United States Patent Application Publication US 2023/0026259 A1 - sequence listing, part 44

SEQ ID NO: 133990 - DNA, 7304 bp, Homo sapiens
  Payload ID: 6176
  Gene Symbol: FRMPD3
  Gene Name: FERM and PDZ domain containing 3
  Uniprot ID: Q5JV73
  ENST ID: ENST00000276185
  CDS Start-End: 1-5433
atggagactctggatagccagagggtccaggaccgcctgctggcagccccaggatgcagctccccttctggccaacaggaactcttttccagtcatgtgatgcaggaagagagcgcaaatgatatggaatgtgagcagctgccagcagagatactgcgacaagtgaccgttcaccgagaccctatatatggctttggcttcgtggctggcagtgagaggcctgtggtggttcgatctgtgaggccaggaggcccctctgagaacaagctcctggctggtgaccagattgtggctattaatgaggaagacgtgagtgaagccccgagggagagactcatagaacttatcaggagcgctaaggaattcatcgttcttacagttctgcacactcatcagtcccccaaatctgctttcatcagtgctgcgaagaaggccaagttgaggtccaatcctgtgaaggttcgattttctgagcaggtggcagttggagaaacagatgcaaaaatgatgaagaaggaagctctcctcctcatccctaatgtcctgaaggttttcttagaaaatgggcagatcaagtcattcacatttgatggtcggaccactgttaaggatgtgatgttgacattacaggaccgcctttccctgaggttcattgagcactttgctcttgtccttgagtatgccgggccagaacagaatcacaagtttctgcttcttcaggacaagcaacccctggcttatgtggtacagcggacacactatcatggaatgaaatgcctcttccgaataagcttctttcccaaagaccctgtggagctgctgcgtcgggatcctgctgcttttgagtacctatacatccagagtcggaatgatgttattcgagaacgctttggaatggatcccaagccagagatgcttttgggccttgctgcgctccacatctatatcactgtctcagccactcgacctagtcagaagatctcgctcaagaatgtggagaaggagtggggcctggaaccctttcttcccccctccctcctgcaggtcatcaaagagaagaacctccggaaatctctctctcagcaactgaaggctcaccaaacacatccttcctgcggcaccaagggctctgcaattcaggcaaagctccagtatctacgaattctgaatgaacttcctaccttcacgggcgttttgttcaacactgtaggcctggatgagaagcagtcggccaccacgctcctggtgggaccccgtcatggcatcagccatgttattgacctcaaaaccaacctcaccactgtgctgtccgagttcagcaagatcagcaagatccagctgttccgggagaaccagggcgtggcccgggtggagaccagcatcatggatgccaagcctctggtgctgttgatggagtggcctgaagccaccaactttgcctgcctgatcgcggggtactgccgcctcttgctggattccaggaagatggtcttctccaggcctgccagccagccacttccacctccaatgatcaaggcagattacatgcacagcgcccaccgccctgtcactgggggccacctggggaaaaaggagagtagttatgtgggcagcgtgggcaccagccccaggaaatcgagccgctgcacgcccccacctgccgactctgagcttgtcagcttctgctacctccatatgcgggaacaaaggaaggagcaggaaagccggacagatgtcaacgagaacctaatcttctttgaggagaccaggccccgaaccaagtctgaccccacatccaaaagctctggccaaggttatgaggtagtccctgatgactttgatgcagctagcctagaccacgagccttgtgccagcagggcccggtcctacaccttggacaattcccttggggctgaagccctgaatttctactgtgactcttgcaaagccaaacttcaggagcagctgggccctcgcaaaggtgggaagcctggctcctctcgtgacaatatagtagatttgatgtccctcccaccacctgggagtgaggaggaggaggaggaggaagatgagacaacttctctgttgccagccattgctgccccaccccctggtttccgagacaacagctctgatgaggatgaccccaagcgccgggctgtccagagccaggaacaaggacgccacctgcgtgggcttctgtacgatgagattccagtgacattgattgacagtgtgcagacccggacagttcgagatcatgcccaggagctagatgatgccctggtgtccactctgcaggctctagaagccctggctgcatccgaggatggaccacacccaccacccccacagactgcaggtctgattgtgctggccacaatcactcctgaatcatcgctggactcaggtcatgaaaccaactcttcagagctcacagacatgtcagagatgatgtcggccatgaagcagcaccagaacaccacctacttcctggcccagcacctcaacaaggacagcctccttgcccgcaaggacctgcccttccggatccagagctgtgcagcccaggccgttcttacggccccttactctcttgggcgcccggatcccaacccatctctccaacccattgccacaggccagagtcctggcccccctggcgctcggaggaagctgccccagtcagagggccaggtacagggagaacgaacatactccttggcagtgcacccagcactgtccccacagcttagtgaacagaagaatctgagtctgctgtccccagttcctgaggacaaagggcctggccacactagggcaggcctagaaatgtcactgagggcagccacatcatccctcagtgaagagcaggtctctgagctgagggacaacctgcccaaggaggtcaggttgagccccaagcttatcctcgacccaaagagcagtgtgacccctgccatcatctcggccgccctacagcaagtggttcacaataagagtctagtcactgctggtggggctttggggaacccccccagcaggggtgagagaaggctggaggccagcatggggaggccagaggttagcatgatgagcagcagtgccagtaagaatctgaagttcaaaattagccccagtgctccagagacctcatggaattctcaacatcagctgggtgcagaggtctcttccagccccagagcacccacaggcagccgggctgacagcctgcacctctcccaacaagaggacagtctgcctgttcaaaatttccctcccaaaagctatcttttgcgaacaagccgagagtcagtgggcaagcaagctacaggggaggtggcaggcaaaggcgggccagtgggtggtaagcccaccctgcagaagcagggcaccatctccagccaaggggagaaggcgcagctggagagcacacccaaaagaagcaagctcgaagagaccagcctggttccccgagctacctaccccatggctctgcagagccccagctgccagtcaagaagccacagccccagctgccagcctcatggccacagccccagcagccagtctcgaggtcagagccccagctgccaacctcgaggccagagcccactgaggtctcaggctgccagccggcaggtgagcaccatgccctctaggaagcttgaaacaactctcaatggagcccactcgacctctgaaggccctgccaaacccaagtcatcccgaggtcctttccggctacgcaatttattctctgccaccttcccaacccgccagaagaaggagacagatgagcggcaggcccaactgcagaaggtaaagcagtatgaactggagttccttgaggaacttctaaagccaccaagccagggggagctgccaggcaccgagtacctgcaacctccagcacctggccgctgcagctgccagctccgcagcagccctgtgcagcaggggcctggcatgtcccgtgagcagaggcgcagctgtgactgcaagcgcatctgccgggggggccggccacaagccacccagacaccagtgcccagcctccgggggagggaaagggacagagtcctccctagccagaggcagccagaggctggcccaggcgtgagcctcagcagccccatcaatgtccagcgcattcgttctaccagcctggagtcccgagagtgccgatcggaccctgagagtggtgtttcgtgcctgaccacgtgtgcctcggggggcgagtgtctgggagctcccaattacaggaaactgatgcgccgctacagtatcagtgagctggaccagggtgacagggcctcgctgacctcggatgtctacccacatcctcccctgggcatgctgcccagggaggccaaggaggtagaggcaagcctccccatagccttgggtcccaaaagcaggtctctggagtcaccgacgctgggagacccctcctacgtccaggttgccccagagaccaaaggccccagacagatggccgtgttctcactgcccgaggaggtgtaccggaagcctgccgagctagacgaggacagtgagagcagcaagtgctgctccatccgctactgcttctactaccgcaagtgtgacatggcagatgatgccagtgatggcaaggatgagctctcctactctatccccatgaagatcctgcctggcatgaagctggacgagcaggtggtgcctgtggtgagcaggaccctgcaggtgctggatgctgctacctgcagcagcagcagccctgaggcctcccgcactcaggagattgacctccgtgtgtccaccttcgaggggagcctggccaagatcaatgccctgcgggcccatgcctatggcctccctgatggcttcctggctgcccggctggacaccaacgagctgctgacagtcctgcggcagtgtgtggccagccccgaggcccgtgcccccaagccctatgtgtctcagatctccgagtataagcttgagctagctctcaagttcaaggagctccgggcctcctgccgccgtgtggccaatgtggacaagagcccaactcacatgctggcagccatcacgggcagcttccaggtgctgagcagcctcattgagaccttcgtgcggctggtgttcattgtgcgctccgaggcccagcgccaagagctgctggccaaggtagaagaggtggtgaggaactacaccttcctgctgcgtgcagctgaggagtccacagcccgtaaccttaaccagcagcagcagcaacaacaacagcagcagcagcaacaacaacagcagcagcaacaacaacagcagcagcagcagcagcaggtggcagcagctgcaggggcagccacagagcatccaccaggctccccaacttcggcgactgttatgagcacattcacccactccttaaaaacccttattaagtagggcatctgcccacacctgtcccccttccccaaccatggccccaggtttgagctttgtggtccttgcatcttgtggtgagtgtgtgtgtgtctgctgggccagtcagggtccaagagcccatcagtctccggggagtggaaactctcttgattgaggctctctcttaagggctgcaggcttagctgccgccctgggtgtcctcaccccttccctggcctctgggcctcactgtgagggcaaaggcccctcttcactctgctcacagcagagctgtattttatctcttctctggggctgagaggtgacatcaggctcacttcctgctcaatccgtgttgggcgctgggggagccagggcctgaagcaagcggaccctcaggctttgagctcctcgtggcatcggctcccctgctgggagcagtggcagtagcagcaggccacattgccgtgccgaggggagagggcgctcagtccagatgtccccatccaccttgggctcacactcacctggtagatgccaccctgagggcctgtgcctgggtgagatgtctgcagaaaacagccacactaggctgtttgcagcggcccaactggccggcagcctggtgagccctcacctccaggtccagtagctccacaccagccatccccaaagtgccctgcccctcactgatgggcagggcagctcagtccactagggagcaagcatctgggatcaccccactcattttgggtaaggtacctgatgaaaacgtctgcctggggagacccagtgcaggcctaggagcccgcctagcccggcccagcccagctcaggggctgttgctgcaggcatgaggcttctctctcaacatctctctaccagacagactgtccttgggagtttgacttagctgtggatcggggaggggggtggggggaggggggaaaggggtaggggtggggggtgttgatgactatatcttaaacttctggaagctagcgtgatatgttaatcctgagtatatgcttttggctgtgtattgaccctgtggatttgtctctctaagaaaagaagctgagcgccttacccggtgcagtcctgcacctttctccctctctggagccatctggaagggaattcacactgtttaacatccaccttgacacacacctcctattgccaccaccgctgccaccaccaccgccaccaccgctgccaaccctccccccacgccccccacccccgcaaccttcctgggagtgaagacacggagtccctaccaactgtcccactgtagggaacaaagaaagccaatgtttcttctgtatagattgcttctcgtccgcctctccatatctccccatttcccacacccttgtgccctgtgtctgcctctgtttcatcactgtgtcagaggcccatgtgaaatctttcattctgatgtgagttttataaagatgtacactgtgcttaatccctgcccatccttggtagcccctagtgcaataaagtctccctgagtggtgagttctcccggcaaggaggaggggagtttcttctgcagaatccagcccctcacttccttgcttctcctcccccaggaccaagttgttgaatgggccagagatgcagccagtggggaatccttttcccctcagccactgcaagctggagtgctgatatggtcttctttttctcccaacttcgccactcagcccctgcctgtgtcattccaccgccatccttcacctctccctcagcctcatggagaggaaacattttctaatgtctgtatatagtatatatactacataaaatatataaattatatatatactaatttatgtcttgtttttcaaacaagaatgattaaatctattcatcttact

SEQ ID NO: 133991 - DNA, 7155 bp, Homo sapiens
  Payload ID: 6176
  Gene Symbol: FRMPD3
  Gene Name: FERM and PDZ domain containing 3
  ENST ID: ENST00000439554
  CDS Start-End: 1-5277
cgacaagtgaccgttcaccgagaccctatatatggctttggcttcgtggctggcagtgagaggcctgtggtggttcgatctgtgaggccaggaggcccctctgagaacaagctcctggctggtgaccagattgtggctattaatgaggaagacgtgagtgaagccccgagggagagactcatagaacttatcaggagcgctaaggaattcatcgttcttacagttctgcacactcatcagtcccccaaatctgctttcatcagtgctgcgaagaaggccaagttgaggtccaatcctgtgaaggttcgattttctgagcaggtggcagttggagaaacagatgcaaaaatgatgaagaaggaagctctcctcctcatccctaatgtcctgaaggttttcttagaaaatgggcagatcaagtcattcacatttgatggtcggaccactgttaaggatgtgatgttgacattacaggaccgcctttccctgaggttcattgagcactttgctcttgtccttgagtatgccgggccagaacagaatcacaagtttctgcttcttcaggacaagcaacccctggcttatgtggtacagcggacacactatcatggaatgaaatgcctcttccgaataagcttctttcccaaagaccctgtggagctgctgcgtcgggatcctgctgcttttgagtacctatacatccagagtcggaatgatgttattcgagaacgctttggaatggatcccaagccagagatgcttttgggccttgctgcgctccacatctatatcactgtctcagccactcgacctagtcagaagatctcgctcaagaatgtggagaaggagtggggcctggaaccctttcttcccccctccctcctgcaggtcatcaaagagaagaacctccggaaatctctctctcagcaactgaaggctcaccaaacacatccttcctgcggcaccaagggctctgcaattcaggcaaagctccagtatctacgaattctgaatgaacttcctaccttcacgggcgttttgttcaacactgtaggcctggatgagaagcagtcggccaccacgctcctggtgggaccccgtcatggcatcagccatgttattgacctcaaaaccaacctcaccactgtgctgtccgagttcagcaagatcagcaagatccagctgttccgggagaaccagggcgtggcccgggtggagaccagcatcatggatgccaagcctctggtgctgttgatggagtggcctgaagccaccaactttgcctgcctgatcgcggggtactgccgcctcttgctggattccaggaagatggtcttctccaggcctgccagccagccacttccacctccaatgatcaaggcagattacatgcacagcgcccaccgccctgtcactgggggccacctggggaaaaaggagagtagttatgtgggcagcgtgggcaccagccccaggaaatcgagccgctgcacgcccccacctgccgactctgagcttgtcagcttctgctacctccatatgcgggaacaaaggaaggagcaggaaagccggacagatgtcaacgagaacctaatcttctttgaggagaccaggccccgaaccaagtctgaccccacatccaaaagctctggccaaggttatgaggtagtccctgatgactttgatgcagctagcctagaccacgagccttgtgccagcagggcccggtcctacaccttggacaattcccttggggctgaagccctgaatttctactgtgactcttgcaaagccaaacttcaggagcagctgggccctcgcaaaggtgggaagcctggctcctctcgtgacaatatagtagatttgatgtccctcccaccacctgggagtgaggaggaggaggaggaggaagatgagacaacttctctgttgccagccattgctgccccaccccctggtttccgagacaacagctctgatgaggatgaccccaagcgccgggctgtccagagccaggaacaaggacgccacctgcgtgggcttctgtacgatgagattccagtgacattgattgacagtgtgcagacccggacagttcgagatcatgcccaggagctagatgatgccctggtgtccactctgcaggctctagaagccctggctgcatccgaggatggaccacacccaccacccccacagactgcaggtctgattgtgctggccacaatcactcctgaatcatcgctggactcaggtcatgaaaccaactcttcagagctcacagacatgtcagagatgatgtcggccatgaagcagcaccagaacaccacctacttcctggcccagcacctcaacaaggacagcctccttgcccgcaaggacctgcccttccggatccagagctgtgcagcccaggccgttcttacggccccttactctcttgggcgcccggatcccaacccatctctccaacccattgccacaggccagagtcctggcccccctggcgctcggaggaagctgccccagtcagagggccaggtacagggagaacgaacatactccttggcagtgcacccagcactgtccccacagcttagtgaacagaagaatctgagtctgctgtccccagttcctgaggacaaagggcctggccacactagggcaggcctagaaatgtcactgagggcagccacatcatccctcagtgaagagcaggtctctgagctgagggacaacctgcccaaggaggtcaggttgagccccaagcttatcctcgacccaaagagcagtgtgacccctgccatcatctcggccgccctacagcaagtggttcacaataagagtctagtcactgctggtggggctttggggaacccccccagcaggggtgagagaaggctggaggccagcatggggaggccagaggttagcatgatgagcagcagtgccagtaagaatctgaagttcaaaattagccccagtgctccagagacctcatggaattctcaacatcagctgggtgcagaggtctcttccagccccagagcacccacaggcagccgggctgacagcctgcacctctcccaacaagaggacagtctgcctgttcaaaatttccctcccaaaagctatcttttgcgaacaagccgagagtcagtgggcaagcaagctacaggggaggtggcaggcaaaggcgggccagtgggtggtaagcccaccctgcagaagcagggcaccatctccagccaaggggagaaggcgcagctggagagcacacccaaaagaagcaagctcgaagagaccagcctggttccccgagctacctaccccatggctctgcagagccccagctgccagtcaagaagccacagccccagctgccagcctcatggccacagccccagcagccagtctcgaggtcagagccccagctgccaacctcgaggccagagcccactgaggtctcaggctgccagccggcaggtgagcaccatgccctctaggaagcttgaaacaactctcaatggagcccactcgacctctgaaggccctgccaaacccaagtcatcccgaggtcctttccggctacgcaatttattctctgccaccttcccaacccgccagaagaaggagacagatgagcggcaggcccaactgcagaaggtaaagcagtatgaactggagttccttgaggaacttctaaagccaccaagccagggggagctgccaggcaccgagtacctgcaacctccagcacctggccgctgcagctgccagctccgcagcagccctgtgcagcaggggcctggcatgtcccgtgagcagaggcgcagctgtgactgcaagcgcatctgccgggggggccggccacaagccacccagacaccagtgcccagcctccgggggagggaaagggacagagtcctccctagccagaggcagccagaggctggcccaggcgtgagcctcagcagccccatcaatgtccagcgcattcgttctaccagcctggagtcccgagagtgccgatcggaccctgagagtggtgtttcgtgcctgaccacgtgtgcctcggggggcgagtgtctgggagctcccaattacaggaaactgatgcgccgctacagtatcagtgagctggaccagggtgacagggcctcgctgacctcggatgtctacccacatcctcccctgggcatgctgcccagggaggccaaggaggtagaggcaagcctccccatagccttgggtcccaaaagcaggtctctggagtcaccgacgctgggagacccctcctacgtccaggttgccccagagaccaaaggccccagacagatggccgtgttctcactgcccgaggaggtgtaccggaagcctgccgagctagacgaggacagtgagagcagcaagtgctgctccatccgctactgcttctactaccgcaagtgtgacatggcagatgatgccagtgatggcaaggatgagctctcctactctatccccatgaagatcctgcctggcatgaagctggacgagcaggtggtgcctgtggtgagcaggaccctgcaggtgctggatgctgctacctgcagcagcagcagccctgaggcctcccgcactcaggagattgacctccgtgtgtccaccttcgaggggagcctggccaagatcaatgccctgcgggcccatgcctatggcctccctgatggcttcctggctgcccggctggacaccaacgagctgctgacagtcctgcggcagtgtgtggccagccccgaggcccgtgcccccaagccctatgtgtctcagatctccgagtataagcttgagctagctctcaagttcaaggagctccgggcctcctgccgccgtgtggccaatgtggacaagagcccaactcacatgctggcagccatcacgggcagcttccaggtgctgagcagcctcattgagaccttcgtgcggctggtgttcattgtgcgctccgaggcccagcgccaagagctgctggccaaggtagaagaggtggtgaggaactacaccttcctgctgcgtgcagctgaggagtccacagcccgtaaccttaaccagcagcagcagcaacaacaacagcagcagcagcaacaacaacagcagcagcaacaacaacagcagcagcagcagcagcaggtggcagcagctgcaggggcagccacagagcatccaccaggctccccaacttcggcgactgttatgagcacattcacccactccttaaaaacccttattaagtagggcatctgcccacacctgtcccccttccccaaccatggccccaggtttgagctttgtggtccttgcatcttgtggtgagtgtgtgtgtgtctgctgggccagtcagggtccaagagcccatcagtctccggggagtggaaactctcttgattgaggctctctcttaagggctgcaggcttagctgccgccctgggtgtcctcaccccttccctggcctctgggcctcactgtgagggcaaaggcccctcttcactctgctcacagcagagctgtattttatctcttctctggggctgagaggtgacatcaggctcacttcctgctcaatccgtgttgggcgctgggggagccagggcctgaagcaagcggaccctcaggctttgagctcctcgtggcatcggctcccctgctgggagcagtggcagtagcagcaggccacattgccgtgccgaggggagagggcgctcagtccagatgtccccatccaccttgggctcacactcacctggtagatgccaccctgagggcctgtgcctgggtgagatgtctgcagaaaacagccacactaggctgtttgcagcggcccaactggccggcagcctggtgagccctcacctccaggtccagtagctccacaccagccatccccaaagtgccctgcccctcactgatgggcagggcagctcagtccactagggagcaagcatctgggatcaccccactcattttgggtaaggtacctgatgaaaacgtctgcctggggagacccagtgcaggcctaggagcccgcctagcccggcccagcccagctcaggggctgttgctgcaggcatgaggcttctctctcaacatctctctaccagacagactgtccttgggagtttgacttagctgtggatcggggaggggggtggggggaggggggaaaggggtaggggtggggggtgttgatgactatatcttaaacttctggaagctagcgtgatatgttaatcctgagtatatgcttttggctgtgtattgaccctgtggatttgtctctctaagaaaagaagctgagcgccttacccggtgcagtcctgcacctttctccctctctggagccatctggaagggaattcacactgtttaacatccaccttgacacacacctcctattgccaccaccgctgccaccaccaccgccaccaccgctgccaaccctccccccacgccccccacccccgcaaccttcctgggagtgaagacacggagtccctaccaactgtcccactgtagggaacaaagaaagccaatgtttcttctgtatagattgcttctcgtccgcctctccatatctccccatttcccacacccttgtgccctgtgtctgcctctgtttcatcactgtgtcagaggcccatgtgaaatctttcattctgatgtgagttttataaagatgtacactgtgcttaatccctgcccatccttggtagcccctagtgcaataaagtctccctgagtggtgagttctcccggcaaggaggaggggagtttcttctgcagaatccagcccctcacttccttgcttctcctcccccaggaccaagttgttgaatgggccagagatgcagccagtggggaatccttttcccctcagccactgcaagctggagtgctgatatggtcttctttttctcccaacttcgccactcagcccctgcctgtgtcattccaccgccatccttcacctctccctcagcctcatggagaggaaacattttctaatgtctgtatatagtatatatactacataaaatatataaattatatatatactaatttatgtcttgtttttcaaacaagaatgattaaatctattcatcttactatcccaa

SEQ ID NO: 133992 - DNA, 8465 bp, Homo sapiens
  Payload ID: 6177
  Gene Symbol: FRMPD4
  Gene Name: FERM and PDZ domain containing 4
  Uniprot ID: Q14CM0
  ENST ID: ENST00000380682
  CDS Start-End: 507-4475
gggaggcagctgcagtgctgcgaggggtgcgtgcgcgtgtgcccagctcgcctgccgtctcccggctccgtctgcgctcctcggtgcgtggggcacgagggtccgagggccgggaagccagagcagcgcctctcgcccaggcctcgctttctctggacgcccggcagtccccggggctagagcgcacggggcggggcgcgagacccgggccgcgctccccgcccccgcctcttgcgccctgcctggctccctctccattgagttttcctgcctcgggtgcctatcaatggtcctgctcggggatgcacacgcagctcgcggccggaggggggtagcagccgccgcctccaggtgcaggttctctccggccgccgccgccacccgctgtcgccgcgactcgagccccgggcgcactgaggtcttggccatggggctgcggaggctgctgttgctggcgtgagaaggggcgacggagttgtcgcgctcgggggtccccagctgcctgcatggatgtcttcagctttgtgaagattgcaaagctttcgagccacaggacgaagtcttcaggctggccgcctccctcgggaacctggggcttgagccaggtgccgccctatggatgggagatgacggcaaaccgagatgggcgagactacttcatcaatcacatgacacaggcaatcccttttgacgaccctcggttagagagctgccaaatcatccctccggctcctcggaaggtggagatgagaagggaccccgtgctgggatttggttttgtggcaggcagtgaaaagccagtggtcgttcgctcagtaacaccaggtggcccctctgaaggcaagctgatcccgggagatcagattgtaatgattaatgatgaaccggtcagcgctgcacccagagagcgggtcatcgatctggtcagaagctgcaaagaatcgatactcctcactgtcattcagccttacccttctcccaaatcagcatttattagtgctgcaaaaaaggcaagattaaagtccaatcctgtcaaagtacgcttctctgaggaggtcatcatcaacggccaagtgtcggaaactgttaaggacaactcacttctttttatgccaaatgttttgaaagtctatctggaaaatgggcagaccaaatcatttcgttttgactgcagcacttccattaaggatgtcatcttaacccttcaagagaagctctccatcaaaggcattgaacacttctctctcatgctggagcagaggacagaaggggctggaacgaagctgctcttgcttcatgaacaggagactctaactcaggtgacacagaggcccagctcccataagatgagatgtcttttccgaattagcttcgtcccaaaagatccaattgaccttttaaggagagatccagttgctttcgagtatctctatgttcagagttgtaacgatgtggttcaggagcgatttgggccggagctgaaatatgacatagccctgcggctggccgcattacaaatgtacattgcaaccgttaccaccaagcaaacgcagaaaatctccctcaaatacatcgaaaaagaatggggattagagacttttcttccctctgctgtgctgcaaagcatgaaagagaagaacataaagaaagcactttcacaccttgtcaaagcaaatcaaaacttggtaccaccgggtaaaaagctctctgcactacaagccaaggtccattatctcaagttcctcagtgacctacgattgtatgggggccgtgtgttcaaggcaacattagtgcaggcagaaaagcgctcggaagtgactctcctggttgggccccggtatggcataagccatgtcatcaacaccaaaaccaatctggtggctcttttagccgactttagccacgtcaacaggatcgaaatgttttccgaggaggagagcttggtgcgggtagaactccacgtgctagatgtgaagcctatcacgcttctgatggaatcctcagatgccatgaacctggcctgcttgacggctggatactaccggctgcttgttgattccaggaggtcgatatttaacatggccaacaagaaaaacacagcgacccaggaaacaggacctgaaaacaaggggaagcataacctccttggcccagattggaactgtataccccaaatgaccacctttattggcgaaggggaacaagaagcccagataacatacatagattcaaagcagaagacggtggagatcacagacagcaccatgtgtccaaaagagcaccggcacttgtacatagacaatgcctatagttcagatggacttaaccagcagctgagccagcccggggaggccccctgtgaggcagactacagaagtctagctcagcggtccctattgaccctctcaggaccagaaactctgaagaaagcacaggaatctccgagaggagctaaagtgtcctttatttttggagacttcgccttggatgatggtattagtcccccaacccttggctatgaaacgctactagatgagggtcctgaaatgctggagaagcagagaaatctctacattggcagtgccaatgacatgaagggcctggatctcactccagaggcagagggcatccagtttgtggaaaattctgtttatgcaaacataggcgatgtgaagagcttccaggccgcggaggggatcgaggaacccctcttgcatgacatctgttatgcagaaaacactgatgacgcggaggacgaggacgaggtgagctgcgaggaggacctcgtggtgggggagatgaaccagccggccatcctcaacctgtctgggtcaagcgatgacatcattgacctcacatccctgccccctccagaaggtgatgacaatgaggatgacttcctgttgcgttccttgaacatggccattgccgcacccccacctggctttagagacagttcagatgaagaggactctcagagccaggcagcttccttccccgaggacaaggagaaaggcagcagcctgcaaaatgatgagatccccgtgtccctcattgacgctgtgcccaccagcgccgaaggcaagtgtgagaagggactggataatgccgtcgtctccacgctgggagctctagaggctctatccgtgtcagaagaacagcagaccagtgacaattcaggtgtagccatcttgcgggcttatagtcctgagtcttcgtcagactcgggcaatgaaactaactcttctgaaatgactgagagttctgaactggccacagcacaaaaacagtcagaaaacctctcccgcatgttcttggccactcacgaaggctaccacccccttgcagaagagcagaccgagttcccggcctccaagacccccgctgggggcttgcctccaaagtcctcgcacgccctggctgctaggccagcaaccgacctcccgcccaaagttgtgccttccaagcagttacttcactcagaccacatggagatggagcctgaaactatggagactaagtcggtcactgactattttagcaaactgcacatggggtcggtggcatactcctgcactagcaaaaggaaaagcaagctggccgatggtgaggggaaggcaccccctaatgggaacacaacaggaaaaaaacagcaggggaccaaaacggcagagatggaggaggaggccagtggtaaatttggtactgtgtcttcacgagacagtcaacacctgagcacttttaatctggagagaactgcctttcgcaaggacagtcaaagatggtatgtggccactgaaggtgggatggctgaaaaaagtggattagaagcagcaacagggaaaacctttccaagagcttctggtcttggggcaagggaggccgaagggaaggaagaaggagctcctgatggagaaaccagtgatggctcaggacttggtcaaggggaccgcttcttaactgacgtgacctgtgcatcttcagccaaagacttagataacccagaggacgctgactcgtccacctgcgaccatccttccaagcttcctgaggctgatgagagtgtggcccgcctttgtgactaccacttggccaagcggatgtcatcactgcaaagcgagggccatttttctctgcagagctcccaaggctcttcagtggatgcaggctgtggcacaggcagcagtggcagtgcctgtgccacacccgtggagtcgccgctctgcccctccctggggaagcacttgattcctgacgcttctgggaaaggcgtgaattacattccttcagaggagagagcccctgggcttcccaaccacggagccacctttaaggaactgcacccacagacagaagggatgtgtccacggatgacagtgcctgctctgcacacagccattaacaccgaacccctgtttggcacattgagagatggatgccatcggctccccaagattaaggaaaccacagtgtagctttgacagagcctgggaaggagagacgaggaggcatgccttcagcttggtctcaacatcctgaagctgatcccatcctgctaccatcaaacattcactcggaatcaaaggtgccaattccaaatcaagaccctaatgatttctcccaagcaaatcaggcatacggagaggctgtgagctggcggccaccggatctgagaggggggagcctcaggacacctcccagccagaaggctctgagacatagcagcagtatcctctccggatctgtcgatttggagaccttccgagagagaaccaagggtgcagtcagcttaaagtgtccaggcatcacagaagcacaggaggccagttctgaaaggcgagcagaactccccctggggaggaagctcaccaaaagtttttcccaaagctcaatgcacttgagctctgaggggaggtttcacaaaaggtccccagtggctcataaagactcaaagctgtataggacattacccttgcggaagctggagggcagcaattggagatgccggggacccttcagctattgcttcctgaaccgagggcaggatgaagatggtgaggaagaagaggagaggggagaggccaccgtccaggtctcttgcctctatagaccacagatgactcaagccatgccagaaccaagcagcccatgcctggctgtggcgattcagaagcaacgaggggagctatccagagggtcagtgctgaaggtctgggcagaagacctgcgagacccagatgacttggacttcagcaacctggcttttgatgcccggattgcaagaataaatgccctaaaggagagcacatatgcaatgcctgatgggttccttgcagcccaaaatgatgccaatgagctgctctgtctcgtcagggcaaccaaggagaagagggaggagtcacgccctgaagcgtacgaccttacactttctcagtacaagcaactgttatccattgagtccagacagttgggaagtgcctgtaggaaaatggcgatggctgagaaaagcccggaggagatgctcctagctatgacttccagctttcaagtgctctgttgcctaacagaagcttgcatgcgattagttaaagtcgtgaactcagaaacacagcggcaggaaattgtagggaagatcgatgaagtggtcataaattacatttgtctactgaaagctgccgaagcagccactggaaagaaccctggggaccctaatgttggactctcggcgcgacactcaaccaccatggccgctctcgtaagcacactgacacgttctctcaagaggcttttaaacaaataaatatggaagtcacgtcataatctacctttgcaaagccatacatgaacttttatttactttgtgtgtatgatgaacagatgtctcctttcttctctctgtatattttgttattttatataaaataggagataaaagtcacattgatgaaatgttgaaatgtactaatcagatgtattctgtttatattatacatatatatacacgtaaaagaaatatccaagaaagtgatgacatttggctatttttcatatagttaaaactccaggtatatgatgtgaaattttaaattctaccatgttagagcaaaacaatgaatcctatcccctttctttccaagtagctacttggaaaccatatcattcatatttagaagtaaaacacaaaacaaaaaagagagagaaaagaaaagaaatcacaatgtatataaaacagtacttatgttttaaaattatgatttttaagcattggaaatagcaaaaagacatttaaaattcaagaagctattatgaattactagagaatatatctgtaataaattaattttttgctcatagtatttggttactggatgctttcttccaagaatcccacatatttaatttgggtttttgctactggggctacaaattggtggggatggattctactgtgtcagcacaaatgctcttcacagtggttctagcatttaaaaaacttcccggggagaagaacagaggggatgatgggcagtttcctaggtaacacctagagttatagaatatctcattacataaaatgtatggaattaataataccaaaattaattatttgatggaaagatctgctttgactaaatgtcaaaaatctgcaaaccaaagacattatcttcccctcatcccaactcaactacgaaacttaaaattccctttagagtgataggacatttagtaaagtatttgcaaacttaaaaaaaggaacatttaatgatcatcaaaattaagtacagattcagtaatgtagaccagaccacacaccagcacctgtgagtctcatctcagatcacagctctcagcatagggcttcatgcatcaccgcctctacagaggctaaggctgccagtcaaatttggaattatagcgtagtactgggacaaaatctcaaatcttggatgttccagaaaatcagggagagatggctactgtaatcatgggagccatgagtaaatagttaagtatttattaaataaatacttaatctggattggctgataaaaatatgaaatctgaaaaaaaaaagaaagaaatggaagtggtatatttgaccagttcaagtgaaaccaatggaatgcaaagaactttccaggactgtcacatctctaaaagtaccctgcagtcataaaataaaatcgatatgtatatatgtatttcctgggtcattcagtgctcaagttacatgcactcctacttagacaggtggctccttaagaacatgatgggagtacaccaggtgcaaatatttctacttttgtagcctgctgagaaggagtcataacacagtccacaattgcaatctctctctagtcagccattccacagggactcaacaacaaaagccgcacgtggttatggatggcagcaaaggaaaggagtttaggtgtgtgttattataaataatgtttaactaaataataaaacattatttcattacaattataattataaatattggtgttttgatattgagagatattagtggtgtttactgtggaaaatcttagtaaatatcattctgtgtactaaaatcctaacctattaataggatgtgtgccctatgtcagacagtgtgctaagcatattaactatattatctcatttaatcatcacaacaatctgctggtttggacactattctctctggaggcaatatggatgagttcttacggatatggggtttggggtcagaaacatcttgattaaaattttgactctgccattttctagcccttttatgttgggaaagctactttttctagtctcaatttcctcataataaaatgaaaatcaattataagatcgatttccatagggttgtcatgagttttgagtaaaaatgtgtatgtaaagttcttaccacaatacctggcagagagtaagtattcaattaatgttagctattattatcatcataatcgttgtgttaaatatattgcccaagataatatgtgggggaatgtttgttttatatgcatattgtatcctgactgtgtgcagaacacattatgtgtattgcatatatgtaaaagaagtgtacaaggaagtggccatccttgttcaagttacgtatctagttagaacaacttcccagtccattggagttctttgagaagcctcagggaagtagctctgggtccttctaatcaacctcccattactgcgccagtaagtttctgtttcttataaataaactctttgctattcagaaaacctcaaggggcccccacattcactaagcatggggctcctaactggggtccaggtccatagagtgtaggaagaacatattagaacaatacttgtgcttatttttatctagcttttttatgtttgtgtatgttttataatggcataatagtacaatggtacatgtacataattttaaataaataaatgaatgaatgaataaataa

SEQ ID NO: 133993 - DNA, 7916 bp, Homo sapiens
  Payload ID: 6177
  Gene Symbol: FRMPD4
  Gene Name: FERM and PDZ domain containing 4
  ENST ID: ENST00000616992
  CDS Start-End: 87-3935
tttccagccacaggacgaagtcttcaggctggccgcctccctcgggaacctggggcttgagccaggtgccgccctatggatgggagatgacggcaaaccgagatgggcgagactacttcatcaatcacatgacacaggcaatcccttttgacgaccctcggttagagagctgccaaatcatccctccggctcctcggaaggtggagatgagaagggaccccgtgctgggatttggttttgtggcaggcagtgaaaagccagtggtcgttcgctcagtaacaccaggtggcccctctgaaggcaagctgatcccgggagatcagattgtaatgattaatgatgaaccggtcagcgctgcacccagagagcgggtcatcgatctggtcagaagctgcaaagaatcgatactcctcactgtcattcagccttacccttctcccaaatcagcatttattagtgctgcaaaaaaggcaagattaaagtccaatcctgtcaaagtacgcttctctgaggaggtcatcatcaacggccaagtgtcggaaactgttaaggacaactcacttctttttatgccaaatgttttgaaagtctatctggaaaatgggcagaccaaatcatttcgttttgactgcagcacttccattaaggatgtcatcttaacccttcaagagaagctctccatcaaaggcattgaacacttctctctcatgctggagcagaggacagaaggggctggaacgaagctgctcttgcttcatgaacaggagactctaactcaggtgacacagaggcccagctcccataagatgagatgtcttttccgaattagcttcgtcccaaaagatccaattgaccttttaaggagagatccagttgctttcgagtatctctatgttcagagttgtaacgatgtggttcaggagcgatttgggccggagctgaaatatgacatagccctgcggctggccgcattacaaatgtacattgcaaccgttaccaccaagcaaacgcagaaaatctccctcaaatacatcgaaaaagaatggggattagagacttttcttccctctgctgtgctgcaaagcatgaaagagaagaacataaagaaagcactttcacaccttgtcaaagcaaatcaaaacttggtaccaccgggtaaaaagctctctgcactacaagccaaggtccattatctcaagttcctcagtgacctacgattgtatgggggccgtgtgttcaaggcaacattagtgcaggcagaaaagcgctcggaagtgactctcctggttgggccccggtatggcataagccatgtcatcaacaccaaaaccaatctggtggctcttttagccgactttagccacgtcaacaggatcgaaatgttttccgaggaggagagcttggtgcgggtagaactccacgtgctagatctgaaacctatcacgcttctgatggaatcctcagatgccatgaacctggcctgcttgacggctggatactaccggctgcttgttgattccaggaggtcgatatttaacatggccaacaagaaaaacacagcgacccaggaaacaggacctgaaaacaaggggaagcataacctccttggcccagattggaactgtataccccaaatgaccacctttattggcgaaggggaacaagaagcccagataacatacatagattcaaagcagaagacggtggagatcacagacagcaccatgtgtccaaaagagcaccggcacttgtacatagacaatgcctatagttcagatggacttaaccagcagctgagccagcccggggaggccccctgtgaggcagactacagaagtctagctcagcggtccctattgaccctctcaggaccagaaactctgaagaaagcacaggaatctccgagaggagctaaagtgtcctttatttttggagacttcgccttggatgatggtattagtcccccaacccttggctatgaaacgctactagatgagggtcctgaaatgctggagaagcagagaaatctctacattggcagtgccaatgacatgaagggcctggatctcactccagaggcagagggcatccagtttgtggaaaattctgtttatgcaaacataggcgatgtgaagagcttccaggccgcggaggggatcgaggaacccctcttgcatgacatctgttatgcagaaaacactgatgacgcggaggacgaggacgaggtgagctgcgaggaggacctcgtggtgggggagatgaaccagccggccatcctcaacctgtctgggtcaagcgatgacatcattgacctcacatccctgccccctccagaaggtgatgacaatgaggatgacttcctgttgcgttccttgaacatggccattgccgcacccccacctggctttagagacagttcagatgaagaggactctcagagccaggcagcttccttccccgaggacaaggagaaaggcagcagcctgcaaaatgatgagatccccgtgtccctcattgacgctgtgcccaccagcgccgaaggcaagtgtgagaagggactggataatgccgtcgtctccacgctgggagctctagaggctctatccgtgtcagaagaacagcagaccagtgacaattcaggtgtagccatcttgcgggcttatagtcctgagtcttcgtcagactcgggcaatgaaactaactcttctgaaatgactgagagttctgaactggccacagcacaaaaacagtcagaaaacctctcccgcatgttcttggccactcacgaaggctaccacccccttgcagaagagcagaccgagttcccggcctccaagacccccgctgggggcttgcctccaaagtcctcgcacgccctggctgctaggccagcaaccgacctcccgcccaaagttgtgccttccaagcagttacttcactcagaccacatggagatggagcctgaaactatggagactaagtcggtcactgactattttagcaaactgcacatggggtcggtggcatactcctgcactagcaaaaggaaaagcaagctggccgatggtgaggggaaggcaccccctaatgggaacacaacaggaaaaaaacagcaggggaccaaaacggcagagatggaggaggaggccagtggtaaatttggtactgtgtcttcacgagacagtcaacacctgagcacttttaatctggagagaactgcctttcgcaaggacagtcaaagatggtatgtggccactgaaggtgggatggctgaaaaaagtggattagaagcagcaacagggaaaacctttccaagagcttctggtcttggggcaagggaggccgaagggaaggaagaaggagctcctgatggagaaaccagtgatggctcaggacttggtcaaggggaccgcttcttaactgacgtgacctgtgcatcttcagccaaagacttagataacccagaggacgctgactcgtccacctgcgaccatccttccaagcttcctgaggctgatgagagtgtggcccgcctttgtgactaccacttggccaagcggatgtcatcactgcaaagcgagggccatttttctctgcagagctcccaaggctcttcagtggatgcaggctgtggcacaggcagcagtggcagtgcctgtgccacacccgtggagtcgccgctctgcccctccctggggaagcacttgattcctgacgcttctgggaaaggcgtgaattacattccttcagaggagagagcccctgggcttcccaaccacggagccacctttaaggaactgcacccacagacagaagggatgtgtccacggatgacagtgcctgctctgcacacagccattaacaccgaacccctgtttggcacattgagagatggatgccatcggctccccaagattaaggaaaccacagtgtagctttgacagagcctgggaaggagagacgaggaggcatgccttcagcttggtctcaacatcctgaagctgatcccatcctgctaccatcaaacattcactcggaatcaaaggtgccaattccaaatcaagaccctaatgatttctcccaagcaaatcaggcatacggagaggctgtgagctggcggccaccggatctgagaggggggagcctcaggacacctcccagccagaaggctctgagacatagcagcagtatcctctccggatctgtcgatttggagaccttccgagagagaaccaagggtgcagtcagcttaaagtgtccaggcatcacagaagcacaggaggccagttctgaaaggcgagcagaactccccctggggaggaagctcaccaaaagtttttcccaaagctcaatgcacttgagctctgaggggaggtttcacaaaaggtccccagtggctcataaagactcaaagctgtataggacattacccttgcggaagctggagggcagcaattggagatgccggggacccttcagctattgcttcctgaaccgagggcaggatgaagatggtgaggaagaagaggagaggggagaggccaccgtccaggtctcttgcctctatagaccacagatgactcaagccatgccagaaccaagcagcccatgcctggctgtggcgattcagaagcaacgaggggagctatccagagggtcagtgctgaaggtctgggcagaagacctgcgagacccagatgacttggacttcagcaacctggcttttgatgcccggattgcaagaataaatgccctaaaggagagcacatatgcaatgcctgatgggttccttgcagcccaaaatgatgccaatgagctgctctgtctcgtcagggcaaccaaggagaagagggaggagtcacgccctgaagcgtacgaccttacactttctcagtacaagcaactgttatccattgagtccagacagttgggaagtgcctgtaggaaaatggcgatggctgagaaaagcccggaggagatgctcctagctatgacttccagctttcaagtgctctgttgcctaacagaagcttgcatgcgattagttaaagtcgtgaactcagaaacacagcggcaggaaattgtagggaagatcgatgaagtggtcataaattacatttgtctactgaaagctgccgaagcagccactggaaagaaccctggggaccctaatgttggactctcggcgcgacactcaaccaccatggccgctctcgtaagcacactgacacgttctctcaagaggcttttaaacaaataaatatggaagtcacgtcataatctacctttgcaaagccatacatgaacttttatttactttgtgtgtatgatgaacagatgtctcctttcttctctctgtatattttgttattttatataaaataggagataaaagtcacattgatgaaatgttgaaatgtactaatcagatgtattctgtttatattatacatatatatacacgtaaaagaaatatccaagaaagtgatgacatttggctatttttcatatagttaaaactccaggtatatgatgtgaaattttaaattctaccatgttagagcaaaacaatgaatcctatcccctttctttccaagtagctacttggaaaccatatcattcatatttagaagtaaaacacaaaacaaaaaagagagagaaaagaaaagaaatcacaatgtatataaaacagtacttatgttttaaaattatgatttttaagcattggaaatagcaaaaagacatttaaaattcaagaagctattatgaattactagagaatatatctgtaataaattaattttttgctcatagtatttggttactggatgctttcttccaagaatcccacatatttaatttgggtttttgctactggggctacaaattggtggggatggattctactgtgtcagcacaaatgctcttcacagtggttctagcatttaaaaaacttcccggggagaagaacagaggggatgatgggcagtttcctaggtaacacctagagttatagaatatctcattacataaaatgtatggaattaataataccaaaattaattatttgatggaaagatctgctttgactaaatgtcaaaaatctgcaaaccaaagacattatcttcccctcatcccaactcaactacgaaacttaaaattccctttagagtgataggacatttagtaaagtatttgcaaacttaaaaaaaggaacatttaatgatcatcaaaattaagtacagattcagtaatgtagaccagaccacacaccagcacctgtgagtctcatctcagatcacagctctcagcatagggcttcatgcatcaccgcctctacagaggctaaggctgccagtcaaatttggaattatagcgtagtactgggacaaaatctcaaatcttggatgttccagaaaatcagggagagatggctactgtaatcatgggagccatgagtaaatagttaagtatttattaaataaatacttaatctggattggctgataaaaatatgaaatctgaaaaaaaaaagaaagaaatggaagtggtatatttgaccagttcaagtgaaaccaatggaatgcaaagaactttccaggactgtcacatctctaaaagtaccctgcagtcataaaataaaatcgatatgtatatatgtatttcctgggtcattcagtgctcaagttacatgcactcctacttagacaggtggctccttaagaacatgatgggagtacaccaggtgcaaatatttctacttttgtagcctgctgagaaggagtcataacacagtccacaattgcaatctctctctagtcagccattccacagggactcaacaacaaaagccgcacgtggttatggatggcagcaaaggaaaggagtttaggtgtgtgttattataaataatgtttaactaaataataaaacattatttcattacaattataattataaatattggtgttttgatattgagagatattagtggtgtttactgtggaaaatcttagtaaatatcattctgtgtactaaaatcctaacctattaataggatgtgtgccctatgtcagacagtgtgctaagcatattaactatattatctcatttaatcatcacaacaatctgctggtttggacactattctctctggaggcaatatggatgagttcttacggatatggggtttggggtcagaaacatcttgattaaaattttgactctgccattttctagcccttttatgttgggaaagctactttttctagtctcaatttcctcataataaaatgaaaatcaattataagatcgatttccatagggttgtcatgagttttgagtaaaaatgtgtatgtaaagttcttaccacaatacctggcagagagtaagtattcaattaatgttagctattattatcatcataatcgttgtgttaaatatattgcccaagataatatgtgggggaatgtttgttttatatgcatattgtatcctgactgtgtgcagaacacattatgtgtattgcatatatgtaaaagaagtgtacaaggaagtggccatccttgttcaagttacgtatctagttagaacaacttcccagtccattggagttctttgagaagcctcagggaagtagctctgggtccttctaatcaacctcccattactgcgccagtaagtttctgtttcttataaataaactctttgctattcagaaaacctcaaggggcccccacattcactaagcatggggctcctaactggggtccaggtccatagagtgtaggaagaacatattagaacaatacttgtgcttatttttatctagcttttttatgtttgtgtatgttttataatggcataatagtacaatggtacatgtacataattttaaataaataaatgaatgaatg

SEQ ID NO: 133994 - DNA, 3067 bp, Homo sapiens
  Payload ID: 6178
  Gene Symbol: FRMD1
  Gene Name: FERM domain containing 1
  Uniprot ID: Q8N878
  ENST ID: ENST00000283309
  CDS Start-End: 66-1715
gtgatctgggaggtgctgagcacccacctgcgacccatggcgggggagggccgagtaacgacagcatggcggtgcccccgagagggaggggcatagaccccgcccggacaaaccctgacacgttccctccttcaggggcgcgatgtatggaacccagtcctgagaggcctgcatgcagtcagcaggagccgaccctgggaatggacgcgatggcctcggaacacagggatgtcctcgtgctgctgcccagccgggagcaactgcggctggccgtgggggtgaaggctactggccgcgagcttttccagcaagtgtgcaacgtggcgagcatcagagacgcgcagttctttggcctctgtgtggtcagaaacaatgagtatatatttatggatttggagcaaaagctcagcaagtacttctcaaaagattggaagaaagaaagaaatgaaggaaatgagaaacccagagcccccttcgtggccttcctccgagtgcagcactacgtggaaaacggaagggtcataagcgaccacagggcacggcacctgtactactgccacttgaaggagcgcgtgctgaggtcacagtgcgctcaccgggaggaagcctacttcctgctggctgcctgcgcgctgcaggctgacctgggcgagcaccgggagtcggcccatgccgggaggtacttcgagccacactcctacttcccacagtggatcatcaccaagagggggattgactacatcctccggcacatgcctaccctgcaccgtgagcgccagggcctgagccccaaggaggccatgctgtgcttcatccaggaggcctgccggctggaggacgtgcccgtgcacttcttcaggctgcacaaggataagaaggaaggtcgtcccaccgtgatcctgggactggccctcaggggagtgcacatctaccagggaaagaagctggagatccagctggatgggctgcccgcagcacagaagctggtttactacacggggtgcacctggcggtccaggcacctgctgcacctgctgcgcgccagccaccagctccacctccgcgtgcggcccactctgcaacagctgcggcagcgggaggaggcagaagagaagcagcactaccgggagtcctatatcagcgatgagctggagctggacctggccagcaggagcttcccgggcagtggggtcagcagccagcactgcccccactgcctctcacgccactccgccgacagccacggcagttcctacacgtcaggcatcaaggccaactcctggctcagggaatccagagagatgtctgtggacgtgcccttggaggtccacgggctccatgagaaggagccgtcctccagccccaggaccagccgcagccaccccagcacacgtggtgacagccaagccactcgtcaggagccctgcacccaggtcaggaccagaggccagagcgccgaggccgtgcaccagatccaggaaatgacagccggggtcagtgaggagcagcacagccatggcctggacgacatgcagctgcaccagctggccctgcacccagcgcccacctcactcagccataccttccaccgcgccctggactgcaggctggcaggcccctgcgagaccagggccactctccccagcaagaggtccagcaactgtctcgccctggacctgttcggagaggctccaccacaggagtttgtggtgtaggcaccacccacccagcagtaccgtccgcaccgccaggctcagcccctgcccaccccacttccacatggccctcgtcccttcctgcccgccagatgctgcctgcacttccgcagccagcacgctccacaggttcacctgtaagaggtgtggagctggctctgacatcaacctgggaggtaacaaacaggtcccgcacctcatgcctgtctgccatacacccgggagctctttccctcagggtctcagggagccagttcaaggtctggctgtcaagtgtccagagagccatggtgttggcccctgaggcagcctgtcacccatcctaatctgggagagaaggtgacacagctgggcccagaccctggagagacagctctgcagtttcccacactgtcagctccccaagagacagtcctgatgggcacaggctgccagagctcccaagccggagttcacagtcatcactgtgcaggacccaggttcctcccagacctgaacccctctctgcaactcctgtttgcaagcgctgggcctgccagacagaggcccctcttgtggtgcaagcccagctctgtcacctgagatccagccagagaccctcctccaccatccacagtcaatggctgtgctttcccttccaagccagggcttccaaagaccccactgccccggagctgaagccgactctgctcccatctcagccatgaggcctcaggacccactctgctcacaggtggcttccttaagccattgccctggctggggttgggctggtgcagcccagctggcggaggggcgaagctttggtgacagacggagagtgggggactagctgtgcatggcacctgctctgatccggtgggctccacgggtagtgcgacctcggttctgtgggctctggaaggccaccagggtagggtctccccagggctcctccccctgcacaacactcctgcacacgtgcaaacctgctgtcctctgcatttagaggaatggcccgtgcatccctgctagtctcaggcccatcccagagcactgagaggccacaatcgttcagccctgtgccctgaacaccactgcccccttcactgtctgtgtgtggtgaagaccacgccacaccaccctccagctcactggagacaagcatgagcttgagccccatggcctggtgcagggctgcgtgcattgaggccgcctctttgacgggtccatccagggggaccctctcctttctgtgaaagggaatcgtgtgtgtgccccaggcacgtgtaataaagaacccgagcagatgcctcctgcttgaaccaggaccagcctgcctggggggctggtgagatgccggctgtaactca

SEQ ID NO: 133995 - DNA, 2857 bp, Homo sapiens
  Payload ID: 6178
  Gene Symbol: FRMD1
  Gene Name: FERM domain containing 1
  Uniprot ID: Q8N878
  ENST ID: ENST00000440994
  CDS Start-End: 120-1565
ggaaatgtggacacgggacgccggaaacagggacacgcaccagacgctgggtgtttagaggctgccgtgagaggctcagctgtaggaacactgttgggatcactcgcatcagttgggcgatggatgatgtgaaggctactggccgcgagcttttccagcaagtgtgcaacgtggcgagcatcagagacgcgcagttctttggcctctgtgtggtcagaaacaatgagtatatatttatggatttggagcaaaagctcagcaagtacttctcaaaagattggaagaaagaaagaaatgaaggaaatgagaaacccagagcccccttcgtggccttcctccgagtgcagcactacgtggaaaacggaagggtcataagcgaccacagggcacggcacctgtactactgccacttgaaggagcgcgtgctgaggtcacagtgcgctcaccgggaggaagcctacttcctgctggctgcctgcgcgctgcaggctgacctgggcgagcaccgggagtcggcccatgccgggaggtacttcgagccacactcctacttcccacagtggatcatcaccaagagggggattgactacatcctccggcacatgcctaccctgcaccgtgagcgccagggcctgagccccaaggaggccatgctgtgcttcatccaggaggcctgccggctggaggacgtgcccgtgcacttcttcaggctgcacaaggataagaaggaaggtcgtcccaccgtgatcctgggactggccctcaggggagtgcacatctaccagggaaagaagctggagatccagctggatgggctgcccgcagcacagaagctggtttactacacggggtgcacctggcggtccaggcacctgctgcacctgctgcgcgccagccaccagctccacctccgcgtgcggcccactctgcaacagctgcggcagcgggaggaggcagaagagaagcagcactaccgggagtcctatatcagcgatgagctggagctggacctggccagcaggagcttcccgggcagtggggtcagcagccagcactgcccccactgcctctcacgccactccgccgacagccacggcagttcctacacgtcaggcatcaaggccaactcctggctcagggaatccagagagatgtctgtggacgtgcccttggaggtccacgggctccatgagaaggagccgtcctccagccccaggaccagccgcagccaccccagcacacgtggtgacagccaagccactcgtcaggagccctgcacccaggtcaggaccagaggccagagcgccgaggccgtgcaccagatccaggaaatgacagccggggtcagtgaggagcagcacagccatggcctggacgacatgcagctgcaccagctggccctgcacccagcgcccacctcactcagccataccttccaccgcgccctggactgcaggctggcaggcccctgcgagaccagggccactctccccagcaagaggtccagcaactgtctcgccctggacctgttcggagaggctccaccacaggagtttgtggtgtaggcaccacccacccagcagtaccgtccgcaccgccaggctcagcccctgcccaccccacttccacatggccctcgtcccttcctgcccgccagatgctgcctgcacttccgcagccagcacgctccacaggttcacctgtaagaggtgtggagctggctctgacatcaacctgggaggtaacaaacaggtcccgcacctcatgcctgtctgccatacacccgggagctctttccctcagggtctcagggagccagttcaaggtctggctgtcaagtgtccagagagccatggtgttggcccctgaggcagcctgtcacccatcctaatctgggagagaaggtgacacagctgggcccagaccctggagagacagctctgcagtttcccacactgtcagctccccaagagacagtcctgatgggcacaggctgccagagctcccaagccggagttcacagtcatcactgtgcaggacccaggttcctcccagacctgaacccctctctgcaactcctgtttgcaagcgctgggcctgccagacagaggcccctcttgtggtgcaagcccagctctgtcacctgagatccagccagagaccctcctccaccatccacagtcaatggctgtgctttcccttccaagccagggcttccaaagaccccactgccccggagctgaagccgactctgctcccatctcagccatgaggcctcaggacccactctgctcacaggtggcttccttaagccattgccctggctggggttgggctggtgcagcccagctggcggaggggcgaagctttggtgacagacggagagtgggggactagctgtgcatggcacctgctctgatccggtgggctccacgggtagtgcgacctcggttctgtgggctctggaaggccaccagggtagggtctccccagggctcctccccctgcacaacactcctgcacacgtgcaaacctgctgtcctctgcatttagaggaatggcccgtgcatccctgctagtctcaggcccatcccagagcactgagaggccacaatcgttcagccctgtgccctgaacaccactgcccccttcactgtctgtgtgtggtgaagaccacgccacaccaccctccagctcactggagacaagcatgagcttgagccccatggcctggtgcagggctgcgtgcattgaggccgcctctttgacgggtccatccagggggaccctctcctttctgtgaaagggaatcgtgtgtgtgccccaggcacgtgtaataaagaacccgagcagatgc

SEQ ID NO: 133996 - DNA, 2108 bp, Homo sapiens
  Payload ID: 6178
  Gene Symbol: FRMD1
  Gene Name: FERM domain containing 1
  ENST ID: ENST00000509157
  CDS Start-End: 1-543
agccgtccagaagaagagagagttgggccgaggaggactccagggctcagccatgaggagatctgggcggtggtctcctcttcctcgcggcctctgcccgtccactgcccggccctgacatcacgaacgtggcaggccagcctcttccatcacgaacaggccagtcgagaagacaagacattcagaggggcgcgatgtatggaacccagtcctgagaggcctgcatgcagtcagcaggagccgaccctgggaatggacgcgatggcctcggaacacagggatgtcctcgtgctgctgcccagccgggagcaactgcggctggccgtgggggtgaaggctactggccgcgagcttttccagcaagtgtgcaacgtggcgagcatcagagacgcgcagttctttggcctctgtgtggtcagaaacaatgagtatatatttatggatttggagcaaaagctcagcaagtacttctcaaaagattggaagaaagaaagaaatgaactgctccgtccagaggggctgtccgcagggggactgtggtgagccctgaggctgcaagcagggaaatgagaaacccagagcccccttcgtggccttcctccgagtgcagcactacgtggaaaacggaagggtcataagcgaccacagggcacggcacctgtactactgccacttgaaggagcgcgtgctgaggtcacagtgcgctcaccgggaggaagcctacttcctgctggctgcctgcgcgctgcaggctgacctgggcgagcaccgggagtcggcccatgccgggaggtacttcgagccacactcctacttcccacagtggatcatcaccaagagggggattgactacatcctccggcacatgcctaccctgcaccgtgagcgccagggcctgagccccaaggaggccatgctgtgcttcatccaggaggcctgccggctggaggacgtgcccgtgcacttcttcaggctgcacaaggataagaaggaaggtcgtcccaccgtgatcctgggactggccctcaggggagtgcacatctaccagggaaagaagctggagatccagctggatgggctgcccgcagcacagaagctggtttactacacggggtgcacctggcggtccaggcacctgctgcacctgctgcgcgccagccaccagctccacctccgcgtgcggcccactctgcaacagctgcggcagcgggaggaggcagaagagaagcagcactaccgggagtcctatatcagcgatgagctggagctggacctggccagcaggagcttcccgggcagtggggtcagcagccagcactgcccccactgcctctcacgccactccgccgacagccacggcagttcctacacgtcaggcatcaaggccaactcctggctcagggaatccagagagatgtctgtggacgtgcccttggaggtccacgggctccatgagaaggagccgtcctccagccccaggaccagccgcagccaccccagcacacgtggtgacagccaagccactcgtcaggagccctgcacccaggtcaggaccagaggccagagcgccgaggccgtgcaccagatccaggaaatgacagccggggtcagtgaggagcagcacagccatggcctggacgacatgcagctgcaccagctggccctgcacccagcgcccacctcactcagccataccttccaccgcgccctggactgcaggctggcaggcccctgcgagaccagggccactctccccagcaagaggtccagcaactgtctcgccctggacctgttcggagaggctccaccacaggagtttgtggtgtaggcaccacccacccagcagtaccgtccgcaccgccaggctcagcccctgcccaccccacttccacatggccctcgtcccttcctgcccgccagatgctgcctgcacttccgcagccagcacgctccacaggttcacctgtaagaggtgtggagctggctctgacatcaacctgggaggtaacaaacaggtcccgcacctcatgcctgtctgccatacacccgggagctctttccctcagggtctcagggagccagttcaaggtctggctgtcaagtgtcca

SEQ ID NO: 133997 - DNA, 606 bp, Homo sapiens
  Payload ID: 6178
  Gene Symbol: FRMD1
  Gene Name: FERM domain containing 1
  ENST ID: ENST00000511714
  CDS Start-End: 20-606
atctatctcatgatagaggatggaaaccagccgtccagaagaagagagagttgggccgaggaggactccagggctcagccatgaggagatctgggcggtggtctcctcttcctcgcggcctctgcccgtccactgcccggccctgacatcacgaacgtggcaggccagcctcttccatcacgaacaggccagtcgagaagacaagacattcagaggggcgcgatgtatggaacccagtcctgagaggcctgcatgcagtcagcaggagccgaccctgggaatggacgcgatggcctcggaacacagggatgtcctcgtgctgctgcccagccgggagcaactgcggctggccgtgggggtgaaggctactggccgcgagcttttccagcaagtgtgcaacgtggcgagcatcagagacgcgcagttctttggcctctgtgtggtcagaaacaatgagtatatatttatggatttggagcaaaagctcagcaagtacttctcaaaagattggaagaaagaaagaaatgaaggaaatgagaaacccagagcccccttcgtggccttcctccgagtgcagcactacgtggaaaacggaagggtcataag

SEQ ID NO: 133998 - DNA, 3821 bp, Homo sapiens
  Payload ID: 6178
  Gene Symbol: FRMD1
  Gene Name: FERM domain containing 1
  ENST ID: ENST00000468647
  CDS Start-End: 1-543
agccgtccagaagaagagagagttgggccgaggaggactccagggctcagccatgaggagatctgggcggtggtctcctcttcctcgcggcctctgcccgtccactgcccggccctgacatcacgaacgtggcaggccagcctcttccatcacgaacaggccagtcgagaagacaagacattcagaggggcgcgatgtatggaacccagtcctgagaggcctgcatgcagtcagcaggagccgaccctgggaatggacgcgatggcctcggaacacagggatgtcctcgtgctgctgcccagccgggagcaactgcggctggccgtgggggtgaaggctactggccgcgagcttttccagcaagtgtgcaacgtggcgagcatcagagacgcgcagttctttggcctctgtgtggtcagaaacaatgagtatatatttatggatttggagcaaaagctcagcaagtacttctcaaaagattggaagaaagaaagaaatgaactgctccgtccagaggggctgtccgcagggggactgtggtgagccctgaggctgcaagcaggtgtgcccgcccgaagcccgcctttgcagatgttcttgaacgctgtagaccacgtcccactcagggttctccgggtagaaaataccatgagtcgaattgtcagctatggctgcagacacctgagcttcgactttaagctgagtgtgaagcaatccaggcccccccaactgggaagacaggacagccagcggcacctccctgcggctcacttgctctttcttgcattttccccactagggaaatgagaaacccagagcccccttcgtggccttcctccgagtgcagcactacgtggaaaacggaagggtcataagtagagacggggtttctctgtgttggtcaagctggtctcaaactcccgacctcaggtgatccacccgcctcgacctcccaaagtgctgggattacagagctgccttagagcttctagggtaacaaagacgtccctcaggaggatcctgagacttacttccagaacagagcttcagggcgaccacagggcacggcacctgtactactgccacttgaaggagcgcgtgctgaggtcacagtgcgctcaccgggaggaagcctacttcctgctggctgcctgcgcgctgcaggctgacctgggcgagcaccgggagtcggcccatgccgggaggtacttcgagccacactcctacttcccacagtggatcatcaccaagagggggattgactacatcctccggcacatgcctaccctgcaccgtgagcgccagggcctgagccccaaggaggccatgctgtgcttcatccaggaggcctgccggctggaggacgtgcccgtgcacttcttcaggctgcacaaggataagaaggaaggtcgtcccaccgtgatcctgggactggccctcaggggagtgcacatctaccaggaggtggaccgtgctccgcagctgctgtacgacctcccctggccccacgttgggaagctggcatttctgggaaagaagctggagatccagctggatgggctgcccgcagcacagaagctggtttactacacggggtgcacctggcggtccaggcacctgctgcacctgctgcgcgccagccaccagctccacctccgcgtgcggcccactctgcaacagctgcggcagcgggaggaggcagaagagaagcagcactaccgggagtcctatatcagcgatgagctggagctggacctggccagcaggagcttcccgggcagtggggtcagcagccagcactgcccccactgcctctcacgccactccgccgacagccacggcagttcctacacgtcaggcatcaaggccaactcctggctcagggaatccagagagatgtctgtggacgtgcccttggaggtccacgggctccatgagaaggagccgtcctccagccccaggaccagccgcagccaccccagcacacgtggtgacagccaagccactcgtcaggagccctgcacccaggtcaggaccagaggccagagcgccgaggccgtgcaccagtttcctcccgtataaaataggaggccgttcttgaccactgaggtgcttccagagctagtgttcaaggcccacactcagacctgatcctaaattacaccaaacgctaagagtccaggtccactgagttaaaaggcagaaagcagccccaggaaagaagctgggcaaggtgggggcctcctgaaatgcatcaaaggaagatgccaagcctctctcgcagagatccaggaaatgacagccggggtcagtgaggagcagcacagccatggcctggacgacatgcagctgcaccagctggccctgcacccagcgcccacctcactcagccataccttccaccgcgccctggactgcaggctggcaggcccctgcgagaccagggccactctccccagcaagaggtccagcaactgtctcgccctggacctgttcggagaggctccaccacaggagtttgtggtgtaggcaccacccacccagcagtaccgtccgcaccgccaggctcagcccctgcccaccccacttccacatggccctcgtcccttcctgcccgccagatgctgcctgcacttccgcagccagcacgctccacaggttcacctgtaagaggtgtggagctggctctgacatcaacctgggaggtaacaaacaggtcccgcacctcatgcctgtctgccatacacccgggagctctttccctcagggtctcagggagccagttcaaggtctggctgtcaagtgtccagagagccatggtgttggcccctgaggcagcctgtcacccatcctaatctgggagagaaggtgacacagctgggcccagaccctggagagacagctctgcagtttcccacactgtcagctccccaagagacagtcctgatgggcacaggctgccagagctcccaagccggagttcacagtcatcactgtgcaggacccaggttcctcccagacctgaacccctctctgcaactcctgtttgcaagcgctgggcctgccagacagaggcccctcttgtggtgcaagcccagctctgtcacctgagatccagccagagaccctcctccaccatccacagtcaatggctgtgctttcccttccaagccagggcttccaaagaccccactgccccggagctgaagccgactctgctcccatctcagccatgaggcctcaggacccactctgctcacaggtggcttccttaagccattgccctggctggggttgggctggtgcagcccagctggcggaggggcgaagctttggtgacagacggagagtgggggactagctgtgcatggcacctgctctgatccggtgggctccacgggtagtgcgacctcggttctgtgggctctggaaggccaccagggtagggtctccccagggctcctccccctgcacaacactcctgcacacgtgcaaacctgctgtcctctgcatttagaggaatggcccgtgcatccctgctagtctcaggcccatcccagagcactgagaggccacaatcgttcagccctgtgccctgaacaccactgcccccttcactgtctgtgtgtggtgaagaccacgccacaccaccctccagctcactggagacaagcatgagcttgagccccatggcctggtgcagggctgcgtgcattgaggccgcctctttgacgggtccatccagggggaccctctcctttctgtgaaagggaatcgtgtgtgtgccccaggcacgtgtaataaagaacccgagcagatgc

SEQ ID NO: 133999 - DNA, 5297 bp, Homo sapiens
  Payload ID: 6179
  Gene Symbol: FRMD3
  Gene Name: FERM domain containing 3
  Uniprot ID: A2A2Y4
  ENST ID: ENST00000304195
  CDS Start-End: 208-2001
gaggcggaggcgagcgaacagagggagggacccgcccgccgcgccccggccgctgggcatgtgtgtccgcaggcgcccgacgctgccgatgtcccggggctgagccgcgcccaggtgtcccggacagtgcgtgcgagcgtgtgtgtccgcgcaggcgagcaccgcgccggccctgagcctcccgctcgctccccacggccgcggtgcatgttcgcctcctgccactgtgtgccgagaggcaggaggaccatgaaaatgatccactttcggagctccagcgtcaaatcgctcagccaggagatgagatgcaccatccggctgctggacgactcggagatctcctgccacatccagagggaaaccaaagggcagtttctcattgaccacatctgcaactactacagcctgctggagaaggactactttggcattcgctatgtggacccagagaagcaaaggcactggcttgaacctaacaagtccatcttcaagcaaatgaaaactcatccaccatacaccatgtgctttagagtgaaattctacccacatgaacccttgaagattaaagaagagctcacaagataccttttataccttcagattaaaagggacatttttcatggccgcctgctgtgctccttttctgatgctgcctacctgggtgcctgtattgttcaagctgagcttggtgattacgatcctgatgagcatcctgagaattacatcagtgagtttgagattttccccaagcagtcacagaagctggaaagaaaaatagtggaaattcataaaaatgaactcagggggcagagcccaccagttgctgaatttaacttgctcctgaaagctcacactttggaaacctacggggtggatcctcacccatgcaaggattcaacaggcacaacaacatttttaggattcacagctgcaggctttgtggtctttcagggaaataagagaatccatttgataaaatggccagatgtctgcaaattgaagtttgaagggaagacattttatgtgattggcacccagaaggagaaaaaagccatgttggcattccatacttcaacaccagctgcctgcaaacatctttggaagtgtggagtggaaaaccaggccttttataagtatgcaaaatccagtcagatcaagactgtatcaagcagcaagatattttttaaaggaagtagatttcgatatagtgggaaagttgccaaagaggtggtggaggccagttccaagatccagagggagcctcctgaggtgcacagagccaacattactcagagccgcagttcccactccttgaacaaacagctcatcattaacatggaacccctgcagcccctgcttccttcccccagcgagcaagaagaagaacttcctctgggtgagggtgttccattgcctaaagaggagaacatttctgctcccttgatctccagctccccagtgaaggcagcccgggagtatgaagatccccctagtgaagaggaagataaaataaaagaagaacctttaaccatctctgaactagtgtacaacccaagtgccagcctgctccccacccctgtggatgacgatgagattgacatgctctttgactgtccttctaggcttgagttggaaagagaagacacagattcatttgaggatctggaagcagatgaaaacgcctttttgattgctgaagaagaggagctgaaggaggctcgccgtgctttgtcgtggagctatgacattctgactggccatattcgggtgaacccactggtcaagagtttttccaggctccttgtggtgggcctgggactgctgctctttgtatttcccctgctcctcctccttttggagtcaggtattgatctctccttcttatgcgaaatccgccagacaccagagtttgagcagtttcactatgaatactactgtcccctcaaggagtgggtggctgggaaagtccacctcatcctctacatgctgggttgctcatgaagttaatctctcacgtgactaagggctatattcaatgctagtgatttctttttttcagcaaatgcctggttctgaagggtcacggggctgtcaacaggtgttccttactcataattgattattcaaacctttaagttagctttccataattcactgcacttaaataagtttaaatcaaatacagttattttagttacaggttaggaagatggtctttaaataaccaaaaatatgtttattttttattatagtgtagacatacccttcatctattatatcataatacatgttacattggactgaattagattttcccatttctaatagttggcaccattataagctataaggttcagaatcagaattttagtaacaactcaagagaaagttgttgaatataatccttagtgaaaacagtgtcctctaaccaatgcctatacaactaaatttatgctgggtttttggttctgtttttttaaaaatatttttatgtgttcaaactattttggtaaatttttagcaaaaaaaaaaaagaagcctcctggagttatttacatgtacagattgtaagactaatgcacaaaaggtatatcagaatttttttaatgttttggcgctactttgtttttaaaaatatttttggctgaacaataccataatttgttatgatctgcataggagatagaaaatgggtagaaagacactatagtaagtaagctgctaaaacagaggatggaactggaggatgtagaaactgagagcatcaagtggactcagggtggtccatttttcaaagtatttggacaagaggacttgttattttcatttgtattctgtccgtatattttggctggagaagcagatgttttaaaaagaaagtgagagtttaaaggaaaaaaggtaacagatgtgctagtcagttgcatatcaatgtacattaacccaagagtgaaggcagataggaactggagaaatggaaagtggcaaaaatgagttctggtgaggctggcaggcaaatggtgacaggcgaatggtctattttatgaaagtgatggtgatgccagcgttcgatgatgtgaagagcagtgcagtcgctgtctgagttaacatgaacatgtttaagtggatctaaataaaagtggagaaactttaaggtaaatattttgatccctcatgccatttgttgtgattctgtagaagaaacttcaaaaatgtgtttgtatgtgagtgtgcgtgtgtgtgtgtgtgagagagagagagagagagagagagagaatatgaatggctttttgatacatgtccatgatcatgttttgcggtggtcattatactcctttcctttcccagttgttttaaaatttgacttccatagagaaactggagaggcctcatgagatgacataccagttcagcctgggtaaagtagtgacatgaccctaaccagactgtagaggggaccagtgctctagtaccttccttgataccattaaatccatgatggaaaggatttaatccaacaatttaatggtatcaaggaaggtactagagcattgtaccatcagcaacgtactgatgccttcccatgcagactacctgctgatactgtgttatgtgggagaaagataagagtctagaacttatgccatggagcatagagcttctctgtggattgaaaacattccactgccctaatgtacaaagttacagggcccacttggaatcgctctctctagctaatgacattccaaccctatcattagcatgatttctaaattgggcaatacatttccactcactcagtggagctctgagtacttcactggacatttaattttggaaatgagttttgaaactcagttcgtgaagcctgcagtcgagcaaatgactatatatttgccattaagtttgaggggtttcctttcctatatgctttcagtgatttattttgctttttaaataaagattgtttgtttattacctgaaagttgatactgatttaggaatatattttctgtgattggaatcctcaacaatttattttggaagcttgcagatggctaggtttgaaattgaaatttgtgtttttctccttcttttctcatacgacttctaagtcatcctttctgacataaggcaactttagtgtagtctgcacaaaattagtccccttctgatcatgcgtcatataattttctctaaagttctgactatgacaaatcatctggccctcagtctttcaaaataatattatataatattttttaaattatggaactaatatattttccattgtaaaatacttaaaaaatatgatagtataaatatcacatgtaatccaacgatgcagatttatcttaaggagtaataaatatattattttaacatttccagctaacatctcttttctcttaggtggaaacttcattgttgaatagaaatgtttttaagtgaagaagttgacagaatagggtctgctgaatttaaacagccatcaaaagttaaactggaatcttgaaatgccatttgctcggcatagaatcagagccttttagaaacatccatttaagttttgttagaagatagtcaccagttgcctgaatcgaatgaggaaaagcctgcttccagagatggacagtatattatagagtgagatatagagtttaaagcaagtgtgtgagtatatgtatattccatattattggtatatgtgtgtttatatatgaatctgtatatatgtgtgtctttgaatagacacaacatatatgcccctcatgcataattgtgcttattttgccctaattgaggaatttgagatgtattattggttcttctccctctcagatactatggtgggtaaaacccacagcctgaaagggttaaattttccataaatgccactgagtgtacatttgtggatataaataaatatatataatacacacacacatatggcaaatacatatacacacacaatattgcctttagtgctaatgcaagttggatcatgaaaacaatgtaggtaaagtaaagtatgtatttgtctgtgcttgaaaaatattgtaaaatgttatgtatttggaatatattttgtggtttgtctaatatttataaacacaactcggggtgaattcacaatgagtttatttcattgaaatactagagatatgggggccatgttactgtgattggagccttacctttgtatagtgaaatttgcatttctatgtcaacatccagattgttttatatgttaatatggtggcaggaatccctaataaaaatactctggggtaaaa

SEQ ID NO: 134000 - DNA, 964 bp, Homo sapiens
  Payload ID: 6179
  Gene Symbol: FRMD3
  Gene Name: FERM domain containing 3
  Uniprot ID: A2A2Y4
  ENST ID: ENST00000328788
  CDS Start-End: 111-752
tgagttatttctgttggccgcattaggaacctgacatttgattcattcagtgggtcctgcctaggtcctttaaaacagaatggactgttagggaaaggctgccctgggccatgcaggccgaggagaccaaggggattggaataaccagtatggcaaaatgcttggtcaagatccagactcgacgaagcctccaattgcacatggtgaaccactgcaacagtaatgtgtttgttcgtctgctgagactcggctccaaggtcacagctcgtaacactggtgttccattgcctaaagaggagaacatttctgctcccttgatctccagctccccagtgaaggcagcccgggagtatgaagatccccctagtgaagaggaagataaaataaaagaagaacctttaaccatctctgaactagtgtacaacccaagtgccagcctgctccccacccctgtggatgacgatgagattgacatgctctttgactgtccttctaggcttgagttggaaagagaagacacagattcatttgaggatctggaagcagatgaaaacgcctttttgattgctgaagaagaggagctgaaggaggctcgccgtgctttgtcgtggagctatgacattctgactggccatattcgggtgaacccactggtcaagagtttttccaggctccttgtggtgggcctgggactgctgctctttgtatttcccctgctcctcctccttttggagtcagtctccatgcagtaaacagacccagcagaacctgcccgtggtgagctcagccaagacttggctctccatgttccagcctccgtctgtgactgggtgggtaagttcggtgggccccacccagtgggctcggcagccgtcacttcacagaagaagaaaggaaccttgcttaggcctcagatcccagctgtgctctccaatccattaataaagctgcttttaaccctctc

SEQ ID NO: 134001 - DNA, 1397 bp, Homo sapiens
  Payload ID: 6179
  Gene Symbol: FRMD3
  Gene Name: FERM domain containing 3
  Uniprot ID: A2A2Y4
  ENST ID: ENST00000376434
  CDS Start-End: 97-1185
gcttcatttcggaagtgattcatagcacttctgcttacaactctctgatcaggactcatcccaagatcttacccaggatcaaggaaatgcaattctatggtgttcagaagggggcagagcccaccagttgctgaatttaacttgctcctgaaagctcacactttggaaacctacggggtggatcctcacccatgcaaggattcaacaggcacaacaacatttttaggattcacagctgcaggctttgtggtctttcagggaaataagagaatccatttgataaaatggccagatgtctgcaaattgaagtttgaagggaagacattttatgtgattggcacccagaaggagaaaaaagccatgttggcattccatacttcaacaccagctgcctgcaaacatctttggaagtgtggagtggaaaaccaggccttttataagtatgcaaaatccagtcagatcaagactgtatcaagcagcaagatattttttaaaggaagtagatttcgatatagtgggaaagttgccaaagaggtggtggaggccagttccaagatccagagggagcctcctgaggtgcacagagccaacattactcagagccgcagttcccactccttgaacaaacagctcatcattaacatggaacccctgcagcccctgcttccttcccccagcgagcaagaagaagaacttcctctgggtgagggtgttccattgcctaaagaggagaacatttctgctcccttgatctccagctccccagtgaaggcagcccgggagtatgaagatccccctagtgaagaggaagataaaataaaagaagaacctttaaccatctctgaactagtgtacaacccaagtgccagcctgctccccacccctgtggatgacgatgagattgacatgctctttgactgtccttctaggcttgagttggaaagagaagacacagattcatttgaggatctggaagcagatgaaaacgcctttttgattgctgaagaagaggagctgaaggaggctcgccgtgctttgtcgtggagctatgacattctgactggccatattcgggtgaacccactggtcaagagtttttccaggctccttgtggtgggcctgggactgctgctctttgtatttcccctgctcctcctccttttggagtcagtctccatgcagtaaacagacccagcagaacctgcccgtggtgagctcagccaagacttggctctccatgttccagcctccgtctgtgactgggtgggtaagttcggtgggccccacccagtgggctcggcagccgtcacttcacagaagaagaaaggaaccttgcttaggcctcagatcccagctgtgctctccaatccattaataaagctgcttttaaccctctc

SEQ ID NO: 134002 - DNA, 2198 bp, Homo sapiens
  Payload ID: 6179
  Gene Symbol: FRMD3
  Gene Name: FERM domain containing 3
  Uniprot ID: A2A2Y4
  ENST ID: ENST00000376438
  CDS Start-End: 316-1986
cgcgagcccgccgggggtctcaggctctgggcgtcctcggcgagcgagcccgggcagagggaggcgcacgagcgcgcgcgacagaaggaggcggggaaaggagggggcgaggcggaggcgagcgaacagagggagggacccgcccgccgcgccccggccgctgggcatgtgtgtccgcaggcgcccgacgctgccgatgtcccggggctgagccgcgcccaggtgtcccggacagtgcgtgcgagcgtgtgtgtccgcgcaggcgagcaccgcgccggccctgagcctcccgctcgctccccacggccgcggtgcatgttcgcctcctgccactgtgtgccgagaggcaggaggaccatgaaaatgatccactttcggagctccagcgtcaaatcgctcagccaggagatgagatgcaccatccggctgctggacgactcggagatctcctgccacatccagagggaaaccaaagggcagtttctcattgaccacatctgcaactactacagcctgctggagaaggactactttggcattcgctatgtggacccagagaagcaaaggcactggcttgaacctaacaagtccatcttcaagcaaatgaaaactcatccaccatacaccatgtgctttagagtgaaattctacccacatgaacccttgaagattaaagaagagctcacaagataccttttataccttcagattaaaagggacatttttcatggccgcctgctgtgctccttttctgatgctgcctacctgggtgcctgtattgttcaagctgagcttggtgattacgatcctgatgagcatcctgagaattacatcagtgagtttgagattttccccaagcagtcacagaagctggaaagaaaaatagtggaaattcataaaaatgaactcagggggcagagcccaccagttgctgaatttaacttgctcctgaaagctcacactttggaaacctacggggtggatcctcacccatgcaaggattcaacaggcacaacaacatttttaggattcacagctgcaggctttgtggtctttcagggaaataagagaatccatttgataaaatggccagatgtctgcaaattgaagtttgaagggaagacattttatgtgattggcacccagaaggagaaaaaagccatgttggcattccatacttcaacaccagctgcctgcaaacatctttggaagtgtggagtggaaaaccaggccttttataagtatgcaaaatccagtcagatcaagactgtatcaagcagcaagatattttttaaaggaagtagatttcgatatagtgggaaagttgccaaagaggtggtggaggccagttccaagatccagagggagcctcctgaggtgcacagagccaacattactcagagccgcagttcccactccttgaacaaacagctcatcattaacatggaacccctgcagcccctgcttccttcccccagcgagcaagaagaagaacttcctctgggtgagggtgttccattgcctaaagaggagaacatttctgctcccttgatctccagctccccagtgaaggcagcccgggagtatgaagatccccctagtgaagaggaagataaaataaaagaagaacctttaaccatctctgaactagtgtacaacccaagtgccagcctgctccccacccctgtggatgacgatgagattgacatgctctttgactgtccttctaggcttgagttggaaagagaagacacagattcatttgaggatctggaagcagatgaaaacgcctttttgattgctgaagaagaggagctgaaggaggctcgccgtgctttgtcgtggagctatgacattctgactggccatattcgggtgaacccactggtcaagagtttttccaggctccttgtggtgggcctgggactgctgctctttgtatttcccctgctcctcctccttttggagtcagtctccatgcagtaaacagacccagcagaacctgcccgtggtgagctcagccaagacttggctctccatgttccagcctccgtctgtgactgggtgggtaagttcggtgggccccacccagtgggctcggcagccgtcacttcacagaagaagaaaggaaccttgcttaggcctcagatcccagctgtgctctccaatccattaataaagctgcttttaaccctctc

SEQ ID NO: 134003 - DNA, 662 bp, Homo sapiens
  Payload ID: 6179
  Gene Symbol: FRMD3
  Gene Name: FERM domain containing 3
  ENST ID: ENST00000431299
  CDS Start-End: 1-423
ggcacaacaacatttttaggattcacagctgcaggctttgtggtctttcagggaaataagagaatccatttgataaaatggccagatgtctgcaaattgaagtttgaagggaagacattttatgtgattggcacccagaaggagaaaaaagccatgttggcattccatacttcaacaccagctgcctgcaaacatctttggaagtgtggagtggaaaaccaggccttttataagtatgcaaaatccagtcagatcaagactgtatcaagcagcaagatattttttaaaggaagtagatttcgatatagtgggaaagttgccaaagaggtggtggaggccagttccaagatccagagggagcctcctgaggtgcacagatgtgtacagaagaaaatttgttcctgctttggggtgacttggtgaggagctgtaatgtgaaagtctgcaaaaccaggctatcacactgtaagaagcagaagactacaggatgagagaagctggagaatcttggctccaggcatgttggtgcagatcctgaaagtgcagcctgcccaccaatgagaaaagtctttatggttccctcctcttccccaaattgtacttattcaatgcagcagaaatgaagaggaaatgataaaacatatcattcatctgtttcagaa

SEQ ID NO: 134004 - DNA, 5064 bp, Homo sapiens
  Payload ID: 6179
  Gene Symbol: FRMD3
  Gene Name: FERM domain containing 3
  Uniprot ID: A2A2Y4
  ENST ID: ENST00000621208
  CDS Start-End: 111-1772
agccctagagctcccagagacagaagacgagatggcagtattttaaggcactagcagatcacggcactgcaaatcctttttgtcttggcaaggcacaaggagacctgcttatgcagctttcaaagagggaaaccaaagggcagtttctcattgaccacatctgcaactactacagcctgctggagaaggactactttggcattcgctatgtggacccagagaagcaaaggcactggcttgaacctaacaagtccatcttcaagcaaatgaaaactcatccaccatacaccatgtgctttagagtgaaattctacccacatgaacccttgaagattaaagaagagctcacaagataccttttataccttcagattaaaagggacatttttcatggccgcctgctgtgctccttttctgatgctgcctacctgggtgcctgtattgttcaagctgagcttggtgattacgatcctgatgagcatcctgagaattacatcagtgagtttgagattttccccaagcagtcacagaagctggaaagaaaaatagtggaaattcataaaaatgaactcagggggcagagcccaccagttgctgaatttaacttgctcctgaaagctcacactttggaaacctacggggtggatcctcacccatgcaaggattcaacaggcacaacaacatttttaggattcacagctgcaggctttgtggtctttcagggaaataagagaatccatttgataaaatggccagatgtctgcaaattgaagtttgaagggaagacattttatgtgattggcacccagaaggagaaaaaagccatgttggcattccatacttcaacaccagctgcctgcaaacatctttggaagtgtggagtggaaaaccaggccttttataagtatgcaaaatccagtcagatcaagactgtatcaagcagcaagatattttttaaaggaagtagatttcgatatagtgggaaagttgccaaagaggtggtggaggccagttccaagatccagagggagcctcctgaggtgcacagagccaacattactcagagccgcagttcccactccttgaacaaacagctcatcattaacatggaacccctgcagcccctgcttccttcccccagcgagcaagaagaagaacttcctctgggtgagggtgttccattgcctaaagaggagaacatttctgctcccttgatctccagctccccagtgaaggcagcccgggagtatgaagatccccctagtgaagaggaagataaaataaaagaagaacctttaaccatctctgaactagtgtacaacccaagtgccagcctgctccccacccctgtggatgacgatgagattgacatgctctttgactgtccttctaggcttgagttggaaagagaagacacagattcatttgaggatctggaagcagatgaaaacgcctttttgattgctgaagaagaggagctgaaggaggctcgccgtgctttgtcgtggagctatgacattctgactggccatattcgggtgaacccactggtcaagagtttttccaggctccttgtggtgggcctgggactgctgctctttgtatttcccctgctcctcctccttttggagtcaggtattgatctctccttcttatgcgaaatccgccagacaccagagtttgagcagtttcactatgaatactactgtcccctcaaggagtgggtggctgggaaagtccacctcatcctctacatgctgggttgctcatgaagttaatctctcacgtgactaagggctatattcaatgctagtgatttctttttttcagcaaatgcctggttctgaagggtcacggggctgtcaacaggtgttccttactcataattgattattcaaacctttaagttagctttccataattcactgcacttaaataagtttaaatcaaatacagttattttagttacaggttaggaagatggtctttaaataaccaaaaatatgtttattttttattatagtgtagacatacccttcatctattatatcataatacatgttacattggactgaattagattttcccatttctaatagttggcaccattataagctataaggttcagaatcagaattttagtaacaactcaagagaaagttgttgaatataatccttagtgaaaacagtgtcctctaaccaatgcctatacaactaaatttatgctgggtttttggttctgtttttttaaaaatatttttatgtgttcaaactattttggtaaatttttagcaaaaaaaaaaaagaagcctcctggagttatttacatgtacagattgtaagactaatgcacaaaaggtatatcagaatttttttaatgttttggcgctactttgtttttaaaaatatttttggctgaacaataccataatttgttatgatctgcataggagatagaaaatgggtagaaagacactatagtaagtaagctgctaaaacagaggatggaactggaggatgtagaaactgagagcatcaagtggactcagggtggtccatttttcaaagtatttggacaagaggacttgttattttcatttgtattctgtccgtatattttggctggagaagcagatgttttaaaaagaaagtgagagtttaaaggaaaaaaggtaacagatgtgctagtcagttgcatatcaatgtacattaacccaagagtgaaggcagataggaactggagaaatggaaagtggcaaaaatgagttctggtgaggctggcaggcaaatggtgacaggcgaatggtctattttatgaaagtgatggtgatgccagcgttcgatgatgtgaagagcagtgcagtcgctgtctgagttaacatgaacatgtttaagtggatctaaataaaagtggagaaactttaaggtaaatattttgatccctcatgccatttgttgtgattctgtagaagaaacttcaaaaatgtgtttgtatgtgagtgtgcgtgtgtgtgtgtgtgagagagagagagagagagagagagagaatatgaatggctttttgatacatgtccatgatcatgttttgcggtggtcattatactcctttcctttcccagttgttttaaaatttgacttccatagagaaactggagaggcctcatgagatgacataccagttcagcctgggtaaagtagtgacatgaccctaaccagactgtagaggggaccagtgctctagtaccttccttgataccattaaatccatgatggaaaggatttaatccaacaatttaatggtatcaaggaaggtactagagcattgtaccatcagcaacgtactgatgccttcccatgcagactacctgctgatactgtgttatgtgggagaaagataagagtctagaacttatgccatggagcatagagcttctctgtggattgaaaacattccactgccctaatgtacaaagttacagggcccacttggaatcgctctctctagctaatgacattccaaccctatcattagcatgatttctaaattgggcaatacatttccactcactcagtggagctctgagtacttcactggacatttaattttggaaatgagttttgaaactcagttcgtgaagcctgcagtcgagcaaatgactatatatttgccattaagtttgaggggtttcctttcctatatgctttcagtgatttattttgctttttaaataaagattgtttgtttattacctgaaagttgatactgatttaggaatatattttctgtgattggaatcctcaacaatttattttggaagcttgcagatggctaggtttgaaattgaaatttgtgtttttctccttcttttctcatacgacttctaagtcatcctttctgacataaggcaactttagtgtagtctgcacaaaattagtccccttctgatcatgcgtcatataattttctctaaagttctgactatgacaaatcatctggccctcagtctttcaaaataatattatataatattttttaaattatggaactaatatattttccattgtaaaatacttaaaaaatatgatagtataaatatcacatgtaatccaacgatgcagatttatcttaaggagtaataaatatattattttaacatttccagctaacatctcttttctcttaggtggaaacttcattgttgaatagaaatgtttttaagtgaagaagttgacagaatagggtctgctgaatttaaacagccatcaaaagttaaactggaatcttgaaatgccatttgctcggcatagaatcagagccttttagaaacatccatttaagttttgttagaagatagtcaccagttgcctgaatcgaatgaggaaaagcctgcttccagagatggacagtatattatagagtgagatatagagtttaaagcaagtgtgtgagtatatgtatattccatattattggtatatgtgtgtttatatatgaatctgtatatatgtgtgtctttgaatagacacaacatatatgcccctcatgcataattgtgcttattttgccctaattgaggaatttgagatgtattattggttcttctccctctcagatactatggtgggtaaaacccacagcctgaaagggttaaattttccataaatgccactgagtgtacatttgtggatataaataaatatatataatacacacacacatatggcaaatacatatacacacacaatattgcctttagtgctaatgcaagttggatcatgaaaacaatgtaggtaaagtaaagtatgtatttgtctgtgcttgaaaaatattgtaaaatgttatgtatttggaatatattttgtggtttgtctaatatttataaacacaactcggggtgaattcacaatgagtttatttcattgaaatactagagatatgggggccatgttactgtgattggagccttacctttgtatagtgaaatttgcatttctatgtcaacatccagattgttttatatgttaatatggtggcaggaatccctaataaaaatactctggggt

SEQ ID NO: 134005 - DNA, 2145 bp, Homo sapiens
  Payload ID: 6180
  Gene Symbol: FRMD4A
  Gene Name: FERM domain containing 4A
  ENST ID: ENST00000264546
  CDS Start-End: 571-2145
atttctccagtgctgctacagaatgggactttttgcttgaccttgtggaaactcatgggttctccaagttgtaaagagttaagaaaagggatggaatgtctggggaatgttgcagggaaggctgcagctctctgctcttagctttctcaccctggaggggatcccaacactcggtggtgcttctgggtctgaggtcttccctaagttctgtttgatctgccaaagagccagcctcagtccactgagaaacagggatgtgccgttatctgcacactgaggtttatttttaccttgtccctggtgagtccccagagacaaggagaaaacactttgggagggagttaagagccttttgcttatccttgaaggaaagcagtctctgaggattagtgagggtggtggtgagggtaggtagggggaggagagtcagaggaatcagagttatttggactgcattttttccttgcctgattaaatcttactgacattggcactttgtgtcactaaaagaacacagccctggatgtggggccagggaccagagggttggcggcagagtctggggctggcatggctgctgggctgcttggctctgaggacccaccgtggagttggaacctgacttgtcgggcgctgaggacctgccaagtgaggaacattcgagttctgcagctgctgctaaaaccatggtgcatctccagggccgtctatcagatgacggagggccgccgatgtcaagtacatcttcttgatgacaggaagctggaactcctagtacagcccaagctgttggccaaggagcttcttgaccttgtggcttctcacttcaatctgaaggaaaaggagtactttggaatagcattcacagatgaaacgggacacttaaactggcttcagctagatcgaagagtattggaacatgacttccctaaaaagtcaggacccgtggttttatacttttgtgtcaggttctatatagaaagcatttcatacctgaaggataatgctaccattgagcttttctttctgaacgcgaagtcctgcatctacaaggagcttattgacgttgacagcgaagtggtgtttgaattagcttcctatattttacaggaggcaaagggagatttttctagcaatgaagttgtgaggagtgacttgaagaagctgccagcccttcccacccaagccctgaaggagcacccttccctggcctactgtgaagacagagtcattgagcactacaagaaactgaacggtcagacaagaggtcaagcaatcgtaaactacatgagcatcgtggagtctctcccaacctacggggttcactattatgcagtgaaggacaagcagggcataccatggtggctgggcctgagctacaaagggatcttccagtatgactaccatgataaagtgaagccaagaaagatattccaatggagacagttggaaaacctgtacttcagagaaaagaagttttccgtggaagttcatgacccacgcagggcttcagtgacaaggaggacgtttgggcacagcggcattgcagtgcacacgtggtatgcatgtccggcattgatcaagtccatctgggctatggccataagccaacaccagttctatctggacagaaagcagagtaagtccaaaatccatgcagcacgcagcctgagtgagatcgccatcgacctgaccgagacggggacgctgaagacctcgaagctggccaacatgggtagcaaggggaagatcatcagcggcagcagcggcagcctgctgtcttcaggttctcaggaatcagatagctcgcagtcggccaagaaggacatgctggctgccttgaagtccaggcaggaagctctggaggaaaccctgcgtcagaggctggaggaactgaagaagctgtgtctccgagaagctgagctcacgggcaagctgccagtagaatatcccctggatccaggggaggaaccacccattgttcggagaagaataggaacagccttcaaactggatgaacagaaaatcctgcccaaaggagaggaagctgagctggaacgcctggaacgagagtttgccattcagtcccagattacggaggccgcccgccgcctagccagtgaccccaacgtcagcaaaaaactg

SEQ ID NO: 134006 - DNA, 6821 bp, Homo sapiens
  Payload ID: 6180
  Gene Symbol: FRMD4A
  Gene Name: FERM domain containing 4A
  Uniprot ID: Q9P2Q2
  ENST ID: ENST00000357447
  CDS Start-End: 370-3489
gaacgctcacagaacaggcagtgcaattccatgttcctcttaagtatgttagccctaccgggagctgagctggccagtctacttggagaggaaaagtagatctggggaaggtggaagggtcagttcctaagtgacttcctcctcggggatggtaagggcatttgctgatctccagtgactgcctggtgcctcatggtcagactcggctgtctcactcccagatatctgattttgcaaaaagggacacacctatctgcagcaaagaagacactgaccagattgcgagcggtgcttttggatgctctgtagccacccggggcccaggaggactgactcggcagcaggattcgtgcatgggaatcggagaccatggcagtgcagctggtgcccgactcagctctcggcctgctgatgatgacggagggccgccgatgtcaagtacatcttcttgatgacaggaagctggaactcctagtacagcccaagctgttggccaaggagcttcttgaccttgtggcttctcacttcaatctgaaggaaaaggagtactttggaatagcattcacagatgaaacgggacacttaaactggcttcagctagatcgaagagtattggaacatgacttccctaaaaagtcaggacccgtggttttatacttttgtgtcaggttctatatagaaagcatttcatacctgaaggataatgctaccattgagcttttctttctgaacgcgaagtcctgcatctacaaggagcttattgacgttgacagcgaagtggtgtttgaattagcttcctatattttacaggaggcaaagggagatttttctagcaatgaagttgtgaggagtgacttgaagaagctgccagcccttcccacccaagccctgaaggagcacccttccctggcctactgtgaagacagagtcattgagcactacaagaaactgaacggtcagacaagaggtcaagcaatcgtaaactacatgagcatcgtggagtctctcccaacctacggggttcactattatgcagtgaaggacaagcagggcataccatggtggctgggcctgagctacaaagggatcttccagtatgactaccatgataaagtgaagccaagaaagatattccaatggagacagttggaaaacctgtacttcagagaaaagaagttttccgtggaagttcatgacccacgcagggcttcagtgacaaggaggacgtttgggcacagcggcattgcagtgcacacgtggtatgcatgtccggcattgatcaagtccatctgggctatggccataagccaacaccagttctatctggacagaaagcagagtaagtccaaaatccatgcagcacgcagcctgagtgagatcgccatcgacctgaccgagacggggacgctgaagacctcgaagctggccaacatgggtagcaaggggaagatcatcagcggcagcagcggcagcctgctgtcttcaggttctcaggaatcagatagctcgcagtcggccaagaaggacatgctggctgccttgaagtccaggcaggaagctctggaggaaaccctgcgtcagaggctggaggaactgaagaagctgtgtctccgagaagctgagctcacgggcaagctgccagtagaatatcccctggatccaggggaggaaccacccattgttcggagaagaataggaacagccttcaaactggatgaacagaaaatcctgcccaaaggagaggaagctgagctggaacgcctggaacgagagtttgccattcagtcccagattacggaggccgcccgccgcctagccagtgaccccaacgtcagcaaaaaactgaagaaacaaaggaaaacctcgtatctgaatgcactgaagaaactgcaggagattgaaaatgcaatcaatgagaaccgcatcaagtctgggaagaaacccacccagagggcttcgctgatcatagacgatggaaacattgccagtgaagacagctccctctcagatgcccttgttcttgaggatgaagactctcaggttaccagcacaatatcccccctacattctcctcacaagggactccctcctcggccaccgtcgcacaacaggcctcctcctccccagtccctggagggactccgacagatgcactatcaccgcaacgactatgacaagtcacccatcaagcccaaaatgtggagtgagtcctctttagatgaaccctatgagaaggtcaagaagcgctcctctcacagccattccagcagccacaagcgcttccccagcacaggaagctgtgcggaagccggcggaggaagcaactccttgcagaacagccccatccgcggcctcccgcactggaactcccagtccagcatgccgtccacgccagacctgcgggtccggagtccccactacgtccattccacgaggtcggtggacatcagccccacccgactgcacagcctcgcactgcactttaggcaccggagctccagcctggagtcccagggcaagctcctgggctcggaaaacgacaccgggagccccgacttctacaccccgcggactcgtagcagcaacggctcagaccccatggacgactgctcgtcgtgcaccagccactcgagctcggagcactactacccggcgcagatgaacgccaactactccacgctggccgaggactcgccgtccaaggcgcgccagaggcagaggcagcggcagcgggcggcgggcgcactgggctcagccagctcgggcagcatgcccaacctggcggcgcgcgggggtgcggggggcgcggggggcgcggggggcggtgtgtacctgcacagccagagccagcccagctcgcagtaccgcatcaaggagtacccgctgtacatcgagggcggcgccacgcccgtggtggtgcgcagcctggagagcgaccaggagggccactacagcgtcaaggctcagttcaagacgtccaactcctacacggcgggcggcctgttcaaggagagctggcgcggcggcggcggcgacgagggcgacacgggccgcctgacgccgtcgcgatcgcagatcctgcggactccgtcgctgggccgcgagggcgcccacgacaagggcgcgggccgtgccgccgtctcagacgagctgcgccagtggtaccagcgttccaccgcctcgcacaaggagcacagccgcctgtcgcacaccagctccacctcctcggacagcggctcgcagtacagcacctcctcccagagcaccttcgtggcgcacagcagggtcaccaggatgccccagatgtgcaaggccacgtcagctgccttacctcaaagccagagaagctcgacaccgtcaagtgaaattggagccacccccccaagcagcccccaccacatcctaacctggcagactggagaagcaacagaaaactcacccattctggatgggtctgagtctccacctcaccaaagtactgatgaatagaggagctacaatgatagctgtttcctggattcctccctctatccagaactagctgatgtccagtggtacgggcaggaaaaagccaagcccgggaccctcgtgtgagccagcccggcctaatctgaccgcctcaacgccattctgagatcacctcactgcctctcatttgccttacccagacgcaccgtcaccctgcaccagctttggccctcagcactttttttctcctgtctccgcattccctcccccttgaaaacctgactgaggagacattctggaaggttccggtcccactgtgtgtcccctggcgctcttgcccatagagagccagacaccaatcctcaatggcaccttggtggcttccctctgccatgacagcccctaggccaggaaccatcaggggggccagccggcatccaattcctgcggataagtagcgttgggagagaacgggaaaggggacttgagttacagggtgacccagaaagacgattcagctgtgtccagcctgccacccatacgtaggccaaccaagcacttcatgaagaggaggcctcgtggcatattcagtttacacctgaaatattccttgatgggacagcttgtggggatggctatgggggaaggggaggttgagaaaggaagttctcgacaccagaaatgcatcggaggaccacaatcagttctatgctgccaaagattaaaaataaataaaaacataaaaaattaagaggggccaagaggaagacattctttctgcaaggaaatttcttttaaattctgaactgctactacacacaagtgaaagtcaaccctatgtaaactggtgtcctctctctagccctctcccttactggcccacttctctctccgtagagagcctgaaaaactgccccaatgccacggtaaaggcgaggaagtcttggctggcgttgctgactcacagtcgccatccatctggacacaaagagagacctgtgggagtcgtagagggtactgttagccccggtccatgcagggggttcagccgagcccaagactcaaagctgctttcctttcaggatttgtagtaacgtaaggtgataatggccaaaagtggttctctctcattaaaccaaccagtaaaagcgtatcctatttttttgcacaaggtgtttcattttcgtttttatgggaaaccaagggaaaagcacattgcgatccattcagtgtttaactgtcgtggctcattttctgttcgttagcacttgtgtgacaaaagagctcagatccgacttctcctatgtgtcacttattccaagaacccaactatgcccttaggtagaaagatttgactcgtgtgtctactagccaacaggcagagcagggttgaaaaaaatatcagctcccaaagggcccatgtgtctacatcatcagttactgtcatgcaccacatttgtgtgcagataccaaaagaggaggaaagaagaaaaaaattaatgtgtgggagctgcacgtttacatgttttgagctatgcttcaaacacaactggaaagccatcaatcttcaaaggcctcaaaaatacttttatagtaacaagtgcacgactttagttgggttattcaagatggcacaaaaaggtttccgcagaggtggtatgctgtgcttttggcgcaagtggtggggggatggggtgggggtggaatttttttctcactctaatgacttcctattggaaaggcattgacagccagggacaggagccagggtgggggtagttttgtgggaaagcagaactgaagttagcttaagcataaaaacaaagaaaaatcttcgcttttcatgtatgtggaatccaagaataaccataggctctaccagaccagaagggtaaggatggacactaaaatgaaacaaataccaaggtattccttctgctgcagcctggagaccaccgagagtcgagctggggcacacacacacctggccgggacccggcagggacaaggcgggccgtggcctcctccaccaagtctctctagacaattcagggcctgctttccccagctccatgcatggctggactggtgattccagggtgcagaagggattcatattcccagaacgctttaagtgtacacctgcaggataaagagataccggttacattattaaatgattctagggattcactgggggatatttttgttgcttttactttcatggttagagctacaaagaacagtgattttttttttttctcccttccccattcagaaacattatacattgggccatttttctttctcccaaagaagattcatggatagtcagactgaactgtgtgcaacaggaaaagtcaaaagggaaaaggtagctgatgaggttacatggttacatgttctacatcatgcatagtagcttgaaatctagtctggagaaaactggatcaagattctagcccactggagttgcaaggaatgagaggcaaaaattctaaagatttgggttatattttcaacttgggggacagagagaaatggagagcaggaattacagttccaacaaacatcatgatagtctggtagtcaagacagagattaagtaaaacaggttttactgtttagctgagttcagttaatacaaaatgtacataaaacgttagtcctttgagactgacatgattaatgatcagtgtggtgggaaatgatgtagttattgtacacaagcacttgcaaactctttatccctatttctttaaaacaaaataaggtgaaatacgaagtccttggtctgatataaagcccctattggattcttcggatgcgtaaaagaaattgcctgtttcagccagaagactggtgaaaacacatacatcagactatgttgtgagccaggttgattttttattttattatatgcaggtgagtgttgaaactgttaaaattccaatttgttttcattcagtattagtttagttctaaatatagcaaaccccatccaggtgctatcagatgaccagttactgcttagttaactaggtgtaaagttttacatatacattaatgtcaatagtttattacaagttgtgtaaaatggactctagtttaataatgggggaaaaaagattaggttgctcctgaaactgactgtagagcatgtaaaatgattttactggattctgttcaactgtaatcaatgaaaaagatgtacgttgtagacaaagttgcagaattaaaaaaagaaatctgcttttaatttattctttttgtattaagaatttgtatagtacctttacattttgcaaaacagtgttgtcaacacttattaaagcattttcaaaatgaaaaga

SEQ ID NO: 134007 - DNA, 6407 bp, Homo sapiens
  Payload ID: 6180
  Gene Symbol: FRMD4A
  Gene Name: FERM domain containing 4A
  ENST ID: ENST00000358621
  CDS Start-End: 1-3075
atgacggagggccgccgatgtcaagtacatcttcttgatgacaggaagctggaactcctagtacagcccaagctgttggccaaggagcttcttgaccttgtggcttctcacttcaatctgaaggaaaaggagtactttggaatagcattcacagatgaaacgggacacttaaactggcttcagctagatcgaagagtattggaacatgacttccctaaaaagtcaggacccgtggttttatacttttgtgtcaggttctatatagaaagcatttcatacctgaaggataatgctaccattgagcttttctttctgaacgcgaagtcctgcatctacaaggagcttattgacgttgacagcgaagtggtgtttgaattagcttcctatattttacaggaggcaaagggagatttttctagcaatgaagttgtgaggagtgacttgaagaagctgccagcccttcccacccaagccctgaaggagcacccttccctggcctactgtgaagacagagtcattgagcactacaagaaactgaacggtcagacaagaggtcaagcaatcgtaaactacatgagcatcgtggagtctctcccaacctacggggttcactattatgcagtgaaggacaagcagggcataccatggtggctgggcctgagctacaaagggatcttccagtatgactaccatgataaagtgaagccaagaaagatattccaatggagacagttggaaaacctgtacttcagagaaaagaagttttccgtggaagttcatgacccacgcagggcttcagtgacaaggaggacgtttgggcacagcggcattgcagtgcacacgtggtatgcatgtccggcattgatcaagtccatctgggctatggccataagccaacaccagttctatctggacagaaagcagagtaagtccaaaatccatgcagcacgcagcctgagtgagatcgccatcgacctgaccgagacggggacgctgaagacctcgaagctggccaacatgggtagcaaggggaagatcatcagcggcagcagcggcagcctgctgtcttcaggttctcaggaatcagatagctcgcagtcggccaagaaggacatgctggctgccttgaagtccaggcaggaagctctggaggaaaccctgcgtcagaggctggaggaactgaagaagctgtgtctccgagaagctgagctcacgggcaagctgccagtagaatatcccctggatccaggggaggaaccacccattgttcggagaagaataggaacagccttcaaactggatgaacagaaaatcctgcccaaaggagaggaagctgagctggaacgcctggaacgagagtttgccattcagtcccagattacggaggccgcccgccgcctagccagtgaccccaacgtcagcaaaaaactgaagaaacaaaggaaaacctcgtatctgaatgcactgaagaaactgcaggagattgaaaatgcaatcaatgagaaccgcatcaagtctgggaagaaacccacccagagggcttcgctgatcatagacgatggaaacattgccagtgaagacagctccctctcagatgcccttgttcttgaggatgaagactctcaggttaccagcacaatatcccccctacattctcctcacaagggactccctcctcggccaccgtcgcacaacaggcctcctcctccccagtccctggagggactccgacagatgcactatcaccgcaacgactatgacaagtcacccatcaagcccaaaatgtggagtgagtcctctttagatgaaccctatgagaaggtcaagaagcgctcctctcacagccattccagcagccacaagcgcttccccagcacaggaagctgtgcggaagccggcggaggaagcaactccttgcagaacagccccatccgcggcctcccgcactggaactcccagtccagcatgccgtccacgccagacctgcgggtccggagtccccactacgtccattccacgaggtcggtggacatcagccccacccgactgcacagcctcgcactgcactttaggcaccggagctccagcctggagtcccagggcaagctcctgggctcggaaaacgacaccgggagccccgacttctacaccccgcggactcgtagcagcaacggctcagaccccatggacgactgctcgtcgtgcaccagccactcgagctcggagcactactacccggcgcagatgaacgccaactactccacgctggccgaggactcgccgtccaaggcgcgccagaggcagaggcagcggcagcgggcggcgggcgcactgggctcagccagctcgggcagcatgcccaacctggcggcgcgcgggggtgcggggggcgcggggggcgcggggggcggtgtgtacctgcacagccagagccagcccagctcgcagtaccgcatcaaggagtacccgctgtacatcgagggcggcgccacgcccgtggtggtgcgcagcctggagagcgaccaggagggccactacagcgtcaaggctcagttcaagacgtccaactcctacacggcgggcggcctgttcaaggagagctggcgcggcggcggcggcgacgagggcgacacgggccgcctgacgccgtcgcgatcgcagatcctgcggactccgtcgctgggccgcgagggcgcccacgacaagggcgcgggccgtgccgccgtctcagacgagctgcgccagtggtaccagcgttccaccgcctcgcacaaggagcacagccgcctgtcgcacaccagctccacctcctcggacagcggctcgcagtacagcacctcctcccagagcaccttcgtggcgcacagcagggtcaccaggatgccccagatgtgcaaggccacgtcagctgccttacctcaaagccagagaagctcgacaccgtcaagtgaaattggagccacccccccaagcagcccccaccacatcctaacctggcagactggagaagcaacagaaaactcacccattctggatgggtctgagtctccacctcaccaaagtactgatgaatagaggagctacaatgatagctgtttcctggattcctccctctatccagaactagctgatgtccagtggtacgggcaggaaaaagccaagcccgggaccctcgtgtgagccagcccggcctaatctgaccgcctcaacgccattctgagatcacctcactgcctctcatttgccttacccagacgcaccgtcaccctgcaccagctttggccctcagcactttttttctcctgtctccgcattccctcccccttgaaaacctgactgaggagacattctggaaggttccggtcccactgtgtgtcccctggcgctcttgcccatagagagccagacaccaatcctcaatggcaccttggtggcttccctctgccatgacagcccctaggccaggaaccatcaggggggccagccggcatccaattcctgcggataagtagcgttgggagagaacgggaaaggggacttgagttacagggtgacccagaaagacgattcagctgtgtccagcctgccacccatacgtaggccaaccaagcacttcatgaagaggaggcctcgtggcatattcagtttacacctgaaatattccttgatgggacagcttgtggggatggctatgggggaaggggaggttgagaaaggaagttctcgacaccagaaatgcatcggaggaccacaatcagttctatgctgccaaagattaaaaataaataaaaacataaaaaattaagaggggccaagaggaagacattctttctgcaaggaaatttcttttaaattctgaactgctactacacacaagtgaaagtcaaccctatgtaaactggtgtcctctctctagccctctcccttactggcccacttctctctccgtagagagcctgaaaaactgccccaatgccacggtaaaggcgaggaagtcttggctggcgttgctgactcacagtcgccatccatctggacacaaagagagacctgtgggagtcgtagagggtactgttagccccggtccatgcagggggttcagccgagcccaagactcaaagctgctttcctttcaggatttgtagtaacgtaaggtgataatggccaaaagtggttctctctcattaaaccaaccagtaaaagcgtatcctatttttttgcacaaggtgtttcattttcgtttttatgggaaaccaagggaaaagcacattgcgatccattcagtgtttaactgtcgtggctcattttctgttcgttagcacttgtgtgacaaaagagctcagatccgacttctcctatgtgtcacttattccaagaacccaactatgcccttaggtagaaagatttgactcgtgtgtctactagccaacaggcagagcagggttgaaaaaaatatcagctcccaaagggcccatgtgtctacatcatcagttactgtcatgcaccacatttgtgtgcagataccaaaagaggaggaaagaagaaaaaaattaatgtgtgggagctgcacgtttacatgttttgagctatgcttcaaacacaactggaaagccatcaatcttcaaaggcctcaaaaatacttttatagtaacaagtgcacgactttagttgggttattcaagatggcacaaaaaggtttccgcagaggtggtatgctgtgcttttggcgcaagtggtggggggatggggtgggggtggaatttttttctcactctaatgacttcctattggaaaggcattgacagccagggacaggagccagggtgggggtagttttgtgggaaagcagaactgaagttagcttaagcataaaaacaaagaaaaatcttcgcttttcatgtatgtggaatccaagaataaccataggctctaccagaccagaagggtaaggatggacactaaaatgaaacaaataccaaggtattccttctgctgcagcctggagaccaccgagagtcgagctggggcacacacacacctggccgggacccggcagggacaaggcgggccgtggcctcctccaccaagtctctctagacaattcagggcctgctttccccagctccatgcatggctggactggtgattccagggtgcagaagggattcatattcccagaacgctttaagtgtacacctgcaggataaagagataccggttacattattaaatgattctagggattcactgggggatatttttgttgcttttactttcatggttagagctacaaagaacagtgattttttttttttctcccttccccattcagaaacattatacattgggccatttttctttctcccaaagaagattcatggatagtcagactgaactgtgtgcaacaggaaaagtcaaaagggaaaaggtagctgatgaggttacatggttacatgttctacatcatgcatagtagcttgaaatctagtctggagaaaactggatcaagattctagcccactggagttgcaaggaatgagaggcaaaaattctaaagatttgggttatattttcaacttgggggacagagagaaatggagagcaggaattacagttccaacaaacatcatgatagtctggtagtcaagacagagattaagtaaaacaggttttactgtttagctgagttcagttaatacaaaatgtacataaaacgttagtcctttgagactgacatgattaatgatcagtgtggtgggaaatgatgtagttattgtacacaagcacttgcaaactctttatccctatttctttaaaacaaaataaggtgaaatacgaagtccttggtctgatataaagcccctattggattcttcggatgcgtaaaagaaattgcctgtttcagccagaagactggtgaaaacacatacatcagactatgttgtgagccaggttgattttttattttattatatgcaggtgagtgttgaaactgttaaaattccaatttgttttcattcagtattagtttagttctaaatatagcaaaccccatccaggtgctatcagatgaccagttactgcttagttaactaggtgtaaagttttacatatacattaatgtcaatagtttattacaagttgtgtaaaatggactctagtttaataatgggggaaaaaagattaggttgctcctgaaactgactgtagagcatgtaaaatgattttactggattctgttcaactgtaatcaatgaaaaagatgtacgttgtagacaaagttgcagaattaaaaaaagaaatctgcttttaatttattctttttgtattaagaatttgtatagtacctttacattttgcaaaacagtgttgtcaacacttattaaagcattttcaaaatgaaaaga

SEQ ID NO: 134008 - DNA, 1233 bp, Homo sapiens
  Payload ID: 6180
  Gene Symbol: FRMD4A
  Gene Name: FERM domain containing 4A
  ENST ID: ENST00000475141
  CDS Start-End: 380-598
tgccacgtaagacgtgactttgctccccctttgcctgctgccatgattgtggggtctccccatccacgtgaagctgtgatctatggaggtgggacattgatgtagagttgaggacgataactggcttcaggatttctcaagaaaagctttgagagatctacaccttggaaaccccagccctagaggagtgttcttccaagactccacgaacaggaaaaagtcctggatagcagctgagtgccgccatattaaccctttgggatgggccccagaatctgtgtttccatccagttcccaggtgcttttggatgctctgtagccacccggggcccaggaggactgactcggcagcaggattcgtgcatgggaatcggagaccatggcagtgcagctggtgcccgactcagctctcggcctgctgatggacagagccactcatatgaccacggaaggggggacttggagagaagacacattctggtggtggagatggccttttaggctgttgaaaagctgcctctcccatctttgcaagaatctcaggcagcgaaagaagatactgctgtgttcaccaacccgtgaggaggcttcagattgatgtgactaattgtagagcgggaagctcttggctacgtgtcatttgttgagggcgtgtgagttcagggaaagctgcaagggctggaacatgctagagccgaggattagtttatctttagagccaggataaggatgaataaccaaggggcttcaagggtgttatgatgccatttcggttcttagattataaaggctcaccttcaggacagctagattaaaatagtttttaatggaaattaactggataataaataatgcaaattaagcttttctataaatgaagtgtctttaaatacattatctcatttaattccatccatgaccctatttttaagaccaaaaaaaatctgataattagaatttgggaaactgtcaatggtcacataagtgaaactgatgaagcaagttctcaaaatctcggtcctctgagtcccaagccagtgctttctctgacagcatatcaaagctcaacaatttgacttctaggaccttctaacactttggattcgctcctgaagttagctcccctctgaaccagtcagcattttctgtgtttccaggtgaggaatcctgtctttctgttaatcatctgttcttttccatattgaagtgtaaaataaaaaagggataccacaa

SEQ ID NO: 134009 - DNA, 1149 bp, Homo sapiens
  Payload ID: 6180
  Gene Symbol: FRMD4A
  Gene Name: FERM domain containing 4A
  ENST ID: ENST00000493380
  CDS Start-End: 109-270
gtggggtctccccatccacgtgaagctgtgcttttggatgctctgtagccacccggggcccaggaggactgactcggcagcaggattcgtgcatgggaatcggagaccatggcagtgcagctggtgcccgactcagctctcggcctgctgatgatggagtctcactgtgtcgtgcaggctggagggcaatggtgccatcttggatcactgcaatctccaatctctgcttcccgggttcaagcgattctcctgcttcatcctcctgagtagctggggttgcaggatgatgctcattccaagattttctgttttatttctgtcttttgcaatcgttggcctgctttgctgccataaatgagggaattgtggctaagagagcaatctgccggaagcatctcctcatccatcggtggacactaaccacagctataaccgggacaactagagacactgtccaagtcctctgtcaaattcacaacttagcttgcccttaggtgtgaatacagactgaccccagggccggaggggctgctgttgtgagcctttcctgctggaggggcctaaggactcagttccctttatctaagacaaaaccgaatggagacagtaagagcccatcacactccaccctccctccctcaccttcttgcagagctggtagagtgtagtggccaagagcaggtcctctgcggtgtcacaattggagacctcttctgaatccatccctcaccaactcagtgaccagagctggttacccaacctctcagtgcttcaggtttggtttgatgttttcaatctctagaatgcaacagtcgtagagttggtgagaagattatgcagctgtgctgaggaaagagtaagagctcaaacatgtcagctgtcattcaaatgtcactacaatggccttttttcaagtgtgatccacttgcaccaaaattacctgaggtgcttgtgacaaggatcttacagattcagtctccacggaaggttccagaagtgttttagtgatcgaggcaggggctctacagtcagacagacccaacttcaaatcttaccttgcaccttagttagatctgcgtgatgtgcaacaagttaatgcatttagcttcttggagtctttgtttcaataaattaagacattaatatcta

SEQ ID NO: 134010 - DNA, 662 bp, Homo sapiens
  Payload ID: 6180
  Gene Symbol: FRMD4A
  Gene Name: FERM domain containing 4A
  ENST ID: ENST00000632570
  CDS Start-End: 430-662
ccctcctgagcgctcgctcctctcgctcctctcccctcacccgccgccttccctgctgggtccctctccccggtctccacctctcctccctctcctggaagggaaaagtctgccaagctggggactgccacgaccaaaccaacaaaggccgaccgaaggcggagaacttgaaaagaacttgttttgttccagttaaggaacctgcaggaaaatccacacccacattgcctggttttgaactggagagctgcgtgtgtgtgtatattccaatggagacagttggaaaacctgtacttcagagaaaagaagttttccgtggaagttcatgacccacgcagggcttcagtgacaaggaggacgtttgggcacagcggcattgcagtgcacacgtggtatgcatgtccggcattgatcaagtccatctgggctatggccataagccaacaccagttctatctggacagaaagcagagtaagtccaaaatccatgcagcacgcagcctgagtgagatcgccatcgacctgaccgagacggggacgctgaagacctcgaagctggccaacatgggtagcaaggggaagatcatcagcggcagcagcggcagcctgctgtcttcaggatctggtgccaggagacactgcattctactcccaggttctca

SEQ ID NO: 134011 - DNA, 495 bp, Homo sapiens
  Payload ID: 6180
  Gene Symbol: FRMD4A
  Gene Name: FERM domain containing 4A
  ENST ID: ENST00000477221
  CDS Start-End: 391-495
agttcagcactccacgcagatggctaccgctccctcctgagcgctcgctcctctcgctcctctcccctcacccgccgccttccctgctgggtccctctccccggtctccacctctcctccctctcctggaagggaaaagtctgccaagctggggactgccacgaccaaaccaacaaaggccgaccgaaggcggagaacttgaaaagaacttgttttgttccaatattccaatggagacagttggaaaacctgtacttcagagaaaagaagttttccgtggaagttcatgacccacgcagggcttcagtgacaaggaggacgtttgggcacagcggcattgcagtgcacacgtggtatgcatgtccggcattgatcaagtccatctgggctatggccataagccaacaccagttctatctggacagaaagcagagtaagtccaaaatccatgcagcacgcagcctgagtgagatcgccatcgacctgaccgagacg

SEQ ID NO: 134012 - DNA, 1287 bp, Homo sapiens
  Payload ID: 6180
  Gene Symbol: FRMD4A
  Gene Name: FERM domain containing 4A
  ENST ID: ENST00000495956
  CDS Start-End: 1-688
gcacagccagagccagcccagctcgcagtaccgcatcaaggagtacccgctgtacatcgagggcggcgccacgcccgtggtggtgcgcagcctggagagcgaccaggagggccactacagcgtcaaggctcagttcaagacgtccaactcctacacggcgggcggcctgttcaaggagagctggcgcggcggcggcggcgacgagggcgacacgggccgcctgacgccgtcgcgatcgcagatcctgcggactccgtcgctgggccgcgagggcgcccacgacaagggcgcgggccgtgccgccgtctcagacgagctgcgccagtggtaccagcgttccaccgcctcgcacaaggagcacagccgcctgtcgcacaccagctccacctcctcggacagcggctcgcagtacagcacctcctcccagagcaccttcgtggcgcacagcagggtcaccaggatgccccagatgtgcaaggccacgtcagctgccttacctcaaagccagagaagctcgacaccgtcaagtgaaattggagccacccccccaagcagcccccaccacatcctaacctggcagactgggagctacaatgatagctgtttcctggattcctccctctatccagaactagctgatgtccagtggtacgggcaggaaaaagccaagcccgggaccctcgtgtgagccagcccggcctaatctgaccgcctcaacgccattctgagatcacctcactgcctctcatttgccttacccagacgcaccgtcaccctgcaccagctttggccctcagcactttttttctcctgtctccgcattccctcccccttgaaaacctgactgaggagacattctggaaggttccggtcccactgtgtgtcccctggcgctcttgcccatagagagccagacaccaatcctcaatggcaccttggtggcttccctctgccatgacagcccctaggccaggaaccatcaggggggccagccggcatccaattcctgcggataagtagcgttgggagagaacgggaaaggggacttgagttacagggtgacccagaaagacgattcagctgtgtccagcctgccacccatacgtaggccaaccaagcacttcatgaagaggaggcctcgtggcatattcagtttacacctgaaatattccttgatgggacagcttgtggggatggctatgggggaaggggaggttgagaaaggaagttctcgacaccagaaatgcatcggaggaccacaatcagttctatgctgccaaagattaa

SEQ ID NO: 134013 - DNA, 5060 bp, Homo sapiens
  Payload ID: 6181
  Gene Symbol: FRMD4B
  Gene Name: FERM domain containing 4B
  Uniprot ID: Q9Y2L6
  ENST ID: ENST00000398540
  CDS Start-End: 85-3189
cgggagcccaggcgggcaggccgctggggtcggggctgcacgtacgagagccgggacgcccgggttcagagcgaaggaggaggcatggcttcggtgttcatgtgtggcgtggaggacctgctgttcagcggcagccgcttcgtatggaacttgaccgtgtccacgctgcggagatggtacacggagaggctgcgggcttgccaccaggtgctgcggacgtggtgcgggctgcaggacgtgtaccagatgacagaaggcaggcactgccaggtgcacctcctggatgataggagactggagctgctggttcagcccaaacttctagcaagagagttgctggacctagtggcttcacatttcaacctgaaagaaaaggagtattttggaataacattcatagatgacacaggtcagcagaactggctgcagttagatcaccgagttcttgaccacgatttgcccaagaaaccaggcccaaccattttgcactttgctgtgaggttttacattgagagcatatcgtttttaaaggataaaaccaccgtggagctgtttttcctgaatgcaaaggcctgtgtgcacaaggggcaaatcgaagtagagagcgaaaccatcttcaagttagcagcgtttattttacaggaagccaagggagattataccagtgatgaaaatgccaggaaagatttaaagacattaccagcctttccaaccaaaactcttcaggagcatccatcccttgcctactgtgaggacagggtaattgagcattatttgaaaatcaaaggtctcactcgaggtcaagctgtggttcagtatatgaaaatagtagaagctctaccgacttacggtgtccattattatgcagtaaaggataagcaaggacttccttggtggcttggaataagctataagggaattggccaatatgatatacaagacaaggtgaagcctcggaagttattccaatggaaacagctggagaacttatatttccgtgagaaaaaatttgctgttgaagttcatgatccacgaaggatttcagtttcaagaagaacctttgggcaaagtggcttgtttgtgcaaacatggtatgctaactcttctctcatcaagtccatttgggtaatggcaattagtcagcatcagttttacttggaccggaagcaaagcaaagcaaaaattccttcagccaggagtttagatgagattgcaatggatttgacagagacaggaacacaaagggcctccaagctggtgacactggagacgaaaagtcagttcatcatggcaagtaatggcagtttaatctcctcaggttctcaagactcagaagttagtgaagagcaaaagagagaaaaaatccttgaactaaagaagaaggagaaactattacaagaaaaacttctgaaaaaagttgaggagcttaagaagatctgtctgcgggaggctgagctcacaggcaaaatgccaaaggagtatcccctgaacataggcgagaagcctcctcaggtcagaagacgtgtgggtactgcgttcaaattagatgacaacttgctgccgagtgaagaagatcctgctttgcaagaactggagagtaattttctaatacaacaaaagctggtggaagctgcaaagaaacttgccaatgagccagacctttgtaaaactgtgaagaaaaagcgaaagcaagattacacagatgcgatgaaaaagcttcaggagattgaaaatgcaataaacgaataccgaattaggtgtggaaagaaacccagccagaaagcaacagtgttaccagaagacataatcccctcagagagtagctctttgtctgacaccaccacctatgatgatcccagtgatgccttcacttttcctgggcagcgatcaagttcagtacctcattctccaagaattcttccccccaagtctcttggtattgagcgaatccatttcagaaagtcgtccatcaatgaacagtttgtggataccaggcagtccagagaaatgctgtccacacacagcagcccttacaaaactctggagaggcggccccagggaggacgaagcatgcccaccacgccagttcttacccgaaacgcctacagcagcagccacttggaacccgaatcttcatctcagcactgccgccagcggagtggaagcctggagtcccagtcccacctgctctccgagatggacagcgataagccatttttctccctctccaaatcccaaagaagcagcagcacagaaatcctcgatgacgggtcttcttatacaagccaatcaagcacagagtattactgtgtgacaccagttaccggcccctattacaccacccagaccctggacactcgcaccaggggtcggaggaggtcaaagaaacagaatgtttctacttcaaattcaggaagcatgcccaacctagcacaaaaggatagtttgaggaatggtgtttactcaaagagtcaggagccaccgtcttccagttactacattgccgggtacacaccctatgcagagtgtgacttttattacagtggtggttatgtctatgagaatgacaccgagggacagtatagtgtcaacccttcctaccggtcctcagcccactatggatatgagcgccagagggactacagcagatcctttcacgaagatgaggtcgaccgggtaccccataacccatatgcaactctccggctgccaaggaaggctgctgcaaaatcggagcacatcaccaaaaacatccacaaggccttagttgccgagcacttgcgtggctggtaccagcgggcctctgggcagaaggatcagggacacagcccgcagaccagctttgactcagacaggggatcacagagatgcctggggtttgcggggctgcaagtaccttgttctccaagcagtcgtgcatcctcgtactcttcagtgtcttctacaaatgcttctgggaactggaggacccagttaaccatagggctgtcggattacgagactccagcacattcttcttacaccagctgctatggcaatgtctataatcctttaccctctccaagcagacaatacacagaaatcagtcaactggatggtacagatggaaaccagctggaagacaacctggagagtagtgagcagagactcttttggcatgaagattcaaagcctggaacattagtctgaactgcagttggacctcctgaccaagcactgcgttctcacactagtgtgccttgcaaattgtatttgtcttccgagaggatgttcgttttagaaacctaaagacatcaaaggttgaagagaagacttagttgccctggaagtgaatcagtgaatcacacaccaagccccacaaagcccctaaaggaggatttggcctttcaaactctaggcactaacgtaactgtagggtctgcccacatgttgaagtattgccaagagaggactcagtgtgaagccttcatcaatagcaagcactttttaagggagtaaaagttgttaaaggcaaacctcaaaaacatgaaagggcattcaggatgtcccatggcaataagaacaggggaaatctcagagcacaattcagcaggatgagagaaggggaaccagaagctccggagtcattgctcacttcagagtttgaattcgtgagctgacaaagagtaacatgctctttctacacagacatggacaatttagacagtattggaaaattacttgaagctggattttcatgaagttctgaatgagtgtaaatgttttttaggatactataaagagtgatgtttttcataagcaccataaaatgggttctggaaaaactgattaccttagcatcctgtaatataacttatggtagcagattggggaaaatgaagcagcccactgaataattgacaaagtctgcttggagaacattctaaggtacaatatcatggagctcctttttcctttctccactaattgcgtgatgagctattgttctggctgttaattctccaactcggctgtcatttgaagtggcagacttaatatggaaagtttttataattatgagtttgaaaaagcattttaagatgatacagaaagtatccaaaacaacagaaaaaaaaagccacgtcattttagatgaattgcgtgccttaaaatggtgaacgttagaaaattaaacaagtctggattccacaagtagttccaagtcaccaagtgacaaaaacaaggttaacattaaaaaagaaaaacaacaacaacgacaaaaagctccaagctgcagtggatttaattatgaggctaaaactacctcatactttccttggaagaactaattagctatggtttattgtagggttttgtttgtttgttttttaaagcaaatgatttccatattccagattgatcttttttgtcatctttgcttcaaaattacataaaaggtgctcctttcccccttcttttatacaagtttcttgttcatattgtgaatagaaaagtttctgaacaacttttttggaacattttctatctatattccaaagcatgtaatatatacataaaaacgatttgttaaactggtccttagtcatttgtataattagaaatgaagtttgggaaaaaattttggaaaaaagacaagcaaaaaaaaataacttattccttttttgcatatttgtatagccttctagaatcagaaataacctttttgcatattcttttattgttctgacttttcaagacctattatttttttacataggtcaataaacaaaaggtgtgctactgaaaatgtttacgttttcttccatttatgtcaggggttcatgtgaagcaggtcgcagtgctctacttcaagtaatcatattgggcaaggcttcggatttttatttatagtattaccgtattttattaattccgggatgtacatttttaaatatttacattaaaaacatggttcatctttttattgatggcatattctacttgaattggcagttttttcttaatagtacattaaaaataatgctgtgtcttacaataaagttgccttagaattgatgaaa

SEQ ID NO: 134014 - DNA, 846 bp, Homo sapiens
  Payload ID: 6181
  Gene Symbol: FRMD4B
  Gene Name: FERM domain containing 4B
  ENST ID: ENST00000459638
  CDS Start-End: 507-846
agcgagaggaggcaggcaggacggaaggacgcgagaaaggcggcccggggcacagctgtaagtgtggagcaaagcgaggacgcacggcgagcggcggtggcgggggcgacctgcagacccgggccgggggatgcggcaggcgctggctgcccagagagcccgggagtcgggctgcgtagctcacgtgctgagctggagcttggacagagaggaagaggaagaagaggaaggcagccgccgccggggaaggcacagcgcagagtggacttgcaggactggcgcagagccgggtccccaggtcccgcgcggtgcgcagccgagacaataaagtagccgtctacagccccggagcgccgcagggaggaggtggcggagcaggctttgatgagaaatccagaagaaagagtgtatgaaagaaaaagatgacatctatgcatagcaaacaaaatctgaagattattacagtaaaaacaaaagaaaggcaagagaatacttactagttaaagatgacagaaggcaggcactgccaggtgcacctcctggatgataggagactggagctgctggttcagcccaaacttctagcaagagagttgctggacctagtggcttcacatttcaacctgaaagaaaaggagtattttggaataacattcatagatgacacaggtcagcagaactggctgcagttagatcaccgagttcttgaccacgatttgcccaagaaaccaggcccaaccattttgcactttgctgtgaggttttacattgagagcatatcgtttttaaaggataaaaccaccgtggagctgtttttcctgaatgcaaaggcctgtgtgcacaagg

SEQ ID NO: 134015 - DNA, 555 bp, Homo sapiens
  Payload ID: 6181
  Gene Symbol: FRMD4B
  Gene Name: FERM domain containing 4B
  ENST ID: ENST00000497880
  CDS Start-End: 315-555
attcctgcgatctgttaggacttgtaaacataccagagccaagtcctctgaacttcgcgaactgatttggtgtgtttgctggtacccagacggctgcgactagaggctgggcctttcgggaagaaagaccttagggtgctgatggcagcagtctttccgggaagctggttgatccttgaagattaggctttgatgagaaatccagaagaaagagtgtatgaaagaaaaagatgacatctatgcatagcaaacaaaatctgaagattattacagtaaaaacaaaagaaaggcaagagaatacttactagttaaagatgacagaaggcaggcactgccaggtgcacctcctggatgataggagactggagctgctggttcagcccaaacttctagcaagagagttgctggacctagtggcttcacatttcaacctgaaagaaaaggagtattttggaataacattcatagatgacaccccaatttgcctacattttatgcagcccgatacattatcagaggaatccttccactttctgcagataatttccaaagagc

SEQ ID NO: 134016 - DNA, 581 bp, Homo sapiens
  Payload ID: 6181
  Gene Symbol: FRMD4B
  Gene Name: FERM domain containing 4B
  ENST ID: ENST00000460709
  CDS Start-End: 155-581
actggcttgtagttggagaaaatgcaagcacatgcgcgcacacacacgcgcgcgcacacacacacacaccgcacaagtgcttaatacgtgtgtcttttgtcttaagcactctcttcagttcctttaaatgagccgaggtcatggtggttcggagatgacagaaggcaggcactgccaggtgcacctcctggatgataggagactggagctgctggttcagcccaaacttctagcaagagagttgctggacctagtggcttcacatttcaacctgaaagaaaaggagtattttggaataacattcatagatgacacaggtcagcagaactggctgcagttagatcaccgagttcttgaccacgatttgcccaagaaaccaggcccaaccattttgcactttgctgtgaggttttacattgagagcatatcgtttttaaaggataaaaccaccgtggagctgtttttcctgaatgcaaaggcctgtgtgcacaaggggcaaatcgaagtagagagcgaaaccatcttcaagttagcagcgtttattttacaggaagccaagggagattataccagtgatgaaa

SEQ ID NO: 134017 - DNA, 569 bp, Homo sapiens
  Payload ID: 6181
  Gene Symbol: FRMD4B
  Gene Name: FERM domain containing 4B
  ENST ID: ENST00000473029
  CDS Start-End: 67-569
cagcacttgcactctgaggactgactcttaccagctggggagcaaacaggccagctggagaccgagatgacagaaggcaggcactgccaggtgcacctcctggatgataggagactggagctgctggttcagcccaaacttctagcaagagagttgctggacctagtggcttcacatttcaacctgaaagaaaaggagtattttggaataacattcatagatgacacaggtcagcagaactggctgcagttagatcaccgagttcttgaccacgatttgcccaagaaaccaggcccaaccattttgcactttgctgtgaggttttacattgagagcatatcgtttttaaaggataaaaccaccgtggagctgtttttcctgaatgcaaaggcctgtgtgcacaaggggcaaatcgaagtagagagcgaaaccatcttcaagttagcagcgtttattttacaggaagccaagggagattataccagtgatgaaaatgccaggaaagatttaaagacattaccagcctttccaaccaaaactcttcaggagcatccatcccttgcctactg

SEQ ID NO: 134018 - DNA, 3761 bp, Homo sapiens
  Payload ID: 6181
  Gene Symbol: FRMD4B
  Gene Name: FERM domain containing 4B
  ENST ID: ENST00000478263
  CDS Start-End: 647-2707
attgtaactcttcctgtagaacctgttcatgtccagggtgagtaaactagggtagaaatgtcttcctaaaacagcctccggtgaaattcgtccttggattcaaagcaacttacttcctaggaagtatcaggcaaatcccaactgccctccattttagaaaggtctcttttctgggaaaatctgccactgagaactttgccctcctctccctgatgggaggaaggagtagaattagggaggtgtcactcaggagagttgctgatgtcagtagtgtgtcagccgtgggaggctcagtttgtgaaattgagttacacctaagtgtcttatgaaactcagttcagaactcaccggagctgccgtctgggaggggggagggcggaagaaccctgaggtttttcctcacatttctgtcccatttttggaacctctggatttaaagaaatgaaaacctcaagtttgtggagattttaagaaatggttattccaatggaaacagctggagaacttatatttccgtgagaaaaaatttgctgttgaagttcatgatccacgaaggatttcagtttcaagaagaacctttgggcaaagtggcttgtttgtgcaaacatggtatgctaactcttctctcatcaagtccatttgggtaatggcaattagtcagcatcagttttacttggaccggaagcaaagcaaagcaaaaattccttcagccaggagtttagatgagattgcaatggatttgacagagacaggaacacaaagggcctccaagctggtgacactggagacgaaaagtcagttcatcatggcaagtaatggcagtttaatctcctcaggttctcaagactcagaagttagtgaagagcaaaagagagaaaaaatccttgaactaaagaagaaggagaaactattacaagaaaaacttctgaaaaaagttgaggagcttaagaagatctgtctgcgggaggctgagctcacaggcaaaatgccaaaggagtatcccctgaacataggcgagaagcctcctcaggtcagaagacgtgtgggtactgcgttcaaattagatgacaacttgctgccgagtgaagaagatcctgctttgcaagaactggagagtaattttctaatacaacaaaagctggtggaagctgcaaagaaacttgccaatgagccagacctttgtaaaactgtgaagaaaaagcgaaagcaagattacacagatgcgatgaaaaagcttcaggagattgaaaatgcaataaacgaataccgaattaggtgtggaaagaaacccagccagaaagcaacagtgttaccagaagacataatcccctcagagagtagctctttgtctgacaccaccacctatgatgatcccagtgatgccttcacttttcctgggcagcgatcaagttcagtacctcattctccaagaattcttccccccaagtctcttggtattgagcgaatccatttcagaaagtcgtccatcaatgaacagtttgtggataccaggcagtccagagaaatgctgtccacacacagcagcccttacaaaactctggagaggcggccccagggaggacgaagcatgcccaccacgccagttcttacccgaaacgcctacagcagcagccacttggaacccgaatcttcatctcagcactgccgccagcggagtggaagcctggagtcccagtcccacctgctctccgagatggacagcgataagccatttttctccctctccaaatcccaaagaagcagcagcacagaaatcctcgatgacgggtcttcttatacaagccaatcaagcacagagtattactgtgtgacaccagttaccggcccctattacaccacccagaccctggacactcgcaccaggggtcggaggaggtcaaagaaacagaatgtttctacttcaaattcaggaagcatgcccaacctagcacaaaaggatagtttgaggaatggtgtttactcaaagagtcaggagccaccgtcttccagttactacattgccgggtacacaccctatgcagagtgtgacttttattacagtggtggttatgtctatgagaatgacaccgagggacagtatagtgtcaacccttcctaccggtcctcagcccactatggatatgagcgccagagggactacagcagatcctttcacgaagatgaggtcgaccgggtaccccataacccatatgcaactctccggctgccaaggaaggctgctgcaaaatcggagcacatcaccaaaaacatccacaaggccttagttgccgagcacttgcgtggctggtaccagcgggcctctgggcagaaggatcagggacacagcccgcagaccagctttgactcagacaggggatcacagagatgcctggggtttgcggggctgcaagtaccttgttctccaagcagtcgtgcatcctcgtactcttcagtgtcttctacaaatgcttctgggaactggaggacccagttaaccatagggctgtcggattacgagactccagcacattcttcttacaccagctgctatggcaatgtctataatcctttaccctctccaagcagacaatacacagaaatcagtcaactggatggtacagatggaaaccagctggaagacaacctggagagtagtgagcagagactcttttggcatgaagattcaaagcctggaacattagtctgaactgcagttggacctcctgaccaagcactgcgttctcacactagtgtgccttgcaaattgtatttgtcttccgagaggatgttcgttttagaaacctaaagacatcaaaggttgaagagaagacttagttgccctggaagtgaatcagtgaatcacacaccaagccccacaaagcccctaaaggaggatttggcctttcaaactctaggcactaacgtaactgtagggtctgcccacatgttgaagtattgccaagagaggactcagtgtgaagccttcatcaatagcaagcactttttaagggagtaaaagttgttaaaggcaaacctcaaaaacatgaaagggcattcaggatgtcccatggcaataagaacaggggaaatctcagagcacaattcagcaggatgagagaaggggaaccagaagctccggagtcattgctcacttcagagtttgaattcgtgagctgacaaagagtaacatgctctttctacacagacatggacaatttagacagtattggaaaattacttgaagctggattttcatgaagttctgaatgagtgtaaatgttttttaggatactataaagagtgatgtttttcataagcaccataaaatgggttctggaaaaactgattaccttagcatcctgtaatataacttatggtagcagattggggaaaatgaagcagcccactgaataattgacaaagtctgcttggagaacattctaaggtacaatatcatggagctcctttttcctttctccactaattgcgtgatgagctattgttctggctgttaattctccaactcggctgtcatttgaagtggcagacttaatatggaaagtttttataattatgagtttgaaaaagcattttaagatgatacagaaagtatccaaaacaacagaaaaaaaaagccacgtcattttagatgaattgcgtgccttaaaatggtgaacgttagaaaattaaacaagtctggattccacaagtagttccaagtcaccaagtgacaaaaacaaggttaacattaaaaaagaaaa

SEQ ID NO: 134019 - DNA, 549 bp, Homo sapiens
  Payload ID: 6181
  Gene Symbol: FRMD4B
  Gene Name: FERM domain containing 4B
  ENST ID: ENST00000493880
  CDS Start-End: 1-549
agaaatgctaatgggaggagcccaaataacagtgacaaaaccttcctgagcaaattctcttctcaagaaattacacttgtgaagccgaggttttacattgagagcatatcgtttttaaaggataaaaccaccgtggagctgtttttcctgaatgcaaaggcctgtgtgcacaaggggcaaatcgaagtagagagcgaaaccatcttcaagttagcagcgtttattttacaggaagccaagggagattataccagtgatgaaaatgccaggaaagatttaaagacattaccagcctttccaaccaaaactcttcaggagcatccatcccttgcctactgtgaggacagggtaattgagcattatttgaaaatcaaaggtctcactcgaggtcaagctgtggttcagtatatgaaaatagtagaagctctaccgacttacggtgtccattattatgcagtaaaggataagcaaggacttccttggtggcttggaataagctataagggaattggccaatatgatatacaagacaaggtgaagcctcggaag

SEQ ID NO: 134020 - DNA, 561 bp, Homo sapiens
  Payload ID: 6181
  Gene Symbol: FRMD4B
  Gene Name: FERM domain containing 4B
  ENST ID: ENST00000462512
  CDS Start-End: 79-561
ggtttttatgtgtgtgggaatggacgcaaaggaaaacacagctgagctgcattgtaactcttcctgtagaacctgttcatgtccaggttattccaatggaaacagctggagaacttatatttccgtgagaaaaaatttgctgttgaagttcatgatccacgaaggatttcagtttcaagaagaacctttgggcaaagtggcttgtttgtgcaaacatggtatgctaactcttctctcatcaagtccatttgggtaatggcaattagtcagcatcagttttacttggaccggaagcaaagcaaagcaaaaattccttcagccaggagtttagatgagattgcaatggatttgacagagacaggaacacaaagggcctccaagctggtgacactggagacgaaaagtcagttcatcatggcaagtaatggcagtttaatctcctcaggttctcaagactcagaagttagtgaagagcaaaagagagaaaaaatccttgaactaaagaagaaggagaaactattacaagaaaaacttctgaaaaaagttgaggagcttaagaag

SEQ ID NO: 134021 - DNA, 505 bp, Homo sapiens
  Payload ID: 6181
  Gene Symbol: FRMD4B
  Gene Name: FERM domain containing 4B
  ENST ID: ENST00000489817
  CDS Start-End: 454-505
agacggagtctcgctctgtcgcccaggctggagtgcagtggcgcgatctgggctcactgcaacctccgcctcccgggtgcacgccattctcctgcctcagcctcccgagtagctgggactacaggcacccaccagcacgcccggctaattttttttgtatttttagtagagacaaggtttcaccgtgttagcgaggatggtctcgatctcctgacctcgtgatccacctgcctcggcctcccaaagtgctgtgattacaggcgtgagccaccgcgcccggccgagttattccaatggaaacagctggagaacttatatttccgtgagaaaaaatttgctgttgaagttcatgatccacgaaggatttcagtttcaagaagaacctttgggcaaagtggcttgtttgtgcaaacatggtatgctaactcttctctcatcaagtccatttgggtaatggcaattagtcagcatcagttttacttggaccggaagcaaagcaaagtaa

SEQ ID NO: 134022 - DNA, 4091 bp, Homo sapiens
  Payload ID: 6182
  Gene Symbol: FRMD5
  Gene Name: FERM domain containing 5
  ENST ID: ENST00000402883
  CDS Start-End: 157-1710
aaggaggaggaacgaggccagcaggaggcaacggcagcgacggggccggggtgatggtgcaggtgcctggggtcggtgcggagctgccgggctgagggacgcctggtccagggtccgcagcgccgccgcgtcgctcccgggcgggcgggcgggaagatgctgagcaggttgatgagcggcagcagcaggagcctggagcgcgagtacagctgcaccgtgcggctgctggacgacagcgagtacacctgcaccatccagagagatgccaaaggccagtacctgtttgaccttctttgccaccatctgaacctacttgagaaagactattttggtatccgctttgtagacccagataagcagcggcattggctggaatttacaaagtctgtggtgaaacaattgagatcccagcctccattcaccatgtgcttccgtgtgaagttttatcctgcagaccctgctgctctgaaagaagaaataaccaggtatttagtcttcctgcagatcaaaagggatctctaccatggccgactcctctgtaaaacatcggatgctgccttgttagcagcttacatccttcaagcggagattggggattatgactcagggaaacaccctgaaggctacagctccaagttccagtttttccctaaacattcagagaagctggaaaggaaaattgctgagattcacaagacggaactgagtggtcaaacaccagcaacatcagagctgaacttcttaagaaaagcacagacattggaaacatatggagtggatcctcacccatgtaaggacgtgtcaggaaatgctgcatttctggccttcactccttttgggtttgttgttcttcaaggaaacaagagggtccacttcattaaatggaatgaggtgaccaagctgaaatttgaaggaaagactttctatttatacgtaagtcagaaagaggaaaagaaaattattcttacatattttgctccaactcctgaagcgtgtaagcacctctggaaatgtggaatcgagaaccaagccttctacaagctggagaagtcaagccaagtccgcacagtgtccagcagcaatttattctttaaagggagccggttccgatacagtggccgagttgcaaaggaagtcatggaatcaagtgctaagatcaaacgggagccaccggaaatacacagagcagggatggttcccagccggagctgtccctccataacccatggcccaaggctgagcagcgtccccaggacccgcagaagagctgttcacatctccatcatggaaggcctagagtccttacgggacagtgcccattccacaccagtgcgttccacttcccatggggacaccttcctgcctcacgtgagaagcagccggacagatagcaatgagcgagtagctgtgattgcagacgaggcctacagccctgcagacagcgtgctgcccacccctgtggctgagcacagcctggagctgatgttgctttcccggcagatcaatggagccacctgcagcattgaggaggagaaggaatctgaagccagcaccccaactgctacagaggtggaggcccttgggggagagctgagggccctgtgtcaggggcacagcgggcccgaggaggaacagagtgggcatctgaagggaccaccgctacagcaacagcagcatcaggggtggggtaagtctgtccccttagtctagagcctagtgggcatcaccatagttttgtataatgaaactagacttaacgtgattttttttttccgaagaacctcaagacttttatagtgctccaggggcgttaaacgaattcagtggtaccagagatagatagttctgtcagaaatgttggacaaagtgtagttaagagaaagcagagttaagttacctgagagactgttgagatttggatagcagtgcttattttatatacacccccttgacccaaagactatttcaatttatattttaacaacgaaatgttattttcttaacaattcatattttgtttttactttatggattaagaaaatagagcctgatgaactaaacgatgcaagaaagaaactgatcctgagaatgaaaagcttcagaaaatagaattccaagatcaacagccttagaagggaccaggaaaagaatcttttaaaatagatttctaagagatgcctacaaaacacagaatgtgaccgtggcagagaccaacacttagatgtagaaatgctgccccctagggtcatcctctgcataagttctaggaaagcatcaccatccttgcagagggaagtcctcgaagcacgcagcacaggcatatgaagggcgagtgtgggatcctaggcccaagctcttcaactctaaaaccaatcacacacaagatcctgttttcatctcagggagagatttctaagtcatctggggcttgagggcttatttaagggtggtcaatggacatattcctggacccacacaaaagtagagcagctgctgataccctaattggacagccccaaacgcagaacagaacaagtcacttgtagacttgacctcccctattttgtcccccgagatggtagaaccatgtccatgtttacaatatgacaactgtggaataattggggttcttagggagagatttgcataattttaaagacatcctttcatctggaccagaggtcaatcaacttatgtcaagtgctacacagtaaatattttggtttagcacgccatactgtgtcacaactgctcaattctgccatcacagcacaaaaacagccacagataatttgtaaatgaaggaacatggctgtgttccaataaaactttatgaaaacagtgagctgaatttagcctacaggccataatacgccaatcctgctctagacaataaaactgatccttaccagtatgttagcagaagagggtcagtcagctctgtttccatgcctgacatgtatcaaagatctgggacctcttcccagtggaggcactagggttgcttgtttaaagggtgcttgaacaactaaccagcaaagagatgtctgatgccaaatgggcaagatcaaatactggaatgctaaaacacagctggaatctaagaagggaagagggcttctctgaccattttcataccagcaacaatttaggcagaattataaacatctatttatcgagtgacaatacaaaccgaaggagatcctagtagagattaggggtcagttaaaatcaactagccactgccacttgtcatctacatagcaaaggctttatttagcacaggactaacgtgaaaagtagacccagagatgaaaaggctgtcaggagacagggggctggtgtccacctggtatctactgtcttatgcaacatagaagattaccttttagtgtagtgctcctacctcagtttgtagaatctggtgtttctatgcagtgagtgatagcctcaactctgacctttcatattcacattagagacagatgcagtattccatatcctagtatgttccttgtgtctagagttctaacagtacagtagtctatgccatttctaacagctaaattttgctctgtaaacagaaactttagggttgtttttttccagggctcatcccagaaaatatggatagaaaagtttccttcagtttgcttttcaaatagtgcttgaataataaacctcctttgattggtgactagtcttttttggtatatctccacctttaaaaattgttcaagtttttaacctggttatactgtgttctaacatgtctctcattttctctcaaaattagtttatctcattgtagaaaaagcaatggttttcatagcttcatctatcaggaaataaaactcttactaaagaatagcatactgcatctttaagcagtagagggtaaactacctgcaaatgtgaatttcttagatacatttaaaaatatatagttgttaaccttctgtgtgccaaaaactcttaagttacattttccttcaaagcaatgtacttttttctacatatgcagtatgtagttagcataaaatcattggtgccatgaagattatttttaaacttaaataaatatttaaata

SEQ ID NO: 134023 - DNA, 1994 bp, Homo sapiens
  Payload ID: 6182
  Gene Symbol: FRMD5
  Gene Name: FERM domain containing 5
  ENST ID: ENST00000451277
  CDS Start-End: 199-849
gggctggggggaggcggtggcggctgagggaaggaggaggataaggaggaggaacgaggccagcaggaggcaacggcagcgacggggccggggtgatggtgcaggtgcctggggtcggtgcggagctgccgggctgagggacgcctggtccagggtccgcagcgccgccgcgtcgctcccgggcgggcgggcgggaagatgctgagcaggttgatgagcggcagcagcaggagcctggagcgcgagtacagctgcaccgtgcggctgctggacgacagcgagtacacctgcaccatccagagagatgccaaaggccagtacctgtttgaccttctttgccaccatctgaacctacttgagaaagactattttggtatccgctttgtagacccagataagcagcggcattggctggaatttacaaagtctgtggtgaaacaattgagatcccagcctccattcaccatgtgcttccgtgtgaagttttatcctgcagaccctgctgctctgaaagaagaaataaccaggtatttagtcttcctgcagatcaaaagggatctctaccatggccgactcctctgtaaaacatcggatgctgccttgttagcagcttacatccttcaagcggagattggggattatgactcagggaaacaccctgaaggctacagctccaagttccagtttttccctaaacattcagagaagctggaaaggaaaattgctgagattcacaagacggaactgaggacgtgtcaggaaatgctgcatttctggccttcactccttttgggtttgttgttcttcaaggaaacaagagggtccacttcattaaatggaatgaggtgaccaagctgaaatttgaaggaaagactttctatttatacgtaagtcagaaagaggaaaagaaaattattcttacatattttgctccaactcctgaagcgtgtaagcacctctggaaatgtggaatcgagaaccaagccttctacaagctggagaagtcaagccaagtccgcacagtgtccagcagcaatttattctttaaagggagccggttccgatacagtggccgagttgcaaaggaagtcatggaatcaagtgctaagatcaaacgggagccaccggaaatacacagagcagggatggttcccagccggagctgtccctccataacccatggcccaaggctgagcagcgtccccaggacccgcagaagagctgttcacatctccatcatggaaggcctagagtccttacgggacagtgcccattccacaccagtgcgttccacttcccatggggacaccttcctgcctcacgtgagaagcagccggacagatagcaatgagcgagtagctgtgattgcagacgaggcctacagccctgcagacagcgtgctgcccacccctgtggctgagcacagcctggagctgatgttgctttcccggcagatcaatggagccacctgcagcattgaggaggagaaggaatctgaagccagcaccccaactgctacagaggtggaggcccttgggggagagctgagggccctgtgtcaggggcacagcgggcccgaggaggaacaggcgatggtttgcctgcaaaatccgctcagtggtgagcctgctcattgacacctgagaaggcatgactcctcccaaaaactagccaggtggaccaaggaacccggctacccattcccagcaatgggacccatcgcggaaccatcggcacatataccaagtcctcctctcatgactcaaagtccactgcagcctaggagggtgtttcccagaagaagaaagggataggctcatgccctgtctaaacaaactgggaaaactcattttcttcagaagttatttcaagaaaggctcagcgactctgtttctcatctttccaatttgcaggataatttttggttttgaattttgatttttcatagatgtatattattttgaagtatcaaataaaaataatttattttacta

SEQ ID NO: 134024 - DNA, 2042 bp, Homo sapiens
  Payload ID: 6182
  Gene Symbol: FRMD5
  Gene Name: FERM domain containing 5
  ENST ID: ENST00000449926
  CDS Start-End: 1-1425
agagatgccaaaggccagtacctgtttgaccttctttgccaccatctgaacctacttgagaaagactattttggtatccgctttgtagacccagataagcagcggcattggctggaatttacaaagtctgtggtgaaacaattgagatcccagcctccattcaccatgtgcttccgtgtgaagttttatcctgcagaccctgctgctctgaaagaagaaataaccaggtatttagtcttcctgcagatcaaaagggatctctaccatggccgactcctctgtaaaacatcggatgctgccttgttagcagcttacatccttcaagcggagattggggattatgactcagggaaacaccctgaaggctacagctccaagttccagtttttccctaaacattcagagaagctggaaaggaaaattgctgagattcacaagacggaactgagtggtcaaacaccagcaacatcagagctgaacttcttaagaaaagcacagacattggaaacatatggagtggatcctcacccatgtaaggacgtgtcaggaaatgctgcatttctggccttcactccttttgggtttgttgttcttcaaggaaacaagagggtccacttcattaaatggaatgaggtgaccaagctgaaatttgaaggaaagactttctatttatacgtaagtcagaaagaggaaaagaaaattattcttacatattttgctccaactcctgaagcgtgtaagcacctctggaaatgtggaatcgagaaccaagccttctacaagctggagaagtcaagccaagtccgcacagtgtccagcagcaatttattctttaaagggagccggttccgatacagtggccgagttgcaaaggaagtcatggaatcaagtgctaagatcaaacgggagccaccggaaatacacagagcagggatggttcccagccggagctgtccctccataacccatggcccaaggctgagcagcgtccccaggacccgcagaagagctgttcacatctccatcatggaaggcctagagtccttacgggacagtgcccattccacaccagtgcgttccacttcccatggggacaccttcctgcctcacgtgagaagcagccggacagatagcaatgagcgagtagctgtgattgcagacgaggcctacagccctgcagacagcgtgctgcccacccctgtggctgagcacagcctggagctgatgttgctttcccggcagatcaatggagccacctgcagcattgaggaggagaaggaatctgaagccagcaccccaactgctacagaggtggaggcccttgggggagagctgagggccctgtgtcaggggcacagcgggcccgaggaggaacaggcgatggtttgcctgcaaaatccgctcagtggtgagcctgctcattgacacctgagaaggcatgactcctcccaaaaactagccaggtggaccaaggaacccggctacccattcccagcaatgggacccatcgcggaaccatcggcacatataccaagtcctcctctcatgactcaaagtccactgcagcctaggagggtgtttcccagaagaagaaagggataggctcatgccctgtctaaacaaactgggaaaactcattttcttcagaagttatttcaagaaaggctcagcgactctgtttctcatctttccaatttgcaggataatttttggttttgaattttgatttttcatagatgtatattattttgaagtatcaaataaaaataatttattttactattactgattattgcagtagtatcacctagcagaggggacactagttgaaaactagagagctgctgtcctctgtattctgcaggagcttttcctgctggtgccactgggttccagtagactcatcactgcagcctcagcagggcaggccagggatctggacaatggggactgtttagttttttgtttgttttttttgccagccagaacttttaaaaaagtaaacatccatgtagaatgattaaatggaaagttgcttctta

SEQ ID NO: 134025 - DNA, 2778 bp, Homo sapiens
  Payload ID: 6182
  Gene Symbol: FRMD5
  Gene Name: FERM domain containing 5
  ENST ID: ENST00000421674
  CDS Start-End: 140-511
ccagcaggaggcaacggcagcgacggggccggggtgatggtgcaggtgcctggggtcggtgcggagctgccgggctgagggacgcctggtccagggtccgcagcgccgccgcgtcgctcccgggcgggcgggcgggaagatgctgagcaggttgatgagcggcagcagcaggagcctggagcgcgagtacagctgcaccgtgcggctgctggacgacagcgagtacacctgcaccatccagagagatgccaaaggccagtacctgtttgaccttctttgccaccatctgaacctacttgagaaagactattttggtatccgctttgtagacccagataagcagcggcattggctggaatttacaaagtctgtggtgaaacaattgagatcccagcctccattcaccatgtgcttccgtgtgaagttttatcctgcagaccctgctgctctgaaagaagaaataaccagtgcagtcgcaacagagtggacttctttccttcaagaagtgtgaatactacctcttgaactggtcactctcaaagggctctggagtaactaatcagaagcgtcttttcttttacctatgatgttgccactgtggacatttttggagagagctatgttgctgcttatttcggaggttgcaaatagattcaagtggtctaatggatatacttggaaaatgccaaaggcataacactgaaagataagctgggagatactgaagatttaaaatcaaaatggataaactctgtggtgctgttggatcaggtatttagtcttcctgcagatcaaaagggatctctaccatggccgactcctctgtaaaacatcggatgctgccttgttagcagcttacatccttcaagcggagattggggattatgactcagggaaacaccctgaaggctacagctccaagttccagtttttccctaaacattcagagaagctggaaaggaaaattgctgagattcacaagacggaactgagtggtcaaacaccagcaacatcagagctgaacttcttaagaaaagcacagacattggaaacatatggagtggatcctcacccatgtaaggacgtgtcaggaaatgctgcatttctggccttcactccttttgggtttgttgttcttcaaggaaacaagagggtccacttcattaaatggaatgaggtgaccaagctgaaatttgaaggaaagactttctatttatacgtaagtcagaaagaggaaaagaaaattattcttacatattttgctccaactcctgaagcgtgtaagcacctctggaaatgtggaatcgagaaccaagccttctacaagctggagaagtcaagccaagtccgcacagtgtccagcagcaatttattctttaaagggagccggttccgatacaggtaaatagtgacatggccgagttgcaaaggaagtcatggaatcaagtgctaagatcaaacgggagccaccggaaatacacagagcagggatggttcccagccggagctgtccctccataacccatggcccaaggctgagcagcgtccccaggacccgcagaagagctgttcacatctccatcatggaaggcctagagtccttacgggacagtgcccattccacaccagtgcgttccacttcccatggggacaccttcctgcctcacgtgagaagcagccggacagatagcaatgagcgagtagctgtgattgcagacgaggcctacagccctgcagacagcgtgctgcccacccctgtggctgagcacagcctggagctgatgttgctttcccggcagatcaatggagccacctgcagcattgaggaggagaaggaatctgaagccagcaccccaactgctacagaggtggaggcccttgggggagagctgagggccctgtgtcaggggcacagcgggcccgaggaggaacaggtgaataagtttgttctaagtgtcctccgtttgctccttgtgaccatgggactcctctttgttttgctcctcctcctgatcatccttaccgagtctgaccttgacattgcctttttccgtgatatccgccagacccccgagtttgaacaattccactatcaatacttttgtcccctcaggcgatggtttgcctgcaaaatccgctcagtggtgagcctgctcattgacacctgagaaggcatgactcctcccaaaaactagccaggtggaccaaggaacccggctacccattcccagcaatgggacccatcgcggaaccatcggcacatataccaagtcctcctctcatgactcaaagtccactgcagcctaggagggtgtttcccagaagaagaaagggataggctcatgccctgtctaaacaaactgggaaaactcattttcttcagaagttatttcaagaaaggctcagcgactctgtttctcatctttccaatttgcaggataatttttggttttgaattttgatttttcatagatgtatattattttgaagtatcaaataaaaataatttattttactattactgattattgcagtagtatcacctagcagaggggacactagttgaaaactagagagctgctgtcctctgtattctgcaggagcttttcctgctggtgccactgggttccagtagactcatcactgcagcctcagcagggcaggccagggatctggacaatggggactgtttagttttttgtttgttttttttgccagccagaacttttaaaaaagtaaacatccatgtagaatgattaaatggaaagttgcttctta

SEQ ID NO: 134026 - DNA, 5011 bp, Homo sapiens
  Payload ID: 6182
  Gene Symbol: FRMD5
  Gene Name: FERM domain containing 5
  Uniprot ID: Q7Z6J6
  ENST ID: ENST00000417257
  CDS Start-End: 178-1890
ggctgagggaaggaggaggataaggaggaggaacgaggccagcaggaggcaacggcagcgacggggccggggtgatggtgcaggtgcctggggtcggtgcggagctgccgggctgagggacgcctggtccagggtccgcagcgccgccgcgtcgctcccgggcgggcgggcgggaagatgctgagcaggttgatgagcggcagcagcaggagcctggagcgcgagtacagctgcaccgtgcggctgctggacgacagcgagtacacctgcaccatccagagagatgccaaaggccagtacctgtttgaccttctttgccaccatctgaacctacttgagaaagactattttggtatccgctttgtagacccagataagcagcggcattggctggaatttacaaagtctgtggtgaaacaattgagatcccagcctccattcaccatgtgcttccgtgtgaagttttatcctgcagaccctgctgctctgaaagaagaaataaccaggtatttagtcttcctgcagatcaaaagggatctctaccatggccgactcctctgtaaaacatcggatgctgccttgttagcagcttacatccttcaagcggagattggggattatgactcagggaaacaccctgaaggctacagctccaagttccagtttttccctaaacattcagagaagctggaaaggaaaattgctgagattcacaagacggaactgagtggtcaaacaccagcaacatcagagctgaacttcttaagaaaagcacagacattggaaacatatggagtggatcctcacccatgtaaggacgtgtcaggaaatgctgcatttctggccttcactccttttgggtttgttgttcttcaaggaaacaagagggtccacttcattaaatggaatgaggtgaccaagctgaaatttgaaggaaagactttctatttatacgtaagtcagaaagaggaaaagaaaattattcttacatattttgctccaactcctgaagcgtgtaagcacctctggaaatgtggaatcgagaaccaagccttctacaagctggagaagtcaagccaagtccgcacagtgtccagcagcaatttattctttaaagggagccggttccgatacagtggccgagttgcaaaggaagtcatggaatcaagtgctaagatcaaacgggagccaccggaaatacacagagcagggatggttcccagccggagctgtccctccataacccatggcccaaggctgagcagcgtccccaggacccgcagaagagctgttcacatctccatcatggaaggcctagagtccttacgggacagtgcccattccacaccagtgcgttccacttcccatggggacaccttcctgcctcacgtgagaagcagccggacagatagcaatgagcgagtagctgtgattgcagacgaggcctacagccctgcagacagcgtgctgcccacccctgtggctgagcacagcctggagctgatgttgctttcccggcagatcaatggagccacctgcagcattgaggaggagaaggaatctgaagccagcaccccaactgctacagaggtggaggcccttgggggagagctgagggccctgtgtcaggggcacagcgggcccgaggaggaacaggtgaataagtttgttctaagtgtcctccgtttgctccttgtgaccatgggactcctctttgttttgctcctcctcctgatcatccttaccgagtctgaccttgacattgcctttttccgtgatatccgccagacccccgagtttgaacaattccactatcaatacttttgtcccctcaggcgatggtttgcctgcaaaatccgctcagtggtgagcctgctcattgacacctgagaaggcatgactcctcccaaaaactagccaggtggaccaaggaacccggctacccattcccagcaatgggacccatcgcggaaccatcggcacatataccaagtcctcctctcatgactcaaagtccactgcagcctaggagggtgtttcccagaagaagaaagggataggctcatgccctgtctaaacaaactgggaaaactcattttcttcagaagttatttcaagaaaggctcagcgactctgtttctcatctttccaatttgcaggataatttttggttttgaattttgatttttcatagatgtatattattttgaagtatcaaataaaaataatttattttactattactgattattgcagtagtatcacctagcagaggggacactagttgaaaactagagagctgctgtcctctgtattctgcaggagcttttcctgctggtgccactgggttccagtagactcatcactgcagcctcagcagggcaggccagggatctggacaatggggactgtttagttttttgtttgttttttttgccagccagaacttttaaaaaagtaaacatccatgtagaatgattaaatggaaagttgcttcttatgatggtctgagttggattttcttttccttttgttttttcaaatctgagcagagtgggcatctgaagggaccaccgctacagcaacagcagcatcaggggtggggtaagtctgtccccttagtctagagcctagtgggcatcaccatagttttgtataatgaaactagacttaacgtgattttttttttccgaagaacctcaagacttttatagtgctccaggggcgttaaacgaattcagtggtaccagagatagatagttctgtcagaaatgttggacaaagtgtagttaagagaaagcagagttaagttacctgagagactgttgagatttggatagcagtgcttattttatatacacccccttgacccaaagactatttcaatttatattttaacaacgaaatgttattttcttaacaattcatattttgtttttactttatggattaagaaaatagagcctgatgaactaaacgatgcaagaaagaaactgatcctgagaatgaaaagcttcagaaaatagaattccaagatcaacagccttagaagggaccaggaaaagaatcttttaaaatagatttctaagagatgcctacaaaacacagaatgtgaccgtggcagagaccaacacttagatgtagaaatgctgccccctagggtcatcctctgcataagttctaggaaagcatcaccatccttgcagagggaagtcctcgaagcacgcagcacaggcatatgaagggcgagtgtgggatcctaggcccaagctcttcaactctaaaaccaatcacacacaagatcctgttttcatctcagggagagatttctaagtcatctggggcttgagggcttatttaagggtggtcaatggacatattcctggacccacacaaaagtagagcagctgctgataccctaattggacagccccaaacgcagaacagaacaagtcacttgtagacttgacctcccctattttgtcccccgagatggtagaaccatgtccatgtttacaatatgacaactgtggaataattggggttcttagggagagatttgcataattttaaagacatcctttcatctggaccagaggtcaatcaacttatgtcaagtgctacacagtaaatattttggtttagcacgccatactgtgtcacaactgctcaattctgccatcacagcacaaaaacagccacagataatttgtaaatgaaggaacatggctgtgttccaataaaactttatgaaaacagtgagctgaatttagcctacaggccataatacgccaatcctgctctagacaataaaactgatccttaccagtatgttagcagaagagggtcagtcagctctgtttccatgcctgacatgtatcaaagatctgggacctcttcccagtggaggcactagggttgcttgtttaaagggtgcttgaacaactaaccagcaaagagatgtctgatgccaaatgggcaagatcaaatactggaatgctaaaacacagctggaatctaagaagggaagagggcttctctgaccattttcataccagcaacaatttaggcagaattataaacatctatttatcgagtgacaatacaaaccgaaggagatcctagtagagattaggggtcagttaaaatcaactagccactgccacttgtcatctacatagcaaaggctttatttagcacaggactaacgtgaaaagtagacccagagatgaaaaggctgtcaggagacagggggctggtgtccacctggtatctactgtcttatgcaacatagaagattaccttttagtgtagtgctcctacctcagtttgtagaatctggtgtttctatgcagtgagtgatagcctcaactctgacctttcatattcacattagagacagatgcagtattccatatcctagtatgttccttgtgtctagagttctaacagtacagtagtctatgccatttctaacagctaaattttgctctgtaaacagaaactttagggttgtttttttccagggctcatcccagaaaatatggatagaaaagtttccttcagtttgcttttcaaatagtgcttgaataataaacctcctttgattggtgactagtcttttttggtatatctccacctttaaaaattgttcaagtttttaacctggttatactgtgttctaacatgtctctcattttctctcaaaattagtttatctcattgtagaaaaagcaatggttttcatagcttcatctatcaggaaataaaactcttactaaagaatagcatactgcatctttaagcagtagagggtaaactacctgcaaatgtgaatttcttagatacatttaaaaatatatagttgttaaccttctgtgtgccaaaaactcttaagttacattttccttcaaagcaatgtacttttttctacatatgcagtatgtagttagcataaaatcattggtgccatgaagattatttttaaacttaaataaatatttaaatatca

SEQ ID NO: 134027 - DNA, 2628 bp, Homo sapiens
  Payload ID: 6182
  Gene Symbol: FRMD5
  Gene Name: FERM domain containing 5
  ENST ID: ENST00000458630
  CDS Start-End: 1-358
gatgagcggcagcagcaggagcctggagcgcgagtacagctgcaccgtgcggctgctggacgacagcgagtacacctgcaccatccagagagatgccaaaggccagtacctgtttgaccttctttgccaccatctgaacctacttgagaaagactattttggtatccgctttgtagacccagataagcagcggcattggctggaatttacaaagtctgtggtgaaacaattgagatcccagcctccattcaccatgtgcttccgtgtgaagttttatcctgcagaccctgctgctctgaaagaagaaataaccagtgcagtcgcaacagagtggacttctttccttcaagaagtgtgaatactacctcttgaactggtcactctcaaagggctctggagtaactaatcagaagcgtcttttcttttacctatgatgttgccactgtggacatttttggagagagctatgttgctgcttatttcggaggttgcaaatagattcaagtggtctaatggatatacttggaaaatgccaaaggcataacactgaaagataagctgggagatactgaagatttaaaatcaaaatggataaactctgtggtgctgttggatcaggcatagaagccccaggctctgctcatctatgtggaagtggaggtggctcttgctttgcttcagaaaaccaaatccatccaaatcatagacaccctaaggctttaggtatttagtcttcctgcagatcaaaagggatctctaccatggccgactcctctgtaaaacatcggatgctgccttgttagcagcttacatccttcaagcggagattggggattatgactcagggaaacaccctgaaggctacagctccaagttccagtttttccctaaacattcagagaagctggaaaggaaaattgctgagattcacaagacggaactgagtggtcaaacaccagcaacatcagagctgaacttcttaagaaaagcacagacattggaaacatatggagtggatcctcacccatgtaaggaatgaggtgaccaagctgaaatttgaaggaaagactttctatttatacgtaagtcagaaagaggaaaagaaaattattcttacatattttgctccaactcctgaagcgtgtaagcacctctggaaatgtggaatcgagaaccaagccttctacaagctggagaagtcaagccaagtccgcacagtgtccagcagcaatttattctttaaagggagccggttccgatacagtggccgagttgcaaaggaagtcatggaatcaagtgctaagatcaaacgggagccaccggaaatacacagagcagggatggttcccagccggagctgtccctccataacccatggcccaaggctgagcagcgtccccaggacccgcagaagagctgttcacatctccatcatggaaggcctagagtccttacgggacagtgcccattccacaccagtgcgttccacttcccatggggacaccttcctgcctcacgtgagaagcagccggacagatagcaatgagcgagtagctgtgattgcagacgaggcctacagccctgcagacagcgtgctgcccacccctgtggctgagcacagcctggagctgatgttgctttcccggcagatcaatggagccacctgcagcattgaggaggagaaggaatctgaagccagcaccccaactgctacagaggtggaggcccttgggggagagctgagggccctgtgtcaggggcacagcgggcccgaggaggaacaggtgaataagtttgttctaagtgtcctccgtttgctccttgtgaccatgggactcctctttgttttgctcctcctcctgatcatccttaccgagtctgaccttgacattgcctttttccgtgatatccgccagacccccgagtttgaacaattccactatcaatacttttgtcccctcaggcgatggtttgcctgcaaaatccgctcagtggtgagcctgctcattgacacctgagaaggcatgactcctcccaaaaactagccaggtggaccaaggaacccggctacccattcccagcaatgggacccatcgcggaaccatcggcacatataccaagtcctcctctcatgactcaaagtccactgcagcctaggagggtgtttcccagaagaagaaagggataggctcatgccctgtctaaacaaactgggaaaactcattttcttcagaagttatttcaagaaaggctcagcgactctgtttctcatctttccaatttgcaggataatttttggttttgaattttgatttttcatagatgtatattattttgaagtatcaaataaaaataatttattttactattactgattattgcagtagtatcacctagcagaggggacactagttgaaaactagagagctgctgtcctctgtattctgcaggagcttttcctgctggtgccactgggttccagtagactcatcactgcagcctcagcagggcaggccagggatctggacaatggggactgtttagttttttgtttgttttttttgccagccagaacttttaaaaaagtaaacatccatgtagaatgattaaatggaaagttgcttctta

SEQ ID NO: 134028 - DNA, 2319 bp, Homo sapiens
  Payload ID: 6182
  Gene Symbol: FRMD5
  Gene Name: FERM domain containing 5
  ENST ID: ENST00000484674
  CDS Start-End: 458-1702
agaactgaacgcgcagcccatgcggagtggcctattgaaggaagcccagtcctctgggttttagagatttaggccccctcccgccttttgatccccaaattttattgtgttgggcggttctaggggacgtgaggtaaagatttagcaacaagtcccagcgatttggggcttggaagtggccaggaagaatcggcgacttaggaaaaacgccaacaatacggagtttcagaatcatctgtaagaggcctggaatccagaggcacccaagggaattagcaacaagaaatacataagagatgccaaaggccagtacctgtttgaccttctttgccaccatctgaacctacttgagaaagactattttggtatccgctttgtagacccagataagcagcggcattggctggaatttacaaagtctgtggtgaaacaattgagatcccagcctccattcaccatgtgcttccgtgtgaagttttatcctgcagaccctgctgctctgaaagaagaaataaccaggtatttagtcttcctgcagatcaaaagggatctctaccatggccgactcctctgtaaaacatcggatgctgccttgttagcagcttacatccttcaagcggagattggggattatgactcagggaaacaccctgaaggctacagctccaagttccagtttttccctaaacattcagagaagctggaaaggaaaattgctgagattcacaagacggaactgagtggtcaaacaccagcaacatcagagctgaacttcttaagaaaagcacagacattggaaacatatggagtggatcctcacccatgtaaggacgtgtcaggaaatgctgcatttctggccttcactccttttgggtttgttgttcttcaaggaaacaagagggtccacttcattaaatggaatgaggtgaccaagctgaaatttgaaggaaagactttctatttatacgaaaagaaaattattcttacatattttgctccaactcctgaagcgtgtaagcacctctggaaatgtggaatcgagaaccaagccttctacaagctggagaagtcaagccaagtccgcacagtgtccagcagcaatttattctttaaagggagccggttccgatacagtggccgagttgcaaaggaagtcatggaatcaagtgctaagatcaaacgggagccaccggaaatacacagagcagggatggttcccagccggagctgtccctccataacccatggcccaaggctgagcagcgtccccaggacccgcagaagagctgttcacatctccatcatggaaggcctagagtccttacgggacagtgcccattccacaccagtgcgttccacttcccatggggacaccttcctgcctcacgtgagaagcagccggacagatagcaatgagcgagtagctgtgattgcagacgaggcctacagccctgcagacagcgtgctgcccacccctgtggctgagcacagcctggagctgatgttgctttcccggcagatcaatggagccacctgcagcattgaggaggagaaggaatctgaagccagcaccccaactgctacagaggtggaggcccttgggggagagctgagggccctgtgtcaggggcacagcgggcccgaggaggaacaggcgatggtttgcctgcaaaatccgctcagtggtgagcctgctcattgacacctgagaaggcatgactcctcccaaaaactagccaggtggaccaaggaacccggctacccattcccagcaatgggacccatcgcggaaccatcggcacatataccaagtcctcctctcatgactcaaagtccactgcagcctaggagggtgtttcccagaagaagaaagggataggctcatgccctgtctaaacaaactgggaaaactcattttcttcagaagttatttcaagaaaggctcagcgactctgtttctcatctttccaatttgcaggataatttttggttttgaattttgatttttcatagatgtatattattttgaagtatcaaataaaaataatttattttactattactgattattgcagtagtatcacctagcagaggggacactagttgaaaactagagagctgctgtcctctgtattctgcaggagcttttcctgctggtgccactgggttccagtagactcatcactgcagcctcagcagggcaggccagggatctggacaatggggactgtttagttttttgtttgttttttttgccagccagaacttttaaaaaagtaaacatccatgtagaatgattaaatggaaagttgcttctta

SEQ ID NO: 134029 - DNA, 702 bp, Homo sapiens
  Payload ID: 6182
  Gene Symbol: FRMD5
  Gene Name: FERM domain containing 5
  ENST ID: ENST00000558108
  CDS Start-End: 1-537
ttttatcctgcagaccctgctgctctgaaagaagaaataaccaggtatttagtcttcctgcagatcaaaagggatctctaccatggccgactcctctgtaaaacatcggatgctgccttgttagcagcttacatccttcaagcggagattggggattatgactcagggaaacaccctgaaggctacagctccaagttccagtttttccctaaacattcagagaagctggaaaggaaaattgctgagattcacaagacggaactgagtggtcaaacaccagcaacatcagagctgaacttcttaagaaaagcacagacattggaaacatatggagtggatcctcacccatgtaaggacgtgtcaggaaatgctgcatttctggccttcactccttttgggtttgttgttcttcaaggaaacaagagggtccacttcattaaatggaatgaggtgaccaagctgaaatttgaaggaaagactttctatttatacgtaagtcagaaagagaagaaagggataggctcatgccctgtctaaacaaactgggaaaactcattttcttcagaagttatttcaagaaaggctcagcgactctgtttctcatctttccaatttgcaggataatttttggttttgaattttgatttttcatagatgtatattattttgaagtatcaaataaaaataatttattttactatt

SEQ ID NO: 134030 - DNA, 5059 bp, Homo sapiens
  Payload ID: 6182
  Gene Symbol: FRMD5
  Gene Name: FERM domain containing 5
  ENST ID: ENST00000618556
  CDS Start-End: 925-1935
tgcagagagatgccaaaggccagtacctgtttgaccttctttgccaccatctgaacctacttgagaaagactattttggtatccgctttgtagacccagataagcagcggcattggctggaatttacaaagtctgtggtgaaacaattgagatcccagcctccattcaccatgtgcttccgtgtgaagttttatcctgcagaccctgctgctctgaaagaagaaataaccagtgcagtcgcaacagagtggacttctttccttcaagaagtgtgaatactacctcttgaactggtcactctcaaagggctctggagtaactaatcagaagcgtcttttcttttacctatgatgttgccactgtggacatttttggagagagctatgttgctgcttatttcggaggttgcaaatagattcaagtggtctaatggatatacttggaaaatgccaaaggcataacactgaaagataagctgggagatactgaagatttaaaatcaaaatggataaactctgtggtgctgttggatcaggcatagaagccccaggctctgctcatctatgtggaagtggaggtggctcttgctttgcttcagaaaaccaaatccatccaaatcatagacaccctaaggctttaggtatttagtcttcctgcagatcaaaagggatctctaccatggccgactcctctgtaaaacatcggatgctgccttgttagcagcttacatccttcaagcggagattggggattatgactcagggaaacaccctgaaggctacagctccaagttccagtttttccctaaacattcagagaagctggaaaggaaaattgctgagattcacaagacggaactgagtggtcaaacaccagcaacatcagagctgaacttcttaagaaaagcacagacattggaaacatatggagtggatcctcacccatgtaaggaatgaggtgaccaagctgaaatttgaaggaaagactttctatttatacgtaagtcagaaagaggaaaagaaaattattcttacatattttgctccaactcctgaagcgtgtaagcacctctggaaatgtggaatcgagaaccaagccttctacaagctggagaagtcaagccaagtccgcacagtgtccagcagcaatttattctttaaagggagccggttccgatacagtggccgagttgcaaaggaagtcatggaatcaagtgctaagatcaaacgggagccaccggaaatacacagagcagggatggttcccagccggagctgtccctccataacccatggcccaaggctgagcagcgtccccaggacccgcagaagagctgttcacatctccatcatggaaggcctagagtccttacgggacagtgcccattccacaccagtgcgttccacttcccatggggacaccttcctgcctcacgtgagaagcagccggacagatagcaatgagcgagtagctgtgattgcagacgaggcctacagccctgcagacagcgtgctgcccacccctgtggctgagcacagcctggagctgatgttgctttcccggcagatcaatggagccacctgcagcattgaggaggagaaggaatctgaagccagcaccccaactgctacagaggtggaggcccttgggggagagctgagggccctgtgtcaggggcacagcgggcccgaggaggaacaggtgaataagtttgttctaagtgtcctccgtttgctccttgtgaccatgggactcctctttgttttgctcctcctcctgatcatccttaccgagtctgaccttgacattgcctttttccgtgatatccgccagacccccgagtttgaacaattccactatcaatacttttgtcccctcaggcgatggtttgcctgcaaaatccgctcagtggtgagcctgctcattgacacctgagaaggcatgactcctcccaaaaactagccaggtggaccaaggaacccggctacccattcccagcaatgggacccatcgcggaaccatcggcacatataccaagtcctcctctcatgactcaaagtccactgcagcctaggagggtgtttcccagaagaagaaagggataggctcatgccctgtctaaacaaactgggaaaactcattttcttcagaagttatttcaagaaaggctcagcgactctgtttctcatctttccaatttgcaggataatttttggttttgaattttgatttttcatagatgtatattattttgaagtatcaaataaaaataatttattttactattactgattattgcagtagtatcacctagcagaggggacactagttgaaaactagagagctgctgtcctctgtattctgcaggagcttttcctgctggtgccactgggttccagtagactcatcactgcagcctcagcagggcaggccagggatctggacaatggggactgtttagttttttgtttgttttttttgccagccagaacttttaaaaaagtaaacatccatgtagaatgattaaatggaaagttgcttcttatgatggtctgagttggattttcttttccttttgttttttcaaatctgagcagagtgggcatctgaagggaccaccgctacagcaacagcagcatcaggggtggggtaagtctgtccccttagtctagagcctagtgggcatcaccatagttttgtataatgaaactagacttaacgtgattttttttttccgaagaacctcaagacttttatagtgctccaggggcgttaaacgaattcagtggtaccagagatagatagttctgtcagaaatgttggacaaagtgtagttaagagaaagcagagttaagttacctgagagactgttgagatttggatagcagtgcttattttatatacacccccttgacccaaagactatttcaatttatattttaacaacgaaatgttattttcttaacaattcatattttgtttttactttatggattaagaaaatagagcctgatgaactaaacgatgcaagaaagaaactgatcctgagaatgaaaagcttcagaaaatagaattccaagatcaacagccttagaagggaccaggaaaagaatcttttaaaatagatttctaagagatgcctacaaaacacagaatgtgaccgtggcagagaccaacacttagatgtagaaatgctgccccctagggtcatcctctgcataagttctaggaaagcatcaccatccttgcagagggaagtcctcgaagcacgcagcacaggcatatgaagggcgagtgtgggatcctaggcccaagctcttcaactctaaaaccaatcacacacaagatcctgttttcatctcagggagagatttctaagtcatctggggcttgagggcttatttaagggtggtcaatggacatattcctggacccacacaaaagtagagcagctgctgataccctaattggacagccccaaacgcagaacagaacaagtcacttgtagacttgacctcccctattttgtcccccgagatggtagaaccatgtccatgtttacaatatgacaactgtggaataattggggttcttagggagagatttgcataattttaaagacatcctttcatctggaccagaggtcaatcaacttatgtcaagtgctacacagtaaatattttggtttagcacgccatactgtgtcacaactgctcaattctgccatcacagcacaaaaacagccacagataatttgtaaatgaaggaacatggctgtgttccaataaaactttatgaaaacagtgagctgaatttagcctacaggccataatacgccaatcctgctctagacaataaaactgatccttaccagtatgttagcagaagagggtcagtcagctctgtttccatgcctgacatgtatcaaagatctgggacctcttcccagtggaggcactagggttgcttgtttaaagggtgcttgaacaactaaccagcaaagagatgtctgatgccaaatgggcaagatcaaatactggaatgctaaaacacagctggaatctaagaagggaagagggcttctctgaccattttcataccagcaacaatttaggcagaattataaacatctatttatcgagtgacaatacaaaccgaaggagatcctagtagagattaggggtcagttaaaatcaactagccactgccacttgtcatctacatagcaaaggctttatttagcacaggactaacgtgaaaagtagacccagagatgaaaaggctgtcaggagacagggggctggtgtccacctggtatctactgtcttatgcaacatagaagattaccttttagtgtagtgctcctacctcagtttgtagaatctggtgtttctatgcagtgagtgatagcctcaactctgacctttcatattcacattagagacagatgcagtattccatatcctagtatgttccttgtgtctagagttctaacagtacagtagtctatgccatttctaacagctaaattttgctctgtaaacagaaactttagggttgtttttttccagggctcatcccagaaaatatggatagaaaagtttccttcagtttgcttttcaaatagtgcttgaataataaacctcctttgattggtgactagtcttttttggtatatctccacctttaaaaattgttcaagtttttaacctggttatactgtgttctaacatgtctctcattttctctcaaaattagtttatctcattgtagaaaaagcaatggttttcatagcttcatctatcaggaaataaaactcttactaaagaatagcatactgcatctttaagcagtagagggtaaactacctgcaaatgtgaatttcttagatacatttaaaaatatatagttgttaaccttctgtgtgccaaaaactcttaagttacattttccttcaaagcaatgtacttttttctacatatgcagtatgtagttagcataaaatcattggtgccatgaagattatttttaaacttaaataaatatttaaatatcatgg

SEQ ID NO: 134031 - DNA, 2972 bp, Homo sapiens
  Payload ID: 6183
  Gene Symbol: FRMD6
  Gene Name: FERM domain containing 6
  Uniprot ID: Q96NE9
  ENST ID: ENST00000344768
  CDS Start-End: 197-2065
agaggggtgaccagagagcccaacgcctggtgctcaagactttctccgagctatgaaacccacgtagtcgaacaccgtgatgcttctcctgcagggcgtgtgatgaggaggcgagcttggctttggagtgctgggaacctgaggaattgccaaggacccagagcccagccctgaccaccagagtgcccaaaacacaatgaacaaattgaattttcataacaacagagtcatgcaagaccgccgcagtgtgtgcattttccttcccaacgatgaatctctgaacatcatcataaatgttaagattctgtgtcaccagttgctggtccaggtttgtgacctgctcaggctaaaggactgccacctctttggactcagtgttatacaaaataatgaacatgtgtatatggagttgtcacaaaagctttacaaatattgtccaaaagaatggaagaaagaggccagcaaggtacgacaatacgaagtcacttggggtatcgaccaatttgggcctcctatgatcatccacttccgtgtgcagtactatgtggaaaatggcagattgatcagtgacagagcagcaagatactattattactggcacctgagaaaacaagttcttcattctcagtgtgtgctccgagaggaggcctacttcctgctggcagcctttgccctgcaggctgatcttgggaacttcaaaaggaataagcactatggaaaatacttcgagccagaggcttacttcccatcttgggttgtttccaagagggggaaggactacatcctgaagcacattccaaacatgcacaaagatcagtttgcactaacagcttccgaagctcatcttaaatatatcaaagaggctgtccgactggatgacgtcgctgttcattactacagattgtataaggataaaagggaaattgaagcatcgctgactcttggattgaccatgaggggaatacagatttttcagaatttagatgaagagaaacaattactttatgatttcccctggacaaatgttggaaaattggtgtttgtgggtaagaaatttgagattttgccagatggcttgccttctgcccggaagctcatatactacacggggtgccccatgcgctccagacacctcctgcaacttctgagcaacagccaccgcctctatatgaatctgcagcctgtcctgcgccatatccggaagctggaggaaaacgaagagaagaagcagtaccgggaatcttacatcagtgacaacctggacctcgacatggaccagctggaaaaacggtcgcgggccagcgggagcagtgcgggcagcatgaaacacaagcgcctgtcccgtcattccaccgccagccacagcagttcccacacctcgggcattgaggcagacaccaagccccgggacacggggccagaagacagctactccagcagtgccatccaccgcaagctgaaaacctgcagctcaatgaccagtcatggcagctcccacacctcaggggtggagagtggcggcaaagaccggctggaagaggacttacaggacgatgaaatagagatgttggttgatgacccccgggatctggagcagatgaatgaagagtctctggaagtcagcccagacatgtgcatctacatcacagaggacatgctcatgtcgcggaagctgaatggacactctgggttgattgtgaaagaaattgggtcttccacctcgagctcttcagaaacagttgttaagcttcgtggccagagtactgattctcttccacagactatatgtcggaaaccaaagacctccactgatcgacacagcttgagcctcgatgacatcagactttaccagaaagacttcctgcgcattgcaggtctgtgtcaggacactgctcagagttacacctttggatgtggccatgaactggatgaggaaggcctctattgcaacagttgcttggcccagcagtgcatcaacatccaagatgcttttccagtcaaaagaaccagcaaatacttttctctggatctcactcatgatgaagttccagagtttgttgtgtaaagtccgtctgtgtgcagctgtacaggcagcttactgtttgctagaggatgcgaaagtcataagttctttacatattacttgtgccatatcttcttcaccctaaacatagctctttctttataatatttgtgatgatggaaacaaaagccttggaacaattgcactttaagtattacacagaagtaaaagaactacagaaaatgtacagcaagacaagtgcccggaagttcactgatccttcagaaggaaatgcgctttactgattgcaaagccttcagaatattggagtgtggtgtgtttgctcatctgatgctttttagttcagttacatgtaacatcacatttttttatcacgtgaaagatgttagatttgtttgcttataaattttttaccactcccacataaaatgctcatagtttgggagaggaaagagggaagattctctcttcttttaacagagagatgattgctctgtatacccattgcttcctccctgaggctgtcccaaagtgaacactgatggagtggtcaaaatcataaggttgtagcaagccaaagatacgtatgtgacagaagcacataagcaataagcagaaaaccagaagtgcatgctgtgatgcctgtgactccttcatcccgctcagtgccatgtcctcttttgtgatcttccagaaagctccaggattcatttgagttccacatccaagtaacagatgaattatattcatgttgtaatgcattttgtggagtttacaaaaccagtgtctgttaaaactttggaaaatgtcttagaaaacgttggtgcttggtgatgctttatttgtttaattatcaagaacaaattatggcaatgctagtttctgcttaaccaaaatactctgtgtatatattatacatatataaata

SEQ ID NO: 134032 - DNA, 4768 bp, Homo sapiens
  Payload ID: 6183
  Gene Symbol: FRMD6
  Gene Name: FERM domain containing 6
  Uniprot ID: Q96NE9
  ENST ID: ENST00000356218
  CDS Start-End: 494-2338
cttgaaggaagggtgttgggtgaactaacactattttctcctgccctttcccccaatctcaatccctttctctccaaacattcttccttgagcaccccactctggcactcaaaaagccatgggaatgggaaagaagtggctggaagtaaacagcctgcttactcacagcaactgaaaattttgtttcgacgattctggttccaggggcaggagctgaagattaatgcctggagtctgccccattctgagagcagcagcctggctcctggtggctccagcagcagccttcatatctgtttttttcttatgaagcttcttctggttggaaacttgtcaaatttcatcagctatgaaacccacgtagtcgaacaccgtgatgcttctcctgcagggcgtgtgatgaggaggcgagcttggctttggagtgctgggaacctgaggaattgccaaggacccagagcccagccctgaccaccagagtgcccaaaacacaatgaacaaattgaattttcataacaacagagtcatgcaagaccgccgcagtgtgtgcattttccttcccaacgatgaatctctgaacatcatcataaatgttaagattctgtgtcaccagttgctggtccaggtttgtgacctgctcaggctaaaggactgccacctctttggactcagtgttatacaaaataatgaacatgtgtatatggagttgtcacaaaagctttacaaatattgtccaaaagaatggaagaaagaggccagcaagggtatcgaccaatttgggcctcctatgatcatccacttccgtgtgcagtactatgtggaaaatggcagattgatcagtgacagagcagcaagatactattattactggcacctgagaaaacaagttcttcattctcagtgtgtgctccgagaggaggcctacttcctgctggcagcctttgccctgcaggctgatcttgggaacttcaaaaggaataagcactatggaaaatacttcgagccagaggcttacttcccatcttgggttgtttccaagagggggaaggactacatcctgaagcacattccaaacatgcacaaagatcagtttgcactaacagcttccgaagctcatcttaaatatatcaaagaggctgtccgactggatgacgtcgctgttcattactacagattgtataaggataaaagggaaattgaagcatcgctgactcttggattgaccatgaggggaatacagatttttcagaatttagatgaagagaaacaattactttatgatttcccctggacaaatgttggaaaattggtgtttgtgggtaagaaatttgagattttgccagatggcttgccttctgcccggaagctcatatactacacggggtgccccatgcgctccagacacctcctgcaacttctgagcaacagccaccgcctctatatgaatctgcagcctgtcctgcgccatatccggaagctggaggaaaacgaagagaagaagcagtaccgggaatcttacatcagtgacaacctggacctcgacatggaccagctggaaaaacggtcgcgggccagcgggagcagtgcgggcagcatgaaacacaagcgcctgtcccgtcattccaccgccagccacagcagttcccacacctcgggcattgaggcagacaccaagccccgggacacggggccagaagacagctactccagcagtgccatccaccgcaagctgaaaacctgcagctcaatgaccagtcatggcagctcccacacctcaggggtggagagtggcggcaaagaccggctggaagaggacttacaggacgatgaaatagagatgttggttgatgacccccgggatctggagcagatgaatgaagagtctctggaagtcagcccagacatgtgcatctacatcacagaggacatgctcatgtcgcggaagctgaatggacactctgggttgattgtgaaagaaattgggtcttccacctcgagctcttcagaaacagttgttaagcttcgtggccagagtactgattctcttccacagactatatgtcggaaaccaaagacctccactgatcgacacagcttgagcctcgatgacatcagactttaccagaaagacttcctgcgcattgcaggtctgtgtcaggacactgctcagagttacacctttggatgtggccatgaactggatgaggaaggcctctattgcaacagttgcttggcccagcagtgcatcaacatccaagatgcttttccagtcaaaagaaccagcaaatacttttctctggatctcactcatgatgaagttccagagtttgttgtgtaaagtccgtctgtgtgcagctgtacaggcagcttactgtttgctagaggatgcgaaagtcataagttctttacatattacttgtgccatatcttcttcaccctaaacatagctctttctttataatatttgtgatgatggaaacaaaagccttggaacaattgcactttaagtattacacagaagtaaaagaactacagaaaatgtacagcaagacaagtgcccggaagttcactgatccttcagaaggaaatgcgctttactgattgcaaagccttcagaatattggagtgtggtgtgtttgctcatctgatgctttttagttcagttacatgtaacatcacatttttttatcacgtgaaagatgttagatttgtttgcttataaattttttaccactcccacataaaatgctcatagtttgggagaggaaagagggaagattctctcttcttttaacagagagatgattgctctgtatacccattgcttcctccctgaggctgtcccaaagtgaacactgatggagtggtcaaaatcataaggttgtagcaagccaaagatacgtatgtgacagaagcacataagcaataagcagaaaaccagaagtgcatgctgtgatgcctgtgactccttcatcccgctcagtgccatgtcctcttttgtgatcttccagaaagctccaggattcatttgagttccacatccaagtaacagatgaattatattcatgttgtaatgcattttgtggagtttacaaaaccagtgtctgttaaaactttggaaaatgtcttagaaaacgttggtgcttggtgatgctttatttgtttaattatcaagaacaaattatggcaatgctagtttctgcttaaccaaaatactctgtgtatatattatacatatataaatacatgggattgtgtatgtctatatgtgtttaaagcttactatgtcttcattttggcttccatgactatcttttatacatggaattccttaagattgagaatatgtcactgagtgaatgatacctgcagacagtcagttgatatatgtagagttcagaatgactgttttctcatgtgcctttggccatgattctcaacactgattgtataacagaattttggggggagcttttaaaaaataatgactgagtctcccaccagaccgattacatcattctcttgtggcgggacccaagtagaattgccttttcttttaaagttctccagatggagctaatatgcaacaaagttgaaaaccactgatcctgggggtgtcttgttaattttgaagtaaaagtgtacagaagacgtagtgtatgagaaagggccatttttaagacagttacctgttgtgctgctgttacaatatataatgaaaccaagtcaggggagtgaatttatcaatcttttgatgtaaagtaaaaacgtagttcacacttcaggagagaacttcatagcacaatgtctttctataagatatttttaatgatttagtattttacaacatttgtttaccatattttgatataccatttttttctatctgcccagttttattaaaaaaactatatattattttctaaagaaacaatcatatttttatacaaaattatgttttcaggtaacgaaatagatgtagggtacagtggaacataagcagtgttacccctggctgggagtcagtattatacaacaaatggtgagctggaacatgccctgtctgtgctgtccctcctgtgctgggtcgcggatgtgtaggcaacattgccttatcacgctaggttcacctgacactttaaaaggaaaaaaagttccatagagttctgtggtcacaaaattgttttgcttttatcaaatactttaatagaaccaaagttgcagatattggaatgtatggaagtatctcagtctctgcataagaggattaaagtatgaaaggatcatttaatgactgttttacttataagtcattaagtaatccaccatttcttatggatgatgcttaagcctggtgaggtttgtactctaaggagcccagatcataatgcagtgcatttccttagcccttagagtttcttgcaaacatttaaaaaaagacatatttaagaaagaaagataaagaaaaaacatatttaattactgtaaacaggtactgctttatgtttattttctctctacttcaaccaaaatcagatctttgaggttttgctgacattgttggtggttttgcacatgttctttctaattggatttatgaatagttctatgggttttcaaagatgaatcatgctaagaacacttctgctttttgatccactgtttgcagcagaattatatatatgtataggaaaaatccactttgaataatccatgttttgtatttggaaattgtttttaaaaataaaaaggaaaggaaatatataaa

SEQ ID NO: 134033 - DNA, 4828 bp, Homo sapiens
  Payload ID: 6183
  Gene Symbol: FRMD6
  Gene Name: FERM domain containing 6
  Uniprot ID: Q96NE9
  ENST ID: ENST00000395718
  CDS Start-End: 286-2130
ggggcggggcggacgcggagcgcccctctggctggcggggccaaggggctgagaggagtggggcaggctcggcgccggtaggaagagtcagaggggtgaccagagagcccaacgcctggtgctcaagactttctccgagctatgaaacccacgtagtcgaacaccgtgatgcttctcctgcagggcgtgtgatgaggaggcgagcttggctttggagtgctgggaacctgaggaattgccaaggacccagagcccagccctgaccaccagagtgcccaaaacacaatgaacaaattgaattttcataacaacagagtcatgcaagaccgccgcagtgtgtgcattttccttcccaacgatgaatctctgaacatcatcataaatgttaagattctgtgtcaccagttgctggtccaggtttgtgacctgctcaggctaaaggactgccacctctttggactcagtgttatacaaaataatgaacatgtgtatatggagttgtcacaaaagctttacaaatattgtccaaaagaatggaagaaagaggccagcaagggtatcgaccaatttgggcctcctatgatcatccacttccgtgtgcagtactatgtggaaaatggcagattgatcagtgacagagcagcaagatactattattactggcacctgagaaaacaagttcttcattctcagtgtgtgctccgagaggaggcctacttcctgctggcagcctttgccctgcaggctgatcttgggaacttcaaaaggaataagcactatggaaaatacttcgagccagaggcttacttcccatcttgggttgtttccaagagggggaaggactacatcctgaagcacattccaaacatgcacaaagatcagtttgcactaacagcttccgaagctcatcttaaatatatcaaagaggctgtccgactggatgacgtcgctgttcattactacagattgtataaggataaaagggaaattgaagcatcgctgactcttggattgaccatgaggggaatacagatttttcagaatttagatgaagagaaacaattactttatgatttcccctggacaaatgttggaaaattggtgtttgtgggtaagaaatttgagattttgccagatggcttgccttctgcccggaagctcatatactacacggggtgccccatgcgctccagacacctcctgcaacttctgagcaacagccaccgcctctatatgaatctgcagcctgtcctgcgccatatccggaagctggaggaaaacgaagagaagaagcagtaccgggaatcttacatcagtgacaacctggacctcgacatggaccagctggaaaaacggtcgcgggccagcgggagcagtgcgggcagcatgaaacacaagcgcctgtcccgtcattccaccgccagccacagcagttcccacacctcgggcattgaggcagacaccaagccccgggacacggggccagaagacagctactccagcagtgccatccaccgcaagctgaaaacctgcagctcaatgaccagtcatggcagctcccacacctcaggggtggagagtggcggcaaagaccggctggaagaggacttacaggacgatgaaatagagatgttggttgatgacccccgggatctggagcagatgaatgaagagtctctggaagtcagcccagacatgtgcatctacatcacagaggacatgctcatgtcgcggaagctgaatggacactctgggttgattgtgaaagaaattgggtcttccacctcgagctcttcagaaacagttgttaagcttcgtggccagagtactgattctcttccacagactatatgtcggaaaccaaagacctccactgatcgacacagcttgagcctcgatgacatcagactttaccagaaagacttcctgcgcattgcaggtctgtgtcaggacactgctcagagttacacctttggatgtggccatgaactggatgaggaaggcctctattgcaacagttgcttggcccagcagtgcatcaacatccaagatgcttttccagtcaaaagaaccagcaaatacttttctctggatctcactcatgatgaagttccagagtttgttgtgtaaagtccgtctgtgtgcagctgtacaggcagcttactgtttgctagaggatgcgaaagtcataagttctttacatattacttgtgccatatcttcttcaccctaaacatagctctttctttataatatttgtgatgatggaaacaaaagccttggaacaattgcactttaagtattacacagaagtaaaagaactacagaaaatgtacagcaagacaagtgcccggaagttcactgatccttcagaaggaaatgcgctttactgattgcaaagccttcagaatattggagtgtggtgtgtttgctcatctgatgctttttagttcagttacatgtaacatcacatttttttatcacgtgaaagatgttagatttgtttgcttataaattttttaccactcccacataaaatgctcatagtttgggagaggaaagagggaagattctctcttcttttaacagagagatgattgctctgtatacccattgcttcctccctgaggctgtcccaaagtgaacactgatggagtggtcaaaatcataaggttgtagcaagccaaagatacgtatgtgacagaagcacataagcaataagcagaaaaccagaagtgcatgctgtgatgcctgtgactccttcatcccgctcagtgccatgtcctcttttgtgatcttccagaaagctccaggattcatttgagttccacatccaagtaacagatgaattatattcatgttgtaatgcattttgtggagtttacaaaaccagtgtctgttaaaactttggaaaatgtcttagaaaacgttggtgcttggtgatgctttatttgtttaattatcaagaacaaattatggcaatgctagtttctgcttaaccaaaatactctgtgtatatattatacatatataaatacatgggattgtgtatgtctatatgtgtttaaagcttactatgtcttcattttggcttccatgactatcttttatacatggaattccttaagattgagaatatgtcactgagtgaatgatacctgcagacagtcagttgatatatgtagagttcagaatgactgttttctcatgtgcctttggccatgattctcaacactgattgtataacagaattttggggggagcttttaaaaaataatgactgagtctcccaccagaccgattacatcattctcttgtggcgggacccaagtagaattgccttttcttttaaagttctccagatggagctaatatgcaacaaagttgaaaaccactgatcctgggggtgtcttgttaattttgaagtaaaagtgtacagaagacgtagtgtatgagaaagggccatttttaagacagttacctgttgtgctgctgttacaatatataatgaaaccaagtcaggggagtgaatttatcaatcttttgatgtaaagtaaaaacgtagttcacacttcaggagagaacttcatagcacaatgtctttctataagatatttttaatgatttagtattttacaacatttgtttaccatattttgatataccatttttttctatctgcccagttttattaaaaaaactatatattattttctaaagaaacaatcatatttttatacaaaattatgttttcaggtaacgaaatagatgtagggtacagtggaacataagcagtgttacccctggctgggagtcagtattatacaacaaatggtgagctggaacatgccctgtctgtgctgtccctcctgtgctgggtcgcggatgtgtaggcaacattgccttatcacgctaggttcacctgacactttaaaaggaaaaaaagttccatagagttctgtggtcacaaaattgttttgcttttatcaaatactttaatagaaccaaagttgcagatattggaatgtatggaagtatctcagtctctgcataagaggattaaagtatgaaaggatcatttaatgactgttttacttataagtcattaagtaatccaccatttcttatggatgatgcttaagcctggtgaggtttgtactctaaggagcccagatcataatgcagtgcatttccttagcccttagagtttcttgcaaacatttaaaaaaagacatatttaagaaagaaagataaagaaaaaacatatttaattactgtaaacaggtactgctttatgtttattttctctctacttcaaccaaaatcagatctttgaggttttgctgacattgttggtggttttgcacatgttctttctaattggatttatgaatagttctatgggttttcaaagatgaatcatgctaagaacacttctgctttttgatccactgtttgcagcagaattatatatatgtataggaaaaatccactttgaataatccatgttttgtatttggaaattgtttttaaaaataaaaaggaaaggaaatatataaagctgttatttattctgcatttcttacatatctatcgcttgtcagtatacccgttttggtatatattgcctctgcacatctacatttgtatatgcaacagtgagctttatatctacataaactgtaaataatcctttctgtgaaaggatcatcatatcaagatgataccaaaagtatgtaaaaagaaacctgcattattttgtaattatttcttatagatatttcatggtaagattagcagtcaataaagttacttttttgcctttaaa

SEQ ID NO: 134034 - DNA, 495 bp, Homo sapiens
  Payload ID: 6183
  Gene Symbol: FRMD6
  Gene Name: FERM domain containing 6
  ENST ID: ENST00000557405
  CDS Start-End: 1-390
ttccgtgtgcagtactatgtggaaaatggcagattgatcagtgacagagcagcaagatactattattactggcacctgagaaaacaagttcttcattctcagtgtgtgctccgagaggaggcctacttcctgctggcagcctttgccctgcaggctgatcttgggaacttcaaaaggaataagcactatggaaaatacttcgagccagaggcttacttcccatcttgggttgtttccaagagggggaaggactacatcctgaagcacattccaaacatgcacaaagatcagtttgcactaacagcttccgaagctcatcttaaatatatcaaagaggctgtccgactggatgacgtcgctgttcattactacagattgtataaggtatgaaacggcaactaagtcttcagcttctgagaaaaaaacatcttctcaataggattgagaaggaaaaccgaaggatttcatttccattaaaacttatttcatttttta

SEQ ID NO: 134035 - DNA, 573 bp, Homo sapiens
  Payload ID: 6183
  Gene Symbol: FRMD6
  Gene Name: FERM domain containing 6
  ENST ID: ENST00000555703
  CDS Start-End: 145-573
agaggctgggaagtccgggattgaggggccagcatctaccaagggccttcttgttacttcatcccatgatggaaggtggaagggtaaagagaggagaagaagcagtaccgggaatcttacatcagtgacaacctggacctcgacatggaccagctggaaaaacggtcgcgggccagcgggagcagtgcgggcagcatgaaacacaagcgcctgtcccgtcattccaccgccagccacagcagttcccacacctcgggcattgaggcagacaccaagccccgggacacggggccagaagacagctactccagcagtgccatccaccgcaagctgaaaacctgcagctcaatgaccagtcatggcagctcccacacctcaggggtggagagtggcggcaaagaccggctggaagaggacttacaggacgatgagatgttggttgatgacccccgggatctggagcagatgaatgaagagtctctggaagtcagcccagacatgtgcatctacatcacagaggacatgctcatgtcgcggaagctgaatggacactctgggttgattgtgaaagaa

SEQ ID NO: 134036 - DNA, 685 bp, Homo sapiens
  Payload ID: 6183
  Gene Symbol: FRMD6
  Gene Name: FERM domain containing 6
  ENST ID: ENST00000555197
  CDS Start-End: 1-618
gatttcccctggacaaatgttggaaaattggtgtttgtgggtaagaaatttgagattttgccagatggcttgccttctgcccggaagctcatatactacacggggtgccccatgcgctccagacacctcctgcaacttctgagcaacagccaccgcctctatatgaatctgcagcctgtcctgcgccatatccggaagctggaggaaaacgaagagaagaagcagtaccgggaatcttacatcagtgacaacctggacctcgacatggaccagctggaaaaacggtcgcgggccagcgggagcagtgcgggcagcatgaaacacaagcgcctgtcccgtcattccaccgccagccacagcagttcccacacctcgggcattgaggcagacaccaagccccgggacacggggccagaagacagctactccagcagtgccatccaccgcaagctgaaaacctgcagctcaatgaccagtcatggcagctcccacacctcaggggtggagagtggcggcaaagaccggctggaagaggacttacaggacgatggtaacagtactgtcccctcactggctctctgtttagtctcccagttttttcaagcattggttctatagaactggtgtctggagagcaactttaggcagtagtaataaagtggaagaggtgtcttgttgtcttccc

SEQ ID NO: 134037 - DNA, 624 bp, Homo sapiens
  Payload ID: 6183
  Gene Symbol: FRMD6
  Gene Name: FERM domain containing 6
  ENST ID: ENST00000555936
  CDS Start-End: 263-624
aggttaaagtgatttggataaagcagcagttgttttctactgtcagcttgtcctttcaaggaatatatttacgatgcattaaattgcctgattgtggctccctgggtggacttagttgaattgttattttacgtcgtgcctttttcccctacaggttaagattctgtgtcaccagttgctggtccaggtttgtgacctgctcaggctaaaggactgccacctctttggactcagtgttatacaaaataatgaacatgtgtatatggagttgtcacaaaagctttacaaatattgtccaaaagaatggaagaaagaggccagcaaggtacgacaatacgaagtcacttggggtatcgaccaatttgggcctcctatgatcatccacttccgtgtgcagtactatgtggaaaatggcagattgatcagtgacagagcagcaagatactattattactggcacctgagaaaacaagttcttcattctcagtgtgtgctccgagaggaggcctacttcctgctggcagcctttgccctgcaggctgatcttgggaacttcaaaaggaataagcactatggaaaatacttcgagccagaggcttacttcccatcttgggttgtttccaa

SEQ ID NO: 134038 - DNA, 4176 bp, Homo sapiens
  Payload ID: 6183
  Gene Symbol: FRMD6
  Gene Name: FERM domain containing 6
  ENST ID: ENST00000554167
  CDS Start-End: 138-1775
attttacgtcgtgcctttttcccctacaggttaagattctgtgtcaccagttgctggtccaggtttgtgacctgctcaggctaaaggactgccacctctttggactcagtgttatacaaaataatgaacatgtgtatatggagttgtcacaaaagctttacaaatattgtccaaaagaatggaagaaagaggccagcaagggtatcgaccaatttgggcctcctatgatcatccacttccgtgtgcagtactatgtggaaaatggcagattgatcagtgacagagcagcaagatactattattactggcacctgagaaaacaagttcttcattctcagtgtgtgctccgagaggaggcctacttcctgctggcagcctttgccctgcaggctgatcttgggaacttcaaaaggaataagcactatggaaaatacttcgagccagaggcttacttcccatcttgggttgtttccaagagggggaaggactacatcctgaagcacattccaaacatgcacaaagatcagtttgcactaacagcttccgaagctcatcttaaatatatcaaagaggctgtccgactggatgacgtcgctgttcattactacagattgtataaggataaaagggaaattgaagcatcgctgactcttggattgaccatgaggggaatacagatttttcagaatttagatgaagagaaacaattactttatgatttcccctggacaaatgttggaaaattggtgtttgtgggtaagaaatttgagattttgccagatggcttgccttctgcccggaagctcatatactacacggggtgccccatgcgctccagacacctcctgcaacttctgagcaacagccaccgcctctatatgaatctgcagcctgtcctgcgccatatccggaagctggaggaaaacgaagagaagaagcagtaccgggaatcttacatcagtgacaacctggacctcgacatggaccagctggaaaaacggtcgcgggccagcgggagcagtgcgggcagcatgaaacacaagcgcctgtcccgtcattccaccgccagccacagcagttcccacacctcgggcattgaggcagacaccaagccccgggacacggggccagaagacagctactccagcagtgccatccaccgcaagctgaaaacctgcagctcaatgaccagtcatggcagctcccacacctcaggggtggagagtggcggcaaagaccggctggaagaggacttacaggacgatgaaatagagatgttggttgatgacccccgggatctggagcagatgaatgaagagtctctggaagtcagcccagacatgtgcatctacatcacagaggacatgctcatgtcgcggaagctgaatggacactctgggttgattgtgaaagaaattgggtcttccacctcgagctcttcagaaacagttgttaagcttcgtggccagagtactgattctcttccacagactatatgtcggaaaccaaagacctccactgatcgacacagcttgagcctcgatgacatcagactttaccagaaagacttcctgcgcattgcaggtctgtgtcaggacactgctcagagttacacctttggatgtggccatgaactggatgaggaaggcctctattgcaacagttgcttggcccagcagtgcatcaacatccaagatgcttttccagtcaaaagaaccagcaaatacttttctctggatctcactcatgatgaagttccagagtttgttgtgtaaagtccgtctgtgtgcagctgtacaggcagcttactgtttgctagaggatgcgaaagtcataagttctttacatattacttgtgccatatcttcttcaccctaaacatagctctttctttataatatttgtgatgatggaaacaaaagccttggaacaattgcactttaagtattacacagaagtaaaagaactacagaaaatgtacagcaagacaagtgcccggaagttcactgatccttcagaaggaaatgcgctttactgattgcaaagccttcagaatattggagtgtggtgtgtttgctcatctgatgctttttagttcagttacatgtaacatcacatttttttatcacgtgaaagatgttagatttgtttgcttataaattttttaccactcccacataaaatgctcatagtttgggagaggaaagagggaagattctctcttcttttaacagagagatgattgctctgtatacccattgcttcctccctgaggctgtcccaaagtgaacactgatggagtggtcaaaatcataaggttgtagcaagccaaagatacgtatgtgacagaagcacataagcaataagcagaaaaccagaagtgcatgctgtgatgcctgtgactccttcatcccgctcagtgccatgtcctcttttgtgatcttccagaaagctccaggattcatttgagttccacatccaagtaacagatgaattatattcatgttgtaatgcattttgtggagtttacaaaaccagtgtctgttaaaactttggaaaatgtcttagaaaacgttggtgcttggtgatgctttatttgtttaattatcaagaacaaattatggcaatgctagtttctgcttaaccaaaatactctgtgtatatattatacatatataaatacatgggattgtgtatgtctatatgtgtttaaagcttactatgtcttcattttggcttccatgactatcttttatacatggaattccttaagattgagaatatgtcactgagtgaatgatacctgcagacagtcagttgatatatgtagagttcagaatgactgttttctcatgtgcctttggccatgattctcaacactgattgtataacagaattttggggggagcttttaaaaaataatgactgagtctcccaccagaccgattacatcattctcttgtggcgggacccaagtagaattgccttttcttttaaagttctccagatggagctaatatgcaacaaagttgaaaaccactgatcctgggggtgtcttgttaattttgaagtaaaagtgtacagaagacgtagtgtatgagaaagggccatttttaagacagttacctgttgtgctgctgttacaatatataatgaaaccaagtcaggggagtgaatttatcaatcttttgatgtaaagtaaaaacgtagttcacacttcaggagagaacttcatagcacaatgtctttctataagatatttttaatgatttagtattttacaacatttgtttaccatattttgatataccatttttttctatctgcccagttttattaaaaaaactatatattattttctaaagaaacaatcatatttttatacaaaattatgttttcaggtaacgaaatagatgtagggtacagtggaacataagcagtgttacccctggctgggagtcagtattatacaacaaatggtgagctggaacatgccctgtctgtgctgtccctcctgtgctgggtcgcggatgtgtaggcaacattgccttatcacgctaggttcacctgacactttaaaaggaaaaaaagttccatagagttctgtggtcacaaaattgttttgcttttatcaaatactttaatagaaccaaagttgcagatattggaatgtatggaagtatctcagtctctgcataagaggattaaagtatgaaaggatcatttaatgactgttttacttataagtcattaagtaatccaccatttcttatggatgatgcttaagcctggtgaggtttgtactctaaggagcccagatcataatgcagtgcatttccttagcccttagagtttcttgcaaacatttaaaaaaagacatatttaagaaagaaagataaagaaaaaacatatttaattactgtaaacaggtactgctttatgtttattttctctctacttcaaccaaaatcagatctttgaggttttgctgacattgttggtggttttgcacatgttctttctaattggatttatgaatagttctatgggttttcaaagatgaatcatgctaagaacacttctgctttttgatccactgtttgcagcagaattatatatatgtataggaaaaatccactttgaataatccatgttttgtatttggaaattgttttt

SEQ ID NO: 134039 - DNA, 569 bp, Homo sapiens
  Payload ID: 6183
  Gene Symbol: FRMD6
  Gene Name: FERM domain containing 6
  ENST ID: ENST00000554778
  CDS Start-End: 385-569
tcaagactttctccgaggtatgaacaagaaccaggcgtctgggccctttccgctcgccccatcgctcagccgccgcgccccggacgcccgctgtgccccctgccggcggggcggcggcgggactgggtttcgggagggtttctggaagtcgcgagtcccagcgaaggcagtgcaccgctctccgcctctttcttcgccttcttctcgctcccttagctctgggtgtcgggcaccggtgctatgaaacccacgtagtcgaacaccgtgatgcttctcctgcagggcgtgtgatgaggaggcgagcttggctttggagtgctgggaacctgaggaattgccaaggacccagagcccagccctgaccaccagagtgcccaaaacacaatgaacaaattgaattttcataacaacagagtcatgcaagaccgccgcagtgtgtgcattttccttcccaacgatgaatctctgaacatcatcataaatgttaagattctgtgtcaccagttgctggtccaggtttgtgacctgctcaggctaaaggactgccacctctttggactcagtgttat

SEQ ID NO: 134040 - DNA, 1679 bp, Homo sapiens
  Payload ID: 6183
  Gene Symbol: FRMD6
  Gene Name: FERM domain containing 6
  Uniprot ID: Q96NE9
  ENST ID: ENST00000553556
  CDS Start-End: 145-939
agaggctgggaagtccgggattgaggggccagcatctaccaagggccttcttgttacttcatcccatgatggaaggtggaagggtaaagagaggagaagaagcagtaccgggaatcttacatcagtgacaacctggacctcgacatggaccagctggaaaaacggtcgcgggccagcgggagcagtgcgggcagcatgaaacacaagcgcctgtcccgtcattccaccgccagccacagcagttcccacacctcgggcattgaggcagacaccaagccccgggacacggggccagaagacagctactccagcagtgccatccaccgcaagctgaaaacctgcagctcaatgaccagtcatggcagctcccacacctcaggggtggagagtggcggcaaagaccggctggaagaggacttacaggacgatgaaatagagatgttggttgatgacccccgggatctggagcagatgaatgaagagtctctggaagtcagcccagacatgtgcatctacatcacagaggacatgctcatgtcgcggaagctgaatggacactctgggttgattgtgaaagaaattgggtcttccacctcgagctcttcagaaacagttgttaagcttcgtggccagagtactgattctcttccacagactatatgtcggaaaccaaagacctccactgatcgacacagcttgagcctcgatgacatcagactttaccagaaagacttcctgcgcattgcaggtctgtgtcaggacactgctcagagttacacctttggatgtggccatgaactggatgaggaaggcctctattgcaacagttgcttggcccagcagtgcatcaacatccaagatgcttttccagtcaaaagaaccagcaaatacttttctctggatctcactcatgatgaagttccagagtttgttgtgtaaagtccgtctgtgtgcagctgtacaggcagcttactgtttgctagaggatgcgaaagtcataagttctttacatattacttgtgccatatcttcttcaccctaaacatagctctttctttataatatttgtgatgatggaaacaaaagccttggaacaattgcactttaagtattacacagaagtaaaagaactacagaaaatgtacagcaagacaagtgcccggaagttcactgatccttcagaaggaaatgcgctttactgattgcaaagccttcagaatattggagtgtggtgtgtttgctcatctgatgctttttagttcagttacatgtaacatcacatttttttatcacgtgaaagatgttagatttgtttgcttataaattttttaccactcccacataaaatgctcatagtttgggagaggaaagagggaagattctctcttcttttaacagagagatgattgctctgtatacccattgcttcctccctgaggctgtcccaaagtgaacactgatggagtggtcaaaatcataaggttgtagcaagccaaagatacgtatgtgacagaagcacataagcaataagcagaaaaccagaagtgcatgctgtgatgcctgtgactccttcatcccgctcagtgccatgtcctcttttgtgatcttccagaaagctccaggattcatttgagttccacatccaagtaacagatgaattatattcatgttgtaatgca

SEQ ID NO: 134041 - DNA, 3198 bp, Homo sapiens
  Payload ID: 6184
  Gene Symbol: FRMD7
  Gene Name: FERM domain containing 7
  Uniprot ID: Q6ZUT3
  ENST ID: ENST00000298542
  CDS Start-End: 177-2321
aaatgcccttgggtgtgcattacttcaagcaaacggaagtgtgccccgctgacagtgggaatgcctggctgggggtgggggggcccgagtgcaccacatccagctgggagtgaaattcctggagaaagcacccacagcactctgagcctgcttgcagcccaacggcctcgctgagaatgctacatttaaaagtgcagtttttggatgattcccagaagatttttgtggttgatcaaaagtcatccgggaaggcattgtttaacctgagttgcagccatctaaatcttgctgaaaaggaatattttggattagaattctgcagccattctggaaataatgtttggctggagcttttgaagcccataacaaagcaggtaaaaaatcctaaggagattgttttcaaatttatggtgaaatttttcccagtggaccctggacatctgcgggaagaacttacaaggtatctttttactcttcaaataaagaaggatttggctctaggaaggcttccatgcagtgacaactgtacagcgttgatggtatctcacatcttacaatcagaacttggagactttcatgaagaaacagataggaagcatctggcacaaactcggtacttaccaaaccaagactgtttagagggcaagatcatgcactttcatcagaagcacattggcaggagcccagctgaatctgacattctgctactggacatagcaaggaagctggatatgtatggcatcaggcctcaccccgccagtgatggtgaagggatgcagattcacctggctgttgctcacatgggagtactggtgttacggggaaatacaaagatcaatacttttaactgggctaaaatccgcaagttgagttttaagagaaagcattttctcatcaaacttcatgccaatatcttggtgttgtgcaaggataccttggagttcaccatggccagccgagatgcctgcaaggctttctggaagacttgtgtggaataccatgctttcttcaggctttcggaagagcccaaatcaaagcccaaaaccctactctgcagcaagggttccagtttccgctatagtggacgaacccaaaggcaacttttggaatatgggagaaaagggaggctgaagagcttgccatttgaaaggaaacattacccatctcagtaccatgaacgacagtgcaggtcctcaccagacctcctctctgatgtgtcaaaacaagtggaagatttgagactagcatatggtggtggctactaccaaaatgtgaatggagtgcacgcatctgagccagtgctggagagtaggaggaggaattctgcattggaggtgacatttgcaactgagctggagcattccaaaccagaggcggatcccacattgctacatcagtcccaaagcagttcctctttcccttttatttatatggaccctgtctttaacactgagcccaatcctaaccctgatcccagagacattttttcagagaggagttctctaagctccttccaaacaagctgtaagttttctggtaatcacatgagcatatattctggcctcacaagcaaagtgcgtccagcaaagcagctaacttacacggatgtgccctatattccttgtacaggtcagcaggttggtattatgcctccccaggtctttttttatgtggacaagccaccccaggtgcccagatggtccccaattagagcagaggaaaggacaagtccacatagctatgtagagcccactgcaatgaagccagctgaaagaagcccaaggaatatcagaatgaagagctttcagcaagacctgcaagtactccaagaagctatagccaggactagcggtaggagcaacatcaatgtaggtctagaagaggaagacccaaatttggaagatgcatttgtatgtaacattcaagagcaaacccctaaaaggtcccagagccaatcagacatgaaaactattcgttttccttttgggtcagaatttagacctttagggccttgtcctgctctcagtcataaagcagacctgtttacggatatgtttgcagagcaggagttgccagcagttctaatggatcaaagtacagcagaaaggtatgtagctagtgaatccagtgattctgaatcagagattcttaaaccagactactatgctttgtatggcaaagaaataaggtcacccatggccagaatccgcctgtcttctggtagtctacagttagatgaagaagatgaagatgcttatttcaacacaccaactgctgaagacaggacttcactaaaaccatgtaattactttttagcttaaaagtgtgaacctatggacatttctgagccagttccatgttaccgacttaggcagaaaataatgaagttgtagaaaccattttcttggttactacatattcattggtattaaggaaatctcattttggatgcctgccttatgaaagatccagctgttgcctcattccttgagtttcactcttccattacctctgaagggactttagaacatgccctctcctcaccagcactgtggcaaggcaaggtgggtatttgtcatctccactgcatacttcctcatagagacattgtgagtgaaggtcaggctcttcaatgctgaagaatggtgacagtatgggttggcatatggaattagcgtctaatggcatttagtgatttagtagattgtgactgtgttgatctttgtgctcttaaacaacactgaacaaatatttcagtctttactatttgtgtggggcccagtagaaatggtcttgtaatatgctaaatacttccatttttataacatataaaagcagagcatggccctcctacagcctcaggaaggaggtggtggcatagatcctctcaagagaatacaggtttagaattaatctaggacttggcagaattctaaacctaggaaattcatgaattaaatcaatttctagagccagacataaaccagatgaaagtatcatgttgttttacttataacttctatattcttatctactatatctagtaaaagagaaacattatcaggtcagtttgtttatctaatatttcctgccagaatttattttttgtcatagcttcttgcatgtatgcaggccaggaaatgaatgttattgtaataaagtgtgatggaaaatccaggtaattaaaaaataaattat

SEQ ID NO: 134042 - DNA, 2864 bp, Homo sapiens
  Payload ID: 6184
  Gene Symbol: FRMD7
  Gene Name: FERM domain containing 7
  ENST ID: ENST00000370879
  CDS Start-End: 201-1985
aaaaggcatctgactgactgggggcaccattcctttcttgaatcatcttggatctgggagaaggaaaatgcttctttcttatttctgtttctttctcaagagattctccccaatttctttgcaggtatctttttactcttcaaataaagaaggatttggctctaggaaggcttccatgcagtgacaactgtacagcgttgatggtatctcacatcttacaatcagaacttggagactttcatgaagaaacagataggaagcatctggcacaaactcggtacttaccaaaccaagactgtttagagggcaagatcatgcactttcatcagaagcacattggcaggagcccagctgaatctgacattctgctactggacatagcaaggaagctggatatgtatggcatcaggcctcaccccgccagtgatggtgaagggatgcagattcacctggctgttgctcacatgggagtactggtgttacggggaaatacaaagatcaatacttttaactgggctaaaatccgcaagttgagttttaagagaaagcattttctcatcaaacttcatgccaatatcttggtgttgtgcaaggataccttggagttcaccatggccagccgagatgcctgcaaggctttctggaagacttgtgtggaataccatgctttcttcaggctttcggaagagcccaaatcaaagcccaaaaccctactctgcagcaagggttccagtttccgctatagtggacgaacccaaaggcaacttttggaatatgggagaaaagggaggctgaagagcttgccatttgaaaggaaacattacccatctcagtaccatgaacgacagtgcaggtcctcaccagacctcctctctgatgtgtcaaaacaagtggaagatttgagactagcatatggtggtggctactaccaaaatgtgaatggagtgcacgcatctgagccagtgctggagagtaggaggaggaattctgcattggaggtgacatttgcaactgagctggagcattccaaaccagaggcggatcccacattgctacatcagtcccaaagcagttcctctttcccttttatttatatggaccctgtctttaacactgagcccaatcctaaccctgatcccagagacattttttcagagaggagttctctaagctccttccaaacaagctgtaagttttctggtaatcacatgagcatatattctggcctcacaagcaaagtgcgtccagcaaagcagctaacttacacggatgtgccctatattccttgtacaggtcagcaggttggtattatgcctccccaggtctttttttatgtggacaagccaccccaggtgcccagatggtccccaattagagcagaggaaaggacaagtccacatagctatgtagagcccactgcaatgaagccagctgaaagaagcccaaggaatatcagaatgaagagctttcagcaagacctgcaagtactccaagaagctatagccaggactagcggtaggagcaacatcaatgtaggtctagaagaggaagacccaaatttggaagatgcatttgtatgtaacattcaagagcaaacccctaaaaggtcccagagccaatcagacatgaaaactattcgttttccttttgggtcagaatttagacctttagggccttgtcctgctctcagtcataaagcagacctgtttacggatatgtttgcagagcaggagttgccagcagttctaatggatcaaagtacagcagaaaggtatgtagctagtgaatccagtgattctgaatcagagattcttaaaccagactactatgctttgtatggcaaagaaataaggtcacccatggccagaatccgcctgtcttctggtagtctacagttagatgaagaagatgaagatgcttatttcaacacaccaactgctgaagacaggacttcactaaaaccatgtaattactttttagcttaaaagtgtgaacctatggacatttctgagccagttccatgttaccgacttaggcagaaaataatgaagttgtagaaaccattttcttggttactacatattcattggtattaaggaaatctcattttggatgcctgccttatgaaagatccagctgttgcctcattccttgagtttcactcttccattacctctgaagggactttagaacatgccctctcctcaccagcactgtggcaaggcaaggtgggtatttgtcatctccactgcatacttcctcatagagacattgtgagtgaaggtcaggctcttcaatgctgaagaatggtgacagtatgggttggcatatggaattagcgtctaatggcatttagtgatttagtagattgtgactgtgttgatctttgtgctcttaaacaacactgaacaaatatttcagtctttactatttgtgtggggcccagtagaaatggtcttgtaatatgctaaatacttccatttttataacatataaaagcagagcatggccctcctacagcctcaggaaggaggtggtggcatagatcctctcaagagaatacaggtttagaattaatctaggacttggcagaattctaaacctaggaaattcatgaattaaatcaatttctagagccagacataaaccagatgaaagtatcatgttgttttacttataacttctatattcttatctactatatctagtaaaagagaaacattatcaggtcagtttgtttatctaatatttcctgccagaatttattttttgtcatagcttcttgcatgtatgcaggccaggaaatgaatgttattgtaataaagtgtgatggaaaatccaggtaattaaaaaataaattataa

SEQ ID NO: 134043 - DNA, 2100 bp, Homo sapiens
  Payload ID: 6184
  Gene Symbol: FRMD7
  Gene Name: FERM domain containing 7
  Uniprot ID: Q6ZUT3
  ENST ID: ENST00000464296
  CDS Start-End: 1-2100
atgctacatttaaaagtgcagtttttggatgattcccagaagatttttgtggttgatcaaaagtcatccgggaaggcattgtttaacctgagttgcagccatctaaatcttgctgaaaaggaatattttggattagaattctgcagccattctggaaataatgtttggctggagcttttgaagcccataacaaagcaggtaaaaatggaccctggacatctgcgggaagaacttacaaggtatctttttactcttcaaataaagaaggatttggctctaggaaggcttccatgcagtgacaactgtacagcgttgatggtatctcacatcttacaatcagaacttggagactttcatgaagaaacagataggaagcatctggcacaaactcggtacttaccaaaccaagactgtttagagggcaagatcatgcactttcatcagaagcacattggcaggagcccagctgaatctgacattctgctactggacatagcaaggaagctggatatgtatggcatcaggcctcaccccgccagtgatggtgaagggatgcagattcacctggctgttgctcacatgggagtactggtgttacggggaaatacaaagatcaatacttttaactgggctaaaatccgcaagttgagttttaagagaaagcattttctcatcaaacttcatgccaatatcttggtgttgtgcaaggataccttggagttcaccatggccagccgagatgcctgcaaggctttctggaagacttgtgtggaataccatgctttcttcaggctttcggaagagcccaaatcaaagcccaaaaccctactctgcagcaagggttccagtttccgctatagtggacgaacccaaaggcaacttttggaatatgggagaaaagggaggctgaagagcttgccatttgaaaggaaacattacccatctcagtaccatgaacgacagtgcaggtcctcaccagacctcctctctgatgtgtcaaaacaagtggaagatttgagactagcatatggtggtggctactaccaaaatgtgaatggagtgcacgcatctgagccagtgctggagagtaggaggaggaattctgcattggaggtgacatttgcaactgagctggagcattccaaaccagaggcggatcccacattgctacatcagtcccaaagcagttcctctttcccttttatttatatggaccctgtctttaacactgagcccaatcctaaccctgatcccagagacattttttcagagaggagttctctaagctccttccaaacaagctgtaagttttctggtaatcacatgagcatatattctggcctcacaagcaaagtgcgtccagcaaagcagctaacttacacggatgtgccctatattccttgtacaggtcagcaggttggtattatgcctccccaggtctttttttatgtggacaagccaccccaggtgcccagatggtccccaattagagcagaggaaaggacaagtccacatagctatgtagagcccactgcaatgaagccagctgaaagaagcccaaggaatatcagaatgaagagctttcagcaagacctgcaagtactccaagaagctatagccaggactagcggtaggagcaacatcaatgtaggtctagaagaggaagacccaaatttggaagatgcatttgtatgtaacattcaagagcaaacccctaaaaggtcccagagccaatcagacatgaaaactattcgttttccttttgggtcagaatttagacctttagggccttgtcctgctctcagtcataaagcagacctgtttacggatatgtttgcagagcaggagttgccagcagttctaatggatcaaagtacagcagaaaggtatgtagctagtgaatccagtgattctgaatcagagattcttaaaccagactactatgctttgtatggcaaagaaataaggtcacccatggccagaatccgcctgtcttctggtagtctacagttagatgaagaagatgaagatgcttatttcaacacaccaactgctgaagacaggacttcactaaaaccatgtaattactttttagcttaa

SEQ ID NO: 134044 - DNA, 3723 bp, Homo sapiens
  Payload ID: 6185
  Gene Symbol: FRMD8
  Gene Name: FERM domain containing 8
  Uniprot ID: Q9BZ67
  ENST ID: ENST00000317568
  CDS Start-End: 164-1558
gcctcgggcgccgcgcttcctcccgccgtggcttccgcgtcgcttcccggtcagctgcgtccttagcgggagcccgagtgcgggcggtggcgggcttggcggcggggcaggattccaggcaggagccttgcctctcaggtggcgggctctgcgaccctgcgagatggacgggacagaaggcagtgccgggcagcccggccccgctgagcgatcccaccgaagcagcgtgtcctccgtgggagcccgagcggctgacgtgctggtatacctagcggatgacacggtggtgcccctggctgtggagaacctgccctcgctcagtgcccatgagctgcaccgcgctgtccgcgaggtcctgcagcttccagacatcgccctggatgtcttcgcgctctggctggtctcccctctgctggaggtgcagctgaaacccaagcaccagccctacaagctgggacgccagtggccggagctgctgctgcgcttcaccagtgccccagacgatgacgtggccatggatgagcctttcctgcagttccgaaggaacgtgttcttcccaaagcggcgggagctccagatccatgacgaggaggtcctgcggctgctctatgaggaggccaagggcaacgtgctggctgcacggtacccgtgcgacgtggaggactgcgaggctctgggcgccctggtgtgccgcgtgcagcttgggccctaccagcccggccggccggcagcctgcgacctgagggagaagctggactccttcctccctgcccacctctgtaagcggggccagagtctctttgctgccctccggggccgtggggccagggccgggccgggcgagcagggcctgctgaacgcctaccgccaggtgcaggaggtcagcagcgacggcgggtgcgaggccgccctgggcacccactaccgcgcctatctcctcaagtgccacgagctgccgttttatgggtgtgccttcttccacggtgaggttgacaagccggcccaaggctttttgcaccggggtgggcgcaagccagtttctgtggccatcagtctggaaggcgtgcacgtcatcgatagcagagagaagcatgtcctgctgggcctgcgcttccaggagctgtcgtgggaccacacctcccccgaggaggaggagcccatcttgtggctggagttcgacggggacagcgagggcacacctgtcaacaagctcctcaagatctactccaagcaggccgaactgatgagcagtctcattgagtactgcatcgaactgagccaggcggcggagcccgcaggcccccaggacagtgcgactggctcgccctcggaccccagctcctcactggctcctgttcagcgccccaagctgcggaggcagggcagtgtggtgtccagccggatccagcatctctccaccatcgactacgtggaggacggcaaggggatcaggcgagtgaagccgaagcgcaccacatccttcttcagccggcagctgtccttgggccaggggagctacaccgtggtgcagcccggcgacagcctggagcagggctgaggacgctgcacccggcaggaggagggcgactgggggccctggcccggcactgtcctcctgaggggcaggcgccggctgcaacagtctcatgggtcaccacgtggggagggctgcctcagcaggtttctcagaccacggagaagtgacttttgggcccggggccatgcccgggctgtgcaaagctggccagggcctcctgtagggctcctctgcagcctgccctcccttcccccggatgctgggccctgctgctctctcaggaccatccgatcaagctgcagctgccaccctcacctagaaacatgcctttgtgcccacctcaagatgggcagtgtccctgttctgaagtgcccagtggcagctccagtggtagaggaccaaggattgaggtttgggacctgaagctccagtgtgtgcctttggcctcttccctggacttgggtgaccagtctccgtcttcctcctgctagtgctccaccccccggacttggatgaccagtttcccaccttcctcctgctggtgctccatcccccaataccaggctgggccaccactctgaggagggtaggaggggcctccctggattgaaccgggacagaaacacggtgagggcccccaccacacctccctggttgaatcaggaatggagggagccaggcagggccctacctggggtcctgtgcccctcgttctggtctcctttgcaggcacgagataccagaaagagcatgcctttctgatagcctttggtgatgtcactgctgggaggtggctatcctgtggaccacctggcctccagacccacactcacagtctgtgaaaaactgaaaatcccctggtgggcactccctggagcccaagcagctcccctaggggactgaccggacctgacctcccctccctgtgtctgggtcttcaggttttagtttggtctttgttcatctgagttgtgctggggcaacgccaggaagtgccctgggtacctctgctgtgcgctccttcccaggtggcgccatggattcctctgggggctggcgcatgcccaggaaagcctgggccacacgggacactctcttctttatcgaggacacttggaaaggtgactgatatgggtgcttggcttctctggtcccagcttgccctccggggagcaggggctctgtcttgtcccagatgagctgagagcccctgagaggagggctttcccagccctgggaccctccgaggtgggtgtgcgggtctcacaggtgcttcctgggacttcctgtggctgcacagggcttggctttgtcttcgttcccggtggaaaaccgtgggagaggaagcttgggcctctactccaagtatcagagcctgttcaccctcctccctttggtagcttgtgaatgtgccaggtgtttcgaggtaggcttgccttctggcagcatggactttgttaaaataataggcggaaagaagaggcctgggaagggcccccagtcttttggaatgtcctggtcacagggtcatgtcagctgccagttctcgtctcccgtcctggagttgctcggtcttgcggagctgcccgcctgcctgttctggcggctccagcgcaggctgtccctgctgctttgattccaggtgattttattttttttatttttttattttttttgagacggagtcttgctctgttgcccaggcaggagtgcagtggcgcatctcggctcactgcaacctctgtctcaagcgattctcctgcctcagcctcctgagtagctgggattacaggtgcatgccaccaggccccgctgatttttgtatttttagtagagatagggtttcaccatgttggtcaggctggtcgtgaactcctgacctcatgatctgcccgcctcaacctcccaaagtgctgggattataggcgtgagccaccgcccccagctgattccaggcgaattcttctctgatgggcgggcgagggtgtgttcgtgtgatgggttggagtgtgtgtgtctgagtacacagatgatgtgttttcccttcagcttcttacgttttctgagcatccattgtgccttaacattttctgcttgtcctttgggacaaagcagtattttactcattctttgaatgttctcattcttttgtatcatgtgacttattaaaatcagtttctaacaaa

SEQ ID NO: 134045 - DNA, 3514 bp, Homo sapiens
  Payload ID: 6185
  Gene Symbol: FRMD8
  Gene Name: FERM domain containing 8
  Uniprot ID: Q9BZ67
  ENST ID: ENST00000355991
  CDS Start-End: 126-1352
gtcgcttcccggtcagctgcgtccttagcgggagcccgagtgcgggcggtggcgggcttggcggcggggcaggattccaggcaggagccttgcctctcaggtggcgggctctgcgaccctgcgagatggacgggacagaaggcagtgccgggcagcccggccccgctgagcgatcccaccgaagcagcgtgtcctccgtgggagcccgagaggtgcagctgaaacccaagcaccagccctacaagctgggacgccagtggccggagctgctgctgcgcttcaccagtgccccagacgatgacgtggccatggatgagcctttcctgcagttccgaaggaacgtgttcttcccaaagcggcgggagctccagatccatgacgaggaggtcctgcggctgctctatgaggaggccaagggcaacgtgctggctgcacggtacccgtgcgacgtggaggactgcgaggctctgggcgccctggtgtgccgcgtgcagcttgggccctaccagcccggccggccggcagcctgcgacctgagggagaagctggactccttcctccctgcccacctctgtaagcggggccagagtctctttgctgccctccggggccgtggggccagggccgggccgggcgagcagggcctgctgaacgcctaccgccaggtgcaggaggtcagcagcgacggcgggtgcgaggccgccctgggcacccactaccgcgcctatctcctcaagtgccacgagctgccgttttatgggtgtgccttcttccacggtgaggttgacaagccggcccaaggctttttgcaccggggtgggcgcaagccagtttctgtggccatcagtctggaaggcgtgcacgtcatcgatagcagagagaagcatgtcctgctgggcctgcgcttccaggagctgtcgtgggaccacacctcccccgaggaggaggagcccatcttgtggctggagttcgacggggacagcgagggcacacctgtcaacaagctcctcaagatctactccaagcaggccgaactgatgagcagtctcattgagtactgcatcgaactgagccaggcggcggagcccgcaggcccccaggacagtgcgactggctcgccctcggaccccagctcctcactggctcctgttcagcgccccaagctgcggaggcagggcagtgtggtgtccagccggatccagcatctctccaccatcgactacgtggaggacggcaaggggatcaggcgagtgaagccgaagcgcaccacatccttcttcagccggcagctgtccttgggccaggggagctacaccgtggtgcagcccggcgacagcctggagcagggctgaggacgctgcacccggcaggaggagggcgactgggggccctggcccggcactgtcctcctgaggggcaggcgccggctgcaacagtctcatgggtcaccacgtggggagggctgcctcagcaggtttctcagaccacggagaagtgacttttgggcccggggccatgcccgggctgtgcaaagctggccagggcctcctgtagggctcctctgcagcctgccctcccttcccccggatgctgggccctgctgctctctcaggaccatccgatcaagctgcagctgccaccctcacctagaaacatgcctttgtgcccacctcaagatgggcagtgtccctgttctgaagtgcccagtggcagctccagtggtagaggaccaaggattgaggtttgggacctgaagctccagtgtgtgcctttggcctcttccctggacttgggtgaccagtctccgtcttcctcctgctagtgctccaccccccggacttggatgaccagtttcccaccttcctcctgctggtgctccatcccccaataccaggctgggccaccactctgaggagggtaggaggggcctccctggattgaaccgggacagaaacacggtgagggcccccaccacacctccctggttgaatcaggaatggagggagccaggcagggccctacctggggtcctgtgcccctcgttctggtctcctttgcaggcacgagataccagaaagagcatgcctttctgatagcctttggtgatgtcactgctgggaggtggctatcctgtggaccacctggcctccagacccacactcacagtctgtgaaaaactgaaaatcccctggtgggcactccctggagcccaagcagctcccctaggggactgaccggacctgacctcccctccctgtgtctgggtcttcaggttttagtttggtctttgttcatctgagttgtgctggggcaacgccaggaagtgccctgggtacctctgctgtgcgctccttcccaggtggcgccatggattcctctgggggctggcgcatgcccaggaaagcctgggccacacgggacactctcttctttatcgaggacacttggaaaggtgactgatatgggtgcttggcttctctggtcccagcttgccctccggggagcaggggctctgtcttgtcccagatgagctgagagcccctgagaggagggctttcccagccctgggaccctccgaggtgggtgtgcgggtctcacaggtgcttcctgggacttcctgtggctgcacagggcttggctttgtcttcgttcccggtggaaaaccgtgggagaggaagcttgggcctctactccaagtatcagagcctgttcaccctcctccctttggtagcttgtgaatgtgccaggtgtttcgaggtaggcttgccttctggcagcatggactttgttaaaataataggcggaaagaagaggcctgggaagggcccccagtcttttggaatgtcctggtcacagggtcatgtcagctgccagttctcgtctcccgtcctggagttgctcggtcttgcggagctgcccgcctgcctgttctggcggctccagcgcaggctgtccctgctgctttgattccaggtgattttattttttttatttttttattttttttgagacggagtcttgctctgttgcccaggcaggagtgcagtggcgcatctcggctcactgcaacctctgtctcaagcgattctcctgcctcagcctcctgagtagctgggattacaggtgcatgccaccaggccccgctgatttttgtatttttagtagagatagggtttcaccatgttggtcaggctggtcgtgaactcctgacctcatgatctgcccgcctcaacctcccaaagtgctgggattataggcgtgagccaccgcccccagctgattccaggcgaattcttctctgatgggcgggcgagggtgtgttcgtgtgatgggttggagtgtgtgtgtctgagtacacagatgatgtgttttcccttcagcttcttacgttttctgagcatccattgtgccttaacattttctgcttgtcctttgggacaaagcagtattttactcattctttgaatgttctcattcttttgtatcatgtgacttattaaaatcagtttctaac

SEQ ID NO: 134046 - DNA, 1818 bp, Homo sapiens
  Payload ID: 6185
  Gene Symbol: FRMD8
  Gene Name: FERM domain containing 8
  Uniprot ID: Q9BZ67
  ENST ID: ENST00000416776
  CDS Start-End: 106-1398
gtccttagcgggagcccgagtgcgggcggtggcgggcttggcggcggggcaggattccaggcaggagccttgcctctcaggtggcgggctctgcgaccctgcgagatggacgggacagaaggcagtgccgggcagcccggccccgctgagcgatcccaccgaagcagcgtgtcctccgtgggagcccgagcggctgacgtgctggtatacctagcggatgacacggtggtgcccctggctgtggagaacctgccctcgctcagtgcccatgagctgcaccgcgctgtccgcgaggtcctgcagcttccagacatcgccctggatgtcttcgcgctctggctggtctcccctctgctggatgagcctttcctgcagttccgaaggaacgtgttcttcccaaagcggcgggagctccagatccatgacgaggaggtcctgcggctgctctatgaggaggccaagggcaacgtgctggctgcacggtacccgtgcgacgtggaggactgcgaggctctgggcgccctggtgtgccgcgtgcagcttgggccctaccagcccggccggccggcagcctgcgacctgagggagaagctggactccttcctccctgcccacctctgtaagcggggccagagtctctttgctgccctccggggccgtggggccagggccgggccgggcgagcagggcctgctgaacgcctaccgccaggtgcaggaggtcagcagcgacggcgggtgcgaggccgccctgggcacccactaccgcgcctatctcctcaagtgccacgagctgccgttttatgggtgtgccttcttccacggtgaggttgacaagccggcccaaggctttttgcaccggggtgggcgcaagccagtttctgtggccatcagtctggaaggcgtgcacgtcatcgatagcagagagaagcatgtcctgctgggcctgcgcttccaggagctgtcgtgggaccacacctcccccgaggaggaggagcccatcttgtggctggagttcgacggggacagcgagggcacacctgtcaacaagctcctcaagatctactccaagcaggccgaactgatgagcagtctcattgagtactgcatcgaactgagccaggcggcggagcccgcaggcccccaggacagtgcgactggctcgccctcggaccccagctcctcactggctcctgttcagcgccccaagctgcggaggcagggcagtgtggtgtccagccggatccagcatctctccaccatcgactacgtggaggacggcaaggggatcaggcgagtgaagccgaagcgcaccacatccttcttcagccggcagctgtccttgggccaggggagctacaccgtggtgcagcccggcgacagcctggagcagggctgaggacgctgcacccggcaggaggagggcgactgggggccctggcccggcactgtcctcctgaggggcaggcgccggctgcaacagtctcatgggtcaccacgtggggagggctgcctcagcaggtttctcagaccacggagaagtgacttttgggcccggggccatgcccgggctgtgcaaagctggccagggcctcctgtagggctcctctgcagcctgccctcccttcccccggatgctgggccctgctgctctctcaggaccatccgatcaagctgcagctgccaccctcacctagaaacatgcctttgtgcccacctcaagatgggcagtgtccctgttctgaagtgcccagtggcagctccagtggtagaggaccaaggattgaggtttgggacctgaagctccagtgtgtgcctt

SEQ ID NO: 134047 - DNA, 366 bp, Homo sapiens
  Payload ID: 6185
  Gene Symbol: FRMD8
  Gene Name: FERM domain containing 8
  ENST ID: ENST00000531296
  CDS Start-End: 142-342
ccgccgtggcttccgcgtcgcttcccggtcagctgcgtccttagcgggagcccgagtgcgggcggtggcgggcttggcggcggggcaggattccaggcaggagccttgcctctcaggtggcgggctctgcgaccctgcgagatggacgggacagaaggcagtgccgggcagcccggccccgctgagcgatcccaccgaagcagcgtgtcctccgtgggagcccgaggtgggtcccacccgcatctcctcttccacaccctcctgggaccccagccctggagaagtagctctggcttgtcttctttttcattaaagataatttatgtatcgactaagaaataataaggtacattcagatgtggaaaa

SEQ ID NO: 134048 - DNA, 380 bp, Homo sapiens
  Payload ID: 6185
  Gene Symbol: FRMD8
  Gene Name: FERM domain containing 8
  ENST ID: ENST00000525156
  CDS Start-End: 110-380
cttgcggacccagcctgggatcccttaccgtactcaccgagagcttgaggagacctccagccccccatccctggctcccggtaactgctgtttctctttgcctttgcagatggacgggacagaaggcagtgccgggcagcccggccccgctgagcgatcccaccgaagcagcgtgtcctccgtgggagcccgagcggctgacgtgctggtatacctagcggatgacacggtggtgcccctggctgtggagaacctgccctcgctcagtgcccatgagctgcaccgcgctgtccgcgaggtcctgcagcttccagacatcgccctggatgtcttcgcgctctggctggtctcccctctgctggaggtgcagctgaaaccca

SEQ ID NO: 134049 - DNA, 677 bp, Homo sapiens
  Payload ID: 6185
  Gene Symbol: FRMD8
  Gene Name: FERM domain containing 8
  ENST ID: ENST00000533782
  CDS Start-End: 126-677
gtcgcttcccggtcagctgcgtccttagcgggagcccgagtgcgggcggtggcgggcttggcggcggggcaggattccaggcaggagccttgcctctcaggtggcgggctctgcgaccctgcgagatggacgggacagaaggcagtgccgggcagcccggccccgctgagcgatcccaccgaagcagcgtgtcctccgtgggagcccgagaggtgcagctgaaacccaagcaccagccctacaagctgggacgccagtggccggagctgctgctgcgcttcaccagtgccccagacgatgacgtggccatggatgagcctttcctgcagttccgaaggaacgtgttcttcccaaagcggcgggagctccagatccatgacgaggaggtcctgcggctgctctatgaggaggccaagggcaacgtgctggctgcacggtacccgtgcgacgtggaggactgcgaggctctgggcgccctggtgtgccgcgtgcagcttgggccctaccagcccggccggccggcagcctgcgacctgagggagaagctggactccttcctccctgcccacctctgtaagcggggccagagtctctttgctgccctccggggccgtggggccagggccgggccgggcgagcagggcctgctgaacgcctaccgccaggtgcaggaggtc

SEQ ID NO: 134050 - DNA, 568 bp, Homo sapiens
  Payload ID: 6185
  Gene Symbol: FRMD8
  Gene Name: FERM domain containing 8
  ENST ID: ENST00000526201
  CDS Start-End: 103-568
cttagcgggagcccgagtgcgggcggtggcgggcttggcggcggggcaggattccaggcaggagccttgcctctcaggtggcgggctctgcgaccctgcgagatggacgggacagaaggcagtgccgggcagcccggccccgctgagcgatcccaccgaagcagcgtgtcctccgtgggagcccgagcggatgacacggtggtgcccctggctgtggagaacctgccctcgctcagtgcccatgagctgcaccgcgctgtccgcgaggtcctgcagcttccagacatcgccctggatgtcttcgcgctctggctggtctcccctctgctggatgagcctttcctgcagttccgaaggaacgtgttcttcccaaagcggcgggagctccagatccatgacgaggaggtcctgcggctgctctatgaggaggccaagggcaacgtgctggctgcacggtacccgtgcgacgtggaggactgcgaggctctgggcgccctggtgtgccgcgtgcagcttgggccctaccagcccggccggccggcagcctgcgacctgagggagaagctgg

SEQ ID NO: 134051 - DNA, 10262 bp, Homo sapiens
  Payload ID: 6186
  Gene Symbol: FARP1
  Gene Name: FERM, RhoGEF (ARHGEF) and pleckstrin domain protein 1 (chondrocyte-derived)
  Uniprot ID: Q9Y4F1
  ENST ID: ENST00000319562
  CDS Start-End: 266-3403
gcgacccggagcccgctccccacccaccccgcctgctccgccctcccctccgccccgcgccacctttgatggctcggacctcagccggccaccgccagccctgctcgcgcgcccgcgccgccgccgcccgcgggtattaatagccggcgccgccgcgccctcggccgccgggggcttgggagccgccgatcccggagcccgagccgggagagggagccgccgcagccgccggcgctgtggagatattctctaagccgctttcatcatgggagaaatagagcagaggccgaccccaggatcacgactgggggccccggaaaattcggggatcagtaccttggaacgtggacagaagccgcccccaacaccttcaggaaaactcgtgtccatcaaaatccagatgctggatgacacccaggaggcatttgaagttccacaaagagctcctgggaaggtgctgctggatgcagtttgcaaccacctcaacctcgtggaaggtgactattttggcctcgagtttcctgatcacaaaaagatcacggtgtggctggatctcctaaaacccattgtgaaacagattagaaggccaaagcacgttgttgttaagtttgtggtgaaattctttccgcctgaccacacacaactccaagaagaactcacaaggtacctgttcgcgctgcaggtgaagcaggacttggctcaaggcaggttgacgtgtaatgacaccagcgcagctctcttgatttcacacattgtgcaatctgagattggggattttgatgaagccttggacagagagcacttagcaaaaaataaatacatacctcagcaagacgcactagaggacaaaatcgtggaatttcaccataaccacattggacaaacaccagcagaatcagatttccagctcctagagattgcccgtcggctagagatgtatggaatccggttgcacccggccaaggacagggaaggcacgaagatcaatctggccgttgccaacacgggaattctagtgtttcagggtttcactaagatcaatgccttcaactgggccaaggtgcggaagctgagcttcaagaggaagcgctttctcatcaagctccggccagatgccaatagtgcgtaccaggataccttggaattcctgatggccagtcgggatttctgcaagtccttctggaaaatctgtgttgaacatcatgccttctttagactttttgaagagcccaaaccaaagcccaagcccgtcctctttagccgggggtcatcatttcggttcagtggtcggactcagaagcaggttctcgactatgttaaagaaggaggacataagaaggtgcagtttgaaaggaagcacagcaagattcattctatccggagccttgcttcacagcctacagaactgaattcggaagtgctggagcagtctcagcagagcaccagccttacatttggagaaggtgccgaatctccagggggccagagctgccggcgaggaaaggaaccgaaggtttccgccggggagccggggtcgcacccgagccctgcgccgaggagaagccccgcgggtaacaagcaggcggacggagccgcctcggcgcccacggaggaagaggaggaggtcgttaaggataggacccagcagagtaaacctcagcccccgcagccaagcacaggctccctgactggcagtcctcacctttccgagctgtctgtgaactcgcaggggggagtggcccctgccaacgtgaccttgtctcccaacctgagccccgacaccaagcaggcctctcccttgatcagcccgctgctgaatgaccaggcctgcccccggacggacgatgaggatgagggccggaggaagagattcccaactgataaagcgtacttcatagctaaggaagtgtctaccaccgagcgaacatatctgaaggatctcgaagttatcacttcgtggtttcagagcacagtgagcaaagaggacgccatgccggaagcactgaaaagtctcatattcccgaattttgaacctttgcacaaatttcatactaattttctcaaggaaattgagcaacgacttgccctgtgggaaggccgctcaaatgcccaaatcagagattaccaaagaatcggcgatgtcatgctgaagaacattcagggcatgaagcacctggcggctcacctgtggaagcacagcgaggccttggaggccctggagaatggaatcaagagctcccggcggctggagaacttctgcagagactttgagctgcagaaggtgtgttacctaccgctcaacaccttcctcctgcggccactgcaccggctcatgcactacaagcaggtcctggagcggctgtgcaaacaccacccgccgagccacgccgacttcagggactgccgagccgctttggcagagatcacggagatggtggcacagctccacggtacgatgatcaagatggagaatttccagaagctgcacgaactcaagaaagatttgattggcattgacaatcttgtggttccgggaagggagttcatccgtctgggcagcctcagcaagctctcggggaaggggctccagcagcgcatgttcttcctgttcaacgacgtcctgctatacacgagccgggggctgacggcctccaatcagtttaaagtccacgggcagctcccgctctatggcatgacgattgaggagagcgaagacgagtggggggtgccccactgcctgaccctccggggccagcggcagtccatcatcgtggccgccagttctcggtccgagatggagaagtgggttgaggacatccagatggccattgacctggcggagaagagcagcagccccgcccctgagttcctggccagcagcccccctgacaacaagtcccctgatgaagccaccgcggctgaccaggagtcagaggatgacctgagcgcctcgcgcacatcgctggagcgccaggccccgcaccgcggcaacacaatggtgcacgtgtgctggcaccgcaacaccagcgtctccatggtggacttcagcatcgcagtggagaatcagttgtctggaaacctgctgaggaaattcaaaaacagcaacgggtggcagaagctgtgggtggtgttcacaaacttctgcctgttcttctacaaatcacaccaggacaatcatccccttgccagcctgcctctgctcggctactcgctcaccatcccctctgagtccgagaacatccagaaagactacgtgttcaagctgcacttcaagtcccacgtctactacttcagggcggaaagcgagtacacgttcgaaaggtggatggaagtgatccgcagtgccaccagctctgcctcgcgaccccacgtgttgagtcacaaagagtctcttgtgtattgatggccggacacactcgtttccgcagtggctgctttcctggaagacgtttcctttcttctgtattaatgaagcctggtaaaattaacacctgtctgaaaatcaaaaacatggcttcccagcagctctcctgtctccacagccgcgttttttaaccccgacctctcagcgtctgaatgaacagcgctcccacctccagtcctggcatccgctgggggcgctgttctttagctagtgccagtattaaaacattgtcattacgagagtgccaaatgacatcttccctccaccctgcccctgaaaaacagtacacacacatccgttcaacacaagacagggcaagtgtttttcttcctaaaaaaagttctttcttttattattttcacctattggctgctgcattttacgaagtggacttcccggtgtttgtttgtttgtttgcaatacactcagtgcagccttaagcaaatgagatcattttcagatttcattttttttttcagtctttctacttttgtaataataggaagttagtaggactcacttctctgattaataagcaatttgcagcacacagcgttccactgcggggtttcacgctcacctgaaaacacctgttcccaacctacttcttggtgcaagttgaccaaatcgttttaagtggtaactctttccaaccgtagcagggttgttttctgttaagcaaagccgagatccagtgcaatacctggactgtcaccgtcctgtgagtggtgtacacaatgggaagataataagccgtggtgttttgctgtctgtctgtgtcacaagcatgaaaacccgtgtgtcattgatcagcaccatttgtggtatgttccgtgatgagcgtttagtgagcctgctggctgcagagcactatgaaatcatggtacgtagtccccggcacctgtcgttattcctatatcctcctgcaactgtggtttgaaactgcgcattctctagtagtatatatcgtgcctgtcttcaaaaacatttccctttttatactcattccccccaggcatggggtagtgtcagtcggactgcacagggaacacggtttccagtggctttggcccctactcgggaaacgtctgcctgttctcgatggtgatggggtggctgccattcccttggttttcctaagccctttctaacgagagtctcaaacaagcggaggcgagggccaattcaaccccattctttccagcgccccgcaccatagcacctgcccacctgagaaccaggaacgcaccctctctgtggagctctgactggtgtagctggaaacaaacagcaacttgcaaacggacgaagagcctgccgtgtgttaatcatttgccttacaagatgtaccagacggtttccagtactaacaaagggaataaaaatacctcacgccacaatccagcatattgatgttttaaggcaaaacaaccaactttgtctgtagtcttcattttctgtgtggggggggaggggggaaggggacactccagcaagggtttctaaagccccagtgttcagagtgacacagggagggcctgccccccactgttccctatgctccccccacctccaggcaggggcagagcaaacaaacagctccgggccacacagcagcatcaggctccctccagaagtcaccactcactcattcctggagacttggggacaaggcagtctcctcagctatttatttctgaatgattgattgattccaaactacttgctggacactggtggttctgacctgtgaccagcacctctgcttcctgtgtgccctcaagaaaatactagtgtgggtaacagtccatctgagtggagtttgagacacactacacatgagacacacaatgatgcagatactcgttttcttgagctttattggcccctgcatgatacagtccctgtgcttaagaacatgccctattaggtcactctgcctttgctgacacattttatagcagaaatacacaagctgtttttaaaggagggaaatataaaaaatgtttataaactgacagtgttttgccagaggaaaggtacaaaatgctacatacagaaccaaaccagccacttcacaagagcaatgcagggataaaactattggataaggaaggcagatgcacttccaagaaaatcagaacccagcaagaagtggccagtgcaccccaaaccacactggtgtccacctcattggcagcagccagccaggacacagctcaaaaacgcaggagctaccagccacccagtccacggccctcgtctcccagaggctgagtacctccccaggctgcaggctctgggcagctgagccaggagcagctcagggctggcactgagaggctactggtgacagtaaacccgtctcaaaggctgggcctggctacagaccagcagcagttgacgctgaggcaggttccagtggtagccctggtgcctgggctctctcttaatgcaggcctggaagtggcgacacaaaagccagcttccttggctaagatgcccttaaaaacattggggctgattttgtgcgtctacagaaagtaacagcccaggagagaatgtacacagaggcgagctttctaactccatcaaaccccacctcccccgacaggaaatgctgccagtcaactctaaaagaaccacttgttgctctacgggggaaggggctgagtatgatttgtctggcgactgcagagactccccgttcataccagtattcattagaacccagtccctcgagcggctcacccactgttactagcatgagactggcttcagtgctaaaaactgtgatgtcattgtccatttgtaaatctgaagaactctgtaaatcagaaaagctgctgtccgccctggctcacttaaaaatcaggtaacggcacaccctggggaacacagactcaatctgtgtgattcgcaaggacaaaactcatctttgacttatgccgccggcctcacgtaaggaaacagttccccacacagaatactccctggaaacacaaaatgaaatcttctccaattttattattcaacataacattcttgtatggagtaatgagtacaataagaattagcaactcagttctatttccccaaccaaaatatatcccttatacaaattaagagttcaacccaaatccacttctaataaaatacctcaattttagagcttaaaaaccagactgcactagcaaaccgacacaataacccactcaagcatctgtagctcagggctctgtcccctccctatagcttagaggccactagaccagcagatagctgagctacatccccaagctcacccactaacttccttgcttccaaaaatcctgtcttaactccacaagaactggcacacccacgggagatgtcaatcatcagcttcaacaaacataaaagaatgcttcatgtaccagtcaacagctgctgcacgaaccctcccactccagaaacccagagattttccccctcgccaagcaaggtcccacagcaaaccaagaaaaacagacacactggctgcctgcctagcaagcataggccccttccagagaagcaaaataactcttaaggtccccggcaaccgctacagcaatcgcacagatcagcaacctccaactgcatcatctcggtgagcaagtgcgcaagcagtccagggcgctgacctgggcactcggcagctccaggcctggggacttctccctggagtcttccaaagtgtctcatcacacacacacagccacgagtacacacgcacggccacacatacacagcaggtgccctgtcctctgaagagtcacatttcaaggagtatgcaaaataagcgtgttataaaatttatttgtgtaagcattcagacatttttaggtgggaaagatgatatgcagaatccactacaaggtgcaacagaaaatcgtattggaaaggacggtacatctggcgcagaccagcagtggcacgattccaaacaaatgtcagacgagagcgcttcatggggagaaactgaaaattataatttaaagcttcatgaggcaagatatgttccaatttaaaacactaagaaatagtaccatcgatgaaaaaggaaatcaacctctaggtgtaccaaaaggggcgtagggcaaacggggaaaatttgcatttgttgaggtacaaataggagtgttctgtaagagaggggcattaattattaatgacaaaccctgcaaatacaaaataaaacccaaatcactggtcacagaattcaaaatgtacatgtaataaaggcaaggcaatagactcaagttatggcctgtcgaatatttactccactgacgttatctacagaagcacttggccagtttgtacacagtgattccttatgcacgccgaaagggtttccgtaaaaatgacattatatacaaatctgtacacccatccaccagagcgattctccagctcccagagggagttatcaacttaaagcaggatacctgaggtttcatgtctttagttgccttatcataatcccaaatatacatttcagggtttgtttttgtttttaaagacactttcctggaatatgtgcactatggttaaaattaaaaacaaaagtaataaaataaaataaaatgatcgctggaaggagctgaccctccccacccatctgagagacttcatctggctgcagcacagtgaagactgtgtgtgtccctggacgggcgcctggcgctggggtggctcccagtggcgcacctcttcggtggagtcagcgaaggctctcgttgacttttaaaaaaggaggaggatgaagaaggaaaaaaggaaaaacaaaaccccaaatgccaaaggaatttcagtgggatgaagttcctccaccacttagagagtatctagggaaaaagagagagagagaagtcaacacatgtcatttctcatccctgtgcaaaaattcatatagtaaccaaaatcttagttttcataagaaattccaagtcatacaaaaataagtggagcaaatatcaatgtgtaagtctaattttaaaagaatgcatataaagactgagaagatcatgattcttacacaaaaactccagagcatgtcaccaaaaaccaagaatgggttcagcctccctggagagatgtgaataaaacgggaaatcatatcccttttacttacgatcaattgtcaaaaagtgaacattgatccatacatgatgacacagtaagattccagggatgcatatgcattcccgatgtgagggcaggaaacccattttggccataaaaatagtgatgcagtccaagaatctatttcctagaactgcttccgaaatatggtccaaagcaggaacaacgtgtctgcacaaagatgtctctcgggattttcgtaattacactaatttggaaacaactctgatgcccaacagtacagaatcagttaagtaaattatacaaactgaaataacagactaaaaatggtaattatctgtatttacatatatatattaaagcaatattaaaaatatgtacaagtttaaaagtacatacaaaattacagattgggcatcccttatctgaaatgcttctggctttggatctgggaatatccgcattatacttaccagtgtgcagccccaaatccgaaatctgacatgccccagagagcagttcctttgagccccatgctggcgctcaaaagtttcagattggggatttgggatattcagcctgtatatgtgcactatataagtatatttacatgaacaacttctgtatcctaaattaagtactatagaaattctaaaaaatcttctttgcactataaggtagataagagaattcagtaagtttatgacctggtatgacaacagaaggcaatgcacccaaagatgctgatgagatttgggctacagtggtgggatcatgggtaatttctgtgtcttccaaaaattctacaagattgtcttcagaagacaacaaagggtgagaacggggtcccctcatgaccacaattccctcaaccattttacaacagactccaaatcacaggtccaggagagatggctgaggatgtctttgaccaggcttatctcaaacgttccaatctagagctcctcttttcaggcatttgaaatacttggcatctctcccagagaacaaatggttacataaggtcctcccaaaagcacacattagccacggagcctaagactcaactatcaagaaatacaaatgactaaatcacgggatgagttgatgtcacacaaaagaatccaaacattaattccagctgagacagaaaggctctgaaaatgcttcagaggagaggcggctctcatttttcctacagccatccactgaaacaacatgtttggagcaaaactggcaggaagtctaagccatggccaccgtggttttggcagccatcggggtgaacgctcagtgggagcttcaggagcagggaaggaagaagtgggtaccacagccaagcctgcagagagatgataagcacctcaagaggcagctcatctgaggacagaggaggaaagagggcactcctcatcacagacaaaggaaagagagcaccaacttggcttcccccatgcatcactgcaaagtaaagttttaaacacaacacagacatcaggtagctacagacccgcccgagggtaaatagggtcaaccccagccacgatgcccagtgagcacgtaaaatgtgctgcgtctgaatggagatgtgctaagtgtaaaacacacaccaactccaaagacggtccctccaaaaatgtaaaataccttattgatgattgttgttattaatgttgaaataatactttggatctggcaggttaaaaaa

SEQ ID NO: 134052 - DNA, 1021 bp, Homo sapiens
  Payload ID: 6186
  Gene Symbol: FARP1
  Gene Name: FERM, RhoGEF (ARHGEF) and pleckstrin domain protein 1 (chondrocyte-derived)
  Uniprot ID: Q9Y4F1
  ENST ID: ENST00000376581
  CDS Start-End: 37-426
cggcgctgtggagatattctctaagccgctttcatcatgggagaaatagagcagaggccgaccccaggatcacgactgggggccccggaaaattcggggatcagtaccttggaacgtggacagaagccgcccccaacaccttcaggaaaactcgtgtccatcaaaatccagatgctggatgacacccaggaggcatttgaagttccaatggtgtcctcatcctccttcctcaaagccaccggctcctcctggacgggttgggtactgagatgctccatgaagcccaagcaccattcacatctaattgagaagtttggagaggacagaattctcactcatcttacaggctctatttcttacacaaactgggctggaagtagaagcttagcggtcacagtcactgaagagcttcttaatcttttttgagtcaggacttgaagtcctgtttcattatttcattcaaagaaattgattggcaatggccagagttaaattcaaaggtgacattaacacatttcagtgcccaataagtgatttttctgctgggtaggagtagatacagatgtgatctcagatacgtgaagctgcatacagaggggcccatccactcctaaacgggtctccaggaggcttggtttgatctactagatttggtgcctcttaaagggaagcaatacagcttttctgctgtgggttgtttgccactaggggaagattcatttctattccagccataaattagaccaaagagagggatttggtttattgctagtgcagaagttaaaaaccatcttcctttcctgagtggtctcttaattagattctttagtttttaaatgttaactggaattgctgaagtttaattcctgaaagggtttagtttttaaaaggagtacctcatttaccatattactgtgttctgagaaatctacagtaatttttgtgtaacttttttattcaaagaatggattgttaattgtaaagccatttagaaaggcgaataaagtcagatctactttaa

SEQ ID NO: 134053 - DNA, 764 bp, Homo sapiens
  Payload ID: 6186
  Gene Symbol: FARP1
  Gene Name: FERM, RhoGEF (ARHGEF) and pleckstrin domain protein 1 (chondrocyte-derived)
  ENST ID: ENST00000423063
  CDS Start-End: 1-648
cacctggcggctcacctgtggaagcacagcgaggccttggaggccctggagaatggaatcaagagctcccggcggctggagaacttctgcagagactttgagctgcagaaggtgtgttacctaccgctcaacaccttcctcctgcggccactgcaccggctcatgcactacaagcaggtcctggagcggctgtgcaaacaccacccgccgagccacgccgacttcagggactgccgagccgctttggcagagatcacggagatggtggcacagctccacggtacgatgatcaagatggagaatttccagaagctgcacgaactcaagaaagatttgattggcattgacaatcttgtggttccgggaagggtaagcagcagtggcctcactatgcactgcgcggggagcagaaaggaggcatcggagggacttacatttgaaccttttgaagagagacccttgcaaagcaaaatgtcctctttccatccacctgggagacaactggaaaaacacaacagtgtcgttagttcagaatcattgtgttcggaggagataaagcaatcctctgacctcatattctgctttttctccttacggggtgattcgcttctttaccttttcccctaccatatcccacagaagatttgagattgcttattttattttttttaaatgtacataaatgaaaatggaaaattaaaaaaaaaattaggtaaatagtaataaagccagaaaggtagtgcattaaattatgctagaaattc

SEQ ID NO: 134054 - DNA, 744 bp, Homo sapiens
  Payload ID: 6186
  Gene Symbol: FARP1
  Gene Name: FERM, RhoGEF (ARHGEF) and pleckstrin domain protein 1 (chondrocyte-derived)
  ENST ID: ENST00000596256
  CDS Start-End: 1-744
ggaggccctggagaatggaatcaagagctcccggcggctggagaacttctgcagagactttgagctgcagaaggtgtgttacctaccgctcaacaccttcctcctgcggccactgcaccggctcatgcactacaagcaggtcctggagcggctgtgcaaacaccacccgccgagccacgccgacttcagggactgccgagccgctttggcagagatcacggagatggtggcacagctccacggtacgatgatcaagatggagaatttccagaagctgcacgaactcaagaaagatttgattggcattgacaatcttgtggttccgggaaggttcaacgacgtcctgctatacacgagccgggggctgacggcctccaatcagtttaaagtccacgggcagctcccgctctatggcatgacgattgaggagagcgaagacgagtggggggtgccccactgcctgaccctccggggccagcggcagtccatcatcgtggccgccagttctcggtccgagatggagaagtgggttgaggacatccagatggccattgacctggcggagaagagcagcagccccgcccctgagttcctggccagcagcccccctgacaacaagtcccctgatgaagccaccgcggctgaccaggagtcagaggatgacctgagcgcctcgcgcacatcgctggagcgccaggccccgcaccgcggcaacacaatggtgcacgtgtgctggcaccgcaa

SEQ ID NO: 134055 - DNA, 555 bp, Homo sapiens
  Payload ID: 6186
  Gene Symbol: FARP1
  Gene Name: FERM, RhoGEF (ARHGEF) and pleckstrin domain protein 1 (chondrocyte-derived)
  ENST ID: ENST00000599040
  CDS Start-End: 526-555
aggagacctgcctgagccccacagctacaaagagctcctgggaaggtgctgctggatgcagtttgcaaccacctcaacctcgtggaaggtgactattttggcctcgagtttcctgatcacaaaaagatcacggtgtggctggatctcctaaaacccattgtgaaacagattagaaggccaaagcacgttgttgttaagtttgtggtgaaattctttccgcctgaccacacacaactccaagaagaactcacaaggtacctgttcgcgctgcaggtgaagcaggacttggctcaaggcaggttgacgtgtaatgacaccagcgcagctctcttgatttcacacattgtgcaatctgagattggggattttgatgaagccttggacagagagcacttagcaaaaaataaatacatacctcagcaagacgcactagaggacaaaatcgtggaatttcaccataaccacattggacaaacaccagcagaatcagatttccagctcctagagattgcccgtcggctagagatgtatggaatccggttgcacccggccaag

SEQ ID NO: 134056 - DNA, 747 bp, Homo sapiens
  Payload ID: 6186
  Gene Symbol: FARP1
  Gene Name: FERM, RhoGEF (ARHGEF) and pleckstrin domain protein 1 (chondrocyte-derived)
  ENST ID: ENST00000598389
  CDS Start-End: 137-747
attccaggccatagcgaaccggtggtgctcatcctaaaacacaggcgcttgaaatgcgtatttaaaagcaacacacgcgcagtgcagaaaacaaaaacagatacaagcaaaaaatattctctaagccgctttcatcatgggagaaatagagcagaggccgaccccaggatcacgactgggggccccggaaaattcggggatcagtaccttggaacgtggacagaagccgcccccaacaccttcaggaaaactcgtgtccatcaaaatccagatgctggatgacacccaggaggcatttgaagttccacaaagagctcctgggaaggtgctgctggatgcagtttgcaaccacctcaacctcgtggaaggtgactattttggcctcgagtttcctgatcacaaaaagatcacggtgtggctggatctcctaaaacccattgtgaaacagattagaaggccaaagcacgttgttgttaagtttgtggtgaaattctttccgcctgaccacacacaactccaagaagaactcacaaggtacctgttcgcgctgcaggtgaagcaggacttggctcaaggcaggttgacgtgtaatgacaccagcgcagctctcttgatttcacacattgtgcaatctgagattggggattttgatgaagccttggacagagagcacttagcaaaaaataaatacatacctcagcaagacgcactagaggacaaaatcgtggaatttcaccataaccacat

SEQ ID NO: 134057 - DNA, 4926 bp, Homo sapiens
  Payload ID: 6186
  Gene Symbol: FARP1
  Gene Name: FERM, RhoGEF (ARHGEF) and pleckstrin domain protein 1 (chondrocyte-derived)
  ENST ID: ENST00000595437
  CDS Start-End: 240-3470
aagtcccgcgcagcccggggtggtgccggaagcccgtgcctgtggctccgggggaggggagggctcggtgggtccctgaagactgtcctccccgcgcgacgtcgcaggcgaagcagccccaggcaggacctcaaaaagcgacctgcagagtccgagcccctgaccgcccgcctgccgctcccggcttcgccgtgcacacgtctcccgctctccccgatattctctaagccgctttcatcatgggagaaatagagcagaggccgaccccaggatcacgactgggggccccggaaaattcggggatcagtaccttggaacgtggacagaagccgcccccaacaccttcaggaaaactcgtgtccatcaaaatccagatgctggatgacacccaggaggcatttgaagttccacaaagagctcctgggaaggtgctgctggatgcagtttgcaaccacctcaacctcgtggaaggtgactattttggcctcgagtttcctgatcacaaaaagatcacggtgtggctggatctcctaaaacccattgtgaaacagattagaaggccaaagcacgttgttgttaagtttgtggtgaaattctttccgcctgaccacacacaactccaagaagaactcacaaggtacctgttcgcgctgcaggtgaagcaggacttggctcaaggcaggttgacgtgtaatgacaccagcgcagctctcttgatttcacacattgtgcaatctgagattggggattttgatgaagccttggacagagagcacttagcaaaaaataaatacatacctcagcaagacgcactagaggacaaaatcgtggaatttcaccataaccacattggacaaacaccagcagaatcagatttccagctcctagagattgcccgtcggctagagatgtatggaatccggttgcacccggccaaggacagggaaggcacgaagatcaatctggccgttgccaacacgggaattctagtgtttcagggtttcactaagatcaatgccttcaactgggccaaggtgcggaagctgagcttcaagaggaagcgctttctcatcaagctccggccagatgccaatagtgcgtaccaggataccttggaattcctgatggccagtcgggatttctgcaagtccttctggaaaatctgtgttgaacatcatgccttctttagactttttgaagagcccaaaccaaagcccaagcccgtcctctttagccgggggtcatcatttcggttcagtggtcggactcagaagcaggttctcgactatgttaaagaaggaggacataagaaggtgcagtttgaaaggaagcacagcaagattcattctatccggagccttgcttcacagcctacagaactgaattcggaagtgctggagcagtctcagcagagcaccagccttacatttggagaaggtgccgaatctccagggggccagagctgccggcgaggaaaggaaccgaaggtttccgccggggagccggggtcgcacccgagccctgcgccgaggagaagccccgcgggtaacaagcaggcggacggagccgcctcggcgcccacggaggaagaggaggaggtcgttaaggataggacccagcagagtaaacctcagcccccgcagccaagcacaggctccctgactggcagtcctcacctttccgagctgtctgtgaactcgcaggggggagtggcccctgccaacgtgaccttgtctcccaacctgagccccgacaccaagcaggcctctcccttgatcagcccgctgctgaatgaccaggcctgcccccggacggacgatgaggatgagggccggaggaagagattcccaactgataaagcgtacttcatagctaaggaagtgtctaccaccgagcgaacatatctgaaggatctcgaagttatcacttcgtggtttcagagcacagtgagcaaagaggacgccatgccggaagcactgaaaagtctcatattcccgaattttgaacctttgcacaaatttcatactaattttctcaaggaaattgagcaacgacttgccctgtgggaaggccgctcaaatgcccaaatcagagattaccaaagaatcggcgatgtcatgctgaagaacattcagggcatgaagcacctggcggctcacctgtggaagcacagcgaggccttggaggccctggagaatggaatcaagagctcccggcggctggagaacttctgcagagactttgagctgcagaaggtgtgttacctaccgctcaacaccttcctcctgcggccactgcaccggctcatgcactacaagcaggtcctggagcggctgtgcaaacaccacccgccgagccacgccgacttcagggactgccgagccgctttggcagagatcacggagatggtggcacagctccacggtacgatgatcaagatggagaatttccagaagctgcacgaactcaagaaagatttgattggcattgacaatcttgtggttccgggaaggcctggctccttttcccttattaggactccacacttaggacaagccaggcgcatcccatgtgctccagagaggaggccattgttattagtaaaggagttcatccgtctgggcagcctcagcaagctctcggggaaggggctccagcagcgcatgttcttcctgttcaacgacgtcctgctatacacgagccgggggctgacggcctccaatcagtttaaagtccacgggcagctcccgctctatggcatgacgattgaggagagcgaagacgagtggggggtgccccactgcctgaccctccggggccagcggcagtccatcatcgtggccgccagttctcggtccgagatggagaagtgggttgaggacatccagatggccattgacctggcggagaagagcagcagccccgcccctgagttcctggccagcagcccccctgacaacaagtcccctgatgaagccaccgcggctgaccaggagtcagaggatgacctgagcgcctcgcgcacatcgctggagcgccaggccccgcaccgcggcaacacaatggtgcacgtgtgctggcaccgcaacaccagcgtctccatggtggacttcagcatcgcagtggagaatcagttgtctggaaacctgctgaggaaattcaaaaacagcaacgggtggcagaagctgtgggtggtgttcacaaacttctgcctgttcttctacaaatcacaccaggacaatcatccccttgccagcctgcctctgctcggctactcgctcaccatcccctctgagtccgagaacatccagaaagactacgtgttcaagctgcacttcaagtcccacgtctactacttcagggcggaaagcgagtacacgttcgaaaggtggatggaagtgatccgcagtgccaccagctctgcctcgcgaccccacgtgttgagtcacaaagagtctcttgtgtattgatggccggacacactcgtttccgcagtggctgctttcctggaagacgtttcctttcttctgtattaatgaagcctggtaaaattaacacctgtctgaaaatcaaaaacatggcttcccagcagctctcctgtctccacagccgcgttttttaaccccgacctctcagcgtctgaatgaacagcgctcccacctccagtcctggcatccgctgggggcgctgttctttagctagtgccagtattaaaacattgtcattacgagagtgccaaatgacatcttccctccaccctgcccctgaaaaacagtacacacacatccgttcaacacaagacagggcaagtgtttttcttcctaaaaaaagttctttcttttattattttcacctattggctgctgcattttacgaagtggacttcccggtgtttgtttgtttgtttgcaatacactcagtgcagccttaagcaaatgagatcattttcagatttcattttttttttcagtctttctacttttgtaataataggaagttagtaggactcacttctctgattaataagcaatttgcagcacacagcgttccactgcggggtttcacgctcacctgaaaacacctgttcccaacctacttcttggtgcaagttgaccaaatcgttttaagtggtaactctttccaaccgtagcagggttgttttctgttaagcaaagccgagatccagtgcaatacctggactgtcaccgtcctgtgagtggtgtacacaatgggaagataataagccgtggtgttttgctgtctgtctgtgtcacaagcatgaaaacccgtgtgtcattgatcagcaccatttgtggtatgttccgtgatgagcgtttagtgagcctgctggctgcagagcactatgaaatcatggtacgtagtccccggcacctgtcgttattcctatatcctcctgcaactgtggtttgaaactgcgcattctctagtagtatatatcgtgcctgtcttcaaaaacatttccctttttatactcattccccccaggcatggggtagtgtcagtcggactgcacagggaacacggtttccagtggctttggcccctactcgggaaacgtctgcctgttctcgatggtgatggggtggctgccattcccttggttttcctaagccctttctaacgagagtctcaaacaagcggaggcgagggccaattcaaccccattctttccagcgccccgcaccatagcacctgcccacctgagaaccaggaacgcaccctctctgtggagctctgactggtgtagctggaaacaaacagcaacttgcaaacggacgaagagcctgccgtgtgttaatcatttgccttacaagatgtaccagacggtttccagtactaacaaagggaataaaaatacctcacgccacaatccagcatattgatgttttaaggcaaaacaaccaa

SEQ ID NO: 134058 - DNA, 667 bp, Homo sapiens
  Payload ID: 6186
  Gene Symbol: FARP1
  Gene Name: FERM, RhoGEF (ARHGEF) and pleckstrin domain protein 1 (chondrocyte-derived)
  ENST ID: ENST00000601009
  CDS Start-End: 1-514
gtacctgttcgcgctgcaggtgaagcaggacttggctcaaggcaggttgacgtgtaatgacaccagcgcagctctcttgatttcacacattgtgcaatctgagattggggattttgatgaagccttggacagagagcacttagcaaaaaataaatacatacctcagcaagacgcactagaggacaaaatcgtggaatttcaccataaccacattggacaaacaccagcagaatcagatttccagctcctagagattgcccgtcggctagagatgtatggaatccggttgcacccggccaaggacagggaaggcacgaagatcaatctggccgttgccaacacgggaattctagtgtttcagggtttcactaagatcaatgccttcaactgggccaaggtgcggaagctgagcttcaagaggaagcgctttctcatcaagctccggccagatgccaatttcctggggtggcctggagcccggagccgtgggcgacttcacagagaaacgacgtaagagccaacattgacacgaagtatgaggaagaggatgaacgttgcgtttcagtgattttaaggaggcaggaagggactttcagtatctgggttttgtttttcaaggaaatgtaagccaaataaacataatttgtatatgaaatctgtcaaaaaa

SEQ ID NO: 134059 - DNA, 5103 bp, Homo sapiens
  Payload ID: 6186
  Gene Symbol: FARP1
  Gene Name: FERM, RhoGEF (ARHGEF) and pleckstrin domain protein 1 (chondrocyte-derived)
  ENST ID: ENST00000627049
  CDS Start-End: 419-3649
ttcccgctcgccggcctcagaggcggcgggtccggcgcgggcgcagcggtgcgggcgctcggctggggcgcggggcggggacgcggccgctgcccgctttgcgccgctcctccctgcgcgagtagcgctggccccggcgtcgaggcggccatggcgacccggagcccgctccccacccaccccgcctgctccgccctcccctccgccccgcgccacctttgatggctcggacctcagccggccaccgccagccctgctcgcgcgcccgcgccgccgccgcccgcgggtattaatagccggcgccgccgcgccctcggccgccgggggcttgggagccgccgatcccggagcccgagccgggagagggagccgccgcagccgccggcgctgtggagatattctctaagccgctttcatcatgggagaaatagagcagaggccgaccccaggatcacgactgggggccccggaaaattcggggatcagtaccttggaacgtggacagaagccgcccccaacaccttcaggaaaactcgtgtccatcaaaatccagatgctggatgacacccaggaggcatttgaagttccacaaagagctcctgggaaggtgctgctggatgcagtttgcaaccacctcaacctcgtggaaggtgactattttggcctcgagtttcctgatcacaaaaagatcacggtgtggctggatctcctaaaacccattgtgaaacagattagaaggccaaagcacgttgttgttaagtttgtggtgaaattctttccgcctgaccacacacaactccaagaagaactcacaaggtacctgttcgcgctgcaggtgaagcaggacttggctcaaggcaggttgacgtgtaatgacaccagcgcagctctcttgatttcacacattgtgcaatctgagattggggattttgatgaagccttggacagagagcacttagcaaaaaataaatacatacctcagcaagacgcactagaggacaaaatcgtggaatttcaccataaccacattggacaaacaccagcagaatcagatttccagctcctagagattgcccgtcggctagagatgtatggaatccggttgcacccggccaaggacagggaaggcacgaagatcaatctggccgttgccaacacgggaattctagtgtttcagggtttcactaagatcaatgccttcaactgggccaaggtgcggaagctgagcttcaagaggaagcgctttctcatcaagctccggccagatgccaatagtgcgtaccaggataccttggaattcctgatggccagtcgggatttctgcaagtccttctggaaaatctgtgttgaacatcatgccttctttagactttttgaagagcccaaaccaaagcccaagcccgtcctctttagccgggggtcatcatttcggttcagtggtcggactcagaagcaggttctcgactatgttaaagaaggaggacataagaaggtgcagtttgaaaggaagcacagcaagattcattctatccggagccttgcttcacagcctacagaactgaattcggaagtgctggagcagtctcagcagagcaccagccttacatttggagaaggtgccgaatctccagggggccagagctgccggcgaggaaaggaaccgaaggtttccgccggggagccggggtcgcacccgagccctgcgccgaggagaagccccgcgggtaacaagcaggcggacggagccgcctcggcgcccacggaggaagaggaggaggtcgttaaggataggacccagcagagtaaacctcagcccccgcagccaagcacaggctccctgactggcagtcctcacctttccgagctgtctgtgaactcgcaggggggagtggcccctgccaacgtgaccttgtctcccaacctgagccccgacaccaagcaggcctctcccttgatcagcccgctgctgaatgaccaggcctgcccccggacggacgatgaggatgagggccggaggaagagattcccaactgataaagcgtacttcatagctaaggaagtgtctaccaccgagcgaacatatctgaaggatctcgaagttatcacttcgtggtttcagagcacagtgagcaaagaggacgccatgccggaagcactgaaaagtctcatattcccgaattttgaacctttgcacaaatttcatactaattttctcaaggaaattgagcaacgacttgccctgtgggaaggccgctcaaatgcccaaatcagagattaccaaagaatcggcgatgtcatgctgaagaacattcagggcatgaagcacctggcggctcacctgtggaagcacagcgaggccttggaggccctggagaatggaatcaagagctcccggcggctggagaacttctgcagagactttgagctgcagaaggtgtgttacctaccgctcaacaccttcctcctgcggccactgcaccggctcatgcactacaagcaggtcctggagcggctgtgcaaacaccacccgccgagccacgccgacttcagggactgccgagccgctttggcagagatcacggagatggtggcacagctccacggtacgatgatcaagatggagaatttccagaagctgcacgaactcaagaaagatttgattggcattgacaatcttgtggttccgggaaggcctggctccttttcccttattaggactccacacttaggacaagccaggcgcatcccatgtgctccagagaggaggccattgttattagtaaaggagttcatccgtctgggcagcctcagcaagctctcggggaaggggctccagcagcgcatgttcttcctgttcaacgacgtcctgctatacacgagccgggggctgacggcctccaatcagtttaaagtccacgggcagctcccgctctatggcatgacgattgaggagagcgaagacgagtggggggtgccccactgcctgaccctccggggccagcggcagtccatcatcgtggccgccagttctcggtccgagatggagaagtgggttgaggacatccagatggccattgacctggcggagaagagcagcagccccgcccctgagttcctggccagcagcccccctgacaacaagtcccctgatgaagccaccgcggctgaccaggagtcagaggatgacctgagcgcctcgcgcacatcgctggagcgccaggccccgcaccgcggcaacacaatggtgcacgtgtgctggcaccgcaacaccagcgtctccatggtggacttcagcatcgcagtggagaatcagttgtctggaaacctgctgaggaaattcaaaaacagcaacgggtggcagaagctgtgggtggtgttcacaaacttctgcctgttcttctacaaatcacaccaggacaatcatccccttgccagcctgcctctgctcggctactcgctcaccatcccctctgagtccgagaacatccagaaagactacgtgttcaagctgcacttcaagtcccacgtctactacttcagggcggaaagcgagtacacgttcgaaaggtggatggaagtgatccgcagtgccaccagctctgcctcgcgaccccacgtgttgagtcacaaagagtctcttgtgtattgatggccggacacactcgtttccgcagtggctgctttcctggaagacgtttcctttcttctgtattaatgaagcctggtaaaattaacacctgtctgaaaatcaaaaacatggcttcccagcagctctcctgtctccacagccgcgttttttaaccccgacctctcagcgtctgaatgaacagcgctcccacctccagtcctggcatccgctgggggcgctgttctttagctagtgccagtattaaaacattgtcattacgagagtgccaaatgacatcttccctccaccctgcccctgaaaaacagtacacacacatccgttcaacacaagacagggcaagtgtttttcttcctaaaaaaagttctttcttttattattttcacctattggctgctgcattttacgaagtggacttcccggtgtttgtttgtttgtttgcaatacactcagtgcagccttaagcaaatgagatcattttcagatttcattttttttttcagtctttctacttttgtaataataggaagttagtaggactcacttctctgattaataagcaatttgcagcacacagcgttccactgcggggtttcacgctcacctgaaaacacctgttcccaacctacttcttggtgcaagttgaccaaatcgttttaagtggtaactctttccaaccgtagcagggttgttttctgttaagcaaagccgagatccagtgcaatacctggactgtcaccgtcctgtgagtggtgtacacaatgggaagataataagccgtggtgttttgctgtctgtctgtgtcacaagcatgaaaacccgtgtgtcattgatcagcaccatttgtggtatgttccgtgatgagcgtttagtgagcctgctggctgcagagcactatgaaatcatggtacgtagtccccggcacctgtcgttattcctatatcctcctgcaactgtggtttgaaactgcgcattctctagtagtatatatcgtgcctgtcttcaaaaacatttccctttttatactcattccccccaggcatggggtagtgtcagtcggactgcacagggaacacggtttccagtggctttggcccctactcgggaaacgtctgcctgttctcgatggtgatggggtggctgccattcccttggttttcctaagccctttctaacgagagtctcaaacaagcggaggcgagggccaattcaaccccattctttccagcgccccgcaccatagcacctgcccacctgagaaccaggaacgcaccctctctgtggagctctgactggtgtagctggaaacaaacagcaacttgcaaacggacgaagagcctgccgtgtgttaatcatttgccttacaagatgtaccagacggtttccagtactaacaaagggaataaaaatacctcacgccacaatccagcatattgatgttttaaggcaaaacaacc

SEQ ID NO: 134060 - DNA, 4051 bp, Homo sapiens
  Payload ID: 6187
  Gene Symbol: FARP2
  Gene Name: FERM, RhoGEF and pleckstrin domain protein 2
  Uniprot ID: O94887
  ENST ID: ENST00000264042
  CDS Start-End: 171-3335
ggggtcagggcggggcgcgctgcgcgggggctgccggcgggcagttgggagcaggcgacgccgacgcgagtctggcggctgctgcttgcgactgcggaggccgggcgaggccggtgaggacgcggcgggcgagcgagaggccgaggtgttttcttcactcatggtgaagaatgggggagatagaaggaacatacagagtcctgcagactgcagggatgcgcttgggtgcccagacccctgtgggagttagcacccttgagcctgggcagactctcttgcccagaatgcaagagaagcacctgcacctcagagtaaagctgctggacaacaccatggaaatatttgacattgagcctaaatgcgatggccaggtattactgacacaagtgtggaagcgtttaaacctggtagaatgtgactacttcgggatggagtttcaaaatactcagtcctactggatttggcttgaacctatgaaacccatcattaggcaaatacgaaggccaaagaatgtggtgcttcgcctagctgtaaaattttttccacctgatcctggtcagctacaagaagaatatacaagatacttgtttgccttgcaacttaagagagacctgctggaagagcgtttgacctgtgctgacaccacagcggcccttctcacgtcccatctcctgcagtcggaaataggagattacgatgaaacgctggaccgagagcacctcaaagtgaacgagtatttgcctggccagcagcactgccttgagaagatactagaattccatcagaagcacgtgggccagacacctgctgagtcggatttccaggtgctcgaaattgctcgaaagttggaaatgtacggcatcagatttcacatggcttctgacagggaaggaaccaagattcaactggcagtttcccacatgggtgtactcgtgttccagggcaccaccaaaatcaacactttcaactggtccaaggtccgtaaactaagcttcaagaggaaaagatttcttatcaaacttcatccagaggttcatggaccttaccaggacacattagaatttttgttgggtagtagagatgaatgtaagaacttctggaagatttgtgtggagtatcacaccttttttagacttttggaccaacctaagccaaaagcaaaagccgtcttcttcagccggggctcctccttcagatacagtggaagaactcagaaacaactagtagattatttcaaagacagtggaatgaagagaattccatatgaaagaaggcacagcaagacccacacgtccgttcgagctctgactgcagacctaccaaaacagagcatctcattccccgagggattgaggactcctgcctccccatcttcagcgaatgccttttactcgctctctccctccactctggtcccctctggcctgccagagtttaaggacagcagcagctccctcacagatccccaggtttcctacgtcaagagtccagctgcagagaggcgcagtggagcagtggctggaggccccgacacaccatcggcccagcccctcgggccccccgcactccagcctggtccaggcctttccacgaagagtcctcagccttctccctccagccggaagagccccctgagtctgagccctgcatttcaggtgcctttgggcccagctgaacagggctcatccccactcctgagccctgtcctcagtgatgctggcggagccgggatggactgcgaggagcccagacacaagcgcgtgcctgcagacgaggcctacttcatagtcaaagagattctcgctacagaacgaacatacctcaaggatttagaagttattaccgtgtggttccgcagcgcagtggtgaaggaggacgccatgcctgcgactctgatgacgctgctcttctccaacatcgatcccatctatgagttccacagaggcttcctgcgcgaggtggagcagaggctggcactctgggaagggccctccaaagcccacacaaaaggcagtcatcaacgaatcggggacatcctgctcaggaacatgcgccagttaaaggagtttaccagctacttccaaagacatgacgaggtcctaacagaactggaaaaggctaccaaacgctgtaagaagttggaggcagtgtacaaggagtttgagctgcagaaggtctgctacttgcctctcaacacgttcctgctgaagcccatccagcggctgctgcactaccgcctgctgctgcgccgcctatgcggacattacagccccgggcaccatgactacgctgactgccatgacgccctgaaagccatcacagaggtgaccaccacactacagcacattctcatccggctggagaacctgcagaagctaacggagctgcagcgggacctggtgggcatagagaacctcattgctcctggcagggagttcatccgtgagggctgccttcacaagctcaccaagaagggcctgcagcagaggatgttttttctgttctcagatatgttgctgtacacaagcaaaggagttgcagggaccagccacttccggatccggggcctccttcccctccaaggcatgctggtggaagaaagtgataacgagtggtctgttccacactgtttcaccatctacgcggctcagaaaacaatcgtggtggcagccagcactcggctggagaaagagaagtggatgctggacctgaactccgcgatccaagcagccaagagtggcggtgacacggcccctgcactgccaggccgcactgtgtgcactcgtccccccagatcccccaacgaggtatctctggagcaggagtcagaagatgatgctcggggtgtccgcagctccctggaggggcatggccagcaccgggccaacaccacaatgcacgtgtgctggtaccggaacaccagcgtgtccagggcagaccacagtgcagctgtcgagaaccagctttcaggatatctgctaagaaagttcaaaaacagtcatggctggcagaagctctgggtcgtctttaccaacttctgtttgttcttctacaaaactcatcaggatgactacccactggccagcctcccgctgctgggctacagcgtgagcatccccagggaggccgatggcatacacaaagactatgttttcaagctccagttcaaatcccacgtctacttcttccgggctgagagcaagtacacatttgaaaggtggatggaggtgatccagggggccagcagctcagccgggagggccccaagcatcgtgcaggatggcccccaaccctcctcagggctggaggggatggtcagggggaaggaggaatgacgctcaacctgcccaggtttggacacaactacaaagaacagcaggacacagaggtgacctctgtcctgaggcttctcaacagatgggaagtggctgtggtctcactggatccccactggcaccagcagtgtgggtgggcctcatgtaacatctgggaggggcttcatccccccacccaggacctagtgcatgccagcagctatctggggccctgggaaaaatgtgcgagtcttgagcgcggagccgctcaagccacagctcccaggcccctggctcaaagacgcagacaaggcctgagcagtgctctcggcatcggaccaaagcctgggcacaccctgcctctctccccagagcagggtccctgccgaggactggcctagagcaagcactggaaaagaggccctgccatacaccctgcgtacccactgccaggaccctctcagacaagcgtggcacagccatgctgaccttccatctggtgaaccaagtggcagccccaggggcctgccctgcaggtcacagctaaacaagtctggcagaagccacgcttgttccccatgtacctctagagaagcagaaaccaaagtccccctgtgccctgggagggtggggccgtctaatttattactgcccagcattccttccaacgggaagtagatgggcgactgctttgttcacacacatttgattaaaaataaacaaacagcatctcccca

SEQ ID NO: 134061 - DNA, 2580 bp, Homo sapiens
  Payload ID: 6187
  Gene Symbol: FARP2
  Gene Name: FERM, RhoGEF and pleckstrin domain protein 2
  Uniprot ID: O94887
  ENST ID: ENST00000373287
  CDS Start-End: 117-2060
gcgacgccgacgcgagtctggcggctgctgcttgcgactgcggaggccgggcgaggccggtgaggacgcggcgggcgagcgagaggccgaggtgttttcttcactcatggtgaagaatgggggagatagaaggaacatacagagtcctgcagactgcagggatgcgcttgggtgcccagacccctgtgggagttagcacccttgagcctgggcagactctcttgcccagaatgcaagagaagcacctgcacctcagagtaaagctgctggacaacaccatggaaatatttgacattgagcctaaatgcgatggccaggtattactgacacaagtgtggaagcgtttaaacctggtagaatgtgactacttcgggatggagtttcaaaatactcagtcctactggatttggcttgaacctatgaaacccatcattaggcaaatacgaaggccaaagaatgtggtgcttcgcctagctgtaaaattttttccacctgatcctggtcagctacaagaagaatatacaagatacttgtttgccttgcaacttaagagagacctgctggaagagcgtttgacctgtgctgacaccacagcggcccttctcacgtcccatctcctgcagtcggaaataggagattacgatgaaacgctggaccgagagcacctcaaagtgaacgagtatttgcctggccagcagcactgccttgagaagatactagaattccatcagaagcacgtgggccagacacctgctgagtcggatttccaggtgctcgaaattgctcgaaagttggaaatgtacggcatcagatttcacatggcttctgacagggaaggaaccaagattcaactggcagtttcccacatgggtgtactcgtgttccagggcaccaccaaaatcaacactttcaactggtccaaggtccgtaaactaagcttcaagaggaaaagatttcttatcaaacttcatccagaggttcatggaccttaccaggacacattagaatttttgttgggtagtagagatgaatgtaagaacttctggaagatttgtgtggagtatcacaccttttttagacttttggaccaacctaagccaaaagcaaaagccgtcttcttcagccggggctcctccttcagatacagtggaagaactcagaaacaactagtagattatttcaaagacagtggaatgaagagaattccatatgaaagaaggcacagcaagacccacacgtccgttcgagctctgactgcagacctaccaaaacagagcatctcattccccgagggattgaggactcctgcctccccatcttcagcgaatgccttttactcgctctctccctccactctggtcccctctggcctgccagagtttaaggacagcagcagctccctcacagatccccaggtttcctacgtcaagagtccagctgcagagaggcgcagtggagcagtggctggaggccccgacacaccatcggcccagcccctcgggccccccgcactccagcctggtccaggcctttccacgaagagtcctcagccttctccctccagccggaagagccccctgagtctgagccctgcatttcaggtgcctttgggcccagctgaacagggctcatccccactcctgagccctgtcctcagtgatgctggcggagccgggatggactgcgaggagcccagacacaagcgcgtgcctgcagacgaggcctacttcatagtcaaagagattctcgctacagaacgaacatacctcaaggatttagaagttattaccgtgtggttccgcagcgcagtggtgaaggaggacgccatgcctgcgactctgatgacgctgctcttctccaacatcgatcccatctatgagttccacagaggcttcctgcgcgaggtggagcagaggctggcactctgggaagggccctccaaagcccacacaaaaggcagtcatcaacgaatcggggacatcctgctcaggaacatgcgccagttaaaggtgttccagctccacgaagggcatgtagcaggggtcacaaaaatggagtagacttttggataggcaggggcagcactgggggaagtgagatttctcttcaataggagcaacggtacaggtgttcacatgtggacaacagtgcaggtcgtgcattgactgttcaggggtctcactcttgcttaacgtgcctggaacagttctccctccctctcaggctgctcatgagttcaccacgtgaccgcccaaggtgtggagctctgcataacaccatgaagctgagccacagtgacgacgacgactcaagctccccctcctccatccctcgcctgtcccaccttctacccaatcctgcgagactctggccactcctcacacctagagttcccaagggactataggttttgctgttctgtgttgagatagccccacttgaagaactgcattcagcctaggtgcccttttcctgcctcgacggaagctgagtcaggttgttaatgagaaagttctacttatcccaaaggcagttgcactaatttaaaattgaaatatacacaaatctgtttgatccaga

SEQ ID NO: 134062 - DNA, 538 bp, Homo sapiens
  Payload ID: 6187
  Gene Symbol: FARP2
  Gene Name: FERM, RhoGEF and pleckstrin domain protein 2
  ENST ID: ENST00000445489
  CDS Start-End: 260-538
agcatctggaaatattgttattgagggtggtgcttgttattttatgctccacctatgagtgcctgagtagaaaataatcttttgtaacactttcttttgacgtgattaagactcacagaagttgcagtaatagtacagaggattcccgtgtctccgataatttgtcttttaccttgttttagtacctaaataatgtgataattccttcatgtggtttttttttttttcattttagtgttttcttcactcatggtgaagaatgggggagatagaaggaacatacagagtcctgcagactgcagggatgcgcttgggtgcccagacccctgtgggagttagcacccttgagcctgggcagactctcttgcccagaatgcaagagaagcacctgcacctcagagtaaagctgctggacaacaccatggaaatatttgacattgagcctaaatgcgatggccaggtattactgacacaagtgtggaagcgtttaaacctggtagaatgtgactacttcgggatggagtttcaaaatactcag

SEQ ID NO: 134063 - DNA, 456 bp, Homo sapiens
  Payload ID: 6187
  Gene Symbol: FARP2
  Gene Name: FERM, RhoGEF and pleckstrin domain protein 2
  ENST ID: ENST00000418082
  CDS Start-End: 54-456
acaataactgtttgggctggtggcgagagtgttttcttcactcatggtgaagaatgggggagatagaaggaacatacagagtcctgcagactgcagggatgcgcttgggtgcccagacccctgtgggagttagcacccttgagcctgggcagactctcttgcccagaatgcaagagaagcacctgcacctcagagtaaagctgctggacaacaccatggaaatatttgacattgagcctaaatgcgatggccaggtattactgacacaagtgtggaagcgtttaaacctggtagaatgtgactacttcgggatggagtttcaaaatactcagtcctactggatttggcttgaacctatgaaacccatcattaggcaaatacgaaggccaaagaatgtggtgcttcgcctagctgtaaaattttttccacctgatcctggtcagctacaagaagaat

SEQ ID NO: 134064 - DNA, 550 bp, Homo sapiens
  Payload ID: 6187
  Gene Symbol: FARP2
  Gene Name: FERM, RhoGEF and pleckstrin domain protein 2
  ENST ID: ENST00000412332
  CDS Start-End: 1-170
tcaaatcccacgtctacttcttccgggctgagagcaagtacacatttgaaaggtggatggaggtgatccagggggccagcagctcagccgggagggccccaagcatcgtgcaggatggcccccaaccctcctcagggctggaggggatggtcagggggaaggaggaatgacgctcaacctgcccagagcagggtccctgccgaggactggcctagagcaagcactggaaaagaggccctgccatacaccctgcgtacccactgccaggaccctctcagacaagcgtggcacagccatgctgaccttccatctggtgaaccaagtggcagccccaggggcctgccctgcaggtcacagctaaacaagtctggcagaagccacgcttgttccccatgtacctctagagaagcagaaaccaaagtccccctgtgccctgggagggtggggccgtctaatttattactgcccagcattccttccaacgggaagtagatgggcgactgctttgttcacacacatttgattaaaaataaacaaacagcatctcccc

SEQ ID NO: 134065 - DNA, 578 bp, Homo sapiens
  Payload ID: 6187
  Gene Symbol: FARP2
  Gene Name: FERM, RhoGEF and pleckstrin domain protein 2
  ENST ID: ENST00000422951
  CDS Start-End: 1-239
ggttccgcagcgcagtggtgaaggaggacgccatgcctgcgactctgatgacgctgctcttctccaacatcgatcccatctatgagttccacagaggcttcctgcgcgaggtggagcagaggctggcactctgggaagggccctccaaagcccacacaaaaggcagtcatcaacgaatcggggacatcctgctcaggaacatgcgccagttaaaggctgctcatgagttcaccacgtgaccgcccaaggtgtggagctctgcataacaccatgaagctgagccacagtgacgacgacgactcaagctccccctcctccatccctcgcctgtcccaccttctacccaatcctgcgagactctggccactcctcacacctagagttcccaagggactataggttttgctgttctgtgttgagatagccccacttgaagaactgcattcagcctaggtgcccttttcctgcctcgacggaagctgagtcaggttgttaatgagaaagttctacttatcccaaaggcagttgcactaatttaaaattgaaatatacacaaatctgtttgatccagattatca

SEQ ID NO: 134066 - DNA, 6065 bp, Homo sapiens
  Payload ID: 6187
  Gene Symbol: FARP2
  Gene Name: FERM, RhoGEF and pleckstrin domain protein 2
  ENST ID: ENST00000413432
  CDS Start-End: 1-1449
gtggagtatcacaccttttttagacttttggaccaacctaagccaaaagcaaaagccgtcttcttcagccggggctcctccttcagatacagtggaagaactcagaaacaactagtagattatttcaaagacagtggaatgaagagaattccatatgaaagaaggcacagcaagacccacacgtccgttcgagctctgactgcagacctaccaaaacagagcatctcattccccgagggattgaggactcctgcctccccatcttcagcgaatgccttttactcgctctctccctccactctggtcccctctggcctgccagagtttaaggacagcagcagctccctcacagatccccaggtttcctacgtcaagagtccagctgcagagaggcgcagtggagcagtggctggaggccccgacacaccatcggcccagcccctcgggccccccgcactccagcctggtccaggtgtcgggttttgtcatgtcgtgagcagctgtggttctgtctgtgctggggggcagagtttcagtgccttagacctagacacagggagggccggtagggagctcagcgctgcttgtaaaaatgacaatggtggggatgactttaccacaggctcatttccttccggtggggagcaccggtgtgaccggcagtgtcgtgggggggcccctgctttcacattgacaaatgcccagctgcaggtatctgaggagttcatagacgatgacccagcagacatctccttctttgctggaggctctgaggcgttttcttttccttatggctctgtagtcccacaggaatctcaggcctctgcccagcctctggtggcccctcctttgtgtgagcttccagggtctgctcggtccagcccagacaggtactccatggaggcagtagatatgaacacagaagacggttttgcatttgaggaggaaagtgacttcaatgggaacgcacacccctcagacacctcggagctatttgaggtgaaggcgcaggccagccggatgcagcgcctgctgggtccttctgagaccagctcactgagaaacagccagtctgaaaacagctccctcaataacatgccactacgtggtgggctgtctgtgcacacatgcagctcagccagtcaatctgaggccagctccatggtcaacttcccagcctactcagtccgctctgagtccagctcggccttccagttctctgacatcatcgaccagttagagcagctcagctacccacccacgacggccgaggactccagcagcacagagtcagactcatgggactctgaaaccgaggcccccctagacataagccttttcttcagcaacccttttgcacacacaagtggagaaagagtcccttttgatttacagaacaatttaaagaatttgactccaggagagcaaatagataaaaacccatcttgaccactctgggttcctttacaaggcaacccactcacccacgctgtgtggtttagagctcagaattgtttggtttaaacacagaaagtgactttcatttcatggatagatattcaatttttttttaatttcctgatttattatacttttttgaatgtcaaaaaatttgacctttcacttggaatgacgtaaaagctatgcctccggtcttagacctgagtactccagccagtcctcctagaggaccgataaattagtctttgtagtttatgttttttgccatatgctttgattcaagtaagaactggtgctatacattctgaatgttacacaattctgttcatgttgatcttcaatagaatatgtgtattacactattgatgctgcttttcaagatgagccctgttgcctataattaactaggacacaggttttgtctcacttgtccagccactgcgctacacaaaaccttgagtatgcctctacagccctaaccctgggaaagatggccataggccatggcctcctgtgtgctgtggtcaaactcgtgggactctgagaccctaaggcccccgtagacattagccttttcttcagcaacccttttgcacagacaagtggagaaagagtcccactgggactctggggggacagtcatccattgcactggggttgggggtgaggggatgcctggaactgtcccagtgccaaaggcaccatgtcatttttttttttaaaggtgtcaaagggccactgcctcattattgacttgagacccagaaatagtgctgtgtgtagatagtggtcttggagaggcgttggtttaaaatgcacttatgtaagtttgagctgttttcttttcttcagcttaattgggaactagaagatacgtggttgcaaaaaaagcagaaccagacacaccatgggcatcattctgtcccaggacaatgggaagggtcccaggggcaggtgtgccaaggtggccctgcccacccatccagcgtacccgtaaacacataccaggtgccatgggccctgctgggtaccacatggagagcttctcagtctaaaccaccataaaagtcaaggctgatgtttgtggcacagagtgggtaggtccatccagggacgtcatggggaaaccactgccatgcagctcagcacccacaagtgccggtctcaggccagccctagatgacactgttcaatttgtcaagtccacagatagggttggggtttttgttgtttttcttttctgatcttacctagtagtgcaataccacatttaaagtttaattctcttcccagaatgtcttgtggaaactttacatttcattcctgttcacattgtaagatctctgatgttttgcctggatggatttactgtgattgcacagggaccacgtggctcaggtgtctgagccattgagggcatcttgcaagggctggttttccttttctcatcagtgttggctggatgccagcaggggttttgtggctaaccacatcaggcagtttcccatttttgtagctttgttatacctaaaccgcagtctcatcattttgcttatgcagctagaagtttcagtctgtatagttgttattcattctgtccctggtaatttagacctgccttcttgatgctttaggggccattgggcacagctttctacattggctaacaaatacctgtgaaaatgttaacagacagaagcgcagcagtgaacctgaggtcaggacaggactgtttgggaggttcttcttttcttactgtcactccaaaaataaaccttggatttgtgtgctggggagaaatgagtatagataacatttaaaacgttttcctaaaccttagtattcatatggtagctgatggttcctctccccttcattactgttgcctgacgacggtccttgctgatgctgtgaactaacaaagttgtctttttgtttttaagggaacccaccctggcgtctggacagcaggttaggtttgggtggttttgagctagcactgctgtggggcaggggtggccgctccctggtgaagctaatgctgtggaagctggaatgttccttcctaaggagtgggatcatgcccctaccccagcagaggtatctcatcactcgctcatgtgcgagattctaaataaattttgttcttgggcatcttctactaggcctcctataaaatagatcttgctgtttttggtttgtgttaatggaacctcactttctagagataattctttagttttttatttaggaagttttcaaaatatacaaagcaggaatgtaaggaacccgcatcacctcaaattcagtgttacccacacttgaccatgcttgccccagctgtgccttttttctttccttgggtattttgttgctaaagtattttattattactgttttagagacagggcctcactcctgtcacccaggctggagtatggtggcacagtcacatctcactgcagcctcaacctcctgggctcaagccatccccccaccccagcctcctgagtagctgggactacaggcacacatcactgcgcccagctaatttttaaaaaatttttgtggagacaggttctcttcatgttgcccaggatggtcttgaattcctgggctccagcagtcctcctgtctcagcctcccaaagtgccagaattgcaggcatgagcctgggtgctagagcgaggccctgtctcaaaaaaaaaaaaaaaaaaaatcaatcaaggctttcttccgagttactgctcacagccctcttacccctttctcttgtgagtgggttgtaatgtccacccagaggggatttagacacggaagggaaggcaagcgtgggcaccatggctttagaaccataaggaagacatttccctctacagattctgtctttccacttgtaacagttaatgaggcactgacgttgctcttttccaccttaacaagacagtttacagtggttaaatagcaaaactccaggagcaattcagcctgaggccatagtgccctgcagcagcattgggctctgcttttgtttctgctttgtgctttgtggctcttcttcaagccagtgttgggtagtgcacagcctgagaggtgtggcctgataaaccctgaaattgaaagaagtatgcagatttgactcagcactcctggaagtgtctggatacagctcactgagagtgtggaggtgaaagtgcctgcaaaatattaacagttctctctcaatctattgatctcctcagttacatccagaaccttaaagccgcacagttgtcatcctccgcccgcagtctcaggcagggcgcatcaggggctgcactggtagctcccaggaggacttacccatgggtcaccgtcatagccaggtgtgtctactcagaggggacgcaatcctgcagcagtccccgtcaatgagaggccaccagcagacagtgcctgttggacccatgaagtccaccactaattatatactctgctttaggtagaatatttttattagctgtcaaactgtttttgtatttaagtttccaaaagtccaggtactttatgtaggccaatgtataaatatttcaagtctaacagtagcacagttatatgttaatacaactgactacacgaaaaatatgtaatagcatatgctatgtaatttttcaaatcactaggtattgatatgtgccttttttatattaccaagagattctctaaatatggaattagattaggattctctgctccacttaacacacatttttaaattagtactgatgattgagggatggacaatagcacaccaaaaaaaaaagagtttagtatgaaaaatttaaacctgttggttaagtcattcccattaatgtcattttgctgagggtgacttggtccttttgaattgctttggtgtacgggtatgttctgatttttcatgcaagctcctctgccattccaccgctctgaggagtaattgtagcacttcacatgtgctgtggttgtgatcacatggtgacatacatagcatgtgtgttcccagctgttgtgtgtttatgtgacatttgatgccaatacatatgtcttcaaggtatgcttgttccctcccagctcgtggaatatcaaaaaaattcattgctggaaaaattatttcatagacaaaaatgttaatgttctcttggggacttagagttgaaaatatttgtatagatttggttctcaagtccacagaatcgtatctgctgtggtctccctttggtgctcatctgggagccatgtgtatggaagattctgtcacaggcggctgggatgtgggcagatgctgttagcctccctctccacgtggtggtccatgcctgacgtgtcccctagttcaaggaagcgccatctttagcatgaaaacaattgcgttcccctaggaaatgaagaaaaaatgagctgaaatttccttatacatttgaatttgttcattttttaaagagacatttttgttgtctgctttgtggtacttataaaatttgttttccattgaaattgccatttataaatttgcagatatgtactaatttagatttttttaagtgttcaataaaataaggatatatttactgtgaatttttaaa

SEQ ID NO: 134067 - DNA, 587 bp, Homo sapiens
  Payload ID: 6187
  Gene Symbol: FARP2
  Gene Name: FERM, RhoGEF and pleckstrin domain protein 2
  ENST ID: ENST00000444371
  CDS Start-End: 1-587
ggtggaagaaagtgataacgagtggtctgttccacactgtttcaccatctacgcggctcagaaaacaatcgtggtggcagccagcactcggctggagaaagagaagtggatgctggacctgaactccgcgatccaagcagccaagagtggcggtgacacggcccctgcactgccaggccgcactgtgtgcactcgtccccccagatcccccaacgaggtatctctggagcaggagtcagaagatgatgctcggggtgtccgcagctccctggaggggcatggccagcaccgggccaacaccacaatgcacgtgtgctggtaccggaacaccagcgtgtccagggcagaccacagtgcagctgtcgagaaccagctttcaggatatctgctaagaaagttcaaaaacagtcatggctggcagaagctctgggtcgtctttaccaacttctgtttgttcttctacaaaactcatcaggtggatggaggtgatccagggggccagcagctcagccgggagggccccaagcatcgtgcaggatggcccccaaccctcctcagggctggaggggatggtcagggggaaggag

SEQ ID NO: 134068 - DNA, 2122 bp, Homo sapiens
  Payload ID: 6187
  Gene Symbol: FARP2
  Gene Name: FERM, RhoGEF and pleckstrin domain protein 2
  Uniprot ID: O94887
  ENST ID: ENST00000627550
  CDS Start-End: 125-2041
gggagcaggcgacgccgacgcgagtctggcggctgctgcttgcgactgcggaggccgggcgaggccggtgaggacgcggcgggcgagcgagaggccgaggtgttttcttcactcatggtgaagaatgggggagatagaaggaacatacagagtcctgcagactgcagggatgcgcttgggtgcccagacccctgtgggagttagcacccttgagcctgggcagactctcttgcccagaatgcaagagaagcacctgcacctcagagtaaagctgctggacaacaccatggaaatatttgacattgagcctaaatgcgatggccaggtattactgacacaagtgtggaagcgtttaaacctggtagaatgtgactacttcgggatggagtttcaaaatactcagtcctactggatttggcttgaacctatgaaacccatcattaggcaaatacgaaggccaaagaatgtggtgcttcgcctagctgtaaaattttttccacctgatcctggtcagctacaagaagaatatacaagatacttgtttgccttgcaacttaagagagacctgctggaagagcgtttgacctgtgctgacaccacagcggcccttctcacgtcccatctcctgcagtcggaaataggagattacgatgaaacgctggaccgagagcacctcaaagtgaacgagtatttgcctggccagcagcactgccttgagaagatactagaattccatcagaagcacgtgggccagacacctgctgagtcggatttccaggtgctcgaaattgctcgaaagttggaaatgtacggcatcagatttcacatggcttctgacagggaaggaaccaagattcaactggcagtttcccacatgggtgtactcgtgttccagggcaccaccaaaatcaacactttcaactggtccaaggtccgtaaactaagcttcaagaggaaaagatttcttatcaaacttcatccagaggttcatggaccttaccaggacacattagaatttttgttgggtagtagagatgaatgtaagaacttctggaagatttgtgtggagtatcacaccttttttagacttttggaccaacctaagccaaaagcaaaagccgtcttcttcagccggggctcctccttcagatacagtggaagaactcagaaacaactagtagattatttcaaagacagtggaatgaagagaattccatatgaaagaaggcacagcaagacccacacgtccgttcgagctctgactgcagacctaccaaaacagagcatctcattccccgagggattgaggactcctgcctccccatcttcagcgaatgccttttactcgctctctccctccactctggtcccctctggcctgccagagtttaaggacagcagcagctccctcacagatccccaggtttcctacgtcaagagtccagctgcagagaggcgcagtggagcagtggctggaggccccgacacaccatcggcccagcccctcgggccccccgcactccagcctggtccaggcctttccacgaagagtcctcagccttctccctccagccggaagagccccctgagtctgagccctgcatttcaggtgcctttgggcccagctgaacagggctcatccccactcctgagccctgtcctcagtgatgctggcggagccgggatggactgcgaggagcccagacacaagcgcgtgcctgcagacgaggcctacttcatagtcaaagagattctcgctacagaacgaacatacctcaaggatttagaagttattaccgtgtggttccgcagcgcagtggtgaaggaggacgccatgcctgcgactctgatgacgctgctcttctccaacatcgatcccatctatgagttccacagaggcttcctgcgcgaggtggagcagaggctggcactctgggaagggccctccaaagcccacacaaaaggcagtcatcaacgaatcggggacatcctgctcaggaacatgcgccagttaaaggctgctcatgagttcaccacgtgaccgcccaaggtgtggagctctgcataacaccatgaagctgagccacagtgacgacgacgactcaagctccccctcctccat

SEQ ID NO: 134069 - DNA, 5151 bp, Homo sapiens
  Payload ID: 6188
  Gene Symbol: FERMT1
  Gene Name: fermitin family member 1
  Uniprot ID: Q9BQL6
  ENST ID: ENST00000217289
  CDS Start-End: 790-2823
ctggagtctcccctggtcgggagcctcagccttctggagactgacaccaccctcttactcagagacgaatcgttttgtcgttgccttcacctccctgaccacaagtgctccggggctctttctgagggaggcagctgttctaggcgggaggctggagtctcctgggcctggacgcaccccggggtgtgagtgatgggtatgcctgaaaggaggggaagtggcgcggctttaatcatctgggctagtccccggcgggcctgggggaacagggaaactggaggcggccttaaagcgtcaggatgagacatcgcaagaggagctgcagatactgagcgtgcgccccgggttctcgccgccttctctccgccgagcagcccttcggccaccctttgcccttaaaaatctgcagactgcgcctcctctccgcgggagcgagacctagcaggcccggggctgggcgtgccctcgcctgccacgctgcgcgctgccctcagccgggccgctggggccgtgcagtgcaccgggcacgccgcgccaggctgggggcaggcaccgagcctccgtgggaggtcccgaggcagcttcgcctgctcgccctggctccagccctcacctgccgcagccttagctgagcagccgccgccactgggcgccccccgctccccacttcgccagcgcccgctcctcggctcggcccggggtagtttgtagggacgcagctctccacgtgcgcgactgcgaggctggacgctacgggctcctggaaaggagacaccagcatttgccacaatgctgtcatccactgactttacatttgcttcctgggagcttgtggtccgcgttgaccatcccaatgaagagcagcagaaagacgtcacactgagagtatctggagaccttcatgttggaggagtgatgctcaagttagtagaacagatcaatatatcccaagactggtcagactttgctctttggtgggaacagaagcattgctggcttctgaaaacccactggaccctggacaaatatggggtccaggcagatgcaaagcttctcttcacccctcagcataaaatgctgcgccttcgtctgccgaatttgaagatggtgaggttgcgagtcagcttctcagctgtggtttttaaagctgtcagtgatatctgcaaaatcctgaatattagaagatcagaagagctttccttgttaaagccgtctggtgactattttaagaagaagaagaaaaaagacaaaaataataaggaacccataattgaagatattctaaacctggagagttctccaacagcttcaggttcatcagtaagtcctggtttatacagtaaaaccatgacccctatatatgaccccatcaatggaacaccagcatcatccaccatgacttggttcagtgacagccctttgacggaacaaaactgcagcatcctcgcattcagccaacccccccagtccccagaagcacttgcggatatgtaccagcctcggtctctggttgataaagccaagctcaatgcaggttggctagactcctcacgctcccttatggaacaaggcatccaagaggatgagcagctgctcttacgatttaaatattattctttcttcgacttgaatcctaaatatgatgctgtccgaataaaccaactctatgagcaagccaggtgggccattctcttagaagaaattgattgcacagaggaagaaatgttgatctttgcagctctacagtaccacattagcaaactgtcgttgtctgctgaaacacaggattttgcaggcgagtccgaggttgatgaaatagaagcggcgctttctaatttggaagtaaccctagaaggtggaaaagcggacagccttttggaggacattactgatatccctaaacttgcagataatctcaaattatttaggcccaagaagttactaccaaaagctttcaaacaatattggtttatctttaaagacacatccatagcatactttaaaaataaggaacttgaacaaggagaaccactagaaaaactaaatcttagaggctgcgaagttgtgcccgatgtaaatgtagcaggaagaaaatttggaatcaagttactaatccctgttgccgatggtatgaatgaaatgtatttgagatgtgaccatgagaatcaatacgcccaatggatggctgcctgcatgttggcatcgaagggcaaaaccatggcagacagctcctaccagccagaggtcctcaacatcctttcatttctgaggatgaaaaacaggaactctgcatctcaggtggcttccagtctcgaaaacatggatatgaacccagaatgttttgtgtcaccacggtgtgcaaaaagacacaaatccaaacagctggccgcccggatcctggaggcgcaccagaacgtggcccagatgcccctggtcgaagccaagctgcggttcatccaggcgtggcagtcactgcctgagtttggcctcacctactaccttgtcagatttaaaggaagcaaaaaagatgacattctgggagtttcatataacaggttgattaaaattgatgcagccaccgggattccagtgacaacatggagattcacaaatatcaaacagtggaatgtaaactgggaaacccggcaggtggtcatcgagtttgaccaaaacgtctttactgctttcacctgcctgagtgcagattgcaagattgtgcacgagtacattggcggctacattttcttgtccacccgctccaaggaccagaatgaaacactcgatgaggacttgttccacaaattgaccggcggtcaggattgaaacaagcacgcgtgctcggctcacaccaacaaggcaagccaaaggcgcccctccccagagggatccctaacgtgcccagcatgtagattctggactaacagacaacatacattcaccgctggtcacccagatcctcattcaaacccactgctggcacatccctttccttactttgccctgtgctaccagccacggaaggagcctctcttgttttttctataaaatgggtaggcaggagaaaagcaggtgccctaagattgctctaaggcccagcatgtggttacagttctctgacttgcagaacctgccaggtgtatggctacaagttatcctcgtgctgatctgtctcattactaagtcaatggagaagacagaaaggtaaaaatcacgtgtagcaagaacaactcttatttcacaaactcaggtatgaaacgaaacgcctgtccttcatggaactgcttttagctcctgtcttttcaaaatggcagagggagttcctacacacactttttccctggaggccaaggtctaggggtagaaaggggaggggtggggctaccaggtagcagttgacaacccaaggtcagaggagtggccctcagtgtcatctgtccacagtgatacctgccaagatgaccactgacccacatctggtcttagtcattggtctcctcagatttctggggccacctgcaagccccattccattcctacagatctctcagccacctgtaagtcctttgtgaagatgtgggtgacacagggggacaggaaaacccatttctcaacccagatccatgtctccactgcttctactctgggttgggattcaggaagacaggcacagtcctctctgttcatagaaacacctgccagtgtcaaggattccagtcaggtgtctatcccaactggtcagggagagaagggcagacccattctcaaagaccaccatgtccaaggtctgacagctccccactggctgcccccacaggggctttaggctggtctgggtcatggggaagcgtccctcttatcgctggtctgtgttctcctggatttggtatctatgttggtacgactcctggccttttatctaaaggactttggcttttgtaaatcacaagccaataatagacttttttctccccctctgttttttgctgtgtcatctctgccttgagactgccttgagacagtgcttgccttgagagagtgagccaattaacagctgcctgaattgtcattttccattttggtttgttagaggtgggaggggtgggttttgagaaggtcaaaagcaataccagaagtaaagggaaatatcagacaatattttattattttttcatagatgttctgccacacaaagaacttggggtgtaaggataaggcaaaagctccaatcccatttttcagttctcctaggatgcacccctcagggagcctggccagagttccgaggcccgtgagcgtcagctgttgctttattttccatcaaagccctctgagaagtgagacctcagcaattccgggagccacatagagacagacttggcaagggaccccctggttctgagccagtagctgccatctggaaattcctcttttagcctctccttagaggtgaatgtgaatgaagcctcccaggcacccgctgaatttctgaggccttgcttaaagctcagaagtggtttaggcatttggaaaatctggttcacatcataaagaacttgatttgaaatgttttctatagaaacaagtgctaagtgtaccgtatatacttgatgttggtcatttctcagtcctatttctcagttctattattttagaacctagtcagttctttaagattataactggtcctacattaaaataatgcttctcgatgtcagattttacctgtttgctgctgagaacatctctgcctaatttaccaaagccagaccttcagttcaacatgcttccttagcttttcatagttgtctgacatttccatgaaaacaaaggaaccaactttgttttaaccaaactttgtttggttacagttttcaggggagcgtttcttccatgacacacagcaacatcccaaagaaataaacaagtgtgacaaaaaaaaaaaaaaacaaacctaaatgctactgttccaaagagcaacttgatggttttttttaatactgagtgcaaaaggtcacccaaattcctatgatgaaattttaaattaatgggcacctttcaacatcatttgcttccttatctacagttgattcagaaatctgcattttttattcttttatatgacttttaagtaaaagatttatatggatttga

SEQ ID NO: 134070 - DNA, 567 bp, Homo sapiens
  Payload ID: 6188
  Gene Symbol: FERMT1
  Gene Name: fermitin family member 1
  ENST ID: ENST00000378844
  CDS Start-End: 128-567
ccagttaccccctgaaacatttcagttgtgaacgttctttcctgctagcttctcccatgaggggaaaacgatgggtttgaaattcacatccctatctgtactttgaagaacaccagcatttgccacaatgctgtcatccactgactttacatttgcttcctgggagcttgtggtccgcgttgaccatcccaatgaagagcagcagaaagacgtcacactgagagtatctggagaccttcatgttggaggagtgatgctcaagttagtagaacagatcaatatatcccaagactggtcagactttgctctttggtgggaacagaagcattgctggcttctgaaaacccactggaccctggacaaatatggggtccaggcagatgcaaagcttctcttcacccctcagcataaaatgctgcgccttcgtctgccgaatttgaagatggtgaggttgcgagtcagcttctcagctgtggtttttaaagctgtcagtgatatctgcaaaatcctgaatattagaagatcagaagagctttccttgttaaagccgtctggtgactattttaa

SEQ ID NO: 134071 - DNA, 3229 bp, Homo sapiens
  Payload ID: 6188
  Gene Symbol: FERMT1
  Gene Name: fermitin family member 1
  ENST ID: ENST00000536936
  CDS Start-End: 816-2078
agtgcaccgggcacgccgcgccaggctgggggcaggcaccgagcctccgtgggaggtcccgaggcagcttcgcctgctcgccctggctccagccctcacctgccgcagccttagctgagcagccgccgccactgggcgccccccgctccccacttcgccagcgcccgctcctcggctcggcccggggtagtttgtagggacgcagctctccacgtgcgcgactgcgaggctggacgctacgggctcctggaaaggagacaccagcatttgccacaatgctgtcatccactgactttacatttgcttcctgggagcttgtggtccgcgttgaccatcccaatgaagagcagcagaaagacgtcacactgagagtatctggagaccttcatgttggaggagtgatgctcaaatatatcccaagactggtcagactttgctctttggtgggaacagaagcattgctggcttctgaaaacccactggaccctggacaaatatggggtccaggcagatgcaaagcttctcttcacccctcagcataaaatgctgcgccttcgtctgccgaatttgaagatggtgaggttgcgagtcagcttctcagctgtggtttttaaagctgtcagtgatatctgcaaaatcctgaatattagaagatcagaagagctttccttgttaaagccgtctggtgactattttaagaagaagaagaaaaaagacaaaaataataaggaacccataattgaagatattctaaacctggagagttctccaacagcttcaggttcatcagttggctagactcctcacgctcccttatggaacaaggcatccaagaggatgagcagctgctcttacgatttaaatattattctttcttcgacttgaatcctaaatatgatgctgtccgaataaaccaactctatgagcaagccaggtgggccattctcttagaagaaattgattgcacagaggaagaaatgttgatctttgcagctctacagtaccacattagcaaactgtcgttgtctgctgaaacacaggattttgcaggcgagtccgaggttgatgaaatagaagcggcgctttctaatttggaagtaaccctagaaggtggaaaagcggacagccttttggaggacattactgatatccctaaacttgcagataatctcaaattatttaggcccaagaagttactaccaaaagctttcaaacaatattggtttatctttaaagacacatccatagcatactttaaaaataaggaacttgaacaaggagaaccactagaaaaactaaatcttagaggctgcgaagttgtgcccgatgtaaatgtagcaggaagaaaatttggaatcaagttactaatccctgttgccgatggtatgaatgaaatgtatttgagatgtgaccatgagaatcaatacgcccaatggatggctgcctgcatgttggcatcgaagggcaaaaccatggcagacagctcctaccagccagaggtcctcaacatcctttcatttctgaggatgaaaaacaggaactctgcatctcaggtggcttccagtctcgaaaacatggatatgaacccagaatgttttgtgtcaccacggtgtgcaaaaagacacaaatccaaacagctggccgcccggatcctggaggcgcaccagaacgtggcccagatgcccctggtcgaagccaagctgcggttcatccaggcgtggcagtcactgcctgagtttggcctcacctactaccttgtcagatttaaaggaagcaaaaaagatgacattctgggagtttcatataacaggttgattaaaattgatgcagccaccgggattccagtgacaacatggagattcacaaatatcaaacagtggaatgtaaactgggaaacccggcaggtggtcatcgagtttgaccaaaacgtctttactgctttcacctgcctgagtgcagattgcaagattgtgcacgagtacattggcggctacattttcttgtccacccgctccaaggaccagaatgaaacactcgatgaggacttgttccacaaattgaccggcggtcaggattgaaacaagcacgcgtgctcggctcacaccaacaaggcaagccaaaggcgcccctccccagagggatccctaacgtgcccagcatgtagattctggactaacagacaacatacattcaccgctggtcacccagatcctcattcaaacccactgctggcacatccctttccttactttgccctgtgctaccagccacggaaggagcctctcttgttttttctataaaatgggtaggcaggagaaaagcaggtgccctaagattgctctaaggcccagcatgtggttacagttctctgacttgcagaacctgccaggtgtatggctacaagttatcctcgtgctgatctgtctcattactaagtcaatggagaagacagaaaggtaaaaatcacgtgtagcaagaacaactcttatttcacaaactcaggtatgaaacgaaacgcctgtccttcatggaactgcttttagctcctgtcttttcaaaatggcagagggagttcctacacacactttttccctggaggccaaggtctaggggtagaaaggggaggggtggggctaccaggtagcagttgacaacccaaggtcagaggagtggccctcagtgtcatctgtccacagtgatacctgccaagatgaccactgacccacatctggtcttagtcattggtctcctcagatttctggggccacctgcaagccccattccattcctacagatctctcagccacctgtaagtcctttgtgaagatgtgggtgacacagggggacaggaaaacccatttctcaacccagatccatgtctccactgcttctactctgggttgggattcaggaagacaggcacagtcctctctgttcatagaaacacctgccagtgtcaaggattccagtcaggtgtctatcccaactggtcagggagagaagggcagacccattctcaaagaccaccatgtccaaggtctgacagctccccactggctgcccccacaggggctttaggctggtctgggtcatggggaagcgtccctcttatcgctggtctgtgttctcctggatttggtatctatgttggtacgactcctggccttttatctaaaggactttggcttttgtaaatcacaagccaataatagacttttttctccccctc

SEQ ID NO: 134072 - DNA, 3338 bp, Homo sapiens
  Payload ID: 6189
  Gene Symbol: FERMT2
  Gene Name: fermitin family member 2
  Uniprot ID: Q96AC1
  ENST ID: ENST00000341590
  CDS Start-End: 187-2229
gggtggagcgcggggagccaggcgaggggccgcgacgacgggactccattagccgctccggccacaggcagcgcttcgccagccgaggaaccggacgcggacaccgccgccccgcgagcctccagcccctcgcctgttgccgcgcgagtcccgggcccggagcgctaggagcgcgcggaaggagccatggctctggacgggataaggatgccagatggctgctacgcggacgggacgtgggaactgagtgtccatgtgacggacctgaaccgcgatgtcaccctgagagtgaccggcgaggtgcacattggaggcgtgatgcttaagctggtggagaaactcgatgtaaaaaaagattggtctgaccatgctctctggtgggaaaagaagagaacttggcttctgaagacacattggaccttagataagtatggtattcaggcagatgctaagcttcagttcacccctcagcacaaactgctccgcctgcagcttcccaacatgaagtatgtgaaggtgaaagtgaatttctctgatagagtcttcaaagctgtttctgacatctgtaagacttttaatatcagacaccccgaagaactttctctcttaaagaaacccagagatccaacaaagaaaaaaaagaagaagctagatgaccagtctgaagatgaggcacttgaattagaggggcctcttatcactcctggatcaggaagtatatattcaagcccaggactgtatagtaaaacaatgacccccacttatgatgctcatgatggaagccccttgtcaccaacttctgcttggtttggtgacagtgctttgtcagaaggcaatcctggtatacttgctgtcagtcaaccaatcacgtcaccagaaatcttggcaaaaatgttcaagcctcaagctcttcttgataaagcaaaaatcaaccaaggatggcttgattcctcaagatctctcatggaacaagatgtgaaggaaaatgaggccttgctgctccgattcaagtattacagcttttttgatttgaatccaaagtatgatgcaatcagaatcaatcagctttacgagcaggccaaatgggccattctcctggaagagattgaatgcacagaagaagaaatgatgatgtttgcagccctgcagtatcatatcaataagctgtcaatcatgacatcagagaatcatttgaacaacagtgacaaagaagttgatgaagttgatgctgccctttcagacctggagattactctggaagggggtaaaacgtcaacaattttgggtgacattacttccattcctgaacttgctgactacattaaagttttcaagccaaaaaagctgactctgaaaggttacaaacaatattggtgcaccttcaaagacacatccatttcttgttataagagcaaagaagaatccagtggcacaccagctcatcagatgaacctcaggggatgtgaagttaccccagatgtaaacatttcaggccaaaaatttaacattaaactcctgattccagttgcagaaggcatgaatgaaatctggcttcgttgtgacaatgaaaaacagtatgcacactggatggcagcctgcagattagcctccaaaggcaagaccatggcggacagttcttacaacttagaagttcagaatattctttcctttctgaagatgcagcatttaaacccagatcctcagttaataccagagcagatcacgactgatataactcctgaatgtttggtgtctccccgctatctaaaaaagtataagaacaagcagataacagcgagaatcttggaggcccatcagaatgtagctcagatgagtctaattgaagccaagatgagatttattcaagcttggcagtcactacctgaatttggcatcactcacttcattgcaaggttccaagggggcaaaaaagaagaacttattggaattgcatacaacagactgattcggatggatgccagcactggagatgcaattaaaacatggcgtttcagcaacatgaaacagtggaatgtcaactgggaaatcaaaatggtcaccgtagagtttgcagatgaagtacgattgtccttcatttgtactgaagtagattgcaaagtggttcatgaattcattggtggctacatatttctctcaacacgtgcaaaagaccaaaacgagagtttagatgaagagatgttctacaaacttaccagtggttgggtgtgaataggaatactgtttaatgaaactccacggccataacaatatttaactttaaaagctgtttgttatatgctgcttaataaagtaagcttgaaatttatcattttatcatgaaaacttctttgccttaccagaccagttaatatgtgcactaaacaagcacgactattaatctatcatgttatgatataataaacttgaatttgtcacacattccttagggccatgaattgaaaactgaaatagtgggcaaatcaggaacaaaccatcactgatttactgatttaagctagccaaactgtaagaaacaagccatctattttaaagctatccagggcttaacctatatgaactctatttatcatgtctaatgcatgtgatttaatgtatgtttaatttgatatcatgttttaaaatatcctacttctggtagccatttaattcctccccctacccccaaataaatcaggcatgcaggaggcctgatatttagtaatgtcattgtgtttgaccttgaaggaaaatgctattagtccgtcgtgcttgatttgtttttgtccttgaataagcatgttatgtatattgtctcgtgtttttatttttacaccatattgtattacacttttagtattcaccagcataatcactgtctgcctaaaatatgcaactctttgcattacaatatgaagtaaagttctatgaagtatgcattttgtgtaactaatgtaaaaacacaaattttataaaattgtacagttttttaaaaactactcacaactagcagatggcttaaatgtagcaatctctgcgttaattaaatgcctttaagagatataattaacgtgcagttttaatatctactaaattaagaatgacttcattatgatcatgatttgccacaatgtccttaactctaatgcctggactggccatgttctagtctgttgcgctgttacaatctgtattggtgctagtcagaaaattcctagctcacatagcccaaaagggtgcgagggagaggtggattaccagtattgttcaataatccatggttcaaagactgtataaatgcattttattttaaataaaagcaaaacttttatttaatattt

SEQ ID NO: 134073 - DNA, 3247 bp, Homo sapiens
  Payload ID: 6189
  Gene Symbol: FERMT2
  Gene Name: fermitin family member 2
  Uniprot ID: Q96AC1
  ENST ID: ENST00000343279
  CDS Start-End: 82-2145
gccgccccgcgagcctccagcccctcgcctgttgccgcgcgagtcccgggcccggagcgctaggagcgcgcggaaggagccatggctctggacgggataaggatgccagatggctgctacgcggacgggacgtgggaactgagtgtccatgtgacggacctgaaccgcgatgtcaccctgagagtgaccggcgaggtgcacattggaggcgtgatgcttaagctggtggagaaactcgatgtaaaaaaagattggtctgaccatgctctctggtgggaaaagaagagaacttggcttctgaagacacattggaccttagataagtatggtattcaggcagatgctaagcttcagttcacccctcagcacaaactgctccgcctgcagcttcccaacatgaagtatgtgaaggtgaaagtgaatttctctgatagagtcttcaaagctgtttctgacatctgtaagacttttaatatcagacaccccgaagaactttctctcttaaagaaacccagagatccaacaaagaaaaaaaagaagaagctagatgaccagtctgaagatgaggcacttgaattagaggggcctcttatcactcctggatcaggaagtatatattcaagcccaggactgtatagtaaaacaatgacccccacttatgatgctcatgatggaagccccttgtcaccaacttctgcttggtttggtgacagtgctttgtcagaaggcaatcctggtatacttgctgtcagtcaaccaatcacgtcaccagaaatcttggcaaaaatgttcaagcctcaagctcttcttgataaagcaaaaatcaaccaaggatggcttgattcctcaagatctctcatggaacaagatgtgaaggaaaatgaggccttgctgctccgattcaagtattacagcttttttgatttgaatccaaagtatgatgcaatcagaatcaatcagctttacgagcaggccaaatgggccattctcctggaagagattgaatgcacagaagaagaaatgatgatgtttgcagccctgcagtatcatatcaataagctgtcaatcatgacatcagagaatcatttgaacaacagtgacaaagaagttgatgaagttgatgctgccctttcagacctggagattactctggaagggggtaaaacgtcaacaattttgggtgacattacttccattcctgaacttgctgactacattaaagttttcaagccaaaaaagctgactctgaaaggttacaaacaatattggtgcaccttcaaagacacatccatttcttgttataagagcaaagaagaatccagtggcacaccagctcatcagatgaacctcaggggatgtgaagttaccccagatgtaaacatttcaggccaaaaatttaacattaaactcctgattccagttgcagaaggcatgaatgaaatctggcttcgttgtgacaatgaaaaacagtatgcacactggatggcagcctgcagattagcctccaaaggcaagaccatggcggacagttcttacaacttagaagttcagaatattctttcctttctgaagatgcagcatttaaacccagatcctcagttaataccagagcagatcacgactgatataactcctgaatgtttggtgtctccccgctatctaaaaaagtataagaacaagcagccaggctatataagagatttgataacagcgagaatcttggaggcccatcagaatgtagctcagatgagtctaattgaagccaagatgagatttattcaagcttggcagtcactacctgaatttggcatcactcacttcattgcaaggttccaagggggcaaaaaagaagaacttattggaattgcatacaacagactgattcggatggatgccagcactggagatgcaattaaaacatggcgtttcagcaacatgaaacagtggaatgtcaactgggaaatcaaaatggtcaccgtagagtttgcagatgaagtacgattgtccttcatttgtactgaagtagattgcaaagtggttcatgaattcattggtggctacatatttctctcaacacgtgcaaaagaccaaaacgagagtttagatgaagagatgttctacaaacttaccagtggttgggtgtgaataggaatactgtttaatgaaactccacggccataacaatatttaactttaaaagctgtttgttatatgctgcttaataaagtaagcttgaaatttatcattttatcatgaaaacttctttgccttaccagaccagttaatatgtgcactaaacaagcacgactattaatctatcatgttatgatataataaacttgaatttgtcacacattccttagggccatgaattgaaaactgaaatagtgggcaaatcaggaacaaaccatcactgatttactgatttaagctagccaaactgtaagaaacaagccatctattttaaagctatccagggcttaacctatatgaactctatttatcatgtctaatgcatgtgatttaatgtatgtttaatttgatatcatgttttaaaatatcctacttctggtagccatttaattcctccccctacccccaaataaatcaggcatgcaggaggcctgatatttagtaatgtcattgtgtttgaccttgaaggaaaatgctattagtccgtcgtgcttgatttgtttttgtccttgaataagcatgttatgtatattgtctcgtgtttttatttttacaccatattgtattacacttttagtattcaccagcataatcactgtctgcctaaaatatgcaactctttgcattacaatatgaagtaaagttctatgaagtatgcattttgtgtaactaatgtaaaaacacaaattttataaaattgtacagttttttaaaaactactcacaactagcagatggcttaaatgtagcaatctctgcgttaattaaatgcctttaagagatataattaacgtgcagttttaatatctactaaattaagaatgacttcattatgatcatgatttgccacaatgtccttaactctaatgcctggactggccatgttctagtctgttgcgctgttacaatctgtattggtgctagtcagaaaattcctagctcacatagcccaaaagggtgcgagggagaggtggattaccagtattgttcaataatccatggttcaaagactgtataaatgcattttattttaaataaaagcaaaacttttattt

SEQ ID NO: 134074 - DNA, 3369 bp, Homo sapiens
  Payload ID: 6189
  Gene Symbol: FERMT2
  Gene Name: fermitin family member 2
  Uniprot ID: Q96AC1
  ENST ID: ENST00000395631
  CDS Start-End: 218-2260
cacaggcagcgcttcgccagccgaggaaccggacgcggacaccgccgccccgcgagcctccagcccctcgcctgttgccgcgcgagtcccgggcccggagcgctaggagcgcgcggtgagggagcgggaccccgccgggacccgagggggcgcggcggggaggggaacggggagtcagcccgcgctgtgtctcggggccggccggcaggaaggagccatggctctggacgggataaggatgccagatggctgctacgcggacgggacgtgggaactgagtgtccatgtgacggacctgaaccgcgatgtcaccctgagagtgaccggcgaggtgcacattggaggcgtgatgcttaagctggtggagaaactcgatgtaaaaaaagattggtctgaccatgctctctggtgggaaaagaagagaacttggcttctgaagacacattggaccttagataagtatggtattcaggcagatgctaagcttcagttcacccctcagcacaaactgctccgcctgcagcttcccaacatgaagtatgtgaaggtgaaagtgaatttctctgatagagtcttcaaagctgtttctgacatctgtaagacttttaatatcagacaccccgaagaactttctctcttaaagaaacccagagatccaacaaagaaaaaaaagaagaagctagatgaccagtctgaagatgaggcacttgaattagaggggcctcttatcactcctggatcaggaagtatatattcaagcccaggactgtatagtaaaacaatgacccccacttatgatgctcatgatggaagccccttgtcaccaacttctgcttggtttggtgacagtgctttgtcagaaggcaatcctggtatacttgctgtcagtcaaccaatcacgtcaccagaaatcttggcaaaaatgttcaagcctcaagctcttcttgataaagcaaaaatcaaccaaggatggcttgattcctcaagatctctcatggaacaagatgtgaaggaaaatgaggccttgctgctccgattcaagtattacagcttttttgatttgaatccaaagtatgatgcaatcagaatcaatcagctttacgagcaggccaaatgggccattctcctggaagagattgaatgcacagaagaagaaatgatgatgtttgcagccctgcagtatcatatcaataagctgtcaatcatgacatcagagaatcatttgaacaacagtgacaaagaagttgatgaagttgatgctgccctttcagacctggagattactctggaagggggtaaaacgtcaacaattttgggtgacattacttccattcctgaacttgctgactacattaaagttttcaagccaaaaaagctgactctgaaaggttacaaacaatattggtgcaccttcaaagacacatccatttcttgttataagagcaaagaagaatccagtggcacaccagctcatcagatgaacctcaggggatgtgaagttaccccagatgtaaacatttcaggccaaaaatttaacattaaactcctgattccagttgcagaaggcatgaatgaaatctggcttcgttgtgacaatgaaaaacagtatgcacactggatggcagcctgcagattagcctccaaaggcaagaccatggcggacagttcttacaacttagaagttcagaatattctttcctttctgaagatgcagcatttaaacccagatcctcagttaataccagagcagatcacgactgatataactcctgaatgtttggtgtctccccgctatctaaaaaagtataagaacaagcagataacagcgagaatcttggaggcccatcagaatgtagctcagatgagtctaattgaagccaagatgagatttattcaagcttggcagtcactacctgaatttggcatcactcacttcattgcaaggttccaagggggcaaaaaagaagaacttattggaattgcatacaacagactgattcggatggatgccagcactggagatgcaattaaaacatggcgtttcagcaacatgaaacagtggaatgtcaactgggaaatcaaaatggtcaccgtagagtttgcagatgaagtacgattgtccttcatttgtactgaagtagattgcaaagtggttcatgaattcattggtggctacatatttctctcaacacgtgcaaaagaccaaaacgagagtttagatgaagagatgttctacaaacttaccagtggttgggtgtgaataggaatactgtttaatgaaactccacggccataacaatatttaactttaaaagctgtttgttatatgctgcttaataaagtaagcttgaaatttatcattttatcatgaaaacttctttgccttaccagaccagttaatatgtgcactaaacaagcacgactattaatctatcatgttatgatataataaacttgaatttgtcacacattccttagggccatgaattgaaaactgaaatagtgggcaaatcaggaacaaaccatcactgatttactgatttaagctagccaaactgtaagaaacaagccatctattttaaagctatccagggcttaacctatatgaactctatttatcatgtctaatgcatgtgatttaatgtatgtttaatttgatatcatgttttaaaatatcctacttctggtagccatttaattcctccccctacccccaaataaatcaggcatgcaggaggcctgatatttagtaatgtcattgtgtttgaccttgaaggaaaatgctattagtccgtcgtgcttgatttgtttttgtccttgaataagcatgttatgtatattgtctcgtgtttttatttttacaccatattgtattacacttttagtattcaccagcataatcactgtctgcctaaaatatgcaactctttgcattacaatatgaagtaaagttctatgaagtatgcattttgtgtaactaatgtaaaaacacaaattttataaaattgtacagttttttaaaaactactcacaactagcagatggcttaaatgtagcaatctctgcgttaattaaatgcctttaagagatataattaacgtgcagttttaatatctactaaattaagaatgacttcattatgatcatgatttgccacaatgtccttaactctaatgcctggactggccatgttctagtctgttgcgctgttacaatctgtattggtgctagtcagaaaattcctagctcacatagcccaaaagggtgcgagggagaggtggattaccagtattgttcaataatccatggttcaaagactgtataaatgcattttattttaaataaaagcaaaacttttatttaatattt

SEQ ID NO: 134075 - DNA, 2082 bp, Homo sapiens
  Payload ID: 6189
  Gene Symbol: FERMT2
  Gene Name: fermitin family member 2
  Uniprot ID: Q96AC1
  ENST ID: ENST00000399304
  CDS Start-End: 108-2009
cagccgaggaaccggacgcggacaccgccgccccgcgagcctccagcccctcgcctgttgccgcgcgagtcccgggcccggagcgctaggagcgcgcggaaggagccatggctctggacgggataaggatgccagatggctgctacgcggacgggacgtgggaactgagtgtccatgtgacggacctgaaccgcgatgtcaccctgagagtgaccggcgaggtgcacattggaggcgtgatgcttaagctggtggagaaactcgatgtaaaaaaagattggtctgaccatgctctctggtgggaaaagaagagaacttggcttctgaagacacattggaccttagataagtatggtattcaggcagatgctaagcttcagttcacccctcagcacaaactgctccgcctgcagcttcccaacatgaagtatgtgaaggtgaaagtgaatttctctgatagagtcttcaaagctgtttctgacatctgtaagacttttaatatcagacaccccgaagaactttctctcttaaagaaacccagagatccaacaaagaaaaaaaagaagaagctagatgaccagtctgaagatgaggcacttgaattagaggggcctcttatcactcctggatcaggaagtatatattcaagcccaggactgtatagtaaaacaatgacccccacttatgatgctcatgatggaagccccttgtcaccaacttctgcttggtttggtgacagtgctttgtcagaaggcaatcctggtatacttgctgtcagtcaaccaatcacgtcaccagaaatcttggcaaaaatgttcaagcctcaagctcttcttgataaagcaaaaatcaaccaaggatggcttgattcctcaagatctctcatggaacaagatgtgaaggaaaatgaggccttgctgctccgattcaagtattacagcttttttgatttgaatccaaagtatgatgcaatcagaatcaatcagctttacgagcaggccaaatgggccattctcctggaagagattgaatgcacagaagaagaaatgatgatgtttgcagccctgcagtatcatatcaataagctgtcaatcatgacatcagagaatcatttgaacaacagtgacaaagaagttgatgaagttgatgctgccctttcagacctggagattactctggaagggggtaaaacgtcaacaattttgggtgacattacttccattcctgaacttgctgactacattaaagttttcaagccaaaaaagctgactctgaaaggttacaaacaatattggtgcaccttcaaagacacatccatttcttgttataagagcaaagaagaatccagtggcacaccagctcatcagatgaacctcaggggatgtgaagttaccccagatgtaaacatttcaggccaaaaatttaacattaaactcctgattccagttgcagaaggcatgaatgaaatctggcttcgttgtgacaatgaaaaacagtatgcacactggatggcagcctgcagattagcctccaaaggcaagaccatggcggacagttcttacaacttagaagttcagaatattctttcctttctgaagatgcagcatttaaacccagatcctcagttaataccagagcagatcacgactgatataactcctgaatgtttggtgtctccccgctatctaaaaaagtataagaacaagcagccaggctatataagagatttgataacagcgagaatcttggaggcccatcagaatgtagctcagatgagtctaattgaagccaagatgagatttattcaagcttggcagtcactacctgaatttggcatcactcacttcattgcaaggttccaagggggcaaaaaagaagaacttattggaattgcatacaacagactgattcggatggatgccagcactggagatgcaattaaaacatggcgtttcagcaacatgaaacagtggaatgtcaactgggaaatcaaaatggtaaactcataacaatgttacttgaatatagtccttctctgatacaaattagtacattaagaataaaaaggcctataaattctga

SEQ ID NO: 134076 - DNA, 587 bp, Homo sapiens
  Payload ID: 6189
  Gene Symbol: FERMT2
  Gene Name: fermitin family member 2
  ENST ID: ENST00000554712
  CDS Start-End: 128-587
gtttcccagtaatgttaatgaacaaaaggttatctgcctagcgagttccttttccaagcgtttgagacaattcgacaagattatgagactgcgaactggagtcttttatctttaaaaggaaggagccatggctctggacgggataaggatgccagatggctgctacgcggacgggacgtgggaactgagtgtccatgtgacggacctgaaccgcgatgtcaccctgagagtgaccggcgaggtgcacattggaggcgtgatgcttaagctggtggagaaactcgatgtaaaaaaagattggtctgaccatgctctctggtgggaaaagaagagaacttggcttctgaagacacattggaccttagataagtatggtattcaggcagatgctaagcttcagttcacccctcagcacaaactgctccgcctgcagcttcccaacatgaagtatgtgaaggtgaaagtgaatttctctgatagagtcttcaaagctgtttctgacatctgtaagacttttaatatcagacaccccgaagaactttctctcttaaagaaacccagagatccaacaaagaaaaaaaagaaga

SEQ ID NO: 134077 - DNA, 3029 bp, Homo sapiens
  Payload ID: 6189
  Gene Symbol: FERMT2
  Gene Name: fermitin family member 2
  ENST ID: ENST00000554152
  CDS Start-End: 1-1923
tctgaccatgctctctggtgggaaaagaagagaacttggcttctgaagacacattggaccttagataagtatggtattcaggcagatgctaagcttcagttcacccctcagcacaaactgctccgcctgcagcttcccaacatgaagtatgtgaaggtgaaagtgaatttctctgatagagtcttcaaagctgtttctgacatctgtaagacttttaatatcagacaccccgaagaactttctctcttaaagaaacccagagatccaacaaagaaaaaaaagaagaagctagatgaccagtctgaagatgaggcacttgaattagaggggcctcttatcactcctggatcaggcactgatgttctttacattggccctctgaaaggaagtatatattcaagcccaggactgtatagtaaaacaatgacccccacttatgatgctcatgatggaagccccttgtcaccaacttctgcttggtttggtgacagtgctttgtcagaaggcaatcctggtatacttgctgtcagtcaaccaatcacgtcaccagaaatcttggcaaaaatgttcaagcctcaagctcttcttgataaagcaaaaatcaaccaaggatggcttgattcctcaagatctctcatggaacaagatgtgaaggaaaatgaggccttgctgctccgattcaagtattacagcttttttgatttgaatccaaagtatgatgcaatcagaatcaatcagctttacgagcaggccaaatgggccattctcctggaagagattgaatgcacagaagaagaaatgatgatgtttgcagccctgcagtatcatatcaataagctgtcaatcatgacatcagagaatcatttgaacaacagtgacaaagaagttgatgaagttgatgctgccctttcagacctggagattactctggaagggggtaaaacgtcaacaattttgggtgacattacttccattcctgaacttgctgactacattaaagttttcaagccaaaaaagctgactctgaaaggttacaaacaatattggtgcaccttcaaagacacatccatttcttgttataagagcaaagaagaatccagtggcacaccagctcatcagatgaacctcaggggatgtgaagttaccccagatgtaaacatttcaggccaaaaatttaacattaaactcctgattccagttgcagaaggcatgaatgaaatctggcttcgttgtgacaatgaaaaacagtatgcacactggatggcagcctgcagattagcctccaaaggcaagaccatggcggacagttcttacaacttagaagttcagaatattctttcctttctgaagatgcagcatttaaacccagatcctcagttaataccagagcagatcacgactgatataactcctgaatgtttggtgtctccccgctatctaaaaaagtataagaacaagcagccaggctatataagagatttgataacagcgagaatcttggaggcccatcagaatgtagctcagatgagtctaattgaagccaagatgagatttattcaagcttggcagtcactacctgaatttggcatcactcacttcattgcaaggttccaagggggcaaaaaagaagaacttattggaattgcatacaacagactgattcggatggatgccagcactggagatgcaattaaaacatggcgtttcagcaacatgaaacagtggaatgtcaactgggaaatcaaaatggtcaccgtagagtttgcagatgaagtacgattgtccttcatttgtactgaagtagattgcaaagtggttcatgaattcattggtggctacatatttctctcaacacgtgcaaaagaccaaaacgagagtttagatgaagagatgttctacaaacttaccagtggttgggtgtgaataggaatactgtttaatgaaactccacggccataacaatatttaactttaaaagctgtttgttatatgctgcttaataaagtaagcttgaaatttatcattttatcatgaaaacttctttgccttaccagaccagttaatatgtgcactaaacaagcacgactattaatctatcatgttatgatataataaacttgaatttgtcacacattccttagggccatgaattgaaaactgaaatagtgggcaaatcaggaacaaaccatcactgatttactgatttaagctagccaaactgtaagaaacaagccatctattttaaagctatccagggcttaacctatatgaactctatttatcatgtctaatgcatgtgatttaatgtatgtttaatttgatatcatgttttaaaatatcctacttctggtagccatttaattcctccccctacccccaaataaatcaggcatgcaggaggcctgatatttagtaatgtcattgtgtttgaccttgaaggaaaatgctattagtccgtcgtgcttgatttgtttttgtccttgaataagcatgttatgtatattgtctcgtgtttttatttttacaccatattgtattacacttttagtattcaccagcataatcactgtctgcctaaaatatgcaactctttgcattacaatatgaagtaaagttctatgaagtatgcattttgtgtaactaatgtaaaaacacaaattttataaaattgtacagttttttaaaaactactcacaactagcagatggcttaaatgtagcaatctctgcgttaattaaatgcctttaagagatataattaacgtgcagttttaatatctactaaattaagaatgacttcattatgatcatgatttgccacaatgtccttaactctaatgcctggactggccatgttctagtctgttgcgctgttacaatctgtattggtgctagtcagaaaattcctagctcacatagcccaaaagggtgcgagggagaggtggattaccagtattgttcaataatccatggttcaaagactgtataaatgcattttattttaaataaaagcaaaacttttatttaata

SEQ ID NO: 134078 - DNA, 2064 bp, Homo sapiens
  Payload ID: 6189
  Gene Symbol: FERMT2
  Gene Name: fermitin family member 2
  Uniprot ID: Q96AC1
  ENST ID: ENST00000553373
  CDS Start-End: 1-2064
atggctctggacgggataaggatgccagatggctgctacgcggacgggacgtgggaactgagtgtccatgtgacggacctgaaccgcgatgtcaccctgagagtgaccggcgaggtgcacattggaggcgtgatgcttaagctggtggagaaactcgatgtaaaaaaagattggtctgaccatgctctctggtgggaaaagaagagaacttggcttctgaagacacattggaccttagataagtatggtattcaggcagatgctaagcttcagttcacccctcagcacaaactgctccgcctgcagcttcccaacatgaagtatgtgaaggtgaaagtgaatttctctgatagagtcttcaaagctgtttctgacatctgtaagacttttaatatcagacaccccgaagaactttctctcttaaagaaacccagagatccaacaaagaaaaaaaagaagaagctagatgaccagtctgaagatgaggcacttgaattagaggggcctcttatcactcctggatcaggaagtatatattcaagcccaggactgtatagtaaaacaatgacccccacttatgatgctcatgatggaagccccttgtcaccaacttctgcttggtttggtgacagtgctttgtcagaaggcaatcctggtatacttgctgtcagtcaaccaatcacgtcaccagaaatcttggcaaaaatgttcaagcctcaagctcttcttgataaagcaaaaatcaaccaaggatggcttgattcctcaagatctctcatggaacaagatgtgaaggaaaatgaggccttgctgctccgattcaagtattacagcttttttgatttgaatccaaagtatgatgcaatcagaatcaatcagctttacgagcaggccaaatgggccattctcctggaagagattgaatgcacagaagaagaaatgatgatgtttgcagccctgcagtatcatatcaataagctgtcaatcatgacatcagagaatcatttgaacaacagtgacaaagaagttgatgaagttgatgctgccctttcagacctggagattactctggaagggggtaaaacgtcaacaattttgggtgacattacttccattcctgaacttgctgactacattaaagttttcaagccaaaaaagctgactctgaaaggttacaaacaatattggtgcaccttcaaagacacatccatttcttgttataagagcaaagaagaatccagtggcacaccagctcatcagatgaacctcaggggatgtgaagttaccccagatgtaaacatttcaggccaaaaatttaacattaaactcctgattccagttgcagaaggcatgaatgaaatctggcttcgttgtgacaatgaaaaacagtatgcacactggatggcagcctgcagattagcctccaaaggcaagaccatggcggacagttcttacaacttagaagttcagaatattctttcctttctgaagatgcagcatttaaacccagatcctcagttaataccagagcagatcacgactgatataactcctgaatgtttggtgtctccccgctatctaaaaaagtataagaacaagcagccaggctatataagagatttgataacagcgagaatcttggaggcccatcagaatgtagctcagatgagtctaattgaagccaagatgagatttattcaagcttggcagtcactacctgaatttggcatcactcacttcattgcaaggttccaagggggcaaaaaagaagaacttattggaattgcatacaacagactgattcggatggatgccagcactggagatgcaattaaaacatggcgtttcagcaacatgaaacagtggaatgtcaactgggaaatcaaaatggtcaccgtagagtttgcagatgaagtacgattgtccttcatttgtactgaagtagattgcaaagtggttcatgaattcattggtggctacatatttctctcaacacgtgcaaaagaccaaaacgagagtttagatgaagagatgttctacaaacttaccagtggttgggtgtga

SEQ ID NO: 134079 - DNA, 555 bp, Homo sapiens
  Payload ID: 6189
  Gene Symbol: FERMT2
  Gene Name: fermitin family member 2
  ENST ID: ENST00000557562
  CDS Start-End: 94-291
cgggaccccgccgggacccgagggggcgcggcggggaggggaacggggagtcagcccgcgctgtgtctcggggccggccggcaggaaggagccatggctctggacgggataaggatgccagatggctgctacgcggacgggacgtgggaactgagtgtccatgtgacggacctgaaccgcgatgtcaccctgagagtgaccggcgaggtgcacattggaggcgtgatgcttaagctggtggagaaactcgagaaaagaagcccaacaagatgtaaaaaaagattggtctgaccatgctctctggtgggaaaagaagagaacttggcttctgaagacacattggaccttagataagtatggtattcaggcagatgctaagcttcagttcacccctcagcacaaactgctccgcctgcagcttcccaacatgaagtatgtgaaggtgaaagtgaatttctctgatagagtcttcaaagctgtttctgacatctgtaagacttttaatatcagacaccccgaagaactttctctcttaaagaaacccagagatccaac

SEQ ID NO: 134080 - DNA, 655 bp, Homo sapiens
  Payload ID: 6189
  Gene Symbol: FERMT2
  Gene Name: fermitin family member 2
  ENST ID: ENST00000553663
  CDS Start-End: 1-400
ctttctgaagatgcagcatttaaacccagatcctcagttaataccagagcagatcacgactgatataactcctgaatgtttggtgtctccccgctatctaaaaaagtataagaacaagcagataacagcgagaatcttggaggcccatcagaatgtagctcagatgagtctaattgaagccaagatgagatttattcaagcttggcagtcactacctgaatttggcatcactcacttcattgcaaggttccaagggggcaaaaaagaagaacttattggaattgcatacaacagactgattcggatggatgccagcactggagatgcaattaaaacatggcgtttcagcaacatgaaacagtggaatgtcaactgggaaatcaaaatggtaaactcataacaatgttacttgaatatagtccttctctgatacaaattagtacattaagaataaaaaggcctataaattctgatgattatttgtaccaccacctcttaaagtacagacagaccatggttgactattcatttctcacttaaatttgcctatttcataattagcccagttactaaaattctaagtgcataatttgcttagaatgttgccttttttgtctttctgtaatggataaagccgatctactctgaaatagca

SEQ ID NO: 134081 - DNA, 700 bp, Homo sapiens
  Payload ID: 6189
  Gene Symbol: FERMT2
  Gene Name: fermitin family member 2
  ENST ID: ENST00000554288
  CDS Start-End: 234-700
ctttacctccagtcaactcttgattatggtaatagttatatctcatttggggctcaagaggatcctaaaacaaaaatgtaaaaaaagattggtctgaccatgctctctggtgggaaaagaagagaacttggcttctgaagacacattggaccttagataagtatggtattcaggcagatgctaagcttcagttcacccctcagcacaaactgctccgcctgcagcttcccaacatgaagtatgtgaaggtgaaagtgaatttctctgatagagtcttcaaagctgtttctgacatctgtaagacttttaatatcagacaccccgaagaactttctctcttaaagaaacccagagatccaacaaagaaaaaaaagaagaagctagatgaccagtctgaagatgaggcacttgaattagaggggcctcttatcactcctggatcaggaagtatatattcaagcccaggactgtatagtaaaacaatgacccccacttatgatgctcatgatggaagccccttgtcaccaacttctgcttggtttggtgacagtgctttgtcagaaggcaatcctggtatacttgctgtcagtcaaccaatcacgtcaccagaaatcttggcaaaaatgttcaagcctcaagctcttcttgataaagcaaaaatcaaccaaggatggcttgattcctcaagatctctcatgga

SEQ ID NO: 134082 - DNA, 754 bp, Homo sapiens
  Payload ID: 6189
  Gene Symbol: FERMT2
  Gene Name: fermitin family member 2
  ENST ID: ENST00000555692
  CDS Start-End: 356-754
gattatggtaatagttatatctcatttggggctcaagaggatcctaaaacaaaagtaaatggtacagagaattacaatattagcagagtacaaaagtatatatttatcagaaataagtcacgtgcccagaaaagttatctgtgcttataagtcacaatgacatgttgccttagcaaagattatctaatgtaaactttgcttctagtttatggacgtgtgagaatactaaacaaattttgcatttctttcctgaattagtactttaaaaatatgcaactagaaatttatcctccctaaaagtaatattttaacctcctcttcattccaaactctaagttgcttacttatttttaagatgtggttacttaaggtaagaaaaaatgtaaaaaaagattggtctgaccatgctctctggtgggaaaagaagagaacttggcttctgaagacacattggaccttagataagtatggtattcaggcagatgctaagcttcagttcacccctcagcacaaactgctccgcctgcagcttcccaacatgaagtatgtgaaggtgaaagtgaatttctctgatagagtcttcaaagctgtttctgacatctgtaagacttttaatatcagacaccccgaagaactttctctcttaaagaaacccagagatccaacaaagaaaaaaaagaagaagctagatgaccagtctgaagatgaggcacttgaattagaggggcctcttatcactcctggatcaggtaag

SEQ ID NO: 134083 - DNA, 2482 bp, Homo sapiens
  Payload ID: 6189
  Gene Symbol: FERMT2
  Gene Name: fermitin family member 2
  ENST ID: ENST00000635305
  CDS Start-End: 1-1636
ggcacttgaattagaggggcctcttatcactcctggatcaggcactgatgttctttacattggccctctgaaaggaagtatatattcaagcccaggactgtatagtaaaacaatgacccccacttatgatgctcatgatggaagccccttgtcaccaacttctgcttggtttggtgacagtgctttgtcagaaggcaatcctggtatacttgctgtcagtcaaccaatcacgtcaccagaaatcttggcaaaaatgttcaagcctcaagctcttcttgataaagcaaaaatcaaccaaggatggcttgattcctcaagatctctcatggaacaagatgtgaaggaaaatgaggccttgctgctccgattcaagtattacagcttttttgatttgaatccaaagtatgatgcaatcagaatcaatcagctttacgagcaggccaaatgggccattctcctggaagagattgaatgcacagaagaagaaatgatgatgtttgcagccctgcagtatcatatcaataagctgtcaatcatgacatcagagaatcatttgaacaacagtgacaaagaagttgatgaagttgatgctgccctttcagacctggagattactctggaagggggtaaaacgtcaacaattttgggtgacattacttccattcctgaacttgctgactacattaaagttttcaagccaaaaaagctgactctgaaaggttacaaacaatattggtgcaccttcaaagacacatccatttcttgttataagagcaaagaagaatccagtggcacaccagctcatcagatgaacctcaggggatgtgaagttaccccagatgtaaacatttcaggccaaaaatttaacattaaactcctgattccagttgcagaaggcatgaatgaaatctggcttcgttgtgacaatgaaaaacagtatgcacactggatggcagcctgcagattagcctccaaaggcaagaccatggcggacagttcttacaacttagaagttcagaatattctttcctttctgaagatgcagcatttaaacccagatcctcagttaataccagagcagatcacgactgatataactcctgaatgtttggtgtctccccgctatctaaaaaagtataagaacaagcaggaaaaaggatgcaaaaaacacatgccaggctatataagagatttgataacagcgagaatcttggaggcccatcagaatgtagctcagatgagtctaattgaagccaagatgagatttattcaagcttggcagtcactacctgaatttggcatcactcacttcattgcaaggttccaagggggcaaaaaagaagaacttattggaattgcatacaacagactgattcggatggatgccagcactggagatgcaattaaaacatggcgtttcagcaacatgaaacagtggaatgtcaactgggaaatcaaaatggtcaccgtagagtttgcagatgaagtacgattgtccttcatttgtactgaagtagattgcaaagtggttcatgaattcattggtggctacatatttctctcaacacgtgcaaaagaccaaaacgagagtttagatgaagagatgttctacaaacttaccagtggttgggtgtgaataggaatactgtttaatgaaactccacggccataacaatatttaactttaaaagctgtttgttatatgctgcttaataaagtaagcttgaaatttatcattttatcatgaaaacttctttgccttaccagaccagttaatatgtgcactaaacaagcacgactattaatctatcatgttatgatataataaacttgaatttgtcacacattccttagggccatgaattgaaaactgaaatagtgggcaaatcaggaacaaaccatcactgatttactgatttaagctagccaaactgtaagaaacaagccatctattttaaagctatccagggcttaacctatatgaactctatttatcatgtctaatgcatgtgatttaatgtatgtttaatttgatatcatgttttaaaatatcctacttctggtagccatttaattcctccccctacccccaaataaatcaggcatgcaggaggcctgatatttagtaatgtcattgtgtttgaccttgaaggaaaatgctattagtccgtcgtgcttgatttgtttttgtccttgaataagcatgttatgtatattgtctcgtgtttttatttttacaccatattgtattacacttttagtattcaccagcataatcactgtctgcctaaaatatgcaactctttgcattacaatatgaagtaaagttctatgaagtatgcattttgtgtaactaatgtaaaaacacaaattttataaaattgtacagttttttaaaaactactcacaactagcagatggcttaaatgtagcaatctctgcgttaattaaatgcctttaagagatataattaacgtgcagt

SEQ ID NO: 134084 - DNA, 2489 bp, Homo sapiens
  Payload ID: 6190
  Gene Symbol: FERMT3
  Gene Name: fermitin family member 3
  Uniprot ID: Q86UX7
  ENST ID: ENST00000279227
  CDS Start-End: 96-2099
gagaaaggagggcaggaagcccacggcccacaggggtgtagcccgagacccacctgcagcccccagcccttgccaggaaagcagcagccgcagccatggcggggatgaagacagcctccggggactacatcgactcgtcatgggagctgcgggtgtttgtgggagaggaggacccagaggccgagtcggtcaccctgcgggtcactggggagtcgcacatcggcggggtgctcctgaagattgtggagcagatcaatcgcaagcaggactggtcagaccatgctatttggtgggaacagaagaggcagtggctgctgcagacccactggacactggacaagtacgggatcctggccgacgcacgcctcttctttgggccccagcaccggcccgtcatccttcggttgcccaaccgccgcgcactgcgcctccgtgccagcttctcccagcccctcttccaggctgtggctgccatctgccgcctcctcagcatccggcaccccgaggagctgtccctgctccgggctcctgagaagaaggagaagaagaagaaagagaaggagccagaggaagagctctatgacttgagcaaggttgtcttggctgggggcgtggcacctgcactgttccgggggatgccagctcacttctcggacagcgcccagactgaggcctgctaccacatgctgagccggccccagccgccacccgaccccctcctgctccagcgtctgccacggcccagctccctgtcagacaagacccagctccacagcaggtggctggactcgtcgcggtgtctcatgcagcagggcatcaaggccggggacgcactctggctgcgcttcaagtactacagcttcttcgatttggatcccaagacagaccccgtgcggctgacacagctgtatgagcaggcccggtgggacctgctgctggaggagattgactgcaccgaggaggagatgatggtgtttgccgccctgcagtaccacatcaacaagctgtcccagagcggggaggtgggggagccggctggcacagacccagggctggacgacctggatgtggccctgagcaacctggaggtgaagctggaggggtcggcgcccacagatgtgctggacagcctcaccaccatcccagagctcaaggaccatctccgaatctttcgcatcccacgaaggccccggaagctgaccctgaagggctaccgccaacactgggtggtgttcaaggagaccacactgtcctactacaagagccaggacgaggcccctggggaccccattcagcagctcaacctcaagggctgtgaggtggttcccgatgttaacgtctccggccagaagttctgcattaaactcctagtgccctcccctgagggcatgagtgagatctacctgcggtgccaggatgagcagcagtatgcccgctggatggctggctgccgcctggcctccaaaggccgcaccatggccgacagcagctacaccagcgaggtgcaggccatcctggccttcctcagcctgcagcgcacgggcagtgggggcccgggcaaccacccccacggccctgatgcctctgccgagggcctcaacccctacggcctcgttgccccccgtttccagcgaaagttcaaggccaagcagctcaccccacggatcctggaagcccaccagaatgtggcccagttgtcgctggcagaggcccagctgcgcttcatccaggcctggcagtccctgcccgacttcggcatctcctatgtcatggtcaggttcaagggcagcaggaaagacgagatcctgggcatcgccaacaaccgactgatccgcatcgacttggccgtgggcgacgtggtcaagacctggcgtttcagcaacatgcgccagtggaatgtcaactgggacatccggcaggtggccatcgagtttgatgaacacatcaatgtggccttcagctgcgtgtctgccagctgccgaattgtacacgagtatatcgggggctacattttcctgtcgacgcgggagcgggcccgtggggaggagctggatgaagacctcttcctgcagctcaccgggggccatgaggccttctgagggctgtctgattgcccctgccctgctcaccaccctgtcacagccactcccaagcccacacccacaggggctcactgccccacacccgctccaggcaggcacccagctgggcatttcacctgctgtcactgactttgtgcaggccaaggacctggcagggccagacgctgtaccatcacccaggccagggatgggggtgggggtccctgagctcatgtggtgccccctttccttgtctgagtggctgaggctgatacccctgacctatctgcagtcccccagcacacaaggaagaccagatgtagctacaggatgatgaaacatggtttcaaacgagttctttcttgttactttttaaaatttcttttttataaattaatattttattgt

SEQ ID NO: 134085 - DNA, 2481 bp, Homo sapiens
  Payload ID: 6190
  Gene Symbol: FERMT3
  Gene Name: fermitin family member 3
  Uniprot ID: Q86UX7
  ENST ID: ENST00000345728
  CDS Start-End: 96-2087
gagaaaggagggcaggaagcccacggcccacaggggtgtagcccgagacccacctgcagcccccagcccttgccaggaaagcagcagccgcagccatggcggggatgaagacagcctccggggactacatcgactcgtcatgggagctgcgggtgtttgtgggagaggaggacccagaggccgagtcggtcaccctgcgggtcactggggagtcgcacatcggcggggtgctcctgaagattgtggagcagatcaatcgcaagcaggactggtcagaccatgctatttggtgggaacagaagaggcagtggctgctgcagacccactggacactggacaagtacgggatcctggccgacgcacgcctcttctttgggccccagcaccggcccgtcatccttcggttgcccaaccgccgcgcactgcgcctccgtgccagcttctcccagcccctcttccaggctgtggctgccatctgccgcctcctcagcatccggcaccccgaggagctgtccctgctccgggctcctgagaagaaggagaagaagaagaaagagaaggagccagaggaagagctctatgacttgagcaaggttgtcttggctgggggcgtggcacctgcactgttccgggggatgccagctcacttctcggacagcgcccagactgaggcctgctaccacatgctgagccggccccagccgccacccgaccccctcctgctccagcgtctgccacggcccagctccctgtcagacaagacccagctccacagcaggtggctggactcgtcgcggtgtctcatgcagcagggcatcaaggccggggacgcactctggctgcgcttcaagtactacagcttcttcgatttggatcccaagacagaccccgtgcggctgacacagctgtatgagcaggcccggtgggacctgctgctggaggagattgactgcaccgaggaggagatgatggtgtttgccgccctgcagtaccacatcaacaagctgtcccagagcggggaggtgggggagccggctggcacagacccagggctggacgacctggatgtggccctgagcaacctggaggtgaagctggaggggtcggcgcccacagatgtgctggacagcctcaccaccatcccagagctcaaggaccatctccgaatctttcggccccggaagctgaccctgaagggctaccgccaacactgggtggtgttcaaggagaccacactgtcctactacaagagccaggacgaggcccctggggaccccattcagcagctcaacctcaagggctgtgaggtggttcccgatgttaacgtctccggccagaagttctgcattaaactcctagtgccctcccctgagggcatgagtgagatctacctgcggtgccaggatgagcagcagtatgcccgctggatggctggctgccgcctggcctccaaaggccgcaccatggccgacagcagctacaccagcgaggtgcaggccatcctggccttcctcagcctgcagcgcacgggcagtgggggcccgggcaaccacccccacggccctgatgcctctgccgagggcctcaacccctacggcctcgttgccccccgtttccagcgaaagttcaaggccaagcagctcaccccacggatcctggaagcccaccagaatgtggcccagttgtcgctggcagaggcccagctgcgcttcatccaggcctggcagtccctgcccgacttcggcatctcctatgtcatggtcaggttcaagggcagcaggaaagacgagatcctgggcatcgccaacaaccgactgatccgcatcgacttggccgtgggcgacgtggtcaagacctggcgtttcagcaacatgcgccagtggaatgtcaactgggacatccggcaggtggccatcgagtttgatgaacacatcaatgtggccttcagctgcgtgtctgccagctgccgaattgtacacgagtatatcgggggctacattttcctgtcgacgcgggagcgggcccgtggggaggagctggatgaagacctcttcctgcagctcaccgggggccatgaggccttctgagggctgtctgattgcccctgccctgctcaccaccctgtcacagccactcccaagcccacacccacaggggctcactgccccacacccgctccaggcaggcacccagctgggcatttcacctgctgtcactgactttgtgcaggccaaggacctggcagggccagacgctgtaccatcacccaggccagggatgggggtgggggtccctgagctcatgtggtgccccctttccttgtctgagtggctgaggctgatacccctgacctatctgcagtcccccagcacacaaggaagaccagatgtagctacaggatgatgaaacatggtttcaaacgagttctttcttgttactttttaaaatttcttttttataaattaatattttattgttgga

SEQ ID NO: 134086 - DNA, 714 bp, Homo sapiens
  Payload ID: 6190
  Gene Symbol: FERMT3
  Gene Name: fermitin family member 3
  ENST ID: ENST00000541252
  CDS Start-End: 471-714
gctgaagtcacattgctgaggtctgagggggtctaggtgacccaggggcctgcccccacgctccctccccttggcggaagctttgagcagatcgcaagcaggactggtcagaccatgctatttggtgggaacagaagaggcagtggctgctgcagacccactggacactggacaagtacgggatcctggccgacgcacgcctcttctttgggccccagcaccggcccgtcatccttcggttgcccaaccgccgcgcactgcgcctccgtgccagcttctcccagcccctcttccaggctgtggctgccatctgccgcctcctcagcatccggcaccccgaggagctgtccctgctccgggctcctgagaagaaggagaagaagaagaaagagaaggagccagaggaagagctctatgacttgagcaaggttgtcttggctgggggcgtggcacctgcactgttccgggggatgccagctcacttctcggacagcgcccagactgaggcctgctaccacatgctgagccggccccagccgccacccgaccccctcctgctccagcgtctgccacggcccagctccctgtcagacaagacccagctccacagcaggtggctggactcgtcgcggtgtctcatgcagcagggcatcaaggccggggacgcactctggctgcgcttcaagtactacagcttcttcgatttggatccca

SEQ ID NO: 134087 - DNA, 911 bp, Homo sapiens
  Payload ID: 6190
  Gene Symbol: FERMT3
  Gene Name: fermitin family member 3
  ENST ID: ENST00000545896
  CDS Start-End: 1-555
agcagcagtatgcccgctggatggctggctgccgcctggcctccaaaggccgcaccatggccgacagcagctacaccagcgaggtgcaggccatcctggccttcctcagcctgcagcgcacgggcagtgggggcccgggcaaccacccccacggccctgatgcctctgccgagggcctcaacccctacggcctcgttgccccccgtttccagcgaaagttcaaggccaagcaggttcaagggcagcaggaaagacgagatcctgggcatcgccaacaaccgactgatccgcatcgacttggccgtgggcgacgtggtcaagacctggcgtttcagcaacatgcgccagtggaatgtcaactgggacatccggcaggtggccatcgagtttgatgaacacatcaatgtggccttcagctgcgtgtctgccagctgccgaattgtacacgagtatatcgggggctacattttcctgtcgacgcgggagcgggcccgtggggaggagctggatgaagacctcttcctgcagctcaccgggggccatgaggccttctgagggctgtctgattgcccctgccctgctcaccaccctgtcacagccactcccaagcccacacccacaggggctcactgccccacacccgctccaggcaggcacccagctgggcatttcacctgctgtcactgactttgtgcaggccaaggacctggcagggccagacgctgtaccatcacccaggccagggatgggggtgggggtccctgagctcatgtggtgccccctttccttgtctgagtggctgaggctgatacccctgacctatctgcagtcccccagcacacaaggaagaccagatgtagctacaggatgatgaaacatggtttcaaacgagttctttcttgttacttttt

SEQ ID NO: 134088 - DNA, 1006 bp, Homo sapiens
  Payload ID: 6190
  Gene Symbol: FERMT3
  Gene Name: fermitin family member 3
  ENST ID: ENST00000544997
  CDS Start-End: 149-1006
acccgccctgctcgtgataaggcacaagcaagggctgccctgaaggaagctccaaagagaaaggagggcaggaagcccacggcccacaggggtgtagcccgagacccacctgcagcccccagcccttgccaggaaagcagccgcagccatggcggggatgaagacagcctccggggactacatcgactcgtcatgggagctgcgggtgtttgtgggagaggaggacccagaggccgagtcggtcaccctgcgggtcactggggagtcgcacatcggcggggtgctcctgaagattgtggagcagatcaatcgcaagcaggactggtcagaccatgctatttggtgggaacagaagaggcagtggctgctgcagacccactggacactggacaagtacgggatcctggccgacgcacgcctcttctttgggccccagcaccggcccgtcatccttcggttgcccaaccgccgcgcactgcgcctccgtgccagcttctcccagcccctcttccaggctgtggctgccatctgccgcctcctcagcatccggcaccccgaggagctgtccctgctccgggctcctgagaagaaggagaagaagaagaaagagaaggagccagaggaagagctctatgacttgagcaaggttgtcttggctgggggcgtggcacctgcactgttccgggggatgccagctcacttctcggacagcgcccagactgaggcctgctaccacatgctgagccggccccagccgccacccgaccccctcctgctccagcgtctgccacggcccagctccctgtcagacaagacccagctccacagcaggtggctggactcgtcgcggtgtctcatgcagcagggcatcaaggccggggacgcactctggctgcgcttcaagtactacagcttcttcgatttggatcccaagacagaccccgtgcggctgacacagctgtatgagcaggcccggtgggacctgctgctggaggagattgactgc

SEQ ID NO: 134089 - DNA, 3206 bp, Homo sapiens
  Payload ID: 6191
  Gene Symbol: FDX1
  Gene Name: ferredoxin 1
  Uniprot ID: P10109
  ENST ID: ENST00000260270
  CDS Start-End: 239-793
gggcgtgagaggcggggcggggccgcgctctgcttgccaatgtctttataggtcacccggaaggcacgcggaacctcggcgcggtgcttccagcagggtctctccgccactccagccccgcgcccctcgccgcggccctcgggcgtctgcgccgcagctgccgcccccgcctctttggagtctctcgcggcctcaaagcgcggcctgcgtcgcttccggcagttcccgaccgcgggcgatggctgccgctgggggcgcccggctgctgcgcgccgcttctgctgtcctcggcggcccggccggccggtggctgcaccacgctgggtcccgcgctggatccagcggcctgctgaggaaccgggggccgggcgggagcgcggaggcgagccggtcgctgagcgtgtcggcgcgggcccggagcagctcagaagataaaataacagtccactttataaaccgtgatggtgaaacattaacaaccaaaggaaaagttggtgattctctgctagatgttgtggttgaaaataatctagatattgatggctttggtgcatgtgagggaaccctggcttgttcaacctgtcacctcatctttgaagatcacatatatgagaagttagatgcaatcactgatgaggagaatgacatgctcgatctggcatatggactaacagacagatcacggttgggctgccaaatctgtttgacaaaatctatggacaatatgactgttcgagtgcctgaaacagtggctgatgccagacaatccattgatgtgggcaagacctcctgaactagaacaaataggaatattttcatggaattttacctatttttataattattatttcttaaagtgattaaatgagaacatggatgagtggacttcatattatgactagctttactattttaattcaccttgcataactactgaattttgtcattcttgaaagtatgcaatttttattttggttatattacaaaaatgtcaatcaaatattaaaaaatagttaatgtgatagaaaaaccttacatatttttttcttatgtttgtttagcgactttagcaaaatgttttcatataatctcatctgtttacctagaagataggttaaggaaatatattattattcctgtttgatgtgggtgaaggcagagatctaacctggcttgtttagggccataccactaattagaaaatctgtgctagaacctgtgtcttattcctataagctatgtgttcagactgaaactggagaaattatgactattttatttatagtagtagttaaatctgaatgtgtatggacaaaaatatttaattgctcagtaaactgcttaacttcaaagatagttattgaccttataaataaatatttcaaaattttgattcggaagactaagtctggacgtagacattataatgctatcaaagaagtttgatctctgttttgactaaactagaggaaaaatgattggatgtgtttattcttttctaagcagaatggtttaactttgtactctttgaaaaataatgctgatttataaatctctgcctataacagaatggaaaccttatgaatgaattgtgtttctctgtcctgagctggagaagggaatgagcaggctgacacgttgcacagccccaggtggcgccattctctcacgcaaggatggggctgcagggtgagcagcgtgggctgcagtgtgtcagtcccaggagtgagggagtggcaagcaccacagattaccacgtatgtgtggaagacattcgtactcttatctttactataaataaattcataaaagttaacaaaggggtacacagtatggtctttggaaatataataaaacatcaactaacttggactaattgtgaggaagagcagaacaaattagtagaaagaggttataagacaattgagttagcttcatgtgtattattgcagcttgatcatttatataaatatttgtctagtacaatgcttgacatacagcattgtgttatgcccattggggacacagaggtgaacaagacaaggaatgccatcagggaattcaccttttattaggaaaatataaaatatgtatgtatgtgcagataatttgcttgaactaaactgactagttctgctaaataagattttaaactaattcatatgtaaaaagtgattaggaagaacttgaagtatcatttgatgcttaataactattgagtagttttttttttttttttttggtggggggagcgggggacagggtcttactctgtcactcaggccagagtacaatagtatgatctcggctcactgcaacttctgcctcccagtttcaagggattctcgtgcctcagcctcccaggtagctggtactacaggcacggaccaccacgcctggctaatttttgtattttttctagggacagggttttaccacgttgcccaggctggtcttgaacttttgagctcgagtgatccacccacctcagcctcccaaaatgctgggattacagatgtgagccaccgtgcttggccataactattgaatgctttctatgtggagagtgcttgtcttaattttctgttgctataatagaataacacagactgggtaatttataaagaaaagagatttatttggatcatggttctggaggctgggaggtccaagagcatggtaccagcatctgcttggcatctggtgacagctttcttgctgcatcattacatggtggaagggcaagagaatgcgagtgagagcaagagggcaaaatgattatccttttatcaggagcccacttctgacataactaacccacacctgagataacggcattaatccattcatgaggtctctgctcttaaaggagatcacctcttaaaggacccacctttcaatgccattacactggcaatttaatttcaagatgagttttggaggggacattcaaaccatagcagtgctataattttaaagtacttcaaagccaatttattctcttaattagcttcattattcttgtctttgtgtgtggattacctaaactctccttccagagctactttaatgattatattcaaccaaagcactctaaaatttagagtataaattgtcttatatttcaaattagaaaagttcaaatgaagtttaattgtgttattttataaaaccttctaaaattattaaatggaggatataatcta

SEQ ID NO: 134090 - DNA, 1012 bp, Homo sapiens
  Payload ID: 6192
  Gene Symbol: FDX1L
  Gene Name: ferredoxin 1-like
  Uniprot ID: Q6P4F2
  ENST ID: ENST00000393708
  CDS Start-End: 11-571
gagtcacgtgatgcatgtcatggccgcctccatggcccggggaggcgtgagtgccagggttctactgcaggctgccaggggcacctggtggaacagacctgggggcacttccgggtcgggggagggggtggcgctggggacaaccagaaagtttcaagcgacaggctcgcgcccggctggagaggaggacgcgggcggcccggagcggcccggggacgtggtgaacgtggtgttcgtagaccgctcaggccagcggatcccagtgagtggcagagtcggggacaatgttcttcacctggcccagcgccacggggtggacctggaaggggcctgtgaagcctccctggcctgctccacctgccatgtgtatgtgagtgaagaccacctggatctcctgcctcctcccgaggagagggaagacgacatgctagacatggcccccctcctccaggagaactcgcggctgggctgccagattgtgctgacaccggagctggaaggagcggaattcaccctgcccaagatcaccaggaacttctacgtggatggccatgtccccaagccccactgacatgaacacctggaccattccacattgccatggccccagggcccagattgagggaatagccaggtgccagccctgcccagagtgcggacaggcccgggagagacgtggaagcccctgtgaaggacaacacccctgcttgggagagagtcccatgtccaggctctggtggggacagggcccctagtggggtggccttccccaggcccctgagaatcagggtttgagtaggagtggactcatattggagctgcaataaatcgataacacaggccccagcatgttgagtgtccttgggggacagatctggggtctacaggtggctcacacctgtaatcctagcactttgggaagccaagatgggaggatcacttgaggccaggagcttaagaccatcctgggcaacatggcgagacctcgtctctataaaaacagtaaaaatta

SEQ ID NO: 134091 - DNA, 584 bp, Homo sapiens
  Payload ID: 6192
  Gene Symbol: FDX1L
  Gene Name: ferredoxin 1-like
  ENST ID: ENST00000494368
  CDS Start-End: 307-453
gagtcacgtgatgcatgtcatggccgcctccatggcccggggaggcgctcgcgcccggctggagaggaggacgcgggcggcccggagcggcccggggacgtggtgaacgtggtgttcgtagaccgctcaggccagcggatcccagtgagtggcagagtcggggacaatgttcttcacctggcccagcgccacggggtggacctggaaggggcctgtgaagcctccctggcctgctccacctgccatgtgtatgtgagtgaagaccacctggatctcctgcctcctcccgaggagagggaagacgacatgctagacatggcccccctcctccaggagaactcgcggctgggctgccagattgtgctgacaccggagctggaaggagcggaattcaccctgcccaagatcaccaggaacttctacgtggatggccatgtccccaagccccactgacatgaacacctggaccattccacattgccatggccccagggcccagattgagggaatagccaggtgccagccctgcccagagtgcggacaggcccgggagagacgtggaagcccctgtgaaggacaacacc

SEQ ID NO: 134092 - DNA, 773 bp, Homo sapiens
  Payload ID: 6192
  Gene Symbol: FDX1L
  Gene Name: ferredoxin 1-like
  ENST ID: ENST00000492239
  CDS Start-End: 358-504
gctcggcgcagccgctcaccgaaccgtgttttccaggctcgcgcccggctggagaggaggacgcgggcggcccggagcggcccggggacgtattctacccgggccctgagcccatcatccagttcggcattcgcacttccatctgtccccagggtgaacgtggtgttcgtagaccgctcaggccagcggatcccagtgagtggcagagtcggggacaatgttcttcacctggcccagcgccacggggtggacctggaaggggcctgtgaagcctccctggcctgctccacctgccatgtgtatgtgagtgaagaccacctggatctcctgcctcctcccgaggagagggaagacgacatgctagacatggcccccctcctccaggagaactcgcggctgggctgccagattgtgctgacaccggagctggaaggagcggaattcaccctgcccaagatcaccaggaacttctacgtggatggccatgtccccaagccccactgacatgaacacctggaccattccacattgccatggccccagggcccagattgagggaatagccaggtgccagccctgcccagagtgcggacaggcccgggagagacgtggaagcccctgtgaaggacaacacccctgcttgggagagagtcccatgtccaggctctggtggggacagggcccctagtggggtggccttccccaggcccctgagaatcagggtttgagtaggagtggactcatattggagctgcaataaatcgataacacag

SEQ ID NO: 134093 - DNA, 1875 bp, Homo sapiens
  Payload ID: 6193
  Gene Symbol: FDXR
  Gene Name:: ferredoxin reductase
  ENST ID: ENST00000293195
  CDS Start-End: 80-1555
gcgggcccgggcaggagcgggcttgccctgcggagcagtagctaggaacagatccacttgcaggttgctgctcccagccatggcttcgcgctgctggcgctggtggggctggtcggcgtggcctcggacccggctgcctcccgccgggagcaccccgagcttctgccaccatttctccacacaggagaagaccccccagatctgtgtggtgggcagtggcccagctggcttctacacggcccaacacctgctaaagcacccccaggcccacgtggacatctacgagaaacagcctgtgccctttggcctggtgcgctttggtgtggcgcctgatcaccccgaggtgaagaatgtcatcaacacatttacccagacggcccattctggccgctgtgccttctggggcaacgtggaggtgggcagggacgtgacggtgccggagctgcaggaggcctaccacgctgtggtgctgagctacggggcagaggaccatcgggccctggaaattcctggtgaggagctgccaggtgtgtgctccgcccgggccttcgtgggctggtacaacgggcttcctgagaaccaggagctggagccagacctgagctgtgacacagccgtgattctggggcaggggaacgtggctctggacgtggcccgcatcctactgaccccacctgagcacctggagagaacggacatcacgaaggcagccctgggtgtactgaggcagagtcgagtgaagacagtgtggctagtgggccggcgtggacccctgcaagtggccttcaccattaaggagcttcgggagatgattcagttaccgggagcccggcccattttggatcctgtggatttcttgggtctccaggacaagatcaaggaggtcccccgcccgaggaagcggctgacggaactgctgcttcgaacggccacagagaagccagggccggcggaagctgcccgccaggcatcggcctcccgtgcctggggcctccgctttttccgaagcccccagcaggtgctgccctcaccagatgggcggcgggcagcaggtgtccgcctagcagtcactagactggagggtgtcgatgaggccacccgtgcagtgcccacgggagacatggaagacctcccttgtgggctggtgctcagcagcattgggtataagagccgccctgtcgacccaagcgtgccctttgactccaagcttggggtcatccccaatgtggagggccgggttatggatgtgccaggcctctactgcagcggctgggtgaagagaggacctacaggtgtcatagccacaaccatgactgacagcttcctcaccggccagatgctgctgcaggacctgaaggctgggttgctcccctctggccccaggcctggctacgcagccatccaggccctgctcagcagccgaggggtccggccagtctctttctcagactgggagaagctggatgccgaggaggtggcccggggccagggcacggggaagcccagggagaagctggtggatcctcaggagatgctgcgcctcctgggccactgagcccagccccagccccggcccccagcagggaagggatgagtgttgggaggggaagggctgggtccgtctgagtgggactttgcacctctgctgatcccggccggccctggcttggaggcttggctgctcttccagcgtctctcctccctcctggggaaggtcgcccttgcgcgcaaggttttagctttcagcaactgaggtaaccttagggacaggtggaggtgtgggccgatctaaccccttacccatctctctactgctggactgtggagggtcaccaggttgggaacatgctggaaataaaacagctgcaaccaaga

SEQ ID NO: 134094 - DNA, 1809 bp, Homo sapiens
  Payload ID: 6193
  Gene Symbol: FDXR
  Gene Name: ferredoxin reductase
  ENST ID: ENST00000413947
  CDS Start-End: 33-1601
acagatccacttgcaggttgctgctcccagccatggcttcgcgctgctggcgctggtggggctggtcggcgtggcctcggacccggctgcctcccgccgggagcaccccgacctttgggggttcagatgaagtaagagaccctgcaaatgccaaagccttgaggaacaagagaaggaggatgcaggtgagggtgaagcttgggaagttccagcttctgttggatattcaggagaagaccccccagatctgtgtggtgggcagtggcccagctggcttctacacggcccaacacctgctaaagcacccccaggcccacgtggacatctacgagaaacagcctgtgccctttggcctggtgcgctttggtgtggcgcctgatcaccccgaggtgaagaatgtcatcaacacatttacccagacggcccattctggccgctgtgccttctggggcaacgtggaggtgggcagggacgtgacggtgccggagctgcaggaggcctaccacgctgtggtgctgagctacggggcagaggaccatcgggccctggaaattcctggtgaggagctgccaggtgtgtgctccgcccgggccttcgtgggctggtacaacgggcttcctgagaaccaggagctggagccagacctgagctgtgacacagccgtgattctggggcaggggaacgtggctctggacgtggcccgcatcctactgaccccacctgagcacctggagagaacggacatcacgaaggcagccctgggtgtactgaggcagagtcgagtgaagacagtgtggctagtgggccggcgtggacccctgcaagtggccttcaccattaaggagcttcgggagatgattcagttaccgggagcccggcccattttggatcctgtggatttcttgggtctccaggacaagatcaaggaggtcccccgcccgaggaagcggctgacggaactgctgcttcgaacggccacagagaagccagggccggcggaagctgcccgccaggcatcggcctcccgtgcctggggcctccgctttttccgaagcccccagcaggtgctgccctcaccagatgggcggcgggcagcaggtgtccgcctagcagtcactagactggagggtgtcgatgaggccacccgtgcagtgcccacgggagacatggaagacctcccttgtgggctggtgctcagcagcattgggtataagagccgccctgtcgacccaagcgtgccctttgactccaagcttggggtcatccccaatgtggagggccgggttatggatgtgccaggcctctactgcagcggctgggtgaagagaggacctacaggtgtcatagccacaaccatgactgacagcttcctcaccggccagatgctgctgcaggacctgaaggctgggttgctcccctctggccccaggcctggctacgcagccatccaggccctgctcagcagccgaggggtccggccagtctctttctcagactgggagaagctggatgccgaggaggtggcccggggccagggcacggggaagcccagggagaagctggtggatcctcaggagatgctgcgcctcctgggccactgagcccagccccagccccggcccccagcagggaagggatgagtgttgggaggggaagggctgggtccgtctgagtgggactttgcacctctgctgatcccggccggccctggcttggaggcttggctgctcttccagcgtctctcctccctcctggggaaggtcgcccttgcgcgcaaggttttagctttcagcaactgaggtaacctta

SEQ ID NO: 134095 - DNA, 1705 bp, Homo sapiens
  Payload ID: 6193
  Gene Symbol: FDXR
  Gene Name: ferredoxin reductase
  Uniprot ID: P22570
  ENST ID: ENST00000420580
  CDS Start-End: 31-1386
agatccacttgcaggttgctgctcccagccatggcttcgcgctgctggcgctggtggggctggtcggcgtggcctcggacccggctgcctcccgccgggagcaccccgagcttctgccaccatttctccacacaggagaagaccccccagatctgtgtggtgggcagtggcccagctggcttctacacggcccaacacctgctaaagcagcacccccaggcccacgtggacatctacgagaaacagcctgtgccctttggcctggtgcgctttggtgtggcgcctgatcaccccgaggtgaagagctacggggcagaggaccatcgggccctggaaattcctggtgaggagctgccaggtgtgtgctccgcccgggccttcgtgggctggtacaacgggcttcctgagaaccaggagctggagccagacctgagctgtgacacagccgtgattctggggcaggggaacgtggctctggacgtggcccgcatcctactgaccccacctgagcacctggagagaacggacatcacgaaggcagccctgggtgtactgaggcagagtcgagtgaagacagtgtggctagtgggccggcgtggacccctgcaagtggccttcaccattaaggagcttcgggagatgattcagttaccgggagcccggcccattttggatcctgtggatttcttgggtctccaggacaagatcaaggaggtcccccgcccgaggaagcggctgacggaactgctgcttcgaacggccacagagaagccagggccggcggaagctgcccgccaggcatcggcctcccgtgcctggggcctccgctttttccgaagcccccagcaggtgctgccctcaccagatgggcggcgggcagcaggtgtccgcctagcagtcactagactggagggtgtcgatgaggccacccgtgcagtgcccacgggagacatggaagacctcccttgtgggctggtgctcagcagcattgggtataagagccgccctgtcgacccaagcgtgccctttgactccaagcttggggtcatccccaatgtggagggccgggttatggatgtgccaggcctctactgcagcggctgggtgaagagaggacctacaggtgtcatagccacaaccatgactgacagcttcctcaccggccagatgctgctgcaggacctgaaggctgggttgctcccctctggccccaggcctggctacgcagccatccaggccctgctcagcagccgaggggtccggccagtctctttctcagactgggagaagctggatgccgaggaggtggcccggggccagggcacggggaagcccagggagaagctggtggatcctcaggagatgctgcgcctcctgggccactgagcccagccccagccccggcccccagcagggaagggatgagtgttgggaggggaagggctgggtccgtctgagtgggactttgcacctctgctgatcccggccggccctggcttggaggcttggctgctcttccagcgtctctcctccctcctggggaaggtcgcccttgcgcgcaaggttttagctttcagcaactgaggtaaccttagggacaggtggaggtgtgggccgatctaaccccttacccatctctctactgctggactgtggagggtcaccaggttgggaacatgctggaaataaaacagctgcaaccaag

SEQ ID NO: 134096 - DNA, 1967 bp, Homo sapiens
  Payload ID: 6193
  Gene Symbol: FDXR
  Gene Name: ferredoxin reductase
  ENST ID: ENST00000442102
  CDS Start-End: 88-1692
gcttgtgggcgggcccgggcaggagcgggcttgccctgcggagcagtagctaggaacagatccacttgcaggttgctgctcccagccatggcttcgcgctgctggcgctggtggggctggtcggcgtggcctcggacccggctgcctcccgccgggagcaccccgagcttctgccaccatttctccacacaggagaagaccccccagatctgtgtggtgggcagtggcccagctggcttctacacggcccaacacctgctaaagagggtggaagccttgtgttctcagcccagggtcctgaactctcctgctctgtctggggaaggggaggacctgggggcgtcccagcctctctctctcggccccaccagctgccaccctgttccccagcagcacccccaggcccacgtggacatctacgagaaacagcctgtgccctttggcctggtgcgctttggtgtggcgcctgatcaccccgaggtgaagaatgtcatcaacacatttacccagacggcccattctggccgctgtgccttctggggcaacgtggaggtgggcagggacgtgacggtgccggagctgcaggaggcctaccacgctgtggtgctgagctacggggcagaggaccatcgggccctggaaattcctggtgaggagctgccaggtgtgtgctccgcccgggccttcgtgggctggtacaacgggcttcctgagaaccaggagctggagccagacctgagctgtgacacagccgtgattctggggcaggggaacgtggctctggacgtggcccgcatcctactgaccccacctgagcacctggagagaacggacatcacgaaggcagccctgggtgtactgaggcagagtcgagtgaagacagtgtggctagtgggccggcgtggacccctgcaagtggccttcaccattaaggagcttcgggagatgattcagttaccgggagcccggcccattttggatcctgtggatttcttgggtctccaggacaagatcaaggaggtcccccgcccgaggaagcggctgacggaactgctgcttcgaacggccacagagaagccagggccggcggaagctgcccgccaggcatcggcctcccgtgcctggggcctccgctttttccgaagcccccagcaggtgctgccctcaccagatgggcggcgggcagcaggtgtccgcctagcagtcactagactggagggtgtcgatgaggccacccgtgcagtgcccacgggagacatggaagacctcccttgtgggctggtgctcagcagcattgggtataagagccgccctgtcgacccaagcgtgccctttgactccaagcttggggtcatccccaatgtggagggccgggttatggatgtgccaggcctctactgcagcggctgggtgaagagaggacctacaggtgtcatagccacaaccatgactgacagcttcctcaccggccagatgctgctgcaggacctgaaggctgggttgctcccctctggccccaggcctggctacgcagccatccaggccctgctcagcagccgaggggtccggccagtctctttctcagactgggagaagctggatgccgaggaggtggcccggggccagggcacggggaagcccagggagaagctggtggatcctcaggagatgctgcgcctcctgggccactgagcccagccccagccccggcccccagcagggaagggatgagtgttgggaggggaagggctgggtccgtctgagtgggactttgcacctctgctgatcccggccggccctggcttggaggcttggctgctcttccagcgtctctcctccctcctggggaaggtcgcccttgcgcgcaaggttttagctttcagcaactgaggtaaccttagggacaggtggaggtgtgggccgatctaaccccttacccatctctctactgctggactgtggagggt

SEQ ID NO: 134097 - DNA, 1827 bp, Homo sapiens
  Payload ID: 6193
  Gene Symbol: FDXR
  Gene Name: ferredoxin reductase
  ENST ID: ENST00000544854
  CDS Start-End: 189-1508
agagaatgtccttgttagcggggagcagctagagggacaggagggagggaaggaaggaaggaggaaacctggaagatgaggtcagccacgagagataaggggtaagaacatccggcagacttagcgttccggaggtggccctggagaggacatcgtgacccagagtgaaggatctgtcgcaggaaagaatggaagataaggacagagagcacccccaggcccacgtggacatctacgagaaacagcctgtgccctttggcctggtgcgctttggtgtggcgcctgatcaccccgaggtgaagaatgtcatcaacacatttacccagacggcccattctggccgctgtgccttctggggcaacgtggaggtgggcagggacgtgacggtgccggagctgcaggaggcctaccacgctgtggtgctgagctacggggcagaggaccatcgggccctggaaattcctggtgaggagctgccaggtgtgtgctccgcccgggccttcgtgggctggtacaacgggcttcctgagaaccaggagctggagccagacctgagctgtgacacagccgtgattctggggcaggggaacgtggctctggacgtggcccgcatcctactgaccccacctgagcacctggagagaacggacatcacgaaggcagccctgggtgtactgaggcagagtcgagtgaagacagtgtggctagtgggccggcgtggacccctgcaagtggccttcaccattaaggagcttcgggagatgattcagttaccgggagcccggcccattttggatcctgtggatttcttgggtctccaggacaagatcaaggaggtcccccgcccgaggaagcggctgacggaactgctgcttcgaacggccacagagaagccagggccggcggaagctgcccgccaggcatcggcctcccgtgcctggggcctccgctttttccgaagcccccagcaggtgctgccctcaccagatgggcggcgggcagcaggtgtccgcctagcagtcactagactggagggtgtcgatgaggccacccgtgcagtgcccacgggagacatggaagacctcccttgtgggctggtgctcagcagcattgggtataagagccgccctgtcgacccaagcgtgccctttgactccaagcttggggtcatccccaatgtggagggccgggttatggatgtgccaggcctctactgcagcggctgggtgaagagaggacctacaggtgtcatagccacaaccatgactgacagcttcctcaccggccagatgctgctgcaggacctgaaggctgggttgctcccctctggccccaggcctggctacgcagccatccaggccctgctcagcagccgaggggtccggccagtctctttctcagactgggagaagctggatgccgaggaggtggcccggggccagggcacggggaagcccagggagaagctggtggatcctcaggagatgctgcgcctcctgggccactgagcccagccccagccccggcccccagcagggaagggatgagtgttgggaggggaagggctgggtccgtctgagtgggactttgcacctctgctgatcccggccggccctggcttggaggcttggctgctcttccagcgtctctcctccctcctggggaaggtcgcccttgcgcgcaaggttttagctttcagcaactgaggtaaccttagggacaggtggaggtgtgggccgatctaaccccttacccatctctctactgctggactgtggagggtcaccaggttgggaacatgctggaaataaaacagctgcaaccaag

SEQ ID NO: 134098 - DNA, 2157 bp, Homo sapiens
  Payload ID: 6193
  Gene Symbol: FDXR
  Gene Name: ferredoxin reductase
  ENST ID: ENST00000579482
  CDS Start-End: 33-173
acagatccacttgcaggttgctgctcccagccatggcttcgcgctgctggcgctggtggggctggtcggcgtggcctcggacccggctgcctcccgccgggagcaccccgagtaggagcagggcgcctttggggctggatgggagcgcggggaggcctgcgagcgctgagtaggggtcggagcagagctggggcagggctggagaagggcttctgccaccatttctccacacaggagaagaccccccagatctgtgtggtgggcagtggcccagctggcttctacacggcccaacacctgctaaagggagctccaagctactggctgtgctcctaagacaggaccacatgcagcacgtttgggacagtggcccttagcttgagtcaggcactgagcacagcatctcgtagcatcctcatgacaacctgcaaagcaggtgtcgtgcctcttgcttcacagcagcacccccaggcccacgtggacatctacgagaaacagcctgtgccctttggcctggtgcgctttggtgtggcgcctgatcaccccgaggtgaagaatgtcatcaacacatttacccagacggcccattctggccgctgtgccttctggggcaacgtggaggtgggcagggacgtgacggtgccggagctgcaggaggcctaccacgctgtggtgctgagctacggggcagaggaccatcgggccctggaaattcctggtgaggagctgccaggtgtgtgctccgcccgggccttcgtgggctggtacaacgggcttcctgagaaccaggagctggagccagacctgagctgtgacacagccgtgattctggggcaggggaacgtggctctggacgtggcccgcatcctactgaccccacctgagcacctggagagaacggacatcacgaaggcagccctgggtgtactgaggcagagtcgagtgaagacagtgtggctagtgggccggcgtggacccctgcaagtggccttcaccattaaggagcttcgggagatgattcagttaccgggagcccggcccattttggatcctgtggatttcttgggtctccaggacaagatcaaggaggtcccccgcccgaggaagcggctgacggaactgctgcttcgaacggccacagagaagccagggccggcggaagctgcccgccaggcatcggcctcccgtgcctggggcctccgctttttccgaagcccccagcaggtgctgccctcaccagatgggcggcgggcagcaggtgtccgcctagcagtcactagactggaggtgagtctcatgtttcccaaagacacccccttcccaggcctctgccacccgcctggtgttgcccacactctccccaacagggtgtcgatgaggccacccgtgcagtgcccacgggagacatggaagacctcccttgtgggctggtgctcagcagcattgggtataagagccgccctgtcgacccaagcgtgccctttgactccaagcttggggtcatccccaatgtggagggccgggttatggatgtgccaggcctctactgcagcggctgggtgaagagaggacctacaggtgtcatagccacaaccatgactgacagcttcctcaccggccagatgctgctgcaggacctgaaggctgggttgctcccctctggccccaggcctggctacgcagccatccaggccctgctcagcagccgaggggtccggccagtctctttctcagactgggagaagctggatgccgaggaggtggcccggggccagggcacggggaagcccagggagaagctggtggatcctcaggagatgctgcgcctcctgggccactgagcccagccccagccccggcccccagcagggaagggatgagtgttgggaggggaagggctgggtccgtctgagtgggactttgcacctctgctgatcccggccggccctggcttggaggcttggctgctcttccagcgtctctcctccctcctggggaaggtcgcccttgcgcgcaaggttttagctttcagcaactgaggtaaccttagggacaggtggaggtgtgggccgatctaaccccttacccatctctctactgctggactgtggagggtcaccaggttgggaacatgctggaaataaaacagctgcaacc

SEQ ID NO: 134099 - DNA, 1912 bp, Homo sapiens
  Payload ID: 6193
  Gene Symbol: FDXR
  Gene Name: ferredoxin reductase
  ENST ID: ENST00000577509
  CDS Start-End: 25-165
acttgcaggttgctgctcccagccatggcttcgcgctgctggcgctggtggggctggtcggcgtggcctcggacccggctgcctcccgccgggagcaccccgagtaggagcagggcgcctttggggctggatgggagcgcggggaggcctgcgagcgctgagtaggggtcggagcagagctggggcagggctggagaagggcttctgccaccatttctccacacaggagaagaccccccagatctgtgtggtgggcagtggcccagctggcttctacacggcccaacacctgctaaagcagcacccccaggcccacgtggacatctacgagaaacagcctgtgccctttggcctggtgcgctttggtgtggcgcctgatcaccccgaggtgaagaatgtcatcaacacatttacccagacggcccattctggccgctgtgccttctggggcaacgtggaggtgggcagggacgtgacggtgccggagctgcaggaggcctaccacgctgtggtgctgagctacggggcagaggaccatcgggccctggaaattcctggtgaggagctgccaggtgtgtgctccgcccgggccttcgtgggctggtacaacgggcttcctgagaaccaggagctggagccagacctgagctgtgacacagccgtgattctggggcaggggaacgtggctctggacgtggcccgcatcctactgaccccacctgagcacctggagagaacggacatcacgaaggcagccctgggtgtactgaggcagagtcgagtgaagacagtgtggctagtgggccggcgtggacccctgcaagtggccttcaccattaaggagcttcgggagatgattcagttaccgggagcccggcccattttggatcctgtggatttcttgggtctccaggacaagatcaaggaggtcccccgcccgaggaagcggctgacggaactgctgcttcgaacggccacagagaagccagggccggcggaagctgcccgccaggcatcggcctcccgtgcctggggcctccgctttttccgaagcccccagcaggtgctgccctcaccagatgggcggcgggcagcaggtgtccgcctagcagtcactagactggagggtgtcgatgaggccacccgtgcagtgcccacgggagacatggaagacctcccttgtgggctggtgctcagcagcattgggtataagagccgccctgtcgacccaagcgtgccctttgactccaagcttggggtcatccccaatgtggagggccgggttatggatgtgccaggcctctactgcagcggctgggtgaagagaggacctacaggtgtcatagccacaaccatgactgacagcttcctcaccggccagatgctgctgcaggacctgaaggctgggttgctcccctctggccccaggcctggctacgcagccatccaggccctgctcagcagccgaggggtccggccagtctctttctcagactgggagaagctggatgccgaggaggtggcccggggccagggcacggggaagcccagggagaagctggtggatcctcaggagatgctgcgcctcctgggccactgagcccagccccagccccggcccccagcagggaagggatgagtgttgggaggggaagggctgggtccgtctgagtgggactttgcacctctgctgatcccggccggccctggcttggaggcttggctgctcttccagcgtctctcctccctcctggggaaggtcgcccttgcgcgcaaggttttagctttcagcaactgaggtaaccttagggacaggtggaggtgtgggccgatctaaccccttacccatctctctactgctggactgtggagggtcaccaggttgggaacatgctggaaataaaacagctgc

SEQ ID NO: 134100 - DNA, 1766 bp, Homo sapiens
  Payload ID: 6193
  Gene Symbol: FDXR
  Gene Name: ferredoxin reductase
  ENST ID: ENST00000582944
  CDS Start-End: 42-1493
tagctaggaacagatccacttgcaggttgctgctcccagccatggcttcgcgctgctggcgctggtggggctggtcggcgtggcctcggacccggctgcctcccgccgggagcaccccgagcttctgccaccatttctccacacaggagaagaccccccagatctgtgtggtgggcagtggcccagctggcttctacacggcccaacacctgctaaagcacccccaggcccacgtggacatctacgagaaacagcctgtgccctttggcctggtgcgctttggtgtggcgcctgatcaccccgaggtgaagacggcccattctggccgctgtgccttctggggcaacgtggaggtgggcagggacgtgacggtgccggagctgcaggaggcctaccacgctgtggtgctgagctacggggcagaggaccatcgggccctggaaattcctggtgaggagctgccaggtgtgtgctccgcccgggccttcgtgggctggtacaacgggcttcctgagaaccaggagctggagccagacctgagctgtgacacagccgtgattctggggcaggggaacgtggctctggacgtggcccgcatcctactgaccccacctgagcacctggagagaacggacatcacgaaggcagccctgggtgtactgaggcagagtcgagtgaagacagtgtggctagtgggccggcgtggacccctgcaagtggccttcaccattaaggagcttcgggagatgattcagttaccgggagcccggcccattttggatcctgtggatttcttgggtctccaggacaagatcaaggaggtcccccgcccgaggaagcggctgacggaactgctgcttcgaacggccacagagaagccagggccggcggaagctgcccgccaggcatcggcctcccgtgcctggggcctccgctttttccgaagcccccagcaggtgctgccctcaccagatgggcggcgggcagcaggtgtccgcctagcagtcactagactggagggtgtcgatgaggccacccgtgcagtgcccacgggagacatggaagacctcccttgtgggctggtgctcagcagcattgggtataagagccgccctgtcgacccaagcgtgccctttgactccaagcttggggtcatccccaatgtggagggccgggttatggatgtgccaggcctctactgcagcggctgggtgaagagaggacctacaggtgtcatagccacaaccatgactgacagcttcctcaccggccagatgctgctgcaggacctgaaggctgggttgctcccctctggccccaggcctggctacgcagccatccaggccctgctcagcagccgaggggtccggccagtctctttctcagactgggagaagctggatgccgaggaggtggcccggggccagggcacggggaagcccagggagaagctggtggatcctcaggagatgctgcgcctcctgggccactgagcccagccccagccccggcccccagcagggaagggatgagtgttgggaggggaagggctgggtccgtctgagtgggactttgcacctctgctgatcccggccggccctggcttggaggcttggctgctcttccagcgtctctcctccctcctggggaaggtcgcccttgcgcgcaaggttttagctttcagcaactgaggtaaccttagggacaggtggaggtgtgggccgatctaaccccttacccatctctctactgctggactgtggagg

SEQ ID NO: 134101 - DNA, 553 bp, Homo sapiens
  Payload ID: 6193
  Gene Symbol: FDXR
  Gene Name: ferredoxin reductase
  ENST ID: ENST00000580492
  CDS Start-End: 25-300
acttgcaggttgctgctcccagccatggcttcgcgctgctggcgctggtggggctggtcggcgtggcctcggacccggctgcctcccgccgggagcaccccgagcttctgccaccatttctccacacaggagaagaccccccagatctgtgtggtgggcagtggcccagctggcttctacacggcccaacacctgctaaagctgccaccctgttccccagcagcacccccaggcccacgtggacatctacgagaaacagcctgtgccctttggcctggtgcgctttggtgtggcgcctgatcaccccgaggtgaagaatgtcatcaacacatttacccagacggcccattctggccgctgtgccttctggggcaacgtggaggtgggcagggacgtgacggtgccggagctgcaggaggcctaccacgctgtggtgctgagctacggggcagaggaccatcgggccctggaaattcctggtgaggagctgccaggtgtgtgctccgcccgggccttcgtgggctggtacaacgggcttcctgagaaccaggag

SEQ ID NO: 134102 - DNA, 558 bp, Homo sapiens
  Payload ID: 6193
  Gene Symbol: FDXR
  Gene Name: ferredoxin reductase
  ENST ID: ENST00000579543
  CDS Start-End: 31-171
agatccacttgcaggttgctgctcccagccatggcttcgcgctgctggcgctggtggggctggtcggcgtggcctcggacccggctgcctcccgccgggagcaccccgagtaggagcagggcgcctttggggctggatgggagcgcggggaggcctgcgagcgctgagtaggggtcggagcagagctggggcagggctggagaagggagaagaccccccagatctgtgtggtgggcagtggcccagctggcttctacacggcccaacacctgctaaagcacccccaggcccacgtggacatctacgagaaacagcctgtgccctttggcctggtgcgctttggtgtggcgcctgatcaccccgaggtgaagaatgtcatcaacacatttacccagacggcccattctggccgctgtgccttctggggcaacgtggaggtgggcagggacgtgacggtgccggagctgcaggaggcctaccacgctgtggtgctgagctacggggcagaggaccatcgggccctggaaattcctggtgaggagctgccaggtgtgtgct

SEQ ID NO: 134103 - DNA, 846 bp, Homo sapiens
  Payload ID: 6193
  Gene Symbol: FDXR
  Gene Name: ferredoxin reductase
  ENST ID: ENST00000582710
  CDS Start-End: 1-139
ggcttcgcgctgctggcgctggtggggctggtcggcgtggcctcggacccggctgcctcccgccgggagcaccccgagtaggagcagggcgcctttggggctggatgggagcgcggggaggcctgcgagcgctgagtaggggtcggagcagagctggggcagggctggagaagggcttctgccaccatttctccacacaggagaagaccccccagatctgtgtggtgggcagtggcccagctggcttctacacggcccaacacctgctaaagcacccccaggcccacgtggacatctacgagaaacagcctgtgccctttggcctggtgcgctttggtgtggcgcctgatcaccccgaggtgaagagctacggggcagaggaccatcgggccctggaaattcctggtgaggagctgccaggtgtgtgctccgcccgggccttcgtgggctggtacaacgggcttcctgagaaccaggagctggagccagacctgagctgtgacacagccgtgattctggggcaggggaacgtggctctggacgtggcccgcatcctactgaccccacctgagcacctggagagaacggacatcacgaaggcagccctgggtgtactgaggcagagtcgagtgaagacagtgtggctagtgggccggcgtggacccctgcaagtggccttcaccattaaggagcttcgggagatgattcagttaccgggagcccggcccattttggatcctgtggatttcttgggtctccaggacaagatcaaggaggtcccccgcccgaggaagcggctgacggaactgctgcttcgaacggccacagagaagccagggccggcgg

SEQ ID NO: 134104 - DNA, 1827 bp, Homo sapiens
  Payload ID: 6193
  Gene Symbol: FDXR
  Gene Name: ferredoxin reductase
  ENST ID: ENST00000581530
  CDS Start-End: 18-1511
ggttgctgctcccagccatggcttcgcgctgctggcgctggtggggctggtcggcgtggcctcggacccggctgcctcccgccgggagcaccccgagcttctgccaccatttctccacacaggagaagaccccccagatctgtgtggtgggcagtggcccagctggcttctacacggcccaacacctgctaaagcacccccaggcccacgtggacatctacgagaaacagcctgtgccctttggcctggtgcgctttggtgtggcgcctgatcaccccgaggtgaagaatgtcatcaacacatttacccagacggcccattctggccgctgtgccttctggggcaacgtggaggtgggcagggacgtgacggtgccggagctgcaggaggcctaccacgctgtggtgctgagctacggggcagaggaccatcgggccctggaaattcctggtgaggagctgccaggtgtgtgctccgcccgggccttcgtgggctggtacaacgggcttcctgagaaccaggagctggagccagacctgagctgtgacacagccgtgattctggggcaggggaacgtggctctggacgtggcccgcatcctactgaccccacctgagcacctggaggccctccttttgtgccagagaacggacatcacgaaggcagccctgggtgtactgaggcagagtcgagtgaagacagtgtggctagtgggccggcgtggacccctgcaagtggccttcaccattaaggagcttcgggagatgattcagttaccgggagcccggcccattttggatcctgtggatttcttgggtctccaggacaagatcaaggaggtcccccgcccgaggaagcggctgacggaactgctgcttcgaacggccacagagaagccagggccggcggaagctgcccgccaggcatcggcctcccgtgcctggggcctccgctttttccgaagcccccagcaggtgctgccctcaccagatgggcggcgggcagcaggtgtccgcctagcagtcactagactggagggtgtcgatgaggccacccgtgcagtgcccacgggagacatggaagacctcccttgtgggctggtgctcagcagcattgggtataagagccgccctgtcgacccaagcgtgccctttgactccaagcttggggtcatccccaatgtggagggccgggttatggatgtgccaggcctctactgcagcggctgggtgaagagaggacctacaggtgtcatagccacaaccatgactgacagcttcctcaccggccagatgctgctgcaggacctgaaggctgggttgctcccctctggccccaggcctggctacgcagccatccaggccctgctcagcagccgaggggtccggccagtctctttctcagactgggagaagctggatgccgaggaggtggcccggggccagggcacggggaagcccagggagaagctggtggatcctcaggagatgctgcgcctcctgggccactgagcccagccccagccccggcccccagcagggaagggatgagtgttgggaggggaagggctgggtccgtctgagtgggactttgcacctctgctgatcccggccggccctggcttggaggcttggctgctcttccagcgtctctcctccctcctggggaaggtcgcccttgcgcgcaaggttttagctttcagcaactgaggtaaccttagggacaggtggaggtgtgggccgatctaaccccttacccatctctctactgctggactgtggagggtcaccaggttgggaacatgctggaaataaaacagctgcaacc

SEQ ID NO: 134105 - DNA, 558 bp, Homo sapiens
  Payload ID: 6193
  Gene Symbol: FDXR
  Gene Name: ferredoxin reductase
  ENST ID: ENST00000579893
  CDS Start-End: 67-558
agcgttccggaggtggccctggagaggacatcgtgacccagagtgaaggatctgtcgcaggaaagaatggaagataaggacagagagcagcacccccaggcccacgtggacatctacgagaaacagcctgtgccctttggcctggtgcgctttggtgtggcgcctgatcaccccgaggtgaagaatgtcatcaacacatttacccagacggcccattctggccgctgtgccttctggggcaacgtggaggtgggcagggacgtgacggtgccggagctgcaggaggcctaccacgctgtggtgctgagctacggggcagaggaccatcgggccctggaaattcctggtgaggagctgccaggtgtgtgctccgcccgggccttcgtgggctggtacaacgggcttcctgagaaccaggagctggagccagacctgagctgtgacacagccgtgattctggggcaggggaacgtggctctggacgtggcccgcatcctactgaccccacctgagcacctggagagaacggacatcacgaaggcagccctgggtgtactg

SEQ ID NO: 134106 - DNA, 567 bp, Homo sapiens
  Payload ID: 6193
  Gene Symbol: FDXR
  Gene Name: ferredoxin reductase
  ENST ID: ENST00000581219
  CDS Start-End: 34-567
aacagatccacttgcaggttgctgctcccagccatggcttcgcgctgctggcgctggtggggctggtcggcgtggcctcggacccggctgcctcccgccgggagcaccccgagcttctgccaccatttctccacacaggagaagaccccccagatctgtgtggtgggcagtggcccagctggcttctacacggcccaacacctgctaaagagggtggaagccttgtgttctcagcccagggtcctgaactctcctgctctgtctggggaaggggaggacctgggggcgtcccagcctctctctctcggccccaccagctgccaccctgttccccagcagcacccccaggcccacgtggacatctacgagaaacagcctgtgccctttggcctggtgcgctttggtgtggcgcctgatcaccccgaggtgaagacggcccattctggccgctgtgccttctggggcaacgtggaggtgggcagggacgtgacggtgccggagctgcaggaggcctaccacgctgtggtgctgagctacggggcagaggaccatcgggccctggaaatt

SEQ ID NO: 134107 - DNA, 1762 bp, Homo sapiens
  Payload ID: 6193
  Gene Symbol: FDXR
  Gene Name: ferredoxin reductase
  ENST ID: ENST00000583917
  CDS Start-End: 72-1463
gggcaggagcgggcttgccctgcggagcagtagctaggaacagatccacttgcaggttgctgctcccagccatggcttcgcgctgctggcgctggtggggctggtcggcgtggcctcggacccggctgcctcccgccgggagcaccccgagcttctgccaccatttctccacacaggagaagaccccccagatctgtgtggtgggcagtggcccagctggcttctacacggcccaacacctgctaaagcagcacccccaggcccacgtggacatctacgagaaacagcctgtgccctttggcctggtgcgctttggtgtggcgcctgatcaccccgaggtgaagaatgtcatcaacacatttacccagacggcccattctggccgctgtgccttctggggcaacgtggaggtgggcagggacgtgacggtgccggagctgcaggaggcctaccacgctgtggtgctgagctacggggcagaggaccatcgggccctggaaattcctggtgaggagctgccaggtgtgtgctccgcccgggccttcgtgggctggtacaacgggcttcctgagaaccaggagctggagccagacctgagctgtgacacagccgtgattctggggcaggggaacgtggctctggacgtggcccgcatcctactgaccccacctgagcacctggagagaacggacatcacgaaggcagccctgggtgtactgaggcagagtcgagtgaagacagtgtggctagtgggccggcgtggacccctgcaagtggccttcaccattaaggtcccccgcccgaggaagcggctgacggaactgctgcttcgaacggccacagagaagccagggccggcggaagctgcccgccaggcatcggcctcccgtgcctggggcctccgctttttccgaagcccccagcaggtgctgccctcaccagatgggcggcgggcagcaggtgtccgcctagcagtcactagactggagggtgtcgatgaggccacccgtgcagtgcccacgggagacatggaagacctcccttgtgggctggtgctcagcagcattgggtataagagccgccctgtcgacccaagcgtgccctttgactccaagcttggggtcatccccaatgtggagggccgggttatggatgtgccaggcctctactgcagcggctgggtgaagagaggacctacaggtgtcatagccacaaccatgactgacagcttcctcaccggccagatgctgctgcaggacctgaaggctgggttgctcccctctggccccaggcctggctacgcagccatccaggccctgctcagcagccgaggggtccggccagtctctttctcagactgggagaagctggatgccgaggaggtggcccggggccagggcacggggaagcccagggagaagctggtggatcctcaggagatgctgcgcctcctgggccactgagcccagccccagccccggcccccagcagggaagggatgagtgttgggaggggaagggctgggtccgtctgagtgggactttgcacctctgctgatcccggccggccctggcttggaggcttggctgctcttccagcgtctctcctccctcctggggaaggtcgcccttgcgcgcaaggttttagctttcagcaactgaggtaaccttagggacaggtggaggtgtgggccgatctaaccccttacccatctctctactgctggactgtggagggtcaccaggttgggaacatgctggaa

SEQ ID NO: 134108 - DNA, 1561 bp, Homo sapiens
  Payload ID: 6193
  Gene Symbol: FDXR
  Gene Name: ferredoxin reductase
  ENST ID: ENST00000583881
  CDS Start-End: 70-300
gcaggagcgggcttgccctgcggagcagtagctaggaacagatccacttgcaggttgctgctcccagccatggcttcgcgctgctggcgctggtggggctggtcggcgtggcctcggacccggctgcctcccgccgggagcaccccgagagaagaccccccagatctgtgtggtgggcagtggcccagctggcttctacacggcccaacacctgctaaagcagcacccccaggcccacgtggacatctacgagaaacagcctgtgccctttggcctggtgcgctttggtgtggcgcctgatcaccccgaggtgaagacggcccattctggccgctgtgccttctggggcaacgtggaggtgggcagggacgtgacggtgccggagctgcaggaggcctaccacgctgtggtgctgagctacggggcagaggaccatcgggccctggaaattcctggtgaggagctgccaggtgtgtgctccgcccgggccttcgtgggctggtacaacgggcttcctgagaaccaggagctggagccagacctgagctgtgacacagccgtgattctggggcaggggaacgtggctctggacgtggcccgcatcctactgaccccacctgagcacctggagagaacggacatcacgaaggcagccctgggtgtactgaggcagagtcgagtgaagacagtgtggctagtgggccggcgtggacccctgcaagtggccttcaccattaagaggtcccccgcccgaggaagcggctgacggaactgctgcttcgaacggccacagagaagccagggccggcggaagctgcccgccaggcatcggcctcccgtgcctggggcctccgctttttccgaagcccccagcaggtgctgccctcaccagatgggcggcgggcagcaggtgtccgcctagcagtcactagactggaggcctctactgcagcggctgggtgaagagaggacctacaggtgtcatagccacaaccatgactgacagcttcctcaccggccagatgctgctgcaggacctgaaggctgggttgctcccctctggccccaggcctggctacgcagccatccaggccctgctcagcagccgaggggtccggccagtctctttctcagactgggagaagctggatgccgaggaggtggcccggggccagggcacggggaagcccagggagaagctggtggatcctcaggagatgctgcgcctcctgggccactgagcccagccccagccccggcccccagcagggaagggatgagtgttgggaggggaagggctgggtccgtctgagtgggactttgcacctctgctgatcccggccggccctggcttggaggcttggctgctcttccagcgtctctcctccctcctggggaaggtcgcccttgcgcgcaaggttttagctttcagcaactgaggtaaccttagggacaggtggaggtgtgggccgatctaaccccttacccatctctctactgctggactgtggagggtcaccaggttgggaacatgctggaaataaaacagctgcaaccaaga

SEQ ID NO: 134109 - DNA, 2789 bp, Homo sapiens
  Payload ID: 6194
  Gene Symbol: FDXACB1
  Gene Name: ferredoxin-fold anticodon binding domain containing 1
  Uniprot ID: Q9BRP7
  ENST ID: ENST00000260257
  CDS Start-End: 49-1923
cgtaaaacgagcgccacagagaacgcgagccgggagtccgtggaggccatggcccctcggcgcctcctgttggttggggaggggaatttctccttcgccgccgctctgagcgaaaccctggatcagagcactcaacttaccgccacctgcctccagcgcccggccgagttggctcgggatccactggcctgggagaatctgcagtgcctgcgcgagcgaggtatcgatgtacgtttcggtgtggactgcacccagctggcagatgtctttgaactgcacgagagagaatttgatcaaatttatttcatcttcccgcattgtggacgcaaagctggcgtagctaagaacagggaactgcttgccaaatttttccaaagctgtgcagacgttcttgcagaggaaggagaagtccacgtggcattatgtagaggacaaggtggaactcctgcggataagccccagagagaatggcacaacagttggcaagtggttgccatggcagccctgggggggctcattttaagcgacgtgtatccattcagctgtaaggctgtggcagggtacaagtgcactggatataggagtcaagataagtcctttcatgtagaaggtgctttgaaccatatcttcaccaggagcttaccttttgaaggttctcaacccagaatcttcaggatcaaactgggtaaccagtggttttcctttccagaaccagaagcacttgtaggaaagttgaacaggggtttcctggaagcaccttcatgtcatcctatcaaaaccataaatgagaaactcattgctgaattaggcaaagttttcccgctaaaaaggctgaagtgttcctaccctttgctgccacaggaaggtaccagtgttcttcctttctggaattgtgactttctgtcagctgctttttggattagtctccatgaagataactcaaattctgagtccctgactggtgggacatcacaagatgtggaagactttctagtgtcattttcagaacttagccttctcaagaatcctggaagagatggtaaagaagaagcttgtgaaggaacctgtggccaggccaagatctgccttagaccttctctcctagtgcatgttcaggatgtcatcgaagtaccagacttcctctcaggttctctgcacatcctcagtggacctgtctttcagaagtgccacattttgcctttcacaatgccagcatttcatgaaactttatttatccttggggttaatcaaaatctgaaggatggctgtcttcaatcactgctggatcatctgaagggcattctagatagcctgctgacccagacattgccggagagctctaagctgagcagtttagtcaaatttgtccttcagtcaaatggaaaggattatatgattcgtgtgaagactcataattttagcccagattgtactgaggatctaattattgggtctgttatcacatctgccactagtgttatacataaagaccagtgttttgtgtttgtgtctatgaacttggacttattagccatgcttgtctggtgtatctctgactggagaatgttgtggacgtttgataaccgtttcctgaaaaattttgtccctggcaaaatagaaccctttaaaagtcattctctgtatcctccatgttatgtgcatgatgttagtttttggatagatcagaagaaaggatttgatgaactagagtttcacactgtggcccgagcagtgtctcaggacactattatatccatacagtttcttagccgtttccagcatccaaagactcaacaggtcagtctctgctatagattgacctaccagacctgtgacaaggccctcacccagcagcaagtagcatcaatgcagtcccagtttaggaaggagattcaacaacacctatatgttatacctcggtagtttggtaaatccttttctgcagtgtgatccttcattgcgggggatgtggaggaaaattaccaacttgcaaccagtagtcctttctggatttttgtttttgtaaaatcttttactttgtgaccatagctactgttcgttgatctttttttttttttttttttgagacggagtcttgctctgccgcccaggcgggagtgcagtggcagtggcatgatatcagctcactataagctccacctcccaggttcatgccattctcctgcctcagcctcccgagtagctgggactacaggcacctgccaccacgcctggctaatttttttttttgtatttttagtagagacgaggtttcaccgtgttagccaggatggtctcaatctcccggcctcgtgatctgcctgcgtcggcctcccaaagtgctgggattatagatgtgagccaccgcgcccggcctactgttagttgatcttaaagataccttgactctattactgaaacttatagattataatgtgattggtgacatttggagttgtgtaatattttggtcccgagaagtgactaaaacaataaacaaaacagcatcttgtactttagatgctctattgttgaacaggcagtagaacttaagtgtctcatcaaatataaatatgttttccacactgtcaattactcttcccttaactttgttgtatcatttcattaaatcaccttatgagagtagtttttggcatcagactaacatttattagcttgggaaattgcaaatattccacattaattttggtattattattataatcatcaccattttaattctgtggttgaaagtcatggaacgaataaagtgtcagatttagggttaa

SEQ ID NO: 134110 - DNA, 2206 bp, Homo sapiens
  Payload ID: 6194
  Gene Symbol: FDXACB1
  Gene Name: ferredoxin-fold anticodon binding domain containing 1
  ENST ID: ENST00000531487
  CDS Start-End: 326-643
agaactcgcctcacccccctgcgctagtgactgcttgtgacctcatgcaggtgtgatgaagtcgctcaaggccatgcttgggctaaagacactttgatcttcccgagggggtgaaagggcgaggtgacaggaaagtgcgcgtcttgcttttgcactcatagttatcatccaccggggagtcggtacaccggctcgtctagacaaccaggcgccatgggtgcgtcatcaactagtgacgggagaagacggggcggagagagatccgtgaaggaagtgacgtaaaacgagcgccacagagaacgcgagccgggagtccgtggaggccatggcccctcggcgcctcctgttggttggggaggggaatttctccttcgccgccgctctgagcgaaaccctggatcagagcactcaacttaccgccacctgcctccagcgcccggccgagttggctcgggatccactggcctgggagaatctgcagtgcctgcgcgagcgagctgtgcagacgttcttgcagaggaaggagaagtccacgtggcattatgtagaggacaaggtggaactcctgcggataagccccagagagaatggcacaacagttggcaagtggttgccatggcagccctgggggggctcattttaagcgacgtgtatccattcagctgtaaggctgtggcagggtacaagtgcactggatataggagtcaagataagtcctttcatgtagaaggtgctttgaaccatatcttcaccaggagcttaccttttgaaggttctcaacccagaatcttcaggatcaaactgggtaaccagtggttttcctttccagaaccagaagcacttgtaggaaagttgaacaggggtttcctggaagcaccttcatgtcatcctatcaaaaccataaatgagaaactcattgctgaattaggcaaagttttcccgctaaaaaggctgaagtgttcctaccctttgctgccacaggaaggtaccagtgttcttcctttctggaattgtgactttctgtcagctgctttttggattagtctccatgaagataactcaaattctgagtccctgactggtgggacatcacaagatgtggaagactttctagtgtcattttcagaacttagccttctcaagaatcctggaagagatggtaaagaagaagcttgtgaaggaacctgtggccaggccaagatctgccttagaccttctctcctagtgcatgttcaggatgtcatcgaagtaccagacttcctctcaggttctctgcacatcctcagtggacctgtctttcagaagtgccacattttgcctttcacaatgccagcatttcatgaaactttatttatccttggggttaatcaaaatctgaaggatggctgtcttcaatcactgctggatcatctgaagggcattctagatagcctgctgacccagacattgccggagagctctaagctgagcagtttagtcaaatttgtccttcagtcaaatggaaaggattatatgattcgtgtgaagactcataattttagcccagattgtactgaggatctaattattgggtctgttatcacatctgccactagtgttatacataaagaccagtgttttgtgtttgtgtctatgaacttggacttattagccatgcttgtctggtgtatctctgactggagaatgttgtggacgtttgataaccgtttcctgaaaaattttgtccctggcaaaatagaaccctttaaaagtcattctctgtatcctccatgttatgtgcatgatgttagtttttggatagatcagaagaaaggatttgatgaactagagtttcacactgtggcccgagcagtgtctcaggacactattatatccatacagtttcttagccgtttccagcatccaaagactcaacaggtcagtctctgctatagattgacctaccagacctgtgacaaggccctcacccagcagcaagtagcatcaatgcagtcccagtttaggaaggagattcaacaacacctatatgttatacctcggtagtttggtaaatccttttctgcagtgtgatccttcattgcgggggatgtggaggaaaattaccaacttgcaaccagtagtcctttctggatttttgtttttgtaaaatcttttactttgtgaccatagctactgttcgttgatctttttttttttttttttttga

SEQ ID NO: 134111 - DNA, 1611 bp, Homo sapiens
  Payload ID: 6194
  Gene Symbol: FDXACB1
  Gene Name: ferredoxin-fold anticodon binding domain containing 1
  ENST ID: ENST00000528274
  CDS Start-End: 424-1611
atactggagatctaggtgtaactgtctctagggctggaatgacagacatcaccatccactcagttgtccaagccagaagcctggggcttatctttgactctgacttgtctttaattttcatccagtcactaagtcttgttgatttttgaatcagactgccaccctccattcccattgccaaatttcaattcaaatcactgtcagctttgtctccattattgcagttgcctcttgttttatcctgccatgccatcagccttgttcctctccaaacctttctccacaggaaaggagaatttttcaaagtgaaagtataattgtatcatcttcttatttaaaatctttcagtggctttccaccgttttcagagtaagattcagtctgttaaaatggcttacaacagaacagagaaccaaatacagcatgttcttgttaccggaaggggtcctgatccagaccccaagagacacaagaaataattcaagctgtgcagacgttcttgcagaggaaggagaagtccacgtggcattatgtagaggacaaggtggaactcctgcggataagccccagagagaatggcacaacagttggcaagtggttgccatggcagccctgggggggctcattttaagcgacgtgtatccattcagctgtaaggctgtggcagggtacaagtgcactggatataggagtcaagataagtcctttcatgtagaaggtgctttgaaccatatcttcaccaggagcttaccttttgaaggttctcaacccagaatcttcaggatcaaactgggtaaccagtggttttcctttccagaaccagaagcacttgtaggaaagttgaacaggggtttcctggaagcaccttcatgtcatcctatcaaaaccataaatgagaaactcattgctgaattaggcaaagttttcccgctaaaaaggctgaagtgttcctaccctttgctgccacaggaaggtaccagtgttcttcctttctggaattgtgactttctgtcagctgctttttggattagtctccatgaagataactcaaattctgagtccctgactggtgggacatcacaagatgtggaagactttctagtgtcattttcagaacttagccttctcaagaatcctggaagagatggtaaagaagaagcttgtgaaggaacctgtggccaggccaagatctgccttagaccttctctcctagtgcatgttcaggatgtcatcgaagtaccagacttcctctcaggttctctgcacatcctcagtggacctgtctttcagaagtgccacattttgcctttcacaatgccagcatttcatgaaactttatttatccttggggttaatcaaaatctgaaggatggctgtcttcaatcactgctggatcatctgaagggcattctagatagcctgctgacccagacattgccggagagctctaagctgagcagtttagtcaaatttgtccttcagtcaaatggaaaggattatatgattcgtgtgaagactcataattttagcccagattgtactgaggatctaattattgggtctgttatcacatctgccactagtgttatacataaagaccagtgttttgtg

SEQ ID NO: 134112 - DNA, 2678 bp, Homo sapiens
  Payload ID: 6195
  Gene Symbol: FRRS1
  Gene Name: ferric-chelate reductase 1
  Uniprot ID: Q6ZNA5
  ENST ID: ENST00000287474
  CDS Start-End: 603-2483
atactgctgggattacaggcgcccgccaccacgcccggctaattttttgtatttttagtagagacggggtttcactgtgttggcaaggatggtctctatctcctgacctcgtgatatgcccgcctccgcctcccaaagtgctgggattacaggcttgagccaccgcgtctggcctatttatttattattttcgagacggagtgttgctcttgtggcccaggctggagtgcaacggcgggatttcggctcactgcaacctctgcctcccgggttcaagcaattctcctgcctcagcctcctgagtagctgggattacaggcaggcaccaccacacccggctaattttgtatttttagtagaaacggggtttctccatgttggtcagtctggtttcgaactcccagcgtcaggtcatctgcctgcctcggcctcccaaagtgctgggattacaggcgtgagccaccgcgcccagccacttctgtatttttaaaaaagtggtaaggaagtggaggattaaatgatttgcccaaagtctcacagtaatttgtagagctgagattgaaattcgggtgaaacttcacatatcacattctttttatcagatggcagtttctggatttactcttggtacctgcatacttctgttgcacattagttatgtggctaattatcccaatggaaaagtaacacagtcatgccatggaatgattcctgaacatggtcatagtccacagtctgttcctgttcatgacatttacgtgagtcagatgacattcaggccaggagatcagattgaagttactttgtcagggcatccatttaaaggctttctcctagaagcgcgtaatgctgaggatctgaatggccctcctattggctccttcacattgattgacagtgaagtgtcacaacttttgacctgtgaagatatacagggatcagcagtgagtcacagaagtgcatctaaaaaaacagaaattaaagtctactggaatgctccaagcagtgctccaaatcacacacagtttctagtcacagttgttgagaagtataaaatctactgggtgaagattcctggtcctataatttcacaaccaaatgcatttccttttacaacacctaaagctacagtagtacctttgccaacgttacctcccgtttcccacttaaccaaaccattcagtgcctcagattgtgggaacaagaagttctgtattaggagtcctttgaactgtgacccagagaaggaggcttcctgtgtcttcttgtccttcacaagagatgaccaatcggtgatggttgaaatgagcggccccagtaaaggctatttatcctttgcattgtctcatgatcagtggatgggtgatgatgatgcttatctgtgtattcatgaagatcagactgtgtacatccagccttcccatttaacggggcgaagtcaccctgtaatggactccagggatacccttgaggatatggcttggaggttggcggacggtgttatgcagtgttctttcagaagaaacattacccttcctggagttaagaatagatttgatctaaacacaagctattacatatttctagcagatggtgcagctaatgatggtcgaatttacaagcactctcagcaacctttgattacctatgaaaaatatgatgtgacagactctccaaagaacataggaggatcccattctgtactccttctgaaggttcatggtgccttaatgtttgtggcatggatgactactgttagcataggtgtactggttgcccggttcttcaagccagtttggtcaaaagctttcttgcttggtgaagcagcttggtttcaggtgcatcggatgctcatgttcaccacaactgtcctcacctgcattgcttttgttatgccgtttatatacaggggaggctggagtaggcatgcaggttaccacccatacctcggctgtatagtgatgactttggcagttcttcagcctcttctggcagtcttcaggccacctttacatgacccaagaaggcaaatgtttaactggactcattggagtatgggaacagctgctagaataatagcagtggcagcgatgttcctgggaatggatttaccaggactgaatcttcctgattcatggaaaacctatgcaatgaccggattcgtagcctggcatgttgggactgaggttgttctggagttgaaatattggatgatgacagaattcagatccttcagtcatttactgcagtggaaacagagggtcatgcttttaaaaaggcagtgttggcaatttatgtctgtgggaatgttacttttctcatcatatttttatctgcaatcaaccatctatgagcaagcaaagaccttggcttttgcaggccaagtgataattatcatcaaaccaaagaaacttgaagcctgtcctgactgcctggagcatatttgtgaattctcacttggaagactggggtcatgtctgtagaggaattctgaagtccagcctttagagaacaacattcaagagggtcatatagactataaattaatgtcatgccctatatgtaattctgggtcttaaaggaaagattgtacttcaggagaagtaactctcaaatatttcatgccaagattttaagaatgttggtatttaagaaaataaatagtgatttggaaaatc

SEQ ID NO: 134113 - DNA, 8197 bp, Homo sapiens
  Payload ID: 6196
  Gene Symbol: FRRS1L
  Gene Name: ferric-chelate reductase 1-like
  Uniprot ID: Q9P0K9
  ENST ID: ENST00000561981
  CDS Start-End: 1-1035
atgcgcagaccgaggcagggaggcgggggtgcgggaggctccgcggctgcgcgggcgcgtgctggtggcctcggcggaggctcagtcccggcccgcgcccgcggcgcccccgctgcggcccgagcggcctggctgcgggatctgtgcgcacggatggcgcggccgccccggcagcacccgggggtctgggcgtcgctgctcctgctgctactgacggggcccgccgcctgcgcagccagccccgcggacgacggtgcgggcccggggggccggggaccccggggacgcgcgcggggggacacgggcgccgacgaggcggtgccgcgccacgactcctcctacggcaccttcgcgggggagttctacgacctgcgctacctgtcggaggagggttaccccttccctactgctcctcctgtggatccatttgccaaaatcaaagtggacgactgtggaaaaactaagggatgctttagatatggcaaaccaggctgtaatgcagagacctgtgactatttcctcagctaccggatgataggggctgatgtagaatttgagctgagtgcagacacagatggttgggtagcagttggattctcttcagacaagaaaatgggtggtgatgatgtcatggcctgcgtccatgatgacaatggcagggtccgcatacagcacttctataatgtaggccagtgggcaaaggagattcagagaaaccctgccagagatgaagaaggagtttttgagaacaatcgcgtcacctgcagatttaaacgccctgtgaatgttcccagagatgaaacaattgttgatctgcatttgagttggtattatctgtttgcttggggtccagccattcagggctctatcactcgacatgatatagactcaccgccggcttcagagcgtgttgtcagtatttacaagtatgaagacatttttatgccatcagctgcctatcaaaccttctcatctccattttgtttgcttctgattgttgctctgaccttctacctattgatgggaaccccctaaccacagctgcagggccaacagattacatggattgggaagtctttagtataaatatattttttaaagaatatccagtataattttagcttcaattatttaagaaaaaaaacctcatataatttcagctttttggaagaaagaacaagcttcttttgtagtcaaagaagattgtttaataatgaccctatacttttggaacatacttacaccttttctaagcactttcacatatgttttcttatttaacttcacaacatctctgagttggattgatgaaaattgtgattgccatcttcctgaatgggatttgagacccaaaaagactgcctttttatgatccacataccatataactttggctagaaatgacaaatagaaaggcagagaaggaactaagtatagaaatcatgtctcaaaacagtctttactatgagtgctatagcacagagagttattttgaatattactagggagaactttactgaatgtcataagttcacagtcagccttttgggcagaagaaatttcaaatttccgtaaagcagaagtgcttttggatatttacacagccaatggggagattggaggaaaatacaatgatatgaaaatagttcatatttatttgaaattttggccgagcatggtggctcacgcctgtgatcccagcactttaggaggccaagacgggcaggtcacctgaggtcaggagttcgagaccagcctggccaatgtggtgaaacccccgtctctattaaaaagtacaaaaatgagccaggcgtggtggtgcacacctataatcccagctattcgggaggctgaggcaggagaattgctggaacccaggaggcggaggttgcagtgagccgagattgtgccagtgcactccagcctaggtgacagagccagactctgtctcaaaaataactaactaaataaataatatttatttgaaatttcttctcagttagagagcagctatgggaaaacatttttactgctatttgcaaaggttggagaccaaactgtgagcattcctgaagatgtaaagttgtgttaatgatattaaaaaaaaaaaaaaagggaattcttagcagttagaatttgaacttttctaccactgaattttataaaactaaggtattcatctgtggttacagtgaattctcttgtcagagccagcataccttaagtgtgattaaaaatgtatttttttttttttttgcgatgaattttccctcttgtcgcccaggctggagtacaatggtgtgatctcagcttcactgcaacctccgcctcccaggttcaagtgattctcctgcctcagcctcctgagtagatgggattacaggcatgtgccactatgcctggctaatttttttgtatttttagtagagatggagtttcaccattttagtcaggctggtctcgaactcctgacctcaggtgatccacctgctttggcctcccagagtgctaggattacaggtgtgagccaccgtgcctggcctaaaaatgtgttatatcagacaaaacatcttagtaaaaatttagggcattttaataataagccaacagtttttgagactgtagagattttgagtagaattttttttatgaggtggctttttaaaaaataattgaaaatgggaaaatgacccataaagtgaattcacctagaatatccatttaaatgttcagacttgtggctgagcgcggtggctcacacctgtaatcccagcactttgggaggccaaggcaggcggatcacctgaggtcaggagttcgagaccagtctggccaacatggcaaaaccttgtctccactaaaaatacaaaaattagccgggtgtggtggcacatgcctgtaatcccagccacttgggaggctgaggcacgagaatcacttgaaccttggaggcagagcttgcagtgagccaaaattgtgccacttgcactccagcctgggtgacagagggagaccctgtctcaaaaaaataagtaaaataaaatgttcagacttataaactagacaggtagtcagcataattcatagtaatgccttgacattaggcgccccaaaggactcctttgttctttgttccaaatgtctgtgctaactgcccattttgaggagagaagtctgcaggtatagttagtgctgctgagacatttccactctggcattctagagttctctggcttgcccttgttgctttaaagctggttccaacttcgtgggctttatgattgagcaacactggtgattgtgatttctaataccaccctccagattcatgtcacaggtgaaagtctgcctgtggggagagctttcacattctcctggagttgaaccaaaataaggaaaacatcaacaaacacagttaccaaaagcttccaaggagggatggaggagaaattctgttcattgcagatggggagaaattaaatgacatcaagtgcataatggaactgggtaggattcaaactcaagtcccctggttcaagtccttgactccactctgggcatggctaagtctggcctgtgtctcatcttctcagctctagtggctgtttagtagtgaagatactgatatgcaggcagccatgttgtaaataagaagcaaatatttttatatttctctctcttatgtgtataatatttgagctacaaacaggttaaaacaaaagagagacttcagcttagtagcaggcagggaaggaagaagtgaatgcagcttccttccgcttacatttctaatcaagctaattatttcactagtgatttctcatttgattaccgattttgcttatttatgcttagaactttcaatgacttctcagtgccattaaggtaaaatgcaagccatttctgtgacctgcaatatcatcttttgccactcctcctcacttgctatgtcttagcaagactgagaggctctcagttcttcagacctgctctatctcacctctcattttgttcatattctccacctcttgtgcttgatgaactcctattcacctatcaggtcacaacttaaatattttttcctccaaatctctggactacataggtccaggcccccatcaaatgctcccatagcacattgggcttcctcatcaacatgctcgttatacttttctagaattgctggcttgtcctccttgttatctccctaatgcagagaccattactcatcattgtagcagatatttatccatatcaggtactcagcaaacatttgtggaatgaatctatatgtgaaactatacttctatggcaagtttgtttggttcagaaggcttgcatttcatgtatattgggagactggccaacatttttatattcttcctcctatgctcaaaccataaataattatgttagcaaacactgaactttgtcttttgaaacataaatagaaacatccttagtaacagtactaacagtaatcatttttcagaaataagaattcacaccagtgatacagaatggcctttgaccattatctcagagaactagcagtcgatagacatgctgaagtgataattccaaaaacttcagtttcattcatccctacttaaatataagagaatcaacttctattttatgtctgtattcccattttctaatatactacttgtcacagaggagatgcccaaccagtgtttttcgtaaagtacctgaatagattaataataatgctagtgaaatatatttagtgctgttctaagcactttacatgaattaactcatttaatcctcaccgcaaccataggaagtagattctattatttatccaattttacagatgaaaaaactgaggctggtcacttgacataaattaccagtgctggccaggactttagagaccatttaatccaatgctcttattttacagaggtgcagctgaagcctaaggaggtgatatgatttcctacacattcatgcaccttcgtgcacatccattaaaacttttattaaatggaacccactatccatactccaattagctaggtgccttttttcccccatttagtaatttacaattaattggaggactttttatagttatatttagaggaaaggagcatgttttactctatatcaactttcttttctgcttaaaagcattttgattctttattttaccagtcattttagttcttttaataggtttaatacacagatcaaacaagacttaaatacatttttaacaatgtaacaatttaaaagaaattgcctaaaacctaggtcttctaacttggagcccagtgctttttttattgctccgctgagtcaaaaggtgaatatataaacatgatttcagatagaatgcagaagctgtatttaattaagttggcttttgtcattaaagaaatcagaaagtttggacaactcaggaatggatttccatcctagatggtatttactactatttctggaattaagtttactgtctatattcaggattttgtgcataagagacgtgaccactgaggttgtgtgtcattcttatctctactccaggggtcagcaaactttctctgttaagggtcagatagtagttttttggcttttcagtctctgtttggctctgctataaacaatacataaatgaatgagcatggctatgttccaataaaacttaattgacactgaactttgaatttcatgtacttttcaaatgtcacaaatgttttccttttgatttttttcagaaagccattaaaaaaatccaaagaccattcttagcttgcaggctgcacaaaaacaggaagcaggcggggtttgcttatggactgtggctttcccacccttgttcttagatagggacacaccaatatatcatgattagttgtaaaggatactgccagtaacatattattactggttagttgtaagaatatcaaagttagtgaataatttgcttttaaaataaattattgttgatttatttttataaataaatggcacagggcatctcatgctcttgcattctaatatattttctggaattgatgcaaaagtggtggcagtaaagtacagagccggctaagcagcagttttgtcttaagtaactgtggtgatcatggacaaccattgcgctgaactgctcttcatggtaaggatttcagtgtttcagagtaattcattaacctagagatgttttaaaaagttgtatcggccgggcgcggtggctcaagcctgtaatcccagcacttcgggaggccgaggtgggcggatcacgagatcaggagatcgagaccatcctggctgacacggtgaaaccccatctctactaaaaatacaaaaaaaattagctgggcgtggtggcgggagcctgtagtcccagctactcaggaggctgaggcaagagaatggcgtgaacccgggaggtggagctttcaatgagccgagattgcccctctgcactccagcctgggtaacagagcaagactccgtctaaaaaataaataaataaaataaaataaaataaaataaaagttgtatcaaaatctgctgcaccatgggagtgttttacacatgtgatgtggcatctaccttatgtaccataatggaaaaatgtttgagaaccactgcactaggccaaaggctgggatgtgtatactttgctgccgtgtataattgtatgtccttgttctctaaacggaattggttatgtttagtgaacagttaggtggttctccatgtgtttatatacacagacgatccccgaatttggatggttcaacttaagagttttcaaacttacgatgatatgaaagtgatatacatttgatacattcctacaacttacaatggggttatgtcccataattgttttgacttatgatattttcaacttacaattgatgggtttactgagacataaccctcttgtaacttgaggagcatgtgtatatttgtacatacatgatggtgtgtgtttatacacaaaggcctgaatatacacaccatgagcatttgaaggtctttgtcaaggttgtttctgtttctgatctcttgcctactttaaaacccaagaggtagaacattatgcatattacaggcaaaactatgcttgagtttatagcaatgtagtttgtagaaaggattcctggatgttttactaagcctttcctcctccattcaacattatatgaattgttaagaacatataaagtaccactgttgaatgtgacttttctatactgttagttaagaaaccaagactagtgttagctgagtaactggcatgttgatgcaacctatacaggttttgtatttaattaggttccttattcagttattcaagtatccagttatttagtttcaaggtagatttctttgtttttatatttaataaaagacttgcatataagttcctcttcatgaaaatagtggctaggctagtgtgattttaagtatgtctggcaactcaaaatgtaatggattcatcaagctatttgggatttttaacataaaacacactgctgcttgattaatgtgttcagttttcccctggatatttgctattaggctgatagccatttggttggattcttctggagagtaattgattctctaaggtaatggggtgctgcagtgggtgtagcattcacccaggtcactagaatcctacctgtttcatcacatagaaggccctggccatggggaagagtgaatgcagcttctccggatgccttatttccacagacatgctgatatgctggaacaatctggctccaggagtattaatatacttttttgagactgtctacaaaatactattttgtaaaaactatgcctttacatagacattgataggttatatttgttttataacaattgtgtacctaatgtttgtgattaattttgagatttatgtatatttataagcctatcttatgtaaatttttactctaagatgtgtggcacattactaataaagacgtggatttctatttatgtaaagtaattgtagcaatattcctagatgctacctaaatgattgttctgtccatttgccatcacaaatacttttatctttggatgattatgttagtcagaatatattaattagatttaaactttaaaataagaattacaacatagtttgaaattcttcctgttgatgtaattaaagttagtttataattcctta

SEQ ID NO: 134114 - DNA, 879 bp, Homo sapiens
  Payload ID: 6197
  Gene Symbol: FTMT
  Gene Name: ferritin mitochondrial
  Uniprot ID: Q8N4E7
  ENST ID: ENST00000321339
  CDS Start-End: 10-738
ggcggcgctatgctgtcctgcttcaggctcctctccaggcacatcagcccttcgctggcgtctctgcgcccggtgcgctgctgcttcgcgctcccgctgcgttgggccccggggcgccccttggaccccaggcagatcgccccccgccgccccctggccgcagccgcctcctcccgggaccctaccgggcccgccgccggcccctctcgggtgcgccagaacttccaccccgactccgaggctgccatcaaccgccagatcaacctcgagctctatgcgtcctacgtgtacttgtccatggcctattacttctcccgggatgacgtggccttgaacaacttctccaggtatttccttcaccagtcccgggaggagaccgagcacgcggagaagctgatgaggctgcagaaccagcgaggaggccggatccgcctgcaggacatcaagaagccggaacaggacgactgggaaagcgggctgcatgccatggagtgtgctctactcttggaaaagaacgtgaaccagtcgttgctggaattgcacgctctagcctcagataaaggtgacccccatttgtgcgatttcctggaaacctactacctgaatgagcaggtgaagtctatcaaagaactaggtgaccacgtgcacaacttagtgaagatgggggccccggatgctggcctggcggagtacctttttgacacacatacccttggaaatgaaaacaagcagaactaagccacgagctgccttcctcccaggctagtggatccaaagaccaaagtcagctgtctcctgctttcttgcccttaaaatcacctccatctttatattcttctgttatactattcctccaataaagtgatttgtagaaaaaaa

SEQ ID NO: 134115 - DNA, 1229 bp, Homo sapiens
  Payload ID: 6198
  Gene Symbol: FTH1
  Gene Name: ferritin, heavy polypeptide 1
  Uniprot ID: P02794
  ENST ID: ENST00000273550
  CDS Start-End: 236-787
ataagagaccacaagcgacccgcagggccagacgttcttcgccgagagtcgtcggggtttcctgcttcaacagtgcttggacggaacccggcgctcgttccccaccccggccggccgcccatagccagccctccgtcacctcttcaccgcaccctcggactgccccaaggcccccgccgccgctccagcgccgcgcagccaccgccgccgccgccgcctctccttagtcgccgccatgacgaccgcgtccacctcgcaggtgcgccagaactaccaccaggactcagaggccgccatcaaccgccagatcaacctggagctctacgcctcctacgtttacctgtccatgtcttactactttgaccgcgatgatgtggctttgaagaactttgccaaatactttcttcaccaatctcatgaggagagggaacatgctgagaaactgatgaagctgcagaaccaacgaggtggccgaatcttccttcaggatatcaagaaaccagactgtgatgactgggagagcgggctgaatgcaatggagtgtgcattacatttggaaaaaaatgtgaatcagtcactactggaactgcacaaactggccactgacaaaaatgacccccatttgtgtgacttcattgagacacattacctgaatgagcaggtgaaagccatcaaagaattgggtgaccacgtgaccaacttgcgcaagatgggagcgcccgaatctggcttggcggaatatctctttgacaagcacaccctgggagacagtgataatgaaagctaagcctcgggctaatttccccatagccgtggggtgacttccctggtcaccaaggcagtgcatgcatgttggggtttcctttaccttttctataagttgtaccaaaacatccacttaagttctttgatttgtaccattccttcaaataaagaaatttggtacccaggtgttgtctttgaggtcttgggatgaatcagaaatctatccaggctatcttccagattccttaagtgccgttgttcagttctaatcacactaatcaaaaagaaacgagtatttgtatttattaaactcattagtttgggcagtatactaaggtgtggctgtcttggattcagatagaactaagggttcccgactctgaatccagagtctgagttaaatgtttccaatggttcagtctagctttcacagtttttatgaataaaaggcattaaaggctgaa

SEQ ID NO: 134116 - DNA, 507 bp, Homo sapiens
  Payload ID: 6198
  Gene Symbol: FTH1
  Gene Name: ferritin, heavy polypeptide 1
  ENST ID: ENST00000529631
  CDS Start-End: 207-452
agacgttcttcgccgagagtcgtcggggtttcctgcttcaacagtgcttggacggaacccggcgctcgttccccaccccggccggccgcccatagccagccctccgtcacctcttcaccgcaccctcggactgccccaaggcccccgccgccgctccagcgccgcgcagccaccgccgccgccgccgcctctccttagtcgccgccatgacgaccgcgtccacctcgcaggtgcgccagaactaccaccaggactcagaggccgccatcaaccgccagatcaacctggagctctacgcctcctacgtttacctgtccatgccaacagggacacctggtcaccagggacagaagaagtcccacagaaagatcatcccaggcaggaccttgtatgtgcctgatgacttggaggaatctctccctctctctggacctcagtttccctgcctgtgaaatggggagatgggtgcctgcctgcagcctcaaagattgaggtgagaatcctgtg

SEQ ID NO: 134117 - DNA, 530 bp, Homo sapiens
  Payload ID: 6198
  Gene Symbol: FTH1
  Gene Name: ferritin, heavy polypeptide 1
  ENST ID: ENST00000529191
  CDS Start-End: 207-515
agacgttcttcgccgagagtcgtcggggtttcctgcttcaacagtgcttggacggaacccggcgctcgttccccaccccggccggccgcccatagccagccctccgtcacctcttcaccgcaccctcggactgccccaaggcccccgccgccgctccagcgccgcgcagccaccgccgccgccgccgcctctccttagtcgccgccatgacgaccgcgtccacctcgcaggtgcgccagaactaccaccaggactcagaggccgccatcaaccgccagatcaacctggagctctacgcctcctacgtttacctgtccatggtcctggtgcatctcatccacagccaacagggacacctggtcaccagggacagaagaagtcccacagaaagatcatcccaggcaggaccttgtatgtgcctgatgacttggaggaatctctccctctctctggacctcagtttccctgcctgtgaaatggggagatgggtgcctgcctgcagcctcaaagattgaggtgagaatcctgtg

SEQ ID NO: 134118 - DNA, 912 bp, Homo sapiens
  Payload ID: 6198
  Gene Symbol: FTH1
  Gene Name: ferritin, heavy polypeptide 1
  ENST ID: ENST00000532829
  CDS Start-End: 207-494
agacgttcttcgccgagagtcgtcggggtttcctgcttcaacagtgcttggacggaacccggcgctcgttccccaccccggccggccgcccatagccagccctccgtcacctcttcaccgcaccctcggactgccccaaggcccccgccgccgctccagcgccgcgcagccaccgccgccgccgccgcctctccttagtcgccgccatgacgaccgcgtccacctcgcaggtgcgccagaactaccaccaggactcagaggccgccatcaaccgccagatcaacctggagctctacgcctcctacgtttacctgtccatgtcttactactttgaccgcgatgatgtggctttgaagaactttgccaaatactttcttcaccaatctcatgaggagagggaacatgctgagaaactgatgaagctgcagaaccaacgaggtggccgaatcttccttcaggatatcaagactgtgatgactgggagagcgggctgaatgcaatggagtgtgcattacatttggaaaaaaatgtgaatcagtcactactggaactgcacaaactggccactgacaaaaatgacccccatttgtgtgacttcattgagacacattacctgaatgagcaggtgaaagccatcaaagaattgggtgaccacgtgaccaacttgcgcaagatgggagcgcccgaatctggcttggcggaatatctctttgacaagcacaccctgggagacagtgataatgaaagctaagcctcgggctaatttccccatagccgtggggtgacttccctggtcaccaaggcagtgcatgcatgttggggtttcctttaccttttctataagttgtaccaaaacatccacttaagttctttgatttgtaccattccttcaaataaagaaatttggtaccc

SEQ ID NO: 134119 - DNA, 786 bp, Homo sapiens
  Payload ID: 6198
  Gene Symbol: FTH1
  Gene Name: ferritin, heavy polypeptide 1
  ENST ID: ENST00000526640
  CDS Start-End: 183-644
ggggtttcctgcttcaacagtgcttggacggaacccggcgctcgttccccaccccggccggccgcccatagccagccctccgtcacctcttcaccgcaccctcggactgccccaaggcccccgccgccgctccagcgccgcgcagccaccgccgccgccgccgcctctccttagtcgccgccatgacgaccgcgtccacctcgcagtcttactactttgaccgcgatgatgtggctttgaagaactttgccaaatactttcttcaccaatctcatgaggagagggaacatgctgagaaactgatgaagctgcagaaccaacgaggtggccgaatcttccttcaggatatcaagaaaccagactgtgatgactgggagagcgggctgaatgcaatggagtgtgcattacatttggaaaaaaatgtgaatcagtcactactggaactgcacaaactggccactgacaaaaatgacccccatttgtgtgacttcattgagacacattacctgaatgagcaggtgaaagccatcaaagaattgggtgaccacgtgaccaacttgcgcaagatgggagcgcccgaatctggcttggcggaatatctctttgacaagcacaccctgggagacagtgataatgaaagctaagcctcgggctaatttccccatagccgtggggtgacttccctggtcaccaaggcagtgcatgcatgttggggtttcctttaccttttctataagttgtaccaaaacatccacttaagttctttgatttgtaccattccttcaa

SEQ ID NO: 134120 - DNA, 550 bp, Homo sapiens
  Payload ID: 6198
  Gene Symbol: FTH1
  Gene Name: ferritin, heavy polypeptide 1
  ENST ID: ENST00000530019
  CDS Start-End: 207-550
agacgttcttcgccgagagtcgtcggggtttcctgcttcaacagtgcttggacggaacccggcgctcgttccccaccccggccggccgcccatagccagccctccgtcacctcttcaccgcaccctcggactgccccaaggcccccgccgccgctccagcgccgcgcagccaccgccgccgccgccgcctctccttagtcgccgccatgacgaccgcgtccacctcgcaggtgcgccagaactaccaccaggactcagaggccgccatcaaccgccagatcaacctggagctctacgcctcctacgtttacctgtccatgtcttactactttgaccgcgatgatgtggctttgaagaactttgccaaatactttcttcaccaatctcatgaggagagggaacatgctgagaaactgatgaagctgcagaaccaacgaggtggccgaatcttccttcaggatatcaagccaacagggacacctggtcaccagggacagaagaagtcccacagaaagatcatcccaggcaggaccttgtatgtgcctgatga

SEQ ID NO: 134121 - DNA, 983 bp, Homo sapiens
  Payload ID: 6198
  Gene Symbol: FTH1
  Gene Name: ferritin, heavy polypeptide 1
  ENST ID: ENST00000534180
  CDS Start-End: 209-361
ccagacgttcttcgccgagagtcgtcggggtttcctgcttcaacagtgcttggacggaacccggcgctcgttccccaccccggccggccgcccatagccagccctccgtcacctcttcaccgcaccctcggactgccccaaggcccccgccgccgctccagcgccgcgcagccaccgccgccgccgccgcctctccttagtcgccgccatgacgaccgcgtccacctcgcaggtgcgccagaactaccaccaggactcagaggccgccatcaaccgccagatcaacctggagctctacgcctcctacgtttacctgtccatgatcgtcacagctacctgtctctggggatccctagtataacacattcagtgttcccctttcagtcttactactttgaccgcgatgatgtggctttgaagaactttgccaaatactttcttcaccaatctcatgaggagagggaacatgctgagaaactgatgaagctgcagaaccaacgaggtggccgaatcttccttcaggatatcaagaaaccagactgtgatgactgggagagcgggctgaatgcaatggagtgtgcattacatttggaaaaaaatgtgaatcagtcactactggaactgcacaaactggccactgacaaaaatgacccccatttgtgtgacttcattgagacacattacctgaatgagcaggtgaaagccatcaaagaattgggtgaccacgtgaccaacttgcgcaagatgggagcgcccgaatctggcttggcggaatatctctttgacaagcacaccctgggagacagtgataatgaaagctaagcctcgggctaatttccccatagccgtggggtgacttccctggtcaccaaggcagtgcatgcatgttggggtttcctttaccttttctataagttgtaccaaaacatccacttaagttctttgatttgtaccattccttcaaataaagaaatttggtaccc

SEQ ID NO: 134122 - DNA, 742 bp, Homo sapiens
  Payload ID: 6198
  Gene Symbol: FTH1
  Gene Name: ferritin, heavy polypeptide 1
  ENST ID: ENST00000532601
  CDS Start-End: 275-616
ggacttctctggcgcagaaagtcggggcagctggttcttctcggctgtaccctgagaatgctccctcctaggccagggccgcctctgcacacccttcttttttaaggagaccttggtgtcctgaaatcctggggttgcaagactgccagcctgtgtgatcaatcctgcggttaggaagtcttactactttgaccgcgatgatgtggctttgaagaactttgccaaatactttcttcaccaatctcatgaggagagggaacatgctgagaaactgatgaagctgcagaaccaacgaggtggccgaatcttccttcaggatatcaagaaaccagactgtgatgactgggagagcgggctgaatgcaatggagtgtgcattacatttggaaaaaaatgtgaatcagtcactactggaactgcacaaactggccactgacaaaaatgacccccatttgtgtgacttcattgagacacattacctgaatgagcaggtgaaagccatcaaagaattgggtgaccacgtgaccaacttgcgcaagatgggagcgcccgaatctggcttggcggaatatctctttgacaagcacaccctgggagacagtgataatgaaagctaagcctcgggctaatttccccatagccgtggggtgacttccctggtcaccaaggcagtgcatgcatgttggggtttcctttaccttttctataagttgtaccaaaacatccacttaagttctttgatt

SEQ ID NO: 134123 - DNA, 567 bp, Homo sapiens
  Payload ID: 6198
  Gene Symbol: FTH1
  Gene Name: ferritin, heavy polypeptide 1
  ENST ID: ENST00000529548
  CDS Start-End: 393-567
agacgttcttcgccgagagtcgtcggggtttcctgcttcaacagtgcttggacggaacccggcgctcgttccccaccccggccggccgcccatagccagccctccgtcacctcttcaccgcaccctcggactgccccaaggcccccgccgccgctccagcgccgcgcagccaccgccgccatcaaccgccagatcaacctggagctctacgcctcctacgtttacctgtccatgatcgtcacagctacctgtctctggggatccctagtataacacattcagtgttcccctttcagtcttactactttgaccgcgatgatgtggctttgaagaactttgccaaatactttcttcaccaatctcatgaggagagggaacatgctgagaaactgatgaagctgcagaaccaacgaggtggccgaatcttccttcaggatatcaagaaaccagactgtgatgactgggagagcgggctgaatgcaatggagtgtgcattacatttggaaaaaaatgtgaatcagtcactactggaactgcacaaactggccactgacaaaaatgaccccc

SEQ ID NO: 134124 - DNA, 825 bp, Homo sapiens
  Payload ID: 6198
  Gene Symbol: FTH1
  Gene Name: ferritin, heavy polypeptide 1
  Uniprot ID: P02794
  ENST ID: ENST00000620041
  CDS Start-End: 113-664
agacgttcttcgccgagagtcgtcggggtttcctgcttcaacagtgcttggacggaacccggcgctcgttccccaccccggccgccgccgccgcctctccttagtcgccgccatgacgaccgcgtccacctcgcaggtgcgccagaactaccaccaggactcagaggccgccatcaaccgccagatcaacctggagctctacgcctcctacgtttacctgtccatgtcttactactttgaccgcgatgatgtggctttgaagaactttgccaaatactttcttcaccaatctcatgaggagagggaacatgctgagaaactgatgaagctgcagaaccaacgaggtggccgaatcttccttcaggatatcaagaaaccagactgtgatgactgggagagcgggctgaatgcaatggagtgtgcattacatttggaaaaaaatgtgaatcagtcactactggaactgcacaaactggccactgacaaaaatgacccccatttgtgtgacttcattgagacacattacctgaatgagcaggtgaaagccatcaaagaattgggtgaccacgtgaccaacttgcgcaagatgggagcgcccgaatctggcttggcggaatatctctttgacaagcacaccctgggagacagtgataatgaaagctaagcctcgggctaatttccccatagccgtggggtgacttccctggtcaccaaggcagtgcatgcatgttggggtttcctttaccttttctataagttgtaccaaaacatccacttaagttctttgatttgtaccattccttcaaataaagaaatttggtaccc

SEQ ID NO: 134125 - DNA, 813 bp, Homo sapiens
  Payload ID: 6199
  Gene Symbol: FTHL17
  Gene Name: ferritin, heavy polypeptide-like 17
  Uniprot ID: Q9BXU8
  ENST ID: ENST00000359202
  CDS Start-End: 101-652
cacccgcctttcactatccgccattcttgtcacctcagctgctgccctcgctaccgcaccgacttcgcccgtgtgctcgcctgcacttgcgctgcccgccatggccaccgcccagccgtcgcaggtgcgccagaagtacgacaccaactgcgacgccgccatcaacagccacatcacgctggagctctacacctcctacctgtacctgtctatggccttctacttcaaccgggacgacgtggccctggagaacttcttccgctacttcctgcgcctgtcggacgacaaaatggagcatgcccagaagctgatgaggctgcagaacctgcgcggtggccacatctgccttcacgatatcaggaagccagagtgccaaggctgggagagcgggctcgtggccatggagtccgccttccacctggagaagaacgtcaaccagagcctgctggatctgtaccagctggccgtggagaagggcgacccccagctgtgccacttcctggagagccactacctgcacgagcaagtcaagaccatcaaagagctgggtggctacgtgagcaacctgcgcaagatttgttccccggaagccggcctggctgagtacctgttcgacaagctcaccctgggcggccgcgtcaaagagacttgagcccagatgggccccacagccacggggtcccttccctgggtcaggccactaggcggggcgtgcatgttgccctttcagaacgttctcttcagttttatctttcagttttaccattgttagcaaaaaagttatctggttctcaaagcaataaaggtgtccat

SEQ ID NO: 134126 - DNA, 878 bp, Homo sapiens
  Payload ID: 6200
  Gene Symbol: FTL
  Gene Name: ferritin, light polypeptide
  Uniprot ID: P02792
  ENST ID: ENST00000331825
  CDS Start-End: 208-735
gtcccctcgcagttcggcggtcccgcgggtctgtctcttgcttcaacagtgtttggacggaacagatccggggactctcttccagcctccgaccgccctccgatttcctctccgcttgcaacctccgggaccatcttctcggccatctcctgcttctgggacctgccagcaccgtttttgtggttagctccttcttgccaaccaaccatgagctcccagattcgtcagaattattccaccgacgtggaggcagccgtcaacagcctggtcaatttgtacctgcaggcctcctacacctacctctctctgggcttctatttcgaccgcgatgatgtggctctggaaggcgtgagccacttcttccgcgaattggccgaggagaagcgcgagggctacgagcgtctcctgaagatgcaaaaccagcgtggcggccgcgctctcttccaggacatcaagaagccagctgaagatgagtggggtaaaaccccagacgccatgaaagctgccatggccctggagaaaaagctgaaccaggcccttttggatcttcatgccctgggttctgcccgcacggacccccatctctgtgacttcctggagactcacttcctagatgaggaagtgaagcttatcaagaagatgggtgaccacctgaccaacctccacaggctgggtggcccggaggctgggctgggcgagtatctcttcgaaaggctcactctcaagcacgactaagagccttctgagcccagcgacttctgaagggccccttgcaaagtaatagggcttctgcctaagcctctccctccagccaataggcagctttcttaactatcctaacaagccttggaccaaatggaaataaagctttttgatgc

SEQ ID NO: 134127 - DNA, 772 bp, Homo sapiens
  Payload ID: 6200
  Gene Symbol: FTL
  Gene Name: ferritin, light polypeptide
  ENST ID: ENST00000622577
  CDS Start-End: 200-772
gcagttcggcggtcccgcgggtctgtctcttgcttcaacagtgtttggacggaacagatccggggactctcttccagcctccgaccgccctccgatttcctctccgcttgcaacctccgggaccatcttctcggccatctcctgcttctgggacctgccagcaccgtttttgtggttagctccttcttgccaaccaaccatgagctcccagattcgtcagaattattccaccgacgtggaggcagccgtcaacagcctggtcaatttgtacctgcaggcctcctacacctacctctctctgggcttctatttcgaccgcgatgatgtggctctggaaggcgtgagccacttcttccgcgaattggccgaggagaagcgcgagggctacgagcgtctcctgaagatgcaaaaccagcgtggcggccgcgctctcttccaggacatcaagaagccagctgaagatgagtggggtaaaaccccagacgccatgaaagctgccatggccctggagaaaaagctgaaccaggcccttttggatcttcatgccctgggttctgcccgcacggacccccatctctgtgacttcctggagactcacttcctagatgaggaagtgaagcttatcaagaagatgggtgaccacctgaccaacctccacaggctgggtggcccggaggctgggctgggcgagtattcttcgaaaggctcactctcaagcacgactaagagccttctgagcccagcgacttctgaagggccccttgcaaagtaa

SEQ ID NO: 134128 - DNA, 3853 bp, Homo sapiens
  Payload ID: 6201
  Gene Symbol: FECH
  Gene Name: ferrochelatase
  Uniprot ID: P22830
  ENST ID: ENST00000262093
  CDS Start-End: 153-1424
cggcagcgaatgagcgggcgcgccgggagggcgcgaggtcagggggctggggacgcgcgtggggatcgctacccggctcggccactgctgggcggacacctgggcgcgccgccgcgggaggagcccggactcgggccgaggctgcccaggcaatgcgttcactcggcgcaaacatggctgcggccctgcgcgccgcgggcgtcctgctccgcgatccgctggcatccagcagctggagggtctgtcagccatggaggtggaagtcaggtgcagctgcagcggccgtcaccacagaaacagcccagcatgcccagggtgcaaaacctcaagttcaaccgcagaagaggaagccgaaaactggaatattaatgctaaacatgggaggccctgaaactcttggagatgttcacgacttccttctgagactcttcttggaccgagacctcatgacacttcctattcagaataagctggcaccattcatcgccaaacgccgaacccccaagattcaagagcagtaccgcaggattggaggcggatcccccatcaagatatggacttccaagcagggagagggcatggtgaagctgctggatgaattgtcccccaacacagcccctcacaaatactatattggatttcggtacgtccatcctttaacagaagaagcaattgaagagatggagagagatggcctagaaagggctattgctttcacacagtatccacagtacagctgctccaccacaggcagcagcttaaatgccatttacagatactataatcaagtgggacggaagcccacgatgaagtggagcactattgacaggtggcccacacatcacctcctcatccagtgctttgcagatcatattctaaaggaactggaccattttccacttgagaagagaagcgaggtggtcattctgttttctgctcactcactgcccatgtctgtggtcaacagaggcgacccatatcctcaggaggtaagcgccactgtccaaaaagtcatggaaaggctggagtactgcaacccctaccgactggtgtggcaatccaaggttggtccaatgccctggttgggtcctcaaacagacgaatctatcaaagggctttgtgagagggggaggaagaatatcctcttggttccgatagcatttaccagtgaccatattgaaacgctgtatgagctggacatcgagtactctcaagttttagccaaggagtgtggagttgaaaacatcagaagagctgagtctcttaatggaaatccattgttctctaaggccctggccgacttggtgcattcacacatccagtcaaacgagctgtgttccaagcagctgaccctgagctgtccgctctgtgtcaatcctgtctgcagggagactaaatccttcttcaccagccagcagctgtgacccccgccggtggaccccgtggcgttaggcaaatgcccaacctccagatacctccgatgtggagagggtgttatttagagatcaaggaaggaagtcatccttccttgatatatatacagcctttgggtacaaattgtgtggtttcttgaggattggactcttgatggatttctatttttatataactatacagtaagcatttgtattttctctctctaggtataagttactagtttggaatgtccatcaggacctttaataaatgagttaaaaatttgtcttatgagacacacctatttaagtacagattttggctttattgcccaaaaccctcctgaaagggtacggagagtcccctctgtgggctggcagtgtgaatgagatctgtttagtctcgtgcatatagttgctgttttttaaatgaacacagttgagtatttgaagtgaatttgaaaaagaaatgttacttaatctttccctaagcccatgggttacagaatgctagggaggcaatttggttacctgcaatggctgcttttgccagcgaggccaccattcattggtcatcttggtatttgtgtgtgaatctcactttcctcaatgtaaaaaggaatcaagtatggatttcagaggtgctcttagattccccatacacccaagggtaataaacgtgtacaagtacagtgttcatgatacgtgccttggtgggagtccgtggtgccacagggaaggggctcccactgcttctggtctccagggacagtgctgctggaaaggctagtgatgagcttcaccctggagctcctcccgggaccttgcaagcctctccatccagcatcttctctatcttagttgaatgccttctttctgaacatttgttttaagaattattttataaagtcaacaatactttgcttgaattctttcttaatttacgattttttattataaaaatgtatagtgatacaatgggacatgtgaagaatacagaaaagtaaccactttaatgcaataactgttatcataatattgtatttcgtggtagtcctttcctgtagatatttttaatgccatttaatgccattgtcaccttggatttatgagtgaaaagtgtttctaaaaatatagaaataatgtcagatcagagtctgatcttctatgtttgtatttaaatggattaaaagatccccggtggttccatgaagaatttgtaaagatcactttctctttcctccaagccctgaaactttgttcttcaaaagagcgtttctttttttttttttttttagccagtttataaagtggaagtattaggagattcataaatcttctatattgagaattggctatgttaataaatattacaacatcattaaggttttagctaagtttgattcatgctgtctgttaaatcaaaactgatctaaatcagaattattaaatgtgaggagcttttttaatacaggaaaagaaacatgtcatccacttgagttaatagttttcctacgttgatgacagccctcatgagtagcatccacatttttaaaatttcaaattggtttttctactagtagattgtgtttctagagaaagatacaaggcataggtgattgtttaggattttcctctagcctttgccattacctttttggggatgaggttcacagtagactttgagtgaccgtcccaccgtgaagtgaattctctgagctggtggtgtggtgctggaaggaaggttatttttggagccactctctccccttaaggatatttcccaagggcctgcttcaattctttgatgactttagaggtgaaaaaatatttttatggagatgatgcagaaaactccaattcaggagcccttgcgagtatatctgaagcacttatttgctaaggaaacctgaattgatagcagtactgtgctgtctggaataatgtccttgatactgagttgggaccagactggcttttatagtgacaggcaaagaggaatttattgagatcactgctcatggcatttgttgctgtaagaagtgttgcctttgattgttactaaccacggatgggtaacggtcatacattaggctagtgtttggtaggacaaaatctttttagagctttgagaattgtcatcctgttggtcaactttgaaatacaaatgtttgccctggtaattagcaatgaactgctggcagtttcttcagctgtgtatatacggatctggcttttaattgatgaatcaacttctacagaaacttttgcagggacagtgttgatgaggcagtttagcttgccagggtgatgataaagcccaggtccctgcatgtatagtgctcttctaaagaatatgcattcttgaactacttaactttttaaaaatcacaataaatttttgcactcaaaatttgcttcgtatcaggagaaatgaa

SEQ ID NO: 134129 - DNA, 2526 bp, Homo sapiens
  Payload ID: 6201
  Gene Symbol: FECH
  Gene Name: ferrochelatase
  Uniprot ID: P22830
  ENST ID: ENST00000382873
  CDS Start-End: 35-1324
aggagcccggactcgggccgaggctgcccaggcaatgcgttcactcggcgcaaacatggctgcggccctgcgcgccgcgggcgtcctgctccgcgatccgctggcatccagcagctggagggtctgtcagccatggaggtggaagtcaggtgcagctgcagcggccgtcaccacagaaacagcccagcatgcccagggtgcaaaacctcaagttcaaccgcagaagaggtatgagtctaacatcaggaagccgaaaactggaatattaatgctaaacatgggaggccctgaaactcttggagatgttcacgacttccttctgagactcttcttggaccgagacctcatgacacttcctattcagaataagctggcaccattcatcgccaaacgccgaacccccaagattcaagagcagtaccgcaggattggaggcggatcccccatcaagatatggacttccaagcagggagagggcatggtgaagctgctggatgaattgtcccccaacacagcccctcacaaatactatattggatttcggtacgtccatcctttaacagaagaagcaattgaagagatggagagagatggcctagaaagggctattgctttcacacagtatccacagtacagctgctccaccacaggcagcagcttaaatgccatttacagatactataatcaagtgggacggaagcccacgatgaagtggagcactattgacaggtggcccacacatcacctcctcatccagtgctttgcagatcatattctaaaggaactggaccattttccacttgagaagagaagcgaggtggtcattctgttttctgctcactcactgcccatgtctgtggtcaacagaggcgacccatatcctcaggaggtaagcgccactgtccaaaaagtcatggaaaggctggagtactgcaacccctaccgactggtgtggcaatccaaggttggtccaatgccctggttgggtcctcaaacagacgaatctatcaaagggctttgtgagagggggaggaagaatatcctcttggttccgatagcatttaccagtgaccatattgaaacgctgtatgagctggacatcgagtactctcaagttttagccaaggagtgtggagttgaaaacatcagaagagctgagtctcttaatggaaatccattgttctctaaggccctggccgacttggtgcattcacacatccagtcaaacgagctgtgttccaagcagctgaccctgagctgtccgctctgtgtcaatcctgtctgcagggagactaaatccttcttcaccagccagcagctgtgacccccgccggtggaccccgtggcgttaggcaaatgcccaacctccagatacctccgatgtggagagggtgttatttagagatcaaggaaggaagtcatccttccttgatatatatacagcctttgggtacaaattgtgtggtttcttgaggattggactcttgatggatttctatttttatataactatacagtaagcatttgtattttctctctctaggtataagttactagtttggaatgtccatcaggacctttaataaatgagttaaaaatttgtcttatgagacacacctatttaagtacagattttggctttattgcccaaaaccctcctgaaagggtacggagagtcccctctgtgggctggcagtgtgaatgagatctgtttagtctcgtgcatatagttgctgttttttaaatgaacacagttgagtatttgaagtgaatttgaaaaagaaatgttacttaatctttccctaagcccatgggttacagaatgctagggaggcaatttggttacctgcaatggctgcttttgccagcgaggccaccattcattggtcatcttggtatttgtgtgtgaatctcactttcctcaatgtaaaaaggaatcaagtatggatttcagaggtgctcttagattccccatacacccaagggtaataaacgtgtacaagtacagtgttcatgatacgtgccttggtgggagtccgtggtgccacagggaaggggctcccactgcttctggtctccagggacagtgctgctggaaaggctagtgatgagcttcaccctggagctcctcccgggaccttgcaagcctctccatccagcatcttctctatcttagttgaatgccttctttctgaacatttgttttaagaattattttataaagtcaacaatactttgcttgaattctttcttaatttacgattttttattataaaaatgtatagtgatacaatgggacatgtgaagaatacagaaaagtaaccactttaatgcaataactgttatcataatattgtatttcgtggtagtcctttcctgtagatatttttaatgccatttaatgccattgtcaccttggatttatgagtgaaaagtgtttctaaaaatatagaaataatgtcagatcagagtctgatcttctatgtttgtatttaaatggattaaaagatccccggtggttccatg

SEQ ID NO: 134130 - DNA, 1874 bp, Homo sapiens
  Payload ID: 6201
  Gene Symbol: FECH
  Gene Name: ferrochelatase
  ENST ID: ENST00000585494
  CDS Start-End: 82-417
cccggctcggccactgctgggcggacacctgggcgcgccgccgcgggaggagcccggactcgggccgaggctgcccaggcaatgcgttcactcggcgcaaacatggctgcggccctgcgcgccgcgggcgtcctgctccgcgatccgctggcatccagcagctggagggtctgtcagccatggaggtggaagtcaggtgcagctgcagcggccgtcaccacagaaacagcccagcatgcccagggtgcaaaacctcaagttcaaccgcagaagaggaagccgaaaactggaatattaatgctaaacatgggaggccctgaaactcttggagatgttcacgacttccttctgagactcttcttggaccgagacctcatgacacttcctattcagaaaaaacatttctcaggttgctaagctggaataaaatccacttacctgtatgttaaatgatttagtaagctggcaccattcatcgccaaacgccgaacccccaagattcaagagcagtaccgcaggattggaggcggatcccccatcaagatatggacttccaagcagggagagggcatggtgaagctgctggatgaattgtcccccaacacagcccctcacaaatactatattggatttcggtacgtccatcctttaacagaagaagcaattgaagagatggagagagatggcctagaaagggctattgctttcacacagtatccacagtacagctgctccaccacaggcagcagcttaaatgccatttacagatactataatcaagtgggacggaagcccacgatgaagtggagcactattgacaggtggcccacacatcacctcctcatccagtgctttgcagatcatattctaaaggaactggaccattttccacttgagaagagaagcgaggtggtcattctgttttctgctcactcactgcccatgtctgtggtcaacagaggcgacccatatcctcaggaggtaagcgccactgtccaaaaagtcatggaaaggctggagtactgcaacccctaccgactggtgtggcaatccaaggttggtccaatgccctggttgggtcctcaaacagacgaatctatcaaagggctttgtgagagggggaggaagaatatcctcttggttccgatagcatttaccagtgaccatattgaaacgctgtatgagctggacatcgagtactctcaagttttagccaaggagtgtggagttgaaaacatcagaagagctgagtctcttaatggaaatccattgttctctaaggccctggccgacttggtgcattcacacatccagtcaaacgagctgtgttccaagcagctgaccctgagctgtccgctctgtgtcaatcctgtctgcagggagactaaatccttcttcaccagccagcagctgtgacccccgccggtggaccccgtggcgttaggcaaatgcccaacctccagatacctccgatgtggagagggtgttatttagagatcaaggaaggaagtcatccttccttgatatatatacagcctttgggtacaaattgtgtggtttcttgaggattggactcttgatggatttctatttttatataactatacagtaagcatttgtattttctctctctaggtataagttactagtttggaatgtccatcaggacctttaataaatgagttaaaaatttgtcttatgagacacacctatttaagtacagattttggctttattgcccaaaaccctcctgaaagggtacggagagtcccctctgtgggctggcagtgtgaatgagatctgtttagtctcgtgcatatagttgctgttttttaaatgaacacagttgagtatttgaagtgaatttgaaaaag

SEQ ID NO: 134131 - DNA, 544 bp, Homo sapiens
  Payload ID: 6201
  Gene Symbol: FECH
  Gene Name: ferrochelatase
  ENST ID: ENST00000591977
  CDS Start-End: 1-431
tggaccattttccacttgagaagagaagcgaggtggtcattctgttttctgctcactcactgcccatgtctgtggtcaacagaggcgacccatatcctcaggaggtaagcgccactgtccaaaaagtcatggaaaggctggagtactgcaacccctaccgactggtgtggcaatccaaggttggtccaatgccctggttgggtcctcaaacagacgaatctatcaaagggctttgtgagagggggaggaagaatatcctcttggttccgatagcatttaccagtgaccatattgaaacgctgtatgagctggacatcgagtactctcaagttttagccaaggagtgtggagttgaaaacatcagaagagctgagtctcttaatggaaatccattgttctctaaggtatctacagtgttacaatcgttttagtagaacataccagagagtaatcctctgagaaactcttgcagaatattggtttttctcacatattagaacatttggagttccaattaattacaaaaataaaatcgaattcctta

SEQ ID NO: 134132 - DNA, 564 bp, Homo sapiens
  Payload ID: 6201
  Gene Symbol: FECH
  Gene Name: ferrochelatase
  ENST ID: ENST00000585747
  CDS Start-End: 70-564
actgctgggcggacacctgggcgcgccgccgcgggaggagcccggactcgggccgaggctgcccaggcaatgcgttcactcggcgcaaacatggctgcggccctgcgcgccgcgggcgtcctgctccgcgatccgctggcatccagcagctggagggtctgtcagccatggaggtggaagtcaggtgcagctgcagcggccgtcaccacagaaacagcccagcatgcccagggtgcaaaacctcaagttcaaccgcagaagaggaagccgaaaactggaatattaatgctaaacatgggaggccctgaaactcttggagatgttcacgacttccttctgagactcttcttggaccgagacctcatgacacttcctattcagaataagctggcaccattcatcgccaaacgccgaacccccaagattcaagagcagtaccgcaggattggaggcggatcccccatcaagatatggacttccaagcagggagagggcatggtgaagctgctggatgaattgtcccccaacacagtacccaaccagagaatactgagtccgaccagc

SEQ ID NO: 134133 - DNA, 1049 bp, Homo sapiens
  Payload ID: 6201
  Gene Symbol: FECH
  Gene Name: ferrochelatase
  ENST ID: ENST00000592699
  CDS Start-End: 71-1049
cactgctgggcggacacctgggcgcgccgccgcgggaggagcccggactcgggccgaggctgcccaggcaatgcgttcactcggcgcaaacatggctgcggccctgcgcgccgcgggcgtcctgctccgcgatccgctggcatccagcagctggagggtctgtcagccatggaggtggaagtcaggtgcagctgcagcggccgtcaccacagaaacagcccagcatgcccagggtgcaaaacctcaagttcaaccgcagaagaggaagccgaaaactggaatattaatgctaaacatgggaggccctgaaactcttggagatgttcacgacttccttctgagactcttcttggaccgagacctcatgacacttcctattcagaataagctggcaccattcatcgccaaacgccgaacccccaagattcaagagcagtaccgcaggattggaggcggatcccccatcaagatatggacttccaagcagggagagggcatggtgaagctgctggatgaattgtcccccaacacagcccctcacaaatactatattggatttcggtacgtccatcctttaacagaagaagcaattgaagagatggagagagatggcctagaaagggctattgctttcacacagtatccacagtacagctgctccaccacaggcagcagcttaaatgccatttacagatactataatcaagtgggacggaagcccacgatgaagtggagcactattgacaggtggcccacacatcacctcctcatccaggtggtcaacagaggcgacccatatcctcaggaggtaagcgccactgtccaaaaagtcatggaaaggctggagtactgcaacccctaccgactggtgtggcaatccaaggttggtccaatgccctggttgggtcctcaaacagacgaatctatcaaagggctttgtgagagggggaggaagaatatcctcttggttccgatagcatttaccagtgaccatattgaaacgctgtatgagctggacatcgagtactctcaagttttagccaaggagg

SEQ ID NO: 134134 - DNA, 590 bp, Homo sapiens
  Payload ID: 6201
  Gene Symbol: FECH
  Gene Name: ferrochelatase
  ENST ID: ENST00000591215
  CDS Start-End: 319-590
actcggcgcaaacatggctgcggccctgcgcgccgcgggcgtcctgctccgcgatccgcgttgtgaccacaggatgagctgatgggactgtggatctcacacacctggctgggacagcatttccaactgtgacaccttgaacaaggcacctaacctcgccagagctttgtggcatccagcagctggagggtctgtcagccatggaggtggaagtcaggtgcagctgcagcggccgtcaccacagaaacagcccagcatgcccagggtgcaaaacctcaagttcaaccgcagaagaggaagccgaaaactggaatattaatgctaaacatgggaggccctgaaactcttggagatgttcacgacttccttctgagactcttcttggaccgagacctcatgacacttcctattcagaataagctggcaccattcatcgccaaacgccgaacccccaagattcaagagcagtaccgcaggattggaggcggatcccccatcaagatatggacttccaagcagggagagggcatggtgaagctgctggatgaattgtcccccaacacagcccctcacaaatactatattggatt

SEQ ID NO: 134135 - DNA, 2829 bp, Homo sapiens
  Payload ID: 6202
  Gene Symbol: FES
  Gene Name: FES proto-oncogene, tyrosine kinase
  Uniprot ID: P07332
  ENST ID: ENST00000328850
  CDS Start-End: 143-2611
cctccacaggcccgccccggggcctgggccaactgaaaccgcgggaggaggaagcgcggaatcaggaactggccggggtccgcaccgggcctgagtcggtccgaggccgtcccaggagcagctgcccgtgcggaacagcactatgggcttctcttccgagctgtgcagcccccagggccacggggtcctgcagcaaatgcaggaggccgagcttcgtctactggagggcatgagaaagtggatggcccagcgggtcaagagtgacagggagtatgcaggactgcttcaccacatgtccctgcaggacagtgggggccagagccgggccatcagccctgacagccccatcagtcagtcctgggctgagatcaccagccaaactgagggcctgagccgcttgctgcggcagcacgcagaggatctgaactcagggcccctgagcaagctgagcctgctcatccgggaacggcagcagcttcgcaagacctacagcgagcagtggcagcagctgcagcaggagctcaccaagacccacagccaggacattgagaagctgaagagccagtaccgagctctggcacgggacagtgcccaagccaagcgcaagtaccaggaggccagcaaagacaaggaccgtgacaaggctaaggacaagtatgtgcgcagcctgtggaagctctttgctcaccacaaccgctatgtgctgggcgtgcgggctgcgcagctacaccaccagcaccaccaccagctcctgctgcccggcctgctgcggtcactgcaggacctgcacgaggagatggcttgcatcctgaaggagatcctgcaggaatacctggagattagcagcctggtgcaggatgaggtggtggccattcaccgggagatggctgcagctgctgcccgcatccagcctgaggctgagtaccaaggcttcctgcgacagtatgggtccgcacctgacgtcccaccctgtgtcacgttcgatgagtcactgcttgaggagggtgaaccgctggagcctggggagctccagctgaacgagctgactgtggagagcgtgcagcacacgctgacctcagtgacagatgagctggctgtggccaccgagatggtgttcaggcggcaggagatggttacgcagctgcaacaggagctccggaatgaagaggagaacacccacccccgggagcgggtgcagctgctgggcaagaggcaagtgctgcaagaagcactgcaggggctgcaggtagcgctgtgcagccaggccaagctgcaggcccagcaggagttgctgcagaccaagctggagcacctgggccccggcgagcccccgcctgtgctgctcctgcaggatgaccgccactccacgtcgtcctcggagcaggagcgagaggggggaaggacacccacgctggagatccttaagagccacatctcaggaatcttccgccccaagttctcgctccctccaccgctgcagctcattccggaggtgcagaagcccctgcatgagcagctgtggtaccacggggccatcccgagggcagaggtggctgagctgctggtgcactctggggacttcctggtgcgggagagccagggcaagcaggagtacgtgctgtcggtgctgtgggatggtctgccccggcacttcatcatccagtccttggataacctgtaccgactggaaggggaaggctttcctagcattcctttgctcatcgaccacctactgagcacccagcagcccctcaccaagaagagtggtgttgtcctgcacagggctgtgcccaaggacaagtgggtgctgaaccatgaggacctggtgttgggtgagcagattggacgggggaactttggcgaagtgttcagcggacgcctgcgagccgacaacaccctggtggcggtgaagtcttgtcgagagacgctcccacctgacctcaaggccaagtttctacaggaagcgaggatcctgaagcagtacagccaccccaacatcgtgcgtctcattggtgtctgcacccagaagcagcccatctacatcgtcatggagcttgtgcaggggggcgacttcctgaccttcctccgcacggagggggcccgcctgcgggtgaagactctgctgcagatggtgggggatgcagctgctggcatggagtacctggagagcaagtgctgcatccaccgggacctggctgctcggaactgcctggtgacagagaagaatgtcctgaagatcagtgactttgggatgtcccgagaggaagccgatggggtctatgcagcctcagggggcctcagacaagtccccgtgaagtggaccgcacctgaggcccttaactacggccgctactcctccgaaagcgacgtgtggagctttggcatcttgctctgggagaccttcagcctgggggcctccccctatcccaacctcagcaatcagcagacacgggagtttgtggagaaggggggccgtctgccctgcccagagctgtgtcctgatgccgtgttcaggctcatggagcagtgctgggcctatgagcctgggcagcggcccagcttcagcaccatctaccaggagctgcagagcatccgaaagcggcatcggtgaggctgggacccccttctcaagctggtggcctctgcaggcctaggtgcagctcctcagcggctccagctcatatgctgacagctcttcacagtcctggactcctgccaccagcatccacactgccggcaggatgcagcgccgtgtcctctctgtgtccctgctgctgccagggcttcctcttccgggcagaaacaataaaaccacttgtgcccactgaa

SEQ ID NO: 134136 - DNA, 2302 bp, Homo sapiens
  Payload ID: 6202
  Gene Symbol: FES
  Gene Name: FES proto-oncogene, tyrosine kinase
  Uniprot ID: P07332
  ENST ID: ENST00000394300
  CDS Start-End: 1-2295
atgggcttctcttccgagctgtgcagcccccagggccacggggtcctgcagcaaatgcaggaggccgagcttcgtctactggagggcatgagaaagtggatggcccagcgggtcaagagtgacagggagtatgcaggactgcttcaccacatgtccctgcaggacagtgggggccagagccgggccatcagccctgacagccccatcagtcagacccacagccaggacattgagaagctgaagagccagtaccgagctctggcacgggacagtgcccaagccaagcgcaagtaccaggaggccagcaaagacaaggaccgtgacaaggctaaggacaagtatgtgcgcagcctgtggaagctctttgctcaccacaaccgctatgtgctgggcgtgcgggctgcgcagctacaccaccagcaccaccaccagctcctgctgcccggcctgctgcggtcactgcaggacctgcacgaggagatggcttgcatcctgaaggagatcctgcaggaatacctggagattagcagcctggtgcaggatgaggtggtggccattcaccgggagatggctgcagctgctgcccgcatccagcctgaggctgagtaccaaggcttcctgcgacagtatgggtccgcacctgacgtcccaccctgtgtcacgttcgatgagtcactgcttgaggagggtgaaccgctggagcctggggagctccagctgaacgagctgactgtggagagcgtgcagcacacgctgacctcagtgacagatgagctggctgtggccaccgagatggtgttcaggcggcaggagatggttacgcagctgcaacaggagctccggaatgaagaggagaacacccacccccgggagcgggtgcagctgctgggcaagaggcaagtgctgcaagaagcactgcaggggctgcaggtagcgctgtgcagccaggccaagctgcaggcccagcaggagttgctgcagaccaagctggagcacctgggccccggcgagcccccgcctgtgctgctcctgcaggatgaccgccactccacgtcgtcctcggagcaggagcgagaggggggaaggacacccacgctggagatccttaagagccacatctcaggaatcttccgccccaagttctcgctccctccaccgctgcagctcattccggaggtgcagaagcccctgcatgagcagctgtggtaccacggggccatcccgagggcagaggtggctgagctgctggtgcactctggggacttcctggtgcgggagagccagggcaagcaggagtacgtgctgtcggtgctgtgggatggtctgccccggcacttcatcatccagtccttggataacctgtaccgactggaaggggaaggctttcctagcattcctttgctcatcgaccacctactgagcacccagcagcccctcaccaagaagagtggtgttgtcctgcacagggctgtgcccaaggacaagtgggtgctgaaccatgaggacctggtgttgggtgagcagattggacgggggaactttggcgaagtgttcagcggacgcctgcgagccgacaacaccctggtggcggtgaagtcttgtcgagagacgctcccacctgacctcaaggccaagtttctacaggaagcgaggatcctgaagcagtacagccaccccaacatcgtgcgtctcattggtgtctgcacccagaagcagcccatctacatcgtcatggagcttgtgcaggggggcgacttcctgaccttcctccgcacggagggggcccgcctgcgggtgaagactctgctgcagatggtgggggatgcagctgctggcatggagtacctggagagcaagtgctgcatccaccgggacctggctgctcggaactgcctggtgacagagaagaatgtcctgaagatcagtgactttgggatgtcccgagaggaagccgatggggtctatgcagcctcagggggcctcagacaagtccccgtgaagtggaccgcacctgaggcccttaactacggccgctactcctccgaaagcgacgtgtggagctttggcatcttgctctgggagaccttcagcctgggggcctccccctatcccaacctcagcaatcagcagacacgggagtttgtggagaaggggggccgtctgccctgcccagagctgtgtcctgatgccgtgttcaggctcatggagcagtgctgggcctatgagcctgggcagcggcccagcttcagcaccatctaccaggagctgcagagcatccgaaagcggcatcggtgaggctggg

SEQ ID NO: 134137 - DNA, 2133 bp, Homo sapiens
  Payload ID: 6202
  Gene Symbol: FES
  Gene Name: FES proto-oncogene, tyrosine kinase
  ENST ID: ENST00000394302
  CDS Start-End: 86-2131
ggaatcaggaactggccggggtccgcaccgggcctgagtcggtccgaggccgtcccaggagcagctgcccgtgcggaacagcactatgggcttctcttccgagctgtgcagcccccagggccacggggtcctgcagcaaatgcaggaggccgagcttcgtctactggagggcatgagaaagtggatggcccagcgggtcaagagtgacagggagtatgcaggactgcttcaccacatgtccctgcaggacagtgggggccagagccgggccatcagccctgacagccccatcagtcagacccacagccaggacattgagaagctgaagagccagtaccgagctctggcacgggacagtgcccaagccaagcgcaagtaccaggaggccagcaaagacaaggaccgtgacaaggctaaggacaagtatgtgcgcagcctgtggaagctctttgctcaccacaaccgctatgtgctgggcgtgcgggctgcgcagctacaccaccagcaccaccaccagctcctgctgcccggcctgctgcggtcactgcaggacctgcacgaggagatggcttgcatcctgaaggagatcctgcaggaatacctggagattagcagcctggtgcaggatgaggtggtggccattcaccgggagatggctgcagctgctgcccgcatccagcctgaggctgagtaccaaggcttcctgcgacagtatgggtccgcacctgacgtcccaccctgtgtcacgttcgatgagtcactgcttgaggagggtgaaccgctggagcctggggagctccagctgaacgagctgactgtggagagcgtgcagcacacgctgacctcagtgacagatgagctggctgtggccaccgagatggtgttcaggcggcaggagatggttacgcagctgcaacaggagctccggaatgaagaggagaacacccacccccgggagcgggtgcagctgctgggcaagaggcaagtgctgcaagaagcactgcaggggctgcaggtagcgctgtgcagccaggccaagctgcaggcccagcaggagttgctgcagaccaagctggagcacctgggccccggcgagcccccgcctgtgctgctcctgcaggatgaccgccactccacgtcgtcctcggagcaggagcgagaggggggaaggacacccacgctggagatccttaagagccacatctcaggaatcttccgccccaagttctcgaacctgtaccgactggaaggggaaggctttcctagcattcctttgctcatcgaccacctactgagcacccagcagcccctcaccaagaagagtggtgttgtcctgcacagggctgtgcccaaggacaagtgggtgctgaaccatgaggacctggtgttgggtgagcagattggacgggggaactttggcgaagtgttcagcggacgcctgcgagccgacaacaccctggtggcggtgaagtcttgtcgagagacgctcccacctgacctcaaggccaagtttctacaggaagcgagaagcagcccatctacatcgtcatggagcttgtgcagggggtcctccccacctgcagggggcgacttcctgaccttcctccgcacggagggggcccgcctgcgggtgaagactctgctgcagatggtgggggatgcagctgctggcatggagtacctggagagcaagtgctgcatccaccgggacctggctgctcggaactgcctggtgacagagaagaatgtcctgaagatcagtgactttgggatgtcccgagaggaagccgatggggtctatgcagcctcagggggcctcagacaagtccccgtgaagtggaccgcacctgaggcccttaactacggccgctactcctccgaaagcgacgtgtggagctttggcatcttgctctgggagaccttcagcctgggggcctccccctatcccaacctcagcaatcagcagacacgggagtttgtggagaaggggggccgtctgccctgcccagagctgtgtcctgatgccgtgttcaggctcatggagcagtgctgggcctatgagcctgggcagcggcccagcttcagcaccatctaccaggagctgcagagcatccgaaagcggcatcggtgagg

SEQ ID NO: 134138 - DNA, 587 bp, Homo sapiens
  Payload ID: 6202
  Gene Symbol: FES
  Gene Name: FES proto-oncogene, tyrosine kinase
  ENST ID: ENST00000452243
  CDS Start-End: 146-587
gagtcggtccgaggccgtcccaggagcagctgcccgtgcgggtacctctagccccggggcctggaggagcggtgggagctgggggcgcggcaggcaggggcagagcaggcgttccgagggccagagacccacccagaacagcactatgggcttctcttccgagctgtgcagcccccagggccacggggtcctgcagcaaatgcaggaggccgagcttcgtctactggagggcatgagaaagtggatggcccagcgggtcaagagtgacagggagtatgcaggactgcttcaccacatgtccctgcaggacagtgggggccagagccgggccatcagccctgacagccccatcagtcagtcctgggctgagatcaccagccaaactgagggcctgagccgcttgctgcggcagcacgcagaggatctgaactcagggcccctgagcaagctgagcctgctcatccgggaacggcagcagcttcgcaagacctacagcgagcagtggcagcagctgcagcaggagctcaccaagacccacagccaggacattgagaagctgaagagccagtaccgagctctggcacggg

SEQ ID NO: 134139 - DNA, 544 bp, Homo sapiens
  Payload ID: 6202
  Gene Symbol: FES
  Gene Name: FES proto-oncogene, tyrosine kinase
  ENST ID: ENST00000443697
  CDS Start-End: 201-544
agctggggcaggcttggcctgtcgaggacctgggcaagggtgtccctgtaaggggtggtgggtggaagggcctggggagggaggctccaggttggctcctgttcccgaacgtgcggaggagaccctgacgctaaggaagcaatgagggccagtccccaggccaggctgctgctgggtacccatggctgcgtaacagcactatgggcttctcttccgagctgtgcagcccccagggccacggggtcctgcagcaaatgcaggaggccgagcttcgtctactggagggcatgagaaagtggatggcccagcgggtcaagagtgacagggagtatgcaggactgcttcaccacatgtccctgcaggacagtgggggccagagccgggccatcagccctgacagccccatcagtcagtcctgggctgagatcaccagccaaactgagggcctgagccgcttgctgcggcagcacgcagaggatctgaactcagggcccctgagcaagctgagcctgctcatccgggaacggcagcagcttcgcaagac

SEQ ID NO: 134140 - DNA, 2266 bp, Homo sapiens
  Payload ID: 6202
  Gene Symbol: FES
  Gene Name: FES proto-oncogene, tyrosine kinase
  Uniprot ID: P07332
  ENST ID: ENST00000444422
  CDS Start-End: 1-2259
atgggcttctcttccgagctgtgcagcccccagggccacggggtcctgcagcaaatgcaggaggccgagcttcgtctactggagggcatgagaaagtggatggcccagcgggtcaagagtgacagggagtatgcaggactgcttcaccacatgtccctgcaggacagtgggggccagagccgggccatcagccctgacagccccatcagtcagtcctgggctgagatcaccagccaaactgagggcctgagccgcttgctgcggcagcacgcagaggatctgaactcagggcccctgagcaagctgagcctgctcatccgggaacggcagcagcttcgcaagacctacagcgagcagtggcagcagctgcagcaggagctcaccaagacccacagccaggacattgagaagctgaagagccagtaccgagctctggcacgggacagtgcccaagccaagcgcaagtaccaggaggccagcaaagacaaggaccgtgacaaggctaaggacaagtatgtgcgcagcctgtggaagctctttgctcaccacaaccgctatgtgctgggcgtgcgggctgcgcagctacaccaccagcaccaccaccagctcctgctgcccggcctgctgcggtcactgcaggacctgcacgaggagatggcttgcatcctgaaggagatcctgcaggaatacctggagattagcagcctggtgcaggatgaggtggtggccattcaccgggagatggctgcagctgctgcccgcatccagcctgaggctgagtaccaaggcttcctgcgacagtatgggtccgcacctgacgtcccaccctgtgtcacgttcgatgagtcactgcttgaggagggtgaaccgctggagcctggggagctccagctgaacgagctgactgtggagagcgtgcagcacacgctgacctcagtgacagatgagctggctgtggccaccgagatggtgttcaggcggcaggagatggttacgcagctgcaacaggagctccggaatgaagaggagaacacccacccccgggagcgggtgcagctgctgggcaagaggcaagtgctgcaagaagcactgcaggggctgcaggtagcgctgtgcagccaggccaagctgcaggcccagcaggagttgctgcagaccaagctggagcacctgggccccggcgagcccccgcctgtgctgctcctgcaggatgaccgccactccacgtcgtcctcggagcaggagcgagaggggggaaggacacccacgctggagatccttaagagccacatctcaggaatcttccgccccaagttctcgaacctgtaccgactggaaggggaaggctttcctagcattcctttgctcatcgaccacctactgagcacccagcagcccctcaccaagaagagtggtgttgtcctgcacagggctgtgcccaaggacaagtgggtgctgaaccatgaggacctggtgttgggtgagcagattggacgggggaactttggcgaagtgttcagcggacgcctgcgagccgacaacaccctggtggcggtgaagtcttgtcgagagacgctcccacctgacctcaaggccaagtttctacaggaagcgaggatcctgaagcagtacagccaccccaacatcgtgcgtctcattggtgtctgcacccagaagcagcccatctacatcgtcatggagcttgtgcaggggggcgacttcctgaccttcctccgcacggagggggcccgcctgcgggtgaagactctgctgcagatggtgggggatgcagctgctggcatggagtacctggagagcaagtgctgcatccaccgggacctggctgctcggaactgcctggtgacagagaagaatgtcctgaagatcagtgactttgggatgtcccgagaggaagccgatggggtctatgcagcctcagggggcctcagacaagtccccgtgaagtggaccgcacctgaggcccttaactacggccgctactcctccgaaagcgacgtgtggagctttggcatcttgctctgggagaccttcagcctgggggcctccccctatcccaacctcagcaatcagcagacacgggagtttgtggagaaggggggccgtctgccctgcccagagctgtgtcctgatgccgtgttcaggctcatggagcagtgctgggcctatgagcctgggcagcggcccagcttcagcaccatctaccaggagctgcagagcatccgaaagcggcatcggtgaggctggg

SEQ ID NO: 134141 - DNA, 485 bp, Homo sapiens
  Payload ID: 6202
  Gene Symbol: FES
  Gene Name: FES proto-oncogene, tyrosine kinase
  ENST ID: ENST00000416779
  CDS Start-End: 359-485
agtgtgaagaactgggcctattgtgtcttcctgggctgaagtgatctggtcgccacaggctatagggctgaggcctaaggtggagggaggcctgactgaatcaagatgacttcttgtggggagcctgagtcccaaatggaaaactccacgcctgtccgctccccaacccctgccccttgatttccccaggtctcccttgggacaggaagcccctgcctgggggtaggaggatggggacaaaaccactaggatctgtatccgagaagcagtctctgttcgggatatttacttggaaattttattcaaatggaagctggcgcctgagcctctccttagggaattccgtgagaacagcactatgggcttctcttccgagctgtgcagcccccagggccacggggtcctgcagcaaatgcaggaggccgagcttcgtctactggagggcatgagaaagtggatggcccagcgggtcaagagtgacaggg

SEQ ID NO: 134142 - DNA, 2327 bp, Homo sapiens
  Payload ID: 6202
  Gene Symbol: FES
  Gene Name: FES proto-oncogene, tyrosine kinase
  Uniprot ID: P07332
  ENST ID: ENST00000414248
  CDS Start-End: 108-2192
aaaccgcgggaggaggaagcgcggaatcaggaactggccggggtccgcaccgggcctgagtcggtccgaggccgtcccaggagcagctgcccgtgcggaacagcactatgggcttctcttccgagctgtgcagcccccagggccacggggtcctgcagcaaatgcaggaggccgagcttcgtctactggagggcatgagaaagtggatggcccagcgggtcaagagtgacagggagtatgcaggactgcttcaccacatgtccctgcaggacagtgggggccagagccgggccatcagccctgacagccccatcagtcagacccacagccaggacattgagaagctgaagagccagtaccgagctctggcacgggacagtgcccaagccaagcgcaagtaccaggaggccagcaaagacaaggaccgtgacaaggctaaggacaagtatgtgcgcagcctgtggaagctctttgctcaccacaaccgctatgtgctgggcgtgcgggctgcgcagctacaccaccagcaccaccaccagctcctgctgcccggcctgctgcggtcactgcaggacctgcacgaggagatggcttgcatcctgaaggagatcctgcaggaatacctggagattagcagcctggtgcaggatgaggtggtggccattcaccgggagatggctgcagctgctgcccgcatccagcctgaggctgagtaccaaggcttcctgcgacagtatgggtccgcacctgacgtcccaccctgtgtcacgttcgatgagtcactgcttgaggagggtgaaccgctggagcctggggagctccagctgaacgagctgactgtggagagcgtgcagcacacgctgacctcagtgacagatgagctggctgtggccaccgagatggtgttcaggcggcaggagatggttacgcagctgcaacaggagctccggaatgaagaggagaacacccacccccgggagcgggtgcagctgctgggcaagaggcaagtgctgcaagaagcactgcaggggctgcaggtagcgctgtgcagccaggccaagctgcaggcccagcaggagttgctgcagaccaagctggagcacctgggccccggcgagcccccgcctgtgctgctcctgcaggatgaccgccactccacgtcgtcctcggagcaggagcgagaggggggaaggacacccacgctggagatccttaagagccacatctcaggaatcttccgccccaagttctcgaacctgtaccgactggaaggggaaggctttcctagcattcctttgctcatcgaccacctactgagcacccagcagcccctcaccaagaagagtggtgttgtcctgcacagggctgtgcccaaggacaagtgggtgctgaaccatgaggacctggtgttgggtgagcagattggacgggggaactttggcgaagtgttcagcggacgcctgcgagccgacaacaccctggtggcggtgaagtcttgtcgagagacgctcccacctgacctcaaggccaagtttctacaggaagcgaggatcctgaagcagtacagccaccccaacatcgtgcgtctcattggtgtctgcacccagaagcagcccatctacatcgtcatggagcttgtgcaggggggcgacttcctgaccttcctccgcacggagggggcccgcctgcgggtgaagactctgctgcagatggtgggggatgcagctgctggcatggagtacctggagagcaagtgctgcatccaccgggacctggctgctcggaactgcctggtgacagagaagaatgtcctgaagatcagtgactttgggatgtcccgagaggaagccgatggggtctatgcagcctcagggggcctcagacaagtccccgtgaagtggaccgcacctgaggcccttaactacggccgctactcctccgaaagcgacgtgtggagctttggcatcttgctctgggagaccttcagcctgggggcctccccctatcccaacctcagcaatcagcagacacgggagtttgtggagaaggggggccgtctgccctgcccagagctgtgtcctgatgccgtgttcaggctcatggagcagtgctgggcctatgagcctgggcagcggcccagcttcagcaccatctaccaggagctgcagagcatccgaaagcggcatcggtgaggctgggacccccttctcaagctggtggcctctgcaggcctaggtgcagctcctcagcggctccagctcatatgctgacagctcttcacagtcctggactcctgccaccagcatccacactgccggcaggatgca

SEQ ID NO: 134143 - DNA, 2461 bp, Homo sapiens
  Payload ID: 6202
  Gene Symbol: FES
  Gene Name: FES proto-oncogene, tyrosine kinase
  ENST ID: ENST00000464684
  CDS Start-End: 32-1669
ccaggagcagctgcccgtgcggaacagcactatgggcttctcttccgagctgtgcagcccccagggccacggggtcctgcagcaaatgcaggaggccgagcttcgtctactggagggcatgagaaagtggatggcccagcgggtcaagagtgacagggagtatgcaggactgcttcaccacatgtccctgcaggacagtgggggccagagccgggccatcagccctgacagccccatcagtcagtcctgggctgagatcaccagccaaactgagggcctgagccgcttgctgcggcagcacgcagaggatctgaactcagggcccctgagcaagctgagcctgctcatccgggaacggcagcagcttcgcaagacctacagcgagcagtggcagcagctgcagcaggagctcaccaagacccacagccaggacattgagaagctgaagagccagtaccgagctctggcacgggacagtgcccaagccaagcgcaagtaccaggaggccagcaaagacaaggaccgtgacaaggctaaggacaagtatgtgcgcagcctgtggaagctctttgctcaccacaaccgctatgtgctgggcgtgcgggctgcgcagctacaccaccagcaccaccaccagctcctgctgcccggcctgctgcggtcactgcaggacctgcacgaggagatggcttgcatcctgaaggagatcctgcaggaatacctggagattagcagcctggtgcaggatgaggtggtggccattcaccgggagatggctgcagctgctgcccgcatccagcctgaggctgagtaccaaggcttcctgcgacagtatgggtccgcacctgacgtcccaccctgtgtcacgttcgatgagtcactgcttgaggagggtgaaccgctggagcctggggagctccagctgaacgagctgactgtggagagcgtgcagcacacgctgacctcagtgacagatgagctggctgtggccaccgagatggtgttcaggcggcaggagatggttacgcagctgcaacaggagctccggaatgaagaggagaacacccacccccgggagcgggtgcagctgctgggcaagaggcaagtgctgcaagaagcactgcaggggctgcaggtagcgctgtgcagccaggccaagctgcaggcccagcaggagttgctgcagaccaagctggagcacctgggccccggcgagcccccgcctgtgctgctcctgcaggatgaccgccactccacgtcgtcctcggagcaggagcgagaggggggaaggacacccacgctggagatccttaagagccacatctcaggaatcttccgccccaagttctcgctccctccaccgctgcagctcattccggaggtgcagaagcccctgcatgagcagctgtggtaccacggggccatcccgagggcagaggtggctgagctgctggtgcactctggggacttcctggtgcgggagagccagggcaagcaggagtacgtgctgtcggtgctgtgggatggtctgccccggcacttcatcatccaggctcacgccccctcagaatggaggctgctgaccccgggtcccctgccctgcagaacctgtaccgactggaaggggaaggctttcctagcattcctttgctcatcgaccacctactgagcacccagcagcccctcaccaagaagagtggtgttgtcctgcacagggctgtgcccaaggacaagtgggtgctgaaccatgaggacctggtgttgggtgagcagattggacgggggaactttggcgaagtgttcagcggacgcctgcgagccgacaacaccctggtggcggtgaagtcttgtcgagagacgctcccacctgacctcaaggccaagtttctacaggaagcgaggatcctgaagcagtacagccaccccaacatcgtgcgtctcattggtgtctgcacccagaagcagcccatctacatcgtcatggagcttgtgcaggggggcgacttcctgaccttcctccgcacggagggggcccgcctgcgggtgaagactctgctgcagatggtgggggatgcagctgctggcatggagtacctggagagcaagtgctgcatccaccgggacctggctgctcggaactgcctggtgacagagaagaatgtcctgaagatcagtgactttgggatgtcccgagaggaagccgatggggtctatgcagcctcagggggcctcagacaagtccccgtgaagtggaccgcacctgaggcccttaactacgggggccgtctgccctgcccagagctgtgtcctgatgccgtgttcaggctcatggagcagtgctgggcctatgagcctgggcagcggcccagcttcagcaccatctaccaggagctgcagagcatccgaaagcggcatcggtgaggctgggacccccttctcaagctggtggcctctgcaggcc

SEQ ID NO: 134144 - DNA, 587 bp, Homo sapiens
  Payload ID: 6202
  Gene Symbol: FES
  Gene Name: FES proto-oncogene, tyrosine kinase
  ENST ID: ENST00000559355
  CDS Start-End: 81-587
ggaatcaggaactggccggggtccgcaccgggcctgagtcggtccgaggccgtcccaggagcagctgcccgtgcggcactatgggcttctcttccgagctgtgcagcccccagggccacggggtcctgcagcaaatgcaggaggccgagcttcgtctactggagggcatgagaaagtggatggcccagcgggtcaagagtgacagggagtatgcaggactgcttcaccacatgtccctgcaggacagtgggggccagagccgggccatcagccctgacagccccatcagtcagtcctgggctgagatcaccagccaaactgagggcctgagccgcttgctgcggcagcacgcagaggatctgaactcagggcccctgagcaagctgagcctgctcatccgggaacggcagcagcttcgcaagacctacagcgagcagtggcagcagctgcagcaggagctcaccaagacccacagccaggacattgagaagctgaagagccagtaccgagctctggcacgggacagtgcccaagccaagcgcaagtaccaggaggccagcaaagacaaggaccgtgacaaggctaag

SEQ ID NO: 134145 - DNA, 1096 bp, Homo sapiens
  Payload ID: 6202
  Gene Symbol: FES
  Gene Name: FES proto-oncogene, tyrosine kinase
  ENST ID: ENST00000470152
  CDS Start-End: 203-568
aaaccgcgggaggaggaagcgcggaatcaggaactggccggggtccgcaccgggcctgagtcggtccgaggccgtcccaggagcagctgcccgtgcgggtacctctagccccggggcctggaggagcggtgggagctgggggcgcggcaggcaggggcagagcaggcgttccgagggccagagacccacccagaacagcactatgggcttctcttccgagctgtgcagcccccagggccacggggtcctgcagcaaatgcaggaggccgagcttcgtctactggagggcatgagaaagtggatggcccagcgggtcaagagtgacagggagtatgcaggactgcttcaccacatgtccctgcaggacagtgggggccagagccgggccatcagccctgacagccccatcagtcaggtgggtctctatgggactctggtgggtgctggctgtatctgccttctccttcctctcctgggggccctctggggcagtggctggagatctggcaggccaatgcttgggagccattgtgcccccctccctgcctcccccatctgtgctgtatagtcctgggctgagatcaccagccaaactgagggcctgagccgcttgctgcggcagcacgcagaggatctgaactcagggcccctgagcaagctgagcctgctcatccgggaacggcagcagcttcgcaagacctacagcgagcagtggcagcagctgcagcaggagctcaccaagacccacagccaggacattgagaagctgaagagccagtaccgagctctggcacgggacagtgcccaagccaagcgcaagtaccaggaggccagcaaagacaaggaccgtgacaaggctaaggacaagtatgtgcgcagcctgtggaagctctttgctcaccacaaccgctatgtgctgggcgtgcgggctgcgcagctacaccaccagcaccaccaccagctcctgctgcccggcctgctgcggtcactgcaggacctgcacgaggagatggcttgcatcctgaaggagatcctgcaggaatacctggagattagcagcctggtgcaggatgaggtggtggccattcaccgggag

SEQ ID NO: 134146 - DNA, 1072 bp, Homo sapiens
  Payload ID: 6203
  Gene Symbol: FATE1
  Gene Name: fetal and adult testis expressed 1
  Uniprot ID: Q969F0
  ENST ID: ENST00000370350
  CDS Start-End: 86-637
agaggtgattttctgagtgtgactcctctgttcctggcaccctgtgcatccttagccatagcttacaagagaacagctggttgtgatggcaggaggccctcccaacaccaaggcggagatggaaatgtccctggcagaagaactgaatcatggacgccaaggggaaaaccaagagcacctggtgatagcagaaatgatggagcttggatctcggtcccggggtgcctcccagaagaagcagaagttggaacaaaaagctgctggctctgcttcagccaaacgagtttggaatatgactgccacccgacccaagaaaatggggtcccagctgccaaagcccagaatgctgagagaatcaggccatggggatgcccatctccaggagtacgctggcaatttccaaggcatacgtttccattatgatcgcaacccagggacagatgcagtggcgcagactagcctggaagagttcaatgtactggagatggaagtcatgagaagacagctgtatgcagtcaaccggcgtctgcgcgccctggaggaacagggcgccacctggcgccacagggagaccctgatcatcgccgtgctggtgtcggccagcattgccaacctgtggctgtggatgaaccagtgatcgccccagcgcggcctccgtattggagccctccctgcttccccttctttctttcctctttccccaggccgccactgcccttgcccctttcatctcccagcagccctcaggagcgtcaggatcattttcaactctggttaggcctcctacctggggaggccaggtcactgcactgggaggtcctggctgctgcgaagctggaggaggactgcgtgggctgagatgccaccctttgaagggtgaacagcatggcggcatctgggccccacagtaacacctagtggcaaccttgccttcctgacctcagcggcccttctgttccatcctctgtgggcaggggtgtggctttgttttcctccctcgtttgcttccacctcgtgcacagcgctctgcacagacaacacgctcaataaaagttcagccatagcagcaaaa

SEQ ID NO: 134147 - DNA, 450 bp, Homo sapiens
  Payload ID: 6203
  Gene Symbol: FATE1
  Gene Name: fetal and adult testis expressed 1
  ENST ID: ENST00000417321
  CDS Start-End: 1-243
aaggcggagatggaaatgtccctggcagaagaactgaatcatggacgccaaggggaaaaccaagagcacctggtgatagcagaaatgatggagcttggatctcggtcccggggtgcctcccagaagaagcagaagttggaacaaaaagctgctggctctgcttcagccaaacgagtttggaatatgactgccacccgacccaagaaaatgcaacccagggacagatgcagtggcgcagactagcctggaagagttcaatgtactggagatggaagtcatgagaagacagctgtatgcagtcaaccggcgtctgcgcgccctggaggaacagggcgccacctggcgccacagggagaccctgatcatcgccgtgctggtgtcggccagcattgccaacctgtggctgtggatgaaccagtgatcgccccagcgcggcctccgtattggagc

SEQ ID NO: 134148 - DNA, 1627 bp, Homo sapiens
  Payload ID: 6204
  Gene Symbol: FETUB
  Gene Name: fetuin B
  Uniprot ID: Q9UGM5
  ENST ID: ENST00000265029
  CDS Start-End: 102-1250
gttgtaacaaaaccgctcaagtctgccttaaagagccttacaagccagccagtccctgcagctccacaaactgacccatcctgggccttgttctccacagaatgggtctgctccttcccctggcactctgcatcctagtcctgtgctgcggagcaatgtctccaccccagctggccctcaacccctcggctctgctctcccggggctgcaatgactcagatgtgctggcagttgcaggctttgccctgcgggatattaacaaagacagaaaggatggctatgtgctgagactcaaccgagtgaacgacgcccaggaatacagacggggtggcctgggatctctgttctatcttacactggatgtgctagagactgactgccatgtgctcagaaagaaggcatggcaagactgtggaatgaggatattttttgaatcagtttatggtcaatgcaaagcaatattttatatgaacaacccaagtagagttctctatttagctgcttataactgtactcttcgcccagtttcaaaaaaaaagatttacatgacgtgccctgactgcccaagctccatacccactgactcttccaatcaccaagtgctggaggctgccaccgagtctcttgcgaaatacaacaatgagaacacatccaagcagtattctctcttcaaagtcaccagggcttctagccagtgggtggtcggcccttcttactttgtggaatacttaattaaagaatcaccatgtactaaatcccaggccagcagctgttcacttcagtcctccgactctgtgcctgttggtctttgcaaaggttctctgactcgaacacactgggaaaagtttgtctctgtgacttgtgacttctttgaatcacaggctccagccactggaagtgaaaactctgctgttaaccagaaacctacaaaccttcccaaggtggaagaatcccagcagaaaaacacccccccaacagactccccctccaaagctgggccaagaggatctgtccaatatcttcctgacttggatgataaaaattcccaggaaaagggccctcaggaggcctttcctgtgcatctggacctaaccacgaatccccagggagaaaccctggatatttccttcctcttcctggagcctatggaggagaagctggtggtcctgcctttccccaaagaaaaagcacgcactgctgagtgcccagggccagcccagaatgccagccctcttgtccttccgccatgagaatcacacagagtcttctgtaggggtatggtgcgccgcatgacatgggaggcgatggggacgatggacagagacagagcgtgcacacgtagagtggctagtgaaggacgcctttttgactcttcttggtctcagcatgttgactgggattggaaataatgagactgagccctcggcttgggctgcactctaccctgtacactgccttgtaccctgagctgcatcacctcctaaactgagcagtctcataccatggagagatgcctctcttatgtcttcagccactcacttataaagatacttatcttttcagcagtatatatgtgctgaaatctcagcatgaaagcattgcatgagtaaagatactttccctaaca

SEQ ID NO: 134149 - DNA, 1055 bp, Homo sapiens
  Payload ID: 6204
  Gene Symbol: FETUB
  Gene Name: fetuin B
  ENST ID: ENST00000382134
  CDS Start-End: 102-1055
gttgtaacaaaaccgctcaagtctgccttaaagagccttacaagccagccagtccctgcagctccacaaactgacccatcctgggccttgttctccacagaatgggtctgctccttcccctggcactctgcatcctagtcctgtgctgcggagcaatgtctccaccccagctggccctcaacccctcggctctgctctcccggggctgcaatgactcagatgtgctggcagttgcaggctttgccctgcgggatattaacaaagacagaaaggatggctatgtgctgagactcaaccgagtgaacgacgcccaggaatacagacgggcaatttcaaaaaaaaagatttacatgacgtgccctgactgcccaagctccatacccactgactcttccaatcaccaagtgctggaggctgccaccgagtctcttgcgaaatacaacaatgagaacacatccaagcagtattctctcttcaaagtcaccagggcttctagccagtgggtggtcggcccttcttactttgtggaatacttaattaaagaatcaccatgtactaaatcccaggccagcagctgttcacttcagtcctccgactctgtgcctgttggtctttgcaaaggttctctgactcgaacacactgggaaaagtttgtctctgtgacttgtgacttctttgaatcacaggctccagccactggaagtgaaaactctgctgttaaccagaaacctacaaaccttcccaaggtggaagaatcccagcagaaaaacacccccccaacagactccccctccaaagctgggccaagaggatctgtccaatatcttcctgacttggatgataaaaattcccaggaaaagggccctcaggaggcctttcctgtgcatctggacctaaccacgaatccccagggagaaaccctggatatttccttcctcttcctggagcctatggaggagaagctggtggtcctgcctttccccaaagaaaaagcacgcactgctgagtgcccagggccagcccagaatgccagccctcttgtccttccgccatga

SEQ ID NO: 134150 - DNA, 1040 bp, Homo sapiens
  Payload ID: 6204
  Gene Symbol: FETUB
  Gene Name: fetuin B
  Uniprot ID: Q9UGM5
  ENST ID: ENST00000382136
  CDS Start-End: 3-1040
gaatgggtctgctccttcccctggcactctgcatcctagtcctgtgctgcggagcaatgtctccaccccagctggccctcaacccctcggctctgctctcccggggctgcaatgactcagatgtgctggcagttgcaggctttgccctgcgggatattaacaaagacagaaaggatggctatgtgctgagactcaaccgagtgaacgacgcccaggaatacagacgggtttatggtcaatgcaaagcaatattttatatgaacaacccaagtagagttctctatttagctgcttataactgtactcttcgcccagtttcaaaaaaaaagatttacatgacgtgccctgactgcccaagctccatacccactgactcttccaatcaccaagtgctggaggctgccaccgagtctcttgcgaaatacaacaatgagaacacatccaagcagtattctctcttcaaagtcaccagggcttctagccagtgggtggtcggcccttcttactttgtggaatacttaattaaagaatcaccatgtactaaatcccaggccagcagctgttcacttcagtcctccgactctgtgcctgttggtctttgcaaaggttctctgactcgaacacactgggaaaagtttgtctctgtgacttgtgacttctttgaatcacaggctccagccactggaagtgaaaactctgctgttaaccagaaacctacaaaccttcccaaggtggaagaatcccagcagaaaaacacccccccaacagactccccctccaaagctgggccaagaggatctgtccaatatcttcctgacttggatgataaaaattcccaggaaaagggccctcaggaggcctttcctgtgcatctggacctaaccacgaatccccagggagaaaccctggatatttccttcctcttcctggagcctatggaggagaagctggtggtcctgcctttccccaaagaaaaagcacgcactgctgagtgcccagggccagcccagaatgccagccctcttgtccttccgccatga

SEQ ID NO: 134151 - DNA, 1640 bp, Homo sapiens
  Payload ID: 6204
  Gene Symbol: FETUB
  Gene Name: fetuin B
  ENST ID: ENST00000435961
  CDS Start-End: 70-429
gagccttacaagccagccagtccctgcagctccacaaactgacccatcctgggccttgttctccacagaatgggtctgctccttcccctggcactctgcatcctagtcctgtgctgcggagcaatgtctccaccccagctggccctcaacccctcggctctgctctcccggggctgcaatgactcagatgtgctggcagttgcaggctttgccctgcgggatattaacaaagacagaaaggatggctatgtgctgagactcaaccgagtgaacgacgcccaggaatacagacggggtggcctgggatctctgttctatcttacactggatgtgctagagactgactgccatgtgctcagaaagaaggcatggcaagactgtggaatgaggatattttttgaatcatttcaaaaaaaaagatttacatgacgtgccctgactgcccaagctccatacccactgactcttccaatcaccaagtgctggaggctgccaccgagtctcttgcgaaatacaacaatgagaacacatccaagcagtattctctcttcaaagtcaccagggcttctagccagtgggtggtcggcccttcttactttgtggaatacttaattaaagaatcaccatgtactaaatcccaggccagcagctgttcacttcagtcctccgactctgtgcctgttggtctttgcaaaggttctctgactcgaacacactgggaaaagtttgtctctgtgacttgtgacttctttgaatcacaggctccagccactggaagtgaaaactctgctgttaaccagaaacctacaaaccttcccaaggtggaagaatcccagcagaaaaacacccccccaacagactccccctccaaagctgggccaagaggatctgtccaatatcttcctgacttggatgataaaaattcccaggaaaagggccctcaggaggcctttcctgtgcatctggacctaaccacgaatccccagggagaaaccctggatatttccttcctcttcctggagcctatggaggagaagctggtggtcctgcctttccccaaagaaaaagcacgcactgctgagtgcccagggccagcccagaatgccagccctcttgtccttccgccatgagaatcacacagagtcttctgtaggggtatggtgcgccgcatgacatgggaggcgatggggacgatggacagagacagagcgtgcacacgtagagtggctagtgaaggacgcctttttgactcttcttggtctcagcatgttgactgggattggaaataatgagactgagccctcggcttgggctgcactctaccctgtacactgccttgtaccctgagctgcatcacctcctaaactgagcagtctcataccatggagagatgcctctcttatgtcttcagccactcacttataaagatacttatcttttcagcagtatatatgtgctgaaatctcagcatgaaagcattgcatgagtaaagatactttccctaacaccgggaggcgtgagcaactaatgcccagcacagtttcagtccctaaattccctttaattccaggacaggtattagctgcgtagggcccataccatttccaaccctctacctcttttcatctgtctggaagtct

SEQ ID NO: 134152 - DNA, 591 bp, Homo sapiens
  Payload ID: 6204
  Gene Symbol: FETUB
  Gene Name: fetuin B
  ENST ID: ENST00000431018
  CDS Start-End: 281-591
gtcagcatttgtccagccctgctggagagccactaggagaggcatcagtctccagtacaaattaacaaaccggctgctggcttatgtatcagttgcctatgcatagggtcagtatactcacccccaggcctgaacaactctgggtcctcaggaaccctgaaggtgtgactggcaaagctgaggccctggctcgggagctgcttccctgagaggactgcgcctacagcatccttgacatcttttcataaaccagcacaacttttcaaaaaaaaagatttacatgacgtgccctgactgcccaagctccatacccactgactcttccaatcaccaagtgctggaggctgccaccgagtctcttgcgaaatacaacaatgagaacacatccaagcagtattctctcttcaaagtcaccagggcttctagccagtgggtggtcggcccttcttactttgtggaatacttaattaaagaatcaccatgtactaaatcccaggccagcagctgttcacttcagtcctccgactctgtgcctgttggtctttgcaaaggttctctgactcgaacacactgggaaaagtttgtctctgt

SEQ ID NO: 134153 - DNA, 1410 bp, Homo sapiens
  Payload ID: 6204
  Gene Symbol: FETUB
  Gene Name: fetuin B
  Uniprot ID: Q9UGM5
  ENST ID: ENST00000450521
  CDS Start-End: 262-1410
gtcagcatttgtccagccctgctggagagccactaggagaggcatcagtctccagtacaaattaacaaaccggctgctggcttatgtatcagttgcctatgcatagggtcagtatactcacccccaggcctgaacaactctgggtcctcaggaaccctgaaggtgtgactggcaaagctgaggccctggctcgggagctgcttccctgagaggactgcgcctacagcatccttgacatcttttcataaaccagcacaactaatgggtctgctccttcccctggcactctgcatcctagtcctgtgctgcggagcaatgtctccaccccagctggccctcaacccctcggctctgctctcccggggctgcaatgactcagatgtgctggcagttgcaggctttgccctgcgggatattaacaaagacagaaaggatggctatgtgctgagactcaaccgagtgaacgacgcccaggaatacagacggggtggcctgggatctctgttctatcttacactggatgtgctagagactgactgccatgtgctcagaaagaaggcatggcaagactgtggaatgaggatattttttgaatcagtttatggtcaatgcaaagcaatattttatatgaacaacccaagtagagttctctatttagctgcttataactgtactcttcgcccagtttcaaaaaaaaagatttacatgacgtgccctgactgcccaagctccatacccactgactcttccaatcaccaagtgctggaggctgccaccgagtctcttgcgaaatacaacaatgagaacacatccaagcagtattctctcttcaaagtcaccagggcttctagccagtgggtggtcggcccttcttactttgtggaatacttaattaaagaatcaccatgtactaaatcccaggccagcagctgttcacttcagtcctccgactctgtgcctgttggtctttgcaaaggttctctgactcgaacacactgggaaaagtttgtctctgtgacttgtgacttctttgaatcacaggctccagccactggaagtgaaaactctgctgttaaccagaaacctacaaaccttcccaaggtggaagaatcccagcagaaaaacacccccccaacagactccccctccaaagctgggccaagaggatctgtccaatatcttcctgacttggatgataaaaattcccaggaaaagggccctcaggaggcctttcctgtgcatctggacctaaccacgaatccccagggagaaaccctggatatttccttcctcttcctggagcctatggaggagaagctggtggtcctgcctttccccaaagaaaaagcacgcactgctgagtgcccagggccagcccagaatgccagccctcttgtccttccgccatga

SEQ ID NO: 134154 - DNA, 1561 bp, Homo sapiens
  Payload ID: 6204
  Gene Symbol: FETUB
  Gene Name: fetuin B
  ENST ID: ENST00000420570
  CDS Start-End: 55-333
gccagtccctgcagctccacaaactgacccatcctgggccttgttctccacagaatgggtctgctccttcccctggcactctgcatcctagtcctgtgctgcggagcaatgtctccaccccagctggccctcaacccctcggctctgctctcccggggctgcaatgactcagatgtgctggcagttgcaggctttgccctgcgggatattaacaaagacagaaaggatggctatgtgctgagactcaaccgagtgaacgacgcccaggaatacagacgggcaaggtggcctgggatctctgttctatcttacactggatgtgctagagactgactgccatgtgctcagaaagaaggcatggcaagactgtggaatgaggatattttttgaatcagtttatggtcaatgcaaagcaatattttatatgaacaacccaagtagagttctctatttagctgcttataactgtactcttcgcccagtttcaaaaaaaaagatttacatgacgtgccctgactgcccaagctccatacccactgactcttccaatcaccaagtgctggaggctgccaccgagtctcttgcgaaatacaacaatgagaacacatccaagcagtattctctcttcaaagtcaccagggcttctagccagtgggtggtcggcccttcttactttgtggaatacttaattaaagaatcaccatgtactaaatcccaggccagcagctgttcacttcagtcctccgactctgtgcctgttggtctttgcaaaggttctctgactcgaacacactgggaaaagtttgtctctgtgacttgtgacttctttgaatcacaggctccagccactggaagtgaaaactctgctgttaaccagaaacctacaaaccttcccaaggtggaagaatcccagcagaaaaacacccccccaacagactccccctccaaagctgggccaagaggatctgtccaatatcttcctgacttggatgataaaaattcccaggaaaagggccctcaggaggcctttcctgtgcatctggacctaaccacgaatccccagggagaaaccctggatatttccttcctcttcctggagcctatggaggagaagctggtggtcctgcctttccccaaagaaaaagcacgcactgctgagtgcccagggccagcccagaatgccagccctcttgtccttccgccatgagaatcacacagagtcttctgtaggggtatggtgcgccgcatgacatgggaggcgatggggacgatggacagagacagagcgtgcacacgtagagtggctagtgaaggacgcctttttgactcttcttggtctcagcatgttgactgggattggaaataatgagactgagccctcggcttgggctgcactctaccctgtacactgccttgtaccctgagctgcatcacctcctaaactgagcagtctcataccatggagagatgcctctcttatgtcttcagccactcacttataaagatacttatcttttcagcagtatatatgtgctgaaatctcagcatgaaagcattgcat

SEQ ID NO: 134155 - DNA, 1879 bp, Homo sapiens
  Payload ID: 6205
  Gene Symbol: FEV
  Gene Name: FEV (ETS oncogene family)
  Uniprot ID: Q99581
  ENST ID: ENST00000295727
  CDS Start-End: 583-1299
gcggcgagtggagcgggagccgactggaagaagggctctagggagggggctgtggctgctggggtccgaggtggggccgggtacaccagccccatcactgtttgcagagagtcagggaggcggaaaagacacgcgctctaggctcccatcagggcacatggcccgggcccatcccccgcgcgtctccccggctgcggggcgcggggggctgccgggtgcgcttggctgtggcgcggcgcgttggagactttattgcgatgggacgataagaggggcgggggcggggtcctgggggccgaggcggcagcgctttaattaaaacggaaattgcggccccgggccgcgcgggggccggagggttccaagcggccccttagctggaagcgtttctccaggacccccccgcaacccccgccacgcccgggctgccccctcccgccaggccctgccggacccggcgccgtcttctcctccttgtcacccgcggtcgcttcgggcggggatcggtgccaccgagcgcaaagcctgcctcgccccccttccccgtcccccccatctcccaccgcccagtccccggcggcgatgagacagagcggcgcctcccagcccctgctgatcaacatgtacctgccagatcccgtcggagacggtctcttcaaggacgggaagaacccgagctgggggccgctgagccccgcggttcagaaaggcagcggacagatccagctgtggcagtttctgctggagctgctggctgaccgcgcgaacgccggctgcatcgcgtgggagggcggtcacggcgagttcaagctcacggacccggacgaggtggcgcggcggtggggcgagcgcaagagcaagcccaacatgaactacgacaagctgagccgcgccctgcgctactactacgacaagaacatcatgagcaaggtgcatggcaagcgctacgcctaccgcttcgacttccagggcctggcgcaggcctgccagccgccgcccgcgcacgctcatgccgccgccgcagctgctgccgccgccgcggccgcccaggacggcgcgctctacaagctgcccgccggcctcgccccgctgcccttccccggcctctccaaactcaacctcatggccgcctcggccggggtcgcgcccgccggcttctcctactggccgggcccgggccccgccgccaccgctgccgccgccaccgccgcgctctaccccagtcccagcttgcagcccccgcccgggcccttcggggccgtggccgcagcctcgcacttggggggccattaccactagacggggcggtcgggtgcctgcggcctcgcccgcacgcctagagtctcgcccgatcccatcggcatcccggggagggcccgggagcctccgtcaaccgtcctctaatccagagtttactccacctgccgcacttagcagggggacgggaccgaagctccctcaatccttgtctggtactagatttgctcctgtcccaccccgcagtcccctgaggagggcgatgtgcgccctctttcactttttttcttctaggtctccaggtcccggaggggatttgtggacctctcttgtctccccaccactccagtgcatttccgcctggctcctagaagccccattcaatatcactactctttaacgagtgccaaatcttttcccacttttgctcttccccaaggaactgctcccacctcagcacgtggaggcctctcacggtcctccttcctgggacctgagcaggtttggtgaaagccaccgtcctccgtgacacacggcccccttcctcctgtccccacactcccaggagaaactcccggtgtgtttctgaccctttcagccccattaaagctcctgagctctc

SEQ ID NO: 134156 - DNA, 1368 bp, Homo sapiens
  Payload ID: 6206
  Gene Symbol: FEZF1
  Gene Name: FEZ family zinc finger 1
  Uniprot ID: A0PJY2
  ENST ID: ENST00000427185
  CDS Start-End: 63-1340
cagggaacaaggcaacggacggcgcaacccagccccggctgacggacgctggcgactcagacatggacagtagctgccacaacgcgactaccaaaatgttagcgactgctccagctcggggcaacatgatgagcacgtccaaacccttggctttctccattgaacgaatcatggcgcgcaccccagagcccaaggccctgccagtcccccacttcctgcagggagccttacccaagggggaacccaagcactctctgcatctcaactcgtcgatcccctgcatgatccccttcgtgcctgtggcctacgacacgagccccaaggcaggagtgacgggctccgagccgcggaaggccagtctggaggccccggcggcgcccgcggcggtgccctcggctcccgcattcagctgcagcgacctgctcaactgcgcactgagtctcaagggcgacctggcccgcgacgcgctgccgctgcagcagtacaagctgccaaaaacgtatttagccgaaaggaataaactggtggtcccggcggtggagaaatacccttctggagtagctttcaaagacctgtcccaggctcagctgcagcattacatgaaagaaagcgcccagcttctgtcggaaaaaatcgcgttcaaaacctcggatttcagccgaggctctcctaatgccaagcccaaagttttcacttgcgaagtgtgtggaaaggtctttaatgcgcactataacttaacccgtcacatgccagtgcacacaggagccagacccttcgtttgcaaagtgtgcggaaaaggtttcaggcaagcaagcaccctgtgcaggcacaagatcattcacacgcaggaaaaacctcacaaatgtaaccagtgtggcaaagcatttaatagaagttccactttaaacactcatacccgaatacacgcgggctacaaaccgtttgtgtgtgaattctgtggcaaagggtttcatcaaaaagggaattacaaaaaccacaagttgacccacagcggggagaagcagttcaagtgcaatatctgcaacaaggctttccaccaggtttacaacctcaccttccacatgcacacccacaacgacaagaagcctttcacctgccccacgtgcggcaagggtttctgcaggaactttgacctcaagaagcatgtccgcaagctgcacgacagcagcctggggctggcccgcacgccagctggcgaaccaggcactgaaccgccgcccccgctaccgcagcagccgccgatgacgctgcctcctctgcagccgccgctgccaaccccggggcccctgcagcccgggctccaccagggccaccagtgatcgaggctaagggtcctcccagcctcag

SEQ ID NO: 134157 - DNA, 688 bp, Homo sapiens
  Payload ID: 6206
  Gene Symbol: FEZF1
  Gene Name: FEZ family zinc finger 1
  ENST ID: ENST00000418046
  CDS Start-End: 582-688
gcccgaggtcggcgggacctgatcgaaggcagcgccgcgtcgaccaccccgggagccggacgcttgggagccccagcccggcagcggcgcccggtcactgaagttgcgccccaactcccagccgcctccaagcttctcgagctaagtttcctgacccctccaagggagtctcacagagctcggtggccctcggccttgccaacgtcactttaactgtttggaactcgtgagcaagaaccgagaagtggagagcccagccggggagttttcagcttttctgtttcacttcgggcttcttctattcaaatggctctgcgctggccaccgaatcctgaatgaggcggggctcctctgccccaactccagcagcgggaacttggttcccctgggcagccgggggcagggggcgccaaggccgtggcgataatgaaggctgagacggccaaggccagcgggtcggcgcggggcactcccgggccggagtggccatcggccggagttcaggaggtctgtgacaagcagggaacaaggcaacggacggcgcaacccagccccggctgacggacgctggcgactcagacatggacagtagctgccacaacgcgactaccaaaatgttagcgactgctccagctcggggcaacatgatgagcacgtccaaacccttggctttctccattgaacgaat

SEQ ID NO: 134158 - DNA, 2099 bp, Homo sapiens
  Payload ID: 6206
  Gene Symbol: FEZF1
  Gene Name: FEZ family zinc finger 1
  Uniprot ID: A0PJY2
  ENST ID: ENST00000442488
  CDS Start-End: 69-1496
gacaagcagggaacaaggcaacggacggcgcaacccagccccggctgacggacgctggcgactcagacatggacagtagctgccacaacgcgactaccaaaatgttagcgactgctccagctcggggcaacatgatgagcacgtccaaacccttggctttctccattgaacgaatcatggcgcgcaccccagagcccaaggccctgccagtcccccacttcctgcagggagccttacccaagggggaacccaagcactctctgcatctcaactcgtcgatcccctgcatgatccccttcgtgcctgtggcctacgacacgagccccaaggcaggagtgacgggctccgagccgcggaaggccagtctggaggccccggcggcgcccgcggcggtgccctcggctcccgcattcagctgcagcgacctgctcaactgcgcactgagtctcaagggcgacctggcccgcgacgcgctgccgctgcagcagtacaagctggtaaggccgcgtgtggtcaaccactcttcattccacgccatgggcgccttgtgctacctgaaccgaggtgacggcccatgccacccggcagccggcgtgaacatccacccggtggcctcctacttcctcagttcccctttgcacccgcagccaaaaacgtatttagccgaaaggaataaactggtggtcccggcggtggagaaatacccttctggagtagctttcaaagacctgtcccaggctcagctgcagcattacatgaaagaaagcgcccagcttctgtcggaaaaaatcgcgttcaaaacctcggatttcagccgaggctctcctaatgccaagcccaaagttttcacttgcgaagtgtgtggaaaggtctttaatgcgcactataacttaacccgtcacatgccagtgcacacaggagccagacccttcgtttgcaaagtgtgcggaaaaggtttcaggcaagcaagcaccctgtgcaggcacaagatcattcacacgcaggaaaaacctcacaaatgtaaccagtgtggcaaagcatttaatagaagttccactttaaacactcatacccgaatacacgcgggctacaaaccgtttgtgtgtgaattctgtggcaaagggtttcatcaaaaagggaattacaaaaaccacaagttgacccacagcggggagaagcagttcaagtgcaatatctgcaacaaggctttccaccaggtttacaacctcaccttccacatgcacacccacaacgacaagaagcctttcacctgccccacgtgcggcaagggtttctgcaggaactttgacctcaagaagcatgtccgcaagctgcacgacagcagcctggggctggcccgcacgccagctggcgaaccaggcactgaaccgccgcccccgctaccgcagcagccgccgatgacgctgcctcctctgcagccgccgctgccaaccccggggcccctgcagcccgggctccaccagggccaccagtgatcgaggctaagggtcctcccagcctcagccgtgcccccacgctgaggcagcggcagactagagctcctggtccgagttcgtctgcagaccccagggcatgttgggccccacacttcagggccgaccagaagcctctgcatcccctggcctttcgcctcttgcatgcacctgctaaatggttttgtgtattatattctatataggcactaacaattatgaaaaatttggagggttttgcttgttttctgtttttctttttctttttttttaatttggaaagacttttcatcttgggtggagagatggtgtttattttgttttgttttgtttaaacaaatttctgctatatttattgagatctgtattattctacccgggaatgctgcatcattttaattttattattgtatatatttccattgtgttgattctccggtctcaagatgtctgctggatgttgatcatttcctctttccctgaagtaacaaaacactgtgtgtatgtcatatatacacgcatagatgtgtgcgcccataggggtacattccacattcgtgagcacacacccatacacattagataagggtggttcattatggatga

SEQ ID NO: 134159 - DNA, 2074 bp, Homo sapiens
  Payload ID: 6207
  Gene Symbol: FEZF2
  Gene Name: FEZ family zinc finger 2
  Uniprot ID: Q8TBJ5
  ENST ID: ENST00000283268
  CDS Start-End: 296-1675
cttttaaagtttgaggggcggtggtggcggcggccggcaggcgcgggggaacacaggggccgctacgggagccgcgccgccgcccatgtcattccacttcaagtgacttcatgtgatgtcagctgaatgtaaaagacagtgatctcacgcggaggggaagatgtttgccatcaaaatgtgacagaagagacacgctgcatggctcggaacgcatctccttggtggtgggggaaagagacttagaggagagaggctgcgccctggcccagcctggctcggctcagctccgcgcgccatggcaagctcggcttccctggagaccatggtgcccccggcctgcccgcgcgccggagcgtcgccggccacttccaagacactggccttttccatcgagcgcatcatggccaagacgtcggagccccgtgcgccctttgagccccggcctggagcgctagaggcggacggcagccagggcaagaaactgctcaacctctgctcgccgctgccctgtatgatccccctccagcccctaggctacgaggtgccgtcaaagacactgctcagttactcggagctctggaaaagcagcctccgggcgggcggcggcggaggcggcggcggcggtggcggcggcggcggcgggggggccccagtgtgcggcgccagcggcttgtgcaaaaccaactgtggcgtgtgctgcaaggccgagctgggcctggcgccgtccgcgctgcccgcgggcagggtcatcaagccgcaggtcatcaaccaggctgtggggctgccggccagcggctcgctctactacttcaactacctggactcgaccgcgtacccgccgtctgagctcctcagcggccacctcttcccgtctggcctcctcaatgcgcaggcccccgccgccctggctgctcaccccaagctctttctgctggagaacgccaagctggccggcctggctgcggacaagttcccccacccggctccctatccccataaggagcgcttgccggcgccgctggagcaggtactgaaggaaaactcggccctgactgccgagcgcggaggcgtcaagggccacagcaagctgccaggaggctccgcagatggcaagcccaaaaacttcacctgcgaggtgtgcggcaaggtgtttaacgctcactataatctcacccgccacatgccggtccacaccggagccagaccgttcgtgtgcaaagtctgcggcaaaggctttcgccaggccagcacgctctgcaggcacaaaattatccacacccaggaaaagccacataaatgcaaccagtgcggcaaagcgttcaaccgcagctccacgctcaacacgcatatccgcatccacgcgggctacaagcccttcgtctgcgaattttgcggcaaaggctttcaccaaaaagggaactacaagaaccacaagctgacccacagcggcgagaagcagtacaaatgtaccatctgcaacaaggccttccaccaggtctacaacctaaccttccatatgcacacccacaacgacaagaagcctttcacgtgcgccacttgcggcaaagggttttgcagaaactttgacttaaagaaacatgtgcgcaaactccacgacagcgtgggccctgctgccccctccgcaaaggacctgactaggacagtgcagagctgagagctactgccttgcccttccttccctccctgtaccacctgaaaacagatcacacatataaacttatttctaaaattaaaagaaaaaaaaactatagcagagaggctaaaatctatttatcgaaaccagcatatttttggaaagctaaatgtttcctcgatgactggcagcaaactcgtggcccccacctttgtatattcaggaaacttatttaaatccagtgcgccgaaacgtatttaattccaggcctccgcttctcctggggcagccagttttaaccccagcctgtcaccgtgagcgccccagaagagcgcggcgcccctagccatctttatacagccatgtaaatcctcctgtacaagcgaacacggaatatatacatatataactcaataaaca

SEQ ID NO: 134160 - DNA, 2001 bp, Homo sapiens
  Payload ID: 6207
  Gene Symbol: FEZF2
  Gene Name: FEZ family zinc finger 2
  Uniprot ID: Q8TBJ5
  ENST ID: ENST00000486811
  CDS Start-End: 220-1599
gatgggaccttctcaattatacaaacatgacttcatgtgatgtcagctgaatgtaaaagacagtgatctcacgcggaggggaagatgtttgccatcaaaatgtgacagaagagacacgctgcatggctcggaacgcatctccttggtggtgggggaaagagacttagaggagagaggctgcgccctggcccagcctggctcggctcagctccgcgcgccatggcaagctcggcttccctggagaccatggtgcccccggcctgcccgcgcgccggagcgtcgccggccacttccaagacactggccttttccatcgagcgcatcatggccaagacgtcggagccccgtgcgccctttgagccccggcctggagcgctagaggcggacggcagccagggcaagaaactgctcaacctctgctcgccgctgccctgtatgatccccctccagcccctaggctacgaggtgccgtcaaagacactgctcagttactcggagctctggaaaagcagcctccgggcgggcggcggcggaggcggcggcggcggtggcggcggcggcggcgggggggccccagtgtgcggcgccagcggcttgtgcaaaaccaactgtggcgtgtgctgcaaggccgagctgggcctggcgccgtccgcgctgcccgcgggcagggtcatcaagccgcaggtcatcaaccaggctgtggggctgccggccagcggctcgctctactacttcaactacctggactcgaccgcgtacccgccgtctgagctcctcagcggccacctcttcccgtctggcctcctcaatgcgcaggcccccgccgccctggctgctcaccccaagctctttctgctggagaacgccaagctggccggcctggctgcggacaagttcccccacccggctccctatccccataaggagcgcttgccggcgccgctggagcaggtactgaaggaaaactcggccctgactgccgagcgcggaggcgtcaagggccacagcaagctgccaggaggctccgcagatggcaagcccaaaaacttcacctgcgaggtgtgcggcaaggtgtttaacgctcactataatctcacccgccacatgccggtccacaccggagccagaccgttcgtgtgcaaagtctgcggcaaaggctttcgccaggccagcacgctctgcaggcacaaaattatccacacccaggaaaagccacataaatgcaaccagtgcggcaaagcgttcaaccgcagctccacgctcaacacgcatatccgcatccacgcgggctacaagcccttcgtctgcgaattttgcggcaaaggctttcaccaaaaagggaactacaagaaccacaagctgacccacagcggcgagaagcagtacaaatgtaccatctgcaacaaggccttccaccaggtctacaacctaaccttccatatgcacacccacaacgacaagaagcctttcacgtgcgccacttgcggcaaagggttttgcagaaactttgacttaaagaaacatgtgcgcaaactccacgacagcgtgggccctgctgccccctccgcaaaggacctgactaggacagtgcagagctgagagctactgccttgcccttccttccctccctgtaccacctgaaaacagatcacacatataaacttatttctaaaattaaaagaaaaaaaaactatagcagagaggctaaaatctatttatcgaaaccagcatatttttggaaagctaaatgtttcctcgatgactggcagcaaactcgtggcccccacctttgtatattcaggaaacttatttaaatccagtgcgccgaaacgtatttaattccaggcctccgcttctcctggggcagccagttttaaccccagcctgtcaccgtgagcgccccagaagagcgcggcgcccctagccatctttatacagccatgtaaatcctcctgtacaagcgaacacggaatatatacatatataactcaataaacagaa

SEQ ID NO: 134161 - DNA, 1918 bp, Homo sapiens
  Payload ID: 6207
  Gene Symbol: FEZF2
  Gene Name: FEZ family zinc finger 2
  Uniprot ID: Q8TBJ5
  ENST ID: ENST00000475839
  CDS Start-End: 148-1527
cctgttcatttgaatgcaaatgggtgacccgggcccgactaggtgcttattaaattgcagttttcccccctgccttttccggaatgcagacttagaggagagaggctgcgccctggcccagcctggctcggctcagctccgcgcgccatggcaagctcggcttccctggagaccatggtgcccccggcctgcccgcgcgccggagcgtcgccggccacttccaagacactggccttttccatcgagcgcatcatggccaagacgtcggagccccgtgcgccctttgagccccggcctggagcgctagaggcggacggcagccagggcaagaaactgctcaacctctgctcgccgctgccctgtatgatccccctccagcccctaggctacgaggtgccgtcaaagacactgctcagttactcggagctctggaaaagcagcctccgggcgggcggcggcggaggcggcggcggcggtggcggcggcggcggcgggggggccccagtgtgcggcgccagcggcttgtgcaaaaccaactgtggcgtgtgctgcaaggccgagctgggcctggcgccgtccgcgctgcccgcgggcagggtcatcaagccgcaggtcatcaaccaggctgtggggctgccggccagcggctcgctctactacttcaactacctggactcgaccgcgtacccgccgtctgagctcctcagcggccacctcttcccgtctggcctcctcaatgcgcaggcccccgccgccctggctgctcaccccaagctctttctgctggagaacgccaagctggccggcctggctgcggacaagttcccccacccggctccctatccccataaggagcgcttgccggcgccgctggagcaggtactgaaggaaaactcggccctgactgccgagcgcggaggcgtcaagggccacagcaagctgccaggaggctccgcagatggcaagcccaaaaacttcacctgcgaggtgtgcggcaaggtgtttaacgctcactataatctcacccgccacatgccggtccacaccggagccagaccgttcgtgtgcaaagtctgcggcaaaggctttcgccaggccagcacgctctgcaggcacaaaattatccacacccaggaaaagccacataaatgcaaccagtgcggcaaagcgttcaaccgcagctccacgctcaacacgcatatccgcatccacgcgggctacaagcccttcgtctgcgaattttgcggcaaaggctttcaccaaaaagggaactacaagaaccacaagctgacccacagcggcgagaagcagtacaaatgtaccatctgcaacaaggccttccaccaggtctacaacctaaccttccatatgcacacccacaacgacaagaagcctttcacgtgcgccacttgcggcaaagggttttgcagaaactttgacttaaagaaacatgtgcgcaaactccacgacagcgtgggccctgctgccccctccgcaaaggacctgactaggacagtgcagagctgagagctactgccttgcccttccttccctccctgtaccacctgaaaacagatcacacatataaacttatttctaaaattaaaagaaaaaaaaactatagcagagaggctaaaatctatttatcgaaaccagcatatttttggaaagctaaatgtttcctcgatgactggcagcaaactcgtggcccccacctttgtatattcaggaaacttatttaaatccagtgcgccgaaacgtatttaattccaggcctccgcttctcctggggcagccagttttaaccccagcctgtcaccgtgagcgccccagaagagcgcggcgcccctagccatctttatacagccatgtaaatcctcctgtacaagcgaacacggaatatatacatatataactc

SEQ ID NO: 134162 - DNA, 1484 bp, Homo sapiens
  Payload ID: 6208
  Gene Symbol: FGFR1OP
  Gene Name: FGFR1 oncogene partner
  Uniprot ID: O95684
  ENST ID: ENST00000349556
  CDS Start-End: 6-1145
gcaagatggcggcgacggcggccgcagtggtggccgaggaggacacggagctgcgggacctgctggtgcagacgctggagaacagcggggtcctgaaccgcatcaaggctgaactccgagcagctgtgtttttagcactagaggagcaagaaaaagtagagaacaaaactcctttagttaatgagagcctgaaaaagtttttaaataccaaagacggtcgtttagtggctagtcttgttgcagaatttcttcagttttttaaccttgactttactttggctgtttttcaacctgaaactagcacactgcaaggtctcgaaggtcgagagaatttagcccgagatttaggtataattgaagcagaaggtactgtgggtggacccttattattagaagtgatcaggcgctgtcaacagaaagaaaaagggccaaccactggggaaggtgcacttgatctatctgatgtacattctccaccaaagtcaccagagggaaaaacaagtgcacagacaacaccaagtaagaaggccaatgatgaggccaatcagagtgatacaagtgtctccttgtcagaacccaagagcaaaagcagccttcacttactgtcccatgaaacaaaaattggatcttttctaagcaacagaactttagatggcaaagacaaagctggcctttgtccagatgaagatgatatggaaggagattctttctttgatgatcccattcctaagccagagaaaacttacggtttgaggaaggaacctaggaagcaagcaggaagtctggcctcgctctcggatgcaccccccttaaaaagtggactcagctccctggcgggagccccttctttaaaagactctgagagtaaaaggggaaatacagttttgaaagatctgaaattgatcagtgataaaattggatcacttggattaggaactggagaagatgatgactatgttgatgattttaatagtaccagccatcgctcagagaaaagtgagataagtattggtgaagagatagaagaagacctttctgtggaaatagatgacatcaataccagtgataagcttgatgacctcacacaagatctgactgtatcccagctcagtgatgttgcggattatctggaagatgttgcatagacacgaagaaggaagtattctaattaacaaggacagaggactgaccggttccattttttttttttccagacaatcactcagctggaatgtctgctctctattggtgccttgcatttcaaaaacactgcagatattttttaaaagtaattttcattttactaaacaaaatacttcctatttgagcccatgtgtggaagatttaatattcttaatttaactgtacatttctttatggaaattgattatctacactcagtttcattacagggaaggaacccatgaaaacatcagtgttaagagcatgatgaaaggtgtcaataaagccgtaggatcgcgcaa

SEQ ID NO: 134163 - DNA, 14166 bp, Homo sapiens
  Payload ID: 6208
  Gene Symbol: FGFR1OP
  Gene Name: FGFR1 oncogene partner
  Uniprot ID: O95684
  ENST ID: ENST00000366847
  CDS Start-End: 232-1431
cgccgaccctaagtttcggcgctcagtggtccggcgctccccaaggctcggtgtccagcgtcaaccccgaggtctctatgccccgcctcccgacgccagggggcagggccagcgcgctgcgcgtcggggcggggctttggctgcgtcggccgcgtagcccgcgcgcggagcgtaccctgctgcggccgttggccgttagcgcggcttcggcggttgtcttggagaagcaagatggcggcgacggcggccgcagtggtggccgaggaggacacggagctgcgggacctgctggtgcagacgctggagaacagcggggtcctgaaccgcatcaaggctgaactccgagcagctgtgtttttagcactagaggagcaagaaaaagtagagaacaaaactcctttagttaatgagagcctgaaaaagtttttaaataccaaagacggtcgtttagtggctagtcttgttgcagaatttcttcagttttttaaccttgactttactttggctgtttttcaacctgaaactagcacactgcaaggtctcgaaggtcgagagaatttagcccgagatttaggtataattgaagcagaaggtactgtgggtggacccttattattagaagtgatcaggcgctgtcaacagaaagaaaaagggccaaccactggggaaggtgcacttgatctatctgatgtacattctccaccaaagtcaccagagggaaaaacaagtgcacagacaacaccaagtaagataccaaggtataaaggacaaggtaagaagaagacaagcgggcagaaggctggtgacaagaaggccaatgatgaggccaatcagagtgatacaagtgtctccttgtcagaacccaagagcaaaagcagccttcacttactgtcccatgaaacaaaaattggatcttttctaagcaacagaactttagatggcaaagacaaagctggcctttgtccagatgaagatgatatggaaggagattctttctttgatgatcccattcctaagccagagaaaacttacggtttgaggaaggaacctaggaagcaagcaggaagtctggcctcgctctcggatgcaccccccttaaaaagtggactcagctccctggcgggagccccttctttaaaagactctgagagtaaaaggggaaatacagttttgaaagatctgaaattgatcagtgataaaattggatcacttggattaggaactggagaagatgatgactatgttgatgattttaatagtaccagccatcgctcagagaaaagtgagataagtattggtgaagagatagaagaagacctttctgtggaaatagatgacatcaataccagtgataagcttgatgacctcacacaagatctgactgtatcccagctcagtgatgttgcggattatctggaagatgttgcatagacacgaagaaggaagtattctaattaacaaggacagaggactgaccggttccattttttttttttccagacaatcactcagctggaatgtctgctctctattggtgccttgcatttcaaaaacactgcagatattttttaaaagtaattttcattttactaaacaaaatacttcctatttgagcccatgtgtggaagatttaatattcttaatttaactgtacatttctttatggaaattgattatctacactcagtttcattacagggaaggaacccatgaaaacatcagtgttaagagcatgatgaaaggtgtcaataaagccgtaggatcgcgcaaccctttgtgtgtgtggctgctggtacgtgtgatctttgaaaaccttggctttagccctctggaatcagagcttacccaccatagtatattttgatattaggtggttctacacatagttggcaaaatgacttggtaaatttgtaatgctgaagtatattagtataagttaaatttgatgtgtcaactttattttgtatttccttccatttggaaggtttgttagaccattaaggttatattaaagtactcttgtgtgtgctatttagttttgcttgttttaaagaaatctagaagtggttatgagttttaattcatagaattgtcaataacataacatttgcaatcgtcattcctcctgttatccatgtaagcagctttagtcgtaggttctcttcattataatttattatctgtaaagattccttgaaacttaaatgcatctgaaaccattaagcagtgcttttatttcagatctgtaagttaattgtattaaaatccaaattggaatgaaatagtagtaatggcctaagaccatgttcagtttgacaagctttatatactgtacataatttcattgtaacccttaaaaatagagccaataatagaatttccacagtctcatttatacggttaaagcattattgctattatgtaggtcacggatgtttataatactaaagtattttaaaatgtgcaagtagaaaaaacagtagaaagtgatgcatgcatatttatatataagtaaagcaggattgtgctgtttttgcactttataatttcaattaagttgcggctttttactacaagttaactttattagtaaaaggagcaaattagacctaattcattgatctcggttaagtgagcagactgcatgacttgtgtaatgccagtttctcatttcatattagcctaaatattacagaaattactccttgggctctaaaatgtagaggaaatgaaaatgtaaggattaaggctgtgtaacagaatctggctttttaaaatttaagtgaaactaagctgtaaacatcaagaggaagtaggacataaactgggccggtacagcctgggagccctgtgtatttctgccctccgtctgtgagctgctatctcagtctccttcagctcttcatgtcttagtaaacagcaccacgtgcagatgtaatcttgttgcagtcccccagtgtggttgttataaaatgcatttctttgtaagtcatctctgtaaacagtcactttctaaaagcactatagttctggtcccctggaatctggatcacatgtatgatttatttttaatatttgataggaactaggtttcagtgaaatgatttgaaagcatagcaggatgtggctttttaaatttatgaaactttcgaacagtagcaactgaaatttgtcacttttctgttacgcagagaatcagaccttttgataatatttgggagggtaaaagaaatatgccaaatatgaaacttttttgtcagcactacatacatcttttttttgcggggggcgggggggacagagtctcactgtgtcactcagactggagtacagtgatgcgatctcggctcactgcaacctccgcctcctgggttcaagcgattctcctgcttcagcctcctgagtagctgggattacaggtgcacaccaccacgcccggctaatttttgtatttttagtagagatggggtttcaccatgttggtcaggctggtcttgaactcctgacctcgttcctgccttagcctcctaaagtgccgggattacaggcgtgaaccaccgcacctggccagtactacatccattttattgaatgattttgaatgacttaaagttcaactatgaaaaagctttcttttcacatgtactttttgattaggtattatcaacttatgaaacttgaagatgtgaagtgacaggttttgcatgtgatgagtgttttctgttaaaaaataaatattgaaatattaacccattaaatacatttttatggtaacctatgttttacagtggagttttaaaaatgctaggtctttctttcattttattgataactacaaatgaataaaaagcatttattctctttgttgatattcggttgtgcttttatactttatgttggataacaacctgtgggcagttgtgtagatgccattagtccctgcctcatgcttgcccacagctcttcctcccctccttacttccctctcctgcccatgcaccagagctgtgccagcccactgctgcacagcctctgcacctgagcttgccaaagcccttcctgtctcaaggtgtgatatttgcccctccttgtctggaatgtccttcccctagaactgcatgaagctggtttatttcagtctcatgttcaaagacgcttccagacctaagggagatgtccattctcctccctgtccctgccccaccacttgcatttaccccttttattttattcatctcagcatactctgaaatggtcttgcttattttgtgtgtgtgtgtgtgtgtgtgtgtttaactatgagctcgtgagaacagggattttcttttaaactgctgtgtacctggcacaacatttgtcccctagtatgagcttggcatctttggggctgtaaacaggcttgagcactgacatggggcctggagaatgtggtttctggctaggcagctggaacaatctacaaaatctgaggggaaagctgtccttaccctaaacctggggaggtccctaggttcaagtctgcaggaaggggatctggttcaggagaaggccgtcctgtgaatttgccccacccaccaagctcagctggagcagggcctctgaaggaggtgccctctgtgtggctctgctgtggtgttggttcatgaaggacatgggaggggggcaggacaggagaggcagctcttcctggagaaaaacacacccagcccaagttggagccctcctgtggcattgggtggggaggattcccgccatcagttctctgtccatgggtgctagtctcacccctgccctccgagcagtccgtgctcccagtgtccctgtcctcttttttttttttttttttttttgaggtggagttttgttcttgttgcccaggctggagtgccatggggcgacctcggctcactgcaacccctgccttctgggttcaagtgattctcctgcctcagcctcccaagtagctgagattacaggtgcctgccaccatgcccagctaatttttataatttttttgtagagacgggatttcaccatgttggccaggctggtctcaaactcctgacctcaggtgatccacccgcctcagcctcccaaagtgctgggaatacaggtgtgagtcacggtgcccggcctagtcttcctgctctaggaagggacgtgtttggggaggaaatccagggcagctacctttgtgagttgtcctaatgctgcgttcagagttccacacgttcaacaagcatctgacatttaaggaaagtgaatgtatgtcatgaaagacagatgaacaaagaactgatcttgaagaaaatgtaatcaggaaacgagataattcaagaacaaaaacctgtgaaggactgaatgtgtcccccaaaatgtgtatgtcgaaacctaatcccacataggatggaattaggtagggcctctggaagttgatgagatcattagcgcccttataggaggcccgggagagctgctttgccccttccagcgtgtgaggacacagtgaggaggtgttgcctatgaggaaacaggccctcccagatggtgaacctgccggtaccttgatcttggacttaagccatctgagctgtgagccctacacttccattctttataaattatccagtccaaggtactttaggaacctgaatggattaagacaaacctgattatgccactccgagatttgaggtaacatttgaatctaaaagaggctatatgaaagaggttataataaaaatgatttttgactaaaaaattgttggcctaagataattcagtagcagggctgaataatgggatgactcaaaatcagtaagctcaaaggcaatttcaaagaaatctttatgtttagcaagaagaccaagatgacaagatgcgccaggagacttggccagaggacctccaggctgacaaagtttccccgaggaagtcagattggaaaagtgtcctcaggttcaaggaaacctgggtgtgcaccgggtgaatgagagtggcagacagaaggaaacagcaaggcctctgaggtaggagggacagcgtttttgaatgtgaaatttattccctgatacatgtttttaaaaatgaatcttgctgcccttagaaaatgaacccccgaacaaggtaaggtcgagctggcccctcgtgtcatccgactttgcgttgtggccctgcctgcagaaacgtgtgctctgctacagccctgggaggaggggccgggctcccaactcctgccccgcttctagcacatgctgtgcttggccacttctctgcctcttagtttaacagcagcactgggcaaggtttgccctctgcacaccagaccggcttcccaagaaccggggaagaggagagggcatgcctggggcctgagcttagtgggccgggtggaggcaggaggtactgcatggaggagcgtggacagtggcatgcaggaggccagtcattctgcggttttagctggaggtttgtttttggtagtttgtagaatcatcagatttgatgatgaaactttttttccataaatgttaaattttcagacacttgtattttttttttccttttttttttttgagactgagtcactgtcgcccaggctggagtgcagtggtactagctcggctcactgcaacctctgcctcccaggttcaagcgattctcctgcctcagcctcctgagtagctgggattacagatgtgtttcaccatgcccggcgaattttttttgtatttttagtagacacgggatctcaccgtgttggccaggctggtcttgaactcctgacctatggtgatccgcacccctccccgccccccccgcggcccagcctcccaaagtgctgggattacaggcatgagccactgtacccagccctgtattttctttaaaaaccaattttgggccgggcacggtggctcacgcctgtaatcccagcactttgggaggccgaggcaggcggatcacgaggtcaggagatcgagaccatcctggctaacatggtgaaaacccatctctactaaaaatacagaaaaaaaatgagctgggtgcgatggtgggtgcctgcagtcccagctactcgggaggctgaggcaggagaatggcgtgaacccaggaggcggagcttgcagtgagcccagatcacgcccctgcactccagcctgggtgacagagcgagactccgtctcaaaaacaacaacaacaacgaaaaaacgattttggcatgttttgtaagttgccagactattggatatacctcttaatcatactttgtttgaaatcctttgtggtttctaaagcactagtagctttctgaaaggaaaatttttaatgaatgaagcatgcttcatcctgcacatcccctcctgccccagcacccctactgcccatgcgcctctcctgccccagcacccctactgccccagtgccaggccttttctagcagctctcatgggttcatccctgctgcgggcattgctccaccaaggggcagtgctctccctgccggtaagtgttggaacttcacgtttccctctagttttctctttacattttaacatacactattatgtgtcaatatattaattatatattaattacatttatagaggttaggtatatatggcagatcatatctgagcgtgaattacattctccaatatttttatttgtcatgatttattgcagggttcacttatttgatctaccccaacttaacacacatttccaagaaaatatccatcacactagaaagaaagaaagaggaaggaaggaagggagggagggagagaaggagaaaggaagaaagggaaggaaaatggaatggaggaagggaaaaatggaaggaggaaggaaggaagggaaagaatgaagaaagccatttgttcctgcaaacctaaacctctttgtagtaagttctggcagaaggtgtgtttctggagttaaactacaggcttggaaatggaatttcttagcctaatttctaaattagaactgcttatgcaaattaacactccgtacatttcaacaagcagttggctgatttcttctgtccactccacctgcagatgcagaggtggccccatcctgtgatgtgccaccacatcccttttcagtgaagggctttgttggctgctgtgggcattctcatggcctctccagggatggcctccactgtagagacctatgtcaccaaggccaggccctctcagggggctccatccaacgaccattctgcctcagggtaagaggcccggccctctcagcctgagtccattctggctccagagctccctgagagcttgcctggcaagttactcttgcaattctagcttccagcaggcgttgatttctggggcacttttgataaactcctggcaggaaactcaatctctgggggtcagagtccacttcctggggagcccaatctgtgacccctaggagtggggaccatggaagcacttggctctccagcatgtgctgaatagggggcgctgcctgcaatgtccacgtggaaacctggctgggagaatgcctgtgtgctctgcatggggatgtaaaggtgtgagcaaaccttcttcagagaggggatgttcaatgcgaaatttgaacattgggacctgaaaaactgatgggctgatggggtctgcccatgattggcagccttcatagaatcacgagggaggagcacaggccaccctagacaggaggggtcccctactgacagggaggtgctgtcggggcagcaggcacgtgcaggaaaacggaaaagcagagtaattgaatgtaaatcatgcaactccactacagtggctagaagcctggatgggcaacttggctgagtgatgttgggcaagttatttaatatcagtattctcagttttctcatctgtaaaggggattaaatacttccttcccttacagggctgccctggtcttaagtaatgcccacagagagcttagcattgttcttggcaagtcactagtactcagtaaatactatttttattaagaaggtaagattcacaggacttagtgtcttaactagatgttgagagtaaggagaagagagaatacttctcggatgattgttcagtttctgatgaatgtctgttcccctttcaaaacctaattcagatgtcacttcctcctcaaagctctcgccccgcgccgagctactgtgatgtatttttatgacctggcagcttttttctcatatccctgttagcggtatgtggtaagaacatgagacacagaatcagaaaccatggatttctggtcttgactccactaccactcagaggaacctcacggtggatgccgtaagtgtttacactgaaaaggattttcacgaaaacctgcattttcatttcgttcacaagagaattatgagactagaaaaacaacaattcttagtataccacagactgtggtgcctaggaataacagacaagctttaactcacacgatgagcatctttatttagctctgcttttagatatctgcatgataaagatgagtgatccaacgttagaaatcatctggacattaaaactgaattgtaggcaggcgtggtggctcacacctgtaatcccagcacttacggagaccaaggcgggcagattgcttgagctcaggagtttgtgagactagcctgggcaacatagtaagacccctatctctacaaaaaatataaaaattagctaggcatcatggcctgtgcctgtagtcctagctattgaggaaactgatgcaggaggatcatttgagctcaggagtttgagaccattctgggcaatacggtgaaaccctgtctctacaaaaaaatgcaaagattagctaggcatgatggcacatgcctgtggtcccagctactcgggaggctgaggcaggaggattgcaggaggtttgcttgagccggggaggtcgagtctgcagtgaactgagattgcatcactgcactacagcctgggtgacagagtaagaccctatctcaaaaaaaagaactaattgtaacaaactatctttcaaattatatcaaaacagtgattcataaattccatgttgcccagagatcatgaggagctcttctatgatttgacagtgcaattactgaaggggaagacaccatgcaaatacatggtaaaaatattcaaattattactgatttgacacaaaatattgatgtaaataacataaaactgtaatatgccattatgatgacattaatgaaaaattggttaatgaatgtcattgaaagagcatgtacatcactaaatgttcttagtcactgaaagtgtgaaatagcctctaaactcatatgtggaaaaagaacttgaaaaaggtttccagaaatgtgacaattctagtactttcatgacattttaaaaaagggattgtaaagactgatgaaacccttaaaacctctcaagaattaaaaatcatttttgatcaacagagtaaactgattttttatctctgttgaaagatatttttaaaatcattgtcctatggaaaagtcatatagaacgtttgctgtttaatgtagcacagatgtatcaaaaagccatgccaggcagttatagatatcttagttttctggattttgtgacgtttgtggtatttgtcagatttttaaaatttgtgatttgttgggatttgttcctcattcacaggtaattttatatacttttgtattcactttcgaaaagaaggcaactctaaattttatgaacttcaagtgctataaaacaattaccacagtaaattttgaaaaattcaccccaaaaagaaaccttgtatccattggcagtaactccctatgctccgccattcctctcagctccctgtctggcaaccacttcctgtctcttcagagttgcctcttctggacattacatataaacggaattatacactatgtggccttttatgactggcttctttcacttagcataatgttttcaagagtcatctgtgttgtagcatttgtcagtacttcatttatttttgtttcctaacaatactccattgtagggattgaccacactttatccattcattggttgatggacatttgggttgtttccactttttctgctgttgtgaataacagtgctaagcacattcatatgcagtgtttgtgtagatatataatatgctttattttctcttgagtacataaaagtggagcctctgagtaatataataactctatgtttggtgttttgaagaattgctaaattgttttccaaagcagctgcaccattttatatccctaccagcaatgcatgaagcttccagtttctccacatcatcacgaatactccttattctctctctttttagatatagacattctggcaggtgtgacattgtatctcttgtggtttagatttgcatttggagcatgtcttatgtgcacttaaaaatattaatatctattctgctgttgttgggtaaactgttctatagatgttgatatggcttcgctgtgtccccactcaaaatctcatcttgacttgtaatccccataatctccatgtgtcaagggtgggaccaggtggaggtaattggatcatgagggtggttttccctactctgttttcatgatagtgagtctcacaaggtctgatggttttataagcatctggcatttcccctgcttgcactcaggctgtcctgccacactgtgaagaaggtgccttgcttctcctttgccttctgccatgagtgtaagtttcatgaggcctccccagccatgctgaactgtgagtcaattaaacctctttcctttataaattaccaagctgcggctatttcttcatagcagtgtgagaacggactaatacaggtgttttttaggtcttgttattgtgtcgttcacgtcttttatttccttgttgatcttactcttagttgttctatccatcattgaaaatggggcattggccaggcgtggtggctcacgcctgtaatcccagcactttgggaggccaagaccagcagatcacttgaggtcaggggttcgagaccagcgtggctaacatggagaactcctgtctctactaaaaatacaaaaattagtcaggtgtggcagtgcgtgcccgcctatagtcccatctacttgggaggctgaggcaggggaattgcttgaaccctggagtcagagtttgcagtgagctgagatcatgccactgcgctccagtctgggtgacagagtgagactcaaaaaagaaaaaaaaaaaaaaaaaaaaaaagaaagaaaatgagacattggatttgtaagtttctgacaggttcattttgcctgctgcccagatagagccgatttatgaggacagggaaattgcaatagagaaagagtttaatacatgtagaactggctaaacaagagactggagttttattattactcaaatcagcctccacaaaaatttggaggctaggtcttttcaaagatagtttggtgggcaggggtttgtgtactaagaaactaaatgtttcttgtgtactaagtcagcttctgggtgggggccagaggaccagttgagccaagaattcaagaggtacaggttcaagtagggccatctggttgtcagaaatgcaaaagcctggaaagtcatctcaaatgttaggttctacaatagtcaagttatttatagtaattgggaaagttgcaaatcttgtgacctctgtagaaaataggtggtaatctttacacctatatcttagtagaattcaggcccctcacttcctcctaacctggtagcctttcattagttttacaaaggcagtttaattttggggggcagggctattatcatctaaactataaactataatcgtttgtcccaaagttagcttggcccatgcccaggaatgaccaagggcaatttggagattaaagtcaagatggagttggttagatcagatctctttcactgttataattttctcactgttaaaatttacaaaggcagtttcaaaatctgaaacttttattgttaaattatgtatttattcctttagttctgtcatgttctgcttcttatattttggaactctgttgttaggtgcatacatatttataattgttatatcttcctgatggattggtattgtaatcactgtaaaatacactattatcattgtaaaatattcctttttatctctagtattttttgtctgtttgacttaaagtctattttgtttgatattagcatagctattcttgctcttactgtggcaatttgtatgatacctttttcttttagcctatttatatctttgaatcaaaagtttgtctcctgtagatagcatatagttggataatttttagttcttttgattggattgtttaattcattcatttttagtgttactattgatatggctggatttgtgtctgcaattttaatttttgttttctatatgtctcgtgtttttgtggctttgcttcttcttctttgctttcttttgcattaagtattttctagtttaacaacttaatttcttaaattatttttaactatatttttacgtatttccttaatgaatgcttgatggctcacaatctccttctcagtttatcagaatctacttaagtttatactaacttatgtccagtgagatagaaacacatttcttctttatagctctaggtcctcttcacttgtttttgtgctattattgttatacttactacctctgtatatgttacaagcccaagaatactattctacttatttatataattttatgttttttaaagaacctgagactggaagtgagggaaatagggcgtgcaggaaggaaggaagaggaaggaaaagtgtgtgaaagggggctccacctcctttagtggataccctgagcttatttccaggggcctttgtaaattcccagtgacaactctttggaagatgaaatccccctcttccctgcatcttattagaacagtgtatcctggaggacatcccttgcctttcaccaagtgaccctatactggcggcagaacttctcgattttgcggatttcaaaatggctccacgtactcatagttttcatgacagacttcattgcgatagtcaaatactgttccacttactgcagttgcctacagtctgggttttgttcagttgaaattaaataaattttatgcacaaa

SEQ ID NO: 134164 - DNA, 3451 bp, Homo sapiens
  Payload ID: 6208
  Gene Symbol: FGFR1OP
  Gene Name: FGFR1 oncogene partner
  ENST ID: ENST00000622353
  CDS Start-End: 97-1152
tttggctgcgtcggccgcgtagcccgcgcgcggagcgtaccctgctgcggccgttggccgttagcgcggcttcggcggttgtcttggagaagcaagatggcggcgacggcggccgcagtggtggccgaggaggacacggagctgcgggacctgctggtgcagacgctggagaacagcggggtcctgaaccgcatcaaggctgaactccgagcagctgtgtttttagcactagaggagcaagaaaaagtagagaacaaaactcctttagttaatgagagcctgaaaaagtttttaaataccaaagacggtcgtttagtggctagtcttgttgcagaatttcttcagttttttaaccttgactttactttggctgtttttcaacctgaaactagcacactgcaaggtctcgaaggtcgagagaatttagcccgagatttaggtataattgaagcagaaggtactgtgggtggacccttattattagaagtgatcaggcgctgtcaacagaaagaaaaagggccaaccactggggaaaaggccaatgatgaggccaatcagagtgatacaagtgtctccttgtcagaacccaagagcaaaagcagccttcacttactgtcccatgaaacaaaaattggatcttttctaagcaacagaactttagatggcaaagacaaagctggcctttgtccagatgaagatgatatggaaggagattctttctttgatgatcccattcctaagccagagaaaacttacggtttgaggaaggaacctaggaagcaagcaggaagtctggcctcgctctcggatgcaccccccttaaaaagtggactcagctccctggcgggagccccttctttaaaagactctgagagtaaaaggggaaatacagttttgaaagatctgaaattgatcagtgataaaattggatcacttggattaggaactggagaagatgatgactatgttgatgattttaatagtaccagccatcgctcagagaaaagtgagataagtattggtgaagagatagaagaagacctttctgtggaaatagatgacatcaataccagtgataagacaatcactcagctggaatgtctgctctctattggtgccttgcatttcaaaaacactgcagatattttttaaaagtaattttcattttactaaacaaaatacttcctatttgagcccatgtgtggaagatttaatattcttaatttaactgtacatttctttatggaaattgattatctacactcagtttcattacagggaaggaacccatgaaaacatcagtgttaagagcatgatgaaaggtgtcaataaagccgtaggatcgcgcaaccctttgtgtgtgtggctgctggtacgtgtgatctttgaaaaccttggctttagccctctggaatcagagcttacccaccatagtatattttgatattaggtggttctacacatagttggcaaaatgacttggtaaatttgtaatgctgaagtatattagtataagttaaatttgatgtgtcaactttattttgtatttccttccatttggaaggtttgttagaccattaaggttatattaaagtactcttgtgtgtgctatttagttttgcttgttttaaagaaatctagaagtggttatgagttttaattcatagaattgtcaataacataacatttgcaatcgtcattcctcctgttatccatgtaagcagctttagtcgtaggttctcttcattataatttattatctgtaaagattccttgaaacttaaatgcatctgaaaccattaagcagtgcttttatttcagatctgtaagttaattgtattaaaatccaaattggaatgaaatagtagtaatggcctaagaccatgttcagtttgacaagctttatatactgtacataatttcattgtaacccttaaaaatagagccaataatagaatttccacagtctcatttatacggttaaagcattattgctattatgtaggtcacggatgtttataatactaaagtattttaaaatgtgcaagtagaaaaaacagtagaaagtgatgcatgcatatttatatataagtaaagcaggattgtgctgtttttgcactttataatttcaattaagttgcggctttttactacaagttaactttattagtaaaaggagcaaattagacctaattcattgatctcggttaagtgagcagactgcatgacttgtgtaatgccagtttctcatttcatattagcctaaatattacagaaattactccttgggctctaaaatgtagaggaaatgaaaatgtaaggattaaggctgtgtaacagaatctggctttttaaaatttaagtgaaactaagctgtaaacatcaagaggaagtaggacataaactgggccggtacagcctgggagccctgtgtatttctgccctccgtctgtgagctgctatctcagtctccttcagctcttcatgtcttagtaaacagcaccacgtgcagatgtaatcttgttgcagtcccccagtgtggttgttataaaatgcatttctttgtaagtcatctctgtaaacagtcactttctaaaagcactatagttctggtcccctggaatctggatcacatgtatgatttatttttaatatttgataggaactaggtttcagtgaaatgatttgaaagcatagcaggatgtggctttttaaatttatgaaactttcgaacagtagcaactgaaatttgtcacttttctgttacgcagagaatcagaccttttgataatatttgggagggtaaaagaaatatgccaaatatgaaacttttttgtcagcactacatacatcttttttttgcggggggcgggggggacagagtctcactgtgtcactcagactggagtacagtgatgcgatctcggctcactgcaacctccgcctcctgggttcaagcgattctcctgcttcagcctcctgagtagctgggattacaggtgcacaccaccacgcccggctaatttttgtatttttagtagagatggggtttcaccatgttggtcaggctggtcttgaactcctgacctcgttcctgccttagcctcctaaagtgccgggattacaggcgtgaaccaccgcacctggccagtactacatccattttattgaatgattttgaatgacttaaagttcaactatgaaaaagctttcttttcacatgtactttttgattaggtattatcaacttatgaaacttgaagatgtgaagtgacaggttttgcatgtgatgagtgttttctgttaaaaaataaatattgaaatattaacccattaaatacatttttatggtaacctatgttttacagtggagttttaaaaatgctaggtctttctttcattttattgataactacaaatgaataaaaagcatttattctctttgttgata

SEQ ID NO: 134165 - DNA, 2924 bp, Homo sapiens
  Payload ID: 6209
  Gene Symbol: FGFR1OP2
  Gene Name: FGFR1 oncogene partner 2
  Uniprot ID: Q9NVK5
  ENST ID: ENST00000229395
  CDS Start-End: 343-1104
agggccccgccctgccttctggggcaaagcggagagtggtcggttctgccccacagtaacgcgaggaaagaaatctcgcgaggctggagttctccgggagcgccggtcggaggcggtcggcggaggtgtctaccccgccggtgatggcgttgaacgccactggcttcccggccttccgtccgctgcctccgtccgattctgcgtctgcttgctgaggaggcggattaggggggcgcggagtctcttcccttgagtgcataggtcccggttggtagagggtttgagtccgcatcgccacagctgaaggctgcgagggactaagagcagaatatatctttagaaatgagttgcacaattgagaaggcacttgccgacgctaaagctcttgttgaaagattaagagatcatgacgatgcagcagaatctctgattgagcaaaccacagctctcaacaagcgagtagaagccatgaaacagtatcaggaagaaattcaagaacttaatgaagtcgcgagacatcggccacggtccacgttagttatgggaatccagcaagaaaacagacaaatcagagagttgcaacaagaaaacaaagaattacgtacatctctggaagaacatcagtcggccttggaacttataatgagcaagtaccgagaacaaatgtttagattgctaatggctagcaaaaaagatgatccgggtataataatgaagttaaaagagcagcactccaagattgacatggtacatcgtaacaagtccgaaggattcttccttgatgcatctcgacacatccttgaagcacctcaacatggactggagagaaggcacttggaagcaaatcagaatgaactgcaagcacatgttgaccagataactgaaatggcagcagtaatgaggaaagccattgaaattgacgagcaacagggttgcaaggaacaagaacgaatatttcaacttgaacaagaaaacaaaggcttgagagagatccttcaaataactcgagaatcatttttgaacctaaggaaagatgatgcgtcggaaagtacttctttgtcagcattagtgaccaacagtgatttgagtctgaggaagagctgaagagtttctgagtctgtgagcttcttacatggctccaaatggtcaaataagtgaatgaatgaatggacagaaaattcaatcctttatttttttctctgtaaatatgtacagtgcacgggctatgagatagcaacaaaaaatgcatagttaatggtcatagactttattccaaaacataattggaaaatagaaactgagccattgccaaatggtaaagaaatgaaaagttttcacagtgactactgaatataccaagagcttttggcagtactgctggctttctgggtgattaattaggtaaacttgaatattcccagtaaatgtttgagaatgcataaaattataccaatttaaaaatataaatttttgccactgttttgtgaacggaggatttgtacgctaaatttcatccttatttggcgtcaaagttgatgcaaagtttatgtaccatgagacttctagtgattgcctactttcacatttatttaaatttttgtgaaagaaaatacagttttaaaggctataggaatgtgttatatgtaccttaaacagataatttaattttagcaatttatcataactgatacttagctaacaattgtccataacttgtttaagtgtaagaaataccatttcaggaatgaaaaagaaggaatactactttctaagaaagaagatcttataatagacatatttagtaggttaaactactcctttgaaagaataagttttggttcaaagtcaataatgaagacgagatttgtttttctcttctctggctgatttttaaggatattatgtagttcatttagttaacagaattgaaatgtttgatatggcaagataggtatggtaatttcaaagtgaattgggaattcctctggctcatagaacccttttttttttcctttaagtattcttgagatacaaaaaaaaaaagtaaatacaatttcaaaaaaaaagttccggatctgtttttaagctccatctggtcctcataacctgcaagatttttcttaaaacctttcagctgaaagtgggggtaaaggtggagtaatctgtggatttgtttctgttgtcttttaaaatgtcaaatatataatatgtaatttttttaaaaaccaccagatacagaaatgtgctttaacatcagttgaaacctaaattttcttatgttgtggtgattgtattaaaaagggataaaagaagagtgtcaaacatggttaaatatattgtactcatttatgttgaatacgtattaaaattaagacaaatggaaaattatactttgagtatataatttgttaaatattactttatatggtaattttatgtataatttcatatattggtaaaattcaaaactacacttgagaatttttttatcttaagtttggggtgaatggggtggatgagactgattgaatagaaaagggctaatggcccaaacattatatagatttctttttttcagtcagaggccttatttgatattttataaataaatgacagtttttatttttaaactttttattgtttttgggaaagtattccttaatttaatgacacattcattcagatacttcttatccctgctaataaaggaaatctatttcaagctacaccattgagattaagtctgaggcagttcattgaggcagctctactataaaagcttacttgataaataattatttttgtaaacaagttgggttaacttattcttcgtctttttgcttggatatgaatttaaggtcttcatgtttaaagacatttactttgttatttagtgacacatttccatcctatttttttttttt

SEQ ID NO: 134166 - DNA, 2790 bp, Homo sapiens
  Payload ID: 6209
  Gene Symbol: FGFR1OP2
  Gene Name: FGFR1 oncogene partner 2
  Uniprot ID: Q9NVK5
  ENST ID: ENST00000327214
  CDS Start-End: 226-873
cggcggaggtgtctaccccgccggtgatggcgttgaacgccactggcttcccggccttccgtccgctgcctccgtccgattctgcgtctgcttgctgaggaggcggattaggggggcgcggagtctcttcccttgagtgcataggtcccggttggtagagggtttgagtccgcatcgccacagctgaaggctgcgagggactaagagcagaatatatctttagaaatgagttgcacaattgagaaggcacttgccgacgctaaagctcttgttgaaagattaagagatcatgacgatgcagcagaatctctgattgagcaaaccacagctctcaacaagcgagtagaagccatgaaacagtatcaggaagaaattcaagaacttaatgaagtcgcgagacatcggccacggtccacgttagttatgggaatccagcaagaaaacagacaaatcagagagttgcaacaagaaaacaaagaattacgtacatctctggaagaacatcagtcggccttggaacttataatgagcaagtaccgagaacaaatgtttagattgctaatggctagcaaaaaagatgatccgggtataataatgaagttaaaagagcagcactccaaggaactgcaagcacatgttgaccagataactgaaatggcagcagtaatgaggaaagccattgaaattgacgagcaacagggttgcaaggaacaagaacgaatatttcaacttgaacaagaaaacaaaggcttgagagagatccttcaaataactcgagaatcatttttgaacctaaggaaagatgatgcgtcggaaagtacttctttgtcagcattagtgaccaacagtgatttgagtctgaggaagagctgaagagtttctgagtctgtgagcttcttacatggctccaaatggtcaaataagtgaatgaatgaatggacagaaaattcaatcctttatttttttctctgtaaatatgtacagtgcacgggctatgagatagcaacaaaaaatgcatagttaatggtcatagactttattccaaaacataattggaaaatagaaactgagccattgccaaatggtaaagaaatgaaaagttttcacagtgactactgaatataccaagagcttttggcagtactgctggctttctgggtgattaattaggtaaacttgaatattcccagtaaatgtttgagaatgcataaaattataccaatttaaaaatataaatttttgccactgttttgtgaacggaggatttgtacgctaaatttcatccttatttggcgtcaaagttgatgcaaagtttatgtaccatgagacttctagtgattgcctactttcacatttatttaaatttttgtgaaagaaaatacagttttaaaggctataggaatgtgttatatgtaccttaaacagataatttaattttagcaatttatcataactgatacttagctaacaattgtccataacttgtttaagtgtaagaaataccatttcaggaatgaaaaagaaggaatactactttctaagaaagaagatcttataatagacatatttagtaggttaaactactcctttgaaagaataagttttggttcaaagtcaataatgaagacgagatttgtttttctcttctctggctgatttttaaggatattatgtagttcatttagttaacagaattgaaatgtttgatatggcaagataggtatggtaatttcaaagtgaattgggaattcctctggctcatagaacccttttttttttcctttaagtattcttgagatacaaaaaaaaaaagtaaatacaatttcaaaaaaaaagttccggatctgtttttaagctccatctggtcctcataacctgcaagatttttcttaaaacctttcagctgaaagtgggggtaaaggtggagtaatctgtggatttgtttctgttgtcttttaaaatgtcaaatatataatatgtaatttttttaaaaaccaccagatacagaaatgtgctttaacatcagttgaaacctaaattttcttatgttgtggtgattgtattaaaaagggataaaagaagagtgtcaaacatggttaaatatattgtactcatttatgttgaatacgtattaaaattaagacaaatggaaaattatactttgagtatataatttgttaaatattactttatatggtaattttatgtataatttcatatattggtaaaattcaaaactacacttgagaatttttttatcttaagtttggggtgaatggggtggatgagactgattgaatagaaaagggctaatggcccaaacattatatagatttctttttttcagtcagaggccttatttgatattttataaataaatgacagtttttatttttaaactttttattgtttttgggaaagtattccttaatttaatgacacattcattcagatacttcttatccctgctaataaaggaaatctatttcaagctacaccattgagattaagtctgaggcagttcattgaggcagctctactataaaagcttacttgataaataattatttttgtaaacaagttgggttaacttattcttcgtctttttgcttggatatgaatttaaggtcttcatgtttaaagacatttactttgttatttagtgacacatttccatcctattttttttttttttttggttgttgttaaacagaaccttaagtttatgtttgaggtatgtactgcataggaacctattttattattaaagatgaatgattaaaattggta

SEQ ID NO: 134167 - DNA, 956 bp, Homo sapiens
  Payload ID: 6209
  Gene Symbol: FGFR1OP2
  Gene Name: FGFR1 oncogene partner 2
  Uniprot ID: Q9NVK5
  ENST ID: ENST00000546072
  CDS Start-End: 229-747
ggtcggcggaggtgtctaccccgccggtgatggcgttgaacgccactggcttcccggccttccgtccgctgcctccgtccgattctgcgtctgcttgctgaggaggcggattaggggggcgcggagtctcttcccttgagtgcataggtcccggttggtagagggtttgagtccgcatcgccacagctgaaggctgcgagggactaagagcagaatatatctttagaaatgagttgcacaattgagaaggcacttgccgacgctaaagctcttgttgaaagattaagagatcatgacgatgcagcagaatctctgattgagcaaaccacagctctcaacaagcgagtagaagccatgaaacagtatcaggaagaaattcaagaacttaatgaagtcgcgagacatcggccacggtccacgttagttatgggaatccagcaagaaaacagacaaatcagagagttgcaacaagaaaacaaagaattacgtacatctctggaagaacatcagtcggccttggaacttataatgagcaagtaccgagaacaaatgtttagattgctaatggctagcaaaaaagatgatccgggtataataatgaagttaaaagagcagcactccaagattgacatggtacatcgtaacaagtccgaaggattcttccttgatgcatctcgacacatccttgaagcacctcaacatggactggagagaaggcacttggaagcaaatcagaatgtacactaaataaacagtcaacttttggggtgtggatggaaggggggtccattttaaaagtgcttttacattgaatttccctcccagattagatcagcaaataaatgaaatttattaaaagaatgttgtgtctttaatagccatgctgttcagtgtagaaactttaaatctctcattaattttctgtgtattgtatcatgtacagcctgttagatatt

SEQ ID NO: 134168 - DNA, 582 bp, Homo sapiens
  Payload ID: 6209
  Gene Symbol: FGFR1OP2
  Gene Name: FGFR1 oncogene partner 2
  ENST ID: ENST00000544111
  CDS Start-End: 403-582
agcgccggtcggaggcggtcggcggaggtgtctaccccgccggtgatggcgttgaacgccactggcttcccggccttccgtccgctgcctccgtccgattctgcgtctgcttgctgaggaggcggattaggggggcgcggagtctcttcccttgagtgcataggtcccggttggtagagggtttgagtccgcatcgccacagctgaaggctgcgagggactaagagcagagaagatgcaagagttagaattataatgcaactttatgtaagaagcagaagttcttccaagaagaggttgagactttaatgtagcatgacacattgaggccacttcggctggtcagcagtgtttgtgaacagtgtgtcaagtcacctgaccaagcagagatatatctttagaaatgagttgcacaattgagaaggcacttgccgacgctaaagctcttgttgaaagattaagagatcatgacgatgcagcagaatctctgattgagcaaaccacagctctcaacaagcgagtagaagccatgaaacagtatcaggaagaaattcaagaacttaatgaagtcgcgagacatcgg

SEQ ID NO: 134169 - DNA, 2275 bp, Homo sapiens
  Payload ID: 6210
  Gene Symbol: FOPNL
  Gene Name: FGFR1OP N-terminal like
  Uniprot ID: Q96NB1
  ENST ID: ENST00000255759
  CDS Start-End: 31-555
ccgcggtgcggccctggcggccgttgaaaaatggcgactgtggcagagttgaaggctgttttaaaggacaccttggaaaaaaagggggtattagggcatttaaaagcaaggatccgagctgaagttttcaatgccctagatgatgaccgtgaaccccgaccatcattgtctcatgaaaaccttctaattaatgaattaattcgagagtatttagaattcaacaaatataagtatacagcatctgtcctcatagcagaatctggtcaacctgtagttccgttggacagacagtttctcatccatgaactaaatgcatttgaagaatcaaaggataatacaatacctcttttatatgggattttagcccatttcttgcgtggaactaaggatggcatccagaatgcatttctgaaagggccttcacttcagccttcagacccaagtcttggcagacaacctagtagaagaaagccaatggatgaccacctaagaaaggaggaacagaaaagtactaacattgaagatcttcatgtttctcaggcagtcaacagataatgctttgtttggggtatcttttgtcttaaaattgtattattaattaaataacttatttattgtcccaatgttaccaaaatgcaccactaatgtttgtagaaattggagtttctacaaaacacccctcatgtttaactacatttgtgaataaaagctaactcttgtcatctagcttattggatttgacttgaaaaaaaaagtattgtttttacgaagtattttttgtttttttgagatggagtctcgctctgtcacccagactggagtgcagtggcacgatctcggctcactgcaatctctgcctcccggattcaagtgattctcctgcctcagcctcccaagtagctgggaaaacaggcctgtgccaccacaccggagtagtttttgtatttttagtagagatggggtttcaccatgctggccaggctggtcttgaactcctgacctcaggtgatctgtgtgccccagcctcccaaagcgctgggattacaggtgtgagccactgagcccagccatttaggaagtattataaaggcccttaaagtttgtaaggaaatgaaagggctttgtattaccttttcaataggcaacaatgtactttttctttccttagactttggcttactggaagatttaattaaaaggtagaggagaagtaaatttgctgtaataattttgctgtaaataaaacaaagagtttattttattagataaagaatgtgaagtaagcatgaagagacaggctttgggagaaataccagaaagggatttttcaaagatggcattgtttaatctccgtgtggccctcggttgtgcaatcacagatgagccagaagagggccagccccctacttgtttgggctccgaaactcttaccaaacatcaatttttattcttgggatagaaaaatagtatgtgctatctctaatacgctacttcgatatttattaaagaagtatttttaatgtagtgtccacaggctcatttcattgaaaacaactgactatgatgatagacagctcctgattggcaaaagttcgatggtatattcagaattaaattttgcctgcacacctaaacactgacaacatttagcttaaaggttttccatggagaagagtggtaagagctgtagttagcaaaattggcatcctctttagggtgtcaattctgtgctgctttgcaaattgttgaaacttttgattttctgtttggcaatgctagtcagtgttcacttcttacagattagccaagaatttttatctaaatgcagaaacttattaatgaaatccatttaaactatacttacacaacattttgggaggccctgctggtaaaattatatatggatgcagaagtattgcaagagtccattttccatttttaaatctgcaatatctgattacattgatgaattccgttgtattgtatgtgtgaatataaatatctgaattctcccgggggacttggttttcgtccaaggatgttggcagtggacacttagtttacctcaggaattgcaatcatgtaagactatattcggaaaaaatgctggagtatataattttggatactgatataaaatcatcaagatggaagttaagcagaattgtcacgtgtagtccatagcgcttttatatgcattattctgtaatttgtttgtactgcggcaactttttatactttcaatgtatcatttaataaaaaaaataagcaagtc

SEQ ID NO: 134170 - DNA, 851 bp, Homo sapiens
  Payload ID: 6210
  Gene Symbol: FOPNL
  Gene Name: FGFR1OP N-terminal like
  ENST ID: ENST00000573087
  CDS Start-End: 41-289
gtgcgcagggccgcggtgcggccctggcggccgttgaaaaatggcgactgtggcagagttgaaggctgttttaaaggacaccttggaaaaaaagggggtattagggcatttaaaagcaaggatccgagctgaagttttcaatgccctagatgatgaccgtgaaccccgaccatcattgtctcatgaaaaccttctaattaatgaattaattcgagagtatttagaattcaacaaatataagtatacagcatctgtcctcatagcagacctcttttatatgggattttagcccatttcttgcgtggaactaaggatggcatccagaatgcatttctgaaagggccttcacttcagccttcagacccaagtcttggcagacaacctagtagaagaaagccaatggatgaccacctaagaaaggaggaacagaaaagtactaacattgaagatcttcatgtttctcaggcagtcaacagataatgctttgtttggggtatcttttgtcttaaaattgtattattaattaaataacttatttattgtcccaatgttaccaaaatgcaccactaatgtttgtagaaattggagtttctacaaaacacccctcatgtttaactacatttgtgaataaaagctaactcttgtcatctagcttattggatttgacttgaaaaaaaaagtattgtttttacgaagtattttttgtttttttgagatggagtctcgctctgtcacccagactggagtgcagtggcacgatctcggctcactgcaatctctgcctcccggattcaagtgattctcctgcctcagcctcccaagtagctgggaaaacaggcctgtgccaccac

SEQ ID NO: 134171 - DNA, 381 bp, Homo sapiens
  Payload ID: 6210
  Gene Symbol: FOPNL
  Gene Name: FGFR1OP N-terminal like
  ENST ID: ENST00000575938
  CDS Start-End: 9-381
gttgaaaaatggcgactgtggcagagttgaaggctgatgatgaccgtgaaccccgaccatcattgtctcatgaaaaccttctaattaatgaattaattcgagagtatttagaattcaacaaatataagtatacagcatctgtcctcatagcagaatctggtcaacctgtagttccgttggacagacagtttctcatccatgaactaaatgcatttgaagaatcaaaggataatacaatacctcttttatatgggattttagcccatttcttgcgtggaactaaggatggcatccagaatgcatttctgaaagggccttcacttcagccttcagacccaagtcttggcagacaacctagtagaagaaagccaatgggtatga

SEQ ID NO: 134172 - DNA, 565 bp, Homo sapiens
  Payload ID: 6210
  Gene Symbol: FOPNL
  Gene Name: FGFR1OP N-terminal like
  ENST ID: ENST00000575744
  CDS Start-End: 19-345
cctggcggccgttgaaaaatggcgactgtggcagagttgaaggctgaatctggtcaacctgtagttccgttggacagacagtttctcatccatgaactaaatgcatttgaagaatcaaaggataatacaatacctcttttatatgggattttagcccatttcttgcgtggaactaaggatggcatccagaatgcatttctgaaagggccttcacttcagccttcagacccaagtcttggcagacaacctagtagaagaaagccaatggatgaccacctaagaaaggaggaacagaaaagtactaacattgaagatcttcatgtttctcaggcagtcaacagataatgctttgtttggggtatcttttgtcttaaaattgtattattaattaaataacttatttattgtcccaatgttaccaaaatgcaccactaatgtttgtagaaattggagtttctacaaaacacccctcatgtttaactacatttgtgaataaaagctaactcttgtcatctagcttattggatttgacttgaaaaaaaaagtattgtttttacgaagtatt

SEQ ID NO: 134173 - DNA, 530 bp, Homo sapiens
  Payload ID: 6210
  Gene Symbol: FOPNL
  Gene Name: FGFR1OP N-terminal like
  ENST ID: ENST00000575073
  CDS Start-End: 41-355
gtgcgcagggccgcggtgcggccctggcggccgttgaaaaatggcgactgtggcagagttgaaggctgttttaaaggacaccttggaaaaaaagggggtattagggcatttaaaagcaaggatccgagctgaagttttcaatgccctagatgatgaccgtgaaccccgaccatcattgtctcatgaaaaccttctaattaatgaattaattcgagagtatttagaattcaacaaatataagtatacagcatctgtcctcatagcagaatctggtcaacctgtagttccgttggacagacagtttctcatccatgaactaaatgcatttgaagaatcaaaggataatacaatatgaccacctaagaaaggaggaacagaaaagtactaacattgaagatcttcatgtttctcaggcagtcaacagataatgctttgtttggggtatcttttgtcttaaaattgtattattaattaaataacttatttattgtcccaatgttaccaaaatgcaccactaatgtttgtagaaa

SEQ ID NO: 134174 - DNA, 2039 bp, Homo sapiens
  Payload ID: 6210
  Gene Symbol: FOPNL
  Gene Name: FGFR1OP N-terminal like
  Uniprot ID: Q96NB1
  ENST ID: ENST00000573968
  CDS Start-End: 18-320
ctggcggccgttgaaaaatggcgactgtggcagagttgaaggctgttttaaaggacaccttggaaaaaaagggggtattagggcatttaaaagcaaggatccgagctgaagttttcaatgccctagatgatgaccgtgaaccccgaccatcattgtctcatgaaaaccttctaattaatgaattaattcgagagtatttagaattcaacaaatataagtatacagcatctgtcctcatagcagatgaccacctaagaaaggaggaacagaaaagtactaacattgaagatcttcatgtttctcaggcagtcaacagataatgctttgtttggggtatcttttgtcttaaaattgtattattaattaaataacttatttattgtcccaatgttaccaaaatgcaccactaatgtttgtagaaattggagtttctacaaaacacccctcatgtttaactacatttgtgaataaaagctaactcttgtcatctagcttattggatttgacttgaaaaaaaaagtattgtttttacgaagtattttttgtttttttgagatggagtctcgctctgtcacccagactggagtgcagtggcacgatctcggctcactgcaatctctgcctcccggattcaagtgattctcctgcctcagcctcccaagtagctgggaaaacaggcctgtgccaccacaccggagtagtttttgtatttttagtagagatggggtttcaccatgctggccaggctggtcttgaactcctgacctcaggtgatctgtgtgccccagcctcccaaagcgctgggattacaggtgtgagccactgagcccagccatttaggaagtattataaaggcccttaaagtttgtaaggaaatgaaagggctttgtattaccttttcaataggcaacaatgtactttttctttccttagactttggcttactggaagatttaattaaaaggtagaggagaagtaaatttgctgtaataattttgctgtaaataaaacaaagagtttattttattagataaagaatgtgaagtaagcatgaagagacaggctttgggagaaataccagaaagggatttttcaaagatggcattgtttaatctccgtgtggccctcggttgtgcaatcacagatgagccagaagagggccagccccctacttgtttgggctccgaaactcttaccaaacatcaatttttattcttgggatagaaaaatagtatgtgctatctctaatacgctacttcgatatttattaaagaagtatttttaatgtagtgtccacaggctcatttcattgaaaacaactgactatgatgatagacagctcctgattggcaaaagttcgatggtatattcagaattaaattttgcctgcacacctaaacactgacaacatttagcttaaaggttttccatggagaagagtggtaagagctgtagttagcaaaattggcatcctctttagggtgtcaattctgtgctgctttgcaaattgttgaaacttttgattttctgtttggcaatgctagtcagtgttcacttcttacagattagccaagaatttttatctaaatgcagaaacttattaatgaaatccatttaaactatacttacacaacattttgggaggccctgctggtaaaattatatatggatgcagaagtattgcaagagtccattttccatttttaaatctgcaatatctgattacattgatgaattccgttgtattgtatgtgtgaatataaatatctgaattctcccgggggacttggttttcgtccaaggatgttggcagtggacacttagtttacctcaggaattgcaatcatgtaagactatattcggaaaaaatgctggagtatataattttggatactgatataaaatcatcaagatggaagttaagcagaattgtcacgtgtagtccatagcgcttttatatgcattattctgtaatttgtttgtactgcggcaactttttatactttcaatgtatcatttaataaaaaaaataagcaagt

SEQ ID NO: 134175 - DNA, 796 bp, Homo sapiens
  Payload ID: 6210
  Gene Symbol: FOPNL
  Gene Name: FGFR1OP N-terminal like
  ENST ID: ENST00000572415
  CDS Start-End: 39-413
gcgcagggccgcggtgcggccctggcggccgttgaaaaatggcgactgtggcagagttgaaggctgttttaaaggacaccttggaaaaaaagggggtattagggcatttaaaagcaaggatccgagctgaagttttcaatgccctagatgatgaccgtgaaccccgaccatcattgtctcatgaaaaccttctaattaatgaattaattcgagagtatttagaattcaacaaatataagtatacagcatctgtcctcatagcagacggagtctcactctattgtgatctcagctcactgcatcctccgcctcctgggttcaagcagttctcctgcctcagcctcccgagtacctggaactacagaatctggtcaacctgtagttccgttggacagacagtttctcatccatgaactaaatgcatttgaagaatcaaaggataatacaatacctcttttatatgggattttagcccatttcttgcgtggaactaaggatggcatccagaatgcatttctgaaagggccttcacttcagccttcagacccaagtcttggcagacaacctagtagaagaaagccaatggatgaccacctaagaaaggaggaacagaaaagtactaacattgaagatcttcatgtttctcaggcagtcaacagataatgctttgtttggggtatcttttgtcttaaaattgtattattaattaaataacttatttattgtcccaatgttaccaaaatgcaccactaatgtttgtagaaattggagtttctacaaaacacccctcatgttt

SEQ ID NO: 134176 - DNA, 735 bp, Homo sapiens
  Payload ID: 6210
  Gene Symbol: FOPNL
  Gene Name: FGFR1OP N-terminal like
  ENST ID: ENST00000573396
  CDS Start-End: 15-401
gcggccgttgaaaaatggcgactgtggcagagttgaaggctgttttaaaggacaccttggaaaaaaagggggtattagggcatttaaaagcaaggatccgagctgaagttttcaatgccctagatgatgaccgtgaaccccgaccatcattgtctcatgaaaaccttctaattaatgaattaattcgagagtatttagaattcaacaaatataagtatacagcatctgtcctcatagcagctcactgcatcctccgcctcctgggttcaagcagttctcctgcctcagcctcccgagtacctggaactacagaatctggtcaacctgtagttccgttggacagacagtttctcatccatgaactaaatgcatttgaagaatcaaaggataatacaatatgaccacctaagaaaggaggaacagaaaagtactaacattgaagatcttcatgtttctcaggcagtcaacagataatgctttgtttggggtatcttttgtcttaaaattgtattattaattaaataacttatttattgtcccaatgttaccaaaatgcaccactaatgtttgtagaaattggagtttctacaaaacacccctcatgtttaactacatttgtgaataaaagctaactcttgtcatctagcttattggatttgacttgaaaaaaaaagtattgtttttacgaagtattttttgtttttttgagatggagtctcgctctgtcacccagac

SEQ ID NO: 134177 - DNA, 646 bp, Homo sapiens
  Payload ID: 6210
  Gene Symbol: FOPNL
  Gene Name: FGFR1OP N-terminal like
  ENST ID: ENST00000573429
  CDS Start-End: 30-626
cgcggtgcggccctggcggccgttgaaaaatggcgactgtggcagagttgaaggctgttttaaaggacaccttggaaaaaaagggggtattagggcatttaaaagcaaggatccgagctgaagttttcaatgccctagatgatgaccgtgaaccccgaccatcattgtctcatgaaaaccttctaattaatgaattaattcgagagtatttagaattcaacaaatataagtatacagcatctgtcctcatagcagctcactgcatcctccgcctcctgggttcaagcagttctcctgcctcagcctcccgagtacctggaactacagaatctggtcaacctgtagttccgttggacagacagtttctcatccatgaactaaatgcatttgaagaatcaaaggataatacaatacctcttttatatgggattttagcccatttcttgcgtggaactaaggatggcatccagaatgcatttctgaaagggccttcacttcagccttcagacccaagtcttggcagacaacctagtagaagaaagccaatggatgaccacctaagaaaggaggaacagaaaagtactaacattgaagatcttcatgtttctcaggcagtcaacagataatgctttgtttggggtatctt

SEQ ID NO: 134178 - DNA, 2275 bp, Homo sapiens
  Payload ID: 6210
  Gene Symbol: FOPNL
  Gene Name: FGFR1OP N-terminal like
  Uniprot ID: Q96NB1
  ENST ID: ENST00000622266
  CDS Start-End: 31-555
ccgcggtgcggccctggcggccgttgaaaaatggcgactgtggcagagttgaaggctgttttaaaggacaccttggaaaaaaagggggtattagggcatttaaaagcaaggatccgagctgaagttttcaatgccctagatgatgaccgtgaaccccgaccatcattgtctcatgaaaaccttctaattaatgaattaattcgagagtatttagaattcaacaaatataagtatacagcatctgtcctcatagcagaatctggtcaacctgtagttccgttggacagacagtttctcatccatgaactaaatgcatttgaagaatcaaaggataatacaatacctcttttatatgggattttagcccatttcttgcgtggaactaaggatggcatccagaatgcatttctgaaagggccttcacttcagccttcagacccaagtcttggcagacaacctagtagaagaaagccaatggatgaccacctaagaaaggaggaacagaaaagtactaacattgaagatcttcatgtttctcaggcagtcaacagataatgctttgtttggggtatcttttgtcttaaaattgtattattaattaaataacttatttattgtcccaatgttaccaaaatgcaccactaatgtttgtagaaattggagtttctacaaaacacccctcatgtttaactacatttgtgaataaaagctaactcttgtcatctagcttattggatttgacttgaaaaaaaaagtattgtttttacgaagtattttttgtttttttgagatggagtctcgctctgtcacccagactggagtgcagtggcacgatctcggctcactgcaatctctgcctcccggattcaagtgattctcctgcctcagcctcccaagtagctgggaaaacaggcctgtgccaccacaccggagtagtttttgtatttttagtagagatggggtttcaccatgctggccaggctggtcttgaactcctgacctcaggtgatctgtgtgccccagcctcccaaagcgctgggattacaggtgtgagccactgagcccagccatttaggaagtattataaaggcccttaaagtttgtaaggaaatgaaagggctttgtattaccttttcaataggcaacaatgtactttttctttccttagactttggcttactggaagatttaattaaaaggtagaggagaagtaaatttgctgtaataattttgctgtaaataaaacaaagagtttattttattagataaagaatgtgaagtaagcatgaagagacaggctttgggagaaataccagaaagggatttttcaaagatggcattgtttaatctccgtgtggccctcggttgtgcaatcacagatgagccagaagagggccagccccctacttgtttgggctccgaaactcttaccaaacatcaatttttattcttgggatagaaaaatagtatgtgctatctctaatacgctacttcgatatttattaaagaagtatttttaatgtagtgtccacaggctcatttcattgaaaacaactgactatgatgatagacagctcctgattggcaaaagttcgatggtatattcagaattaaattttgcctgcgcacctaaacactgacaacatttagcttaaaggttttccatggagaagagtggtaagagctgtagttagcaaaattggcatcctctttagggtgtcaattctgtgctgctttgcaaattgttgaaacttttgattttctgtttggcaatgctagtcagtgttcacttcttacagattagccaagaatttttatctaaatgcagaaacttattaatgaaatccatttaaactatacttacacaacattttgggaggccctgctggtaaaattatatatggatgcagaagtattgcaagagtccattttccatttttaaatctgcaatatctgattacattgatgaattccgttgtattgtatgtgtgaatataaatatctgaattctcccgggggacttggttttcgtccaaggatgttggcagtggacacttagtttacctcaggaattgcaatcatgtaagactatattcggaaaaaatgctggagtatataattttggatactgatataaaatcatcaagatggaagttaagcagaattgtcacgtgtagtccatagcgcttttatatgcattattctgtaatttgtttgtactgcggcaactttttatactttcaatgtatcatttaataaaaaaaataagcaagtc

SEQ ID NO: 134179 - DNA, 796 bp, Homo sapiens; identical to SEQ ID NO: 134175
  Payload ID: 6210
  Gene Symbol: FOPNL
  Gene Name: FGFR1OP N-terminal like
  ENST ID: ENST00000633954
  CDS Start-End: 39-413

SEQ ID NO: 134180 - DNA, 646 bp, Homo sapiens; identical to SEQ ID NO: 134177
  Payload ID: 6210
  Gene Symbol: FOPNL
  Gene Name: FGFR1OP N-terminal like
  ENST ID: ENST00000633985
  CDS Start-End: 30-626

SEQ ID NO: 134181 - DNA, 735 bp, Homo sapiens; identical to SEQ ID NO: 134176
  Payload ID: 6210
  Gene Symbol: FOPNL
  Gene Name: FGFR1OP N-terminal like
  ENST ID: ENST00000634146
  CDS Start-End: 15-401

SEQ ID NO: 134182 - DNA, 2039 bp, Homo sapiens
  Payload ID: 6210
  Gene Symbol: FOPNL
  Gene Name: FGFR1OP N-terminal like
  Uniprot ID: Q96NB1
  ENST ID: ENST00000631974
  CDS Start-End: 18-320
ctggcggccgttgaaaaatggcgactgtggcagagttgaaggctgttttaaaggacaccttggaaaaaaagggggtattagggcatttaaaagcaaggatccgagctgaagttttcaatgccctagatgatgaccgtgaaccccgaccatcattgtctcatgaaaaccttctaattaatgaattaattcgagagtatttagaattcaacaaatataagtatacagcatctgtcctcatagcagatgaccacctaagaaaggaggaacagaaaagtactaacattgaagatcttcatgtttctcaggcagtcaacagataatgctttgtttggggtatcttttgtcttaaaattgtattattaattaaataacttatttattgtcccaatgttaccaaaatgcaccactaatgtttgtagaaattggagtttctacaaaacacccctcatgtttaactacatttgtgaataaaagctaactcttgtcatctagcttattggatttgacttgaaaaaaaaagtattgtttttacgaagtattttttgtttttttgagatggagtctcgctctgtcacccagactggagtgcagtggcacgatctcggctcactgcaatctctgcctcccggattcaagtgattctcctgcctcagcctcccaagtagctgggaaaacaggcctgtgccaccacaccggagtagtttttgtatttttagtagagatggggtttcaccatgctggccaggctggtcttgaactcctgacctcaggtgatctgtgtgccccagcctcccaaagcgctgggattacaggtgtgagccactgagcccagccatttaggaagtattataaaggcccttaaagtttgtaaggaaatgaaagggctttgtattaccttttcaataggcaacaatgtactttttctttccttagactttggcttactggaagatttaattaaaaggtagaggagaagtaaatttgctgtaataattttgctgtaaataaaacaaagagtttattttattagataaagaatgtgaagtaagcatgaagagacaggctttgggagaaataccagaaagggatttttcaaagatggcattgtttaatctccgtgtggccctcggttgtgcaatcacagatgagccagaagagggccagccccctacttgtttgggctccgaaactcttaccaaacatcaatttttattcttgggatagaaaaatagtatgtgctatctctaatacgctacttcgatatttattaaagaagtatttttaatgtagtgtccacaggctcatttcattgaaaacaactgactatgatgatagacagctcctgattggcaaaagttcgatggtatattcagaattaaattttgcctgcgcacctaaacactgacaacatttagcttaaaggttttccatggagaagagtggtaagagctgtagttagcaaaattggcatcctctttagggtgtcaattctgtgctgctttgcaaattgttgaaacttttgattttctgtttggcaatgctagtcagtgttcacttcttacagattagccaagaatttttatctaaatgcagaaacttattaatgaaatccatttaaactatacttacacaacattttgggaggccctgctggtaaaattatatatggatgcagaagtattgcaagagtccattttccatttttaaatctgcaatatctgattacattgatgaattccgttgtattgtatgtgtgaatataaatatctgaattctcccgggggacttggttttcgtccaaggatgttggcagtggacacttagtttacctcaggaattgcaatcatgtaagactatattcggaaaaaatgctggagtatataattttggatactgatataaaatcatcaagatggaagttaagcagaattgtcacgtgtagtccatagcgcttttatatgcattattctgtaatttgtttgtactgcggcaactttttatactttcaatgtatcatttaataaaaaaaataagcaagt

SEQ ID NO: 134183 - DNA, 530 bp, Homo sapiens; identical to SEQ ID NO: 134173
  Payload ID: 6210
  Gene Symbol: FOPNL
  Gene Name: FGFR1OP N-terminal like
  ENST ID: ENST00000632623
  CDS Start-End: 41-355

SEQ ID NO: 134184 - DNA, 565 bp, Homo sapiens; identical to SEQ ID NO: 134172
  Payload ID: 6210
  Gene Symbol: FOPNL
  Gene Name: FGFR1OP N-terminal like
  ENST ID: ENST00000633304
  CDS Start-End: 19-345

SEQ ID NO: 134185 - DNA, 851 bp, Homo sapiens; identical to SEQ ID NO: 134170
  Payload ID: 6210
  Gene Symbol: FOPNL
  Gene Name: FGFR1OP N-terminal like
  ENST ID: ENST00000631896
  CDS Start-End: 41-289

SEQ ID NO: 134186 - DNA, 381 bp, Homo sapiens; identical to SEQ ID NO: 134171
  Payload ID: 6210
  Gene Symbol: FOPNL
  Gene Name: FGFR1OP N-terminal like
  ENST ID: ENST00000634203
  CDS Start-End: 9-381

SEQ ID NO: 134187 - DNA, 1976 bp, Homo sapiens
  Payload ID: 6211
  Gene Symbol: FGGY
  Gene Name: FGGY carbohydrate kinase domain containing
  Uniprot ID: Q96C11
  ENST ID: ENST00000303721
  CDS Start-End: 175-1830
ggcttctccaacccggcccggcccttccttcccctttcccgcagtcgttgcctcctcctcccctgcctcctcctccccttcctcctcctggccgcttagtctcacacccgccgggccgttgttcccgagacgttgttgagtcccctgtgtcctcttctgggtggaggaactgcaatgtctggtggagaacagaaaccagagaggtactatgtgggtgtggacgttggaacaggcagtgtccgtgcagctctggtggaccagagtggggtcctgttggcttttgcagaccagccaattaagaattgggagccccagttcaaccaccatgagcagtcctccgaggacatctgggctgcgtgctgtgttgtcacaaagaaagttgtacaagggattgatttaaaccaaattcgaggacttgggtttgatgccacgtgttctctggttgttttggataagcagtttcacccattaccagtcaaccaggaaggggattcccatcgaaacgtcatcatgtggctggaccatcgagcagtcagtcaagttaacaggatcaatgagaccaagcacagtgtcctccagtacgtcgggggggtgatgtctgtggaaatgcaggccccgaaacttctgtggctgaaagagaacttgagagagatttgctgggataaggcgggacatttctttgatctcccggacttcttatcgtggaaggcaacaggtgtcacagcacggtctctctgctccctggtgtgtaagtggacatattcagcagagaaaggctgggacgacagtttctggaaaatgattggtttggaagactttgttgcagataattacagcaaaataggaaaccaagtgctacctcctggagcttctcttggaaatgggctcacaccagaggcagcaagagaccttggccttctccctgggattgcggtcgcagcttcactcattgatgcccatgcaggaggactaggagtgattggggcagatgtgagagggcacggcctcatctgtgaggggcagccagtgacgtcacggctggctgtcatctgtggaacgtcttcttgtcacatggggatcagcaaagacccgatttttgtaccaggcgtctgggggccttatttctcagccatggtacctgggttctggctgaatgaaggtggtcagagcgttactggaaaattgatagaccacatggtacaaggccatgctgcttttccagaactacaagtaaaggccacagccagatgccagagtatatatgcatatttgaacagtcacctggatctgattaagaaggctcagcctgtgggtttccttactgttgatttacatgtttggccagatttccatggcaaccggtctcccttagcagatctgacactaaagggcatggtcaccggattgaaactgtctcaggaccttgatgatcttgccattctctacctggccacagttcaagccattgctttggggactcgcttcattatagaagccatggaggcagcagggcactcaatcagtactcttttcctatgtggaggcctcagcaagaatcccctttttgtgcaaatgcatgcggacattactggcatgcctgtggtcctgtcgcaagaggtggagtccgttcttgtgggtgctgctgttctgggtgcctgtgcctcaggggatttcgcttctgtacaggaagcaatggcaaaaatgagcaaagttgggaaagttgtgttcccgagactacaggataaaaaatactatgataagaaataccaagtattcctgaagctggttgaacaccagaaggagtatttggcgatcatgaatgatgactgaacagggcttgcaggtgctgatgccagaagcttctgtgccattgcattaaagacttgtcatttgatccatgttcaagacccttgaggtattgtttcatcatttctgtattgtctttcaataaagaaaacaaacatgtgcaaccagaa

SEQ ID NO: 134188 - DNA, 1041 bp, Homo sapiens
  Payload ID: 6211
  Gene Symbol: FGGY
  Gene Name: FGGY carbohydrate kinase domain containing
  Uniprot ID: Q96C11
  ENST ID: ENST00000371210
  CDS Start-End: 139-897
aaagcaaaatctgagcaggcttccgaggtttcctatgcaggagtgattggggcagatgtgagagggcacggcctcatctgtgaggggcagccagtgacgtcacggctggctgtcatctgtggaacgtcttcttgtcacatggggatcagcaaagacccgatttttgtaccaggcgtctgggggccttatttctcagccatggtacctgggttctggctgaatgaaggtggtcagagcgttactggaaaattgatagaccacatggtacaaggccatgctgcttttccagaactacaagtaaaggccacagccagatgccagagtatatatgcatatttgaacagtcacctggatctgattaagaaggctcagcctgtgggtttccttactgttgatttacatgtttggccagatttccatggcaaccggtctcccttagcagatctgacactaaagggcatggtcaccggattgaaactgtctcaggaccttgatgatcttgccattctctacctggccacagttcaagccattgctttggggactcgcttcattatagaagccatggaggcagcagggcactcaatcagtactcttttcctatgtggaggcctcagcaagaatcccctttttgtgcaaatgcatgcggacattactggcatgcctgtggtcctgtcgcaagaggtggagtccgttcttgtgggtgctgctgttctgggtgcctgtgcctcaggggatttcgcttctgtacaggaagcaatggcaaaaatgagcaaagttgggaaagttgtgttcccgagactacaggataaaaaatactatgataagaaataccaagtattcctgaagctggttgaacaccagaaggagtatttggcgatcatgaatgatgactgaacagggcttgcaggtgctgatgccagaagcttctgtgccattgcattaaagacttgtcatttgatccatgttcaagacccttgaggtattgtttcatcatttctgtattgtctttcaataaagaaaacaaacatgtgcaaccag

SEQ ID NO: 134189 - DNA, 1640 bp, Homo sapiens
  Payload ID: 6211
  Gene Symbol: FGGY
  Gene Name: FGGY carbohydrate kinase domain containing
  Uniprot ID: Q96C11
  ENST ID: ENST00000371212
  CDS Start-End: 105-1496
atgatcgcatggagaatggattttgttgctttatctgatattgtcctcagctcctcctgaatttgccgagatcttacagcagtcagtaaggtggaggaactgcaatgtctggtggagaacagaaaccagagaggtactatgtgggtgtggacgttggaacaggcagtgtccgtgcagctctggtggaccagagtggggtcctgttggcttttgcagaccagccaattaagaattgggagccccagttcaaccaccatgagcagtcctccgaggacatctgggctgcgtgctgtgttgtcacaaagaacttgagagagatttgctgggataaggcgggacatttctttgatctcccggacttcttatcgtggaaggcaacaggtgtcacagcacggtctctctgctccctggtgtgtaagtggacatattcagcagagaaaggctgggacgacagtttctggaaaatgattggtttggaagactttgttgcagataattacagcaaaataggaaaccaagtgctacctcctggagcttctcttggaaatgggctcacaccagaggcagcaagagaccttggccttctccctgggattgcggtcgcagcttcactcattgatgcccatgcaggaggactaggagtgattggggcagatgtgagagggcacggcctcatctgtgaggggcagccagtgacgtcacggctggctgtcatctgtggaacgtcttcttgtcacatggggatcagcaaagacccgatttttgtaccaggcgtctgggggccttatttctcagccatggtacctgggttctggctgaatgaaggtggtcagagcgttactggaaaattgatagaccacatggtacaaggccatgctgcttttccagaactacaagtaaaggccacagccagatgccagagtatatatgcatatttgaacagtcacctggatctgattaagaaggctcagcctgtgggtttccttactgttgatttacatgtttggccagatttccatggcaaccggtctcccttagcagatctgacactaaagggcatggtcaccggattgaaactgtctcaggaccttgatgatcttgccattctctacctggccacagttcaagccattgctttggggactcgcttcattatagaagccatggaggcagcagggcactcaatcagtactcttttcctatgtggaggcctcagcaagaatcccctttttgtgcaaatgcatgcggacattactggcatgcctgtggtcctgtcgcaagaggtggagtccgttcttgtgggtgctgctgttctgggtgcctgtgcctcaggggatttcgcttctgtacaggaagcaatggcaaaaatgagcaaagttgggaaagttgtgttcccgagactacaggataaaaaatactatgataagaaataccaagtattcctgaagctggttgaacaccagaaggagtatttggcgatcatgaatgatgactgaacagggcttgcaggtgctgatgccagaagcttctgtgccattgcattaaagacttgtcatttgatccatgttcaagacccttgaggtattgtttcatcatttctgtattgtctttcaataaagaaaacaaacatgtgcaaccag

SEQ ID NO: 134190 - DNA, 2052 bp, Homo sapiens
  Payload ID: 6211
  Gene Symbol: FGGY
  Gene Name: FGGY carbohydrate kinase domain containing
  Uniprot ID: Q96C11
  ENST ID: ENST00000371218
  CDS Start-End: 185-1912
cccagaaagaggcttctccaacccggcccggcccttccttcccctttcccgcagtcgttgcctcctcctcccctgcctcctcctccccttcctcctcctggccgcttagtctcacacccgccgggccgttgttcccgagacgttgttgagtcccctgtgtcctcttctgggtggaggaactgcaatgtctggtggagaacagaaaccagagaggtactatgtgggtgtggacgttggaacaggcagtgtccgtgcagctctggtggaccagagtggggtcctgttggcttttgcagaccagccaattaagaattgggagccccagttcaaccaccatgagcagtcctccgaggacatctgggctgcgtgctgtgttgtcacaaagaaagttgtacaagggattgatttaaaccaaattcgaggacttgggtttgatgccacgtgttctctggttgttttggataagcagtttcacccattaccagtcaaccaggaaggggattcccatcgaaacgtcatcatgtggctggaccatcgagcagtcagtcaagttaacaggatcaatgagaccaagcacagtgtcctccagtacgtcgggggggtgatgtctgtggaaatgcaggccccgaaacttctgtggctgaaagagaacttgagagagatttgctgggataaggcgggacatttctttgatctcccggacttcttatcgtggaaggcaacaggtgtcacagcacggtctctctgctccctggtgtgtaagtggacatattcagcagagaaaggctgggacgacagtttctggaaaatgattggtttggaagactttgttgcagataattacagcaaaataggaaaccaagtgctacctcctggagcttctcttggaaatgggctcacaccagaggcagcaagagaccttggccttctccctgggattgcggtcgcagcttcactcattgatgcccatgcaggaggactaggagtgattggggcagatgtgagagggcacggcctcatctgtgaggggcagccagtgacgtcacggctggctgtcatctgtggaacgtcttcttgtcacatggggatcagcaaagacccgatttttgtaccaggcgtctgggggccttatttctcagccatggtacctgggttctggctgaatgaaggtggtcagagcgttactggaaaattgatagaccacatggtacaaggccatgctgcttttccagaactacaagtaaaggccacagccagatgccagagtatatatgcatatttgaacagtcacctggatctgattaagaaggctcagcctgtgggtttccttactgttgatttacatgtttggccagatttccatggcaaccggtctcccttagcagatctgacactaaagggcatgagaaccactggatatctgtatattccggctttggcagcgttgcactctcccagttctctactctcccctcaggtcaccggattgaaactgtctcaggaccttgatgatcttgccattctctacctggccacagttcaagccattgctttggggactcgcttcattatagaagccatggaggcagcagggcactcaatcagtactcttttcctatgtggaggcctcagcaagaatcccctttttgtgcaaatgcatgcggacattactggcatgcctgtggtcctgtcgcaagaggtggagtccgttcttgtgggtgctgctgttctgggtgcctgtgcctcaggggatttcgcttctgtacaggaagcaatggcaaaaatgagcaaagttgggaaagttgtgttcccgagactacaggataaaaaatactatgataagaaataccaagtattcctgaagctggttgaacaccagaaggagtatttggcgatcatgaatgatgactgaacagggcttgcaggtgctgatgccagaagcttctgtgccattgcattaaagacttgtcatttgatccatgttcaagacccttgaggtattgtttcatcatttctgtattgtctttcaataaagaaaacaaacatgtgcaa

SEQ ID NO: 134191 - DNA, 2485 bp, Homo sapiens
  Payload ID: 6211
  Gene Symbol: FGGY
  Gene Name: FGGY carbohydrate kinase domain containing
  ENST ID: ENST00000430447
  CDS Start-End: 171-1694
cccttccttcccctttcccgcagtcgttgcctcctcctcccctgcctcctcctccccttcctcctcctggccgcttagtctcacacccgccgggccgttgttcccgagacgttgttgagtcccctgtgtcctcttctggactacgccaagccacaggtggaggaactgcaatgtctggtggagaacagaaaccagagaggtactatgtgggtgtggacgttggaacaggcagtgtccgtgcagctctggtggaccagagtggggtcctgttggcttttgcagaccagccaattaagaattgggagccccagttcaaccaccatgagcagtcctccgaggacatctgggctgcgtgctgtgttgtcacaaagaaagttgtacaagggattgatttaaaccaaattcgaggacttgggtttgatgccacgtgttctctggttgttttggataagcagtttcacccattaccagtcaaccaggaaggggattcccatcgaaacgtcatcatgtggctggaccatcgagcagtcagtcaagttaacaggatcaatgagaccaagcacagtgtcctccagtacgtcgggggggtgatgtctgtggaaatgcaggccccgaaacttctgtggctgaaagagaacttgagagagatttgctgggataaggcgggacatttctttgatctcccggacttcttatcgtggaaggcaacaggtgtcacagcacggtctctctgctccctggtgtgtaagtggacatattcagcagagaaaggctgggacgacagtttctggaaaatgattggtttggaagactttgttgcagataattacagcaaaataggaaaccaagtgctacctcctggagcttctcttggaaatgggctcacaccagaggcagcaagagaccttggccttctccctgggattgcggtcgcagcttcactcattgatgcccatgcaggaggactaggagtgattggggcagatgtgagagggcacggcctcatctgtgaggggcagccagtgacgtcacggctggctgtcatctgtggaacgtcttcttgtcacatggggatcagcaaagacccgatttttgtaccaggcgtctgggggccttatttctcagccatggtacctgggttctggctgaatgaaggtggtcagagcgttactggaaaattgatagaccacatggtacaaggccatgctgcttttccagaactacaagtaaaggccacagccagatgccagagtatatatgcatatttgaacagtcacctggatctgattaagaaggctcagcctgtgggtttccttactgttgatttacatgtttggccagatttccatggcaaccggtctcccttagcagatctgacactaaagggcatggtcaccggattgaaactgtctcaggaccttgatgatcttgccattctctacctggccacagttcaagccattgctttggggactcgcttcattatagaagccatggaggcagcagggcactcaatcagtactcttttcctatgtggaggcctcagcaagaatcccctttttgtgcaaatgcatgcggacattactggcatgcctgtggtcctgtcgcaagaggtggagtccgttcttgtgggtgctgctgttctgggtgcctgtgcctcaggggatttcgcttctgtacagtgggggaaatagatagctcagttgtggacgatagcagcaatgggaagcagtatttgagaagaaatcagactctcttcttccagtcttttgcaagacagctgtccccaaagggatgaatccattacctttcaccagagttgagttcgttttccatttcatctttctgcttaaagagaaagccctttaaaagcgcagcgcatacattgagtgcgtgtacttaatttttaatatgtgtgtgcccacagccaagagaacagagaaccttaaataataatgaaactgaattgtacatgtcgtatgttttatgtggcactgattcctaaatatgctcctagcagccaggtattatttaatacatccccattaatcaagctgccaaatctaaatgaaaaccatgtttaaatatgtttaataagattatagcttttggttgaatatcaaactaacatagctacatttttccttccagccagctctcatttactgtcttacatttttactctgaaagcttttgtactatcaaaccaatcttgattataaaacaaattataccacaaacttttagtatcgtgagcttcagctgagtccctcagtgtaaatgttaggagaaagaacagttctgagattttttttctggctaaaaaatgatatttttcttcttcttggggtgagcctttgagtttaaaaggaaattaaaaattcaattagagatactaaattgtttgtagcttctgtattaaatgatgtctgccttttgcatagttattgaaagtgtttcatattaaatgtactttttctttttg

SEQ ID NO: 134192 - DNA, 681 bp, Homo sapiens
  Payload ID: 6211
  Gene Symbol: FGGY
  Gene Name: FGGY carbohydrate kinase domain containing
  ENST ID: ENST00000413489
  CDS Start-End: 128-681
caaggcggggctgtagccgccccgggaccgccctgctcaggcgccgtggggttcggcgcggctacgtgcagaatccgtctagctaaaatgtaatttcagattggacaagtactgtggaggaactgcaatgtctggtggagaacagaaaccagagaggtactatgtgggtgtggacgttggaacaggcagtgtccgtgcagctctggtggaccagagtggggtcctgttggcttttgcagaccagccaattaagaattgggagccccagttcaaccaccatgagcagtcctccgaggacatctgggctgcgtgctgtgttgtcacaaagaaagttgtacaagggattgatttaaaccaaattcgaggacttgggtttgatgccacgtgttctctggttgttttggataagcagtttcacccattaccagtcaaccaggaaggggattcccatcgaaacgtcatcatgtggctggaccatcgagcagtcagtcaagttaacaggatcaatgagaccaagcacagtgtcctccagtacgtcgggggggtgatgtctgtggaaatgcaggccccgaaacttctgtggctgaaagagaacttgagagagatttgctgggataaggcgggacatttctttgatctcccggacttcttatcgtggaaggcaacaggtgtcacagcacg

SEQ ID NO: 134193 - DNA, 563 bp, Homo sapiens
  Payload ID: 6211
  Gene Symbol: FGGY
  Gene Name: FGGY carbohydrate kinase domain containing
  ENST ID: ENST00000582567
  CDS Start-End: 401-563
ggccgcgctttacaggggccgcgctttacaggggccgcgctttacaggggccgcgctttacaggggccgcgctttacaggggccgcgctttacaggggccgcgctttacaggggccgcgctttacaggggccgcgccggcgggggcgggatcgcgcgcaaggcggggctgtagccgccccgggaccgccctgctcaggcgccgtggggttcggcgcggctacgtgcagaatccgtctagctaaaatgtaatttcagattggacaagtactagagggagtcaaaagtgaggaacccaagcctgagcacgtgggccagccccatggggaatctgtcttgtcatcggggctggctggagtagagacaagtctggatgctggctggccaggtggaggaactgcaatgtctggtggagaacagaaaccagagaggtactatgtgggtgtggacgttggaacaggcagtgtccgtgcagctctggtggaccagagtggggtcctgttggcttttgcagaccagccaattaagaattgggagccccagttcaaccaccatgagcagtcct

SEQ ID NO: 134194 - DNA, 4072 bp, Homo sapiens
  Payload ID: 6211
  Gene Symbol: FGGY
  Gene Name: FGGY carbohydrate kinase domain containing
  ENST ID: ENST00000634606
  CDS Start-End: 237-986
gtagccgccccgggaccgccctgctcaggcgccgtggggttcggcgcggctacgtgcagaatccgtctagctaaaatgtaatttcagattggacaagtactaaagttgtacaagggattgatttaaaccaaattcgaggacttgggtttgatgccacgtgttctctggttgttttggataagcagtttcacccattaccagtcaaccaggaaggggattcccatcgaaacgtcatcatgtggctggaccatcgagcagtcagtcaagttaacaggatcaatgagaccaagcacagtgtcctccagtacgtcgggggggtgatgtctgtggaaatgcaggccccgaaacttctgtggctgaaagagaacttgagagagatttgctgggataaggcgggacatttctttgatctcccggacttcttatcgtggaaggcaacaggtgtcacagcacggtctctctgctccctggtgtgtaagtggacatattcagcagagaaaggctgggacgacagtttctggaaaatgattggtttggaagactttgttgcagataattacagcaaaataggaaaccaagtgctacctcctggagcttctcttggaaatgggctcacaccagaggcagcaagagaccttggccttctccctgggattgcggtcgcagcttcactcattgatgcccatgcaggaggactaggagtgattggggcagatgtgagagggcacggcctcatctgtgaggggcagccagtgacgtcacggctggctgtcatctgtggaacgtcttcttgtcacatggggatcagcaaagacccgatttttgtaccaggcgtctgggggccttatttctcagccatggtacctgggttctggctgaatgaaggtggtcagagcgttactggaaaattgatagaccacatggtacaaggccatgctgcttttccagaactacaagtaaaggccacagccaggtcaccggattgaaactgtctcaggaccttgatgatcttgccattctctacctggccacagttcaagccattgctttggggactcgcttcattatagaagccatggaggcagcagggcactcaatcagtactcttttcctatgtggaggcctcagcaagaatcccctttttgtgcaaatgcatgcggacattactggcatgcctgtggtcctgtcgcaagaggtggagtccgttcttgtgggtgctgctgttctgggtgcctgtgcctcaggggatttcgcttctgtacaggaagcaatggcaaaaatgagcaaagttgggaaagttgtgttcccgagactacaggataaaaaatactatgataagaaataccaagtattcctgaagctggttgaacaccagaaggagtatttggcgatcatgaatgatgactgaacagggcttgcaggtgctgatgccagaagcttctgtgccattgcattaaagacttgtcatttgatccatgttcaagacccttgagataaggaaaacgaagcacagagcaattaaataacttgcccaagatcgcccaagatcacccaagatgtccggctgaagttcttaaccattaccttacactaatcaacagcaacaataataataaccacctttctaggatgcaaattatgttccaagaactttcattatttcattacatctgcatagccccaagagtaaataatatcctgttctattgaagaagaaactgaggtcccaagacatgaaattacttgctcaaggtcacacactgccctcaactctgtgatgtcaaaattcccttctccataggtaacagatcctatctggctacttttcattattaaggaacctgtcttaaatcctccaaggtgtcattcatttagttatttgacactaagcccctaagtgaaattataactatggctaaaatccttcctcattttggaggcttctaatccaagaaccaaagatgccaacattcttcctctgtgactattttaactttgtggttatgatacctattgccacactttcagtcctacttgtccacacttaaacaccatgctttcccattctgagtgatggcaccctcatccccacccaaagctactgtgggtgctactgccttacagagtatactgtggtgtgctgcctggatatttccagcatcttggagtgctttcagcagacagccatcagccatcagccttctttgtgaattgcctaggctgccacgtcacctctctagggcagcccacatgcaatgaatgatttgtcaacatggaagcgtacagaccaactcccctcattcaaacttggaacaacttggaaggaccattccagcttcagcactccccagggataagtcaagactttcattgagcctgcaccacaacctgctttctccctctgcccactacttcttccttccctcctctctcacagctgttattcccaacagcatttcttaataaccctccaacatgctaatctccatctcagggtctacttcctggaaaatccaatttacaacaggctgcaataacaaaagtcctcgaagttaagattttttttttctgtttatggtacaattttaaaatctcttgctctatggatgcgcattctctagtgacagagatgtcgtctcccttaatttgaacttgcacttggcttcaatttctccattgaatccttagagtaatctctctttgggcagcccaacaggttggcaataacatctcttggaagtaaaatgcattaaaaggcagtttcattaagtgatataaaatccatgtaactcaagtcttcaacagccctagaagtaaaatttccagtatctcatacagttcctaaattaatattaatttcatagcaagagtgagtttcaagccagtgtgaaaaataaatgaatattcatttttacacacagtgggaaggaatccacatccttgatcacctttctccagtctctaccttaatagttatgctggctgaaaatatccataggatatttgtccctatcttcccagtcccattacctaaacattcagatccaagtcaattatggtcaaggttgttccattaacagaaagctaaatcttacccataatgtctgggattggtcttgcttccctaaaccctagtatggtatttgatggagctcaaatacaccttaggtatttgtgcccactgtgtttacaggtctaagaacaaggaggtgttgtaaaacgtcagttttcattcctgtctctctttctgtgactctgcctcgggcatataaatctcctccctcggggcctggaaactattattccaaagtacctcccagattctgaaaattgtcacagctgctgcattcagcttcttctgaactttgatattgacttgaggtagcctgagtttgcaatttgctataattctttgcctatttgattgcagaccactcttgtgggcatcatccagaaaagcaaactaatccctatggtggatctcatatcattctggctacctctgtctcggttgctgagattgagcctatgttgcagttctttcctttctccctctttcttccctcccttcttttatgccttcatccttccttcctaccttcaacatttgcaggacatgtgtttgggggtctgtggaaggggaagctttacctaaacaatgctgtcagaattctctgtgtgtgggttcaataatttccttcaggaatgaatgctttgctgctgacgtccaattgcactctttgctgctgacatgatctctctactagcatgactgcaggaactgtatgtctagatctgcatctgtccaggtcagagtcttctagctgatatccattctgagacattcagggttacctagaaatcagcaggaaagccttagaattctcagtttcttcatttcatcatttgtatgtgtaagacacagatatcttctttacaagtagggcctactgcagttctatttaaagtgcctagctagggattttctcctcttatcatttatctatttacttacagaccaactcagaacataaaatctctttctcatcctttctccccaacacacacaaaa

SEQ ID NO: 134195 - DNA, 2455 bp, Homo sapiens
  Payload ID: 6211
  Gene Symbol: FGGY
  Gene Name: FGGY carbohydrate kinase domain containing
  ENST ID: ENST00000634399
  CDS Start-End: 128-466
gtctctgaggggggaaattttgcatgatcgcatggagaatggattttgttgctttatctgatattgtcctcagctcctcctgaatttgccgagatcttacagcagtcagtaaggtggaggaactgcaatgtctggtggagaacagaaaccagagaggtactatgtgggtgtggacgttggaacaggcagtgtccgtgcagctctggtggaccagagtggggtcctgttggcttttgcagaccagccaattaagaattgggagccccagttcaaccaccatgagcagtcctccgaggacatctgggctgcgtgctgtgttgtcacaaagaaagttgtacaagggattgatttaaaccaaattcgaggacttgggtttgatgccacgtgttctctggttgttttggataagcagtttcacccattaccagtcaaccaggaagaacttgagagagatttgctgggataaggcgggacatttctttgatctcccggacttcttatcgtggaaggcaacaggtgtcacagcacggtctctctgctccctggtgtgtaagtggacatattcagcagagaaaggctgggacgacagtttctggaaaatgattggtttggaagactttgttgcagataattacagcaaaatagattcgcagaaggactgttttcagctgctggcccttccaggaatagccctaaagagccagaagggcaaaggagtaacattgaccacatcatggtgatacaaggaaaccaagtgctacctcctggagcttctcttggaaatgggctcacaccagaggcagcaagagaccttggccttctccctgggattgcggtcgcagcttcactcattgatgcccatgcaggaggactaggagtgattggggcagatgtgagagggcacggcctcatctgtgaggggcagccagtgacgtcacggctggctgtcatctgtggaacgtcttcttgtcacatggggatcagcaaagacccgatttttgtaccaggcgtctgggggccttatttctcagccatggtacctgggttctggctgaatgaaggtggtcagagcgttactggaaaattgatagaccacatggtacaaggccatgctgcttttccagaactacaagtaaaggccacagccagatgccagagtatatatgcatatttgaacagtcacctggatctgattaagaaggctcagcctgtgggtttccttactgttgatttacatgtttggccagatttccatggcaaccggtctcccttagcagatctgacactaaagggcatgagaaccactggatatctgtatattccggctttggcagcgttgcactctcccagttctctactctcccctcaggtcaccggattgaaactgtctcaggaccttgatgatcttgccattctctacctggccacagttcaagccattgctttggggactcgcttcattatagaagccatggaggcagcagggcactcaatcagtactcttttcctatgtggaggcctcagcaagaatcccctttttgtgcaaatgcatgcggacattactggcatgcctgtggtcctgtcgcaagaggtggagtccgttcttgtgggtgctgctgttctgggtgcctgtgcctcaggggatttcgcttctgtacaggaagcaatggcaaaaatgagcaaagttgggaaagttgtgttcccgagactacaggataaaaaatactatgataagaaataccaagtattcctgaagctggttgaacaccagaaggagtatttggcgatcatgaatgatgactgaacagggcttgcaggtgctgatgccagaagcttctgtgccattgcattaaagacttgtcatttgatccatgttcaagacccttgagataaggaaaacgaagcacagagcaattaaataacttgcccaagatcgcccaagatcacccaagatgtccggctgaagttcttaaccattaccttacactaatcaacagcaacaataataataaccacctttctaggatgcaaattatgttccaagaactttcattatttcattacatctgcatagccccaagagtaaataatatcctgttctattgaagaagaaactgaggtcccaagacatgaaattacttgctcaaggtcacacactgccctcaactctgtgatgtcaaaattcccttctccataggtaacagatcctatctggctacttttcattattaaggagaatggagatgtctcggattttttgtgcacaaattgtcctcagaaccaaacaaaataaccagcataggagagaattcacaaagtaagagactcataaagtaaaatgttttgctttactttttgcctttttcatcctgctttgtttttcaacatgtgtaaatcattctgttactataaacttaataaagaagtaaaagagcaaagaccaaaaatgtaataa

SEQ ID NO: 134196 - DNA, 4653 bp, Homo sapiens
  Payload ID: 6211
  Gene Symbol: FGGY
  Gene Name: FGGY carbohydrate kinase domain containing
  ENST ID: ENST00000424725
  CDS Start-End: 122-508
gaggggggaaattttgcatgatcgcatggagaatggattttgttgctttatctgatattgtcctcagctcctcctgaatttgccgagatcttacagcagtcagtaaggtggaggaactgcaatgtctggtggagaacagaaaccagagaggtactatgtgggtgtggacgttggaacaggcagtgtccgtgcagctctggtggaccagagtggggtcctgttggcttttgcagaccagccaattaagaattgggagccccagttcaaccaccatgagcagtcctccgaggacatctgggctgcgtgctgtgttgtcacaaagaaagttgtacaagggattgatttaaaccaaattcgaggacttgggtttgatgccacgtgttctctggttgttttggataagcagtttcacccattaccagtcaaccaggaaggtctctctgctccctggtgtgtaagtggacatattcagcagagaaaggctgggacgacagtttctggaaaatgattggtttggaagactttgttgcagataattacagcaaaataggaaaccaagtgctacctcctggagcttctcttggaaatgggctcacaccagaggcagcaagagaccttggccttctccctgggattgcggtcgcagcttcactcattgatgcccatgcaggaggactagatcagcaaagacccgatttttgtaccaggcgtctgggggccttatttctcagccatggtacctgggttctggctgaatgaaggtggtcagagcgttactggaaaattgatagaccacatggtacaaggccatgctgcttttccagaactacaagtaaaggccacagccaggtcaccggattgaaactgtctcaggaccttgatgatcttgccattctctacctggccacagttcaagccattgctttggggactcgcttcattatagaagccatggaggcagcagggcactcaatcagtactcttttcctatgtggaggcctcagcaagaatcccctttttgtgcaaatgcatgcggacattactggcatgcctgtggtcctgtcgcaagaggtggagtccgttcttgtgggtgctgctgttctgggtgcctgtgcctcaggggatttcgcttctgtacagataaggaaaacgaagcacagagcaattaaataacttgcccaagatcgcccaagatcacccaagatgtccggctgaagttcttaaccattaccttacactaatcaacagcaacaataataataaccacctttctaggatgcaaattatgttccaagaactttcattatttcattacatctgcatagccccaagagtaaataatatcctgttctattgaagaagaaactgaggtcccaagacatgaaattacttgctcaaggtcacacactgccctcaactctgtgatgtcaaaattcccttctccataggtaacagatcctatctggctacttttcattattaaggagaatggagatgtctcggattttttgtgcacaaattgtcctcagaaccaaacaaaataaccagcataggagagaattcacaaagtaagagactcataaagtaaaatgttttgctttactttttgcctttttcatcctgctttgtttttcaacatgtgtaaatcattctgttactataaacttaataaagaagtaaaagagcaaagaccaaaaatgtaataatgaaataaagtttttatcagttataattttttggcatgatcaggttatctttggtgtacacttcagggttttgtatttcaaacacaactcttcttaaaacttttcatgtgtcccagatgtgacctagtttccttctgggaaatgaatgctgagtgttgtacagacaagtcaaacagacatagctattttaggagtcattaatgtagtgcttatagaaaccaaatatgtaaacccacctggccaggaaaacctttattgagtatatactttgtgctgagtgatattccaggctccagaaatgaaaatacaaagggcaaggcccaatcttgaagagctcatgaactagtaaaagagaacaacaaacatgttacaaggcaaaaacaaattacaaatgtaaataataaagccaaagcataatatgtacaataatggaagcctgaaaaaggtaaagaagtattacataaaatggagccatttgttctgtcttaggagagctcaaaaaagccttcacagaaaaggtagaatccaagcaaattcaaaagtttaaagtccagtttggaaattttctttcaattaagtcatgacgtgtttatggacaaatatccacttgaatcaataagaaaaggaaaatgactagcataatgctgcacataaaataagaattaaaatgtttctgctctcttcgtgtatttttaaaattaaggtaaaattcagataacataaaatccacccttttagtcattttaaagtgtacaattttttagtacattttaaagtgtacaattcagtggtgtttagtacactcacaatgttttgcaaccattaccactacctaattctagaatatctttatcatccaaaaagaaaccctgtgcccattgagtagtcactggcctttccatttaccccaactcctccagcacgcgacaaccactaatttgctttctgtctctatgcctcttctggacactttatataaatacaaccatacaatatgtaggcatttgtgtctggcttctttcagttagcataatatttttgaggttcttccttgttatagcatgaatcagtactttattccttttcatagatgaataacatcccattgtatgtatatgccacatcttgttaatctgtttatcaattggaggacagtgggttgtttctacattttagctattgagaatagggctgcctccatatttgtgtacaagatttgtctgaactcttcttttcaattatcttaactatatacctaatgatatggtttgcctgtgtccccacccaaacctcatcttgaattgtagctcctataatccccatgtgttgtgggagggacctggtggcaggtaattgaatcccggtgtctggtttttcctgttctgttcttgtgacagtgaataagtctcatgaggtctgatggttttataatgggcagttctgcaaatgctgtctttcctgccaccatgtaagacgtgcctttgctcctccttcaccttccgccatgattgtgaggtcttcccagccatgggaactgtgagtccattaaacctctttttatttataaattacccagtcttgggtatttcttcatagcagcatgagaacaaatgaatacacctaggagtagcattgttgggtcttatgataacactaggtttaacttttcgaggaaccaccaaactattttttttcacgttggctgcaccattttacattcccaccagccatatatgaacgttccaatttctccacacctcaccaatattcatcacattctgttttgttttgttttgtattgttttgttttgtttactttttcccatcctagcgagtgtgaagtatctcattgtggttttcctttgtatttccctaatgactgatgatgctgactatctttttatgtgcttactggccatctgtatattttccttagagaaatgactattcagatcccttgcccatttttgaattaggttgtcttttgttatcgaattgtaagagttctgtataaattctggatataagtctcatcagatctataataggcaaatattttctcccattctgtaagttgtctatttttttgataaatcacccactccagtgacatagccaccatgtgctcacacacgcctcatcaggggcccaagcaccagcccattccagggtccactgccagtgaccctgttcattccagcagctgagtcactacacacctcacccagaggccagaggactggcccacccaaggcctgccactggtggcaacctcacccactccagtggccaagccactgaacatctgtgcaacacccaagacctaaggactggccgactcagagtctgacacctctggaaacctcacccactcagaaacagagctaccaaaggcctatagccctctcaggggccacagatctggcccactgggggcccactacactttgcaaagctgcaccatagcctccacaaactcttgcagcctaggccgctgaggcacttgcagacactgctaacattgaatacaccaaacagaatcacacagagactacactattgcacccacctggacccaaagccaaaacactacccaaccaacactaaaggacaaatctacaggaaaaattatttctttatgaaagttgctcaataaaatgagacaagacaactgctacaccagatgtgcagatatcaacataaggacacaagatgtatgcaaaagcaaggaaacctgacacctccaaaggaacataataattttccagtagcagactccaaaaaagaaaatctatgaaatgcctaaaaatgaactcaaaataattatcttaaaaaaactcagtgagatataagagaatacaaatagaccattcaatgaattcgggaaaacaattatcatcagaataagaaattcaacagagataggtactataaaatggaaccaaac

SEQ ID NO: 134197 - DNA, 2172 bp, Homo sapiens
  Payload ID: 6211
  Gene Symbol: FGGY
  Gene Name: FGGY carbohydrate kinase domain containing
  ENST ID: ENST00000635156
  CDS Start-End: 122-1513
gaggggggaaattttgcatgatcgcatggagaatggattttgttgctttatctgatattgtcctcagctcctcctgaatttgccgagatcttacagcagtcagtaaggtggaggaactgcaatgtctggtggagaacagaaaccagagaggtactatgtgggtgtggacgttggaacaggcagtgtccgtgcagctctggtggaccagagtggggtcctgttggcttttgcagaccagccaattaagaattgggagccccagttcaaccaccatgagcagtcctccgaggacatctgggctgcgtgctgtgttgtcacaaagaacttgagagagatttgctgggataaggcgggacatttctttgatctcccggacttcttatcgtggaaggcaacaggtgtcacagcacggtctctctgctccctggtgtgtaagtggacatattcagcagagaaaggctgggacgacagtttctggaaaatgattggtttggaagactttgttgcagataattacagcaaaataggaaaccaagtgctacctcctggagcttctcttggaaatgggctcacaccagaggcagcaagagaccttggccttctccctgggattgcggtcgcagcttcactcattgatgcccatgcaggaggactaggagtgattggggcagatgtgagagggcacggcctcatctgtgaggggcagccagtgacgtcacggctggctgtcatctgtggaacgtcttcttgtcacatggggatcagcaaagacccgatttttgtaccaggcgtctgggggccttatttctcagccatggtacctgggttctggctgaatgaaggtggtcagagcgttactggaaaattgatagaccacatggtacaaggccatgctgcttttccagaactacaagtaaaggccacagccagatgccagagtatatatgcatatttgaacagtcacctggatctgattaagaaggctcagcctgtgggtttccttactgttgatttacatgtttggccagatttccatggcaaccggtctcccttagcagatctgacactaaagggcatggtcaccggattgaaactgtctcaggaccttgatgatcttgccattctctacctggccacagttcaagccattgctttggggactcgcttcattatagaagccatggaggcagcagggcactcaatcagtactcttttcctatgtggaggcctcagcaagaatcccctttttgtgcaaatgcatgcggacattactggcatgcctgtggtcctgtcgcaagaggtggagtccgttcttgtgggtgctgctgttctgggtgcctgtgcctcaggggatttcgcttctgtacaggaagcaatggcaaaaatgagcaaagttgggaaagttgtgttcccgagactacaggataaaaaatactatgataagaaataccaagtattcctgaagctggttgaacaccagaaggagtatttggcgatcatgaatgatgactgaacagggcttgcaggtgctgatgccagaagcttctgtgccattgcattaaagacttgtcatttgatccatgttcaagacccttgagataaggaaaacgaagcacagagcaattaaataacttgcccaagatcgcccaagatcacccaagatgtccggctgaagttcttaaccattaccttacactaatcaacagcaacaataataataaccacctttctaggatgcaaattatgttccaagaactttcattatttcattacatctgcatagccccaagagtaaataatatcctgttctattgaagaagaaactgaggtcccaagacatgaaattacttgctcaaggtcacacactgccctcaactctgtgatgtcaaaattcccttctccataggtaacagatcctatctggctacttttcattattaaggagaatggagatgtctcggattttttgtgcacaaattgtcctcagaaccaaacaaaataaccagcataggagagaattcacaaagtaagagactcataaagtaaaatgttttgctttactttttgcctttttcatcctgctttgtttttcaacatgtgtaaatcattctgttactataaacttaataaagaagtaaaagagcaaagaccaaaaatgtaataatgaaataa

SEQ ID NO: 134198 - DNA, 5360 bp, Homo sapiens
  Payload ID: 6211
  Gene Symbol: FGGY
  Gene Name: FGGY carbohydrate kinase domain containing
  ENST ID: ENST00000634364
  CDS Start-End: 517-2061
acacccgccgggccgttgttcccgagacgttgttgagtcccctgtgtcctcttctgggagctagataagggcctggttccacttctcagtattcagggaatggattccctgcttactcccttccttcctttggatgccacaaaatgagcacttgactgaaaatatgcttatacgcgtttttacagactacgccaagccacagcaaatccctgattgcagtataactaactaaataaattgcacaggacttgtgtacatcaactcccagcaaagtccaaagatcaaagttgaaagaggatactgaattccttcccagatttctgggacactgcttctgtgcactgtcaccaaataaatcctggaggagtggcgccttaagaaataggagagggagtcaaaagtgaggaacccaagcctgagcacgtgggccagccccatggggaatctgtcttgtcatcggggctggctggagtagagacaagtctggatgctggctggccaggtggaggaactgcaatgtctggtggagaacagaaaccagagaggtactatgtgggtgtggacgttggaacaggcagtgtccgtgcagctctggtggaccagagtggggtcctgttggcttttgcagaccagccaattaagaattgggagccccagttcaaccaccatgagcagtcctccgaggacatctgggctgcgtgctgtgttgtcacaaagaaagttgtacaagggattgatttaaaccaaattcgaggacttgggtttgatgccacgtgttctctggttgttttggataagcagtttcacccattaccagtcaaccaggaaggggattcccatcgaaacgtcatcatgtggctggaccatcgagcagtcagtcaagttaacaggatcaatgagaccaagcacagtgtcctccagtacgtcgggggggtgatgtctgtggaaatgcaggccccgaaacttctgtggctgaaagagaacttgagagagatttgctgggataaggcgggacatttctttgatctcccggacttcttatcgtggaaggcaacaggtgtcacagcacggtctctctgctccctggtgtgtaagtggacatattcagcagagaaaggctgggacgacagtttctggaaaatgattggtttggaagactttgttgcagataattacagcaaaataggaaaccaagtgctacctcctggagcttctcttggaaatgggctcacaccagaggcagcaagagaccttggccttctccctgggattgcggtcgcagcttcactcattgatgcccatgcaggaggactaggagtgattggggcagatgtgagagggcacggcctcatctgtgaggggcagccagtgacgtcacggctggctgtcatctgtggaacgtcttcttgtcacatggggatcagcaaagacccgatttttgtaccaggcgtctgggggccttatttctcagccatggtacctgggttctggctgaatgaaggtggtcagagcgttactggaaaattgatagaccacatggtacaaggccatgctgcttttccagaactacaagtaaaggccacagccagatgccagagtatatatgcatatttgaacagtcacctggatctgattaagaaggctcagcctgtgggtttccttactgttgatttacatgtttggccagatttccatggcaaccggtctcccttagcagatctgacactaaagggcatggtcaccggattgaaactgtctcaggaccttgatgatcttgccattctctacctggccacagttcaagccattgctttggggactcgcttcattatagaagccatggaggcagcagggcactcaatcagtactcttttcctatgtggaggcctcagcaagaatcccctttttgtgcaaatgcatgcggacattactggcatgcctgtggtcctgtcgcaagaggtggagtccgttcttgtgggtgctgctgttctgggtgcctgtgcctcaggggatttcgcttctgtacagataaggaaaacgaagcacagagcaattaaataacttgcccaagatcgcccaagatcacccaagatgtccggctgaagttcttaaccattaccttacactaatcaacagcaacaataataataaccacctttctaggatgcaaattatgttccaagaactttcattatttcattacatctgcatagccccaagagtaaataatatcctgttctattgaagaagaaactgaggtcccaagacatgaaattacttgctcaaggtcacacactgccctcaactctgtgatgtcaaaattcccttctccataggtaacagatcctatctggctacttttcattattaaggagaatggagatgtctcggattttttgtgcacaaattgtcctcagaaccaaacaaaataaccagcataggagagaattcacaaagtaagagactcataaagtaaaatgttttgctttactttttgcctttttcatcctgctttgtttttcaacatgtgtaaatcattctgttactataaacttaataaagaagtaaaagagcaaagaccaaaaatgtaataatgaaataaagtttttatcagttataattttttggcatgatcaggttatctttggtgtacacttcagggttttgtatttcaaacacaactcttcttaaaacttttcatgtgtcccagatgtgacctagtttccttctgggaaatgaatgctgagtgttgtacagacaagtcaaacagacatagctattttaggagtcattaatgtagtgcttatagaaaccaaatatgtaaacccacctggccaggaaaacctttattgagtatatactttgtgctgagtgatattccaggctccagaaatgaaaatacaaagggcaaggcccaatcttgaagagctcatgaactagtaaaagagaacaacaaacatgttacaaggcaaaaacaaattacaaatgtaaataataaagccaaagcataatatgtacaataatggaagcctgaaaaaggtaaagaagtattacataaaatggagccatttgttctgtcttaggagagctcaaaaaagccttcacagaaaaggtagaatccaagcaaattcaaaagtttaaagtccagtttggaaattttctttcaattaagtcatgacgtgtttatggacaaatatccacttgaatcaataagaaaaggaaaatgactagcataatgctgcacataaaataagaattaaaatgtttctgctctcttcgtgtatttttaaaattaaggtaaaattcagataacataaaatccacccttttagtcattttaaagtgtacaattttttagtacattttaaagtgtacaattcagtggtgtttagtacactcacaatgttttgcaaccattaccactacctaattctagaatatctttatcatccaaaaagaaaccctgtgcccattgagtagtcactggcctttccatttaccccaactcctccagcacgcgacaaccactaatttgctttctgtctctatgcctcttctggacactttatataaatacaaccatacaatatgtaggcatttgtgtctggcttctttcagttagcataatatttttgaggttcttccttgttatagcatgaatcagtactttattccttttcatagatgaataacatcccattgtatgtatatgccacatcttgttaatctgtttatcaattggaggacagtgggttgtttctacattttagctattgagaatagggctgcctccatatttgtgtacaagatttgtctgaactcttcttttcaattatcttaactatatacctaatgatatggtttgcctgtgtccccacccaaacctcatcttgaattgtagctcctataatccccatgtgttgtgggagggacctggtggcaggtaattgaatcccggtgtctggtttttcctgttctgttcttgtgacagtgaataagtctcatgaggtctgatggttttataatgggcagttctgcaaatgctgtctttcctgccaccatgtaagacgtgcctttgctcctccttcaccttccgccatgattgtgaggtcttcccagccatgggaactgtgagtccattaaacctctttttatttataaattacccagtcttgggtatttcttcatagcagcatgagaacaaatgaatacacctaggagtagcattgttgggtcttatgataacactaggtttaacttttcgaggaaccaccaaactattttttttcacgttggctgcaccattttacattcccaccagccatatatgaacgttccaatttctccacacctcaccaatattcatcacattctgttttgttttgttttgtattgttttgttttgtttactttttcccatcctagcgagtgtgaagtatctcattgtggttttcctttgtatttccctaatgactgatgatgctgactatctttttatgtgcttactggccatctgtatattttccttagagaaatgactattcagatcccttgcccatttttgaattaggttgtcttttgttatcgaattgtaagagttctgtataaattctggatataagtctcatcagatctataataggcaaatattttctcccattctgtaagttgtctatttttttgataaatcacccactccagtgacatagccaccatgtgctcacacacgcctcatcaggggcccaagcaccagcccattccagggtccactgccagtgaccctgttcattccagcagctgagtcactacacacctcacccagaggccagaggactggcccacccaaggcctgccactggtggcaacctcacccactccagtggccaagccactgaacatctgtgcaacacccaagacctaaggactggccgactcagagtctgacacctctggaaacctcacccactcagaaacagagctaccaaaggcctatagccctctcaggggccacagatctggcccactgggggcccactacactttgcaaagctgcaccatagcctccacaaactcttgcagcctaggccgctgaggcacttgcagacactgctaacattgaatacaccaaacagaatcacacagagactacactattgcacccacctggacccaaagccaaaacactacccaaccaacactaaaggacaaatctacaggaaaaattatttctttatgaaagttgctcaataaaatgagacaagacaactgctacaccagatgtgcagatatcaacataaggacacaagatgtatgcaaaagcaaggaaacctgacacctccaaaggaacataataattttcc

SEQ ID NO: 134199 - DNA, 1738 bp, Homo sapiens
  Payload ID: 6211
  Gene Symbol: FGGY
  Gene Name: FGGY carbohydrate kinase domain containing
  ENST ID: ENST00000635297
  CDS Start-End: 234-695
gtaaacataagaatgggccaaagacttcaacccatctgtgacttggcattgtctctgaggggggaaattttgcatgatcgcatggagaatggattttgttgctttatctgatattgtcctcagctcctcctgaatttgccgagatcttacagcagtcagtaaggtctctctgctccctggtgtgtaagtggacatattcagcagagaaaggctgggacgacagtttctggaaaatgattggtttggaagactttgttgcagataattacagcaaaataggaaaccaagtgctacctcctggagcttctcttggaaatgggctcacaccagaggcagcaagagaccttggccttctccctgggattgcggtcgcagcttcactcattgatgcccatgcaggaggactaggagtgattggggcagatgtgagagggcacggcctcatctgtgaggggcagccagtgacgtcacggctggctgtcatctgtggaacgtcttcttgtcacatggggatcagcaaagacccgatttttgtaccaggcgtctgggggccttatttctcagccatggtacctgggttctggctgaatgaaggtggtcagagcgttactggaaaattgatagaccacatggtacaaggccatgctgcttttccagaactacaagtaaaggccacagccaggtcaccggattgaaactgtctcaggaccttgatgatcttgccattctctacctggccacagttcaagccattgctttggggactcgcttcattatagaagccatggaggcagcagggcactcaatcagtactcttttcctatgtggaggcctcagcaagaatcccctttttgtgcaaatgcatgcggacattactggcatgcctgtggtcctgtcgcaagaggtggagtccgttcttgtgggtgctgctgttctgggtgcctgtgcctcaggggatttcgcttctgtacaggaagcaatggcaaaaatgagcaaagttgggaaagttgtgttcccgagactacaggataaaaaatactatgataagaaataccaagtattcctgaagctggttgaacaccagaaggagtatttggcgatcatgaatgatgactgaacagggcttgcaggtgctgatgccagaagcttctgtgccattgcattaaagacttgtcatttgatccatgttcaagacccttgagataaggaaaacgaagcacagagcaattaaataacttgcccaagatcgcccaagatcacccaagatgtccggctgaagttcttaaccattaccttacactaatcaacagcaacaataataataaccacctttctaggatgcaaattatgttccaagaactttcattatttcattacatctgcatagccccaagagtaaataatatcctgttctattgaagaagaaactgaggtcccaagacatgaaattacttgctcaaggtcacacactgccctcaactctgtgatgtcaaaattcccttctccataggtaacagatcctatctggctacttttcattattaaggagaatggagatgtctcggattttttgtgcacaaattgtcctcagaaccaaacaaaataaccagcataggagagaattcacaaagtaagagactcataaagtaaaatgttttgctttactttttgcctttttcatcctgctttgtttttcaacatgtgtaaatcattctgttactataaacttaataaagaa

SEQ ID NO: 134200 - DNA, 2021 bp, Homo sapiens
  Payload ID: 6212
  Gene Symbol: FGR
  Gene Name: FGR proto-oncogene, Src family tyrosine kinase
  Uniprot ID: P09769
  ENST ID: ENST00000374003
  CDS Start-End: 187-1776
aaagggtgagaggggcaggtggggctagggtggagaccaaagcactgatgtgacggaaccatcagccaggcaactggacctggtggatccaggaagactttctggaagaggtctctgacccctcccaaggatcatgccgcagccccactgacccaggagtaggggcctaagggcagggaacctggaatgggctgtgtgttctgcaagaaattggagccggtggccacggccaaggaggatgctggcctggaaggggacttcagaagctacggggcagcagaccactatgggcctgaccccactaaggcccggcctgcatcctcatttgcccacatccccaactacagcaacttctcctctcaggccatcaaccctggcttccttgatagtggcaccatcaggggtgtgtcagggattggggtgaccctgttcattgccctgtatgactatgaggctcgaactgaggatgacctcaccttcaccaagggcgagaagttccacatcctgaacaatactgaaggtgactggtgggaggctcggtctctcagctccggaaaaactggctgcattcccagcaactacgtggcccctgttgactcaatccaagctgaagagtggtactttggaaagattgggagaaaggatgcagagaggcagctgctttcaccaggcaacccccagggggcctttctcattcgggaaagcgagaccaccaaaggtgcctactccctgtccatccgggactgggatcagaccagaggcgatcatgtgaagcattacaagatccgcaaactggacatgggcggctactacatcaccacacgggttcagttcaactcggtgcaggagctggtgcagcactacatggaggtgaatgacgggctgtgcaacctgctcatcgcgccctgcaccatcatgaagccgcagacgctgggcctggccaaggacgcctgggagatcagccgcagctccatcacgctggagcgccggctgggcaccggctgcttcggggatgtgtggctgggcacgtggaacggcagcactaaggtggcggtgaagacgctgaagccgggcaccatgtccccgaaggccttcctggaggaggcgcaggtcatgaagctgctgcggcacgacaagctggtgcagctgtacgccgtggtgtcggaggagcccatctacatcgtgaccgagttcatgtgtcacggcagcttgctggattttctcaagaacccagagggccaggatttgaggctgccccaattggtggacatggcagcccaggtagctgagggcatggcctacatggaacgcatgaactacattcaccgcgacctgagggcagccaacatcctggttggggagcggctggcgtgcaagatcgcagactttggcttggcgcgtctcatcaaggacgatgagtacaacccctgccaaggttccaagttccccatcaagtggacagccccagaagctgccctctttggcagattcaccatcaagtcagacgtgtggtcctttgggatcctgctcactgagctcatcaccaagggccgaatcccctacccaggcatgaataaacgggaagtgttggaacaggtggagcagggctaccacatgccgtgccctccaggctgcccagcatccctgtacgaggccatggaacagacctggcgtctggacccggaggagaggcctaccttcgagtacctgcagtccttcctggaggactacttcacctccgctgaaccacagtaccagcccggggatcagacatagcctgtccgggcatcaaccctctctggcggtggccaccagtccttgccaatccccagagctgttcttccaaagcccccaggctggcttagaaccccatagagtcctagcatcaccgaggacgtggctgctctgacaccacctagggcaacctacttgttttacagatggggcaaaaggaggcccagagctgatctctcatccgctctggccccaagcactatttcttccttttccacttaggcccc

SEQ ID NO: 134201 - DNA, 2350 bp, Homo sapiens
  Payload ID: 6212
  Gene Symbol: FGR
  Gene Name: FGR proto-oncogene, Src family tyrosine kinase
  Uniprot ID: P09769
  ENST ID: ENST00000374004
  CDS Start-End: 147-1736
gggaggaccccaatctaggcccaagagggaaagccacgtgcctgtatgagcgtatgagcatgtgcatgcgcgtgtgtgcacagggtggtgcacctggcaggggtccttgagtgaggcatgccccattctgtagcagggaacctggaatgggctgtgtgttctgcaagaaattggagccggtggccacggccaaggaggatgctggcctggaaggggacttcagaagctacggggcagcagaccactatgggcctgaccccactaaggcccggcctgcatcctcatttgcccacatccccaactacagcaacttctcctctcaggccatcaaccctggcttccttgatagtggcaccatcaggggtgtgtcagggattggggtgaccctgttcattgccctgtatgactatgaggctcgaactgaggatgacctcaccttcaccaagggcgagaagttccacatcctgaacaatactgaaggtgactggtgggaggctcggtctctcagctccggaaaaactggctgcattcccagcaactacgtggcccctgttgactcaatccaagctgaagagtggtactttggaaagattgggagaaaggatgcagagaggcagctgctttcaccaggcaacccccagggggcctttctcattcgggaaagcgagaccaccaaaggtgcctactccctgtccatccgggactgggatcagaccagaggcgatcatgtgaagcattacaagatccgcaaactggacatgggcggctactacatcaccacacgggttcagttcaactcggtgcaggagctggtgcagcactacatggaggtgaatgacgggctgtgcaacctgctcatcgcgccctgcaccatcatgaagccgcagacgctgggcctggccaaggacgcctgggagatcagccgcagctccatcacgctggagcgccggctgggcaccggctgcttcggggatgtgtggctgggcacgtggaacggcagcactaaggtggcggtgaagacgctgaagccgggcaccatgtccccgaaggccttcctggaggaggcgcaggtcatgaagctgctgcggcacgacaagctggtgcagctgtacgccgtggtgtcggaggagcccatctacatcgtgaccgagttcatgtgtcacggcagcttgctggattttctcaagaacccagagggccaggatttgaggctgccccaattggtggacatggcagcccaggtagctgagggcatggcctacatggaacgcatgaactacattcaccgcgacctgagggcagccaacatcctggttggggagcggctggcgtgcaagatcgcagactttggcttggcgcgtctcatcaaggacgatgagtacaacccctgccaaggttccaagttccccatcaagtggacagccccagaagctgccctctttggcagattcaccatcaagtcagacgtgtggtcctttgggatcctgctcactgagctcatcaccaagggccgaatcccctacccaggcatgaataaacgggaagtgttggaacaggtggagcagggctaccacatgccgtgccctccaggctgcccagcatccctgtacgaggccatggaacagacctggcgtctggacccggaggagaggcctaccttcgagtacctgcagtccttcctggaggactacttcacctccgctgaaccacagtaccagcccggggatcagacatagcctgtccgggcatcaaccctctctggcggtggccaccagtccttgccaatccccagagctgttcttccaaagcccccaggctggcttagaaccccatagagtcctagcatcaccgaggacgtggctgctctgacaccacctagggcaacctacttgttttacagatggggcaaaaggaggcccagagctgatctctcatccgctctggccccaagcactatttcttccttttccacttaggcccctacatgcctgtagcctttctcactccatccccacccaaagtgctcagaccttgtctagttatttataaaactgtatgtacctccctcacttctctcctatcactgctttcctactctccttttatctcactctagtccaggtgccaagaatttcccttctaccctctattctcttgtgtctgtaagttacaaagtcaggaaaagtcttggctggacccctttcctgctgggtggatgcagtggtccaggactggggtctgggcccaggtttgagggagaaggttgcagagcacttcccacctctctgaatagtgtgtatgtgttggtttattgattctgtaaataagtaaaatgacaatatgaatcctc

SEQ ID NO: 134202 - DNA, 2729 bp, Homo sapiens
  Payload ID: 6212
  Gene Symbol: FGR
  Gene Name: FGR proto-oncogene, Src family tyrosine kinase
  Uniprot ID: P09769
  ENST ID: ENST00000374005
  CDS Start-End: 290-1879
ggcttggggctagggcgtgactgtctccctgccaccatcaccgcccgccggccgtgactgcaataagagaagtccgaggcggcttcctcctccctgcccagcaggggcggcggtcagaggcgggcagcaccccagttctccccgcacgccggcactcgcggctgctggagccccggctggctcaccccggggccgggcagaattgggctccaggtctctgacccctcccaaggatcatgccgcagccccactgacccaggagtaggggcctaagggcagggaacctggaatgggctgtgtgttctgcaagaaattggagccggtggccacggccaaggaggatgctggcctggaaggggacttcagaagctacggggcagcagaccactatgggcctgaccccactaaggcccggcctgcatcctcatttgcccacatccccaactacagcaacttctcctctcaggccatcaaccctggcttccttgatagtggcaccatcaggggtgtgtcagggattggggtgaccctgttcattgccctgtatgactatgaggctcgaactgaggatgacctcaccttcaccaagggcgagaagttccacatcctgaacaatactgaaggtgactggtgggaggctcggtctctcagctccggaaaaactggctgcattcccagcaactacgtggcccctgttgactcaatccaagctgaagagtggtactttggaaagattgggagaaaggatgcagagaggcagctgctttcaccaggcaacccccagggggcctttctcattcgggaaagcgagaccaccaaaggtgcctactccctgtccatccgggactgggatcagaccagaggcgatcatgtgaagcattacaagatccgcaaactggacatgggcggctactacatcaccacacgggttcagttcaactcggtgcaggagctggtgcagcactacatggaggtgaatgacgggctgtgcaacctgctcatcgcgccctgcaccatcatgaagccgcagacgctgggcctggccaaggacgcctgggagatcagccgcagctccatcacgctggagcgccggctgggcaccggctgcttcggggatgtgtggctgggcacgtggaacggcagcactaaggtggcggtgaagacgctgaagccgggcaccatgtccccgaaggccttcctggaggaggcgcaggtcatgaagctgctgcggcacgacaagctggtgcagctgtacgccgtggtgtcggaggagcccatctacatcgtgaccgagttcatgtgtcacggcagcttgctggattttctcaagaacccagagggccaggatttgaggctgccccaattggtggacatggcagcccaggtagctgagggcatggcctacatggaacgcatgaactacattcaccgcgacctgagggcagccaacatcctggttggggagcggctggcgtgcaagatcgcagactttggcttggcgcgtctcatcaaggacgatgagtacaacccctgccaaggttccaagttccccatcaagtggacagccccagaagctgccctctttggcagattcaccatcaagtcagacgtgtggtcctttgggatcctgctcactgagctcatcaccaagggccgaatcccctacccaggcatgaataaacgggaagtgttggaacaggtggagcagggctaccacatgccgtgccctccaggctgcccagcatccctgtacgaggccatggaacagacctggcgtctggacccggaggagaggcctaccttcgagtacctgcagtccttcctggaggactacttcacctccgctgaaccacagtaccagcccggggatcagacatagcctgtccgggcatcaaccctctctggcggtggccaccagtccttgccaatccccagagctgttcttccaaagcccccaggctggcttagaaccccatagagtcctagcatcaccgaggacgtggctgctctgacaccacctagggcaacctacttgttttacagatggggcaaaaggaggcccagagctgatctctcatccgctctggccccaagcactatttcttccttttccacttaggcccctacatgcctgtagcctttctcactccatccccacccaaagtgctcagaccttgtctagttatttataaaactgtatgtacctccctcacttctctcctatcactgctttcctactctccttttatctcactctagtccaggtgccaagaatttcccttctaccctctattctcttgtgtctgtaagttacaaagtcaggaaaagtcttggctggacccctttcctgctgggtggatgcagtggtccaggactggggtctgggcccaggtttgagggagaaggttgcagagcacttcccacctctctgaatagtgtgtatgtgttggtttattgattctgtaaataagtaaaatgacaatatgaatcctcaaaccatgaaatacccttgaaccttcctttgggagcgggggtggtcaatagggggtgaacggacagatatggctacaggcagcagcaggggaagctggagagggccctaatgcctaccaagcacggggcatccaaggtgtggagttttagaacacccagagtcccactgctcatctgcacgtgagtttagaagacaagcagctgaagatacattaaaatgtccccttcgttgctga

SEQ ID NO: 134203 - DNA, 2483 bp, Homo sapiens
  Payload ID: 6212
  Gene Symbol: FGR
  Gene Name: FGR proto-oncogene, Src family tyrosine kinase
  Uniprot ID: P09769
  ENST ID: ENST00000399173
  CDS Start-End: 272-1861
ctctgagtgttgcaatggcaatgtttctggcagggtgtgggggacccttgctcaatgacctcctgccctgttgctcagaggataccgctgccagaaaagggttggctcattgtggggcttcccaaggtactctggtagccccagcttctgacctggtcctttctctggtatggggataggaggagagctccggaggtctctgacccctcccaaggatcatgccgcagccccactgacccaggagtaggggcctaagggcagggaacctggaatgggctgtgtgttctgcaagaaattggagccggtggccacggccaaggaggatgctggcctggaaggggacttcagaagctacggggcagcagaccactatgggcctgaccccactaaggcccggcctgcatcctcatttgcccacatccccaactacagcaacttctcctctcaggccatcaaccctggcttccttgatagtggcaccatcaggggtgtgtcagggattggggtgaccctgttcattgccctgtatgactatgaggctcgaactgaggatgacctcaccttcaccaagggcgagaagttccacatcctgaacaatactgaaggtgactggtgggaggctcggtctctcagctccggaaaaactggctgcattcccagcaactacgtggcccctgttgactcaatccaagctgaagagtggtactttggaaagattgggagaaaggatgcagagaggcagctgctttcaccaggcaacccccagggggcctttctcattcgggaaagcgagaccaccaaaggtgcctactccctgtccatccgggactgggatcagaccagaggcgatcatgtgaagcattacaagatccgcaaactggacatgggcggctactacatcaccacacgggttcagttcaactcggtgcaggagctggtgcagcactacatggaggtgaatgacgggctgtgcaacctgctcatcgcgccctgcaccatcatgaagccgcagacgctgggcctggccaaggacgcctgggagatcagccgcagctccatcacgctggagcgccggctgggcaccggctgcttcggggatgtgtggctgggcacgtggaacggcagcactaaggtggcggtgaagacgctgaagccgggcaccatgtccccgaaggccttcctggaggaggcgcaggtcatgaagctgctgcggcacgacaagctggtgcagctgtacgccgtggtgtcggaggagcccatctacatcgtgaccgagttcatgtgtcacggcagcttgctggattttctcaagaacccagagggccaggatttgaggctgccccaattggtggacatggcagcccaggtagctgagggcatggcctacatggaacgcatgaactacattcaccgcgacctgagggcagccaacatcctggttggggagcggctggcgtgcaagatcgcagactttggcttggcgcgtctcatcaaggacgatgagtacaacccctgccaaggttccaagttccccatcaagtggacagccccagaagctgccctctttggcagattcaccatcaagtcagacgtgtggtcctttgggatcctgctcactgagctcatcaccaagggccgaatcccctacccaggcatgaataaacgggaagtgttggaacaggtggagcagggctaccacatgccgtgccctccaggctgcccagcatccctgtacgaggccatggaacagacctggcgtctggacccggaggagaggcctaccttcgagtacctgcagtccttcctggaggactacttcacctccgctgaaccacagtaccagcccggggatcagacatagcctgtccgggcatcaaccctctctggcggtggccaccagtccttgccaatccccagagctgttcttccaaagcccccaggctggcttagaaccccatagagtcctagcatcaccgaggacgtggctgctctgacaccacctagggcaacctacttgttttacagatggggcaaaaggaggcccagagctgatctctcatccgctctggccccaagcactatttcttccttttccacttaggcccctacatgcctgtagcctttctcactccatccccacccaaagtgctcagaccttgtctagttatttataaaactgtatgtacctccctcacttctctcctatcactgctttcctactctccttttatctcactctagtccaggtgccaagaatttcccttctaccctctattctcttgtgtctgtaagttacaaagtcaggaaaagtcttggctggacccctttcctgctgggtggatgcagtggtccaggactggggtctgggcccaggtttgagggagaaggttgcagagcacttcccacctctctgaatagtgtgtatgtgttggtttattgattctgtaaataagtaaaatgacaatatgaatcctcaaaccatg

SEQ ID NO: 134204 - DNA, 1104 bp, Homo sapiens
  Payload ID: 6212
  Gene Symbol: FGR
  Gene Name: FGR proto-oncogene, Src family tyrosine kinase
  ENST ID: ENST00000457296
  CDS Start-End: 167-1104
ctcattgtggggcttcccaaggtactctggtagccccagcttctgacctggtcctttctctggtatggggataggaggagagctccggaggtctctgacccctcccaaggatcatgccgcagccccactgacccaggagtaggggcctaagggcagggaacctggaatgggctgtgtgttctgcaagaaattggagccggtggccacggccaaggaggatgctggcctggaaggggacttcagaagctacggggcagcagaccactatgggcctgaccccactaaggcccggcctgcatcctcatttgcccacatccccaactacagcaacttctcctctcaggccatcaaccctggcttccttgatagtggcaccatcaggggtgtgtcagggattggggtgaccctgttcattgccctgtatgactatgaggctcgaactgaggatgacctcaccttcaccaagggcgagaagttccacatcctgaacaatactgaaggtgactggtgggaggctcggtctctcagctccggaaaaactggctgcattcccagcaactacgtggcccctgttgactcaatccaagctgaagagtggtactttggaaagattgggagaaaggatgcagagaggcagctgctttcaccaggcaacccccagggggcctttctcattcgggaaagcgagaccaccaaaggtgcctactccctgtccatccgggactgggatcagaccagaggcgatcatgtgaagcattacaagatccgcaaactggacatgggcggctactacatcaccacacgggttcagttcaactcggtgcaggagctggtgcagcactacatggaggtgaatgacgggctgtgcaacctgctcatcgcgccctgcaccatcatgaagccgcagacgctgggcctggccaaggacgcctgggagatcagccgcagctccatcacgctggagcgccggctgggcaccggctgcttcggggatgtgtggctgggcacgtggaacggcagcactaaggtggcggtgaagacgctgaagccgggcaccatgtccccgaaggccttcctggaggaggcgcaggtcatgaagctgct

SEQ ID NO: 134205 - DNA, 6480 bp, Homo sapiens
  Payload ID: 6213
  Gene Symbol: FHDC1
  Gene Name: FH2 domain containing 1
  Uniprot ID: Q9C0D6
  ENST ID: ENST00000260008
  CDS Start-End: 76-3507
agtgctacacaagtttgatgtttgtgtcttcttctccaaggccaagaaattatctccataggaggcaacagtactatgcatgttatgaattgtgtctccttggtcagtgataaagaaaatgggaatattgccacagcacctggattcatgattgggcagacacctcctccagcacctcctccacctcctcctccaccccctccatctccaccatgttcatgttcaagggaagagtgtccttcctcccctcctccacccccaccacctccacttcctggggagcctcccatcccacctcccccaccaggcctacccccaactactcacatgaacggctacagccaccttggtaagaaaaagcggatgagaagctttttttggaaaactattccggaggagcaagttcgaggcaaaaccaacatctggaccttggcagccaggcaggaacatcactaccaaattgatacaaagaccattgaggagctctttgggcagcaggaagacaccaccaagtcttcccttcctaggagaggaagaactttaaattcatccttcagagaagctcgagaagagattactattttggatgcaaaacggagcatgaacattgggatatttcttaagcaatttaagaagtctcctcggtccattgtagaagatattcatcaaggaaaaagtgagcattatggatcagagaccttgcgagaatttcttaagtttttgccagagtcagaagaggtaaagaagttaaaagcgtttagtggcgacgtgtcgaagctgtctctggcagattcctttctgtatggcttaattcaggtgccaaactattcacttcggattgaagccatggtgctaaagaaggaatttctaccttcttgctcttctctatatacagatataacagttttaagaactgctataaaagaactgatgtcatgtgaagagctacattcaatattacacttggtgctccaggctgggaatatcatgaatgcaggagggtatgccggcaatgcagtaggatttaaactgtcttctttgctcaaattggcagacacaaaagcaaacaaacctgggatgaatctcctgcactttgttgcacaggaagcccaaaagaaagataccattcttctaaacttttcagaaaaattgcatcatgttcagaagactgctagattatctctggagaacacggaggcagaactgcacttgctgtttgtcaggacaaaatcactaaaagaaaacatccagcgggatggtgaactttgtcagcagatggaagattttcttcagtttgccatagaaaagctgagggaactggaatgctggaaacaagagctccaggatgaggcctacacccttatagattttttctgtgaagacaaaaaaaccatgaaactggatgaatgctttcagatatttagagatttctgtaccaaattcaacaaagcagttaaggacaaccacgaccgggaggcgcaggagctgaggcagctgcagaggctgaaggagcaggagcagaagcagcgctcctgggcaactggggagctgggggcatttggccggagcagcagtgagaatgatgtggagctgctgaccaagaagggtgcagagggcctgctccctttcctgcaccccaggcccatcagcccctccagcccctcctaccggcccccgaacacccgccgctcccgcctctccctgggtccctctgctgaccgggagctgctgaccttcttggagagctccaccggcagccctgaggagcccaataagttccacagcctgccccggagcagcccccggcaggcccggcccacgatagcctgcctggagcctgcagaagtgaggcaccaggactccagctttgcacacaaacctcaggcctcggggggccaggaggaggcccccaacccaccctcagcacaggcgcaccagcttgcagccgcccagcctgagaaccatgcctctgccttccccagagctcggcgccagggcgtcagtgtcctccgaaagaggtacagtgagccggtgagcctgggctcagcacagtcccctcctctctcgccattggctctgggaattaaggagcatgagctggtgacagggctggcccagttcaacctccagggttcccagggcatggaggagacctcccagctgactctgagtgacttcagcccgatggagctagagtctgtggggcataggggcccgcagtccctcagtgccagcagcagcagcctgacacccatgggcagagatgccctggggagtctcagcccagcgctggaggatggcaaggctgcccccgatgagcctggaagtgcagctttgggatctgtgggtagcagcgaccctgagaacaaagatcctagacctctgttctgcatctcggacaccaccgactgctcactgaccctggactgctcagagggaaccgactccagacccagaggcggggacccggaggaaggcggggaaggggatggctccatgtcctctggggttggagaaatgggggacagccaagtctcctccaaccctacatccagcccccctggggaggctcctgcccccgtctctgtggatagtgagcccagctgcaagggcggcctgcccagggacaaacccaccaaaaggaaagatgttgtagcaccaaagagaggctccctgaaagaggcgtctcccggggcctccaagcccgggagcgcccggcggagccagggggcagtggccaagtctgtgcggaccctgaccgcctcagagaacgagagcatgcgcaaggtcatgcccatcaccaagtccagcagaggcgccggctggaggcgaccagagctgtcatcccgggggccctcccagaatccccccagcagcacagatactgtgtggtcacgccagaactccgtgcggagggcctccacaggcgccgaagagcagaggctgccgcgggggagcagcggctccagcagcacccgtccggggagggacgttcccctgcagcccaggggttctttcaagaagcccagtgccaaaccactcaggaacctccccagacagaagcctgaggaaaataagacctgccgcgcccactccgagggccctgagagtcccaaagaagagcccaagaccccgtcagtgcccagcgtcccccacgaactaccccgtgtcccgagctttgcccggaacacagtggcctcctcctctcgaagcatgagaacagatcttcctcccgtggccaaagcccccggcatcactcggacagtgtcgcagcggcagctgagggtgaaaggggaccccgaggatgccgctcccaaggacagcagcactttgaggcgagccagcagtgcccgggcccccaagaagcgcccagagtctgcggagggtcccagtgccaacacggaggcccctctgaaggccagaggggctggggaaagggcctccctccgtcggaaggactccagtcggaccacgctggggagaatcctcaatcccttacggaagtgatgggtgcctgtcctctcctgcctcctgggattcagacggtgaagactgacttctgggacgaggatggggaaagaggcagcatgtctttgttacagataaagcagccactggtgccactgctagtgacgctgttgggatggcacagtccaggaggcctgtggactgcagcctgctgtgctgagccctgctgcagtccagcgtccagatggatgcacgttcactactgtgacggccgcacctcccccatgcaccccaccctcccccaaagcccggatcccgagaaagatttagtaggagtgtaaagtgacattcttatgaaacaagtcaaaaaagtttttttcaggccagtttttatatatcaaagactttctttttaatataaaaattagctaggtgcagtggttcatgcctgtaatccagcactttgggaggctaagatgagtggattgcttgagcctaggagttcgagaccagcctaggcaacatggagaaaccccgtctctatcagaaatacaaaatttagccgagtgtggtggcacatgcctgtggccccagccactctgaacgctgagatgggaaggtcacttgagcccaggaccccaccactgcactccagcctggatgacagagtgagaccttgtctcaaacaaaacaaaacaaaaatgaaatgttctagttttggttccttttgcagagtgaaatgcctcccaggaaaaaaatacatatgtatttttttgcgacagggtcgtgctcttgtctcccagactggactgcagtggcacaatcatagctcactgcagctttgacctcccagacccaagtgatcctcccacctcagcctccctcagagctgggactacaggcgtgcaccaccacgcctggttaattgtttttttttaatttatcttttgtagagatgggatctcactatgttgctcaggctgatctcgagctcctgggctcaagtgatcctcccacctcagcctcccaaagtgctgggattacaggtgtgagccaccacacttggccagtatatcctcagtatgaagatatttttatcttcctgtgttctctggcttcagagtttcacctgcccacacagggtccgttgctggcaactggacttccccataagccttgggtatcctgtgatgggctgtgtctccctgaagattgtctggcttgcccacttctccgtgcatgactctgggtgtgagtctgtctaggaacaggagggaaagttggactcagacagaaatcagatgcttccatgtattcagggcgcgcattgtgagcagtggagtatgagccttgagggcctcatggttgcagggcaggcttccctgcagatgggtggcagcccctggtagaatgctggatttctctggaatctagaagtgccatattttagtggaaaggcatcagggctgtttgacagtgtgcgtctttccaatcccatgttcctccattcgtgtgtctgttataaaactgagtgaaggctgctatgacctgtgttcactctggttacagggaggtgcaaaccattctgtctcccagcctttcttctctctttgtgtgctcccagcacttccttcttttctaacatggcctggagagagtctctctctccttgtctctgtctcttaataatagtttttaacgtggacatctcttccttggtacagtggtttttaaatactgagaagaaccaagtcaggttttttaaagcagactaaaagcatgaaattgctttcagaagaatgtatatcatcgggaaaagttcgggggcagagtgggggaatcaggctttattcaaaagaaacagttgaaaacatgggactttttctacccaatgcccatttcacgactcctctgagactaattgggaaacggggaaattcttggaattttttttttaagaaacttttttgtgttttttttaattttaggtcacttattagtgaaacctcattttagatctgacattggtagatagatggatttaggcaaatatgatgcgtttgtggggaatccacgtggttgacgttagaacctcccttctgcagactgttgcctgtcatctaagcgaattggaaatgctgagcttccataagtcagctgagttttaaaggtaaacgttatggctgaaatagtaaagcacctgaccacaaaacctcttgtaaaaacagccctgagtaggtatttccagggctccacaaagttgcttatgggaatcctgagctgcttttcaccatctcaagaagcctaagaagttatatatttaatcaggtagacaaaacagttcaaagcataaggtccatggtggtggaaaatggatgcaagtgattctaagtttgtggatttgtggatagcagagggatcgggacctcttggaggaaccctgggtaccaagctcccaggcccttcctctatcatggatgctgggtgactttgggaagtcaccacctcttcccaagcctgtttcccatatcacagatgtggggccatggcctcgatgatggtctccacaggtctttccacctctgtgagtccaagtcaggtcaatcagcaaggacccatctctgccctgggtcagctcctcagaaccaacccccagcatctctaaagcaaaagcctcacctcaagggctgctcagaagagagcaccttcagcatgagttgttgctggaagatctaataagctgtgtttcctgggaagtggtgctttacttagccctgtggacaacttctctatgcatctgtgtgagcagatgatcattgtattaccttttatcggtagtaagcttggaaaaataatttaagaatacaatggagaaatgtaaataagtatctatgtaaatttgtttaaaataaactgaatgtatttaatggtccatttatatgttcttttatgtaacatgtagtttaataaagttcctgtttatgagagtcatgtttcatctcagcttcttcc

SEQ ID NO: 134206 - DNA, 6583 bp, Homo sapiens
  Payload ID: 6213
  Gene Symbol: FHDC1
  Gene Name: FH2 domain containing 1
  Uniprot ID: Q9C0D6
  ENST ID: ENST00000511601
  CDS Start-End: 189-3620
acaacggcgggaggctgcagcggtctgcgcgccgggagcgggggcgcgctggccgcgggtttggaagaggacagttgccctttattctggcggcagatagcagcaggtgaaaaagtgctacacaagtttgatgtttgtgtcttcttctccaaggccaagaaattatctccataggaggcaacagtactatgcatgttatgaattgtgtctccttggtcagtgataaagaaaatgggaatattgccacagcacctggattcatgattgggcagacacctcctccagcacctcctccacctcctcctccaccccctccatctccaccatgttcatgttcaagggaagagtgtccttcctcccctcctccacccccaccacctccacttcctggggagcctcccatcccacctcccccaccaggcctacccccaactactcacatgaacggctacagccaccttggtaagaaaaagcggatgagaagctttttttggaaaactattccggaggagcaagttcgaggcaaaaccaacatctggaccttggcagccaggcaggaacatcactaccaaattgatacaaagaccattgaggagctctttgggcagcaggaagacaccaccaagtcttcccttcctaggagaggaagaactttaaattcatccttcagagaagctcgagaagagattactattttggatgcaaaacggagcatgaacattgggatatttcttaagcaatttaagaagtctcctcggtccattgtagaagatattcatcaaggaaaaagtgagcattatggatcagagaccttgcgagaatttcttaagtttttgccagagtcagaagaggtaaagaagttaaaagcgtttagtggcgacgtgtcgaagctgtctctggcagattcctttctgtatggcttaattcaggtgccaaactattcacttcggattgaagccatggtgctaaagaaggaatttctaccttcttgctcttctctatatacagatataacagttttaagaactgctataaaagaactgatgtcatgtgaagagctacattcaatattacacttggtgctccaggctgggaatatcatgaatgcaggagggtatgccggcaatgcagtaggatttaaactgtcttctttgctcaaattggcagacacaaaagcaaacaaacctgggatgaatctcctgcactttgttgcacaggaagcccaaaagaaagataccattcttctaaacttttcagaaaaattgcatcatgttcagaagactgctagattatctctggagaacacggaggcagaactgcacttgctgtttgtcaggacaaaatcactaaaagaaaacatccagcgggatggtgaactttgtcagcagatggaagattttcttcagtttgccatagaaaagctgagggaactggaatgctggaaacaagagctccaggatgaggcctacacccttatagattttttctgtgaagacaaaaaaaccatgaaactggatgaatgctttcagatatttagagatttctgtaccaaattcaacaaagcagttaaggacaaccacgaccgggaggcgcaggagctgaggcagctgcagaggctgaaggagcaggagcagaagcagcgctcctgggcaactggggagctgggggcatttggccggagcagcagtgagaatgatgtggagctgctgaccaagaagggtgcagagggcctgctccctttcctgcaccccaggcccatcagcccctccagcccctcctaccggcccccgaacacccgccgctcccgcctctccctgggtccctctgctgaccgggagctgctgaccttcttggagagctccaccggcagccctgaggagcccaataagttccacagcctgccccggagcagcccccggcaggcccggcccacgatagcctgcctggagcctgcagaagtgaggcaccaggactccagctttgcacacaaacctcaggcctcggggggccaggaggaggcccccaacccaccctcagcacaggcgcaccagcttgcagccgcccagcctgagaaccatgcctctgccttccccagagctcggcgccagggcgtcagtgtcctccgaaagaggtacagtgagccggtgagcctgggctcagcacagtcccctcctctctcgccattggctctgggaattaaggagcatgagctggtgacagggctggcccagttcaacctccagggttcccagggcatggaggagacctcccagctgactctgagtgacttcagcccgatggagctagagtctgtggggcataggggcccgcagtccctcagtgccagcagcagcagcctgacacccatgggcagagatgccctggggagtctcagcccagcgctggaggatggcaaggctgcccccgatgagcctggaagtgcagctttgggatctgtgggtagcagcgaccctgagaacaaagatcctagacctctgttctgcatctcggacaccaccgactgctcactgaccctggactgctcagagggaaccgactccagacccagaggcggggacccggaggaaggcggggaaggggatggctccatgtcctctggggttggagaaatgggggacagccaagtctcctccaaccctacatccagcccccctggggaggctcctgcccccgtctctgtggatagtgagcccagctgcaagggcggcctgcccagggacaaacccaccaaaaggaaagatgttgtagcaccaaagagaggctccctgaaagaggcgtctcccggggcctccaagcccgggagcgcccggcggagccagggggcagtggccaagtctgtgcggaccctgaccgcctcagagaacgagagcatgcgcaaggtcatgcccatcaccaagtccagcagaggcgccggctggaggcgaccagagctgtcatcccgggggccctcccagaatccccccagcagcacagatactgtgtggtcacgccagaactccgtgcggagggcctccacaggcgccgaagagcagaggctgccgcgggggagcagcggctccagcagcacccgtccggggagggacgttcccctgcagcccaggggttctttcaagaagcccagtgccaaaccactcaggaacctccccagacagaagcctgaggaaaataagacctgccgcgcccactccgagggccctgagagtcccaaagaagagcccaagaccccgtcagtgcccagcgtcccccacgaactaccccgtgtcccgagctttgcccggaacacagtggcctcctcctctcgaagcatgagaacagatcttcctcccgtggccaaagcccccggcatcactcggacagtgtcgcagcggcagctgagggtgaaaggggaccccgaggatgccgctcccaaggacagcagcactttgaggcgagccagcagtgcccgggcccccaagaagcgcccagagtctgcggagggtcccagtgccaacacggaggcccctctgaaggccagaggggctggggaaagggcctccctccgtcggaaggactccagtcggaccacgctggggagaatcctcaatcccttacggaagtgatgggtgcctgtcctctcctgcctcctgggattcagacggtgaagactgacttctgggacgaggatggggaaagaggcagcatgtctttgttacagataaagcagccactggtgccactgctagtgacgctgttgggatggcacagtccaggaggcctgtggactgcagcctgctgtgctgagccctgctgcagtccagcgtccagatggatgcacgttcactactgtgacggccgcacctcccccatgcaccccaccctcccccaaagcccggatcccgagaaagatttagtaggagtgtaaagtgacattcttatgaaacaagtcaaaaaagtttttttcaggccagtttttatatatcaaagactttctttttaatataaaaattagctaggtgcagtggttcatgcctgtaatccagcactttgggaggctaagatgagtggattgcttgagcctaggagttcgagaccagcctaggcaacatggagaaaccccgtctctatcagaaatacaaaatttagccgagtgtggtggcacatgcctgtggccccagccactctgaacgctgagatgggaaggtcacttgagcccaggaccccaccactgcactccagcctggatgacagagtgagaccttgtctcaaacaaaacaaaacaaaaatgaaatgttctagttttggttccttttgcagagtgaaatgcctcccaggaaaaaaatacatatgtatttttttgcgacagggtcgtgctcttgtctcccagactggactgcagtggcacaatcatagctcactgcagctttgacctcccagacccaagtgatcctcccacctcagcctccctcagagctgggactacaggcgtgcaccaccacgcctggttaattgtttttttttaatttatcttttgtagagatgggatctcactatgttgctcaggctgatctcgagctcctgggctcaagtgatcctcccacctcagcctcccaaagtgctgggattacaggtgtgagccaccacacttggccagtatatcctcagtatgaagatatttttatcttcctgtgttctctggcttcagagtttcacctgcccacacagggtccgttgctggcaactggacttccccataagccttgggtatcctgtgatgggctgtgtctccctgaagattgtctggcttgcccacttctccgtgcatgactctgggtgtgagtctgtctaggaacaggagggaaagttggactcagacagaaatcagatgcttccatgtattcagggcgcgcattgtgagcagtggagtatgagccttgagggcctcatggttgcagggcaggcttccctgcagatgggtggcagcccctggtagaatgctggatttctctggaatctagaagtgccatattttagtggaaaggcatcagggctgtttgacagtgtgcgtctttccaatcccatgttcctccattcgtgtgtctgttataaaactgagtgaaggctgctatgacctgtgttcactctggttacagggaggtgcaaaccattctgtctcccagcctttcttctctctttgtgtgctcccagcacttccttcttttctaacatggcctggagagagtctctctctccttgtctctgtctcttaataatagtttttaacgtggacatctcttccttggtacagtggtttttaaatactgagaagaaccaagtcaggttttttaaagcagactaaaagcatgaaattgctttcagaagaatgtatatcatcgggaaaagttcgggggcagagtgggggaatcaggctttattcaaaagaaacagttgaaaacatgggactttttctacccaatgcccatttcacgactcctctgagactaattgggaaacggggaaattcttggaattttttttttaagaaacttttttgtgttttttttaattttaggtcacttattagtgaaacctcattttagatctgacattggtagatagatggatttaggcaaatatgatgcgtttgtggggaatccacgtggttgacgttagaacctcccttctgcagactgttgcctgtcatctaagcgaattggaaatgctgagcttccataagtcagctgagttttaaaggtaaacgttatggctgaaatagtaaagcacctgaccacaaaacctcttgtaaaaacagccctgagtaggtatttccagggctccacaaagttgcttatgggaatcctgagctgcttttcaccatctcaagaagcctaagaagttatatatttaatcaggtagacaaaacagttcaaagcataaggtccatggtggtggaaaatggatgcaagtgattctaagtttgtggatttgtggatagcagagggatcgggacctcttggaggaaccctgggtaccaagctcccaggcccttcctctatcatggatgctgggtgactttgggaagtcaccacctcttcccaagcctgtttcccatatcacagatgtggggccatggcctcgatgatggtctccacaggtctttccacctctgtgagtccaagtcaggtcaatcagcaaggacccatctctgccctgggtcagctcctcagaaccaacccccagcatctctaaagcaaaagcctcacctcaagggctgctcagaagagagcaccttcagcatgagttgttgctggaagatctaataagctgtgtttcctgggaagtggtgctttacttagccctgtggacaacttctctatgcatctgtgtgagcagatgatcattgtattaccttttatcggtagtaagcttggaaaaataatttaagaatacaatggagaaatgtaaataagtatctatgtaaatttgtttaaaataaactgaatgtatttaatggtccatttatatgttcttttatgtaacatgtagtttaataaagttcctgtttatgagagtcatgtttcatctc

SEQ ID NO: 134207 - DNA, 1160 bp, Homo sapiens
  Payload ID: 6214
  Gene Symbol: FBL
  Gene Name: fibrillarin
  Uniprot ID: P22087
  ENST ID: ENST00000221801
  CDS Start-End: 115-1080
gcgtcacgcagcgcacgtcgccgcgcgcctgcgctcttttccacgtgcgaaagccccggactcgtggagttgtgaacgccgcggactccggagccgcacaaaccagggctcgccatgaagccaggattcagtccccgtgggggtggctttggcggccgagggggctttggtgaccgtggtggtcgtggaggccgagggggctttggcgggggccgaggtcgaggcggaggctttagaggtcgtggacgaggaggaggtggaggcggcggcggcggtggaggaggaggaagaggtggtggaggcttccattctggtggcaaccggggtcgtggtcggggaggaaaaagaggaaaccagtcggggaagaatgtgatggtggagccgcatcggcatgagggtgtcttcatttgtcgaggaaaggaagatgcactggtcaccaagaacctggtccctggggaatcagtttatggagagaagagagtctcgatttcggaaggagatgacaaaattgagtaccgagcctggaaccccttccgctccaagctagcagcagcaatcctgggtggtgtggaccagatccacatcaaaccgggggctaaggttctctacctcggggctgcctcgggcaccacggtctcccatgtctctgacatcgttggtccggatggtctagtctatgcagtcgagttctcccaccgctctggccgtgacctcattaacttggccaagaagaggaccaacatcattcctgtgatcgaggatgctcgacacccacacaaataccgcatgctcatcgcaatggtggatgtgatctttgctgatgtggcccagccagaccagacccggattgtggccctgaatgcccacaccttcctgcgtaatggaggacactttgtgatttccattaaggccaactgcattgactccacagcctcagccgaggccgtgtttgcctccgaagtgaaaaagatgcaacaggagaacatgaagccgcaggagcagttgacccttgagccatatgaaagagaccatgccgtggtcgtgggagtgtacaggccaccccccaaggtgaagaactgaagttcagcgctgtcaggattgcgagagatgtgtgttgatactgttgcacgtgtgtttttctattaaaagactcatccgtc

SEQ ID NO: 134208 - DNA, 805 bp, Homo sapiens
  Payload ID: 6214
  Gene Symbol: FBL
  Gene Name: fibrillarin
  ENST ID: ENST00000594443
  CDS Start-End: 71-193
gtgcgaaagccccggactcgtggagttgtgaacgccgcggactccggagccgcacaaaccagggctcgccatgaagccaggtggaggcttccattctggtggcaaccggggtcgtggtcggggaggaaaaagaggaaaccagtcggggaagaatgtgatggtggagccgcatcggcatgagggaaggagatgacaaaattgagtaccgagcctggaaccccttccgctccaagctagcagcagcaatcctgggtggtgtggaccagatccacatcaaaccgggggctaaggttctctacctcggggctgcctcgggcaccacggtctcccatgtctctgacatcgttggtccggatggtctagtctatgcagtcgagttctcccaccgctctggccgtgacctcattaacttggccaagaagaggaccaacatcattcctgtgatcgaggatgctcgacacccacacaaataccgcatgctcatcgcaatggtggatgtgatctttgctgatgtggcccagccagaccagacccggattgtggccctgaatgcccacaccttcctgcgtaatggaggacactttgtgatttccattaaggccaactgcattgactccacagcctcagccgaggccgtgtttgcctccgaagtgaaaaagatgcaacaggagaacatgaagccgcaggagcagttgacccttgagccatatgaaagagaccatgccgtggtcgtgggagtgtacaggccaccccccaaggtgaagaactgaagttcagcgctgtcaggattgcgagagatgtgtgt

SEQ ID NO: 134209 - DNA, 732 bp, Homo sapiens
  Payload ID: 6214
  Gene Symbol: FBL
  Gene Name: fibrillarin
  ENST ID: ENST00000597224
  CDS Start-End: 1-732
ggccgagggggctttggcgggggccgaggtcgaggcggaggctttagaggaaaccagtcggggaagaatgtgatggtggagccgcatcggcatgagggtgtcttcatttgtcgaggaaaggaagatgcactggtcaccaagaacctggtccctggggaatcagtttatggagagaagagagtctcgatttcggaaggagatgacaaaattgagtaccgagcctggaaccccttccgctccaagctagcagcagcaatcctgggtggtgtggaccagatccacatcaaaccgggggctaaggttctctacctcggggctgcctcgggcaccacggtctcccatgtctctgacatcgttggtccggatggtctagtctatgcagtcgagttctcccaccgctctggccgtgacctcattaacttggccaagaagaggaccaacatcattcctgtgatcgaggatgctcgacacccacacaaataccgcatgctcatcgcaatggtggatgtgatctttgctgatgtggcccagccagaccagacccggattgtggccctgaatgcccacaccttcctgcgtaatggaggacactttgtgatttccattaaggccaactgcattgactccacagcctcagccgaggccgtgtttgcctccgaagtgaaaaagatgcaacaggagaacatgaagccgcaggagcagttgacccttgagccatatgaaagagaccat

SEQ ID NO: 134210 - DNA, 726 bp, Homo sapiens
  Payload ID: 6214
  Gene Symbol: FBL
  Gene Name: fibrillarin
  ENST ID: ENST00000597634
  CDS Start-End: 43-726
tgaacgccgcggactccggagccgcacaaaccagggctcgccatgaagccaggattcagtccccgtgggggtggctttggcggccgagggggctttggtgaccgtggtggtcgtggaggcttccattctggtggcaaccggggtcgtggtcggggaggaaaaagaggaaaccagtcggggaagaatgtgatggtggagccgcatcggcatgagggtgtcttcatttgtcgaggaaaggaagatgcactggtcaccaagaacctggtccctggggaatcagtttatggagagaagagagtctcgatttcggaaggagatgacaaaattgagtaccgagcctggaaccccttccgctccaagctagcagcagcaatcctgggtggtgtggaccagatccacatcaaaccgggggctaaggttctctacctcggggctgcctcgggcaccacggtctcccatgtctctgacatcgttggtccggatggtctagtctatgcagtcgagttctcccaccgctctggccgtgacctcattaacttggccaagaagaggaccaacatcattcctgtgatcgaggatgctcgacacccacacaaataccgcatgctcatcgcaatggtggatgtgatctttgctgatgtggcccagccagaccagacccggattgtggccctgaatgcccacaccttcctgcgtaatggaggacactttgtgatttccattaag

SEQ ID NO: 134211 - DNA, 581 bp, Homo sapiens
  Payload ID: 6214
  Gene Symbol: FBL
  Gene Name: fibrillarin
  ENST ID: ENST00000598417
  CDS Start-End: 48-581
agttgtgaacgccgcggactccggagccgcacaaaccagggctcgccatgaagccaggattcagtccccgtgggggtggctttggcggccgagggggctttggtgaccgtggtggtcgtggaggctttagaggtcgtggacgaggaggaggtggaggcggcggcggcggtggaggaggaggaagaggtggtggaggcttccattctggtggcaaccggggtcgtggtcggggaggaaaaagaggaaaccagtcggggaagaatgtgatggtggagccgcatcggcatgagggtgtcttcatttgtcgaggaaaggaagatgcactggtcaccaagaacctggtccctggggaatcagtttatggagagaagagagtctcgatttcggaaggagatgacaaaattgagtaccgagcctggaaccccttccgctccaagctagcagcagcaatcctgggtggtgtggaccagatccacatcaaaccgggggctaaggttctctacctcggggctgcctcgggcaccacggtctcccatgtctctgacatcgttggtccggatggtctagtctatgcagtcgag

SEQ ID NO: 134212 - DNA, 896 bp, Homo sapiens
  Payload ID: 6214
  Gene Symbol: FBL
  Gene Name: fibrillarin
  ENST ID: ENST00000595545
  CDS Start-End: 1-690
gtgatggtggagccgcatcggcatgagggtgtcttcatttgtcgaggaaaggaagatgcactggtcaccaagaacctggtccctggggaatcagtttatggagagaagagagtctcgatttcggaaggagatgacaaaattgagtaccgagcctggaaccccttccgctccaagctagcagcagcaatcctgggtggtgtggaccagatccacatcaaaccgggggctaaggttctctacctcggggctgcctcgggcaccacggtctcccatgtctctgacatcgttggtccggatggtctagtctatgcagtcgagttctcccaccgctctggccgtgacctcattaacttggccaagaagaggaccaacatcattcctgtgatcgaggatgctcgacacccacacaaataccgcatgctcatcgcaatggtggatgtgatctttgctgatgtggcccagccagaccagacccggattgtggccctgaatgcccacaccttcctgcgtaatggaggacactttgtgatttccattaaggccaactgcattgactccacagcctcagccgaggccgtgtttgcctccgaagtgaaaaagatgcaacaggagaacatgaagccgcaggagcagttgacccttgagccatatgaaagagaccatgccgtggtcgtgggagtgtacaggtgagcaggggcccagcaatacaccaagacagacatctctgtcccttgcaccccgagtgccatgatcctggggaccctccttcatcacctatcttcctctcacaggccaccccccaaggtgaagaactgaagttcagcgctgtcaggattgcgagagatgtgtgttgatactgttgcacgtgtgtttttctattaaaagactcatccgtc

SEQ ID NO: 134213 - DNA, 603 bp, Homo sapiens
  Payload ID: 6214
  Gene Symbol: FBL
  Gene Name: fibrillarin
  ENST ID: ENST00000594309
  CDS Start-End: 58-603
ggactcgtggagttgtgaacgccgcggactccggagccgcacaaaccagggctcgccatgaagccaggattcagtccccgtgggggtggctttggcggccgagggggctttggtgaccgtggtggtcgtggaggccgagggggctttggcgggggccgaggtcgaggcggaggctttagaggtcgtggacgaggaggaggtggaggcggcggcggcggtggaggaggaggaagaggtggaggcttccattctggtggcaaccggggtcgtggtcggggaggaaaaagaggaaaccagtcggggaagaatgtgatggtggagccgcatcggcatgagggtgtcttcatttgtcgaggaaaggaagatgcactggtcaccaagaacctggtccctggggaatcagtttatggagagaagagagtctcgatttcggaaggagatgacaaaattgagtaccgagcctggaaccccttccgctccaagctagcagcagcaatcctgggtggtgtggaccagatccacatcaaaccgggggctaaggttctctacctcggggctgcctcgggcaccacggtctcccatgtctctgacatcgttggtccg

SEQ ID NO: 134214 - DNA, 877 bp, Homo sapiens
  Payload ID: 6214
  Gene Symbol: FBL
  Gene Name: fibrillarin
  ENST ID: ENST00000601274
  CDS Start-End: 58-877
ggactcgtggagttgtgaacgccgcggactccggagccgcacaaaccagggctcgccatgaagccaggattcagtccccgtgggggtggctttggcggccgagggggctttggtgaccgtggtggtcgtggaggccgagggggctttggcgggggccgaggtcgaggcggaggcttccattctggtggcaaccggggtcgtggtcggggaggaaaaagaggaaaccagtcggggaagaatgtgatggtggagccgcatcggcatgagggtgtcttcatttgtcgaggaaaggaagatgcactggtcaccaagaacctggtccctggggaatcagtttatggagagaagagagtctcgatttcggaaggagatgacaaaattgagtaccgagcctggaaccccttccgctccaagctagcagcagcaatcctgggtggtgtggaccagatccacatcaaaccgggggctaaggttctctacctcggggctgcctcgggcaccacggtctcccatgtctctgacatcgttggtccggatggtctagtctatgcagtcgagttctcccaccgctctggccgtgacctcattaacttggccaagaagaggaccaacatcattcctgtgatcgaggatgctcgacacccacacaaataccgcatgctcatcgcaatggtggatgtgatctttgctgatgtggcccagccagaccagacccggattgtggccctgaatgcccacaccttcctgcgtaatggaggacactttgtgatttccattaaggccaactgcattgactccacagcctcagccgaggccgtgtttgcctccgaagtgaaaaagatgcaacaggagaacatgaagccgcaggagcagttga

SEQ ID NO: 134215 - DNA, 500 bp, Homo sapiens
  Payload ID: 6214
  Gene Symbol: FBL
  Gene Name: fibrillarin
  ENST ID: ENST00000599134
  CDS Start-End: 30-500
ctccggagccgcacaaaccagggctcgccatgaagccaggattcagtccccgtgggggtggctttggcggccgagggggctttggtgaccgtggtggtcgtggaggccgagggggctttggcgggggccgaggtcgaggcggaggctttagaggtcgtggacgaggaggaggtggaggcttccattctggtggcaaccggggtcgtggtcggggaggaaaaagaggaaaccagtcggggaagaatgtgatggtggagccgcatcggcatgagggtgtcttcatttgtcgaggaaaggaagatgcactggtcaccaagaacctggtccctggggaatcagtttatggagagaagagagtctcgatttcggaaggagatgacaaaattgagtaccgagcctggaaccccttccgctccaagctagcagcagcaatcctgggtggtgtggaccagatccacatcaaaccgggggctaaggttctctacctcggggctgcctcg

SEQ ID NO: 134216 - DNA, 732 bp, Homo sapiens; identical to SEQ ID NO: 134209
  Payload ID: 6214
  Gene Symbol: FBL
  Gene Name: fibrillarin
  ENST ID: ENST00000629606
  CDS Start-End: 1-732

SEQ ID NO: 134217 - DNA, 500 bp, Homo sapiens; identical to SEQ ID NO: 134215
  Payload ID: 6214
  Gene Symbol: FBL
  Gene Name: fibrillarin
  ENST ID: ENST00000629982
  CDS Start-End: 30-500

SEQ ID NO: 134218 - DNA, 603 bp, Homo sapiens; identical to SEQ ID NO: 134213
  Payload ID: 6214
  Gene Symbol: FBL
  Gene Name: fibrillarin
  ENST ID: ENST00000628079
  CDS Start-End: 58-603

SEQ ID NO: 134219 - DNA, 896 bp, Homo sapiens; identical to SEQ ID NO: 134212
  Payload ID: 6214
  Gene Symbol: FBL
  Gene Name: fibrillarin
  ENST ID: ENST00000630954
  CDS Start-End: 1-690

SEQ ID NO: 134220 - DNA, 111 bp, Homo sapiens
  Payload ID: 6214
  Gene Symbol: FBL
  Gene Name: fibrillarin
  ENST ID: ENST00000627769
  CDS Start-End: 1-111
ggtggaggcttccattctggtggcaaccggggtcgtggtcggggaggaaaaagaggaaaccagtcggggaagaatgtgatggtggagccgcatcggcatgagggtgaccgg

SEQ ID NO: 134221 - DNA, 111 bp, Homo sapiens; identical to SEQ ID NO: 134220
  Payload ID: 6214
  Gene Symbol: FBL
  Gene Name: fibrillarin
  ENST ID: ENST00000626009
  CDS Start-End: 1-111

SEQ ID NO: 134222 - DNA, 581 bp, Homo sapiens; identical to SEQ ID NO: 134211
  Payload ID: 6214
  Gene Symbol: FBL
  Gene Name: fibrillarin
  ENST ID: ENST00000625673
  CDS Start-End: 48-581

SEQ ID NO: 134223 - DNA, 726 bp, Homo sapiens; identical to SEQ ID NO: 134210
  Payload ID: 6214
  Gene Symbol: FBL
  Gene Name: fibrillarin
  ENST ID: ENST00000627797
  CDS Start-End: 43-726

SEQ ID NO: 134224 - DNA, 805 bp, Homo sapiens; identical to SEQ ID NO: 134208
  Payload ID: 6214
  Gene Symbol: FBL
  Gene Name: fibrillarin
  ENST ID: ENST00000629964
  CDS Start-End: 71-193

SEQ ID NO: 134225 - DNA, 877 bp, Homo sapiens; identical to SEQ ID NO: 134214
  Payload ID: 6214
  Gene Symbol: FBL
  Gene Name: fibrillarin
  ENST ID: ENST00000630592
  CDS Start-End: 58-877

SEQ ID NO: 134226 - DNA, 1160 bp, Homo sapiens; identical to SEQ ID NO: 134207
  Payload ID: 6214
  Gene Symbol: FBL
  Gene Name: fibrillarin
  Uniprot ID: P22087
  ENST ID: ENST00000625241
  CDS Start-End: 115-1080

SEQ ID NO: 134227 - DNA, 1519 bp, Homo sapiens
  Payload ID: 6215
  Gene Symbol: FBLL1
  Gene Name: fibrillarin-like 1
  Uniprot ID: A6NHQ2
  ENST ID: ENST00000338333
  CDS Start-End: 390-1394
cctccccctctcctgcagcagagacgcccccgtccctgtggcccagggaagtgccagggatccctgggaaggcgggagatggggaaggggcagggtgagcgaagaggagcaggctgcgtctgcacgcgggctgggaagcggggcttccgggccgcagggtcgcggggacgggtgtgatgcaatcgcgccacagccgctgcgtcaaggggcggctccgggatgcgggcactgcggtagagcccgtcctgcccccgccgcccgccgcccgccgcccgcctccgctgctaaacccgcggacaaccgccgggacgaccacccagagccaccagagccccctgacacccgccccgaggcaccggtaacccacggcacccgccccggtgcgtgccatgaagtcggccgcgagctcgcgcgggggcggtgggggcggccgcgggggcggcggctggggcagctggggcgggggccgaggcggcggcggcggcgcgggcaagggcggcgggggcgacggcggcggccaggggggcaagggcggcttcggggcgcgggcgcgcggcttcggcgggggcggccggggccgggggcgcggcggcggcgacggcaaggatcgcggcggcggtggacagcggcggggcggcgtggccaagagcaagagccgccgcaggaagggcgccatggtggtgtcggtggagccgcaccggcacgagggcgtcttcatctaccgcggggcggaggacgcgctggtcacgctgaacatggtgccgggccagtctgtgtacggcgagaggcgcgtcacggtgaccgagggcggcgtgaagcaggagtaccgcacgtggaacccgttccgctctaagctggccgcggccatcctgggcggggtggaccagatccacatcaagcccaagtccaaggtgctgtacctgggcgccgcgtcgggcaccaccgtctcccatgtctccgacatcattggcccagacggcctggtctacgccgtcgagttctcccaccgcgccggccgcgatctggtcaacgtggccaagaagcgcaccaacatcattccggtcctggaggacgcgcggcacccgctcaagtaccgcatgctcatcgggatggtggacgtgatcttcgccgacgtggcccagccggaccagtcccgcatcgtggccctgaacgcccacaccttcctgcgcaatgggggccactttctcatctccatcaaggccaactgcatcgactccaccgcatccgccgaggctgtgtttgcttctgaggtgaggaagttgcagcaggagaacttgaagcctcaagagcagctgaccctggagccctatgagcgggaccacgctgtggtggtcggggtctaccgacctcttcccaagagcagcagcaaatagcacccagctcaggctcgcctgccatctccccaaggctgcgttgtgtttgctattattttctgtgtgttttctttgtgagtgttttgttttgttgtttttctattaaactgcataaagaaacggca

SEQ ID NO: 134228 - DNA, 11756 bp, Homo sapiens
  Payload ID: 6216
  Gene Symbol: FBN1
  Gene Name: fibrillin 1
  Uniprot ID: P35555
  ENST ID: ENST00000316623
  CDS Start-End: 457-9072
gtggtgatgagggcgacgaaggagggggtgtcattttctttttctttctttttttaaaaaaagtatttctctcgcgagaaaccgctgcgcggacgatacttgaagaggtggggaaaggagggggctgcgggagccgcggcagagactgtgggtgccacaagcggacaggagccacagctgggacagctgcgagcggagccgagcagtggctgtagcggccacgactgggagcagccgccgccgcctcctcgggagtcggagccgccgcttctccactggcaggggccgcctgaagtgggagcagcgcctggagaaggcgggaggagcccggcccgggggacgggcggcgggatagcgggaccccggcggcgcggtgcgcttcagggcgcagcggcggccgcagaccgagccccgggcgcggcaagaggcggcgggagccggtggcggctcggcatcatgcgtcgagggcgtctgctggagatcgccctgggatttaccgtgcttttagcgtcctacacgagccatggggcggacgccaatttggaggctgggaacgtgaaggaaaccagagccagtcgggccaagagaagaggcggtggaggacacgacgcgcttaaaggacccaatgtctgtggatcacgttataatgcttactgttgccctggatggaaaaccttacctggcggaaatcagtgtattgtccccatttgccggcattcctgtggggatggattttgttcgaggccaaatatgtgcacttgcccatctggtcagatagctccttcctgtggctccagatccatacaacactgcaatattcgctgtatgaatggaggtagctgcagtgacgatcactgtctatgccagaaaggatacatagggactcactgtggacaacctgtttgtgaaagtggctgtctcaatggaggaaggtgtgtggccccaaatcgatgtgcatgcacttacggatttactggaccccagtgtgaaagagattacaggacaggcccatgttttactgtgatcagcaaccagatgtgccagggacaactcagcgggattgtctgcacaaaaacgctctgctgtgccacagtcggccgagcctggggccacccctgtgagatgtgtcctgcccagcctcacccctgccgccgtggcttcattccaaatatccgcacgggagcttgtcaagatgtggatgaatgccaggccatccccgggctctgtcagggaggaaattgcattaatactgttgggtcttttgagtgcaaatgccctgctggacacaaacttaatgaagtgtcacaaaaatgtgaagatattgatgaatgcagcaccattcctggaatctgtgaagggggtgaatgtacaaacacagtcagcagttacttttgcaaatgtccccctggtttttacacctctccagatggtaccagatgcatagatgttcgcccaggatactgttacacagctctgacaaacgggcgctgctctaaccagctgccacagtccataaccaaaatgcagtgctgctgtgatgccggccgatgctggtctccaggggtcactgtcgcccctgagatgtgtcccatcagagcaaccgaggatttcaacaagctgtgctctgttcctatggtaattcctgggagaccagaatatcctcccccaccccttggccccattcctccagttctccctgttcctcctggctttcctcctggacctcaaattccggtccctcgaccaccagtggaatatctgtatccatctcgggagccaccaagggtgctgccagtaaacgttactgattactgccagttggtccgctatctctgtcaaaatggacgctgcattccaactcctgggagttaccggtgtgagtgcaacaaagggttccagctggacctccgtggggagtgtattgatgttgatgaatgtgagaaaaacccctgtgctggtggtgagtgtattaacaaccagggttcgtacacctgtcagtgccgagctggatatcagagcacactcacgcggacagaatgccgagacattgatgagtgtttacagaatggccggatctgcaataatggacgctgcatcaacacagatggcagttttcattgcgtgtgtaatgcgggctttcatgttacacgagatgggaagaactgtgaagatatggatgaatgcagcataaggaacatgtgccttaatggaatgtgtatcaatgaagatggcagttttaaatgtatttgcaaacctggattccagctggcatcagatggacgttattgcaaagacattaacgagtgtgaaacccctgggatctgcatgaatgggcgttgcgtcaacactgatggctcctacagatgtgaatgcttccctggactggctgtgggtctggatggccgtgtgtgtgttgacacacacatgcggagcacatgctatggtggatacaagagaggccagtgtatcaaacctttgtttggtgctgtcactaaatctgaatgctgttgcgccagcactgagtatgcatttggggaaccttgccagccgtgtcctgcacagaattcagcggaatatcaggcactctgcagcagtgggccaggaatgacgtcagcaggcagtgatataaatgaatgtgcactagatcctgatatttgcccaaatggaatctgtgaaaaccttcgtgggacctataaatgtatatgcaattcaggatatgaagtggattcaactgggaaaaactgcgttgatattaatgaatgtgtactgaacagtctcctttgtgacaatggacaatgtagaaatactcctggaagttttgtctgtacctgccccaagggatttatctacaaacctgatctaaaaacatgtgaagacattgatgaatgcgaatcaagtccttgcattaatggagtctgcaagaacagcccaggctcttttatttgtgaatgttcttctgaaagtactttggatccaacaaaaaccatctgcatagaaaccatcaagggcacttgctggcagactgtcattgatgggcgatgtgagatcaacatcaatggagccaccttaaagtcccagtgctgctcctccctcggtgctgcgtggggaagcccgtgcaccctatgccaagttgatcccatatgtggtaaagggtactcaagaattaaaggaacacaatgtgaagatatagatgaatgtgaagtgttcccaggagtgtgtaaaaatggcctgtgtgttaacactagggggtcattcaagtgtcagtgtcccagtggaatgactttggatgccacaggaaggatctgtcttgatatccgcctggaaacctgcttcctgaggtacgaggacgaggagtgcaccctgcctattgctggccgccaccgcatggacgcctgctgctgctccgtcggggcagcctggggtactgaggaatgcgaggagtgtcccatgagaaatactcctgagtacgaggagctgtgtccgagaggacccggatttgccacaaaagaaattacaaatggaaagcctttcttcaaagatatcaatgagtgcaagatgatacccagcctctgcacccacggcaagtgcagaaacaccattggcagctttaagtgcaggtgtgacagcggctttgctcttgattctgaagaaaggaactgcacagacattgacgaatgccgcatatctcctgacctctgtggcagaggccagtgtgtgaacacccctggggactttgaatgcaagtgtgacgaaggctatgaaagtggattcatgatgatgaagaactgcatggatattgatgagtgtcagagagatcctctcctatgccgaggtggtgtttgccataacacagagggaagttaccgctgtgaatgcccgcctggccatcagctgtcccccaacatctccgcgtgtatcgacatcaatgaatgtgagctgagtgcacacctgtgccccaatggccgttgcgtgaacctcatagggaagtatcagtgtgcctgcaaccctggctaccattcaactcccgataggctattttgtgttgacattgatgaatgcagcataatgaatggtggttgtgaaaccttctgcacaaactctgaaggcagctatgaatgtagctgtcagccgggatttgcactaatgcctgaccagagatcatgcaccgacatcgatgagtgtgaagataatcccaatatctgtgatggtggtcagtgcacaaatatccctggagagtacaggtgcttgtgttatgatggattcatggcatctgaagacatgaagacttgtgtagatgtcaatgagtgtgacctgaatccaaatatctgcctaagtgggacctgtgaaaacacgaaaggctcatttatctgccactgtgatatgggctactccggcaaaaaaggaaaaactggctgtacagacatcaatgaatgtgaaattggagcacacaactgtggcaaacatgctgtatgtaccaatacagcaggaagcttcaaatgtagctgcagtcccgggtggattggagatggcattaagtgcactgatctggacgaatgttccaatggaacccatatgtgcagccagcatgcagactgcaagaataccatgggatcttaccgctgtctgtgcaaggaaggatacacaggtgatggcttcacttgtacagaccttgatgagtgctctgagaacctgaatctctgtggcaatggccagtgcctcaatgcaccaggaggataccgctgtgaatgcgacatgggcttcgtgcccagtgctgacgggaaagcctgtgaagatattgatgagtgctcccttccgaacatctgtgtctttggaacttgccacaacctccctggcctgttccgctgtgagtgtgagataggctacgaactggacagaagcggcgggaactgcacagatgtgaatgaatgcctggatccaaccacgtgcatcagtgggaactgtgtcaacactccaggcagctatatctgtgactgcccacctgattttgaactgaacccaactcgagttggctgtgttgatacccgctctggaaattgctatttggatattcgacctcgaggagacaatggagatacagcctgcagcaatgaaattggagttggtgtttccaaagcttcctgctgctgttctctgggtaaagcctggggtactccttgtgagatgtgtcctgctgtgaacacatccgagtacaaaattctttgtcctggaggggaaggtttccgaccaaatcctatcaccgttatattggaagatattgatgagtgccaggagctaccagggctgtgccaaggaggaaaatgtatcaacacctttgggagtttccagtgccgctgtccaaccggctactacctgaatgaagatacacgagtgtgtgatgatgtgaatgaatgtgagactcctggaatctgtggtccagggacatgttacaacaccgttggcaactacacctgtatctgtcctccagactacatgcaagtgaatgggggaaataattgcatggatatgagaagaagtttgtgctacagaaactactatgctgacaaccagacctgtgatggagaattgttattcaacatgaccaagaagatgtgctgctgttcctacaacattggccgggcgtggaacaagccctgtgaacagtgtcccatcccaagtacagatgagtttgctacactctgtggaagtcaaaggccaggctttgtcatcgacatttataccggtttacccgttgatattgatgagtgccgggagatcccaggggtctgtgaaaatggagtgtgtatcaacatggttggcagcttccgatgtgaatgtccagtgggattcttctataatgacaagttgttggtttgtgaagatattgacgagtgtcagaacggcccagtgtgccagcgcaacgccgaatgcatcaacactgcaggcagctaccgctgtgactgtaagcccggctaccgcttcacctccacaggacagtgcaatgatcgtaatgaatgtcaagaaatccccaatatatgcagtcatgggcagtgcattgacacagttggaagcttttattgcctttgccacactggttttaaaacaaatgatgaccaaaccatgtgcttggacataaatgaatgtgaaagagatgcctgtgggaatggaacttgccggaacacaattggttccttcaactgccgctgcaatcatggtttcatcctttctcacaacaatgactgtatagatgttgatgaatgtgcaagtggaaatgggaatctttgcagaaatggccaatgcattaatacagtggggtctttccagtgccagtgcaatgaaggctatgaggtggctccagatgggaggacctgtgtggatatcaatgaatgtcttctagaacccagaaaatgtgcaccaggtacctgtcaaaacttggatgggtcctacagatgcatttgcccacctggatacagtcttcaaaatgagaagtgtgaagatattgatgagtgtgtcgaagagccagaaatttgtgccctgggcacatgcagtaacactgaaggcagcttcaaatgtctgtgtccagaagggttttccttgtcctccagtggaagaaggtgccaagatttgcgaatgagctactgttatgcgaagtttgaaggaggaaagtgttcatcacccaaatccagaaatcactccaagcaggaatgctgctgtgccttgaagggagaaggctggggagacccctgcgagctctgccccacggaacctgatgaggccttccgccagatatgtccttatggaagtgggatcatcgtgggacctgatgattcagcagttgatatggacgaatgcaaagaacccgatgtctgtaaacatggacagtgcatcaatacagatggttcctatcgctgcgagtgtccctttggttatattctagcagggaatgaatgtgtagatactgatgaatgttctgttggcaatccttgtggaaatggaacctgcaagaatgtgattggaggttttgaatgcacctgcgaggagggatttgagcccggtccaatgatgacatgtgaagatataaatgaatgtgcccagaatcctctgctctgtgccttccgatgtgtgaacacttatgggtcatatgaatgcaaatgtcccgtgggatatgtgctcagagaagaccgtaggatgtgcaaagatgaggatgagtgtgaagagggaaaacatgactgtactgaaaaacaaatggaatgcaagaacctcattggcacatatatgtgcatctgtggacccgggtatcagcggagacctgatggagaaggctgtgtagatgagaatgaatgtcagacgaagccagggatctgtgagaatgggcgctgcctcaacacccgtgggagctacacctgtgagtgtaatgatgggtttaccgccagccccaaccaggacgagtgccttgacaatcgggaagggtactgcttcacagaggtgctacaaaacatgtgtcagatcggctccagcaacaggaaccccgtcaccaaatcggaatgctgctgtgacggagggagaggctggggtccccactgtgagatctgccctttccaggggactgtggctttcaagaaactctgtccccatggccgaggattcatgaccaatggagcagatatcgatgaatgcaaggttattcacgatgtttgccgaaatggggaatgtgtcaatgacagaggatcatatcattgcatttgtaaaactgggtacactccagatataactgggacttcctgtgtagatctgaacgagtgcaaccaggctcccaaaccctgcaattttatctgcaaaaacacagaagggagttaccagtgttcatgcccgaaaggctacattctgcaagaggatggaaggagctgcaaagatcttgatgagtgtgcaaccaagcaacacaactgccagttcctatgtgttaacaccattggcggcttcacatgcaaatgtcctcccggatttacccaacaccatacgtcctgcattgataacaatgaatgcacctctgacatcaatctgtgcgggtctaagggcatttgccagaacactcctggaagcttcacctgtgaatgccagcggggattctcacttgatcagaccggctccagctgtgaagacgtggacgagtgtgagggtaaccaccgctgccagcatggctgccagaacatcattgggggctacaggtgcagctgcccccagggctacctccagcactaccagtggaaccagtgtgttgatgaaaacgaatgcctcagcgctcacatctgcggaggagcctcctgtcacaacaccctggggagctacaagtgcatgtgtcccgccggcttccagtatgaacagttcagtggaggatgccaagacatcaatgaatgtggctctgcgcaggccccctgcagctatggctgttccaataccgagggcggttacctgtgtggctgtccacctggttacttccgcataggccaagggcactgtgtttctggaatgggcatgggccgaggaaacccagagccacctgtcagtggtgaaatggatgacaattcactctccccagaggcttgttacgagtgtaagatcaatggctaccccaaacggggcaggaaacggagaagcacaaacgaaactgatgcctccaatatcgaggatcagtctgagacagaagccaatgtgagtcttgcaagttgggatgttgagaagacagccatctttgctttcaatatttcccacgtcagtaacaaggttcgaatcctagaactccttccagctcttacaactctgacgaatcacaacagatacttgatcgaatctggaaatgaagatggcttctttaaaatcaaccaaaaggaagggatcagctacctccacttcacaaagaagaagccagtggctggaacctattcattacaaatcagtagtactccactttataaaaagaaagaacttaaccaactagaagacaaatatgacaaagactacctcagtggtgaactgggtgataatctgaagatgaaaatccaggttttgcttcattaattcaccatccagagaccaaataattaaaagaaaaacaaatatagataggtagaactatattttcccccaatcagaatcatcatatcataggtacaatctttcaccaagtaaatttgtataaataagcactattctttgtattaccaaagcaaggtacaggtgactaccctagttcaaaacaaccactttctcaggcttctcatgtgtgtagctaagctaccttgtcatatgtgttgattcttgaaaactgggacgtgtatttccattgggggttggccatttatgctgacatgccatccttccagcaaacgtacgggaatgtgctttcaattgatggactactctattttttgcaaatttgtaaactttgcttctccaaatacaagtactaggttgtccatttatggtacctatttggtgctagtaaattttcaaactagatttataaatgcactgtaatatgtacacaacttagaaaccaaattacaagtattcagttccaatacttcattaatttcaatcaaccaaagttagttcagtagcttatctcagttatgagtataatacattacatgtaaattaagtgtgtgtatactgtaatcgtgctattttttatcattgaaacatttataaactagaataataatgcccttaatgtgagggtttgtaatggtgcttattaagaccaaagacttgttaaatgtatacaccaagtggtaatgaaatttcggtgactggcccacacgtgcatagaggtctgggaggaccaggaaacagcctcagtggccagaggatcaccagtgcatccttcatcacagcatgtgcaatatgccaagattaccctcggtcattcctgtcaacaaggggtcaatgtcataaatgtcacaataaaacaatctcttcttttttttagtttaccccttggctttgtgttcttgcatggatttggggttggaggggccattccggaggctaaataaagtctcctggatttaaattatcctgggtctcttacttatggcttatgaaagtaccaaatgtataaccactagaagaaaatttaacatatgagtcgatcccttgttttatccattgaaagtagcagagtctggtgtcattaacctgacttgcttgtgagaaatttagattgtagagtcatttctgaaacatgacctaattcatcttgtgacttttaaatagtcttaaataccaagttcagtcattgtcttagagcacatgaatttcattataatagatttatcatgcccccctctcaaatatacacagttttggcaagccttaggtgttctgttccatttttttttcccctaaacatctttcgttagtcaatgctcatctaattacaaagggataatcccagactgtatccaattgctgtaacttttggtttcttaatgtcataatttttaaagtctgttttattttaagtgcaatattgagtatttagctgttaggctcaatccgtcgatatgaaataattttttaaatccctaagggcaggaaagcatttcgtggtagtgaaaataagaggaaataagatggcatgaaggtggtgggcggagaaactaggtaggacacaggaaagtgctctcaaaaatctttgaagagctcagctgaaaaaaatggagtagatttggctcatactattccggaaggcaaaaccagggtcagctgatgtcagccccagtttaatacacacggtcccaattatagagctactcactgaaagaatgggtttccttgcattgtggtgagctccctgtcacaagatagaagagtttcagtctaggcttaatggcaaccattggacaaagatgctttcttccacctaacaggccattaacatcttaaaggtatttttgtatctctaattttgtttataataggtgctcaacagaatgagctgaatggctgttacaaagggggtttgtaccttgggtaagagattaaaatataactcaaaatttccttctaacgctgcacctatggaaccatgtgatagaggtgtattaaaattgttatcgaagaatatatagcatatggtaaacaacagtttgcatatggaaaatgtctttgataatttaaccagaactgcattatattcaataacggattttctttataacaaacaacaggggaaaatggagttggcacacagtggatcactttgatatttttaatagtccaagtctggattttatttattcctgagccaacaattttgaacagcatattttccatgtttctgactgtaacaaaacattttcctcattgttccattgtaaatattcctcttgttggaactctttttaatcctgagatttaaacctgtacctttcaattgtctgtgacctttcaatttcactttcaatagttgaagaacttggctttgtaaatctctcagaagcttgaaaatatcttgtctctaccccctcagcccatttcatttgccaataattattttgtaagtagggttgaaatgaactcagctggccttgtgaaatgtttaaacttgcacaaacaactacatttttgttcaacaaatagcagtttactcagccaaaatcactttggatattgccattacaaatactgttaaacttcagaaatcatgtctgtaaattagatgagccaaaataaaggacaattgggttgatgctgca

SEQ ID NO: 134229 - DNA, 3766 bp, Homo sapiens
  Payload ID: 6216
  Gene Symbol: FBN1
  Gene Name: fibrillin 1
  ENST ID: ENST00000537463
  CDS Start-End: 317-1225
agagactgtgggtgccacaagcggacaggagccacagctgggacagctgcgagcggagccgagcagtggctgtagcggccacgactgggagcagccgccgccgcctcctcgggagtcggagccgccgcttctccactggcaggggccgcctgaagtgggagcagcgcctggagaaggcgggaggagcccggcccgggggacgggcggcgggatagcgggaccccggcggcgcggtgcgcttcagggcgcagcggcggccgcagaccgagccccgggcgcggcaagaggcggcgggagccggtggcggctcggcatcatgcgtcgagggcgtctgctggagatcgccctgggatttaccgtgcttttagcgtcctacacgagccatggggcggacgccaatttggaggctgggaacgtgaaggaaaccagagccagtcgggccaagagaagaggcggtggaggacacgacgcgcttaaaggacccaatgtctgtggatcacgttataatgcttactgttgccctggatggaaaaccttacctggcggaaatcagtgtattgtccccatttgccggcattcctgtggggatggattttgttcgaggccaaatatgtgcacttgcccatctggtcagatagctccttcctgtggctccagatccatacaacactgcaatattcgctgtatgaatggaggtagctgcagtgacgatcactgtctatgccagaaaggatacatagggactcactgtggacaacctgtttgtgaaagtggctgtctcaatggaggaaggtgtgtggccccaaatcgatgtgcatgcacttacggatttactggaccccagtgtgaaagagattacaggacaggcccatgttttactgtgatcagcaaccagatgtgccagggacaactcagcgggattgtctgcacaaaaacgctctgctgtgccacaacatcaatgaatgtgaaattggagcacacaactgtggcaaacatgctgtatgtaccaatacagcaggaagcttcaaatgtagctgcagtcccgggtggattggagatggcattaagtgcactgatctggacgaatgttccaatggaacccatatgtgcagccagcatgcagactgcaagaataccatgggatcttaccgctgtctgtgcaaggaaggatacacaggtgatggcttcacttgtacagaccttgatgagtgctctgagaacctgaatctctgtggcaatggccagtgcctcaatgcaccaggaggataccgctgtgaatgcgacatgggcttcgtgcccagtgctgacgggaaagcctgtgaagatattgatgagtgctcccttccgaacatctgtgtctttggaacttgccacaacctccctggcctgttccgctgtgagtgtgagataggctacgaactggacagaagcggcgggaactgcacagatgtgaatgaatgcctggatccaaccacgtgcatcagtgggaactgtgtcaacactccaggcagctatatctgtgactgcccacctgattttgaactgaacccaactcgagttggctgtgttgatacccgctctggaaattgctatttggatattcgacctcgaggagacaatggagatacagcctgcagcaatgaaattggagttggtgtttccaaagcttcctgctgctgttctctgggtaaagcctggggtactccttgtgagatgtgtcctgctgtgaacacatccgagtacaaaattctttgtcctggaggggaaggtttccgaccaaatcctatcaccgttatattggaagatattgatgagtgccaggagctaccagggctgtgccaaggaggaaaatgtatcaacacctttgggagtttccagtgccgctgtccaaccggctactacctgaatgaagatacacgagtgtgtgatgatgtgaatgaatgtgagactcctggaatctgtggtccagggacatgttacaacaccgttggcaactacacctgtatctgtcctccagactacatgcaagtgaatgggggaaataattgcatggatatgagaagaagtttgtgctacagaaactactatgctgacaaccagacctgtgatggagaattgttattcaacatgaccaagaagatgtgctgctgttcctacaacattggccgggcgtggaacaagccctgtgaacagtgtcccatcccaagtacagatgagtttgctacactctgtggaagtcaaaggccaggctttgtcatcgacatttataccggtttacccgttgatattgatgagtgccgggagatcccaggggtctgtgaaaatggagtgtgtatcaacatggttggcagcttccgatgtgaatgtccagtgggattcttctataatgacaagttgttggtttgtgaagatattgacgagtgtcagaacggcccagtgtgccagcgcaacgccgaatgcatcaacactgcaggcagctaccgctgtgactgtaagcccggctaccgcttcacctccacaggacagtgcaatgatcgtaatgaatgtcaagaaatccccaatatatgcagtcatgggcagtgcattgacacagttggaagcttttattgcctttgccacactggttttaaaacaaatgatgaccaaaccatgtgcttggacataaatgaatgtgaaagagatgcctgtgggaatggaacttgccggaacacaattggttccttcaactgccgctgcaatcatggtttcatcctttctcacaacaatgactgtatagatgttgatgaatgtgcaagtggaaatgggaatctttgcagaaatggccaatgcattaatacagtggggtctttccagtgccagtgcaatgaaggctatgaggtggctccagatgggaggacctgtgtggatatcaatgaatgtcttctagaacccagaaaatgtgcaccaggtacctgtcaaaacttggatgggtcctacagatgcatttgcccacctggatacagtcttcaaaatgagaagtgtgaagatattgatgagtgtgtcgaagagccagaaatttgtgccctgggcacatgcagtaacactgaaggcagcttcaaatgtctgtgtccagaagggttttccttgtcctccagtggaagaaggtgccaagatttgcgaatgagctactgttatgcgaagtttgaaggaggaaagtgttcatcacccaaatccagaaatcactccaagcaggaatgctgctgtgccttgaagggagaaggctggggagacccctgcgagctctgccccacggaacctgatgaggccttccgccagatatgtccttatggaagtgggatcatcgtgggacctgatgattcagcagttgatatggacgaatgcaaagaacccgatgtctgtaaacatggacagtgcatcaatacagatggttcctatcgctgcgagtgtccctttggttatattctagcagggaatgaatgtgtagatactgatgaatgttctgttggcaatccttgtggaaatggaacctgcaagaatgtgattggaggttttgaatgcacctgcgaggagggatttgagcccggtccaatgatgacatgtgaagatataaatgaatgtgcccagaatcctctgctctgtgccttccgatgtgtgaacacttatgggtcatatgaatgcaaatgtcccgtgggatatgtgctcagagaagaccgtaggatgtgcaaagatgaggatgagtgtgaagagggaaaacatgactgtactg

SEQ ID NO: 134230 - DNA, 4109 bp, Homo sapiens
  Payload ID: 6216
  Gene Symbol: FBN1
  Gene Name: fibrillin 1
  ENST ID: ENST00000560355
  CDS Start-End: 329-496
gggagccgcggcagagactgtgggtgccacaagcggacaggagccacagctgggacagctgcgagcggagccgagcagtggctgtagcggccacgactgggagcagccgccgccgcctcctcgggagtcggagccgccgcttctccactggcaggggccgcctgaagtgggagcagcgcctggagaaggcgggaggagcccggcccgggggacgggcggcgggatagcgggaccccggcggcgcggtgcgcttcagggcgcagcggcggccgcagaccgagccccgggcgcggcaagaggcggcgggagccggtggcggctcggcatcatgcgtcgagggcgtctgctggagatcgccctgggatttaccgtgcttttagcgtcctacacgagccatggggcggacgccaatttggaggctgggaacgtgaaggaaaccagagccagtcgggccaagagaagaggcggtggaggacacgacgcgcttaaagggtaaaggaaccggttccctcctttggtgtgggtctcccaagtttcaagatccagaacaacgggcaggatgactctccctgtggaagactccttggcaagacctcctgggggcaccttagaggtgctagggttgtttagtccccaccccgttcgtggttaaactaccttgcccctactcccagagatttctgccccaaaggagaggacgtggttaaatggaatcttgggccattgttgaggcagattttgggaggcgagaagagttccttggggaagaaggggaggagttgcgagtgggataagaggagaagcccgttcctttccctgcaatatcaattctggttgtttctagaggaaagtactttccttggggtcatcttggtagatgctgtatttgaaagggggcaaggaaaggaagggattcccatgacagtcagaggagaaatcacacagtagttgactcttccgtaaattatgcttattaaaattacggattgggttttctgggcaatgcttcctttagatgtctacattggaagcagaacagggcaagtggttctgagaactggttttttgagttgtgtggggctctccgtttcactgcagcagtaaggctgctgtggccggccttaagggagtatttttaactagtggtgtttgtgttgtgtacatgcaactgaccatttcactggcttcccatgccgctgttacagatgtttcagccggaaaaattttaattagacttgactaagggttgtcattttcctgtattgaaggacagtgggaatacatttcctttaagagaaatttgtctgcagttgtttaagttaaagcctccatggaaacaacaggatggactgtcagtgaccccttttatcttcttggaggagcctgttaaataaattcagacagtatatatagggagattttgtattaaattcttaccattctcgctgatgctcttttcctgagtggttctgtagctttattatatagctctgggtcaccaagtgatggtatccacttggatatgtggctgttcatttcacttactctttttttgttatgaggtgttatagtcatgtatatgtagtaaaatttgtgtttgtatggcccagatatgagaagaaaaagtaaactcaccagaccagtttttgactcctagtctggagtaaggacaagatgattgtatgagccaagcacttaggctgtgataaaatagcacagaaaatagttatgattaattcggttccatcttggccttcgtggaaaataaacccagaattccgataatgttggaaggaagtttgcttatcatggtaaacctgaccttgatcagacagcagatgtttattgccctgtgtgcaaggcacatggcaagttcaataagtagactgaggctctgattttcatatgttctcaagaggacctcatttagtccagtatttttccttcaaaaatacatttctcctacataataatatcttaatatctattctgataggattgctcctgtatataaaggacgtggggatttaattctgtggctgaagatctgcagagaggtgtgaggcctggtcagacatttgtctcatttctctgggctgtcaccaactagtgtgttcccttgggaatgtgaaaaaagaaactaagctttactttgttgcttaacaggatgccacacttttactcacacttgtgctttttctctctggttttaaatttgtttgtgattatagagagatacctctctgtgctcctcacagtatttgatcattaacacagaccttatcctattgtaaactatttataaagccttcctaaaaacagggtattaatagaattgtaattatgtgtgttcctaattctcatgttaattataagattttataataagtgatatatatatatacacacacacacacacacacacatacacgggggtgaaaataataatttaaaaatatatacaattaaaagtatttccctgccacctttcagagaccattttcttgtgtatttttctataaatcttttaggcatatgtatacatgtacaaataaacacaaatatatatgtatacatacacatgtgtgtgtgtatcctttttaatacatggaatgtattgtacatgcaatattctgaactttacttactttttatgtatctttaatgcatccatctattaactcatatggatctacctcattcattttctttctttttttttgagacacagtcttgctctgttgcccaggctggagtgtagtggtgcaatcttggcttactgcctccaccttcccggctcaagcgattctcctgcctcagcctccagagtagctgggattacaggtgggtgccaccaagcccggctaattttttgtatttttagtagagatggggtttcgccatgttggccaggatggtctcaaactcttggcctcaagcgatccacccacctctgcctctccaaattacaggcttgagccactgcgccctaccccattttcttgttgtatagaacctcattatgtcactggaacagttccctagtgatggctctttagattacattgagtcttttgctattaccaactttcttctgcatacctgtgtttacatacacgtgtttatatgtggtataaattagtaaaaatagaattgctggatcaaagtctttcccatagattttaagcaaaccccaattcttatgttaaatttgaataacattttaaatttattccctctgcttattgccgttacagtctcatatgaataaatcctttaacggtgccctgctgtataaatcatcagaaaaagcagttatgtactacatttttccagttattgcttaaaatttctgtttttgtctgttaaaatattaccggcttcaaaactcacctctttgactacagtgaaacctgtttaccattctgattggagatgcacagtttatgaagtgaaagtgatttgtaacccccgagtctgcctgatgcccagttggtggcagcaactttcagcacctcactaatctttcctctagttaaaaggtaccttaaactcatcagtatctgctgtgcactggttccttctccccagcaaatactgccttcttgtttttctctgatgtggcaggtgactacaaaatccgccttggtattcttcaaatgcatatatattcctttcttgtcagctccctctcttcctagattagaaaactgcctcattttctgctcactggatgtgcagtcccagcttgtcttcctctcctccccccctgttgcaggtgttcttttttttttttattctctccccactgggcagcaaaagttgttccacagtggaaatttaggcatcctcaagtttcttcccagcttctgctgtgttttcttagagtaaattgccaatttctgtttttacaggaaatccttttttaaaaatggaatcagtgtggtccccatctactctgcaaaaattgcatttttctctattttcaaatgagatttgttcaagtttcaaaaccacgtgaaataataaatgtatagtagttttcttttccttgggcattgcttgatatgtgaaatgggtttatgaaaaataataaaatcataacgcta

SEQ ID NO: 134231 - DNA, 4901 bp, Homo sapiens
  Payload ID: 6216
  Gene Symbol: FBN1
  Gene Name: fibrillin 1
  ENST ID: ENST00000559133
  CDS Start-End: 1-2561
ctctgggtaaagcctggggtactccttgtgagatgtgtcctgctgtgaacacatccgagtacaaaattctttgtcctggaggggaaggtttccgaccaaatcctatcaccgttatattggaagatattgatgagtgccaggagctaccagggctgtgccaaggaggaaaatgtatcaacacctttgggagtttccagtgccgctgtccaaccggctactacctgaatgaagatacacgagtgtgtgatgatgtgaatgaatgtgagactcctggaatctgtggtccagggacatgttacaacaccgttggcaactacacctgtatctgtcctccagactacatgcaagtgaatgggggaaataattgcatggatatgagaagaagtttgtgctacagaaactactatgctgacaaccagacctgtgatggagaattgttattcaacatgaccaagaagatgtgctgctgttcctacaacattggccgggcgtggaacaagccctgtgaacagtgtcccatcccaagtacagatgagtttgctacactctgtggaagtcaaaggccaggctttgtcatcgacatttataccggtttacccgttgatattgatgagtgccgggagatcccaggggtctgtgaaaatggagtgtgtatcaacatggttggcagcttccgatgtgaatgtccagtgggattcttctataatgacaagttgttggtttgtgaagatattgacgagtgtcagaacggcccagtgtgccagcgcaacgccgaatgcatcaacactgcaggcagctaccgctgtgactgtaagcccggctaccgcttcacctccacaggacagtgcaatgatcgtaatgaatgtcaagaaatccccaatatatgcagtcatgggcagtgcattgacacagttggaagcttttattgcctttgccacactggttttaaaacaaatgatgaccaaaccatgtgcttggacataaatgaatgtgaaagagatgcctgtgggaatggaacttgccggaacacaattggttccttcaactgccgctgcaatcatggtttcatcctttctcacaacaatgactgtatagatgttgatgaatgtgcaagtggaaatgggaatctttgcagaaatggccaatgcattaatacagtggggtctttccagtgccagtgcaatgaaggctatgaggtggctccagatgggaggacctgtgtggatatcaatgaatgtcttctagaacccagaaaatgtgcaccaggtacctgtcaaaacttggatgggtcctacagatgcatttgcccacctggatacagtcttcaaaatgagaagtgtgaagatattgatgagtgtgtcgaagagccagaaatttgtgccctgggcacatgcagtaacactgaaggcagcttcaaatgtctgtgtccagaagggttttccttgtcctccagtggaagaaggtgccaagatttgcgaatgagctactgttatgcgaagtttgaaggaggaaagtgttcatcacccaaatccagaaatcactccaagcaggaatgctgctgtgccttgaagggagaaggctggggagacccctgcgagctctgccccacggaacctgatgaggccttccgccagatatgtccttatggaagtgggatcatcgtgggacctgatgattcagcagttgatatggacgaatgcaaagaacccgatgtctgtaaacatggacagtgcatcaatacagatggttcctatcgctgcgagtgtccctttggttatattctagcagggaatgaatgtgtagatactgatgaatgttctgttggcaatccttgtggaaatggaacctgcaagaatgtgattggaggttttgaatgcacctgcgaggagggatttgagcccggtccaatgatgacatgtgaagatataaatgaatgtgcccagaatcctctgctctgtgccttccgatgtgtgaacacttatgggtcatatgaatgcaaatgtcccgtgggatatgtgctcagagaagaccgtaggatgtgcaaagatgaggatgagtgtgaagagggaaaacatgactgtactgaaaaacaaatggaatgcaagaacctcattggcacatatatgtgcatctgtggacccgggtatcagcggagacctgatggagaaggctgtgtagatgagaatgaatgtcagacgaagccagggatctgtgagaatgggcgctgcctcaacacccgtgggagctacacctgtgagtgtaatgatgggtttaccgccagccccaaccaggacgagtgccttgacgtcatcctttctcttttactgctgtctccagctttcccctcttgcttcttctcacccaggacaatcgggaagggtactgcttcacagaggtgctacaaaacatgtgtcagatcggctccagcaacaggaaccccgtcaccaaatcggaatgctgctgtgacggagggagaggctggggtccccactgtgagatctgccctttccaggggactgtggctttcaagaaactctgtccccatggccgaggattcatgaccaatggagcagatatcgatgaatgcaaggttattcacgatgtttgccgaaatggggaatgtgtcaatgacagaggatcatatcattgcatttgtaaaactgggtacactccagatataactgggacttcctgtgtagatctgaacgagtgcaaccaggctcccaaaccctgcaattttatctgcaaaaacacagaagggagttaccagtgttcatgcccgaaaggctacattctgcaagaggatggaaggagctgcaaagatcttgatgagtgtgcaaccaagcaacacaactgccagttcctatgtgttaacaccattggcggcttcacatgcaaatgtcctcccggatttacccaacaccatacgtcctgcattgataacaatgaatgcacctctgacatcaatctgtgcgggtctaagggcatttgccagaacactcctggaagcttcacctgtgaatgccagcggggattctcacttgatcagaccggctccagctgtgaagacgtggacgagtgtgagggtaaccaccgctgccagcatggctgccagaacatcattgggggctacaggtgcagctgcccccagggctacctccagcactaccagtggaaccagtgtgttgatgaaaacgaatgcctcagcgctcacatctgcggaggagcctcctgtcacaacaccctggggagctacaagtgcatgtgtcccgccggcttccagtatgaacagttcagtggaggatgccaagacatcaatgaatgtggctctgcgcaggccccctgcagctatggctgttccaataccgagggcggttacctgtgtggctgtccacctggttacttccgcataggccaagggcactgtgtttctggaatgggcatgggccgaggaaacccagagccacctgtcagtggtgaaatggatgacaattcactctccccagaggcttgttacgagtgtaagatcaatggctaccccaaacggggcaggaaacggagaagcacaaacgaaactgatgcctccaatatcgaggatcagtctgagacagaagccaatgtgagtcttgcaagttgggatgttgagaagacagccatctttgctttcaatatttcccacgtcagtaacaaggttcgaatcctagaactccttccagctcttacaactctgacgaatcacaacagatacttgatcgaatctggaaatgaagatggcttctttaaaatcaaccaaaaggaagggatcagctacctccacttcacaaagaagaagccagtggctggaacctattcattacaaatcagtagtactccactttataaaaagaaagaacttaaccaactagaagacaaatatgacaaagactacctcagtggtgaactgggtgataatctgaagatgaaaatccaggttttgcttcattaattcaccatccagagaccaaataattaaaagaaaaacaaatatagataggtagaactatattttcccccaatcagaatcatcatatcataggtacaatctttcaccaagtaaatttgtataaataagcactattctttgtattaccaaagcaaggtacaggtgactaccctagttcaaaacaaccactttctcaggcttctcatgtgtgtagctaagctaccttgtcatatgtgttgattcttgaaaactgggacgtgtatttccattgggggttggccatttatgctgacatgccatccttccagcaaacgtacgggaatgtgctttcaattgatggactactctattttttgcaaatttgtaaactttgcttctccaaatacaagtactaggttgtccatttatggtacctatttggtgctagtaaattttcaaactagatttataaatgcactgtaatatgtacacaacttagaaaccaaattacaagtattcagttccaatacttcattaatttcaatcaaccaaagttagttcagtagcttatctcagttatgagtataatacattacatgtaaattaagtgtgtgtatactgtaatcgtgctattttttatcattgaaacatttataaactagaataataatgcccttaatgtgagggtttgtaatggtgcttattaagaccaaagacttgttaaatgtatacaccaagtggtaatgaaatttcggtgactggcccacacgtgcatagaggtctgggaggaccaggaaacagcctcagtggccagaggatcaccagtgcatccttcatcacagcatgtgcaatatgccaagattaccctcggtcattcctgtcaacaaggggtcaatgtcataaatgtcacaataaaacaatctcttcttttttttagttt

SEQ ID NO: 134232 - DNA, 10724 bp, Homo sapiens
  Payload ID: 6217
  Gene Symbol: FBN2
  Gene Name: fibrillin 2
  Uniprot ID: P35556
  ENST ID: ENST00000262464
  CDS Start-End: 440-9178
ctttccaatatccgtcttcggagcgcacgggaatccgccgagctctgcgtgcaggcccttttttcttttgaggttcacattttttgaaattttacgccagggcttttgtaatttcctcccccgcccgctgacggtcctggagtcgctcggggctttaggccggttatgcaacgtgtaccgctcggggctgccggctgcacctccgccgcgcctcgccgctcactgcgctagacccggcgccccgcgtctcgcttcgcgggcagtcagggggccggcgctctgtcgaggtctccagctagagcagggagcccgagcccgagggagtccccggagccgacgaagggcttattagaccctgactcttttctgaggcgcgcagattttgtctttgatcactccctctccgcgggtctacggccgcgcgctttcggcgccggcgatggggagaagacggaggctgtgtctccagctctacttcctgtggctgggctgtgtggtgctctgggcgcagggcacggccggccagcctcagcctcctccgcccaagccgccccggccccagccgccgccgcaacaggttcggtccgctacagcaggctctgaaggcgggtttctagcgcccgagtatcgcgaggagggtgccgcagtggccagccgcgtccgccggcgaggacagcaggacgtgctccgagggcccaacgtgtgcggctccagattccactcctactgctgccctggatggaagacgctccctggaggaaaccagtgcattgtcccgatttgtagaaatagttgtggagatggattttgttcccgtcctaacatgtgtacttgttccagtgggcaaatatcatcaacctgtggatcaaaatcaattcagcagtgcagtgtgagatgcatgaatggtgggacctgtgcagatgaccactgccagtgccagaaaggatatattggaacttattgtggacaacctgtctgtgaaaatggatgtcagaatggtggacgttgcatcggacccaaccgctgtgcttgtgtttatgggttcactggtccacagtgtgaaagagattacaggacaggcccgtgtttcactcaggtcaacaaccagatgtgccaagggcagctgacaggcattgtctgcacgaagactctgtgctgtgccaccattggacgggcgtggggccatccctgtgagatgtgtccagcccagcctcagccctgccgacggggtttcatccccaacatccgcactggagcttgccaagatgttgatgaatgccaggctatcccagggatatgccaaggaggaaactgtatcaatacagtgggctcttttgaatgcagatgccctgctggtcacaaacagagtgaaactactcagaaatgtgaagacattgatgagtgcagcatcattcctgggatatgtgaaactggtgaatgttccaacaccgtgggaagctatttttgtgtttgtccacgtggatatgtaacctcaacagatggctctcgatgcatcgatcagagaacaggcatgtgtttctcgggcctggtgaatggccgctgtgcacaagagctcccggggagaatgacgaaaatgcagtgctgctgtgagcctggccgctgctggggcatcggaaccattcctgaagcctgtcctgtcagaggttctgaggaatatcgcagactttgcatggatggacttccaatgggaggaattccagggagtgctggttccagacctggaggcactgggggaaatggctttgccccaagtggcaatggcaatggctatggcccaggagggacaggcttcatccccatccctggaggcaatggcttttctcctggcgttgggggagccggtgtgggggccgggggacagggacctatcatcactggactaacaattctgaaccagacaatagatatctgtaagcatcatgctaacctttgtttaaatggacgctgtataccaactgtctcaagctaccgatgtgaatgcaacatgggttataagcaggatgcaaatggagattgtatagatgttgatgaatgcacatcaaatccctgcactaatggagattgtgttaacacacctggttcctattattgtaaatgtcatgctggattccagaggactcctaccaagcaagcatgcattgatattgatgagtgcatccagaatggggttctttgtaaaaacggtcgatgcgtgaacacagatggaagtttccagtgcatttgcaatgccggctttgaattaactacagatggaaaaaactgtgttgatcatgatgaatgtacaactaccaacatgtgtttgaatggaatgtgcatcaatgaagatggcagcttcaagtgcatctgcaaaccaggatttgtcttggctccaaatgggcgttactgtactgatgttgatgaatgccagaccccaggaatctgcatgaatgggcactgcatcaacagtgaagggtccttccgctgtgactgtcccccaggcctggctgtgggcatggatggacgtgtgtgtgttgatactcacatgcgcagtacctgctatggaggaatcaagaaaggagtgtgtgtgcgtcctttccccggtgcagtgaccaagtccgaatgctgctgtgccaatccagactatggttttggagaaccctgccagccatgccctgcaaaaaattcagctgaattccacggcctttgtagtagtggagtaggtatcactgtggatggaagagatatcaatgaatgtgctttggatcctgatatatgtgccaatgggatttgtgaaaacttacgtggtagttaccgttgtaattgcaacagtggctatgaaccagatgcctctggaagaaactgtattgacattgatgaatgtttagtaaacagactgctttgtgataacggattgtgccgaaacacgccaggaagttacagctgtacgtgcccaccagggtatgtgttcaggactgagacagagacctgtgaagatataaatgaatgtgaaagcaacccatgtgtcaatggggcctgcagaaacaaccttggatctttcaattgtgaatgttcgcccggcagcaaactcagctccacaggattgatctgtattgacagcctgaaggggacctgttggctcaacatccaggacagccgctgtgaggtgaatattaatggagccactctgaaatctgaatgctgtgccaccctcggagccgcctgggggagcccctgtgagcggtgtgaactagatacagcttgcccaagagggcttgccaggattaaaggtgttacgtgtgaagatgttaatgagtgtgaggtgttccctggcgtttgtccaaatggacgctgtgtcaacagtaagggatcttttcattgcgagtgccctgaaggccttacgttggatgggactggccgtgtatgtttggatattcgcatggagcagtgttacttgaagtgggatgaagatgaatgcatccaccccgttcctggaaagttccgcatggatgcctgctgctgtgctgtcggggcggcttggggcaccgagtgtgaggagtgccccaaacctggcaccaaggaatacgagacgctgtgcccccgcggggctggctttgctaaccgaggggatgttcttactgggcggccattttacaaagacatcaatgaatgcaaagcatttcctgggatgtgcacttatgggaagtgcagaaatacaatcggaagcttcaaatgccgttgcaatagtggctttgctctagacatggaggaaagaaactgcacggacatcgacgagtgcaggatttctcctgacctctgtggcagtggaatctgcgtcaatacaccgggcagctttgagtgcgagtgcttcgaaggctatgaaagtggcttcatgatgatgaagaactgcatggacattgacgaatgtgaacgtaaccctctcctttgtaggggtggcacctgtgtgaacactgagggcagctttcagtgtgactgcccactgggacacgagctgtcaccatcccgtgaggactgtgtggatattaatgaatgctccctgagtgacaatctctgcagaaatggaaaatgtgtgaacatgattggaacctatcagtgctcttgcaatcctggatatcaggctacgccagaccgccagggctgtacagatattgatgaatgtatgataatgaacggaggctgtgacacccagtgcacaaattcagagggaagctacgaatgcagctgcagtgagggttatgccctgatgccagatgggagatcgtgtgcagacattgatgaatgtgaaaacaatcctgatatctgtgatggcggccagtgtaccaacattcctggagagtatcgctgcctctgctatgatggcttcatggcttccatggacatgaaaacatgcattgatgtcaatgaatgtgacctaaattcaaatatctgcatgtttggggaatgtgagaacacaaagggatccttcatttgccactgtcagctgggttactcagtgaagaaggggaccacaggatgtacagatgtggatgagtgtgaaattggtgctcataactgcgacatgcatgcctcatgtctgaatatcccaggaagcttcaagtgtagctgcagagaaggctggattggaaacggcatcaagtgtattgatctggacgaatgttctaatggaacccaccagtgtagcatcaatgctcagtgtgtaaataccccgggctcataccgctgtgcctgctccgaaggtttcactggtgatggctttacctgctcagatgttgatgagtgtgcagaaaacataaacctctgtgagaacggacagtgccttaatgtcccgggtgcatatcgctgcgagtgtgagatgggcttcactccagcctcagacagcagatcctgccaagatattgatgaatgctccttccaaaacatttgtgtctttggaacatgtaataacctgcctggaatgtttcattgcatctgcgatgatggttatgaattggacagaacaggagggaactgtacagatattgatgagtgtgcagatcctataaactgtgtcaatggcctatgtgtcaacacgcctggtcgctatgagtgtaactgcccacccgattttcagttgaacccaactggtgtgggttgtgttgacaaccgtgtgggcaactgctacctgaagtttggacctcgaggagatgggagtctgtcttgcaacaccgagatcggggtgggcgtcagtcgctcttcatgctgctgctctctgggaaaggcctggggaaacccctgtgagacatgcccccctgtcaatagcactgaatattacaccctgtgtcccggaggtgaaggcttcagacctaaccccatcacaatcattttagaagacattgacgaatgccaggagttaccaggtctctgccagggtggaaactgcatcaacacttttgggagcttccagtgtgagtgcccacaaggctactacctcagcgaggatacccgcatctgtgaagatattgatgagtgttttgcacatcctggtgtgtgtgggcctgggacctgctataacaccctgggaaattacacctgcatttgcccacctgagtacatgcaggtcaatggaggccacaactgcatggacatgagaaaaagcttttgctaccgaagctataatggaaccacttgtgagaatgagttgcctttcaatgtgacaaaaaggatgtgctgctgcacatataatgtgggcaaagcctggaacaaaccttgtgaaccatgcccaactccaggaacagctgactttaaaaccatatgtggaaatattcctggattcacctttgacattcacacaggaaaagctgttgacattgatgaatgtaaagagattccaggcatttgtgcaaatggtgtgtgcattaaccagattggcagtttccgctgtgaatgccctacaggattcagttacaatgacctgctgttggtttgtgaagatatagatgagtgcagcaatggtgataatctctgccagcggaatgcagactgcatcaatagtcctggtagttaccgctgtgaatgtgccgcgggtttcaaactttcacccaatggggcctgtgtagatcgcaatgaatgtttagaaattcctaacgtttgcagtcatggcttgtgtgttgatctgcaaggaagttaccagtgcatctgccacaatggctttaaggcttctcaggaccagaccatgtgcatggatgttgatgagtgcgagcggcatccatgtggaaatggaacttgtaaaaacaccgttggatcctataactgtctgtgctacccagggtttgaactcactcataataatgattgcctggacatagatgagtgcagttccttttttggtcaggtgtgcagaaatggacgttgttttaatgaaattggttctttcaagtgtctatgtaacgaaggttatgaacttaccccagatggcaaaaactgtatagacactaatgagtgtgtcgcccttcccggctcttgctctcctggtacctgtcagaatttggagggatccttcagatgcatctgtcccccagggtatgaagtaaaaagcgagaactgcattgatataaatgaatgtgatgaagatcccaacatttgtctttttggttcctgtactaatactccagggggcttccagtgcctctgcccccctggctttgtactatctgataatggacggagatgctttgatactcgccagagcttctgcttcacaaattttgaaaatggaaagtgttctgtacccaaagctttcaacaccacaaaagcaaaatgctgctgtagtaagatgccaggagagggctggggggacccctgtgagctgtgccccaaagacgatgaagttgcatttcaggatttgtgtccatatggccatggaactgtccctagtcttcatgatacacgtgaagatgtcaatgagtgtcttgagagcccaggcatttgttcaaatggtcaatgtatcaacaccgacggatcttttcgctgtgaatgtccaatgggctacaaccttgactacactggagtacgctgtgtggatactgatgagtgttcaatcggcaatccgtgtggaaatggtacatgcaccaatgttattgggagttttgaatgcaattgcaatgaaggctttgagccagggcccatgatgaattgtgaagatatcaacgaatgtgcccagaacccactgctgtgtgctttccgctgcatgaacacttttgggtcctatgaatgcacgtgcccgattggctatgccctcagggaagatcaaaagatgtgcaaagatctggatgaatgtgctgaagggttacacgactgtgaatctaggggcatgatgtgtaagaatctaatcggcaccttcatgtgcatctgccctcctggaatggcccgaaggcccgatggagaaggctgtgtagatgaaaatgaatgcaggaccaagccaggaatctgtgaaaatggacgttgtgttaacattattggaagctatagatgtgagtgtaatgaaggattccagtcaagttcttcaggcactgaatgccttgacaatcgacagggtctctgctttgcagaggtactgcagacaatatgtcaaatggcatccagtagtcgcaatctcgtcactaagtcagaatgctgctgtgatggtgggcgaggctggggccaccagtgcgagctttgcccacttcctggaactgcccagtacaaaaagatatgtcctcatggcccaggatatacaactgatggaagagatattgatgaatgtaaggtaatgccaaacctctgcaccaatggtcagtgcatcaataccatgggctcattccgatgcttctgcaaggttggctacaccacagacatcagtggaacctcttgtatagaccttgatgaatgctcccagtccccgaaaccatgcaactacatctgcaagaacactgaggggagttatcagtgttcatgtccgagggggtatgtcctgcaagaggatggaaagacatgcaaagaccttgatgaatgtcaaacaaagcagcataactgccagttcctctgtgtcaacaccctgggggggtttacctgtaaatgtccacctggtttcacacagcatcacactgcttgtatcgacaacaacgaatgtgggtctcaaccttcgctttgtggagcaaagggaatctgtcaaaacactccaggcagtttcagctgtgaatgccaaagagggttctctcttgatgccaccggactgaactgtgaagatgttgatgaatgtgatgggaaccacaggtgccaacacggctgccagaacatcctgggtggctacagatgtggctgcccccaaggctacatccagcactaccagtggaatcagtgtgtcgatgagaatgaatgctccaatcccaatgcctgtggctctgcttcctgctacaacaccctggggagttacaagtgcgcctgcccctcggggttctccttcgaccagttctccagtgcctgccacgacgtgaatgagtgctcgtcctccaagaacccctgcaattacggctgctctaacacggaggggggctacctctgtggctgcccccctgggtattacagagtgggacaaggccactgtgtctcaggaatgggatttaacaaggggcagtacctgtcactggatacagaggtcgatgaggaaaatgctctgtccccagaagcatgctacgagtgcaaaatcaacggctattctaagaaagacagcaggcagaagagaagtattcatgaacctgatcccactgctgttgaacagatcagcctagagagtgtcgacatggacagccccgtcaacatgaagttcaacctctcccacctcggctctaaggagcacatcctggaactaaggcccgccatccagcccctcaacaaccacatccgttatgtcatctctcaagggaacgatgacagcgtcttccgcatccaccaaaggaatgggctcagctacttgcacacggccaagaagaagctcatgcccggcacatacacactggaaatcactagcatccctctctacaagaagaaggagcttaagaaactggaagagagcaatgaggatgactacctcctaggggagcttggggaggctctcagaatgaggctgcagattcagctctattaacccttcacagacttgggcccaggctcaaatcctagcacagccagtctgcagaagcatttgaaaagtcaaggactaattttaaagaggaaaaataataataactcttgtttctttcctccctgtcttagactttgaatgttgaccctcacagggagggataatttagactctggtatggccaaagatttgagcacaaaggcaaccgtggttactgtattttttatataacttcattttaaaatatattaaaagaaacctaaatgttcaagatatcagcatatggcactaaatgcacaaaaataatgtgagctttttttttttttcctgttagcagtctgtaacactttgggtattttgctatagttgctaattaaaaaaatatagatgtttatttatttttaatgcagtaatatatggagaaatgaacaaactatgtaaacaaaaagggaaactcacttgtttttctttagatttataaatttgagctattttttttagaggtgctttttaaaaatccaatagatacaagagatgtttcctttggttttctgccagtcatccagctgatacacacctgatgattttaaagaaagccacacagagctgaatgggcagtgtaatcaataatttaaaaaacatgaatgtcattagatcctttataacgtagatcgaagccaaagcagctcatttgtgacaacatttcatatcaccagacacaccaggcaacagaagttgaagcacaaccactgtagcaaaataccttgactgcttgtgagaccattagcattgcaggccaaaccgtactgtatttccttctcataacctcaaggaaccatatgtgctacccacaacacctcattcttacccagggtgcgctgcgtcctcatggtactgtaggcagctgaagaaccgccgttcccttgaaagggaacacctggcattctgtggtgtttcgtgctgtcttaaataatggtgcatttattatgttcaagttatttcaggattgccatatgtgcaaacaaatcatgcaatgcagccaaggaatatatgttgttgttgttgttttaaacccattttttttttagaattttcattaatactgtagttatacaccatatgcctcattttatcatagcctattgtgtatgaaagatgtttgtacaatgaattgatgtttagtttgctttagtcatttaaaaagatattgtaccaggatgtgctattaagagcacgtatccattattcttctcaacccaagaacctgtttcctggaccagtgaccaaacctcatatgtgaaatggccaaagcacatgcaggctcctggttgttcctctcaaacctgtgctgaccaaagattagtaaccagttatacccagtattttgaggttttattgtttttttaataactaaaaagaaaaaaggaacagtgtaaatttgtaatcaagagtttgtgaggaaaaacttatggtttttggttttgtttgtttttgtaggtctgtgtatcaaatatgacacttttcttgcaataaagcttattttggggta

SEQ ID NO: 134233 - DNA, 11132 bp, Homo sapiens
  Payload ID: 6217
  Gene Symbol: FBN2
  Gene Name: fibrillin 2
  Uniprot ID: P35556
  ENST ID: ENST00000508053
  CDS Start-End: 976-9714
ggcagttagggcaactggaaggctgggagctgaaatcacctgaagtctcattcactcacatgtctgatggttgatattgtctatcagattcttttttgtctccttctctgcaagaggctggcaccagatcacctcctgagtagagcagacattccaaaggatgtcctgccaacaataatggaaagctggatacaactgaatatgtaaaatgatgttaatgaagaattgaagagcactgtatctagttttctgctctccccttattttgaatcaaacccaggcatcctatcatttcatctataaagactttagttcctaaaagtggaattgctggatcaaagggtaaaggcataggcaattctagagcatttagatttaatgtgatggacaggaatgaaccatgaagccacgagtgtttgatttttaaattgtgatattccactaaatgagaaatgaccaggacttcacagagatttcatgaaaggagggccacaaaggaagaacccagagcaggccggtgagaggcactctaagagctttccaatatccgtcttcggagcgcacgggaatccgccgagctctgcgtgcaggcccttttttcttttgaggttcacattttttgaaattttacgccagggcttttgtaatttcctcccccgcccgctgacggtcctggagtcgctcggggctttaggccggttatgcaacgtgtaccgctcggggctgccggctgcacctccgccgcgcctcgccgctcactgcgctagacccggcgccccgcgtctcgcttcgcgggcagtcagggggccggcgctctgtcgaggtctccagctagagcagggagcccgagcccgagggagtccccggagccgacgaagggcttattagaccctgactcttttctgaggcgcgcagattttgtctttgatcactccctctccgcgggtctacggccgcgcgctttcggcgccggcgatggggagaagacggaggctgtgtctccagctctacttcctgtggctgggctgtgtggtgctctgggcgcagggcacggccggccagcctcagcctcctccgcccaagccgccccggccccagccgccgccgcaacaggttcggtccgctacagcaggctctgaaggcgggtttctagcgcccgagtatcgcgaggagggtgccgcagtggccagccgcgtccgccggcgaggacagcaggacgtgctccgagggcccaacgtgtgcggctccagattccactcctactgctgccctggatggaagacgctccctggaggaaaccagtgcattgtcccgatttgtagaaatagttgtggagatggattttgttcccgtcctaacatgtgtacttgttccagtgggcaaatatcatcaacctgtggatcaaaatcaattcagcagtgcagtgtgagatgcatgaatggtgggacctgtgcagatgaccactgccagtgccagaaaggatatattggaacttattgtggacaacctgtctgtgaaaatggatgtcagaatggtggacgttgcatcggacccaaccgctgtgcttgtgtttatgggttcactggtccacagtgtgaaagagattacaggacaggcccgtgtttcactcaggtcaacaaccagatgtgccaagggcagctgacaggcattgtctgcacgaagactctgtgctgtgccaccattggacgggcgtggggccatccctgtgagatgtgtccagcccagcctcagccctgccgacggggtttcatccccaacatccgcactggagcttgccaagatgttgatgaatgccaggctatcccagggatatgccaaggaggaaactgtatcaatacagtgggctcttttgaatgcagatgccctgctggtcacaaacagagtgaaactactcagaaatgtgaagacattgatgagtgcagcatcattcctgggatatgtgaaactggtgaatgttccaacaccgtgggaagctatttttgtgtttgtccacgtggatatgtaacctcaacagatggctctcgatgcatcgatcagagaacaggcatgtgtttctcgggcctggtgaatggccgctgtgcacaagagctcccggggagaatgacgaaaatgcagtgctgctgtgagcctggccgctgctggggcatcggaaccattcctgaagcctgtcctgtcagaggttctgaggaatatcgcagactttgcatggatggacttccaatgggaggaattccagggagtgctggttccagacctggaggcactgggggaaatggctttgccccaagtggcaatggcaatggctatggcccaggagggacaggcttcatccccatccctggaggcaatggcttttctcctggcgttgggggagccggtgtgggggccgggggacagggacctatcatcactggactaacaattctgaaccagacaatagatatctgtaagcatcatgctaacctttgtttaaatggacgctgtataccaactgtctcaagctaccgatgtgaatgcaacatgggttataagcaggatgcaaatggagattgtatagatgttgatgaatgcacatcaaatccctgcactaatggagattgtgttaacacacctggttcctattattgtaaatgtcatgctggattccagaggactcctaccaagcaagcatgcattgatattgatgagtgcatccagaatggggttctttgtaaaaacggtcgatgcgtgaacacagatggaagtttccagtgcatttgcaatgccggctttgaattaactacagatggaaaaaactgtgttgatcatgatgaatgtacaactaccaacatgtgtttgaatggaatgtgcatcaatgaagatggcagcttcaagtgcatctgcaaaccaggatttgtcttggctccaaatgggcgttactgtactgatgttgatgaatgccagaccccaggaatctgcatgaatgggcactgcatcaacagtgaagggtccttccgctgtgactgtcccccaggcctggctgtgggcatggatggacgtgtgtgtgttgatactcacatgcgcagtacctgctatggaggaatcaagaaaggagtgtgtgtgcgtcctttccccggtgcagtgaccaagtccgaatgctgctgtgccaatccagactatggttttggagaaccctgccagccatgccctgcaaaaaattcagctgaattccacggcctttgtagtagtggagtaggtatcactgtggatggaagagatatcaatgaatgtgctttggatcctgatatatgtgccaatgggatttgtgaaaacttacgtggtagttaccgttgtaattgcaacagtggctatgaaccagatgcctctggaagaaactgtattgacattgatgaatgtttagtaaacagactgctttgtgataacggattgtgccgaaacacgccaggaagttacagctgtacgtgcccaccagggtatgtgttcaggactgagacagagacctgtgaagatataaatgaatgtgaaagcaacccatgtgtcaatggggcctgcagaaacaaccttggatctttcaattgtgaatgttcgcccggcagcaaactcagctccacaggattgatctgtattgacagcctgaaggggacctgttggctcaacatccaggacagccgctgtgaggtgaatattaatggagccactctgaaatctgaatgctgtgccaccctcggagccgcctgggggagcccctgtgagcggtgtgaactagatacagcttgcccaagagggcttgccaggattaaaggtgttacgtgtgaagatgttaatgagtgtgaggtgttccctggcgtttgtccaaatggacgctgtgtcaacagtaagggatcttttcattgcgagtgccctgaaggccttacgttggatgggactggccgtgtatgtttggatattcgcatggagcagtgttacttgaagtgggatgaagatgaatgcatccaccccgttcctggaaagttccgcatggatgcctgctgctgtgctgtcggggcggcttggggcaccgagtgtgaggagtgccccaaacctggcaccaaggaatacgagacgctgtgcccccgcggggctggctttgctaaccgaggggatgttcttactgggcggccattttacaaagacatcaatgaatgcaaagcatttcctgggatgtgcacttatgggaagtgcagaaatacaatcggaagcttcaaatgccgttgcaatagtggctttgctctagacatggaggaaagaaactgcacggacatcgacgagtgcaggatttctcctgacctctgtggcagtggaatctgcgtcaatacaccgggcagctttgagtgcgagtgcttcgaaggctatgaaagtggcttcatgatgatgaagaactgcatggacattgacgaatgtgaacgtaaccctctcctttgtaggggtggcacctgtgtgaacactgagggcagctttcagtgtgactgcccactgggacacgagctgtcaccatcccgtgaggactgtgtggatattaatgaatgctccctgagtgacaatctctgcagaaatggaaaatgtgtgaacatgattggaacctatcagtgctcttgcaatcctggatatcaggctacgccagaccgccagggctgtacagatattgatgaatgtatgataatgaacggaggctgtgacacccagtgcacaaattcagagggaagctacgaatgcagctgcagtgagggttatgccctgatgccagatgggagatcgtgtgcagacattgatgaatgtgaaaacaatcctgatatctgtgatggcggccagtgtaccaacattcctggagagtatcgctgcctctgctatgatggcttcatggcttccatggacatgaaaacatgcattgatgtcaatgaatgtgacctaaattcaaatatctgcatgtttggggaatgtgagaacacaaagggatccttcatttgccactgtcagctgggttactcagtgaagaaggggaccacaggatgtacagatgtggatgagtgtgaaattggtgctcataactgcgacatgcatgcctcatgtctgaatatcccaggaagcttcaagtgtagctgcagagaaggctggattggaaacggcatcaagtgtattgatctggacgaatgttctaatggaacccaccagtgtagcatcaatgctcagtgtgtaaataccccgggctcataccgctgtgcctgctccgaaggtttcactggtgatggctttacctgctcagatgttgatgagtgtgcagaaaacataaacctctgtgagaacggacagtgccttaatgtcccgggtgcatatcgctgcgagtgtgagatgggcttcactccagcctcagacagcagatcctgccaagatattgatgaatgctccttccaaaacatttgtgtctttggaacatgtaataacctgcctggaatgtttcattgcatctgcgatgatggttatgaattggacagaacaggagggaactgtacagatattgatgagtgtgcagatcctataaactgtgtcaatggcctatgtgtcaacacgcctggtcgctatgagtgtaactgcccacccgattttcagttgaacccaactggtgtgggttgtgttgacaaccgtgtgggcaactgctacctgaagtttggacctcgaggagatgggagtctgtcttgcaacaccgagatcggggtgggcgtcagtcgctcttcatgctgctgctctctgggaaaggcctggggaaacccctgtgagacatgcccccctgtcaatagcactgaatattacaccctgtgtcccggaggtgaaggcttcagacctaaccccatcacaatcattttagaagacattgacgaatgccaggagttaccaggtctctgccagggtggaaactgcatcaacacttttgggagcttccagtgtgagtgcccacaaggctactacctcagcgaggatacccgcatctgtgaagatattgatgagtgttttgcacatcctggtgtgtgtgggcctgggacctgctataacaccctgggaaattacacctgcatttgcccacctgagtacatgcaggtcaatggaggccacaactgcatggacatgagaaaaagcttttgctaccgaagctataatggaaccacttgtgagaatgagttgcctttcaatgtgacaaaaaggatgtgctgctgcacatataatgtgggcaaagcctggaacaaaccttgtgaaccatgcccaactccaggaacagctgactttaaaaccatatgtggaaatattcctggattcacctttgacattcacacaggaaaagctgttgacattgatgaatgtaaagagattccaggcatttgtgcaaatggtgtgtgcattaaccagattggcagtttccgctgtgaatgccctacaggattcagttacaatgacctgctgttggtttgtgaagatatagatgagtgcagcaatggtgataatctctgccagcggaatgcagactgcatcaatagtcctggtagttaccgctgtgaatgtgccgcgggtttcaaactttcacccaatggggcctgtgtagatcgcaatgaatgtttagaaattcctaacgtttgcagtcatggcttgtgtgttgatctgcaaggaagttaccagtgcatctgccacaatggctttaaggcttctcaggaccagaccatgtgcatggatgttgatgagtgcgagcggcatccatgtggaaatggaacttgtaaaaacaccgttggatcctataactgtctgtgctacccagggtttgaactcactcataataatgattgcctggacatagatgagtgcagttccttttttggtcaggtgtgcagaaatggacgttgttttaatgaaattggttctttcaagtgtctatgtaacgaaggttatgaacttaccccagatggcaaaaactgtatagacactaatgagtgtgtcgcccttcccggctcttgctctcctggtacctgtcagaatttggagggatccttcagatgcatctgtcccccagggtatgaagtaaaaagcgagaactgcattgatataaatgaatgtgatgaagatcccaacatttgtctttttggttcctgtactaatactccagggggcttccagtgcctctgcccccctggctttgtactatctgataatggacggagatgctttgatactcgccagagcttctgcttcacaaattttgaaaatggaaagtgttctgtacccaaagctttcaacaccacaaaagcaaaatgctgctgtagtaagatgccaggagagggctggggggacccctgtgagctgtgccccaaagacgatgaagttgcatttcaggatttgtgtccatatggccatggaactgtccctagtcttcatgatacacgtgaagatgtcaatgagtgtcttgagagcccaggcatttgttcaaatggtcaatgtatcaacaccgacggatcttttcgctgtgaatgtccaatgggctacaaccttgactacactggagtacgctgtgtggatactgatgagtgttcaatcggcaatccgtgtggaaatggtacatgcaccaatgttattgggagttttgaatgcaattgcaatgaaggctttgagccagggcccatgatgaattgtgaagatatcaacgaatgtgcccagaacccactgctgtgtgctttccgctgcatgaacacttttgggtcctatgaatgcacgtgcccgattggctatgccctcagggaagatcaaaagatgtgcaaagatctggatgaatgtgctgaagggttacacgactgtgaatctaggggcatgatgtgtaagaatctaatcggcaccttcatgtgcatctgccctcctggaatggcccgaaggcccgatggagaaggctgtgtagatgaaaatgaatgcaggaccaagccaggaatctgtgaaaatggacgttgtgttaacattattggaagctatagatgtgagtgtaatgaaggattccagtcaagttcttcaggcactgaatgccttgacaatcgacagggtctctgctttgcagaggtactgcagacaatatgtcaaatggcatccagtagtcgcaatctcgtcactaagtcagaatgctgctgtgatggtgggcgaggctggggccaccagtgcgagctttgcccacttcctggaactgcccagtacaaaaagatatgtcctcatggcccaggatatacaactgatggaagagatattgatgaatgtaaggtaatgccaaacctctgcaccaatggtcagtgcatcaataccatgggctcattccgatgcttctgcaaggttggctacaccacagacatcagtggaacctcttgtatagaccttgatgaatgctcccagtccccgaaaccatgcaactacatctgcaagaacactgaggggagttatcagtgttcatgtccgagggggtatgtcctgcaagaggatggaaagacatgcaaagaccttgatgaatgtcaaacaaagcagcataactgccagttcctctgtgtcaacaccctgggggggtttacctgtaaatgtccacctggtttcacacagcatcacactgcttgtatcgacaacaacgaatgtgggtctcaaccttcgctttgtggagcaaagggaatctgtcaaaacactccaggcagtttcagctgtgaatgccaaagagggttctctcttgatgccaccggactgaactgtgaagatgttgatgaatgtgatgggaaccacaggtgccaacacggctgccagaacatcctgggtggctacagatgtggctgcccccaaggctacatccagcactaccagtggaatcagtgtgtcgatgagaatgaatgctccaatcccaatgcctgtggctctgcttcctgctacaacaccctggggagttacaagtgcgcctgcccctcggggttctccttcgaccagttctccagtgcctgccacgacgtgaatgagtgctcgtcctccaagaacccctgcaattacggctgctctaacacggaggggggctacctctgtggctgcccccctgggtattacagagtgggacaaggccactgtgtctcaggaatgggatttaacaaggggcagtacctgtcactggatacagaggtcgatgaggaaaatgctctgtccccagaagcatgctacgagtgcaaaatcaacggctattctaagaaagacagcaggcagaagagaagtattcatgaacctgatcccactgctgttgaacagatcagcctagagagtgtcgacatggacagccccgtcaacatgaagttcaacctctcccacctcggctctaaggagcacatcctggaactaaggcccgccatccagcccctcaacaaccacatccgttatgtcatctctcaagggaacgatgacagcgtcttccgcatccaccaaaggaatgggctcagctacttgcacacggccaagaagaagctcatgcccggcacatacacactggaaatcactagcatccctctctacaagaagaaggagcttaagaaactggaagagagcaatgaggatgactacctcctaggggagcttggggaggctctcagaatgaggctgcagattcagctctattaacccttcacagacttgggcccaggctcaaatcctagcacagccagtctgcagaagcatttgaaaagtcaaggactaattttaaagaggaaaaataataataactcttgtttctttcctccctgtcttagactttgaatgttgaccctcacagggagggataatttagactctggtatggccaaagatttgagcacaaaggcaaccgtggttactgtattttttatataacttcattttaaaatatattaaaagaaacctaaatgttcaagatatcagcatatggcactaaatgcacaaaaataatgtgagctttttttttttttcctgttagcagtctgtaacactttgggtattttgctatagttgctaattaaaaaaatatagatgtttatttatttttaatgcagtaatatatggagaaatgaacaaactatgtaaacaaaaagggaaactcacttgtttttctttagatttataaatttgagctattttttttagaggtgctttttaaaaatccaatagatacaagagatgtttcctttggttttctgccagtcatccagctgatacacacctgatgattttaaagaaagccacacagagctgaatgggcagtgtaatcaataatttaaaaaacatgaatgtcattagatcctttataacgtagatcgaagccaaagcagctcatttgtgacaacatttcatatcaccagacacaccaggcaacagaagttgaagcacaaccactgtagcaaaataccttgactgcttgtgagaccattagcattgcaggccaaaccgtactgtatttccttctcataacctcaaggaaccatatgtgctacccacaacacctcattcttacccagggtgcgctgcgtcctcatggtactgtaggcagctgaagaaccgccgttcccttgaaagggaacacctggcattctgtggtgtttcgtgctgtcttaaataatggtgcatttattatgttcaagttatttcaggattgccatatgtgcaaacaaatcatgcaatgcagccaaggaatatatgttgttgttgttgttttaaacccattttttttttagaattttcattaatactgtagttatacaccatatgcctcattttatcatagcctattgtgtatgaaagatgtttgtacaatgaattgatgtttagtttgctttagtcatttaaaaagatattgtaccaggatgtgctattaagagcacgtatccattattcttctcaacccaagaacctgtttcctggaccagtgaccaaacctcatatgtgaaatggccaaagcacatgcaggctcctggttgttcctctcaaacctgtgctgaccaaagattagtaaccagttatacccagtattttgaggttttattgtttttttaataactaaaaagaaa

SEQ ID NO: 134234 - DNA, 1947 bp, Homo sapiens
  Payload ID: 6217
  Gene Symbol: FBN2
  Gene Name: fibrillin 2
  ENST ID: ENST00000502468
  CDS Start-End: 621-1646
gcctcccgccctctctcttgctggccgcacgccccggccccgcgcacctccgcccggctccgcagccgctacccgcgcttcgttgccctgtgggactccgagcgagcccggagggaaccctcctcttcttctgggggcgacttttgtttgcttgcctgtttctttctggtgacttttgcagctttccaatatccgtcttcggagcgcacgggaatccgccgagctctgcgtgcaggcccttttttcttttgaggttcacattttttgaaattttacgccagggcttttgtaatttcctcccccgcccgctgacggtcctggagtcgctcggggctttaggccggttatgcaacgtgtaccgctcggggctgccggctgcacctccgccgcgcctcgccgctcactgcgctagacccggcgccccgcgtctcgcttcgcgggcagtcagggggccggcgctctgtcgaggtctccagctagagcagggagcccgagcccgagggagtccccggagccgacgaagggcttattagaccctgactcttttctgaggcgcgcagattttgtctttgatcactccctctccgcgggtctacggccgcgcgctttcggcgccggcgatggggagaagacggaggctgtgtctccagctctacttcctgtggctgggctgtgtggtgctctgggcgcagggcacggccggccagcctcagcctcctccgcccaagccgccccggccccagccgccgccgcaacaggttcggtccgctacagcaggctctgaaggcgggtttctagcgcccgagtatcgcgaggagggtgccgcagtggccagccgcgtccgccggcgaggacagcaggacgtgctccgagggcccaacgtgtgcggctccagattccactcctactgctgccctggatggaagacgctccctggaggaaaccagtgcattgtcccgatttgtagaaatagttgtggagatggattttgttcccgtcctaacatgtgtacttgttccagtgggcaaatatcatcaacctgtggatcaaaatcaattcagcagtgcagtgtgagatgcatgaatggtgggacctgtgcagatgaccactgccagtgccagaaaggatatattggaacttattgtggacaacctgtctgtgaaaatggatgtcagaatggtggacgttgcatcggacccaaccgctgtgcttgtgtttatgggttcactggtccacagtgtgaaagagattacaggacaggcccgtgtttcactcaggtcaacaaccagatgtgccaagggcagctgacaggcattgtctgcacgaagactctgtgctgtgccaccattggacgggcgtggggccatccctgtgagatgtgtccagcccagcctcagccctgccgacggggtttcatccccaacatccgcactggagcttgccaagatgttgatgaatgccaggctatcccagggatatgccaaggaggaaactgtatcaatacagtgggctcttttgaatgcagatgccctgctggtcacaaacagagtgaaactactcagaaatgtgaagtccatgtggataaagcacaagcaggagccagatgtccttgcgtgatcctcccttccagactataccttcgttaacattccttgagctagttattctttcctggcttacatgggaggcagaaaaagaacatcattgtattggaaagtttcccttaaatggctctttatgtggcagatagttgtttgcaatttagtttgaagagttttcagctttgttccattaacacagcattttgttgtttgagacttgtgacaacaaatatatttatttaggctcatgaaactcataaaagttgttggcacagtctcctctgctgctgttccaactctgcttagataaaccatggaaaataaactttctgtactaaactgaaaa

SEQ ID NO: 134235 - DNA, 4987 bp, Homo sapiens
  Payload ID: 6217
  Gene Symbol: FBN2
  Gene Name: fibrillin 2
  ENST ID: ENST00000508989
  CDS Start-End: 219-4640
actgcgctagacccggcgccccgcgtctcgcttcgcgggcagtcagggggccggcgctctgtcgaggtctccagctagagcagggagcccgagcccgagggagtccccggagccgacgaagggcttattagaccctgactcttttctgaggcgcgcagattttgtctttgatcactccctctccgcgggtctacggccgcgcgctttcggcgccggcgatggggagaagacggaggctgtgtctccagctctacttcctgtggctgggctgtgtggtgctctgggcgcagggcacggccggccagcctcagcctcctccgcccaagccgccccggccccagccgccgccgcaacaggttcggtccgctacagcaggctctgaaggcgggtttctagcgcccgagtatcgcgaggagggtgccgcagtggccagccgcgtccgccggcgaggacagcaggacgtgctccgagggcccaacgtgtgcggctccagattccactcctactgctgccctggatggaagacgctccctggaggaaaccagtgcattgtccttcagcagtgcagtgtgagatgcatgaatggtgggacctgtgcagatgaccactgccagtgccagaaaggatatattggaacttattgtggacaacctgtctgtgaaaatggatgtcagaatggtggacgttgcatcggacccaaccgctgtgcttgtgtttatgggttcactggtccacagtgtgaaagagattacaggacaggcccgtgtttcactcaggtcaacaaccagatgtgccaagggcagctgacaggcattgtctgcacgaagactctgtgctgtgccaccattggacgggcgtggggccatccctgtgagatgtgtccagcccagcctcagccctgccgacggggtttcatccccaacatccgcactggagcttgccaagatgttgatgaatgccaggctatcccagggatatgccaaggaggaaactgtatcaatacagtgggctcttttgaatgcagatgccctgctggtcacaaacagagtgaaactactcagaaatgtgaagacattgatgagtgcagcatcattcctgggatatgtgaaactggtgaatgttccaacaccgtgggaagctatttttgtgtttgtccacgtggatatgtaacctcaacagatggctctcgatgcatcgatcagagaacaggcatgtgtttctcgggcctggtgaatggccgctgtgcacaagagctcccggggagaatgacgaaaatgcagtgctgctgtgagcctggccgctgctggggcatcggaaccattcctgaagcctgtcctgtcagaggttctgaggaatatcgcagactttgcatggatggacttccaatgggaggaattccagggagtgctggttccagacctggaggcactgggggaaatggctttgccccaagtggcaatggcaatggctatggcccaggagggacaggcttcatccccatccctggaggcaatggcttttctcctggcgttgggggagccggtgtgggggccgggggacagggacctatcatcactggactaacaattctgaaccagacaatagatatctgtaagcatcatgctaacctttgtttaaatggacgctgtataccaactgtctcaagctaccgatgtgaatgcaacatgggttataagcaggatgcaaatggagattgtatagatgttgatgaatgcacatcaaatccctgcactaatggagattgtgttaacacacctggttcctattattgtaaatgtcatgctggattccagaggactcctaccaagcaagcatgcattgatattgatgagtgcatccagaatggggttctttgtaaaaacggtcgatgcgtgaacacagatggaagtttccagtgcatttgcaatgccggctttgaattaactacagatggaaaaaactgtgttgatcatgatgaatgtacaactaccaacatgtgtttgaatggaatgtgcatcaatgaagatggcagcttcaagtgcatctgcaaaccaggatttgtcttggctccaaatgggcgttactgtactgatgttgatgaatgccagaccccaggaatctgcatgaatgggcactgcatcaacagtgaagggtccttccgctgtgactgtcccccaggcctggctgtgggcatggatggacgtgtgtgtgttgatactcacatgcgcagtacctgctatggaggaatcaagaaaggagtgtgtgtgcgtcctttccccggtgcagtgaccaagtccgaatgctgctgtgccaatccagactatggttttggagaaccctgccagccatgccctgcaaaaaattcagctgaattccacggcctttgtagtagtggagtaggtatcactgtggatggaagagatatcaatgaatgtgctttggatcctgatatatgtgccaatgggatttgtgaaaacttacgtggtagttaccgttgtaattgcaacagtggctatgaaccagatgcctctggaagaaactgtattgacattgatgaatgtttagtaaacagactgctttgtgataacggattgtgccgaaacacgccaggaagttacagctgtacgtgcccaccagggtatgtgttcaggactgagacagagacctgtgaagatataaatgaatgtgaaagcaacccatgtgtcaatggggcctgcagaaacaaccttggatctttcaattgtgaatgttcgcccggcagcaaactcagctccacaggattgatctgtattgacagcctgaaggggacctgttggctcaacatccaggacagccgctgtgaggtgaatattaatggagccactctgaaatctgaatgctgtgccaccctcggagccgcctgggggagcccctgtgagcggtgtgaactagatacagcttgcccaagagggcttgccaggattaaaggtgttacgtgtgaagatgttaatgagtgtgaggtgttccctggcgtttgtccaaatggacgctgtgtcaacagtaagggatcttttcattgcgagtgccctgaaggccttacgttggatgggactggccgtgtatgtttggatattcgcatggagcagtgttacttgaagtgggatgaagatgaatgcatccaccccgttcctggaaagttccgcatggatgcctgctgctgtgctgtcggggcggcttggggcaccgagtgtgaggagtgccccaaacctggcaccaaggaatacgagacgctgtgcccccgcggggctggctttgctaaccgaggggatgttcttactgggcggccattttacaaagacatcaatgaatgcaaagcatttcctgggatgtgcacttatgggaagtgcagaaatacaatcggaagcttcaaatgccgttgcaatagtggctttgctctagacatggaggaaagaaactgcacggacatcgacgagtgcaggatttctcctgacctctgtggcagtggaatctgcgtcaatacaccgggcagctttgagtgcgagtgcttcgaaggctatgaaagtggcttcatgatgatgaagaactgcatggacattgacgaatgtgaacgtaaccctctcctttgtaggggtggcacctgtgtgaacactgagggcagctttcagtgtgactgcccactgggacacgagctgtcaccatcccgtgaggactgtgtggatattaatgaatgctccctgagtgacaatctctgcagaaatggaaaatgtgtgaacatgattggaacctatcagtgctcttgcaatcctggatatcaggctacgccagaccgccagggctgtacagatattgatgaatgtatgataatgaacggaggctgtgacacccagtgcacaaattcagagggaagctacgaatgcagctgcagtgagggttatgccctgatgccagatgggagatcgtgtgcagacattgatgaatgtgaaaacaatcctgatatctgtgatggcggccagtgtaccaacattcctggagagtatcgctgcctctgctatgatggcttcatggcttccatggacatgaaaacatgcattgatgtcaatgaatgtgacctaaattcaaatatctgcatgtttggggaatgtgagaacacaaagggatccttcatttgccactgtcagctgggttactcagtgaagaaggggaccacaggatgtacagatgtggatgagtgtgaaattggtgctcataactgcgacatgcatgcctcatgtctgaatatcccaggaagcttcaagtgtagctgcagagaaggctggattggaaacggcatcaagtgtattgatctggacgaatgttctaatggaacccaccagtgtagcatcaatgctcagtgtgtaaataccccgggctcataccgctgtgcctgctccgaaggtttcactggtgatggctttacctgctcagatgttgatgagtgtgcagaaaacataaacctctgtgagaacggacagtgccttaatgtcccgggtgcatatcgctgcgagtgtgagatgggcttcactccagcctcagacagcagatcctgccaaggtgggtcaccaggattccaactcattttcaagttggatcaaccacagtaaatgaaaccacaacaagggctggaacaagctccacctggaagcagaatacatagcacatgctgcactataaaagtcattcgtttaagcgtggattattttgccgaatgaataatgatgatggcggctttcatctcttatgaagttttcctggccaagagccagtagttggaagtttggatcattcttttttcttttttaaccatttcttctcttctttctcttttttatcactaaatgaatgacatgtggagaaactattcagcttttaaagtatgctccattacttgtctcaactaccactatttattgtgtttatcaaaatcataaaaagctcatttttggcattt

SEQ ID NO: 134236 - DNA, 1884 bp, Homo sapiens
  Payload ID: 6217
  Gene Symbol: FBN2
  Gene Name: fibrillin 2
  ENST ID: ENST00000507835
  CDS Start-End: 238-1308
tctactgaaaacatacccttgtactgttagccagcaatttccccaacttttcaagcatgcagcaccttcgcttggaaggccaagtctatctcattcaatttttaaatttcttttaaaccctgtgaattagacatcgacgagtgcaggatttctcctgacctctgtggcagtggaatctgcgtcaatacaccgggcagctttgagtgcgagtgcttcgaaggctatgaaagtggcttcatgatgatgaagaactgcatggacattgacgaatgtgaacgtaaccctctcctttgtaggggtggcacctgtgtgaacactgagggcagctttcagtgtgactgcccactgggacacgagctgtcaccatcccgtgaggactgtgtggatattaatgaatgctccctgagtgacaatctctgcagaaatggaaaatgtgtgaacatgattggaacctatcagtgctcttgcaatcctggatatcaggctacgccagaccgccagggctgtacagatattgatgaatgtatgataatgaacggaggctgtgacacccagtgcacaaattcagagggaagctacgaatgcagctgcagtgagggttatgccctgatgccagatgggagatcgtgtgcagacattgatgaatgtgaaaacaatcctgatatctgtgatggcggccagtgtaccaacattcctggagagtatcgctgcctctgctatgatggcttcatggcttccatggacatgaaaacatgcattgatgtcaatgaatgtgacctaaattcaaatatctgcatgtttggggaatgtgagaacacaaagggatccttcatttgccactgtcagctgggttactcagtgaagaaggggaccacaggatgtacagatgtggatgagtgtgaaattggtgctcataactgcgacatgcatgcctcatgtctgaatatcccaggaagcttcaagtgtagctgcagagaaggctggattggaaacggcatcaagtgtattgatctggacgaatgttctaatggaacccaccagtgtagcatcaatgctcagtgtgtaaataccccgggctcataccgctgtgcctgctccgaaggtttcactggtgatggctttacctgctcagatgttgatgagtgtgcagaaaacataaacctctgtgagaacggacagtgccttaatgtcccgggtgcatatcgctgcgagtgtgagatgggcttcactccagcctcagacagcagatcctgccaaggtgggtcaccaggattccaactcattttcaagttggatcaaccacagtaaatgaaaccacaacaagggctggaacaagctccacctggaagcagaatacatagcacatgctgcactataaaagtcattcgtttaagcgtggattattttgccgaatgaataatgatgatggcggctttcatctcttatgaagttttcctggccaagagccagtagttggaagtttggatcattcttttttcttttttaaccatttcttctcttctttctcttttttatcactaaatgaatgacatgtggagaaactattcagcttttaaagtatgctccattacttgtctcaactaccactatttattgtgtttatcaaaatcataaaaagctcatttttggcatttaccttcgtggttgagactgctgtctgtatgtctgggaatggaagtcctcttcagggattcagcaagggctgtacttttgcttaatactagtggttccttattctaagtgatgacatcatccacctttcctagaaatgggtctttgtgcctagtatgatatctttccaagaaaaagaatttggattttctattaaattagaaactcaattcacattatatatagtttgag

SEQ ID NO: 134237 - DNA, 1941 bp, Homo sapiens
  Payload ID: 6217
  Gene Symbol: FBN2
  Gene Name: fibrillin 2
  ENST ID: ENST00000620257
  CDS Start-End: 621-1451
gcctcccgccctctctcttgctggccgcacgccccggccccgcgcacctccgcccggctccgcagccgctacccgcgcttcgttgccctgtgggactccgagcgagcccggagggaaccctcctcttcttctgggggcgacttttgtttgcttgcctgtttctttctggtgacttttgcagctttccaatatccgtcttcggagcgcacgggaatccgccgagctctgcgtgcaggcccttttttcttttgaggttcacattttttgaaattttacgccagggcttttgtaatttcctcccccgcccgctgacggtcctggagtcgctcggggctttaggccggttatgcaacgtgtaccgctcggggctgccggctgcacctccgccgcgcctcgccgctcactgcgctagacccggcgccccgcgtctcgcttcgcgggcagtcagggggccggcgctctgtcgaggtctccagctagagcagggagcccgagcccgagggagtccccggagccgacgaagggcttattagaccctgactcttttctgaggcgcgcagattttgtctttgatcactccctctccgcgggtctacggccgcgcgctttcggcgccggcgatggggagaagacggaggctgtgtctccagctctacttcctgtggctgggctgtgtggtgctctgggcgcagggcacggccggccagcctcagcctcctccgcccaagccgccccggccccagccgccgccgcaacaggttcggtccgctacagcaggctctgaaggcgggtttctagcgcccgagtatcgcgaggagggtgccgcagtggccagccgcgtccgccggcgaggacagcaggacgtgctccgagggcccaacgtgtgcggctccagattccactcctactgctgccctggatggaagacgctccctggaggaaaccagtgcattgtcccgatttgtagaaatagttgtggagatggattttgttcccgtcctaacatgtgtacttgttccagtgggcaaatatcatcaacctgtggatcaaaatcaattcagcagtgcagtgtgagatgcatgaatggtgggacctgtgcagatgaccactgccagtgccagaaaggatatattggaacttattgtggacaacctgtctgtgaaaatggatgtcagaatggtggacgttgcatcggacccaaccgctgtgcttgtgtttatgggttcactggtccacagtgtgaaagagattacaggacaggcccgtgtttcactcaggtcaacaaccagatgtgccaagggcagctgacaggcattgtctgcacgaagactctgtgctgtgccaccattggacgggcgtggggccatccctgtgagatgtgtccagcccagcctcagccctgccgacggggtttcatcccccatccgcactggagcttgccaagatgttgatgaatgccaggctatcccagggatatgccaaggaggaaactgtatcaatacagtgggctcttttgaatgcagatgccctgctggtcacaaacagagtgaaactactcagaaatgtgaagtccatgtggataaagcacaagcaggagccagatgtccttgcgtgatcctcccttccagactataccttcgttaacattccttgagctagttattctttcctggcttacatgggaggcagaaaaagaacatcattgtattggaaagtttcccttaaatggctctttatgtggcagatagttgtttgcaatttagtttgaagagttttcagctttgttccattaacacagcattttgttgtttgagacttgtgacaacaaatatatttatttaggctcatgaaactcataaaagttgttggcacagtctcctctgctgctgttccaactctgcttagataaaccatggaaaataaactttctgtactaaactg

SEQ ID NO: 134238 - DNA, 10154 bp, Homo sapiens
  Payload ID: 6217
  Gene Symbol: FBN2
  Gene Name: fibrillin 2
  ENST ID: ENST00000619499
  CDS Start-End: 1-8736
atggggagaagacggaggctgtgtctccagctctacttcctgtggctgggctgtgtggtgctctgggcgcagggcacggccggccagcctcagcctcctccgcccaagccgccccggccccagccgccgccgcaacaggttcggtccgctacagcaggctctgaaggcgggtttctagcgcccgagtatcgcgaggagggtgccgcagtggccagccgcgtccgccggcgaggacagcaggacgtgctccgagggcccaacgtgtgcggctccagattccactcctactgctgccctggatggaagacgctccctggaggaaaccagtgcattgtcccgatttgtagaaatagttgtggagatggattttgttcccgtcctaacatgtgtacttgttccagtgggcaaatatcatcaacctgtggatcaaaatcaattcagcagtgcagtgtgagatgcatgaatggtgggacctgtgcagatgaccactgccagtgccagaaaggatatattggaacttattgtggacaacctgtctgtgaaaatggatgtcagaatggtggacgttgcatcacccaaccgtgtgcttgtgtttatgggttcactggtccacagtgtgaaagagattacaggacaggcccgtgtttcactcaggtcaacaaccagatgtgccaagggcagctgacaggcattgtctgcacgaagactctgtgctgtgccaccattggacgggcgtggggccatccctgtgagatgtgtccagcccagcctcagccctgccgacggggtttcatccccaacatccgcactggagcttgccaagatgttgatgaatgccaggctatcccagggatatgccaaggaggaaactgtatcaatacagtgggctcttttgaatgcagatgccctgctggtcacaaacagagtgaaactactcagaaatgtgaagacattgatgagtgcagcatcattcctgggatatgtgaaactggtgaatgttccaacaccgtgggaagctatttttgtgtttgtccacgtggatatgtaacctcaacagatggctctcgatgcatcgatcagagaacaggcatgtgtttctcgggcctggtgaatggccgctgtgcacaagagctcccggggagaatgacgaaaatgcagtgctgctgtgagcctggccgctgctggggcatcggaaccattcctgaagcctgtcctgtcagaggttctgaggaatatcgcagactttgcatggatggacttccaatgggaggaattccagggagtgctggttccagacctggaggcactgggggaaatggctttgccccaagtggcaatggcaatggctatggcccaggagggacaggcttcatccccatccctggaggcaatggcttttctcctggcgttgggggagccggtgtgggggccgggggacagggacctatcatcactggactaacaattctgaaccagacaatagatatctgtaagcatcatgctaacctttgtttaaatggacgctgtataccaactgtctcaagctaccgatgtgaatgcaacatgggttataagcaggatgcaaatggagattgtatagatgttgatgaatgcacatcaaatccctgcactaatggagattgtgttaacacacctggttcctattattgtaaatgtcatgctggattccagaggactcctaccaagcaagcatgcattgatattgatgagtgcatccagaatggggttctttgtaaaaacggtcgatgcgtgaacacagatggaagtttccagtgcatttgcaatgccggctttgaattaactacagatggaaaaaactgtgttgatcatgatgaatgtacaactaccaacatgtgtttgaatggaatgtgcatcaatgaagatggcagcttcaagtgcatctgcaaaccaggatttgtcttggctccaaatgggcgttactgtactgatgttgatgaatgccagaccccaggaatctgcatgaatgggcactgcatcaacagtgaagggtccttccgctgtgactgtcccccaggcctggctgtgggcatggatggacgtgtgtgtgttgatactcacatgcgcagtacctgctatggaggaatcaagaaaggagtgtgtgtgcgtcctttccccggtgcagtgaccaagtccgaatgctgctgtgccaatccagactatggttttggagaaccctgccagccatgccctgcaaaaaattcagctgaattccacggcctttgtagtagtggagtaggtatcactgtggatggaagagatatcaatgaatgtgctttggatcctgatatatgtgccaatgggatttgtgaaaacttacgtggtagttaccgttgtaattgcaacagtggctatgaaccagatgcctctggaagaaactgtattgacattgatgaatgtttagtaaacagactgctttgtgataacggattgtgccgaaacacgccaggaagttacagctgtacgtgcccaccagggtatgtgttcaggactgagacagagacctgtgaagatataaatgaatgtgaaagcaacccatgtgtcaatggggcctgcagaaacaaccttggatctttcaattgtgaatgttcgcccggcagcaaactcagctccacaggattgatctgtattgacagcctgaaggggacctgttggctcaacatccaggacagccgctgtgaggtgaatattaatggagccactctgaaatctgaatgctgtgccaccctcggagccgcctgggggagcccctgtgagcggtgtgaactagatacagcttgcccaagagggcttgccaggattaaaggtgttacgtgtgaagatgttaatgagtgtgaggtgttccctggcgtttgtccaaatggacgctgtgtcaacagtaagggatcttttcattgcgagtgccctgaaggccttacgttggatgggactggccgtgtatgtttggatattcgcatggagcagtgttacttgaagtgggatgaagatgaatgcatccaccccgttcctggaaagttccgcatggatgcctgctgctgtgctgtcggggcggcttggggcaccgagtgtgaggagtgccccaaacctggcaccaaggaatacgagacgctgtgcccccgcggggctggctttgctaaccgaggggatgttcttactgggcggccattttacaaagacatcaatgaatgcaaagcatttcctgggatgtgcacttatgggaagtgcagaaatacaatcggaagcttcaaatgccgttgcaatagtggctttgctctagacatggaggaaagaaactgcacggacatcgacgagtgcaggatttctcctgacctctgtggcagtggaatctgcgtcaatacaccgggcagctttgagtgcgagtgcttcgaaggctatgaaagtggcttcatgatgatgaagaactgcatggacattgacgaatgtgaacgtaaccctctcctttgtaggggtggcacctgtgtgaacactgagggcagctttcagtgtgactgcccactgggacacgagctgtcaccatcccgtgaggactgtgtggatattaatgaatgctccctgagtgacaatctctgcagaaatggaaaatgtgtgaacatgattggaacctatcagtgctcttgcaatcctggatatcaggctacgccagaccgccagggctgtacagatattgatgaatgtatgataatgaacggaggctgtgacacccagtgcacaaattcagagggaagctacgaatgcagctgcagtgagggttatgccctgatgccagatgggagatcgtgtgcagacattgatgaatgtgaaaacaatcctgatatctgtgatggcggccagtgtaccaacattcctggagagtatcgctgcctctgctatgatggcttcatggcttccatggacatgaaaacatgcattgatgtcaatgaatgtgacctaaattcaaatatctgcatgtttggggaatgtgagaacacaaagggatccttcatttgccactgtcagctgggttactcagtgaagaaggggaccacaggatgtacagatgtggatgagtgtgaaattggtgctcataactgcgacatgcatgcctcatgtctgaatatcccaggaagcttcaagtgtagctgcagagaaggctggattggaaacggcatcaagtgtattgatctggacgaatgttctaatggaacccaccagtgtagcatcaatgctcagtgtgtaaataccccgggctcataccgctgtgcctgctccgaaggtttcactggtgatggctttacctgctcagatgttgatgagtgtgcagaaaacataaacctctgtgagaacggacagtgccttaatgtcccgggtgcatatcgctgcgagtgtgagatgggcttcactccagcctcagacagcagatcctgccaagatattgatgaatgctccttccaaaacatttgtgtctttggaacatgtaataacctgcctggaatgtttcattgcatctgcgatgatggttatgaattggacagaacaggagggaactgtacagatattgatgagtgtgcagatcctataaactgtgtcaatggcctatgtgtcaacacgcctggtcgctatgagtgtaactgcccacccgattttcagttgaacccaactggtgtgggttgtgttgacaaccgtgtgggcaactgctacctgaagtttggacctcgaggagatgggagtctgtcttgcaacaccgagatcggggtgggcgtcagtcgctcttcatgctgctgctctctgggaaaggcctggggaaacccctgtgagacatgcccccctgtcaatagcactgaatattacaccctgtgtcccggaggtgaaggcttcagacctaaccccatcacaatcattttagaagacattgacgaatgccaggagttaccaggtctctgccagggtggaaactgcatcaacacttttgggagcttccagtgtgagtgcccacaaggctactacctcagcgaggatacccgcatctgtgaagatattgatgagtgttttgcacatcctggtgtgtgtgggcctgggacctgctataacaccctgggaaattacacctgcatttgcccacctgagtacatgcaggtcaatggaggccacaactgcatggacatgagaaaaagcttttgctaccgaagctataatggaaccacttgtgagaatgagttgcctttcaatgtgacaaaaaggatgtgctgctgcacatataatgtgggcaaagcctggaacaaaccttgtgaaccatgcccaactccaggaacagctgactttaaaaccatatgtggaaatattcctggattcacctttgacattcacacaggaaaagctgttgacattgatgaatgtaaagagattccaggcatttgtgcaaatggtgtgtgcattaaccagattggcagtttccgctgtgaatgccctacaggattcagttacaatgacctgctgttggtttgtgaagatatagatgagtgcagcaatggtgataatctctgccagcggaatgcagactgcatcaatagtcctggtagttaccgctgtgaatgtgccgcgggtttcaaactttcacccaatggggcctgtgtagatcgcaatgaatgtttagaaattcctaacgtttgcagtcatggcttgtgtgttgatctgcaaggaagttaccagtgcatctgccacaatggctttaaggcttctcaggaccagaccatgtgcatggatgttgatgagtgcgagcggcatccatgtggaaatggaacttgtaaaaacaccgttggatcctataactgtctgtgctacccagggtttgaactcactcataataatgattgcctggacatagatgagtgcagttccttttttggtcaggtgtgcagaaatggacgttgttttaatgaaattggttctttcaagtgtctatgtaacgaaggttatgaacttaccccagatggcaaaaactgtatagacactaatgagtgtgtcgcccttcccggctcttgctctcctggtacctgtcagaatttggagggatccttcagatgcatctgtcccccagggtatgaagtaaaaagcgagaactgcattgatataaatgaatgtgatgaagatcccaacatttgtctttttggttcctgtactaatactccagggggcttccagtgcctctgcccccctggctttgtactatctgataatggacggagatgctttgatactcgccagagcttctgcttcacaaattttgaaaatggaaagtgttctgtacccaaagctttcaacaccacaaaagcaaaatgctgctgtagtaagatgccaggagagggctggggggacccctgtgagctgtgccccaaagacgatgaagttgcatttcaggatttgtgtccatatggccatggaactgtccctagtcttcatgatacacgtgaagatgtcaatgagtgtcttgagagcccaggcatttgttcaaatggtcaatgtatcaacaccgacggatcttttcgctgtgaatgtccaatgggctacaaccttgactacactggagtacgctgtgtggatactgatgagtgttcaatcggcaatccgtgtggaaatggtacatgcaccaatgttattgggagttttgaatgcaattgcaatgaaggctttgagccagggcccatgatgaattgtgaagatatcaacgaatgtgcccagaacccactgctgtgtgctttccgctgcatgaacacttttgggtcctatgaatgcacgtgcccgattggctatgccctcagggaagatcaaaagatgtgcaaagatctggatgaatgtgctgaagggttacacgactgtgaatctaggggcatgatgtgtaagaatctaatcggcaccttcatgtgcatctgccctcctggaatggcccgaaggcccgatggagaaggctgtgtagatgaaaatgaatgcaggaccaagccaggaatctgtgaaaatggacgttgtgttaacattattggaagctatagatgtgagtgtaatgaaggattccagtcaagttcttcaggcactgaatgccttgacaatcgacagggtctctgctttgcagaggtactgcagacaatatgtcaaatggcatccagtagtcgcaatctcgtcactaagtcagaatgctgctgtgatggtgggcgaggctggggccaccagtgcgagctttgcccacttcctggaactgcccagtacaaaaagatatgtcctcatggcccaggatatacaactgatggaagagatattgatgaatgtaaggtaatgccaaacctctgcaccaatggtcagtgcatcaataccatgggctcattccgatgcttctgcaaggttggctacaccacagacatcagtggaacctcttgtatagaccttgatgaatgctcccagtccccgaaaccatgcaactacatctgcaagaacactgaggggagttatcagtgttcatgtccgagggggtatgtcctgcaagaggatggaaagacatgcaaagaccttgatgaatgtcaaacaaagcagcataactgccagttcctctgtgtcaacaccctgggggggtttacctgtaaatgtccacctggtttcacacagcatcacactgcttgtatcgacaacaacgaatgtgggtctcaaccttcgctttgtggagcaaagggaatctgtcaaaacactccaggcagtttcagctgtgaatgccaaagagggttctctcttgatgccaccggactgaactgtgaagatgttgatgaatgtgatgggaaccacaggtgccaacacggctgccagaacatcctgggtggctacagatgtggctgcccccaaggctacatccagcactaccagtggaatcagtgtgtcgatgagaatgaatgctccaatcccaatgcctgtggctctgcttcctgctacaacaccctggggagttacaagtgcgcctgcccctcggggttctccttcgaccagttctccagtgcctgccacgacgtgaatgagtgctcgtcctccaagaacccctgcaattacggctgctctaacacggaggggggctacctctgtggctgcccccctgggtattacagagtgggacaaggccactgtgtctcaggaatgggatttaacaaggggcagtacctgtcactggatacagaggtcgatgaggaaaatgctctgtccccagaagcatgctacgagtgcaaaatcaacggctattctaagaaagacagcaggcagaagagaagtattcatgaacctgatcccactgctgttgaacagatcagcctagagagtgtcgacatggacagccccgtcaacatgaagttcaacctctcccacctcggctctaaggagcacatcctggaactaaggcccgccatccagcccctcaacaaccacatccgttatgtcatctctcaagggaacgatgacagcgtcttccgcatccaccaaaggaatgggctcagctacttgcacacggccaagaagaagctcatgcccggcacatacacactggaaatcactagcatccctctctacaagaagaaggagcttaagaaactggaagagagcaatgaggatgactacctcctaggggagcttggggaggctctcagaatgaggctgcagattcagctctattaacccttcacagacttgggcccaggctcaaatcctagcacagccagtctgcagaagcatttgaaaagtcaaggactaattttaaagaggaaaaataataataactcttgtttctttcctccctgtcttagactttgaatgttgaccctcacagggagggataatttagactctggtatggccaaagatttgagcacaaaggcaaccgtggttactgtattttttatataacttcattttaaaatatattaaaagaaacctaaatgttcaagatatcagcatatggcactaaatgcacaaaaataatgtgagctttttttttttttcctgttagcagtctgtaacactttgggtattttgctatagttgctaattaaaaaaatatagatgtttatttatttttaatgcagtaatatatggagaaatgaacaaactatgtaaacaaaaagggaaactcacttgtttttctttagatttataaatttgagctattttttttagaggtgctttttaaaaatccaatagatacaagagatgtttcctttggttttctgccagtcatccagctgatacacacctgatgattttaaagaaagccacacagagctgaatgggcagtgtaatcaataatttaaaaaacatgaatgtcattagatcctttataacgtagatcgaagccaaagcagctcatttgtgacaacatttcatatcaccagacacaccaggcaacagaagttgaagcacaaccactgtagcaaaataccttgactgcttgtgagaccattagcattgcaggccaaaccgtactgtatttccttctcataacctcaaggaaccatatgtgctacccacaacacctcattcttacccagggtgcgctgcgtcctcatggtactgtaggcagctgaagaaccgccgttcccttgaaagggaacacctggcattctgtggtgtttcgtgctgtcttaaataatggtgcatttattatgttcaagttatttcaggattgccatatgtgcaaacaaatcatgcaatgcagccaaggaatatatgttgttgttgttgttttaaacccattttttttttagaattttcattaatactgtagttatacaccatatgcctcattttatcatagcctattgtgtatgaaagatgtttgtacaatgaattgatgtttagtttgctttagtcatttaaaaagatattgtaccaggatgtgctattaagagcacgtatccattattcttctcaacccaagaacctgtttcctggaccagtgaccaaacctcatatgtgaaatggccaaagcacatgcaggctcctggttgttcctctcaaacctgtgctgaccaaagattagtaaccagttatacccagtattttgaggttttattgtttttttaataactaaaaagaaa

SEQ ID NO: 134239 - DNA, 9232 bp, Homo sapiens
  Payload ID: 6218
  Gene Symbol: FBN3
  Gene Name: fibrillin 3
  Uniprot ID: Q75N90
  ENST ID: ENST00000270509
  CDS Start-End: 287-8716
gccctctctcccctcccttccacttcccactcccgtcttgccttggctgtgcaccctcagccccaagacccttctctaacatcacacctcctccaggaagcctcctctgactgttcaccgcttcccggttggggctggatgcctccttgggctcccagaggccccggggctgccccatttggcaaccaccctgccctcctcgttgtgttgggtcccccatggctagggtggggggctcatctagggctgactctgcttcctctccgcagcctccaggggacacgccatgactctggagggtctgtatttggcaaggggccccctggcccggctcctgctggcctggtcggccctgttgtgcatggcaggtggccaaggccgctgggacggggccttggaggctgcaggtcctggacgtgtgcggaggcggggcagcccaggcatcttgcaggggccgaatgtgtgcggctcccggttccatgcctactgctgtccaggctggaggacattccctggcaggagccagtgtgtcgtacccatctgtaggcgcgcctgcggtgaaggcttctgctcccagcccaacctgtgcacctgtgcggatgggacgctggctcccagctgcggggtgagccgagggtcagggtgcagtgtgagctgtatgaatgggggcacctgccggggggcgtcctgtctgtgtcagaagggctacacaggcaccgtgtgtgggcagcccatctgtgaccgcggctgccacaatgggggtcgctgcattgggcccaaccgctgcgcctgtgtgtatggcttcatgggacctcaatgtgagagagattaccggacgggaccctgctttggccaagtaggccccgaggggtgccagcatcagctgacgggcctcgtgtgcaccaaggcactttgctgtgccactgtgggccgtgcctggggccttccatgtgaactttgccctgcacagccacacccctgccgccgcggcttcatccccaatatccacacgggggcctgccaagatgtggatgagtgccaggctgtgccaggcctgtgccagggaggcagctgcgtcaacatggtgggctccttccattgccgctgtccagttggacaccggctcagtgacagcagcgccgcatgtgaagactaccgggccggcgcctgcttctcagtgcttttcgggggccgctgtgctggagacctcgccggccactacactcgcaggcagtgctgctgtgacaggggcaggtgctgggcagctggcccggtccctgagctgtgtcctcctcggggctccaatgaattccagcaactgtgcgcccagcggctgccgctgctacccggccaccctggcctcttccctggcctcctgggcttcggatccaatggcatgggtccccctcttgggccagcgcgactcaacccccatggctctgatgcgcgtgggatccccagcctgggccctggcaactctaatattggcactgctaccctgaaccagaccattgacatctgccgacacttcaccaacctgtgtctgaatggccgctgcctgcccacgccttccagctaccgctgcgagtgtaacgtgggctacacccaggacgtgcgcggcgagtgcattgatgtagacgaatgcaccagcagcccctgccaccacggtgactgcgtcaacatccccggcacctaccactgccggtgctacccgggcttccaggccacgcccaccaggcaggcatgcgtggatgtggacgagtgcattgtcagtggtggcctttgtcacctgggccgctgtgtcaacacagagggcagcttccagtgtgtctgcaatgcaggcttcgagctcagccctgacggcaagaactgtgtggaccacaacgagtgtgccaccagcaccatgtgcgtcaacggcgtgtgtctcaacgaggatggcagcttctcctgcctctgcaaacccggcttcctgctggcgcctggcggccactactgcatggacattgacgagtgccagacgcccggcatctgcgtgaacggccactgtaccaacaccgagggctccttccgctgccagtgcctgggggggctggcggtaggcacggatggccgcgtgtgcgtggacacccacgtgcgcagcacctgctatggggccatcgagaagggctcctgtgcccgccccttccctggcactgtcaccaagtccgagtgctgctgtgccaatccggaccacggttttggggagccctgccagctttgtcctgccaaagactccgctgagttccaggcactgtgcagcagtgggcttggcattaccacggatggtcgagacatcaacgagtgtgctctggatcctgaggtttgtgccaatggcgtgtgcgagaaccttcggggcagctaccgctgtgtctgcaacctgggttatgaggcaggtgcctcaggcaaggactgcacagacgtggatgagtgtgccctcaacagcctcctgtgtgacaacgggtggtgccagaatagccctggcagctacagctgctcctgcccccccggcttccacttctggcaggacacggagatctgcaaagatgtcgacgaatgcctgtccagcccgtgtgtgagtggcgtctgtcggaacctggccggctcctacacctgcaaatgtggccctggcagccggctggacccctctggtaccttctgtctagacagcaccaagggcacctgctggctgaagatccaggagagccgctgtgaggtgaaccttcagggagccagcctgcggtctgagtgctgcgccaccctcggggcagcctgggggagcccctgcgaacgctgcgagatcgaccctgcctgtgcccggggctttgcccggatgacgggtgtcacctgcgatgatgtgaacgagtgtgagtccttcccgggagtctgtcccaacgggcgttgcgtcaacactgctgggtctttccgctgtgagtgtccagagggcctgatgctggacgcctcaggccggctgtgcgtggatgtgagattggaaccatgtttcctgcgatgggatgaggatgagtgtggggtcaccctgcctggcaagtaccggatggacgtctgctgctgctccatcggggccgtgtggggagtcgagtgcgaggcctgcccggatcccgagtctctggagttcgccagcctgtgcccgcgggggctgggcttcgccagccgggacttcctgtctggccgaccattctataaagatgtgaatgaatgcaaggtgttccctggcctctgcacgcacggtacctgcagaaacacggtgggcagcttccactgcgcctgtgcggggggcttcgccctggatgcccaggaacggaactgcacagatatcgacgagtgtcgcatctctcctgacctctgcggccagggcacctgtgtcaacacgccgggcagctttgagtgcgagtgttttcccggctacgagagtggcttcatgctgatgaagaactgcatggacgtggacgagtgtgcaagggacccgctgctctgccggggaggcacttgcaccaacacggatgggagctacaagtgccagtgtccccctgggcatgagctgacggccaagggcactgcctgtgaggacatcgatgagtgctccctgagtgatggcctgtgtccccatggccagtgtgtcaatgtcatcggtgccttccagtgctcctgccatgccggcttccagagcacacctgaccgccagggctgcgtggacatcaacgaatgccgggtccagaatggtgggtgtgacgtgcactgtattaacactgagggcagctaccggtgcagctgtgggcagggctactcgctgatgcccgacggaagggcatgtgcagacgtggacgagtgtgaagagaacccccgcgtttgtgaccaaggccactgcaccaacatgccagggggtcaccgctgcctgtgctatgatggcttcatggccacgccagacatgaggacatgtgttgatgtggatgagtgtgacctgaaccctcacatctgcctccatggggactgcgagaacacgaagggttcctttgtctgccactgtcagctgggctacatggtcaggaagggggccacaggctgctctgatgtggatgaatgcgaggttggaggacacaactgtgacagtcacgcctcctgtctcaacatcccggggagtttcagctgtaggtgcctgccaggctgggtgggggatggcttcgaatgtcacgacctggatgaatgcgtctcccaggagcaccggtgcagcccaagaggtgactgtctcaatgtccctggctcctaccgctgcacctgccgccagggctttgccggggatggcttcttctgcgaagacagggatgaatgtgccgagaacgtggacctctgtgacaacgggcagtgcctcaatgcgcccggcgggtaccgctgtgaatgtgagatgggctttgaccccaccgaggaccaccgggcctgccaggatgtggacgagtgtgcgcaagggaacctctgtgcatttgggagctgtgagaacctgcctggaatgttccgctgcatctgcaatggtggctacgaactggaccgagggggtggcaactgcacagacatcaacgagtgtgcagacccagtaaactgcatcaacggcgtgtgcattaacacccccggcagctacctctgcagctgcccccaggattttgagctgaaccccagcggagtgggctgcgtggacactcgggccgggaactgtttcctggagacgcatgaccgaggggacagtggcatttcctgcagtgccgagatcggagttggtgtcacccgagcttcctgctgttgctccctgggccgggcttggggcaatccctgtgagctgtgccctatggccaacaccactgagtacagaaccctgtgcccgggtggtgagggcttccagcctaaccgcatcactgtcattctggaagacatcgacgagtgccaagagctgccagggctgtgtcaggggggtgactgcgtcaacacgtttggcagtttccagtgtgagtgcccacctggctaccacctcagtgagcacacccgcatctgtgaggatattgacgaatgctccacacactccggcatctgtggccctggcacctgctacaacaccctggggaactacacctgtgtctgccctgcagagtacctccaagtcaatggtggcaacaactgcatggatatgaggaagagtgtctgcttccggcactataacggcacatgtcaaaatgagctggccttcaacgtgacccggaaaatgtgttgctgctcctacaacattggccaggcctggaatagaccctgtgaggcctgccccactcccatcagtcctgactaccagatcctgtgtggaaatcaggccccgggattcctcactgacatccacacggggaagccccttgacattgatgagtgtggggagatccccgccatctgtgccaatggcatctgcataaaccagatcgggagtttccgctgcgagtgccccgcaggcttcaactacaacagcatcctgctggcttgtgaagatgtcgatgagtgtggcagcagggagagtccctgccagcagaatgctgactgcatcaacatccccggtagctaccgctgcaagtgcacccgagggtacaaactgtcgccaggcggggcttgtgtgggacggaatgagtgtcgggagatcccgaatgtctgtagccatggtgactgcatggacacagaaggcagctacatgtgtctgtgtcaccgtggattccaggcctctgcagaccagaccctgtgcatggacattgacgagtgtgaccggcagccttgtggaaatgggacctgcaagaacatcattggctcctacaactgcctctgcttccctggctttgtggtgacacacaatggggattgtgtggattttgatgagtgtactaccctggtggggcaggtgtgccgatttggccattgcctcaacacagctggttccttccactgcctctgccaggatggctttgagctcacagctgatgggaagaactgtgtggacaccaatgagtgcctcagccttgcaggaacctgcctacccggcacttgccagaacctcgagggctccttccgctgcatctgtccccctggcttccaggtgcagagtgaccactgcattgatatcgacgagtgctcagaggagcccaacctctgcctctttggcacctgtaccaacagccctgggagcttccagtgcctctgcccacctggctttgtcctctctgacaatgggcaccgttgctttgacacacggcagagtttctgcttcacccgttttgaggctgggaagtgctcggtgcccaaagctttcaacaccaccaagacccgctgctgctgcagtaagaggcctggggagggctggggagacccctgcgaactgtgtccccaggagggcagcgctgcctttcaggagctctgcccctttggccacggggcagtcccaggcccggatgactcccgagaagacgtgaatgagtgtgcagagaaccctggcgtctgcactaacggcgtctgtgtcaacaccgatggatccttccgctgtgagtgtccctttggctacagcctggacttcactggcatcaactgtgtggacacagacgagtgctctgtcggccacccctgtgggcaagggacatgcaccaatgtcatcggaggcttcgaatgtgcctgtgctgacggctttgagcctggcctcatgatgacctgcgaggacatcgacgaatgctccctgaacccgctgctctgtgccttccgctgccacaataccgagggctcctacctgtgcacctgtccagccggctacaccctgcgggaggatggggccatgtgtcgagatgtggacgagtgtgcagatggtcagcaggactgccacgcccggggcatggagtgcaagaacctcatcggtaccttcgcgtgcgtctgtcccccaggcatgcggcccctgcctggctctggggagggctgcacagatgacaatgaatgccacgctcagcctgacctctgtgtcaacggccgctgtgtcaacaccgcgggcagcttccggtgcgactgtgatgagggattccagcccagccccacccttaccgagtgccacgacatccggcaggggccctgctttgccgaggtgctgcagaccatgtgccggtctctgtccagcagcagtgaggctgtcaccagggccgagtgctgctgtgggggtggccggggctgggggccccgctgcgagctctgtcccctgcccggcacctctgcctacaggaagctgtgcccccatggctcaggctacactgctgagggccgagatgtagatgaatgccgtatgcttgctcacctgtgtgctcatggggagtgcatcaacagccttggctccttccgctgccactgtcaggccgggtacacaccggatgctactgctactacctgcctggatatggatgagtgcagccaggtccccaagccatgtaccttcctctgcaaaaacacgaagggcagtttcctgtgcagctgtccccgaggctacctgctggaggaggatggcaggacctgcaaagacctggacgaatgcacctcccggcagcacaactgtcagttcctctgtgtcaacactgtgggcgccttcacctgccgctgtccgcccggcttcacccagcaccaccaggcctgcttcgacaatgatgagtgctcagcccagcctggcccatgtggtgcccacgggcactgccacaacaccccgggcagcttccgctgtgaatgccaccaaggcttcaccctggtcagctcaggccatggctgtgaagatgtgaatgaatgtgatgggccccaccgctgccagcatggctgtcagaaccagctagggggctaccgctgcagctgcccccagggtttcacccagcactcccagtgggcccagtgtgtggatgagaatgagtgtgccctgtcgccccccacctgcgggagcgcctcctgtcgcaacactcttggtggcttccgctgcgtctgcccctctggctttgactttgatcaggccctcgggggctgccaggaggtggatgagtgcgccggacggcgtggcccctgtagctacagctgtgccaacacgcctggtggcttcctgtgcggctgtcctcaaggctacttccgggctgggcaagggcactgtgtctccggcctgggcttcagccccggaccccaggacaccccggacaaagaggagctgctctcgtctgaagcctgctacgaatgcaagatcaatggcctctcccctcgggaccggccacgacgcagtgcccacagggaccaccaggtgaacctggccacccttgactccgaggccctgctgaccttgggcctgaacctctcacacctgggccgggccgagcgcatcctggagctccggccggccctggagggtctagagggccggatccgctacgtcatcgtccgcggaaacgagcaaggtttctttcgcatgcatcacctccgtggcgtcagctccctgcagctggggcggaggcggccggggcctggaacctaccggctggaggtggtgagccacatggcaggaccctggggtgtccagccagaggggcagccagggccatggggccaggccttgaggctgaaggtgcagctgcagttgctttagttgggaggagcctcagtgggccccagctgtccagagaagggggattctggaactgggaaggactgatccccagaagcgatggctgaccagattgaaccccgaaactcaggaagagtgaaatgctacacgacaacctcaggcaagcccggcctctgcctgggcctctgtgccagccccgggggccccccagttactcagtctttcctggagacagcaagaagctgcaatgtgcaatccccctgcccccacagccaaggtcaggaagaggccctgtggtcaccgtgtctggccaatctcaggctttcacttctgtactgcactgtggcttgccctggcggggggcagggggttggcaggacatggcaatgggcaactggggtgggcacagggcttattcctcggagtagaagggtgtacagggggcccagactccacagtgacttgccacatttgccccccatttggagaatgcttttatatcaaaagtggagacgataataaagttattttgggtta

SEQ ID NO: 134240 - DNA, 562 bp, Homo sapiens
  Payload ID: 6218
  Gene Symbol: FBN3
  Gene Name: fibrillin 3
  ENST ID: ENST00000602121
  CDS Start-End: 1-562
ctaccagatcctgtgtggaaatcaggccccgggattcctcactgacatccacacggggaagccccttgatgtcgatgagtgtggcagcagggagagtccctgccagcagaatgctgactgcatcaacatccccggtagctaccgctgcaagtgcacccgagggtacaaactgtcgccaggcggggcttgtgtgggacggaatgagtgtcgggagatcccgaatgtctgtagccatggtgactgcatggacacagaaggcagctacatgtgtctgtgtcaccgtggattccaggcctctgcagaccagaccctgtgcatggacattgacgagtgtgaccggcagccttgtggaaatgggacctgcaagaacatcattggctcctacaactgcctctgcttccctggctttgtggtgacacacaatggggattgtgtggattttgatgagtgtactaccctggtggggcaggtgtgccgatttggccattgcctcaacacagctggttccttccactgcctctgccaggatggctttgagctcacagctgatgggaagaactgt

SEQ ID NO: 134241 - DNA, 9362 bp, Homo sapiens
  Payload ID: 6218
  Gene Symbol: FBN3
  Gene Name: fibrillin 3
  Uniprot ID: Q75N90
  ENST ID: ENST00000600128
  CDS Start-End: 416-8845
aaaagtcagagccccacctccaccttagtctcgatccgaaaacgcggccccggcagcccctactaggcgcccccagcccgccctcacatccctccagtccatcggagtttttcactcggagccccggaccctcccccgagccgcagcctctctccccgccccggatcggagccccccgtccccgccccgggagctaagaggtgcaaacgcgccctcctccaactcctcccgcccccaactcccccccgagtggcagctctgggctgggaacgcggcggggtcggcctctcggctttgcgttcccgccccgggtccccggcgccgcaggagcccgccctgcagcgctgagtcccgcgcgtccgcctgccgtgcccgcctccacgcgcgccgcctcgcagcctccaggggacacgccatgactctggagggtctgtatttggcaaggggccccctggcccggctcctgctggcctggtcggccctgttgtgcatggcaggtggccaaggccgctgggacggggccttggaggctgcaggtcctggacgtgtgcggaggcggggcagcccaggcatcttgcaggggccgaatgtgtgcggctcccggttccatgcctactgctgtccaggctggaggacattccctggcaggagccagtgtgtcgtacccatctgtaggcgcgcctgcggtgaaggcttctgctcccagcccaacctgtgcacctgtgcggatgggacgctggctcccagctgcggggtgagccgagggtcagggtgcagtgtgagctgtatgaatgggggcacctgccggggggcgtcctgtctgtgtcagaagggctacacaggcaccgtgtgtgggcagcccatctgtgaccgcggctgccacaatgggggtcgctgcattgggcccaaccgctgcgcctgtgtgtatggcttcatgggacctcaatgtgagagagattaccggacgggaccctgctttggccaagtaggccccgaggggtgccagcatcagctgacgggcctcgtgtgcaccaaggcactttgctgtgccactgtgggccgtgcctggggccttccatgtgaactttgccctgcacagccacacccctgccgccgcggcttcatccccaatatccacacgggggcctgccaagatgtggatgagtgccaggctgtgccaggcctgtgccagggaggcagctgcgtcaacatggtgggctccttccattgccgctgtccagttggacaccggctcagtgacagcagcgccgcatgtgaagactaccgggccggcgcctgcttctcagtgcttttcgggggccgctgtgctggagacctcgccggccactacactcgcaggcagtgctgctgtgacaggggcaggtgctgggcagctggcccggtccctgagctgtgtcctcctcggggctccaatgaattccagcaactgtgcgcccagcggctgccgctgctacccggccaccctggcctcttccctggcctcctgggcttcggatccaatggcatgggtccccctcttgggccagcgcgactcaacccccatggctctgatgcgcgtgggatccccagcctgggccctggcaactctaatattggcactgctaccctgaaccagaccattgacatctgccgacacttcaccaacctgtgtctgaatggccgctgcctgcccacgccttccagctaccgctgcgagtgtaacgtgggctacacccaggacgtgcgcggcgagtgcattgatgtagacgaatgcaccagcagcccctgccaccacggtgactgcgtcaacatccccggcacctaccactgccggtgctacccgggcttccaggccacgcccaccaggcaggcatgcgtggatgtggacgagtgcattgtcagtggtggcctttgtcacctgggccgctgtgtcaacacagagggcagcttccagtgtgtctgcaatgcaggcttcgagctcagccctgacggcaagaactgtgtggaccacaacgagtgtgccaccagcaccatgtgcgtcaacggcgtgtgtctcaacgaggatggcagcttctcctgcctctgcaaacccggcttcctgctggcgcctggcggccactactgcatggacattgacgagtgccagacgcccggcatctgcgtgaacggccactgtaccaacaccgagggctccttccgctgccagtgcctgggggggctggcggtaggcacggatggccgcgtgtgcgtggacacccacgtgcgcagcacctgctatggggccatcgagaagggctcctgtgcccgccccttccctggcactgtcaccaagtccgagtgctgctgtgccaatccggaccacggttttggggagccctgccagctttgtcctgccaaagactccgctgagttccaggcactgtgcagcagtgggcttggcattaccacggatggtcgagacatcaacgagtgtgctctggatcctgaggtttgtgccaatggcgtgtgcgagaaccttcggggcagctaccgctgtgtctgcaacctgggttatgaggcaggtgcctcaggcaaggactgcacagacgtggatgagtgtgccctcaacagcctcctgtgtgacaacgggtggtgccagaatagccctggcagctacagctgctcctgcccccccggcttccacttctggcaggacacggagatctgcaaagatgtcgacgaatgcctgtccagcccgtgtgtgagtggcgtctgtcggaacctggccggctcctacacctgcaaatgtggccctggcagccggctggacccctctggtaccttctgtctagacagcaccaagggcacctgctggctgaagatccaggagagccgctgtgaggtgaaccttcagggagccagcctgcggtctgagtgctgcgccaccctcggggcagcctgggggagcccctgcgaacgctgcgagatcgaccctgcctgtgcccggggctttgcccggatgacgggtgtcacctgcgatgatgtgaacgagtgtgagtccttcccgggagtctgtcccaacgggcgttgcgtcaacactgctgggtctttccgctgtgagtgtccagagggcctgatgctggacgcctcaggccggctgtgcgtggatgtgagattggaaccatgtttcctgcgatgggatgaggatgagtgtggggtcaccctgcctggcaagtaccggatggacgtctgctgctgctccatcggggccgtgtggggagtcgagtgcgaggcctgcccggatcccgagtctctggagttcgccagcctgtgcccgcgggggctgggcttcgccagccgggacttcctgtctggccgaccattctataaagatgtgaatgaatgcaaggtgttccctggcctctgcacgcacggtacctgcagaaacacggtgggcagcttccactgcgcctgtgcggggggcttcgccctggatgcccaggaacggaactgcacagatatcgacgagtgtcgcatctctcctgacctctgcggccagggcacctgtgtcaacacgccgggcagctttgagtgcgagtgttttcccggctacgagagtggcttcatgctgatgaagaactgcatggacgtggacgagtgtgcaagggacccgctgctctgccggggaggcacttgcaccaacacggatgggagctacaagtgccagtgtccccctgggcatgagctgacggccaagggcactgcctgtgaggacatcgatgagtgctccctgagtgatggcctgtgtccccatggccagtgtgtcaatgtcatcggtgccttccagtgctcctgccatgccggcttccagagcacacctgaccgccagggctgcgtggacatcaacgaatgccgggtccagaatggtgggtgtgacgtgcactgtattaacactgagggcagctaccggtgcagctgtgggcagggctactcgctgatgcccgacggaagggcatgtgcagacgtggacgagtgtgaagagaacccccgcgtttgtgaccaaggccactgcaccaacatgccagggggtcaccgctgcctgtgctatgatggcttcatggccacgccagacatgaggacatgtgttgatgtggatgagtgtgacctgaaccctcacatctgcctccatggggactgcgagaacacgaagggttcctttgtctgccactgtcagctgggctacatggtcaggaagggggccacaggctgctctgatgtggatgaatgcgaggttggaggacacaactgtgacagtcacgcctcctgtctcaacatcccggggagtttcagctgtaggtgcctgccaggctgggtgggggatggcttcgaatgtcacgacctggatgaatgcgtctcccaggagcaccggtgcagcccaagaggtgactgtctcaatgtccctggctcctaccgctgcacctgccgccagggctttgccggggatggcttcttctgcgaagacagggatgaatgtgccgagaacgtggacctctgtgacaacgggcagtgcctcaatgcgcccggcgggtaccgctgtgaatgtgagatgggctttgaccccaccgaggaccaccgggcctgccaggatgtggacgagtgtgcgcaagggaacctctgtgcatttgggagctgtgagaacctgcctggaatgttccgctgcatctgcaatggtggctacgaactggaccgagggggtggcaactgcacagacatcaacgagtgtgcagacccagtaaactgcatcaacggcgtgtgcattaacacccccggcagctacctctgcagctgcccccaggattttgagctgaaccccagcggagtgggctgcgtggacactcgggccgggaactgtttcctggagacgcatgaccgaggggacagtggcatttcctgcagtgccgagatcggagttggtgtcacccgagcttcctgctgttgctccctgggccgggcttggggcaatccctgtgagctgtgccctatggccaacaccactgagtacagaaccctgtgcccgggtggtgagggcttccagcctaaccgcatcactgtcattctggaagacatcgacgagtgccaagagctgccagggctgtgtcaggggggtgactgcgtcaacacgtttggcagtttccagtgtgagtgcccacctggctaccacctcagtgagcacacccgcatctgtgaggatattgacgaatgctccacacactccggcatctgtggccctggcacctgctacaacaccctggggaactacacctgtgtctgccctgcagagtacctccaagtcaatggtggcaacaactgcatggatatgaggaagagtgtctgcttccggcactataacggcacatgtcaaaatgagctggccttcaacgtgacccggaaaatgtgttgctgctcctacaacattggccaggcctggaatagaccctgtgaggcctgccccactcccatcagtcctgactaccagatcctgtgtggaaatcaggccccgggattcctcactgacatccacacggggaagccccttgacattgatgagtgtggggagatccccgccatctgtgccaatggcatctgcataaaccagatcgggagtttccgctgcgagtgccccgcaggcttcaactacaacagcatcctgctggcttgtgaagatgtcgatgagtgtggcagcagggagagtccctgccagcagaatgctgactgcatcaacatccccggtagctaccgctgcaagtgcacccgagggtacaaactgtcgccaggcggggcttgtgtgggacggaatgagtgtcgggagatcccgaatgtctgtagccatggtgactgcatggacacagaaggcagctacatgtgtctgtgtcaccgtggattccaggcctctgcagaccagaccctgtgcatggacattgacgagtgtgaccggcagccttgtggaaatgggacctgcaagaacatcattggctcctacaactgcctctgcttccctggctttgtggtgacacacaatggggattgtgtggattttgatgagtgtactaccctggtggggcaggtgtgccgatttggccattgcctcaacacagctggttccttccactgcctctgccaggatggctttgagctcacagctgatgggaagaactgtgtggacaccaatgagtgcctcagccttgcaggaacctgcctacccggcacttgccagaacctcgagggctccttccgctgcatctgtccccctggcttccaggtgcagagtgaccactgcattgatatcgacgagtgctcagaggagcccaacctctgcctctttggcacctgtaccaacagccctgggagcttccagtgcctctgcccacctggctttgtcctctctgacaatgggcaccgttgctttgacacacggcagagtttctgcttcacccgttttgaggctgggaagtgctcggtgcccaaagctttcaacaccaccaagacccgctgctgctgcagtaagaggcctggggagggctggggagacccctgcgaactgtgtccccaggagggcagcgctgcctttcaggagctctgcccctttggccacggggcagtcccaggcccggatgactcccgagaagacgtgaatgagtgtgcagagaaccctggcgtctgcactaacggcgtctgtgtcaacaccgatggatccttccgctgtgagtgtccctttggctacagcctggacttcactggcatcaactgtgtggacacagacgagtgctctgtcggccacccctgtgggcaagggacatgcaccaatgtcatcggaggcttcgaatgtgcctgtgctgacggctttgagcctggcctcatgatgacctgcgaggacatcgacgaatgctccctgaacccgctgctctgtgccttccgctgccacaataccgagggctcctacctgtgcacctgtccagccggctacaccctgcgggaggatggggccatgtgtcgagatgtggacgagtgtgcagatggtcagcaggactgccacgcccggggcatggagtgcaagaacctcatcggtaccttcgcgtgcgtctgtcccccaggcatgcggcccctgcctggctctggggagggctgcacagatgacaatgaatgccacgctcagcctgacctctgtgtcaacggccgctgtgtcaacaccgcgggcagcttccggtgcgactgtgatgagggattccagcccagccccacccttaccgagtgccacgacatccggcaggggccctgctttgccgaggtgctgcagaccatgtgccggtctctgtccagcagcagtgaggctgtcaccagggccgagtgctgctgtgggggtggccggggctgggggccccgctgcgagctctgtcccctgcccggcacctctgcctacaggaagctgtgcccccatggctcaggctacactgctgagggccgagatgtagatgaatgccgtatgcttgctcacctgtgtgctcatggggagtgcatcaacagccttggctccttccgctgccactgtcaggccgggtacacaccggatgctactgctactacctgcctggatatggatgagtgcagccaggtccccaagccatgtaccttcctctgcaaaaacacgaagggcagtttcctgtgcagctgtccccgaggctacctgctggaggaggatggcaggacctgcaaagacctggacgaatgcacctcccggcagcacaactgtcagttcctctgtgtcaacactgtgggcgccttcacctgccgctgtccgcccggcttcacccagcaccaccaggcctgcttcgacaatgatgagtgctcagcccagcctggcccatgtggtgcccacgggcactgccacaacaccccgggcagcttccgctgtgaatgccaccaaggcttcaccctggtcagctcaggccatggctgtgaagatgtgaatgaatgtgatgggccccaccgctgccagcatggctgtcagaaccagctagggggctaccgctgcagctgcccccagggtttcacccagcactcccagtgggcccagtgtgtggatgagaatgagtgtgccctgtcgccccccacctgcgggagcgcctcctgtcgcaacactcttggtggcttccgctgcgtctgcccctctggctttgactttgatcaggccctcgggggctgccaggaggtggatgagtgcgccggacggcgtggcccctgtagctacagctgtgccaacacgcctggtggcttcctgtgcggctgtcctcaaggctacttccgggctgggcaagggcactgtgtctccggcctgggcttcagccccggaccccaggacaccccggacaaagaggagctgctctcgtctgaagcctgctacgaatgcaagatcaatggcctctcccctcgggaccggccacgacgcagtgcccacagggaccaccaggtgaacctggccacccttgactccgaggccctgctgaccttgggcctgaacctctcacacctgggccgggccgagcgcatcctggagctccggccggccctggagggtctagagggccggatccgctacgtcatcgtccgcggaaacgagcaaggtttctttcgcatgcatcacctccgtggcgtcagctccctgcagctggggcggaggcggccggggcctggaacctaccggctggaggtggtgagccacatggcaggaccctggggtgtccagccagaggggcagccagggccatggggccaggccttgaggctgaaggtgcagctgcagttgctttagttgggaggagcctcagtgggccccagctgtccagagaagggggattctggaactgggaaggactgatccccagaagcgatggctgaccagattgaaccccgaaactcaggaagagtgaaatgctacacgacaacctcaggcaagcccggcctctgcctgggcctctgtgccagccccgggggccccccagttactcagtctttcctggagacagcaagaagctgcaatgtgcaatccccctgcccccacagccaaggtcaggaagaggccctgtggtcaccgtgtctggccaatctcaggctttcacttctgtactgcactgtggcttgccctggcggggggcagggggttggcaggacatggcaatgggcaactggggtgggcacagggcttattcctcggagtagaagggtgtacagggggcccagactccacagtgacttgccacatttgccccccatttggagaatgcttttatatcaaaagtggagacgataataaagttattttgggttaa

SEQ ID NO: 134242 - DNA, 9086 bp, Homo sapiens
  Payload ID: 6218
  Gene Symbol: FBN3
  Gene Name: fibrillin 3
  Uniprot ID: Q75N90
  ENST ID: ENST00000601739
  CDS Start-End: 141-8570
ggagcctcagagtgcggactgacccggacaactgagaagaaaaagagggcgcccctctccagccagccaaccctccaacgttgacaggggtctctcccttctccggggcctttggacaaccagcctccaggggacacgccatgactctggagggtctgtatttggcaaggggccccctggcccggctcctgctggcctggtcggccctgttgtgcatggcaggtggccaaggccgctgggacggggccttggaggctgcaggtcctggacgtgtgcggaggcggggcagcccaggcatcttgcaggggccgaatgtgtgcggctcccggttccatgcctactgctgtccaggctggaggacattccctggcaggagccagtgtgtcgtacccatctgtaggcgcgcctgcggtgaaggcttctgctcccagcccaacctgtgcacctgtgcggatgggacgctggctcccagctgcggggtgagccgagggtcagggtgcagtgtgagctgtatgaatgggggcacctgccggggggcgtcctgtctgtgtcagaagggctacacaggcaccgtgtgtgggcagcccatctgtgaccgcggctgccacaatgggggtcgctgcattgggcccaaccgctgcgcctgtgtgtatggcttcatgggacctcaatgtgagagagattaccggacgggaccctgctttggccaagtaggccccgaggggtgccagcatcagctgacgggcctcgtgtgcaccaaggcactttgctgtgccactgtgggccgtgcctggggccttccatgtgaactttgccctgcacagccacacccctgccgccgcggcttcatccccaatatccacacgggggcctgccaagatgtggatgagtgccaggctgtgccaggcctgtgccagggaggcagctgcgtcaacatggtgggctccttccattgccgctgtccagttggacaccggctcagtgacagcagcgccgcatgtgaagactaccgggccggcgcctgcttctcagtgcttttcgggggccgctgtgctggagacctcgccggccactacactcgcaggcagtgctgctgtgacaggggcaggtgctgggcagctggcccggtccctgagctgtgtcctcctcggggctccaatgaattccagcaactgtgcgcccagcggctgccgctgctacccggccaccctggcctcttccctggcctcctgggcttcggatccaatggcatgggtccccctcttgggccagcgcgactcaacccccatggctctgatgcgcgtgggatccccagcctgggccctggcaactctaatattggcactgctaccctgaaccagaccattgacatctgccgacacttcaccaacctgtgtctgaatggccgctgcctgcccacgccttccagctaccgctgcgagtgtaacgtgggctacacccaggacgtgcgcggcgagtgcattgatgtagacgaatgcaccagcagcccctgccaccacggtgactgcgtcaacatccccggcacctaccactgccggtgctacccgggcttccaggccacgcccaccaggcaggcatgcgtggatgtggacgagtgcattgtcagtggtggcctttgtcacctgggccgctgtgtcaacacagagggcagcttccagtgtgtctgcaatgcaggcttcgagctcagccctgacggcaagaactgtgtggaccacaacgagtgtgccaccagcaccatgtgcgtcaacggcgtgtgtctcaacgaggatggcagcttctcctgcctctgcaaacccggcttcctgctggcgcctggcggccactactgcatggacattgacgagtgccagacgcccggcatctgcgtgaacggccactgtaccaacaccgagggctccttccgctgccagtgcctgggggggctggcggtaggcacggatggccgcgtgtgcgtggacacccacgtgcgcagcacctgctatggggccatcgagaagggctcctgtgcccgccccttccctggcactgtcaccaagtccgagtgctgctgtgccaatccggaccacggttttggggagccctgccagctttgtcctgccaaagactccgctgagttccaggcactgtgcagcagtgggcttggcattaccacggatggtcgagacatcaacgagtgtgctctggatcctgaggtttgtgccaatggcgtgtgcgagaaccttcggggcagctaccgctgtgtctgcaacctgggttatgaggcaggtgcctcaggcaaggactgcacagacgtggatgagtgtgccctcaacagcctcctgtgtgacaacgggtggtgccagaatagccctggcagctacagctgctcctgcccccccggcttccacttctggcaggacacggagatctgcaaagatgtcgacgaatgcctgtccagcccgtgtgtgagtggcgtctgtcggaacctggccggctcctacacctgcaaatgtggccctggcagccggctggacccctctggtaccttctgtctagacagcaccaagggcacctgctggctgaagatccaggagagccgctgtgaggtgaaccttcagggagccagcctgcggtctgagtgctgcgccaccctcggggcagcctgggggagcccctgcgaacgctgcgagatcgaccctgcctgtgcccggggctttgcccggatgacgggtgtcacctgcgatgatgtgaacgagtgtgagtccttcccgggagtctgtcccaacgggcgttgcgtcaacactgctgggtctttccgctgtgagtgtccagagggcctgatgctggacgcctcaggccggctgtgcgtggatgtgagattggaaccatgtttcctgcgatgggatgaggatgagtgtggggtcaccctgcctggcaagtaccggatggacgtctgctgctgctccatcggggccgtgtggggagtcgagtgcgaggcctgcccggatcccgagtctctggagttcgccagcctgtgcccgcgggggctgggcttcgccagccgggacttcctgtctggccgaccattctataaagatgtgaatgaatgcaaggtgttccctggcctctgcacgcacggtacctgcagaaacacggtgggcagcttccactgcgcctgtgcggggggcttcgccctggatgcccaggaacggaactgcacagatatcgacgagtgtcgcatctctcctgacctctgcggccagggcacctgtgtcaacacgccgggcagctttgagtgcgagtgttttcccggctacgagagtggcttcatgctgatgaagaactgcatggacgtggacgagtgtgcaagggacccgctgctctgccggggaggcacttgcaccaacacggatgggagctacaagtgccagtgtccccctgggcatgagctgacggccaagggcactgcctgtgaggacatcgatgagtgctccctgagtgatggcctgtgtccccatggccagtgtgtcaatgtcatcggtgccttccagtgctcctgccatgccggcttccagagcacacctgaccgccagggctgcgtggacatcaacgaatgccgggtccagaatggtgggtgtgacgtgcactgtattaacactgagggcagctaccggtgcagctgtgggcagggctactcgctgatgcccgacggaagggcatgtgcagacgtggacgagtgtgaagagaacccccgcgtttgtgaccaaggccactgcaccaacatgccagggggtcaccgctgcctgtgctatgatggcttcatggccacgccagacatgaggacatgtgttgatgtggatgagtgtgacctgaaccctcacatctgcctccatggggactgcgagaacacgaagggttcctttgtctgccactgtcagctgggctacatggtcaggaagggggccacaggctgctctgatgtggatgaatgcgaggttggaggacacaactgtgacagtcacgcctcctgtctcaacatcccggggagtttcagctgtaggtgcctgccaggctgggtgggggatggcttcgaatgtcacgacctggatgaatgcgtctcccaggagcaccggtgcagcccaagaggtgactgtctcaatgtccctggctcctaccgctgcacctgccgccagggctttgccggggatggcttcttctgcgaagacagggatgaatgtgccgagaacgtggacctctgtgacaacgggcagtgcctcaatgcgcccggcgggtaccgctgtgaatgtgagatgggctttgaccccaccgaggaccaccgggcctgccaggatgtggacgagtgtgcgcaagggaacctctgtgcatttgggagctgtgagaacctgcctggaatgttccgctgcatctgcaatggtggctacgaactggaccgagggggtggcaactgcacagacatcaacgagtgtgcagacccagtaaactgcatcaacggcgtgtgcattaacacccccggcagctacctctgcagctgcccccaggattttgagctgaaccccagcggagtgggctgcgtggacactcgggccgggaactgtttcctggagacgcatgaccgaggggacagtggcatttcctgcagtgccgagatcggagttggtgtcacccgagcttcctgctgttgctccctgggccgggcttggggcaatccctgtgagctgtgccctatggccaacaccactgagtacagaaccctgtgcccgggtggtgagggcttccagcctaaccgcatcactgtcattctggaagacatcgacgagtgccaagagctgccagggctgtgtcaggggggtgactgcgtcaacacgtttggcagtttccagtgtgagtgcccacctggctaccacctcagtgagcacacccgcatctgtgaggatattgacgaatgctccacacactccggcatctgtggccctggcacctgctacaacaccctggggaactacacctgtgtctgccctgcagagtacctccaagtcaatggtggcaacaactgcatggatatgaggaagagtgtctgcttccggcactataacggcacatgtcaaaatgagctggccttcaacgtgacccggaaaatgtgttgctgctcctacaacattggccaggcctggaatagaccctgtgaggcctgccccactcccatcagtcctgactaccagatcctgtgtggaaatcaggccccgggattcctcactgacatccacacggggaagccccttgacattgatgagtgtggggagatccccgccatctgtgccaatggcatctgcataaaccagatcgggagtttccgctgcgagtgccccgcaggcttcaactacaacagcatcctgctggcttgtgaagatgtcgatgagtgtggcagcagggagagtccctgccagcagaatgctgactgcatcaacatccccggtagctaccgctgcaagtgcacccgagggtacaaactgtcgccaggcggggcttgtgtgggacggaatgagtgtcgggagatcccgaatgtctgtagccatggtgactgcatggacacagaaggcagctacatgtgtctgtgtcaccgtggattccaggcctctgcagaccagaccctgtgcatggacattgacgagtgtgaccggcagccttgtggaaatgggacctgcaagaacatcattggctcctacaactgcctctgcttccctggctttgtggtgacacacaatggggattgtgtggattttgatgagtgtactaccctggtggggcaggtgtgccgatttggccattgcctcaacacagctggttccttccactgcctctgccaggatggctttgagctcacagctgatgggaagaactgtgtggacaccaatgagtgcctcagccttgcaggaacctgcctacccggcacttgccagaacctcgagggctccttccgctgcatctgtccccctggcttccaggtgcagagtgaccactgcattgatatcgacgagtgctcagaggagcccaacctctgcctctttggcacctgtaccaacagccctgggagcttccagtgcctctgcccacctggctttgtcctctctgacaatgggcaccgttgctttgacacacggcagagtttctgcttcacccgttttgaggctgggaagtgctcggtgcccaaagctttcaacaccaccaagacccgctgctgctgcagtaagaggcctggggagggctggggagacccctgcgaactgtgtccccaggagggcagcgctgcctttcaggagctctgcccctttggccacggggcagtcccaggcccggatgactcccgagaagacgtgaatgagtgtgcagagaaccctggcgtctgcactaacggcgtctgtgtcaacaccgatggatccttccgctgtgagtgtccctttggctacagcctggacttcactggcatcaactgtgtggacacagacgagtgctctgtcggccacccctgtgggcaagggacatgcaccaatgtcatcggaggcttcgaatgtgcctgtgctgacggctttgagcctggcctcatgatgacctgcgaggacatcgacgaatgctccctgaacccgctgctctgtgccttccgctgccacaataccgagggctcctacctgtgcacctgtccagccggctacaccctgcgggaggatggggccatgtgtcgagatgtggacgagtgtgcagatggtcagcaggactgccacgcccggggcatggagtgcaagaacctcatcggtaccttcgcgtgcgtctgtcccccaggcatgcggcccctgcctggctctggggagggctgcacagatgacaatgaatgccacgctcagcctgacctctgtgtcaacggccgctgtgtcaacaccgcgggcagcttccggtgcgactgtgatgagggattccagcccagccccacccttaccgagtgccacgacatccggcaggggccctgctttgccgaggtgctgcagaccatgtgccggtctctgtccagcagcagtgaggctgtcaccagggccgagtgctgctgtgggggtggccggggctgggggccccgctgcgagctctgtcccctgcccggcacctctgcctacaggaagctgtgcccccatggctcaggctacactgctgagggccgagatgtagatgaatgccgtatgcttgctcacctgtgtgctcatggggagtgcatcaacagccttggctccttccgctgccactgtcaggccgggtacacaccggatgctactgctactacctgcctggatatggatgagtgcagccaggtccccaagccatgtaccttcctctgcaaaaacacgaagggcagtttcctgtgcagctgtccccgaggctacctgctggaggaggatggcaggacctgcaaagacctggacgaatgcacctcccggcagcacaactgtcagttcctctgtgtcaacactgtgggcgccttcacctgccgctgtccgcccggcttcacccagcaccaccaggcctgcttcgacaatgatgagtgctcagcccagcctggcccatgtggtgcccacgggcactgccacaacaccccgggcagcttccgctgtgaatgccaccaaggcttcaccctggtcagctcaggccatggctgtgaagatgtgaatgaatgtgatgggccccaccgctgccagcatggctgtcagaaccagctagggggctaccgctgcagctgcccccagggtttcacccagcactcccagtgggcccagtgtgtggatgagaatgagtgtgccctgtcgccccccacctgcgggagcgcctcctgtcgcaacactcttggtggcttccgctgcgtctgcccctctggctttgactttgatcaggccctcgggggctgccaggaggtggatgagtgcgccggacggcgtggcccctgtagctacagctgtgccaacacgcctggtggcttcctgtgcggctgtcctcaaggctacttccgggctgggcaagggcactgtgtctccggcctgggcttcagccccggaccccaggacaccccggacaaagaggagctgctctcgtctgaagcctgctacgaatgcaagatcaatggcctctcccctcgggaccggccacgacgcagtgcccacagggaccaccaggtgaacctggccacccttgactccgaggccctgctgaccttgggcctgaacctctcacacctgggccgggccgagcgcatcctggagctccggccggccctggagggtctagagggccggatccgctacgtcatcgtccgcggaaacgagcaaggtttctttcgcatgcatcacctccgtggcgtcagctccctgcagctggggcggaggcggccggggcctggaacctaccggctggaggtggtgagccacatggcaggaccctggggtgtccagccagaggggcagccagggccatggggccaggccttgaggctgaaggtgcagctgcagttgctttagttgggaggagcctcagtgggccccagctgtccagagaagggggattctggaactgggaaggactgatccccagaagcgatggctgaccagattgaaccccgaaactcaggaagagtgaaatgctacacgacaacctcaggcaagcccggcctctgcctgggcctctgtgccagccccgggggccccccagttactcagtctttcctggagacagcaagaagctgcaatgtgcaatccccctgcccccacagccaaggtcaggaagaggccctgtggtcaccgtgtctggccaatctcaggctttcacttctgtactgcactgtggcttgccctggcggggggcagggggttggcaggacatggcaatgggcaactggggtgggcacagggcttattcctcggagtagaagggtgtacagggggcccagactccacagtgacttgccacatttgccccccatttggagaatgcttttatatcaaaagtggagacgataataaagttattttgggtta

SEQ ID NO: 134243 - DNA, 512 bp, Homo sapiens
  Payload ID: 6218
  Gene Symbol: FBN3
  Gene Name: fibrillin 3
  ENST ID: ENST00000601281
  CDS Start-End: 1-512
gcttcacccgttttgaggctgggaagtgctcggtgcccaaagctttcaacaccaccaagacccgctgctgctgcagtaagaggcctggggagggctggggagacccctgcgaactgtgtccccaggagggcagcgacgtgaatgagtgtgcagagaaccctggcgtctgcactaacggcgtctgtgtcaacaccgatggatccttccgctgtgagtgtccctttggctacagcctggacttcactggcatcaactgtgtggacacagacgagtgctctgtcggccacccctgtgggcaagggacatgcaccaatgtcatcggaggcttcgaatgtgcctgtgctgacggctttgagcctggcctcatgatgacctgcgaggacatcgacgaatgctccctgaacccgctgctctgtgccttccgctgccacaataccgagggctcctacctgtgcacctgtccagccggctacaccctgcgggaggatggggccatgtgtcgagatgtggac

SEQ ID NO: 134244 - DNA, 3678 bp, Homo sapiens
  Payload ID: 6219
  Gene Symbol: FGA
  Gene Name: fibrinogen alpha chain
  Uniprot ID: P02671
  ENST ID: ENST00000302053
  CDS Start-End: 80-2680
aggatgggaactaggagtggcagcaatcctttctttcagctggagtgctcctcaggagccagccccacccttagaaaagatgttttccatgaggatcgtctgcctggtcctaagtgtggtgggcacagcatggactgcagatagtggtgaaggtgactttctagctgaaggaggaggcgtgcgtggcccaagggttgtggaaagacatcaatctgcctgcaaagattcagactggcccttctgctctgatgaagactggaactacaaatgcccttctggctgcaggatgaaagggttgattgatgaagtcaatcaagattttacaaacagaataaataagctcaaaaattcactatttgaatatcagaagaacaataaggattctcattcgttgaccactaatataatggaaattttgagaggcgatttttcctcagccaataaccgtgataatacctacaaccgagtgtcagaggatctgagaagcagaattgaagtcctgaagcgcaaagtcatagaaaaagtacagcatatccagcttctgcagaaaaatgttagagctcagttggttgatatgaaacgactggaggtggacattgatattaagatccgatcttgtcgagggtcatgcagtagggctttagctcgtgaagtagatctgaaggactatgaagatcagcagaagcaacttgaacaggtcattgccaaagacttacttccctctagagataggcaacacttaccactgataaaaatgaaaccagttccagacttggttcccggaaattttaagagccagcttcagaaggtacccccagagtggaaggcattaacagacatgccgcagatgagaatggagttagagagacctggtggaaatgagattactcgaggaggctccacctcttatggaaccggatcagagacggaaagccccaggaaccctagcagtgctggaagctggaactctgggagctctggacctggaagtactggaaaccgaaaccctgggagctctgggactggagggactgcaacctggaaacctgggagctctggacctggaagtactggaagctggaactctgggagctctggaactggaagtactggaaaccaaaaccctgggagccctagacctggtagtaccggaacctggaatcctggcagctctgaacgcggaagtgctgggcactggacctctgagagctctgtatctggtagtactggacaatggcactctgaatctggaagttttaggccagatagcccaggctctgggaacgcgaggcctaacaacccagactggggcacatttgaagaggtgtcaggaaatgtaagtccagggacaaggagagagtaccacacagaaaaactggtcacttctaaaggagataaagagctcaggactggtaaagagaaggtcacctctggtagcacaaccaccacgcgtcgttcatgctctaaaaccgttactaagactgttattggtcctgatggtcacaaagaagttaccaaagaagtggtgacctccgaagatggttctgactgtcccgaggcaatggatttaggcacattgtctggcataggtactctggatgggttccgccataggcaccctgatgaagctgccttcttcgacactgcctcaactggaaaaacattcccaggtttcttctcacctatgttaggagagtttgtcagtgagactgagtctaggggctcagaatctggcatcttcacaaatacaaaggaatccagttctcatcaccctgggatagctgaattcccttcccgtggtaaatcttcaagttacagcaaacaatttactagtagcacgagttacaacagaggagactccacatttgaaagcaagagctataaaatggcagatgaggccggaagtgaagccgatcatgaaggaacacatagcaccaagagaggccatgctaaatctcgccctgtcagagactgtgatgatgtcctccaaacacatccttcaggtacccaaagtggcattttcaatatcaagctaccgggatccagtaagattttttctgtttattgcgatcaagagaccagtttgggaggatggcttttgatccagcaaagaatggatggatcactgaattttaaccggacctggcaagactacaagagaggtttcggcagcctgaatgacgagggggaaggagaattctggctaggcaatgactacctccacttactaacccaaaggggctctgttcttagggttgaattagaggactgggctgggaatgaagcttatgcagaatatcacttccgggtaggctctgaggctgaaggctatgccctccaagtctcctcctatgaaggcactgcgggtgatgctctgattgagggttccgtagaggaaggggcagagtacacctctcacaacaacatgcagttcagcacctttgacagggatgcagaccagtgggaagagaactgtgcagaagtctatgggggaggctggtggtataataactgccaagcagccaatctcaatggaatctactaccctgggggctcctatgacccaaggaataacagtccttatgagattgagaatggagtggtctgggtttcctttagaggggcagattattccctcagggctgttcgcatgaaaattaggccccttgtgacccaataggctgaagaagtgggaatgggagcactctgtcttctttgctagagaagtggagagaaaatacaaaaggtaaagcagttgagattctctacaacctaaaaaattcctaggtgctattttcttatcctttgtactgtagctaaatgtacctgagacatattagtctttgaaaaataaagttatgtaaggttttttttatctttaaatagctctgtgggttttaacatttttataaagatataccaagggccattcagtacatcaggaaagtggcagacagaagcttctctctgcaaccttgaagactattggtttgagaacttctcttcccataccacccaaaatcataatgccattggaaagcaaaaagttgttttatccatttgatttgaattgttttaagccaatattttaaggtaaaactcactgaatctaaccatagctgacctttgtagtagaatttacaacttataattacaatgcacaatttataattacaatatgtatttatgtcttttgctatggagcaaatccaggaaggcaagagaaacattctttcctaaatataaatgaaaatctatcctttaaactcttccactagacgttgtaatgcacacttatttttttcccaaggagtaaccaatttctttctaaaacacatttaaaattttaaaactatttatgaatattaaaaaaagacataattcacacattaataaacaatctcccaagtattgatttaacttcatttttctaataatcataaactatattctgtgacatgctaattattattaaatgtaagtcgttagttcgaaagcctctcactaagtatgatctatgctatattcaaaattcaacccatttactttggtcaatatttgatctaagttgcatctttaatcctggtggtcttgccttctgatttttaatttgtatccttttctattaagatatatttgtcattttctcttgaatatgtattaaaatatcccaagcaa

SEQ ID NO: 134245 - DNA, 2248 bp, Homo sapiens
  Payload ID: 6219
  Gene Symbol: FGA
  Gene Name: fibrinogen alpha chain
  Uniprot ID: P02671
  ENST ID: ENST00000403106
  CDS Start-End: 80-2014
aggatgggaactaggagtggcagcaatcctttctttcagctggagtgctcctcaggagccagccccacccttagaaaagatgttttccatgaggatcgtctgcctggtcctaagtgtggtgggcacagcatggactgcagatagtggtgaaggtgactttctagctgaaggaggaggcgtgcgtggcccaagggttgtggaaagacatcaatctgcctgcaaagattcagactggcccttctgctctgatgaagactggaactacaaatgcccttctggctgcaggatgaaagggttgattgatgaagtcaatcaagattttacaaacagaataaataagctcaaaaattcactatttgaatatcagaagaacaataaggattctcattcgttgaccactaatataatggaaattttgagaggcgatttttcctcagccaataaccgtgataatacctacaaccgagtgtcagaggatctgagaagcagaattgaagtcctgaagcgcaaagtcatagaaaaagtacagcatatccagcttctgcagaaaaatgttagagctcagttggttgatatgaaacgactggaggtggacattgatattaagatccgatcttgtcgagggtcatgcagtagggctttagctcgtgaagtagatctgaaggactatgaagatcagcagaagcaacttgaacaggtcattgccaaagacttacttccctctagagataggcaacacttaccactgataaaaatgaaaccagttccagacttggttcccggaaattttaagagccagcttcagaaggtacccccagagtggaaggcattaacagacatgccgcagatgagaatggagttagagagacctggtggaaatgagattactcgaggaggctccacctcttatggaaccggatcagagacggaaagccccaggaaccctagcagtgctggaagctggaactctgggagctctggacctggaagtactggaaaccgaaaccctgggagctctgggactggagggactgcaacctggaaacctgggagctctggacctggaagtactggaagctggaactctgggagctctggaactggaagtactggaaaccaaaaccctgggagccctagacctggtagtaccggaacctggaatcctggcagctctgaacgcggaagtgctgggcactggacctctgagagctctgtatctggtagtactggacaatggcactctgaatctggaagttttaggccagatagcccaggctctgggaacgcgaggcctaacaacccagactggggcacatttgaagaggtgtcaggaaatgtaagtccagggacaaggagagagtaccacacagaaaaactggtcacttctaaaggagataaagagctcaggactggtaaagagaaggtcacctctggtagcacaaccaccacgcgtcgttcatgctctaaaaccgttactaagactgttattggtcctgatggtcacaaagaagttaccaaagaagtggtgacctccgaagatggttctgactgtcccgaggcaatggatttaggcacattgtctggcataggtactctggatgggttccgccataggcaccctgatgaagctgccttcttcgacactgcctcaactggaaaaacattcccaggtttcttctcacctatgttaggagagtttgtcagtgagactgagtctaggggctcagaatctggcatcttcacaaatacaaaggaatccagttctcatcaccctgggatagctgaattcccttcccgtggtaaatcttcaagttacagcaaacaatttactagtagcacgagttacaacagaggagactccacatttgaaagcaagagctataaaatggcagatgaggccggaagtgaagccgatcatgaaggaacacatagcaccaagagaggccatgctaaatctcgccctgtcagaggtatccacacttctcctttggggaagccttccctgtccccctagactaagttaaatatttctgcacagtgttcccatggccccttgcatttccttcttaactctctgttacacgtcattgaaactacacttttttggtctgtttttgtgctagactgtaagttccttgggggcagggcctttgtctgtctcatctctgtattcccaaatgcctaacagtacagagccatgactcaataaatacatgttaaatggatgaatgaattcctctgaaactct

SEQ ID NO: 134246 - DNA, 1130 bp, Homo sapiens
  Payload ID: 6219
  Gene Symbol: FGA
  Gene Name: fibrinogen alpha chain
  ENST ID: ENST00000622532
  CDS Start-End: 58-927
gcaatcctttctttcagctggagtgctcctcaggagccagccccacccttagaaaagatgttttccatgaggatcgtctgcctggtcctaagtgtggtgggcacagcatggactgcagatagtggtgaaggtgactttctagctgaaggaggaggcgtgcgtggcccaagggttgtggaaagacatcaatctgcctgcaaagattcagactggcccttctgctctgatgaagactggaactacaaatgcccttctggctgcaggatgaaagggttgattgatgaagtcaatcaagattttacaaacagaataaataagctcaaaaattcactatttgaatatcagaagaacaataaggattctcattcgttgaccactaatataatggaaattttgagaggcgatttttcctcagccaataaccgtgataatacctacaaccgagtgtcagaggatctgagaagcagaattgaagtcctgaagcgcaaagtcatagaaaaagtacagcatatccagcttctgcagaaaaatgttagagctcagttggttgatatgaaacgactggaggtggacattgatattaagatccgatcttgtcgagggtcatgcagtagggctttagctcgtgaagtagatctgaaggactatgaagatcagcagaagcaacttgaacaggtcattgccaaagacttacttcccttggtaaatcttcaagttacagcaaacaatttactagtagcacgagttacaacagaggagactccacatttgaaagcaagagctataaaatggcagatgaggccggaagtgaagccgatcatgaaggaacacatagcaccaagagaggccatgctaaatctcgccctgtcagaggtatccacacttctcctttggggaagccttccctgtccccctagactaagttaaatatttctgcacagtgttcccatggccccttgcatttccttcttaactctctgttacacgtcattgaaactacacttttttggtctgtttttgtgctagactgtaagttccttgggggcagggcctttgtctgtctcatctctgtattcccaaatgcctaacagtacagagccatgactcaataaatacatgttaaatggatg

SEQ ID NO: 134247 - DNA, 1975 bp, Homo sapiens
  Payload ID: 6220
  Gene Symbol: FGB
  Gene Name: fibrinogen beta chain
  Uniprot ID: P02675
  ENST ID: ENST00000302068
  CDS Start-End: 64-1539
gaagtcattcctagcagaggactcagatatatataggattgaagatctctcagttaagtctacatgaaaaggatggtttcttggagcttccacaaacttaaaaccatgaaacatctattattgctactattgtgtgtttttctagttaagtcccaaggtgtcaacgacaatgaggagggtttcttcagtgcccgtggtcatcgaccccttgacaagaagagagaagaggctcccagcctgaggcctgccccaccgcccatcagtggaggtggctatcgggctcgtccagccaaagcagctgccactcaaaagaaagtagaaagaaaagcccctgatgctggaggctgtcttcacgctgacccagacctgggggtgttgtgtcctacaggatgtcagttgcaagaggctttgctacaacaggaaaggccaatcagaaatagtgttgatgagttaaataacaatgtggaagctgtttcccagacctcctcttcttcctttcagtacatgtatttgctgaaagacctgtggcaaaagaggcagaagcaagtaaaagataatgaaaatgtagtcaatgagtactcctcagaactggaaaagcaccaattatatatagatgagactgtgaatagcaatatcccaactaaccttcgtgtgcttcgttcaatcctggaaaacctgagaagcaaaatacaaaagttagaatctgatgtctcagctcaaatggaatattgtcgcaccccatgcactgtcagttgcaatattcctgtggtgtctggcaaagaatgtgaggaaattatcaggaaaggaggtgaaacatctgaaatgtatctcattcaacctgacagttctgtcaaaccgtatagagtatactgtgacatgaatacagaaaatggaggatggacagtgattcagaaccgtcaagacggtagtgttgactttggcaggaaatgggatccatataaacagggatttggaaatgttgcaaccaacacagatgggaagaattactgtggcctaccaggtgaatattggcttggaaatgataaaattagccagcttaccaggatgggacccacagaacttttgatagaaatggaggactggaaaggagacaaagtaaaggctcactatggaggattcactgtacagaatgaagccaacaaataccagatctcagtgaacaaatacagaggaacagccggtaatgccctcatggatggagcatctcagctgatgggagaaaacaggaccatgaccattcacaacggcatgttcttcagcacgtatgacagagacaatgacggctggttaacatcagatcccagaaaacagtgttctaaagaagacggtggtggatggtggtataatagatgtcatgcagccaatccaaacggcagatactactggggtggacagtacacctgggacatggcaaagcatggcacagatgatggtgtagtatggatgaattggaaggggtcatggtactcaatgaggaagatgagtatgaagatcaggcccttcttcccacagcaatagtccccaatacgtagatttttgctcttctgtatgtgacaacatttttgtacattatgttattggaattttctttcatacattatattcctctaaaactctcaagcagacgtgagtgtgactttttgaaaaaagtataggataaattacattaaaatagcacatgattttcttttgttttcttcatttctcttgctcaccaagaagtaacaaaagtatagttttgacagagttggtgttcataatttcagttctagttgattgcgagaattttcaaataaggaagaggggtcttttatccttgtcgtaggaaaaccatgacggaaaggaaaaactgatgtttaaaagtccacttttaaaactatatttatttatgtaggatctgtcaaagaaaacttccaaaaagatttattaattaaaccagactctgttgcaataa

SEQ ID NO: 134248 - DNA, 565 bp, Homo sapiens
  Payload ID: 6220
  Gene Symbol: FGB
  Gene Name: fibrinogen beta chain
  ENST ID: ENST00000425838
  CDS Start-End: 3-140
acatgaaaaggatggtttcttggagcttccacaaacttaaaaccatgaaacatctattattgctactattgtgtgtttttctagttaagtcccaaggtgtcaacgacaatgaggagatgagaaaactggggcacagataaagcaacttgcccaaggtctcatagctggtttcttcagtgcccgtggtcatcgaccccttgacaagaagagagaagaggctcccagcctgaggcctgccccaccgcccatcagtggaggtggctatcgggctcgtccagccaaagcagctgccactcaaaagaaagtagaaagaaaagcccctgatgctggaggctgtcttcacgctgacccagacctgggggtgttgtgtcctacaggatgtcagttgcaagaggctttgctacaacaggaaaggccaatcagaaatagtgttgatgagttaaataacaatgtggaagctgtttcccagacctcctcttcttcctttcagtacatgtatttgctgaaagacctgtggcaaaagaggcagaagcaagtaaaagataatgaaaatgtagtcaatgag

SEQ ID NO: 134249 - DNA, 1164 bp, Homo sapiens
  Payload ID: 6220
  Gene Symbol: FGB
  Gene Name: fibrinogen beta chain
  ENST ID: ENST00000509493
  CDS Start-End: 275-1093
ggatggtttcttggagcttccacaaacttaaaaccatgaaacatctattattgctactattgtgtgtttttctagttaagtcccaaggtgtcaacgacaatgaggagataatgaaaatgtagtcaatgagtactcctcagaactggaaaagcaccaattatatatagatgagactgtgaatagcaatatcccaactaaccttcgtgtgcttcgttcaatcctggaaaacctgagaagcaaaatacaaaagttagaatctgatgtctcagctcaaatggaatattgtcgcaccccatgcactgtcagttgcaatattcctgtggtgtctggcaaagaatgtgaggaaattatcaggaaaggaggtgaaacatctgaaatgtatctcattcaacctgacagttctgtcaaaccgtatagagtatactgtgacatgaatacagaaaatggaggatggacagtgattcagaaccgtcaagacggtagtgttgactttggcaggaaatgggatccatataaacagggatttggaaatgttgcaaccaacacagatgggaagaattactgtggcctaccaggtgaatattggcttggaaatgataaaattagccagcttaccaggatgggacccacagaacttttgatagaaatggaggactggaaaggagacaaagtaaaggctcactatggaggattcactgtacagaatgaagccaacaaataccagatctcagtgaacaaatacagaggaacagccggtaatgccctcatggatggagcatctcagctgatgggagaaaacaggaccatgaccattcacaacggcatgttcttcagcacgtatgacagagacaatgacggctggttaacatcagatcccagaaaacagtgttctaaagaagacggtggtggatggtggtataatagatgtcatgcagccaatccaaacggcagatactactggggtggacagtacacctgggacatggcaaagcatggcacagatgatggtgtagtatggatgaattggaaggggtcatggtactcaatgaggaagatgagtatgaagatcaggcccttcttcccacagcaatagtccccaatacgtagatttttgctcttctgtatgtgacaacatttttgtacattatgttattggaattttct

SEQ ID NO: 134250 - DNA, 1868 bp, Homo sapiens
  Payload ID: 6221
  Gene Symbol: FIBCD1
  Gene Name: fibrinogen C domain containing 1
  ENST ID: ENST00000372337
  CDS Start-End: 569-1480
tttgaagcttcagacaagaggcaaggcctttcctgtggccactgtcagaagaaagagagaacactgcttgccctggttcccttgggcctgccctctcctgggccagccttctctcctcccttgtggccaggtttgtctcacccactgacatgctgtgtggccctggcggccgagctgcggctacgtgctgtgcaccgtgctgctggccctggctgtgctgctggctgtagctgtcaccggtgccgtgctcttcctgaaccacgcccacgcgccgggcacggcgcccccacctgtcgtcagcactggggctgccagcgccaacagcgccctggtcactgtggaaagggcggacagctcgcacctcagcatcctcattgacccgcgctgccccgacctcaccgacagcttcgcacgcctggagagcgcccaggcctcggtgctgcaggcgctgacagagcaccaggcccagccacggctggtgggcgaccaggagcaggagctgctggacacgctggccgaccagctgccccggctgctggcccgagcctcagagctgcagacggagtgcatggggctgcggaaggggcatggcacgctgggccagggcctcagcgccctgcagagtgagcagggccgcctcatccagcttctctctgagagccagggccacatggctcacctggtgaactccgtcagcgacatcctggatgccctgcagagggaccgggggctgggccggccccgcaacaaggccgaccttcagagagcgcctgcccggggaacccggccccggggctgtgccactggctcccggccccgagactgtctggacgtcctcctaagcggacagcaggacgatggcgtctactctgtctttcccacccactacccggccggcttccaggtgtactgtgacatgcgcacggacggcggcggctggacggtgtttcagcgccgggaggacggctccgtgaacttcttccggggctgggatgcgtaccgagacggctttggcaggctcaccggggagcactggctagggctcaagaggatccacgccctgaccacacaggctgcctacgagctgcacgtggacctggaggactttgagaatggcacggcctatgcccgctacgggagcttcggcgtgggcttgttctccgtggaccctgaggaagacgggtacccgctcaccgtggctgactattccggcactgcaggcgactccctcctgaagcacagcggcatgaggttcaccaccaaggaccgtgacagcgaccattcagagaacaactgtgccgccttctaccgcggtgcctggtggtaccgcaactgccacacgtccaacctcaatgggcagtacctgcgcggtgcgcacgcctcctatgccgacggcgtggagtggtcctcctggaccggctggcagtactcactcaagttctctgagatgaagatccggccggtccgggaggaccgctagactggtgcaccttgtccttggccctgctggtccctgtcgccccatccccgaccccacctcactctttcgtgaatgttctccacccacctgtgcctggcggacccactctccagtagggaggggccgggccatccctgacacgaagctccctgggccggtgaagtcacacatcgccttctcgccgtccccaccccctccatttggcagctcactgatctcttgcctctgctgatgggggctggcaaacttgacgaccccaactcctgcctgcccccactgtgactccggtgctgtttgccgtcccctggccaggatggtggagtctgccccaggcaccctctgccctgcccggccaaatacccggcattatggggacagagagcagggg

SEQ ID NO: 134251 - DNA, 3253 bp, Homo sapiens
  Payload ID: 6221
  Gene Symbol: FIBCD1
  Gene Name: fibrinogen C domain containing 1
  Uniprot ID: Q8N539
  ENST ID: ENST00000372338
  CDS Start-End: 244-1629
gcgcagcgcgagcggcgggcgttgggctggcggctttcgcgctcccgctcctgctcccgcccgcacacagcggcgcgctcatcctcacacgcccgcccgctcccgggccgccccggcgcggggcacagaggcggggacccggcggacagagcgcgccccgcgcccgcgcccgcgcccaccccgtctcctttgcgctccgcagcggcgcgcctcgcccggcgcccccgccagtcctgccggaagatggtcaacgaccggtggaagaccatgggcggcgctgcccaacttgaggaccggccgcgcgacaagccgcagcggccgagctgcggctacgtgctgtgcaccgtgctgctggccctggctgtgctgctggctgtagctgtcaccggtgccgtgctcttcctgaaccacgcccacgcgccgggcacggcgcccccacctgtcgtcagcactggggctgccagcgccaacagcgccctggtcactgtggaaagggcggacagctcgcacctcagcatcctcattgacccgcgctgccccgacctcaccgacagcttcgcacgcctggagagcgcccaggcctcggtgctgcaggcgctgacagagcaccaggcccagccacggctggtgggcgaccaggagcaggagctgctggacacgctggccgaccagctgccccggctgctggcccgagcctcagagctgcagacggagtgcatggggctgcggaaggggcatggcacgctgggccagggcctcagcgccctgcagagtgagcagggccgcctcatccagcttctctctgagagccagggccacatggctcacctggtgaactccgtcagcgacatcctggatgccctgcagagggaccgggggctgggccggccccgcaacaaggccgaccttcagagagcgcctgcccggggaacccggccccggggctgtgccactggctcccggccccgagactgtctggacgtcctcctaagcggacagcaggacgatggcgtctactctgtctttcccacccactacccggccggcttccaggtgtactgtgacatgcgcacggacggcggcggctggacggtgtttcagcgccgggaggacggctccgtgaacttcttccggggctgggatgcgtaccgagacggctttggcaggctcaccggggagcactggctagggctcaagaggatccacgccctgaccacacaggctgcctacgagctgcacgtggacctggaggactttgagaatggcacggcctatgcccgctacgggagcttcggcgtgggcttgttctccgtggaccctgaggaagacgggtacccgctcaccgtggctgactattccggcactgcaggcgactccctcctgaagcacagcggcatgaggttcaccaccaaggaccgtgacagcgaccattcagagaacaactgtgccgccttctaccgcggtgcctggtggtaccgcaactgccacacgtccaacctcaatgggcagtacctgcgcggtgcgcacgcctcctatgccgacggcgtggagtggtcctcctggaccggctggcagtactcactcaagttctctgagatgaagatccggccggtccgggaggaccgctagactggtgcaccttgtccttggccctgctggtccctgtcgccccatccccgaccccacctcactctttcgtgaatgttctccacccacctgtgcctggcggacccactctccagtagggaggggccgggccatccctgacacgaagctccctgggccggtgaagtcacacatcgccttctcgccgtccccaccccctccatttggcagctcactgatctcttgcctctgctgatgggggctggcaaacttgacgaccccaactcctgcctgcccccactgtgactccggtgctgtttgccgtcccctggccaggatggtggagtctgccccaggcaccctctgccctgcccggccaaatacccggcattatggggacagagagcagggggcagacagcacccctggagtcctcctagcagatcgtggggaacgtcaggtctctctgaggtcaggtctgaggccagtatcctccagccctcccaatgccaacccccaccccgtttccctggtgcccagagaacccacctctcccccaagggcctcagcctggctgtgggctgggtggccccatcctaccaggccctgaggtcaggatggggagctgctgcctttggggacccacgctccaaggctgagaccagttccctggaggccacccaccctgtgccccggcaggcctggggtctgcagtcctcttacctgctgtgcccacctgctctctgtctcaaatgaggcccaacccatcccccacccagctcccggccgtcctcctacctggggcagctggggctgccatcccatttctcctgcctctggaaggtgggtggggccctgcaccgtggggctggactgcgctaatgggaagctcttggttttctgggctggggcctaggcagggctgggatgaggcttgtacaacccccaccaccaatttcccagggactccagggtcctgaggcctcccaggagggccttgggggtgatgaccccttccctgaggtggctgtctccatgaggaggccaacccttgccattgaccgtggccacctggacccaggccaggcccggcccggcgagtggtcaagggacagggaccacctcaccgggcaaatggggtcggggggactggggcaccagaccaggcaccacctggacactttcttgttgaatcctcccaacacccagcacgctgtcatccccactccttgtgtgcacacatgcagaggtgagacccgcaggctcccaggaccagcagccacaagggcagggctggagccgggtcctcagctgtctgctcagcagccctggacccgcgtgcgttacgtcaggcccagatgcagggcggcttttccaaggcctcctgatggggggcctccgaaagggctggagtcagccttggggagctgcctagcagcctctcctcgggcaggaggggaggtggcttcctccaaaggacacccgatggcaggtgcctagggggtgtggggttccgttctcccttcccctcccactgaagtttgtgcttaaaaaacaataaatttgacttggcaccactgggggttggtgggagaggccgtgtgacctggctctctgtcccagtgccaccaggtcatccacatgcgca

SEQ ID NO: 134252 - DNA, 1046 bp, Homo sapiens
  Payload ID: 6221
  Gene Symbol: FIBCD1
  Gene Name: fibrinogen C domain containing 1
  ENST ID: ENST00000451466
  CDS Start-End: 180-1046
ggagccgggccgcccgcggctgtttgctgccctccggccggccgcgttatctgggggccagttcggcctcctttccctaggtcttttcggaggcggagtttagtatccaagtccgcgggtgtgagcgcgcgcgtgtgtcggcgcgcctcgcccggcgcccccgccagtcctgccggaagatggtcaacgaccggtggaagaccatgggcggcgctgcccaacttgaggaccggccgcgcgacaagccgcagcggccgagctgcggctacgtgctgtgcaccgtgctgctggccctggctgtgctgctggctgtagctgtcaccggtgccgtgctcttcctgaaccacgcccacgcgccgggcacggcgcccccacctgtcgtcagcactggggctgccagcgccaacagcgccctggtcactgtggaaagggcggacagctcgcacctcagcatcctcattgacccgcgctgccccgacctcaccgacagcttcgcacgcctggagagcgcccaggcctcggtgctgcaggcgctgacagagcaccaggcccagccacggctggtgggcgaccaggagcaggagctgctggacacgctggccgaccagctgccccggctgctggcccgagcctcagagctgcagacggagtgcatggggctgcggaaggggcatggcacgctgggccagggcctcagcgccctgcagagtgagcagggccgcctcatccagcttctctctgagagccagggccacatggctcacctggtgaactccgtcagcgacatcctggatgccctgcagagggaccgggggctgggccggccccgcaacaaggccgaccttcagagagcgcctgcccggggaacccggccccggggctgtgccactggctcccggccccgagactgtctggacgtcctcctaagcggacagcaggacgatggcgtctactctgtctttcccacccactacccggccggcttccaggtgtactgtgacatgcgcacggacggcggcggctggacggtgtttcagcgccgggag

SEQ ID NO: 134253 - DNA, 2440 bp, Homo sapiens
  Payload ID: 6221
  Gene Symbol: FIBCD1
  Gene Name: fibrinogen C domain containing 1
  ENST ID: ENST00000444139
  CDS Start-End: 1-932
tcaccggtgccgtgctcttcctgaaccacgcccacgcgccgggcacggcgcccccacctgtcgtcagcactggggctgccagcgccaacagcgccctggtcactgtggaaagggcggacagctcgcacctcagcatcctcattgacccgcgctgccccgacctcaccgacagcttcgcacgcctggagagcgcccaggcctcggtgctgcaggcgctgacagagcaccaggcccagccacggctggtgggcgaccaggagcaggagctgctggacacgctggccgaccagctgccccggctgctggcccgagcctcagagctgcagacggagtgcatggggctgcggaaggggcatggcacgctgggccagggcctcagcgccctgcagagtgagcagggccgcctcatccagcttctctctgagagccagggccacatggctcacctggtgaactccgtcagcgacatcctggatgccctgcagagggaccgggggctgggccggccccgcaacaaggccgaccttcagagagcgcctgcccggggaacccggccccggggctgtgccactggctcccggccccgagactgtctggacgtcctcctaagcggacagcaggacgatggcgtctactctgtctttcccacccactacccggccggcttccaggtgtactgtgacatgcgcacggacggcggcggctggacggtgtttcagcgccgggaggacggctccgtgaacttcttccggggctgggatgcgtaccgagacggctttggcaggctcaccggggagcactggctaggaccgctagactggtgcaccttgtccttggccctgctggtccctgtcgccccatccccgaccccacctcactctttcgtgaatgttctccacccacctgtgcctggcggacccactctccagtagggaggggccgggccatccctgacacgaagctccctgggccggtgaagtcacacatcgccttctcgccgtccccaccccctccatttggcagctcactgatctcttgcctctgctgatgggggctggcaaacttgacgaccccaactcctgcctgcccccactgtgactccggtgctgtttgccgtcccctggccaggatggtggagtctgccccaggcaccctctgccctgcccggccaaatacccggcattatggggacagagagcagggggcagacagcacccctggagtcctcctagcagatcgtggggaacgtcaggtctctctgaggtcaggtctgaggccagtatcctccagccctcccaatgccaacccccaccccgtttccctggtgcccagagaacccacctctcccccaagggcctcagcctggctgtgggctgggtggccccatcctaccaggccctgaggtcaggatggggagctgctgcctttggggacccacgctccaaggctgagaccagttccctggaggccacccaccctgtgccccggcaggcctggggtctgcagtcctcttacctgctgtgcccacctgctctctgtctcaaatgaggcccaacccatcccccacccagctcccggccgtcctcctacctggggcagctggggctgccatcccatttctcctgcctctggaaggtgggtggggccctgcaccgtggggctggactgcgctaatgggaagctcttggttttctgggctggggcctaggcagggctgggatgaggcttgtacaacccccaccaccaatttcccagggactccagggtcctgaggcctcccaggagggccttgggggtgatgaccccttccctgaggtggctgtctccatgaggaggccaacccttgccattgaccgtggccacctggacccaggccaggcccggcccggcgagtggtcaagggacagggaccacctcaccgggcaaatggggtcggggggactggggcaccagaccaggcaccacctggacactttcttgttgaatcctcccaacacccagcacgctgtcatccccactccttgtgtgcacacatgcagaggtgagacccgcaggctcccaggaccagcagccacaagggcagggctggagccgggtcctcagctgtctgctcagcagccctggacccgcgtgcgttacgtcaggcccagatgcagggcggcttttccaaggcctcctgatggggggcctccgaaagggctggagtcagccttggggagctgcctagcagcctctcctcgggcaggaggggaggtggcttcctccaaaggacacccgatggcaggtgcctagggggtgtggggttccgttctcccttcccctcccactgaagtttgtgcttaaaaaacaataaatttgacttggcaccactgggggttggtgggagaggccgtgtgacctggctctctgtcccagtgccaccaggtcatccacatgcgca

SEQ ID NO: 134254 - DNA, 3119 bp, Homo sapiens
  Payload ID: 6221
  Gene Symbol: FIBCD1
  Gene Name: fibrinogen C domain containing 1
  Uniprot ID: Q8N539
  ENST ID: ENST00000448616
  CDS Start-End: 108-1493
ttccctaggtcttttcggaggcggagtttagtatccaagtccgcgggtgtgagcgcgcgcgtgtgtcggcgcgcctcgcccggcgcccccgccagtcctgccggaagatggtcaacgaccggtggaagaccatgggcggcgctgcccaacttgaggaccggccgcgcgacaagccgcagcggccgagctgcggctacgtgctgtgcaccgtgctgctggccctggctgtgctgctggctgtagctgtcaccggtgccgtgctcttcctgaaccacgcccacgcgccgggcacggcgcccccacctgtcgtcagcactggggctgccagcgccaacagcgccctggtcactgtggaaagggcggacagctcgcacctcagcatcctcattgacccgcgctgccccgacctcaccgacagcttcgcacgcctggagagcgcccaggcctcggtgctgcaggcgctgacagagcaccaggcccagccacggctggtgggcgaccaggagcaggagctgctggacacgctggccgaccagctgccccggctgctggcccgagcctcagagctgcagacggagtgcatggggctgcggaaggggcatggcacgctgggccagggcctcagcgccctgcagagtgagcagggccgcctcatccagcttctctctgagagccagggccacatggctcacctggtgaactccgtcagcgacatcctggatgccctgcagagggaccgggggctgggccggccccgcaacaaggccgaccttcagagagcgcctgcccggggaacccggccccggggctgtgccactggctcccggccccgagactgtctggacgtcctcctaagcggacagcaggacgatggcgtctactctgtctttcccacccactacccggccggcttccaggtgtactgtgacatgcgcacggacggcggcggctggacggtgtttcagcgccgggaggacggctccgtgaacttcttccggggctgggatgcgtaccgagacggctttggcaggctcaccggggagcactggctagggctcaagaggatccacgccctgaccacacaggctgcctacgagctgcacgtggacctggaggactttgagaatggcacggcctatgcccgctacgggagcttcggcgtgggcttgttctccgtggaccctgaggaagacgggtacccgctcaccgtggctgactattccggcactgcaggcgactccctcctgaagcacagcggcatgaggttcaccaccaaggaccgtgacagcgaccattcagagaacaactgtgccgccttctaccgcggtgcctggtggtaccgcaactgccacacgtccaacctcaatgggcagtacctgcgcggtgcgcacgcctcctatgccgacggcgtggagtggtcctcctggaccggctggcagtactcactcaagttctctgagatgaagatccggccggtccgggaggaccgctagactggtgcaccttgtccttggccctgctggtccctgtcgccccatccccgaccccacctcactctttcgtgaatgttctccacccacctgtgcctggcggacccactctccagtagggaggggccgggccatccctgacacgaagctccctgggccggtgaagtcacacatcgccttctcgccgtccccaccccctccatttggcagctcactgatctcttgcctctgctgatgggggctggcaaacttgacgaccccaactcctgcctgcccccactgtgactccggtgctgtttgccgtcccctggccaggatggtggagtctgccccaggcaccctctgccctgcccggccaaatacccggcattatggggacagagagcagggggcagacagcacccctggagtcctcctagcagatcgtggggaacgtcaggtctctctgaggtcaggtctgaggccagtatcctccagccctcccaatgccaacccccaccccgtttccctggtgcccagagaacccacctctcccccaagggcctcagcctggctgtgggctgggtggccccatcctaccaggccctgaggtcaggatggggagctgctgcctttggggacccacgctccaaggctgagaccagttccctggaggccacccaccctgtgccccggcaggcctggggtctgcagtcctcttacctgctgtgcccacctgctctctgtctcaaatgaggcccaacccatcccccacccagctcccggccgtcctcctacctggggcagctggggctgccatcccatttctcctgcctctggaaggtgggtggggccctgcaccgtggggctggactgcgctaatgggaagctcttggttttctgggctggggcctaggcagggctgggatgaggcttgtacaacccccaccaccaatttcccagggactccagggtcctgaggcctcccaggagggccttgggggtgatgaccccttccctgaggtggctgtctccatgaggaggccaacccttgccattgaccgtggccacctggacccaggccaggcccggcccggcgagtggtcaagggacagggaccacctcaccgggcaaatggggtcggggggactggggcaccagaccaggcaccacctggacactttcttgttgaatcctcccaacacccagcacgctgtcatccccactccttgtgtgcacacatgcagaggtgagacccgcaggctcccaggaccagcagccacaagggcagggctggagccgggtcctcagctgtctgctcagcagccctggacccgcgtgcgttacgtcaggcccagatgcagggcggcttttccaaggcctcctgatggggggcctccgaaagggctggagtcagccttggggagctgcctagcagcctctcctcgggcaggaggggaggtggcttcctccaaaggacacccgatggcaggtgcctagggggtgtggggttccgttctcccttcccctcccactgaagtttgtgcttaaaaaacaataaatttgacttggcaccactgggggttggtgggagaggccgtgtgacctggctctctgtcccagtgccaccaggtcatccacatgcgcaga

SEQ ID NO: 134255 - DNA, 1659 bp, Homo sapiens
  Payload ID: 6222
  Gene Symbol: FGG
  Gene Name: fibrinogen gamma chain
  Uniprot ID: P02679
  ENST ID: ENST00000336098
  CDS Start-End: 40-1401
tgacactacaaggctcggagctccgggcactcagacatcatgagttggtccttgcacccccggaatttaattctctacttctatgctcttttatttctctcttcaacatgtgtagcatatgttgctaccagagacaactgctgcatcttagatgaaagattcggtagttattgtccaactacctgtggcattgcagatttcctgtctacttatcaaaccaaagtagacaaggatctacagtctttggaagacatcttacatcaagttgaaaacaaaacatcagaagtcaaacagctgataaaagcaatccaactcacttataatcctgatgaatcatcaaaaccaaatatgatagacgctgctactttgaagtccaggaaaatgttagaagaaattatgaaatatgaagcatcgattttaacacatgactcaagtattcgatatttgcaggaaatatataattcaaataatcaaaagattgttaacctgaaagagaaggtagcccagcttgaagcacagtgccaggaaccttgcaaagacacggtgcaaatccatgatatcactgggaaagattgtcaagacattgccaataagggagctaaacagagcgggctttactttattaaacctctgaaagctaaccagcaattcttagtctactgtgaaatcgatgggtctggaaatggatggactgtgtttcagaagagacttgatggcagtgtagatttcaagaaaaactggattcaatataaagaaggatttggacatctgtctcctactggcacaacagaattttggctgggaaatgagaagattcatttgataagcacacagtctgccatcccatatgcattaagagtggaactggaagactggaatggcagaaccagtactgcagactatgccatgttcaaggtgggacctgaagctgacaagtaccgcctaacatatgcctacttcgctggtggggatgctggagatgcctttgatggctttgattttggcgatgatcctagtgacaagtttttcacatcccataatggcatgcagttcagtacctgggacaatgacaatgataagtttgaaggcaactgtgctgaacaggatggatctggttggtggatgaacaagtgtcacgctggccatctcaatggagtttattaccaaggtggcacttactcaaaagcatctactcctaatggttatgataatggcattatttgggccacttggaaaacccggtggtattccatgaagaaaaccactatgaagataatcccattcaacagactcacaattggagaaggacagcaacaccacctggggggagccaaacaggtcagaccagagcaccctgcggaaacagaatatgactcactttaccctgaggatgatttgtagaaaattaactgctaacttctattgacccacaaagtttcagaaattctctgaaagtttcttccttttttctcttactatatttattgatttcaagtcttctattaaggacatttagccttcaatggaaattaaaactcatttaggactgtatttccaaattactgatatcagagttatttaaaaattgtttatttgaggagataacatttcaactttgttcctaaatatataataataaaatgattgactttatttgca

SEQ ID NO: 134256 - DNA, 641 bp, Homo sapiens
  Payload ID: 6222
  Gene Symbol: FGG
  Gene Name: fibrinogen gamma chain
  ENST ID: ENST00000393846
  CDS Start-End: 285-641
gttgggggccaggatgaggaaaaaggaacgggaaagacctgcccacccttctgtatgttgctaccagagacaactgctgcatcttagatgaaagattcggtagttattgtccaactacctgtggcattgcagatttcctgtctacttatcaaaccaaagtagacaaggatctacagtctttggaagacatcttacatcaagttgaaaacaaaacatcagaagtcaaacagctgataaaagcaatccaactcacttataatcctgatgaatcatcaaaaccaaatatgatagacgctgctactttgaagtccaggaaaatgttagaagaaattatgaaatatgaagcatcgattttaacacatgactcaagtattcgatatttgcaggaaatatataattcaaataatcaaaagattgttaacctgaaagagaaggtagcccagcttgaagcacagtgccaggaaccttgcaaagacacggtgcaaatccatgatatcactgggaaagattgtcaagacattgccaataagggagctaaacagagcgggctttactttattaaacctctgaaagctaaccagcaattcttagtctactgtgaaatcgatgggtctggaaatggatggactgtgtttcagaag

SEQ ID NO: 134257 - DNA, 1539 bp, Homo sapiens
  Payload ID: 6222
  Gene Symbol: FGG
  Gene Name: fibrinogen gamma chain
  ENST ID: ENST00000405164
  CDS Start-End: 35-1372
ctacaaggctcggagctccgggcactcagacatcatgagttggtccttgcacccccggaatttaattctctacttctatgctcttttatttctctcttcaacatgtgtagcatatgttgctaccagagacaactgctgcatcttagatgaaagattcggtagttattgtccaactacctgtggcattgcagatttcctgtctacttatcaaaccaaagtagacaaggatctacagtctttggaagacatcttacatcaagttgaaaacaaaacatcagaagtcaaacagctgataaaagcaatccaactcacttataatcctgatgaatcatcaaaaccaaatatgatagacgctgctactttgaagtccaggaaaatgttagaagaaattatgaaatatgaagcatcgattttaacacatgactcaagtattcgatatttgcaggaaatatataattcaaataatcaaaagattgttaacctgaaagagaaggtagcccagcttgaagcacagtgccaggaaccttgcaaagacacggtgcaaatccatgatatcactgggaaagtaaaagtcgattctccttctctagattgtcaagacattgccaataagggagctaaacagagcgggctttactttattaaacctctgaaagctaaccagcaattcttagtctactgtgaaatcgatgggtctggaaatggatggactgtgtttcagaagagacttgatggcagtgtagatttcaagaaaaactggattcaatataaagaaggatttggacatctgtctcctactggcacaacagaattttggctgggaaatgagaagattcatttgataagcacacagtctgccatcccatatgcattaagagtggaactggaagactggaatggcagaaccagtactgcagactatgccatgttcaaggtgggacctgaagctgacaagtaccgcctaacatatgcctacttcgctggtggggatgctggagatgcctttgatggctttgattttggcgatgatcctagtgacaagtttttcacatcccataatggcatgcagttcagtacctgggacaatgacaatgataagtttgaaggcaactgtgctgaacaggatggatctggttggtggatgaacaagtgtcacgctggccatctcaatggagtttattaccaaggtggcacttactcaaaagcatctactcctaatggttatgataatggcattatttgggccacttggaaaacccggtggtattccatgaagaaaaccactatgaagataatcccattcaacagactcacaattggagaaggacagcaacaccacctggggggagccaaacaggctggagacgtttaaaagaccgtttcaaaagagatttacttttttaaaggactttatctgaacagagagatataatatttttcctattggacaatggacttgcaaagcttcacttcattttaagagcaaaagaccccatgttgaaaactccataacagttttatgctgatgataatttatct

SEQ ID NO: 134258 - DNA, 1636 bp, Homo sapiens
  Payload ID: 6222
  Gene Symbol: FGG
  Gene Name: fibrinogen gamma chain
  ENST ID: ENST00000407946
  CDS Start-End: 27-1412
ctcggagctccgggcactcagacatcatgagttggtccttgcacccccggaatttaattctctacttctatgctcttttatttctctcttcaacatgtgtagcatatgttgctaccagagacaactgctgcatcttagatgaaagattcggtagttattgtccaactacctgtggcattgcagatttcctgtctacttatcaaaccaaagtagacaaggatctacagtctttggaagacatcttacatcaagttgaaaacaaaacatcagaagtcaaacagctgataaaagcaatccaactcacttataatcctgatgaatcatcaaaaccaaatatgatagacgctgctactttgaagtccaggaaaatgttagaagaaattatgaaatatgaagcatcgattttaacacatgactcaagtattcgatatttgcaggaaatatataattcaaataatcaaaagattgttaacctgaaagagaaggtagcccagcttgaagcacagtgccaggaaccttgcaaagacacggtgcaaatccatgatatcactgggaaagtaaaagtcgattctccttctctagattgtcaagacattgccaataagggagctaaacagagcgggctttactttattaaacctctgaaagctaaccagcaattcttagtctactgtgaaatcgatgggtctggaaatggatggactgtgtttcagaagagacttgatggcagtgtagatttcaagaaaaactggattcaatataaagaaggatttggacatctgtctcctactggcacaacagaattttggctgggaaatgagaagattcatttgataagcacacagtctgccatcccatatgcattaagagtggaactggaagactggaatggcagaaccagtactgcagactatgccatgttcaaggtgggacctgaagctgacaagtaccgcctaacatatgcctacttcgctggtggggatgctggagatgcctttgatggctttgattttggcgatgatcctagtgacaagtttttcacatcccataatggcatgcagttcagtacctgggacaatgacaatgataagtttgaaggcaactgtgctgaacaggatggatctggttggtggatgaacaagtgtcacgctggccatctcaatggagtttattaccaaggtggcacttactcaaaagcatctactcctaatggttatgataatggcattatttgggccacttggaaaacccggtggtattccatgaagaaaaccactatgaagataatcccattcaacagactcacaattggagaaggacagcaacaccacctggggggagccaaacaggtcagaccagagcaccctgcggaaacagaatatgactcactttaccctgaggatgatttgtagaaaattaactgctaacttctattgacccacaaagtttcagaaattctctgaaagtttcttccttttttctcttactatatttattgatttcaagtcttctattaaggacatttagccttcaatggaaattaaaactcatttaggactgtatttccaaattactgatatcagagttatttaaaaattgtttatttgaggagataacatttcaactttgttcctaa

SEQ ID NO: 134259 - DNA, 1760 bp, Homo sapiens
  Payload ID: 6222
  Gene Symbol: FGG
  Gene Name: fibrinogen gamma chain
  Uniprot ID: P02679
  ENST ID: ENST00000404648
  CDS Start-End: 241-1554
aaaaaggaggagcttcaacctgtgtgcaaaatctgggaacctgacagtataggttgggggccaggatgaggaaaaaggaacgggaaagacctgcccacccttctggtaaggaggccccgtgatcagctccagccatttgcagtcctggctatcccaggagcttacataaagggacaattggagcctgagaggtgacagtgctgacactacaaggctcggagctccgggcactcagacatcatgagttggtccttgcacccccggaatttaattctctacttctatgctcttttatttctctcttcaacatgtgtagcatatgttgctaccagagacaactgctgcatcttagatgaaagattcggtagttattgtccaactacctgtggcattgcagatttcctgtctacttatcaaaccaaagtagacaaggatctacagtctttggaagacatcttacatcaagttgaaaacaaaacatcagaagtcaaacagctgataaaagcaatccaactcacttataatcctgatgaatcatcaaaaccaaatatgatagacgctgctactttgaagtccaggaaaatgttagaagaaattatgaaatatgaagcatcgattttaacacatgactcaagtattcgatatttgcaggaaatatataattcaaataatcaaaagattgttaacctgaaagagaaggtagcccagcttgaagcacagtgccaggaaccttgcaaagacacggtgcaaatccatgatatcactgggaaagattgtcaagacattgccaataagggagctaaacagagcgggctttactttattaaacctctgaaagctaaccagcaattcttagtctactgtgaaatcgatgggtctggaaatggatggactgtgtttcagaagagacttgatggcagtgtagatttcaagaaaaactggattcaatataaagaaggatttggacatctgtctcctactggcacaacagaattttggctgggaaatgagaagattcatttgataagcacacagtctgccatcccatatgcattaagagtggaactggaagactggaatggcagaaccagtactgcagactatgccatgttcaaggtgggacctgaagctgacaagtaccgcctaacatatgcctacttcgctggtggggatgctggagatgcctttgatggctttgattttggcgatgatcctagtgacaagtttttcacatcccataatggcatgcagttcagtacctgggacaatgacaatgataagtttgaaggcaactgtgctgaacaggatggatctggttggtggatgaacaagtgtcacgctggccatctcaatggagtttattaccaaggtggcacttactcaaaagcatctactcctaatggttatgataatggcattatttgggccacttggaaaacccggtggtattccatgaagaaaaccactatgaagataatcccattcaacagactcacaattggagaaggacagcaacaccacctggggggagccaaacaggctggagacgtttaaaagaccgtttcaaaagagatttacttttttaaaggactttatctgaacagagagatataatatttttcctattggacaatggacttgcaaagcttcacttcattttaagagcaaaagaccccatgttgaaaactccataacagttttatgctgatgataatttatctacatgcatttcaataaaccttttgtttcctaagactaga

SEQ ID NO: 134260 - DNA, 789 bp, Homo sapiens
  Payload ID: 6222
  Gene Symbol: FGG
  Gene Name: fibrinogen gamma chain
  ENST ID: ENST00000443553
  CDS Start-End: 421-789
actggaagaagttgcatcacacagcctccaggactgccctcctcctcacagcaatggataatgcttcactagcctttgcagataattttggatcagagaaaaaaccttgagctgggccaaaaaggaggagcttcaacctgtgtgcaaaatctgggaacctgacagtataggttgggggccaggatgaggaaaaaggaacgggaaagacctgcccacccttctgtatgttgctaccagagacaactgctgcatcttagatgaaagattcatttcctgtctacttatcaaaccaaagtagacaaggatctacagtctttggaagacatcttacatcaagttgaaaacaaaacatcagaagtcaaacagctgataaaagcaatccaactcacttataatcctgatgaatcatcaaaaccaaatatgatagacgctgctactttgaagtccaggaaaatgttagaagaaattatgaaatatgaagcatcgattttaacacatgactcaagtattcgatatttgcaggaaatatataattcaaataatcaaaagattgttaacctgaaagagaaggtagcccagcttgaagcacagtgccaggaaccttgcaaagacacggtgcaaatccatgatatcactgggaaagattgtcaagacattgccaataagggagctaaacagagcgggctttactttattaaacctctgaaagctaaccagcaattcttagtctactgtgaaatcgatgggtctggaaatggatggactgtgtttcagaagagacttgatggc

SEQ ID NO: 134261 - DNA, 1158 bp, Homo sapiens
  Payload ID: 6223
  Gene Symbol: FSBP
  Gene Name: fibrinogen silencer binding protein
  Uniprot ID: O95073
  ENST ID: ENST00000481490
  CDS Start-End: 75-974
ttgtgaaaagagctgagcagagctgaaggctgcatggtggtttcagaaactgcctacttaatttgaaaagaacaatggtaggaaaggctagatcttccaattttaccttatccgaaaagcttgatttgctaaagcttgtgaagccatatgtgaaaattctcgaagaacacactaataaacattcagtaatagtagaaaagaatagatgttgggatatcatagcagttaactataatgcaattggagtagaccgccctcctcgaacagcacagggcctacgcaccctttataaaaggctcaaagaatatgccaaacaggagctattgcagcaaaaagagacccaatcagattttaaaagcaatatttctgagccaaccaagaaagttatggagatgattccccagatttccagtttttgcctggtaagagacaggaaccacatacaaagtgcaaacttggatgaggaggcacaggctggtaccagttcactacaggtaatgttggatcaccatcctgttgctattacagtggaggtgaagcaagaagaagacattaaaccacctcctccactggttttaaattctcaacagagtgatactttagagcaaagagaagaacatgaattagtacatgttatggaaagatccttgtcgccttcactttcctctgttgatatgagaatgacatcgtctccatcttctattccaaggagagatgatttttttcggcatgagagtggtgaacactttaggtcactattagggtatgatcctcagatcctgcaaatgttgaaagaggagcatcagataattttagaaaatcaaaaaaattttggattgtatgttcaggagaagagggatggattgaaaagaaggcagcagctagaggaagagctactaagagcaaaaattgaagtggagaagctgaaagcaattcgcttacggcatgatctacctgaatataacagtctctaagtttttttttcaatcttgcaatttgataattttgattttggccaaattactttaatttgggaatatcctgaaacagaatacacgttcttgaaaaatgttgttaatctctattatggaaaaactttttagatataattttctaattattttcttttgagatattaaaatttactggttggttggc

SEQ ID NO: 134262 - DNA, 2472 bp, Homo sapiens
  Payload ID: 6223
  Gene Symbol: FSBP
  Gene Name: fibrinogen silencer binding protein
  ENST ID: ENST00000517506
  CDS Start-End: 85-474
ctttttctgtttgtgaaaagagctgagcagagctgaaggctgcatggtggtttcagaaactgcctacttaatttgaaaagaacaatggtaggaaaggctagatcttccaattttaccttatccgaaaagcttgatttgctaaagcttgtgaagccatatgtgaaaattctcgaagaacacactaataaacattcagtaatagtagaaaagaatagatgttgggatatcatagcagttaactataatgcaattggagtagaccgccctcctcgaacagcacagggcctacgcaccctttataaaaggctcaaagaatatgccaaacaggagctattgcagcaaaaagagacccaatcagattttaaaagcaatatttctgagccaaccaagaaagttatggagatgattccccagatttccagtttttgcctggtaagagacaggaaccacatacaaagttcattcggctcctaaagaagtagcagtgtccaaggaacaagaagagaaatctgatagcctagttaaatatttcagtgttgtttggtgtaagccttcaaagaaaaaacataaaaagtgggaaggtgatgctgttcttattgtaaaaggaaagtcatttatattaaagaatttggaaggcaaagacattggaagaggcattggttataaattcaaagagcttgaaaagattgaagagggccaaacactgatgatttgtggaaaagaaatagaagtcatgggtgtaatctctccagatgacttcagcagtggcaggtgttttcagcttggaggaggaagtactgctatctcgcattcttctcaggttgccaggaaatgtttctctaaccctttcaaaagtgtttgtaaaccaagttcaaaggaaaatagacagaatgatttccaaaattgcaaaccacgccatgacccatatacgccaaattccctcgttatgccacgaccagataagaatcaccagtgggtattcaataagaactgtttccctcttgtggatgtagtgattgatccttaccttgtatatcatcttcgaccacatcagaaagaaggaatcatattcctttatgaatgtgtaatgggaatgagaatgaatggcagatgtggagctattcttgctgatgaaatgggtttagggaagacattgcaatgtatttcgctcatctggaccctgcagtgtcagggaccctatggaggcaagccagtaataaagaagacactaattgtcacacctggaagcttggtgaataattggaagaaagaatttcaaaaatggctaggaagtgaaaggatcaagatatttactgttgatcaggaccacaaagttgaagaattcatcaagtctatattttattctgttcttattatcagttatgaaatgttacttcgttccctggatcaaattaagaatataaaatttgatcttctaatctgtgacgaggggcatcgtttgaagaacagtgccattaagacaactacagccctcattagcctttcttgtgagaaaagaataattctaactggtactccaattcagaatgatctgcaagaattttttgcattaattgattttgtaaatccaggaatattaggctctttgtcatcttataggaaaatatatgaagaacccatcattttatcgagagaaccttctgcttctgaggaagaaaaggagttaggagaaagaagagcagctgaacttacttgcctcactggactctttatccttagaagaacccaagaaattataaataaatatctcccacctaaaatagagaatgttgtcttttgccgaccaggagcactacagattgagctttatcgaaagctgttaaattctcaggttgtcaggttctgccttcaagggttgttggaaaatagtccccatctaatatgtataggagctcttaaaaaactgtgcaatcacccctgccttttgttcaactctataaaggaaaaggaatgtagctcaacttgtgataaaaatgaagaaaagagtctatacaaaggcttgctaagtgtgtttcctgctgactacaaccctctcctgtttactgaaaaggagtcaggaaaactacaggtgttgtccaagctcttagcggttatccacgaacttcgacctactgaaaaggtggtgttggtatccaactatacacaaaccttgaacattttacaagaagtatgtaagcgtcatggatatgcttatacaagacttgatggacaaacaccaatctctcaaaggcagcagattgttgatggctttaacagtcaacactcttctttttttatttttttgttaagttcaaaagctggtggtgtaggacttaacctcattggaggatctcacttaattctctatgacattgattggaatccagccactgacattcaggcaatgtctagagtatggagagatggtcagaaatatcctgtacatatttacagactcctaactacaggtac

SEQ ID NO: 134263 - DNA, 1335 bp, Homo sapiens
  Payload ID: 6224
  Gene Symbol: FGL1
  Gene Name: fibrinogen-like 1
  Uniprot ID: Q08830
  ENST ID: ENST00000381840
  CDS Start-End: 198-1136
aatgctaatttatttcacaggtatgatagtaaccaaaactcaggtaacaaccattagcttttgcaagaagtcaggttgactagcaaggagtctgcttctgctacttggagaagagatttagaattatgtatcttttgttacagatatacagatatacaaatatacagatatacaaataagttttttcaagggggaacatggcaaaggtgttcagtttcatccttgttaccaccgctctgacaatgggcagggaaatttcggcgctcgaggactgtgcccaggagcagatgcggctcagagcccaggtgcgcctgcttgagacccgggtcaaacagcaacaggtcaagatcaagcagcttttgcaggagaatgaagtccagttccttgataaaggagatgagaatactgtcattgatcttggaagcaagaggcagtatgcagattgttcagagattttcaatgatgggtataagctcagtggattttacaaaatcaaacctctccagagcccagcagaattttctgtttattgtgacatgtccgatggaggaggatggactgtaattcagagacgatctgatggcagtgaaaactttaacagaggatggaaagactatgaaaatggctttggaaattttgtccaaaaacatggtgaatattggctgggcaataaaaatcttcacttcttgaccactcaagaagactacactttaaaaatcgaccttgcagattttgaaaaaaatagccgttatgcacaatataagaatttcaaagttggagatgaaaagaatttctacgagttgaatattggggaatattctggaacagctggagattcccttgcggggaattttcatcctgaggtgcagtggtgggctagtcaccaaagaatgaaattcagcacgtgggacagagatcatgacaactatgaagggaactgcgcagaagaagatcagtctggctggtggtttaacaggtgtcactctgcaaacctgaatggtgtatactacagcggcccctacacggctaaaacagacaatgggattgtctggtacacctggcatgggtggtggtattctctgaaatctgtggttatgaaaattaggccaaatgattttattccaaatgtaatttaattgctgctgttgggctttcgtttctgcaattcagctttgtttaaagtgatttgaaaaatactcattctgaacatatccatgcgcaatcatgataactgttgtgagtagtgcttttcattcttctcacttgcctttgttacttaatgtgctttcagtacagcagatatgcaatattcaccaaataaatgtagactgtgtt

SEQ ID NO: 134264 - DNA, 1374 bp, Homo sapiens
  Payload ID: 6224
  Gene Symbol: FGL1
  Gene Name: fibrinogen-like 1
  Uniprot ID: Q08830
  ENST ID: ENST00000381841
  CDS Start-End: 237-1175
aattacaaattcccaatgcagttacaggatcctgggaagcagagtgtctggatggaacctgagctgggtctctgactcacttctgactttagggtgaagatggagggaatctgataaagacatcttataaattcaacagacacaaaagaatttgatctcccataagcaactgtgaaattacaataacagatcctgggaagttctacaattctaattcagttttttcaagggggaacatggcaaaggtgttcagtttcatccttgttaccaccgctctgacaatgggcagggaaatttcggcgctcgaggactgtgcccaggagcagatgcggctcagagcccaggtgcgcctgcttgagacccgggtcaaacagcaacaggtcaagatcaagcagcttttgcaggagaatgaagtccagttccttgataaaggagatgagaatactgtcattgatcttggaagcaagaggcagtatgcagattgttcagagattttcaatgatgggtataagctcagtggattttacaaaatcaaacctctccagagcccagcagaattttctgtttattgtgacatgtccgatggaggaggatggactgtaattcagagacgatctgatggcagtgaaaactttaacagaggatggaaagactatgaaaatggctttggaaattttgtccaaaaacatggtgaatattggctgggcaataaaaatcttcacttcttgaccactcaagaagactacactttaaaaatcgaccttgcagattttgaaaaaaatagccgttatgcacaatataagaatttcaaagttggagatgaaaagaatttctacgagttgaatattggggaatattctggaacagctggagattcccttgcggggaattttcatcctgaggtgcagtggtgggctagtcaccaaagaatgaaattcagcacgtgggacagagatcatgacaactatgaagggaactgcgcagaagaagatcagtctggctggtggtttaacaggtgtcactctgcaaacctgaatggtgtatactacagcggcccctacacggctaaaacagacaatgggattgtctggtacacctggcatgggtggtggtattctctgaaatctgtggttatgaaaattaggccaaatgattttattccaaatgtaatttaattgctgctgttgggctttcgtttctgcaattcagctttgtttaaagtgatttgaaaaatactcattctgaacatatccatgcgcaatcatgataactgttgtgagtagtgcttttcattcttctcacttgcctttgttacttaatgtgctttcagtacagcagatatgcaatattcaccaaataaatgtagactgtgtt

SEQ ID NO: 134265 - DNA, 1462 bp, Homo sapiens
  Payload ID: 6224
  Gene Symbol: FGL1
  Gene Name: fibrinogen-like 1
  Uniprot ID: Q08830
  ENST ID: ENST00000398054
  CDS Start-End: 325-1263
aatgctaatttatttcacaggtatgatagtaaccaaaactcaggtaacaaccattagcttttgcaagaagtcaggttgactagcaaggagtctgcttctgctacttggagaagagatttagaattatgtatcttttgttacagatatacagatatacaaatatacagatatacaaataagggtgaagatggagggaatctgataaagacatcttataaattcaacagacacaaaagaatttgatctcccataagcaactgtgaaattacaataacagatcctgggaagttctacaattctaattcagttttttcaagggggaacatggcaaaggtgttcagtttcatccttgttaccaccgctctgacaatgggcagggaaatttcggcgctcgaggactgtgcccaggagcagatgcggctcagagcccaggtgcgcctgcttgagacccgggtcaaacagcaacaggtcaagatcaagcagcttttgcaggagaatgaagtccagttccttgataaaggagatgagaatactgtcattgatcttggaagcaagaggcagtatgcagattgttcagagattttcaatgatgggtataagctcagtggattttacaaaatcaaacctctccagagcccagcagaattttctgtttattgtgacatgtccgatggaggaggatggactgtaattcagagacgatctgatggcagtgaaaactttaacagaggatggaaagactatgaaaatggctttggaaattttgtccaaaaacatggtgaatattggctgggcaataaaaatcttcacttcttgaccactcaagaagactacactttaaaaatcgaccttgcagattttgaaaaaaatagccgttatgcacaatataagaatttcaaagttggagatgaaaagaatttctacgagttgaatattggggaatattctggaacagctggagattcccttgcggggaattttcatcctgaggtgcagtggtgggctagtcaccaaagaatgaaattcagcacgtgggacagagatcatgacaactatgaagggaactgcgcagaagaagatcagtctggctggtggtttaacaggtgtcactctgcaaacctgaatggtgtatactacagcggcccctacacggctaaaacagacaatgggattgtctggtacacctggcatgggtggtggtattctctgaaatctgtggttatgaaaattaggccaaatgattttattccaaatgtaatttaattgctgctgttgggctttcgtttctgcaattcagctttgtttaaagtgatttgaaaaatactcattctgaacatatccatgcgcaatcatgataactgttgtgagtagtgcttttcattcttctcacttgcctttgttacttaatgtgctttcagtacagcagatatgcaatattcaccaaataaatgtagactgtgtt

SEQ ID NO: 134266 - DNA, 1967 bp, Homo sapiens
  Payload ID: 6224
  Gene Symbol: FGL1
  Gene Name: fibrinogen-like 1
  Uniprot ID: Q08830
  ENST ID: ENST00000398056
  CDS Start-End: 817-1755
gatcaggtctccacagcagcggaacaacacttttctggacagaaagttaatttacatgaaggaaaaacggtctggtggaaggataccagaactaaaacttgggaattaagaaaaattatgacgcggggaagggcttttgcttgtgtttcaccaggagacaatcaaacacccatttagatacccaatagacatttgaaattctgcaatgaaccctacaccgaccggacagaagaaagggaagaatccaaagaggaagaagactggtccctccgacctgtcctttcgggagctgagaaagatgacgaagctgagcgtctcagagaaacaacagaagacggagaagacccgccaggctacaccaccgacatgagaacagataaagaagctgactcaaatggcagagggcagcctaaaggagaaacaactggcaattatcccgggtaatatgatcttggctgccttgatggtaattaccgcggcgtaaatcaacaggattacctttcccttaataatcttcaaaatgtccacgtgaaggacaggaagatgtttaatgggaagaccaaacatcgtcagtgctcaagtccagtagataacaaagaacagaaagaaaacaaaactttggtattttactggaatctgagtgaataaatagggaccacaggacaaatggcaaacaactgcttgagttacatcagaaggaaagaagaaatgatgaacccagatttccattacaggatcctgggaagcagagtgtctggatggaacctgagctgggtctctgactcacttctgactttagttttttcaagggggaacatggcaaaggtgttcagtttcatccttgttaccaccgctctgacaatgggcagggaaatttcggcgctcgaggactgtgcccaggagcagatgcggctcagagcccaggtgcgcctgcttgagacccgggtcaaacagcaacaggtcaagatcaagcagcttttgcaggagaatgaagtccagttccttgataaaggagatgagaatactgtcattgatcttggaagcaagaggcagtatgcagattgttcagagattttcaatgatgggtataagctcagtggattttacaaaatcaaacctctccagagcccagcagaattttctgtttattgtgacatgtccgatggaggaggatggactgtaattcagagacgatctgatggcagtgaaaactttaacagaggatggaaagactatgaaaatggctttggaaattttgtccaaaaacatggtgaatattggctgggcaataaaaatcttcacttcttgaccactcaagaagactacactttaaaaatcgaccttgcagattttgaaaaaaatagccgttatgcacaatataagaatttcaaagttggagatgaaaagaatttctacgagttgaatattggggaatattctggaacagctggagattcccttgcggggaattttcatcctgaggtgcagtggtgggctagtcaccaaagaatgaaattcagcacgtgggacagagatcatgacaactatgaagggaactgcgcagaagaagatcagtctggctggtggtttaacaggtgtcactctgcaaacctgaatggtgtatactacagcggcccctacacggctaaaacagacaatgggattgtctggtacacctggcatgggtggtggtattctctgaaatctgtggttatgaaaattaggccaaatgattttattccaaatgtaatttaattgctgctgttgggctttcgtttctgcaattcagctttgtttaaagtgatttgaaaaatactcattctgaacatatccatgcgcaatcatgataactgttgtgagtagtgcttttcattcttctcacttgcctttgttacttaatgtgctttcagtacagcagatatgcaatattcaccaaataaatgtagactgtgttaatatttattgaa

SEQ ID NO: 134267 - DNA, 1247 bp, Homo sapiens
  Payload ID: 6224
  Gene Symbol: FGL1
  Gene Name: fibrinogen-like 1
  Uniprot ID: Q08830
  ENST ID: ENST00000427924
  CDS Start-End: 110-1048
aattacaaattcccaatgcagttacaggatcctgggaagcagagtgtctggatggaacctgagctgggtctctgactcacttctgactttagttttttcaagggggaacatggcaaaggtgttcagtttcatccttgttaccaccgctctgacaatgggcagggaaatttcggcgctcgaggactgtgcccaggagcagatgcggctcagagcccaggtgcgcctgcttgagacccgggtcaaacagcaacaggtcaagatcaagcagcttttgcaggagaatgaagtccagttccttgataaaggagatgagaatactgtcattgatcttggaagcaagaggcagtatgcagattgttcagagattttcaatgatgggtataagctcagtggattttacaaaatcaaacctctccagagcccagcagaattttctgtttattgtgacatgtccgatggaggaggatggactgtaattcagagacgatctgatggcagtgaaaactttaacagaggatggaaagactatgaaaatggctttggaaattttgtccaaaaacatggtgaatattggctgggcaataaaaatcttcacttcttgaccactcaagaagactacactttaaaaatcgaccttgcagattttgaaaaaaatagccgttatgcacaatataagaatttcaaagttggagatgaaaagaatttctacgagttgaatattggggaatattctggaacagctggagattcccttgcggggaattttcatcctgaggtgcagtggtgggctagtcaccaaagaatgaaattcagcacgtgggacagagatcatgacaactatgaagggaactgcgcagaagaagatcagtctggctggtggtttaacaggtgtcactctgcaaacctgaatggtgtatactacagcggcccctacacggctaaaacagacaatgggattgtctggtacacctggcatgggtggtggtattctctgaaatctgtggttatgaaaattaggccaaatgattttattccaaatgtaatttaattgctgctgttgggctttcgtttctgcaattcagctttgtttaaagtgatttgaaaaatactcattctgaacatatccatgcgcaatcatgataactgttgtgagtagtgcttttcattcttctcacttgcctttgttacttaatgtgctttcagtacagcagatatgcaatattcaccaaataaatgtagactgtgtt

SEQ ID NO: 134268 - DNA, 1093 bp, Homo sapiens
  Payload ID: 6224
  Gene Symbol: FGL1
  Gene Name: fibrinogen-like 1
  Uniprot ID: Q08830
  ENST ID: ENST00000518650
  CDS Start-End: 147-1085
agggtgaagatggagggaatctgataaagacatcttataaattcaacagacacaaaagaatttgatctcccataagcaactgtgaaattacaataacagatcctgggaagttctacaattctaattcagttttttcaagggggaacatggcaaaggtgttcagtttcatccttgttaccaccgctctgacaatgggcagggaaatttcggcgctcgaggactgtgcccaggagcagatgcggctcagagcccaggtgcgcctgcttgagacccgggtcaaacagcaacaggtcaagatcaagcagcttttgcaggagaatgaagtccagttccttgataaaggagatgagaatactgtcattgatcttggaagcaagaggcagtatgcagattgttcagagattttcaatgatgggtataagctcagtggattttacaaaatcaaacctctccagagcccagcagaattttctgtttattgtgacatgtccgatggaggaggatggactgtaattcagagacgatctgatggcagtgaaaactttaacagaggatggaaagactatgaaaatggctttggaaattttgtccaaaaacatggtgaatattggctgggcaataaaaatcttcacttcttgaccactcaagaagactacactttaaaaatcgaccttgcagattttgaaaaaaatagccgttatgcacaatataagaatttcaaagttggagatgaaaagaatttctacgagttgaatattggggaatattctggaacagctggagattcccttgcggggaattttcatcctgaggtgcagtggtgggctagtcaccaaagaatgaaattcagcacgtgggacagagatcatgacaactatgaagggaactgcgcagaagaagatcagtctggctggtggtttaacaggtgtcactctgcaaacctgaatggtgtatactacagcggcccctacacggctaaaacagacaatgggattgtctggtacacctggcatgggtggtggtattctctgaaatctgtggttatgaaaattaggccaaatgattttattccaaatgtaatttaattgctgct

SEQ ID NO: 134269 - DNA, 1367 bp, Homo sapiens
  Payload ID: 6224
  Gene Symbol: FGL1
  Gene Name: fibrinogen-like 1
  Uniprot ID: Q08830
  ENST ID: ENST00000522444
  CDS Start-End: 226-1164
gtgatgaaacagattcaattctagttaacactcagtgtcattctgtgtggtgagaggctgggaaagtctgggagaatttcctcggcgactctaagattagggatggcctgcggctgcatccgacttcctggagctactgaagtctgaactctggtctcatgaaaaattcaaggttgatacatttataaaattctttttgttcttgcagttttttcaagggggaacatggcaaaggtgttcagtttcatccttgttaccaccgctctgacaatgggcagggaaatttcggcgctcgaggactgtgcccaggagcagatgcggctcagagcccaggtgcgcctgcttgagacccgggtcaaacagcaacaggtcaagatcaagcagcttttgcaggagaatgaagtccagttccttgataaaggagatgagaatactgtcattgatcttggaagcaagaggcagtatgcagattgttcagagattttcaatgatgggtataagctcagtggattttacaaaatcaaacctctccagagcccagcagaattttctgtttattgtgacatgtccgatggaggaggatggactgtaattcagagacgatctgatggcagtgaaaactttaacagaggatggaaagactatgaaaatggctttggaaattttgtccaaaaacatggtgaatattggctgggcaataaaaatcttcacttcttgaccactcaagaagactacactttaaaaatcgaccttgcagattttgaaaaaaatagccgttatgcacaatataagaatttcaaagttggagatgaaaagaatttctacgagttgaatattggggaatattctggaacagctggagattcccttgcggggaattttcatcctgaggtgcagtggtgggctagtcaccaaagaatgaaattcagcacgtgggacagagatcatgacaactatgaagggaactgcgcagaagaagatcagtctggctggtggtttaacaggtgtcactctgcaaacctgaatggtgtatactacagcggcccctacacggctaaaacagacaatgggattgtctggtacacctggcatgggtggtggtattctctgaaatctgtggttatgaaaattaggccaaatgattttattccaaatgtaatttaattgctgctgttgggctttcgtttctgcaattcagctttgtttaaagtgatttgaaaaatactcattctgaacatatccatgcgcaatcatgataactgttgtgagtagtgcttttcattcttctcacttgcctttgttacttaatgtgctttcagtacagcagatatgcaatattcaccaaataaatgtagactgtgttaata

SEQ ID NO: 134270 - DNA, 4261 bp, Homo sapiens
  Payload ID: 6225
  Gene Symbol: FGL2
  Gene Name: fibrinogen-like 2
  Uniprot ID: Q14314
  ENST ID: ENST00000248598
  CDS Start-End: 34-1353
gcactccctgctggggtgagcagcactgtaaagatgaagctggctaactggtactggctgagctcagctgttcttgccacttacggttttttggttgtggcaaacaatgaaacagaggaaattaaagatgaaagagcaaaggatgtctgcccagtgagactagaaagcagagggaaatgcgaagaggcaggggagtgcccctaccaggtaagcctgccccccttgactattcagctcccgaagcaattcagcaggatcgaggaggtgttcaaagaagtccaaaacctcaaggaaatcgtaaatagtctaaagaaatcttgccaagactgcaagctgcaggctgatgacaacggagacccaggcagaaacggactgttgttacccagtacaggagccccgggagaggttggtgataacagagttagagaattagagagtgaggttaacaagctgtcctctgagctaaagaatgccaaagaggagatcaatgtacttcatggtcgcctggagaagctgaatcttgtaaatatgaacaacatagaaaattatgttgacagcaaagtggcaaatctaacatttgttgtcaatagtttggatggcaaatgttcaaagtgtcccagccaagaacaaatacagtcacgtccagttcaacatctaatatataaagattgctctgactactacgcaataggcaaaagaagcagtgagacctacagagttacacctgatcccaaaaatagtagctttgaagtttactgtgacatggagaccatggggggaggctggacagtgctgcaggcacgtctcgatgggagcaccaacttcaccagaacatggcaagactacaaagcaggctttggaaacctcagaagggaattttggctggggaacgataaaattcatcttctgaccaagagtaaggaaatgattctgagaatagatcttgaagactttaatggtgtcgaactatatgccttgtatgatcagttttatgtggctaatgagtttctcaaatatcgtttacacgttggtaactataatggcacagctggagatgcattacgtttcaacaaacattacaaccacgatctgaagtttttcaccactccagataaagacaatgatcgatatccttctgggaactgtgggctgtactacagttcaggctggtggtttgatgcatgtctttctgcaaacttaaatggcaaatattatcaccaaaaatacagaggtgtccgtaatgggattttctggggtacctggcctggtgtaagtgaggcacaccctggtggctacaagtcctccttcaaagaggctaagatgatgatcagacccaagcactttaagccataaatcactctgttcattcctccaggtattcgttatctaatagggcaattaattccttcagcactttagaatatgccttgtttcatatttttcatagctaaaaaatgatgtctgacggctaggttcttatgctacacagcatttgaaataaagctgaaaaacaatgcattttaaaggagtcctttgttgttatgctgttatccaatgaacacttgcaagcaattagcaatattgagaattatacattagatttacaattcttttaatttctattgaaactttttctattgcttgtattacttgctgtatttaaaaaataattgttggctgggtgtggtagctcacgcctgtaatcccagcactttggaatgtcaaggcaggcagatcacttgaggtcaggagtttgagaccagcctggccaaacatgtgaaacgctgtctctattaaaaatacaaaaattagccgggcatggtggtacatgcctgtaatcctagctacttgggaggctgaggcaggagaatcgcttgaacctgagaggaagaggttgcagtgagccaagactgagccactgcactccagcatgggtgacagagaaaactctgtctcaaacaaaaaaataataaaatttattcagtaggctggattctacacaaagtaatctgtatttgggccatgatttaagcacatctgaaggtatatcactcttttcaggctataattatttgggtaatcttcattctgagacaaacttaatctatatcatttactttgcaacagaacaaccctacagcattttggttcccagactaagggaactaatatctatataattaaacttgttcatttatcattcatgaaatataaaatacttgtcatttaaaccgtttaaaaatgtggtagcataatgtcaccccaaaaagcattcagaaagcaatgtaactgtgaagaccagggtttaaaggtaattcatttatagtttataactccttagatgtttgatgttgaaaactgctttaacatgaaaattatcttcctctgctctgtgtgaacaatagcttttaatttaagattgctcactactgtactagactactggtaggtttttttggggggggtgggtagggatatgtgggtaatgaagcatttacttacaggctatcatactctgaggccaattttatctccaaagcaataatatcattaagtgattcacttcatagaaggctaagtttctctaggacagatagaaaacatgaattttgaaatatatagaacagtagttaaaatactatatatttcaaccctggctggtagattgcttattttactatcagaaactaaaagatagatttttacccaaacagaagtatctgtaatttttataattcatcaattctggaatgctatatataatatttaaaagactttttaaatgtgtttaatttcatcatcgtaaaaagggatcatctcagagagaacagcagtattctgcgtatttttaaaaatgctctagagtaacatttgaagtaattcactgtagtgtatgccagtcctagaaataatttttttaatttctggtgtctgtttctaatacactaaccaagttttcaaaatatatttacaaagatgcatctttacccattattttaaaatgattaaggaggatagttgcttcaggtaacaagctaatttttcaaatattaggcccttacagaactatttagtcaaaaagtaagatattcctttaaaatatataacccaaagctttcagttaaacatgatatatcacaaatactattaaaatgttaaagagaaatgcaaatagcattaaatgatgaccaaaatgtaaaatattgtagatttcaaaagctgtgtctctattaggtgggataccaaatgtaaatgatgtaactgacgttgttttttactttttactttttaaaaaagactaaaaacgttttgatattatacaatgtatttgtttcagataaggtcattgtcatttagtatatataattaatatatgtacaagtttaagtaaattcctgtgagtaaaaatggacttatcacaaaacatagttctaaagaaaggtatatgctcatatacacggtgtccattaatttaatgggaactaggtataacttcaggagaatttggcaaataattcattaatccatgtaaatattcaaaagcttgttctatccacattatttcaagggatcactttatttttcattatactttcacagcacttttctagtaaattctgtaacacagaaattccattttggaatcatttcatgttaccaataattctagacttttataacatttaacatgttgatggaaatagattacatctgctagaaccttttgccttaactattcaccaatatatgctaatattcataaatatggattgactgtttacaaacattagaatcttgtcttggttccattttgatggctaatatttgttatcttaattaagactatttctgaggtcatgattacttgaaaatattgactaaaactgggtccttagaaattccaggtggagctgatttacctatgactgaggggaaaaaaaaatcaaattttactgataatagtaatgctccaaatgaattaatgacacatctgttcaataaataaagagcttaaatatacaaaacataagaaatctgggcaacaaaacttgtggtctttacttttgaatagctacccaagaaaaggttttaaaggtaaaagttatgagtaatgtcatcacaataagctcttgtttaaaattcttttcttttatgtataattaggtttatgtttcatgtctttttaaaaccttataaaagatttaattatcacatctattcttcaatgtggaaatattaaatattgttggttgtaaaataa

SEQ ID NO: 134271 - DNA, 2780 bp, Homo sapiens
  Payload ID: 6226
  Gene Symbol: FAP
  Gene Name: fibroblast activation protein, alpha
  Uniprot ID: Q12884
  ENST ID: ENST00000188790
  CDS Start-End: 209-2491
aagaacgcccccaaaatctgtttctaattttacagaaatcttttgaaacttggcacggtattcaaaagtccgtggaaagaaaaaaaccttgtcctggcttcagcttccaactacaaagacagacttggtccttttcaacggttttcacagatccagtgacccacgctctgaagacagaattagctaactttcaaaaacatctggaaaaatgaagacttgggtaaaaatcgtatttggagttgccacctctgctgtgcttgccttattggtgatgtgcattgtcttacgcccttcaagagttcataactctgaagaaaatacaatgagagcactcacactgaaggatattttaaatggaacattttcttataaaacattttttccaaactggatttcaggacaagaatatcttcatcaatctgcagataacaatatagtactttataatattgaaacaggacaatcatataccattttgagtaatagaaccatgaaaagtgtgaatgcttcaaattacggcttatcacctgatcggcaatttgtatatctagaaagtgattattcaaagctttggagatactcttacacagcaacatattacatctatgaccttagcaatggagaatttgtaagaggaaatgagcttcctcgtccaattcagtatttatgctggtcgcctgttgggagtaaattagcatatgtctatcaaaacaatatctatttgaaacaaagaccaggagatccaccttttcaaataacatttaatggaagagaaaataaaatatttaatggaatcccagactgggtttatgaagaggaaatgcttgctacaaaatatgctctctggtggtctcctaatggaaaatttttggcatatgcggaatttaatgatacggatataccagttattgcctattcctattatggcgatgaacaatatcctagaacaataaatattccatacccaaaggctggagctaagaatcccgttgttcggatatttattatcgataccacttaccctgcgtatgtaggtccccaggaagtgcctgttccagcaatgatagcctcaagtgattattatttcagttggctcacgtgggttactgatgaacgagtatgtttgcagtggctaaaaagagtccagaatgtttcggtcctgtctatatgtgacttcagggaagactggcagacatgggattgtccaaagacccaggagcatatagaagaaagcagaactggatgggctggtggattctttgtttcaacaccagttttcagctatgatgccatttcgtactacaaaatatttagtgacaaggatggctacaaacatattcactatatcaaagacactgtggaaaatgctattcaaattacaagtggcaagtgggaggccataaatatattcagagtaacacaggattcactgttttattctagcaatgaatttgaagaataccctggaagaagaaacatctacagaattagcattggaagctatcctccaagcaagaagtgtgttacttgccatctaaggaaagaaaggtgccaatattacacagcaagtttcagcgactacgccaagtactatgcacttgtctgctacggcccaggcatccccatttccacccttcatgatggacgcactgatcaagaaattaaaatcctggaagaaaacaaggaattggaaaatgctttgaaaaatatccagctgcctaaagaggaaattaagaaacttgaagtagatgaaattactttatggtacaagatgattcttcctcctcaatttgacagatcaaagaagtatcccttgctaattcaagtgtatggtggtccctgcagtcagagtgtaaggtctgtatttgctgttaattggatatcttatcttgcaagtaaggaagggatggtcattgccttggtggatggtcgaggaacagctttccaaggtgacaaactcctctatgcagtgtatcgaaagctgggtgtttatgaagttgaagaccagattacagctgtcagaaaattcatagaaatgggtttcattgatgaaaaaagaatagccatatggggctggtcctatggaggatacgtttcatcactggcccttgcatctggaactggtcttttcaaatgtggtatagcagtggctccagtctccagctgggaatattacgcgtctgtctacacagagagattcatgggtctcccaacaaaggatgataatcttgagcactataagaattcaactgtgatggcaagagcagaatatttcagaaatgtagactatcttctcatccacggaacagcagatgataatgtgcactttcaaaactcagcacagattgctaaagctctggttaatgcacaagtggatttccaggcaatgtggtactctgaccagaaccacggcttatccggcctgtccacgaaccacttatacacccacatgacccacttcctaaagcagtgtttctctttgtcagactaaaaacgatgcagatgcaagcctgtatcagaatctgaaaaccttatataaacccctcagacagtttgcttattttattttttatgttgtaaaatgctagtataaacaaacaaattaatgttgttctaaaggctgttaaaaaaaagatgaggactcagaagttcaagctaaatattgtttacattttctggtactctgtgaaagaagagaaaagggagtcatgcattttgctttggacacagtgttttatcacctgttcatttgaagaaaaataataaagtcagaagttcaa

SEQ ID NO: 134272 - DNA, 578 bp, Homo sapiens
  Payload ID: 6226
  Gene Symbol: FAP
  Gene Name: fibroblast activation protein, alpha
  ENST ID: ENST00000447386
  CDS Start-End: 114-578
atttctactatttagcaggaactgtgtgtatgcctaattctctttattttatgtagacttgggtaaaaatcgtatttggagttgccacctctgctgtgcttgccttattggtgatgtgcattgtcttacgcccttcaagagttcataactctgaagaaaatacaatgagagcactcacactgaaggatattttaaatggaacattttcttataaaacattttttccaaactggatttcaggacaagaatatcttcatcaatctgcagataacaatatagtactttataatattgaaacaggacaatcatataccattttgagtaatagaaccatgaaaagtgtgaatgcttcaaattacggcttatcacctgatcggcaatttgtatatctagaaagtgattattcaaagctttggagatactcttacacagcaacatattacatctatgaccttagcaatggagaatttgtaagaggaaatgagcttcctcgtccaattcagtatttatgctggtcgcctgttgggagtaaattagcatatgtctatcaaaacaatatctatttgaaacaaagacca

SEQ ID NO: 134273 - DNA, 706 bp, Homo sapiens
  Payload ID: 6226
  Gene Symbol: FAP
  Gene Name: fibroblast activation protein, alpha
  ENST ID: ENST00000450031
  CDS Start-End: 168-533
caaaagctttgtggggcgagagaaaaaggatttaggtgtaaacaaaatcttgccatttctactatttagcaggaactgtgtgtatgcctaattctctttattttatgtagacttgggtaaaaatcgtatttggagttgccacctctgctgtgcttgccttattggtgatgtgcattgtcttacgcccttcaagagttcataactctgaagaaaatacaatgagagcactcacactgaaggatattttaaatggaacattttcttataaaacattttttccaaactggatttcaggacaagaatatcttcatcaatctgcagataacaatatagtactttataatattgaaacaggacaatcatataccattttgagtaatagaaccatgaaaagtgtgaatgcttcaaattacggcttatcacctgatcggcaatttgtatatctagaaagtgattattcaaagctttggagatactcttacacagcaacatattacatctatgaccttagcaatggaaaatggcagctgtgatggcttgagacatgcgctgagatttttagcttagtgctgcttgtgtgattgcatagataattccactgtatgtagaaaactgagacaatgttacagtatgaaagagaatttgtaagaggaaatgagcttcctcgtccaattcagtatttatgctggtcgcctgttgggagtaa

SEQ ID NO: 134274 - DNA, 2598 bp, Homo sapiens
  Payload ID: 6226
  Gene Symbol: FAP
  Gene Name: fibroblast activation protein, alpha
  ENST ID: ENST00000443424
  CDS Start-End: 130-2337
aaaaaaaccttgtcctggcttcagcttccaactacaaagacagacttggtccttttcaacggttttcacagatccagtgacccacgctctgaagacagaattagctaactttcaaaaacatctggaaaaatgaagacttgggtaaaaatcgtatttggagttgccacctctgctgtgcttgccttattggtgatgtgcattgtcttacgcccttcaagagttcataactctgaagaaaatacaatgagagcactcacactgaaggatattttaaatggaacattttcttataaaacattttttccaaactggatttcaggacaagaatatcttcatcaatctgcagataacaatatagtactttataatattgaaacaggacaatcatataccattttgagtaatagaaccatgctttggagatactcttacacagcaacatattacatctatgaccttagcaatggagaatttgtaagaggaaatgagcttcctcgtccaattcagtatttatgctggtcgcctgttgggagtaaattagcatatgtctatcaaaacaatatctatttgaaacaaagaccaggagatccaccttttcaaataacatttaatggaagagaaaataaaatatttaatggaatcccagactgggtttatgaagaggaaatgcttgctacaaaatatgctctctggtggtctcctaatggaaaatttttggcatatgcggaatttaatgatacggatataccagttattgcctattcctattatggcgatgaacaatatcctagaacaataaatattccatacccaaaggctggagctaagaatcccgttgttcggatatttattatcgataccacttaccctgcgtatgtaggtccccaggaagtgcctgttccagcaatgatagcctcaagtgattattatttcagttggctcacgtgggttactgatgaacgagtatgtttgcagtggctaaaaagagtccagaatgtttcggtcctgtctatatgtgacttcagggaagactggcagacatgggattgtccaaagacccaggagcatatagaagaaagcagaactggatgggctggtggattctttgtttcaacaccagttttcagctatgatgccatttcgtactacaaaatatttagtgacaaggatggctacaaacatattcactatatcaaagacactgtggaaaatgctattcaaattacaagtggcaagtgggaggccataaatatattcagagtaacacaggattcactgttttattctagcaatgaatttgaagaataccctggaagaagaaacatctacagaattagcattggaagctatcctccaagcaagaagtgtgttacttgccatctaaggaaagaaaggtgccaatattacacagcaagtttcagcgactacgccaagtactatgcacttgtctgctacggcccaggcatccccatttccacccttcatgatggacgcactgatcaagaaattaaaatcctggaagaaaacaaggaattggaaaatgctttgaaaaatatccagctgcctaaagaggaaattaagaaacttgaagtagatgaaattactttatggtacaagatgattcttcctcctcaatttgacagatcaaagaagtatcccttgctaattcaagtgtatggtggtccctgcagtcagagtgtaaggtctgtatttgctgttaattggatatcttatcttgcaagtaaggaagggatggtcattgccttggtggatggtcgaggaacagctttccaaggtgacaaactcctctatgcagtgtatcgaaagctgggtgtttatgaagttgaagaccagattacagctgtcagaaaattcatagaaatgggtttcattgatgaaaaaagaatagccatatggggctggtcctatggaggatacgtttcatcactggcccttgcatctggaactggtcttttcaaatgtggtatagcagtggctccagtctccagctgggaatattacgcgtctgtctacacagagagattcatgggtctcccaacaaaggatgataatcttgagcactataagaattcaactgtgatggcaagagcagaatatttcagaaatgtagactatcttctcatccacggaacagcagatgataatgtgcactttcaaaactcagcacagattgctaaagctctggttaatgcacaagtggatttccaggcaatgtggtactctgaccagaaccacggcttatccggcctgtccacgaaccacttatacacccacatgacccacttcctaaagcagtgtttctctttgtcagactaaaaacgatgcagatgcaagcctgtatcagaatctgaaaaccttatataaacccctcagacagtttgcttattttattttttatgttgtaaaatgctagtataaacaaacaaattaatgttgttctaaaggctgttaaaaaaaagatgaggactcagaagttcaagctaaatattgtttacattttctggtactctgtgaaagaagagaaaagggagtcatgcattttgctttggacacagtgttttatcacctgttcatttg

SEQ ID NO: 134275 - DNA, 1537 bp, Homo sapiens
  Payload ID: 6226
  Gene Symbol: FAP
  Gene Name: fibroblast activation protein, alpha
  ENST ID: ENST00000422436
  CDS Start-End: 1-78
aaagaaaggtgccaatattacacagcaagtttcagcgactacgccaagtactatgcacttgtctgctacggggaatgaacaacggcttggaaacccgagatgcccacgtcggaggtcaatcattcctcaaactgtagtttcaatggggatagaagatgaacctttgtcctttctaaatttggaaaacatcttgcagaggccctgaagatctcataaagggaaccagaatgaaggctaccctaacatgccacttccctcagtccagccacctggccccggaacctgagctgcagctcatttgactacgtggacatgaataagcattttaacccaaattctcccttgaagatagcacaaagatgcccaggcatccccatttccacccttcatgatggacgcactgatcaagaaattaaaatcctggaagaaaacaaggaattggaaaatgctttgaaaaatatccagctgcctaaagaggaaattaagaaacttgaagtagatgaaattactttatggtacaagatgattcttcctcctcaatttgacagatcaaagaagtatcccttgctaattcaagtgtatggtggtccctgcagtcagagtgtaaggtctgtatttgctgttaattggatatcttatcttgcaagtaaggaagggatggtcattgccttggtggatggtcgaggaacagctttccaaggtgacaaactcctctatgcagtgtatcgaaagctgggtgtttatgaagttgaagaccagattacagctgtcagaaaattcatagaaatgggtttcattgatgaaaaaagaatagccatatggggctggtcctatggaggatacgtttcatcactggcccttgcatctggaactggtcttttcaaatgtggtatagcagtggctccagtctccagctgggaatattacgcgtctgtctacacagagagattcatgggtctcccaacaaaggatgataatcttgagcactataagaattcaactgtgatggcaagagcagaatatttcagaaatgtagactatcttctcatccacggaacagcagatgataatgtgcactttcaaaactcagcacagattgctaaagctctggttaatgcacaagtggatttccaggcaatgtggtactctgaccagaaccacggcttatccggcctgtccacgaaccacttatacacccacatgacccacttcctaaagcagtgtttctctttgtcagactaaaaacgatgcagatgcaagcctgtatcagaatctgaaaaccttatataaacccctcagacagtttgcttattttattttttatgttgtaaaatgctagtataaacaaacaaattaatgttgttctaaaggctgttaaaaaaaagatgaggactcagaagttcaagctaaatattgtttacattttctggtactctgtgaaagaagagaaaagggagtcatgcattttgctttggacacagtgttttatcacctgttcatttgaagaaaaataataaagtcagaagttcaagtgcta

SEQ ID NO: 134276 - DNA, 697 bp, Homo sapiens
  Payload ID: 6226
  Gene Symbol: FAP
  Gene Name: fibroblast activation protein, alpha
  ENST ID: ENST00000462608
  CDS Start-End: 1-143
tctacacagagagattcatgggtctcccaacaaaggatgataatcttgagcactataagaattcaactgtgatggcaagagcagaatatttcagaaatgtagactatcttctcatccacggaacagcagatggtgaggtttaagcaagactcttacacataaaaatactgagccagcatcactttgtttaagaaacattaagcatcctcctatgcctatgctcaggataatgtgcactttcaaaactcagcacagattgctaaagctctggttaatgcacaagtggatttccaggcaatgtggtactctgaccagaaccacggcttatccggcctgtccacgaaccacttatacacccacatgacccacttcctaaagcagtgtttctctttgtcagactaaaaacgatgcagatgcaagcctgtatcagaatctgaaaaccttatataaacccctcagacagtttgcttattttattttttatgttgtaaaatgctagtataaacaaacaaattaatgttgttctaaaggctgttaaaaaaaagatgaggactcagaagttcaagctaaatattgtttacattttctggtactctgtgaaagaagagaaaagggagtcatgcattttgctttggacacagtgttttatcacctgttcatttgaagaaaaataataaagtcagaagttcaagtgcta

SEQ ID NO: 134277 - DNA, 2569 bp, Homo sapiens
  Payload ID: 6226
  Gene Symbol: FAP
  Gene Name: fibroblast activation protein, alpha
  ENST ID: ENST00000627638
  CDS Start-End: 1-2280
atgacttgggtaaaaatcgtatttggagttgccacctctgctgtgcttgccttattggtgatgtgcattgtcttacgcccttcaagagttcataactctgaagaaaatacaatgagagcactcacactgaaggatattttaaatggaacattttcttataaaacattttttccaaactggatttcaggacaagaatatcttcatcaatctgcagataacaatatagtactttataatattgaaacaggacaatcatataccattttgagtaatagaaccatgaaaagtgtgaatgcttcaaattacggcttatcacctgatcggcaatttgtatatctagaaagtgattattcaaagctttggagatactcttacacagcaacatattacatctatgaccttagcaatggagaatttgtaagaggaaatgagcttcctcgtccaattcagtatttatgctggtcgcctgttgggagtaaattagcatatgtctatcaaaacaatatctatttgaaacaaagaccaggagatccaccttttcaaataacatttaatggaagagaaaataaaatatttaatggaatcccagactgggtttatgaagaggaaatgcttgctacaaaatatgctctctggtggtctcctaatggaaaatttttggcatatgcggaatttaatgatacggatataccagttattgcctattcctattatggcgatgaacaatatcctagaacaataaatattccatacccaaaggctggagctaagaatcccgttgttcggatatttattatcgataccacttaccctgcgtatgtaggtccccaggaagtgcctgttccagcaatgatagcctcaagtgattattatttcagttggctcacgtgggttactgatgaacgagtatgtttgcagtggctaaaaagagtccagaatgtttcggtcctgtctatatgtgacttcagggaagactggcagacatgggattgtccaaagacccaggagcatatagaagaaagcagaactggatgggctggtggattctttgtttcaacaccagttttcagctatgatgccatttcgtactacaaaatatttagtgacaaggatggctacaaacatattcactatatcaaagacactgtggaaaatgctattcaaattacaagtggcaagtgggaggccataaatatattcagagtaacacaggattcactgttttattctagcaatgaatttgaagaataccctggaagaagaaacatctacagaattagcattggaagctatcctccaagcaagaagtgtgttacttgccatctaaggaaagaaaggtgccaatattacacagcaagtttcagcgactacgccaagtactatgcacttgtctgctacggcccaggcatccccatttccacccttcatgatggacgcactgatcaagaaattaaaatcctggaagaaaacaaggaattggaaaatgctttgaaaaatatccagctgcctaaagaggaaattaagaaacttgaagtagatgaaattactttatggtacaagatgattcttcctcctcaatttgacagatcaaagaagtatcccttgctaattcaagtgtatggtggtccctgcagtcagagtgtaaggtctgtatttgctgttaattggatatcttatcttgcaagtaaggaagggatggtcattgccttggtggatggtcgaggaacagctttccaaggtgacaaactcctctatgcagtgtatcgaaagctgggtgtttatgaagttgaagaccagattacagctgtcagaaaattcatagaaatgggtttcattgatgaaaaaagaatagccatatggggctggtcctatggaggatacgtttcatcactggcccttgcatctggaactggtcttttcaaatgtggtatagcagtggctccagtctccagctgggaatattacgcgtctgtctacacagagagattcatgggtctcccaacaaaggatgataatcttgagcactataagaattcaactgtgatggcaagagcagaatatttcagaaatgtagactatcttctcatccacggaacagcagatgataatgtgcactttcaaaactcagcacagattgctaaagctctggttaatgcacaagtggatttccaggcaatgtggtactctgaccagaaccacggcttatccggcctgtccacgaaccacttatacacccacatgacccacttcctaaagcagtgtttctctttgtcagactaaaaacgatgcagatgcaagcctgtatcagaatctgaaaaccttatataaacccctcagacagtttgcttattttattttttatgttgtaaaatgctagtataaacaaacaaattaatgttgttctaaaggctgttaaaaaaaagatgaggactcagaagttcaagctaaatattgtttacattttctggtactctgtgaaagaagagaaaagggagtcatgcattttgctttggacacagtgttttatcacctgttcatttgaagaaaaataataaagtcagaagttcaa

SEQ ID NO: 134278 - DNA, 1261 bp, Homo sapiens
  Payload ID: 6227
  Gene Symbol: FIBP
  Gene Name: fibroblast growth factor (acidic) intracellular binding protein
  Uniprot ID: O43427
  ENST ID: ENST00000338369
  CDS Start-End: 114-1208
ggtcccgatgccgcgagcggaatctcggcgctcccggaagtggcctgaaggcggcgcgccagtcccgagcagtgctcgctcctgctcggggcgctgcggccccgggcgtcgccatgaccagtgagctggacatcttcgtggggaacacgacccttatcgacgaggacgtgtatcgcctctggctcgatggttactcggtgaccgacgcggtggccctgcgggtgcgctcgggaatcctggagcagactggcgccacggcagcggtgctgcagagcgacaccatggaccattaccgcaccttccacatgctcgagcggctgctgcatgcgccgcccaagctactgcaccagctcatcttccagattccgccctcccggcaggcactactcatcgagaggtactatgcctttgatgaggcctttgttcgggaggtgctgggcaagaagctgtccaaaggcaccaagaaagacctggatgacatcagcaccaaaacaggcatcaccctcaagagctgccggagacagtttgacaactttaaacgggtcttcaaggtggtagaggaaatgcggggctccctggtggacaatattcagcaacacttcctcctctctgaccggttggccagggactatgcagccatcgtcttctttgctaacaaccgctttgagacagggaagaaaaaactgcagtatctgagcttcggtgactttgccttctgcgctgagctcatgatccaaaactggacccttggagccgtcggtgaggcccccactgacccagactcacagatggatgacatggacatggacttagacaaggaatttctccaggacttgaaggagctcaaggtgctagtggctgacaaggaccttctggacctgcacaagagcctggtgtgcactgctctccggggaaagctgggcgtcttctctgagatggaagccaacttcaagaacctgtcccgggggctggtgaacgtggccgccaagctgacccacaataaagatgtcagagacctgtttgtggacctcgtggagaagtttgtggaaccctgccgctccgaccactggccactcagcgacgtgcggttcttcctgaatcagtattcagcgtctgtccactccctcgatggcttccgacaccaggccctctgggaccgctacatgggcaccctccgcggctgcctcctgcgcctgtatcatgactgaggtgcctcccaacgctccgcccacgctgacaataaagttgctctgagtttgga

SEQ ID NO: 134279 - DNA, 1248 bp, Homo sapiens
  Payload ID: 6227
  Gene Symbol: FIBP
  Gene Name: fibroblast growth factor (acidic) intracellular binding protein
  Uniprot ID: O43427
  ENST ID: ENST00000357519
  CDS Start-End: 122-1195
ataagctgggtcccgatgccgcgagcggaatctcggcgctcccggaagtggcctgaaggcggcgcgccagtcccgagcagtgctcgctcctgctcggggcgctgcggccccgggcgtcgccatgaccagtgagctggacatcttcgtggggaacacgacccttatcgacgaggacgtgtatcgcctctggctcgatggttactcggtgaccgacgcggtggccctgcgggtgcgctcgggaatcctggagcagactggcgccacggcagcggtgctgcagagcgacaccatggaccattaccgcaccttccacatgctcgagcggctgctgcatgcgccgcccaagctactgcaccagctcatcttccagattccgccctcccggcaggcactactcatcgagaggtactatgcctttgatgaggcctttgttcgggaggtgctgggcaagaagctgtccaaaggcaccaagaaagacctggatgacatcagcaccaaaacaggcatcaccctcaagagctgccggagacagtttgacaactttaaacgggtcttcaaggtggtagaggaaatgcggggctccctggtggacaatattcagcaacacttcctcctctctgaccggttggccagggactatgcagccatcgtcttctttgctaacaaccgctttgagacagggaagaaaaaactgcagtatctgagcttcggtgactttgccttctgcgctgagctcatgatccaaaactggacccttggagccgtcgactcacagatggatgacatggacatggacttagacaaggaatttctccaggacttgaaggagctcaaggtgctagtggctgacaaggaccttctggacctgcacaagagcctggtgtgcactgctctccggggaaagctgggcgtcttctctgagatggaagccaacttcaagaacctgtcccgggggctggtgaacgtggccgccaagctgacccacaataaagatgtcagagacctgtttgtggacctcgtggagaagtttgtggaaccctgccgctccgaccactggccactcagcgacgtgcggttcttcctgaatcagtattcagcgtctgtccactccctcgatggcttccgacaccaggccctctgggaccgctacatgggcaccctccgcggctgcctcctgcgcctgtatcatgactgaggtgcctcccaacgctccgcccacgctgacaataaagttgctctgagtttgga

SEQ ID NO: 134280 - DNA, 1010 bp, Homo sapiens
  Payload ID: 6227
  Gene Symbol: FIBP
  Gene Name: fibroblast growth factor (acidic) intracellular binding protein
  ENST ID: ENST00000533037
  CDS Start-End: 73-513
ggcctgaaggcggcgcgccagtcccgagcagtgctcgctcctgctcggggcgctgcggccccgggcgtcgccatgaccagtgagctggacatcttcgtggggaacacgacccttatcgacgaggacgtgtatcgcctctggctcgatggttactcggtgaccgacgcggtggccctgcgggtgcgctcgggaatcctggagcagactggcgccacggcagcggtgctgcagagcgacaccatggaccattaccgcaccttccacatgctcgagcggctgctgcatgcgccgcccaagctactgcaccagctcatcttccagattccgccctcccggcaggcactactcatcgagaggtactatgcctttgatgaggcctttgttcgggaggtgctgggcaagaagctgtccaaaggcaccaagaaagacctggatgacatcagcaccaaaacaggcatcaccctcaagagctgccggagacagggactatgcagccatcgtcttctttgctaacaaccgctttgagacagggaagaaaaaactgcagtatctgagcttcggtgactttgccttctgcgctgagctcatgatccaaaactggacccttggagccgtcgactcacagatggatgacatggacatggacttagacaaggaatttctccaggacttgaaggagctcaaggtgctagtggctgacaaggaccttctggacctgcacaagagcctggtgtgcactgctctccggggaaagctgggcgtcttctctgagatggaagccaacttcaagaacctgtcccgggggctggtgaacgtggccgccaagctgacccacaataaagatgtcagagacctgtttgtggacctcgtggagaagtttgtggaaccctgccgctccgaccactggccactcagcgacgtgcggttcttcctgaatcagtattcagcgtctgtccactccctcgatggcttccgacaccaggccctctgggaccgctacatgggcaccc

SEQ ID NO: 134281 - DNA, 609 bp, Homo sapiens
  Payload ID: 6227
  Gene Symbol: FIBP
  Gene Name: fibroblast growth factor (acidic) intracellular binding protein
  ENST ID: ENST00000531115
  CDS Start-End: 1-413
ttgccttctgcgctgagctcatgatccaaaactggacccttggagccgtcgactcacagatggatgacatggacatggacttagacaaggaatttctccaggacttgaaggagctcaaggtgctagtggctgacaaggaccttctggacctgcacaagagcctggtgtgcactgctctccggggaaagctgggcgtcttctctgagatggaagccaacttcaagaacctgtcccgggggctggtgaacgtggccgccaagctgacccacaataaagatgtcagagacctgtttgtggacctcgtggagaagtttgtggaaccctgccgctccgaccactggccactcagcgacgtgcggttcttcctgaatcagtattcagcgtctgtccactccctcgatggcttccggtgagcagccctgtcctcctgtccagcttggctttgccccagcctgccacctgccaggacctcgcctcctgcagactcaagacaccaggccctctgggaccgctacatgggcaccctccgcggctgcctcctgcgcctgtatcatgactgaggtgcctcccaacgctccgcccacgctgacaataaagttgctctgagtt

SEQ ID NO: 134282 - DNA, 757 bp, Homo sapiens
  Payload ID: 6227
  Gene Symbol: FIBP
  Gene Name: fibroblast growth factor (acidic) intracellular binding protein
  ENST ID: ENST00000532229
  CDS Start-End: 19-459
gcggccccgggcgtcgccatgaccagtgagctggacatcttcgtggggaacacgacccttatcgacgaggacgtgtatcgcctctggctcgatggttactcggtgaccgacgcggtggccctgcgggtgcgctcgggaatcctggagcagactggcgccacggcagcggtgctgcagagcgacaccatggaccattaccgcaccttccacatgctcgagcggctgctgcatgcgccgcccaagctactgcaccagctcatcttccagattccgccctcccggcaggcactactcatcgagaggtactatgcctttgatgaggcctttgttcgggaggtgctgggcaagaagctgtccaaaggcaccaagaaagacctggatgacatcagcaccaaaacaggcatcaccctcaagagctgccggagacagggactatgcagccatcgtcttctttgctaacaaccgctttgagacagggaagaaaaaactgcagtatctgagcttcggtgactttgccttctgcgctgagctcatgatccaaaactggacccttggagccgtcggtgaggcccccactgacccagactcacagatggatgacatggacatggacttagacaaggaatttctccaggacttgaaggagctcaaggtgctagtggctgacaaggaccttctggacctgcacaagagcctggtgtgcactgctctccggggaaagctgggcgtcttctctgagatggaagccaacttcaag

SEQ ID NO: 134283 - DNA, 1173 bp, Homo sapiens
  Payload ID: 6227
  Gene Symbol: FIBP
  Gene Name: fibroblast growth factor (acidic) intracellular binding protein
  ENST ID: ENST00000533045
  CDS Start-End: 97-1143
cggaatctcggcgctcccggaagtggcctgaaggcggcgcgccagtcccgagcagtgctcgctcctgctcggggcgctgcggccccgggcgtcgccatgaccagtgagctggacatcttcgtggggaacacgacccttatcgacgaggacgtgtatcgcctctggctcgatgtgaccgacgcggtggccctgcgggtgcgctcgggaatcctggagcagactggcgccacggcagcggtgctgcagagcgacaccatggaccattaccgcaccttccacatgctcgagcggctgctgcatgcgccgcccaagctactgcaccagctcatcttccagattccgccctcccggcaggcactactcatcgagaggtactatgcctttgatgaggcctttgttcgggaggtgctgggcaagaagctgtccaaaggcaccaagaaagacctggatgacatcagcaccaaaacaggcatcaccctcaagagctgccggagacagtttgacaactttaaacgggtcttcaaggtggtagaggaaatgcggggctccctggtggacaatattcagcaacacttcctcctctctgaccggttggccagggactatgcagccatcgtcttctttgctaacaaccgctttgagacagggaagaaaaaactgcagtatctgagcttcggtgactttgccttctgcgctgagctcatgatccaaaactggacccttggagccgtcgactcacagatggatgacatggacatggacttagacaaggaatttctccaggacttgaaggagctcaaggtgctagtggctgacaaggaccttctggacctgcacaagagcctggtgtgcactgctctccggggaaagctgggcgtcttctctgagatggaagccaacttcaagaacctgtcccgggggctggtgaacgtggccgccaagctgacccacaataaagattattctcttgggcccgcagtttgtggaaccctgccgctccgaccactggccactcagcgacgtgcggttcttcctgaatcagtattcagcgtctgtccactccctcgatggcttccgacaccaggccctctgggaccgctacatgggcaccctccgcggctgcctcctgcgcctgtatcatgactgaggtgcctcccaacgctccgcccacgc

SEQ ID NO: 134284 - DNA, 1469 bp, Homo sapiens
  Payload ID: 6228
  Gene Symbol: FGF1
  Gene Name: fibroblast growth factor 1 (acidic)
  Uniprot ID: P05230
  ENST ID: ENST00000337706
  CDS Start-End: 464-931
ggctctgtgttcctgggcctgctgctggctgtccagagtaggggttgcttagagctgtgtgcatccctgcgggtggtgtgggagtgggcggttgtctaaaggcaggtcccctctactgataaacaaggaccggagatagacctagaggctgacattcttggctcccccagcctacaccccccccacctcgatttcccacagagccctagggacgggtagccagctctgtggcatggtatctggaggcaggccagcaacctgatgtgcatgccacggcccgtccctctccccactcagagctgcagtagcctggaggttcagagagccgggctactctgagaagaagacaccaagtggattctgcttcccctgggacagcactgagcgagtgtggagagaggtacagccctcggcctacaagctctttagtcttgaaagcgccacaagcagcagctgctgagccatggctgaaggggaaatcaccaccttcacagccctgaccgagaagtttaatctgcctccagggaattacaagaagcccaaactcctctactgtagcaacgggggccacttcctgaggatccttccggatggcacagtggatgggacaagggacaggagcgaccagcacattcagctgcagctcagtgcggaaagcgtgggggaggtgtatataaagagtaccgagactggccagtacttggccatggacaccgacgggcttttatacggctcacagacaccaaatgaggaatgtttgttcctggaaaggctggaggagaaccattacaacacctatatatccaagaagcatgcagagaagaattggtttgttggcctcaagaagaatgggagctgcaaacgcggtcctcggactcactatggccagaaagcaatcttgtttctccccctgccagtctcttctgattaaagagatctgttctgggtgttgaccactccagagaagtttcgaggggtcctcacctggttgacccaaaaatgttcccttgaccattggctgcgctaacccccagcccacagagcctgaatttgtaagcaacttgcttctaaatgcccagttcacttctttgcagagccttttacccctgcacagtttagaacagagggaccaaattgcttctaggagtcaactggctggccagtctgggtctgggtttggatctccaattgcctcttgcaggctgagtccctccatgcaaaagtggggctaaatgaagtgtgttaaggggtcggctaagtgggacattagtaactgcacactatttccctctactgagtaaaccctatctgtgattcccccaaacatctggcatggctcccttttgtccttcctgtgccctgcaaatattagcaaagaagcttcatgccaggttaggaaggcagcattccatgaccagaaacagggacaaagaaatccccccttcagaacagaggcatttaaaatggaa

SEQ ID NO: 134285 - DNA, 3660 bp, Homo sapiens
  Payload ID: 6228
  Gene Symbol: FGF1
  Gene Name: fibroblast growth factor 1 (acidic)
  Uniprot ID: P05230
  ENST ID: ENST00000359370
  CDS Start-End: 81-548
gaaaaaatactgttggcagcagcacaatgtttgggctaagacctggtcttgaaagcgccacaagcagcagctgctgagccatggctgaaggggaaatcaccaccttcacagccctgaccgagaagtttaatctgcctccagggaattacaagaagcccaaactcctctactgtagcaacgggggccacttcctgaggatccttccggatggcacagtggatgggacaagggacaggagcgaccagcacattcagctgcagctcagtgcggaaagcgtgggggaggtgtatataaagagtaccgagactggccagtacttggccatggacaccgacgggcttttatacggctcacagacaccaaatgaggaatgtttgttcctggaaaggctggaggagaaccattacaacacctatatatccaagaagcatgcagagaagaattggtttgttggcctcaagaagaatgggagctgcaaacgcggtcctcggactcactatggccagaaagcaatcttgtttctccccctgccagtctcttctgattaaagagatctgttctgggtgttgaccactccagagaagtttcgaggggtcctcacctggttgacccaaaaatgttcccttgaccattggctgcgctaacccccagcccacagagcctgaatttgtaagcaacttgcttctaaatgcccagttcacttctttgcagagccttttacccctgcacagtttagaacagagggaccaaattgcttctaggagtcaactggctggccagtctgggtctgggtttggatctccaattgcctcttgcaggctgagtccctccatgcaaaagtggggctaaatgaagtgtgttaaggggtcggctaagtgggacattagtaactgcacactatttccctctactgagtaaaccctatctgtgattcccccaaacatctggcatggctcccttttgtccttcctgtgccctgcaaatattagcaaagaagcttcatgccaggttaggaaggcagcattccatgaccagaaacagggacaaagaaatccccccttcagaacagaggcatttaaaatggaaaagagagattggattttggtgggtaacttagaaggatggcatctccatgtagaataaatgaagaaagggaggcccagccgcaggaaggcagaataaatccttgggagtcattaccacgccttgaccttcccaaggttactcagcagcagagagccctgggtgacttcaggtggagagcactagaagtggtttcctgataacaagcaaggatatcagagctgggaaattcatgtggatctggggactgagtgtgggagtgcagagaaagaaagggaaactggctgaggggataccataaaaagaggatgatttcagaaggagaaggaaaaagaaagtaatgccacacattgtgcttggcccctggtaagcagaggctttggggtcctagcccagtgcttctccaacactgaagtgcttgcagatcatctggggacctggtttgaatggagattctgattcagtgggttgggggcagagtttctgcagttccatcaggtcccccccaggtgcaggtgctgacaatactgctgccttacccgccatacattaaggagcagggtcctggtcctaaagagttattcaaatgaaggtggttcgacgccccgaacctcacctgacctcaactaacccttaaaaatgcacacctcatgagtctacctgagcattcaggcagcactgacaatagttatgcctgtactaaggagcatgattttaagaggctttggcccaatgcctataaaatgcccatttcgaagatatacaaaaacatacttcaaaaatgttaaacccttaccaacagcttttcccaggagaccatttgtattaccattacttgtataaatacacttcctgcttaaacttgacccaggtggctagcaaattagaaacaccattcatctctaacatatgatactgatgccatgtaaaggcctttaataagtcattgaaatttactgtgagactgtatgttttaattgcatttaaaaatatatagcttgaaagcagttaaactgattagtattcaggcactgagaatgatagtaataggatacaatgtataagctactcacttatctgatacttatttacctataaaatgagatttttgttttccactgtgctattacaaattttcttttgaaagtaggaactcttaagcaatggtaattgtgaataaaaattgatgagagtgttagctcctgtttcatatgaaattgaagtaattgttaactaaaaacaattccttagtaactgaactgtcatatttagaatggaaggaaaatgacagtttgtgaaagttcaaagcaatagtgcaattgaagaattgacctaagtaagctgacattatggttaataatagtattttagatttgtgcagcaaaataatttcataacttttttgtttttgttacttggataagatcaatctgttttattttagtaaatctttgcaggcaagttagagaaaatgcagtgtggcttaacgtctctttagtatgaagatttggccagaaaaagatacccagagaggaaatctaagataattataatggtccatactttttattgtatgaatcaaactcaagcataacattggccaaggaaaattaaataccattgctaacttgtgaaatggaagtctgtgatttcggagatgcaaagcattgtagtaaaaacaccaatgtgacctcgaccatctcagcccagatatcattcatatatctgttcaatgactattaaggtgcctactgtgtgctaggcactgtactggatactggggaccttgtctgtctggtttgctgctgtatcttctcccagggcattatatttatgatgaaagatgctgtggattcaattctttcagtcaagaataaacacagactttgtaggttcctgctgaataaagcaaatcccagaaacccagattttggaagaatcagcaaccccagcataaaataaacccctatcaaaatgtcagaggacatggcaaggtaaacttagcattttcaactttagaaccgggtcagcttcagggggactgctttcaaatcagccaaagagcctgtcagatcttcttagaaggaagaggttggtagttccctgctctgttttgaacatgctctagtttattaacctggggacattcccattgctgtcttaagtaagtctcatagccagctcctgtcacgtgactctcatatggattcattttcgggccagctctgaacaaagcatcatgaacatatgtgcttttggtcgtttgcaatgtgatggtggtggaggtaggtattggtttccttggaaggcatgataagaaagattcacaatggccaacagtgtgtatgaacaaaaaactgattggagcatcagctagtactgaaggtccttgctttgtgtcagaggcaaaggaacccaaggcgccaagtcctcagccttgagtgtactgctgacaactaaactcacaggctgcaaagcagacctctgatgaagatgcctgttatttcacatcactgtctttttgtgtatcatagtctgcaccttacaaatattaataaatgttccaataataggtga

SEQ ID NO: 134286 - DNA, 695 bp, Homo sapiens
  Payload ID: 6228
  Gene Symbol: FGF1
  Gene Name: fibroblast growth factor 1 (acidic)
  Uniprot ID: P05230
  ENST ID: ENST00000360966
  CDS Start-End: 130-312
tctgagaagaagacaccaagtggattctgcttcccctgggacagcactgagcgagtgtggagagaggtacagccctcggcctacaagctctttagtcttgaaagcgccacaagcagcagctgctgagccatggctgaaggggaaatcaccaccttcacagccctgaccgagaagtttaatctgcctccagggaattacaagaagcccaaactcctctactgtagcaacgggggccacttcctgaggatccttccggatggcacagtggatgggacaagggacaggagcgaccagcacacagacaccaaatgaggaatgtttgttcctggaaaggctggaggagaaccattacaacacctatatatccaagaagcatgcagagaagaattggtttgttggcctcaagaagaatgggagctgcaaacgcggtcctcggactcactatggccagaaagcaatcttgtttctccccctgccagtctcttctgattaaagagatctgttctgggtgttgaccactccagagaagtttcgaggggtcctcacctggttgacccaaaaatgttcccttgaccattggctgcgctaacccccagcccacagagcctgaatttgtaagcaacttgcttctaaatgcccagttcacttctttgcagagccttttacccctgcacagtttagaacagagggaccaa

SEQ ID NO: 134287 - DNA, 2582 bp, Homo sapiens
  Payload ID: 6228
  Gene Symbol: FGF1
  Gene Name: fibroblast growth factor 1 (acidic)
  Uniprot ID: P05230
  ENST ID: ENST00000378046
  CDS Start-End: 194-661
gactgcaaaaatatgaatgcaccatgccgccacattatctccattcctccagtgcccgcctgacactggccctgaatcagggctggagggggcaggcatttctcatttactaaagtgctggatgcagcccttgaggttcggcagaagcagaaagctgcgtcttgaaagcgccacaagcagcagctgctgagccatggctgaaggggaaatcaccaccttcacagccctgaccgagaagtttaatctgcctccagggaattacaagaagcccaaactcctctactgtagcaacgggggccacttcctgaggatccttccggatggcacagtggatgggacaagggacaggagcgaccagcacattcagctgcagctcagtgcggaaagcgtgggggaggtgtatataaagagtaccgagactggccagtacttggccatggacaccgacgggcttttatacggctcacagacaccaaatgaggaatgtttgttcctggaaaggctggaggagaaccattacaacacctatatatccaagaagcatgcagagaagaattggtttgttggcctcaagaagaatgggagctgcaaacgcggtcctcggactcactatggccagaaagcaatcttgtttctccccctgccagtctcttctgattaaagagatctgttctgggtgttgaccactccagagaagtttcgaggggtcctcacctggttgacccaaaaatgttcccttgaccattggctgcgctaacccccagcccacagagcctgaatttgtaagcaacttgcttctaaatgcccagttcacttctttgcagagccttttacccctgcacagtttagaacagagggaccaaattgcttctaggagtcaactggctggccagtctgggtctgggtttggatctccaattgcctcttgcaggctgagtccctccatgcaaaagtggggctaaatgaagtgtgttaaggggtcggctaagtgggacattagtaactgcacactatttccctctactgagtaaaccctatctgtgattcccccaaacatctggcatggctcccttttgtccttcctgtgccctgcaaatattagcaaagaagcttcatgccaggttaggaaggcagcattccatgaccagaaacagggacaaagaaatccccccttcagaacagaggcatttaaaatggaaaagagagattggattttggtgggtaacttagaaggatggcatctccatgtagaataaatgaagaaagggaggcccagccgcaggaaggcagaataaatccttgggagtcattaccacgccttgaccttcccaaggttactcagcagcagagagccctgggtgacttcaggtggagagcactagaagtggtttcctgataacaagcaaggatatcagagctgggaaattcatgtggatctggggactgagtgtgggagtgcagagaaagaaagggaaactggctgaggggataccataaaaagaggatgatttcagaaggagaaggaaaaagaaagtaatgccacacattgtgcttggcccctggtaagcagaggctttggggtcctagcccagtgcttctccaacactgaagtgcttgcagatcatctggggacctggtttgaatggagattctgattcagtgggttgggggcagagtttctgcagttccatcaggtcccccccaggtgcaggtgctgacaatactgctgccttacccgccatacattaaggagcagggtcctggtcctaaagagttattcaaatgaaggtggttcgacgccccgaacctcacctgacctcaactaacccttaaaaatgcacacctcatgagtctacctgagcattcaggcagcactgacaatagttatgcctgtactaaggagcatgattttaagaggctttggcccaatgcctataaaatgcccatttcgaagatatacaaaaacatacttcaaaaatgttaaacccttaccaacagcttttcccaggagaccatttgtattaccattacttgtataaatacacttcctgcttaaacttgacccaggtggctagcaaattagaaacaccattcatctctaacatatgatactgatgccatgtaaaggcctttaataagtcattgaaatttactgtgagactgtatgttttaattgcatttaaaaatatatagcttgaaagcagttaaactgattagtattcaggcactgagaatgatagtaataggatacaatgtataagctactcacttatctgatacttatttacctataaaatgagatttttgttttccactgtgctattacaaattttcttttgaaagtaggaactcttaagcaatggtaattgtgaataaaaattgatgagagtgttagctcctgtttcatatgaaattgaagtaattgttaactaaaaacaattccttagtaactgaactgtcatatttagaatggaaggaaaatgacagtttgtgaaagttcaaagcaatagtgcaattgaagaattgacctaagtaagctgacattatggttaataatagtattttagatttgtgcagcaaaa

SEQ ID NO: 134288 - DNA, 298 bp, Homo sapiens
  Payload ID: 6228
  Gene Symbol: FGF1
  Gene Name: fibroblast growth factor 1 (acidic)
  ENST ID: ENST00000394496
  CDS Start-End: 124-298
agactcttgggggattccttagtgagtgagttcactgctcaaagaagggctttgccacttctgcagggaagccagccacgggccagcagtcttgaaagcgccacaagcagcagctgctgagccatggctgaaggggaaatcaccaccttcacagccctgaccgagaagtttaatctgcctccagggaattacaagaagcccaaactcctctactgtagcaacgggggccacttcctgaggatccttccggatggcacagtggatgggacaagggacaggagcgaccagcacattcagc

SEQ ID NO: 134289 - DNA, 759 bp, Homo sapiens
  Payload ID: 6228
  Gene Symbol: FGF1
  Gene Name: fibroblast growth factor 1 (acidic)
  ENST ID: ENST00000407758
  CDS Start-End: 238-519
gtgggcataccagtgtcagctgcacttgtaggggcccaagtgcctcatgacccactcggcagccttcctctccaggatccccaaggctaggaggccaacctactaacagcagcctgcctgcagctgtcctggtagaacagtgtggacattgcagaagctgtcactgccccagaaagaaagcaccccagagccaaggcaaagagtcttgaaagcgccacaagcagcagctgctgagccatggctgaaggggaaatcaccaccttcacagccctgaccgagaagtttaatctgcctccagggaattacaagaagcccaaactcctctactgtagcaacgggggccacttcctgaggatccttccggatggcacagtggatgggacaagggacaggagcgaccagcacactgcagctcagtgcggaaagcgtgggggaggtgtatataaagagtaccgagactggccagtacttggccatggacaccgacgggcttttatacggctcacagacaccaaatgaggaatgtttgttcctggaaaggctggaggagaaccattacaacacctatatatccaagaagcatgcagagaagaattggtttgttggcctcaagaagaatgggagctgcaaacgcggtcctcggactcactatggccagaaagcaatcttgtttctccccctgccagtctcttctgattaaagagatctgttctgggtgttgaccactccagagaagtttcgaggggtcctcacctggtt

SEQ ID NO: 134290 - DNA, 683 bp, Homo sapiens
  Payload ID: 6228
  Gene Symbol: FGF1
  Gene Name: fibroblast growth factor 1 (acidic)
  Uniprot ID: P05230
  ENST ID: ENST00000419524
  CDS Start-End: 169-636
tacagtgcttgtccttagcctttctgtgggcataccagtgtcagctgcacttgtaggggcccaagtgcctcatgacccactcggcagccttcctctccaggatccccaaggctaggaggccaacctactaacagtcttgaaagcgccacaagcagcagctgctgagccatggctgaaggggaaatcaccaccttcacagccctgaccgagaagtttaatctgcctccagggaattacaagaagcccaaactcctctactgtagcaacgggggccacttcctgaggatccttccggatggcacagtggatgggacaagggacaggagcgaccagcacattcagctgcagctcagtgcggaaagcgtgggggaggtgtatataaagagtaccgagactggccagtacttggccatggacaccgacgggcttttatacggctcacagacaccaaatgaggaatgtttgttcctggaaaggctggaggagaaccattacaacacctatatatccaagaagcatgcagagaagaattggtttgttggcctcaagaagaatgggagctgcaaacgcggtcctcggactcactatggccagaaagcaatcttgtttctccccctgccagtctcttctgattaaagagatctgttctgggtgttgaccactccagagaagtttcgaggggt

SEQ ID NO: 134291 - DNA, 550 bp, Homo sapiens
  Payload ID: 6228
  Gene Symbol: FGF1
  Gene Name: fibroblast growth factor 1 (acidic)
  ENST ID: ENST00000411960
  CDS Start-End: 428-550
agagagccgggctactctgagaagaagacaccaagtggattctgcttcccctgggacagcactgagcgagtgtggagagaggtacagccctcggcctacaagctctttagagcacaattaaagaagatcaggtctggctgttgctcggcttcctttctcgttgtgactatgagagggaacacagagttgtgtggactcagtcatggcaattaccctcttctttgtcatcacttcttcctgaaatacctgagagaagacaaagtgagtggacataggaagaagatggccatctactagccaaggagagaggcttggaacaagtccttctttcatagcctcagaaggaaccaaccctgctgacaccttgatcttggacttccagccttcaacacttcttgaaagcgccacaagcagcagctgctgagccatggctgaaggggaaatcaccaccttcacagccctgaccgagaagtttaatctgcctccagggaattacaagaagcccaaactcctctactgtagcaacgggggccacttcctgaggatcctt

SEQ ID NO: 134292 - DNA, 777 bp, Homo sapiens
  Payload ID: 6228
  Gene Symbol: FGF1
  Gene Name: fibroblast growth factor 1 (acidic)
  Uniprot ID: P05230
  ENST ID: ENST00000441680
  CDS Start-End: 263-730
tacagtgcttgtccttagcctttctgtgggcataccagtgtcagctgcacttgtaggggcccaagtgcctcatgacccactcggcagccttcctctccaggatccccaaggctaggaggccaacctactaacagcagcctgcctgcagctgtcctggtagaacagtgtggacattgcagaagctgtcactgccccagaaagaaagcaccccagagccaaggcaaagagtcttgaaagcgccacaagcagcagctgctgagccatggctgaaggggaaatcaccaccttcacagccctgaccgagaagtttaatctgcctccagggaattacaagaagcccaaactcctctactgtagcaacgggggccacttcctgaggatccttccggatggcacagtggatgggacaagggacaggagcgaccagcacattcagctgcagctcagtgcggaaagcgtgggggaggtgtatataaagagtaccgagactggccagtacttggccatggacaccgacgggcttttatacggctcacagacaccaaatgaggaatgtttgttcctggaaaggctggaggagaaccattacaacacctatatatccaagaagcatgcagagaagaattggtttgttggcctcaagaagaatgggagctgcaaacgcggtcctcggactcactatggccagaaagcaatcttgtttctccccctgccagtctcttctgattaaagagatctgttctgggtgttgaccactccagagaagtttcgaggggt

SEQ ID NO: 134293 - DNA, 3805 bp, Homo sapiens
  Payload ID: 6228
  Gene Symbol: FGF1
  Gene Name: fibroblast growth factor 1 (acidic)
  Uniprot ID: P05230
  ENST ID: ENST00000612258
  CDS Start-End: 227-694
agaagtccattcggctcacacatttgccccaagacaaaccacgttaaaataacacccaggagctgcagtagcctggaggttcagagagccgggctactctgagaagaagacaccaagtggattctgcttcccctgggacagcactgagcgagtgtggagagaggtacagccctcggcctacaagctctttagtcttgaaagcgccacaagcagcagctgctgagccatggctgaaggggaaatcaccaccttcacagccctgaccgagaagtttaatctgcctccagggaattacaagaagcccaaactcctctactgtagcaacgggggccacttcctgaggatccttccggatggcacagtggatgggacaagggacaggagcgaccagcacattcagctgcagctcagtgcggaaagcgtgggggaggtgtatataaagagtaccgagactggccagtacttggccatggacaccgacgggcttttatacggctcacagacaccaaatgaggaatgtttgttcctggaaaggctggaggagaaccattacaacacctatatatccaagaagcatgcagagaagaattggtttgttggcctcaagaagaatgggagctgcaaacgcggtcctcggactcactatggccagaaagcaatcttgtttctccccctgccagtctcttctgattaaagagatctgttctgggtgttgaccactccagagaagtttcgaggggtcctcacctggttgacccaaaaatgttcccttgaccattggctgcgctaacccccagcccacagagcctgaatttgtaagcaacttgcttctaaatgcccagttcacttctttgcagagccttttacccctgcacagtttagaacagagggaccaaattgcttctaggagtcaactggctggccagtctgggtctgggtttggatctccaattgcctcttgcaggctgagtccctccatgcaaaagtggggctaaatgaagtgtgttaaggggtcggctaagtgggacattagtaactgcacactatttccctctactgagtaaaccctatctgtgattcccccaaacatctggcatggctcccttttgtccttcctgtgccctgcaaatattagcaaagaagcttcatgccaggttaggaaggcagcattccatgaccagaaacagggacaaagaaatccccccttcagaacagaggcatttaaaatggaaaagagagattggattttggtgggtaacttagaaggatggcatctccatgtagaataaatgaagaaagggaggcccagccgcaggaaggcagaataaatccttgggagtcattaccacgccttgaccttcccaaggttactcagcagcagagagccctgggtgacttcaggtggagagcactagaagtggtttcctgataacaagcaaggatatcagagctgggaaattcatgtggatctggggactgagtgtgggagtgcagagaaagaaagggaaactggctgaggggataccataaaaagaggatgatttcagaaggagaaggaaaaagaaagtaatgccacacattgtgcttggcccctggtaagcagaggctttggggtcctagcccagtgcttctccaacactgaagtgcttgcagatcatctggggacctggtttgaatggagattctgattcagtgggttgggggcagagtttctgcagttccatcaggtcccccccaggtgcaggtgctgacaatactgctgccttacccgccatacattaaggagcagggtcctggtcctaaagagttattcaaatgaaggtggttcgacgccccgaacctcacctgacctcaactaacccttaaaaatgcacacctcatgagtctacctgagcattcaggcagcactgacaatagttatgcctgtactaaggagcatgattttaagaggctttggcccaatgcctataaaatgcccatttcgaagatatacaaaaacatacttcaaaaatgttaaacccttaccaacagcttttcccaggagaccatttgtattaccattacttgtataaatacacttcctgcttaaacttgacccaggtggctagcaaattagaaacaccattcatctctaacatatgatactgatgccatgtaaaggcctttaataagtcattgaaatttactgtgagactgtatgttttaattgcatttaaaaatatatagcttgaaagcagttaaactgattagtattcaggcactgagaatgatagtaataggatacaatgtataagctactcacttatctgatacttatttacctataaaatgagatttttgttttccactgtgctattacaaattttcttttgaaagtaggaactcttaagcaatggtaattgtgaataaaaattgatgagagtgttagctcctgtttcatatgaaattgaagtaattgttaactaaaaacaattccttagtaactgaactgtcatatttagaatggaaggaaaatgacagtttgtgaaagttcaaagcaatagtgcaattgaagaattgacctaagtaagctgacattatggttaataatagtattttagatttgtgcagcaaaataatttcataacttttttgtttttgttacttggataagatcaatctgttttattttagtaaatctttgcaggcaagttagagaaaatgcagtgtggcttaacgtctctttagtatgaagatttggccagaaaaagatacccagagaggaaatctaagataattataatggtccatactttttattgtatgaatcaaactcaagcataacattggccaaggaaaattaaataccattgctaacttgtgaaatggaagtctgtgatttcggagatgcaaagcattgtagtaaaaacaccaatgtgacctcgaccatctcagcccagatatcattcatatatctgttcaatgactattaaggtgcctactgtgtgctaggcactgtactggatactggggaccttgtctgtctggtttgctgctgtatcttctcccagggcattatatttatgatgaaagatgctgtggattcaattctttcagtcaagaataaacacagactttgtaggttcctgctgaataaagcaaatcccagaaacccagattttggaagaatcagcaaccccagcataaaataaacccctatcaaaatgtcagaggacatggcaaggtaaacttagcattttcaactttagaaccgggtcagcttcagggggactgctttcaaatcagccaaagagcctgtcagatcttcttagaaggaagaggttggtagttccctgctctgttttgaacatgctctagtttattaacctggggacattcccattgctgtcttaagtaagtctcatagccagctcctgtcacgtgactctcatatggattcattttcgggccagctctgaacaaagcatcatgaacatatgtgcttttggtcgtttgcaatgtgatggtggtggaggtaggtattggtttccttggaaggcatgataagaaagattcacaatggccaacagtgtgtatgaacaaaaaactgattggagcatcagctagtactgaaggtccttgctttgtgtcagaggcaaaggaacccaaggcgccaagtcctcagccttgagtgtactgctgacaactaaactcacaggctgcaaagcagacctctgatgaagatgcctgttatttcacatcactgtctttttgtgtatcatagtctgcaccttacaaatattaataaatgttccaataataggtg

SEQ ID NO: 134294 - DNA, 4062 bp, Homo sapiens
  Payload ID: 6228
  Gene Symbol: FGF1
  Gene Name: fibroblast growth factor 1 (acidic)
  Uniprot ID: P05230
  ENST ID: ENST00000621536
  CDS Start-End: 484-951
acatgagagggggagaaataaatatacagtgcttgtccttagcctttctgtgggcataccagtgtcagctgcacttgtaggggcccaagtgcctcatgacccactcggcagccttcctctccaggatccccaaggctaggaggccaacctactaacaggtgggtgggtatggtgtgtggtttcactcagttcttctcatggggtttctctgagctccattcataccagaaagggagcaggagagagaggacaagtggatccaacagccttcgctccaggggaatcagggcatcgcctccttttctgggaggacactcccttctgatggtgaatgggaactcccttcctcctgcagcagcctgcctgcagctgtcctggtagaacagtgtggacattgcagaagctgtcactgccccagaaagaaagcaccccagagccaaggcaaagagtcttgaaagcgccacaagcagcagctgctgagccatggctgaaggggaaatcaccaccttcacagccctgaccgagaagtttaatctgcctccagggaattacaagaagcccaaactcctctactgtagcaacgggggccacttcctgaggatccttccggatggcacagtggatgggacaagggacaggagcgaccagcacattcagctgcagctcagtgcggaaagcgtgggggaggtgtatataaagagtaccgagactggccagtacttggccatggacaccgacgggcttttatacggctcacagacaccaaatgaggaatgtttgttcctggaaaggctggaggagaaccattacaacacctatatatccaagaagcatgcagagaagaattggtttgttggcctcaagaagaatgggagctgcaaacgcggtcctcggactcactatggccagaaagcaatcttgtttctccccctgccagtctcttctgattaaagagatctgttctgggtgttgaccactccagagaagtttcgaggggtcctcacctggttgacccaaaaatgttcccttgaccattggctgcgctaacccccagcccacagagcctgaatttgtaagcaacttgcttctaaatgcccagttcacttctttgcagagccttttacccctgcacagtttagaacagagggaccaaattgcttctaggagtcaactggctggccagtctgggtctgggtttggatctccaattgcctcttgcaggctgagtccctccatgcaaaagtggggctaaatgaagtgtgttaaggggtcggctaagtgggacattagtaactgcacactatttccctctactgagtaaaccctatctgtgattcccccaaacatctggcatggctcccttttgtccttcctgtgccctgcaaatattagcaaagaagcttcatgccaggttaggaaggcagcattccatgaccagaaacagggacaaagaaatccccccttcagaacagaggcatttaaaatggaaaagagagattggattttggtgggtaacttagaaggatggcatctccatgtagaataaatgaagaaagggaggcccagccgcaggaaggcagaataaatccttgggagtcattaccacgccttgaccttcccaaggttactcagcagcagagagccctgggtgacttcaggtggagagcactagaagtggtttcctgataacaagcaaggatatcagagctgggaaattcatgtggatctggggactgagtgtgggagtgcagagaaagaaagggaaactggctgaggggataccataaaaagaggatgatttcagaaggagaaggaaaaagaaagtaatgccacacattgtgcttggcccctggtaagcagaggctttggggtcctagcccagtgcttctccaacactgaagtgcttgcagatcatctggggacctggtttgaatggagattctgattcagtgggttgggggcagagtttctgcagttccatcaggtcccccccaggtgcaggtgctgacaatactgctgccttacccgccatacattaaggagcagggtcctggtcctaaagagttattcaaatgaaggtggttcgacgccccgaacctcacctgacctcaactaacccttaaaaatgcacacctcatgagtctacctgagcattcaggcagcactgacaatagttatgcctgtactaaggagcatgattttaagaggctttggcccaatgcctataaaatgcccatttcgaagatatacaaaaacatacttcaaaaatgttaaacccttaccaacagcttttcccaggagaccatttgtattaccattacttgtataaatacacttcctgcttaaacttgacccaggtggctagcaaattagaaacaccattcatctctaacatatgatactgatgccatgtaaaggcctttaataagtcattgaaatttactgtgagactgtatgttttaattgcatttaaaaatatatagcttgaaagcagttaaactgattagtattcaggcactgagaatgatagtaataggatacaatgtataagctactcacttatctgatacttatttacctataaaatgagatttttgttttccactgtgctattacaaattttcttttgaaagtaggaactcttaagcaatggtaattgtgaataaaaattgatgagagtgttagctcctgtttcatatgaaattgaagtaattgttaactaaaaacaattccttagtaactgaactgtcatatttagaatggaaggaaaatgacagtttgtgaaagttcaaagcaatagtgcaattgaagaattgacctaagtaagctgacattatggttaataatagtattttagatttgtgcagcaaaataatttcataacttttttgtttttgttacttggataagatcaatctgttttattttagtaaatctttgcaggcaagttagagaaaatgcagtgtggcttaacgtctctttagtatgaagatttggccagaaaaagatacccagagaggaaatctaagataattataatggtccatactttttattgtatgaatcaaactcaagcataacattggccaaggaaaattaaataccattgctaacttgtgaaatggaagtctgtgatttcggagatgcaaagcattgtagtaaaaacaccaatgtgacctcgaccatctcagcccagatatcattcatatatctgttcaatgactattaaggtgcctactgtgtgctaggcactgtactggatactggggaccttgtctgtctggtttgctgctgtatcttctcccagggcattatatttatgatgaaagatgctgtggattcaattctttcagtcaagaataaacacagactttgtaggttcctgctgaataaagcaaatcccagaaacccagattttggaagaatcagcaaccccagcataaaataaacccctatcaaaatgtcagaggacatggcaaggtaaacttagcattttcaactttagaaccgggtcagcttcagggggactgctttcaaatcagccaaagagcctgtcagatcttcttagaaggaagaggttggtagttccctgctctgttttgaacatgctctagtttattaacctggggacattcccattgctgtcttaagtaagtctcatagccagctcctgtcacgtgactctcatatggattcattttcgggccagctctgaacaaagcatcatgaacatatgtgcttttggtcgtttgcaatgtgatggtggtggaggtaggtattggtttccttggaaggcatgataagaaagattcacaatggccaacagtgtgtatgaacaaaaaactgattggagcatcagctagtactgaaggtccttgctttgtgtcagaggcaaaggaacccaaggcgccaagtcctcagccttgagtgtactgctgacaactaaactcacaggctgcaaagcagacctctgatgaagatgcctgttatttcacatcactgtctttttgtgtatcatagtctgcaccttacaaatattaataaatgttccaataataggtg

SEQ ID NO: 134295 - DNA, 3818 bp, Homo sapiens
  Payload ID: 6228
  Gene Symbol: FGF1
  Gene Name: fibroblast growth factor 1 (acidic)
  Uniprot ID: P05230
  ENST ID: ENST00000619447
  CDS Start-End: 240-707
agacatgtaaaaatagtacttctagtttagagactgcaaaaatatgaatgcaccatgccgccacattatctccattcctccagtgcccgcctgacactggccctgaatcagggctggagggggcaggcatttctcatttactaaagtgctggatgcagcccttgaggttcggcagaagcagaaagctgcggtgagtctggctgtgtcttgaaagcgccacaagcagcagctgctgagccatggctgaaggggaaatcaccaccttcacagccctgaccgagaagtttaatctgcctccagggaattacaagaagcccaaactcctctactgtagcaacgggggccacttcctgaggatccttccggatggcacagtggatgggacaagggacaggagcgaccagcacattcagctgcagctcagtgcggaaagcgtgggggaggtgtatataaagagtaccgagactggccagtacttggccatggacaccgacgggcttttatacggctcacagacaccaaatgaggaatgtttgttcctggaaaggctggaggagaaccattacaacacctatatatccaagaagcatgcagagaagaattggtttgttggcctcaagaagaatgggagctgcaaacgcggtcctcggactcactatggccagaaagcaatcttgtttctccccctgccagtctcttctgattaaagagatctgttctgggtgttgaccactccagagaagtttcgaggggtcctcacctggttgacccaaaaatgttcccttgaccattggctgcgctaacccccagcccacagagcctgaatttgtaagcaacttgcttctaaatgcccagttcacttctttgcagagccttttacccctgcacagtttagaacagagggaccaaattgcttctaggagtcaactggctggccagtctgggtctgggtttggatctccaattgcctcttgcaggctgagtccctccatgcaaaagtggggctaaatgaagtgtgttaaggggtcggctaagtgggacattagtaactgcacactatttccctctactgagtaaaccctatctgtgattcccccaaacatctggcatggctcccttttgtccttcctgtgccctgcaaatattagcaaagaagcttcatgccaggttaggaaggcagcattccatgaccagaaacagggacaaagaaatccccccttcagaacagaggcatttaaaatggaaaagagagattggattttggtgggtaacttagaaggatggcatctccatgtagaataaatgaagaaagggaggcccagccgcaggaaggcagaataaatccttgggagtcattaccacgccttgaccttcccaaggttactcagcagcagagagccctgggtgacttcaggtggagagcactagaagtggtttcctgataacaagcaaggatatcagagctgggaaattcatgtggatctggggactgagtgtgggagtgcagagaaagaaagggaaactggctgaggggataccataaaaagaggatgatttcagaaggagaaggaaaaagaaagtaatgccacacattgtgcttggcccctggtaagcagaggctttggggtcctagcccagtgcttctccaacactgaagtgcttgcagatcatctggggacctggtttgaatggagattctgattcagtgggttgggggcagagtttctgcagttccatcaggtcccccccaggtgcaggtgctgacaatactgctgccttacccgccatacattaaggagcagggtcctggtcctaaagagttattcaaatgaaggtggttcgacgccccgaacctcacctgacctcaactaacccttaaaaatgcacacctcatgagtctacctgagcattcaggcagcactgacaatagttatgcctgtactaaggagcatgattttaagaggctttggcccaatgcctataaaatgcccatttcgaagatatacaaaaacatacttcaaaaatgttaaacccttaccaacagcttttcccaggagaccatttgtattaccattacttgtataaatacacttcctgcttaaacttgacccaggtggctagcaaattagaaacaccattcatctctaacatatgatactgatgccatgtaaaggcctttaataagtcattgaaatttactgtgagactgtatgttttaattgcatttaaaaatatatagcttgaaagcagttaaactgattagtattcaggcactgagaatgatagtaataggatacaatgtataagctactcacttatctgatacttatttacctataaaatgagatttttgttttccactgtgctattacaaattttcttttgaaagtaggaactcttaagcaatggtaattgtgaataaaaattgatgagagtgttagctcctgtttcatatgaaattgaagtaattgttaactaaaaacaattccttagtaactgaactgtcatatttagaatggaaggaaaatgacagtttgtgaaagttcaaagcaatagtgcaattgaagaattgacctaagtaagctgacattatggttaataatagtattttagatttgtgcagcaaaataatttcataacttttttgtttttgttacttggataagatcaatctgttttattttagtaaatctttgcaggcaagttagagaaaatgcagtgtggcttaacgtctctttagtatgaagatttggccagaaaaagatacccagagaggaaatctaagataattataatggtccatactttttattgtatgaatcaaactcaagcataacattggccaaggaaaattaaataccattgctaacttgtgaaatggaagtctgtgatttcggagatgcaaagcattgtagtaaaaacaccaatgtgacctcgaccatctcagcccagatatcattcatatatctgttcaatgactattaaggtgcctactgtgtgctaggcactgtactggatactggggaccttgtctgtctggtttgctgctgtatcttctcccagggcattatatttatgatgaaagatgctgtggattcaattctttcagtcaagaataaacacagactttgtaggttcctgctgaataaagcaaatcccagaaacccagattttggaagaatcagcaaccccagcataaaataaacccctatcaaaatgtcagaggacatggcaaggtaaacttagcattttcaactttagaaccgggtcagcttcagggggactgctttcaaatcagccaaagagcctgtcagatcttcttagaaggaagaggttggtagttccctgctctgttttgaacatgctctagtttattaacctggggacattcccattgctgtcttaagtaagtctcatagccagctcctgtcacgtgactctcatatggattcattttcgggccagctctgaacaaagcatcatgaacatatgtgcttttggtcgtttgcaatgtgatggtggtggaggtaggtattggtttccttggaaggcatgataagaaagattcacaatggccaacagtgtgtatgaacaaaaaactgattggagcatcagctagtactgaaggtccttgctttgtgtcagaggcaaaggaacccaaggcgccaagtcctcagccttgagtgtactgctgacaactaaactcacaggctgcaaagcagacctctgatgaagatgcctgttatttcacatcactgtctttttgtgtatcatagtctgcaccttacaaatattaataaatgttccaataataggtg

SEQ ID NO: 134296 - DNA, 3802 bp, Homo sapiens
  Payload ID: 6228
  Gene Symbol: FGF1
  Gene Name: fibroblast growth factor 1 (acidic)
  Uniprot ID: P05230
  ENST ID: ENST00000610990
  CDS Start-End: 224-691
tcaaaatgacctaagatattctgagtcagagaaaacaaaaggaacagcttaaagagagcaccaactcagtgaggcaaccaggcagtggggccggctggccagactcttgggggattccttagtgagtgagttcactgctcaaagaagggctttgccacttctgcagggaagccagccacgggccagcagtcttgaaagcgccacaagcagcagctgctgagccatggctgaaggggaaatcaccaccttcacagccctgaccgagaagtttaatctgcctccagggaattacaagaagcccaaactcctctactgtagcaacgggggccacttcctgaggatccttccggatggcacagtggatgggacaagggacaggagcgaccagcacattcagctgcagctcagtgcggaaagcgtgggggaggtgtatataaagagtaccgagactggccagtacttggccatggacaccgacgggcttttatacggctcacagacaccaaatgaggaatgtttgttcctggaaaggctggaggagaaccattacaacacctatatatccaagaagcatgcagagaagaattggtttgttggcctcaagaagaatgggagctgcaaacgcggtcctcggactcactatggccagaaagcaatcttgtttctccccctgccagtctcttctgattaaagagatctgttctgggtgttgaccactccagagaagtttcgaggggtcctcacctggttgacccaaaaatgttcccttgaccattggctgcgctaacccccagcccacagagcctgaatttgtaagcaacttgcttctaaatgcccagttcacttctttgcagagccttttacccctgcacagtttagaacagagggaccaaattgcttctaggagtcaactggctggccagtctgggtctgggtttggatctccaattgcctcttgcaggctgagtccctccatgcaaaagtggggctaaatgaagtgtgttaaggggtcggctaagtgggacattagtaactgcacactatttccctctactgagtaaaccctatctgtgattcccccaaacatctggcatggctcccttttgtccttcctgtgccctgcaaatattagcaaagaagcttcatgccaggttaggaaggcagcattccatgaccagaaacagggacaaagaaatccccccttcagaacagaggcatttaaaatggaaaagagagattggattttggtgggtaacttagaaggatggcatctccatgtagaataaatgaagaaagggaggcccagccgcaggaaggcagaataaatccttgggagtcattaccacgccttgaccttcccaaggttactcagcagcagagagccctgggtgacttcaggtggagagcactagaagtggtttcctgataacaagcaaggatatcagagctgggaaattcatgtggatctggggactgagtgtgggagtgcagagaaagaaagggaaactggctgaggggataccataaaaagaggatgatttcagaaggagaaggaaaaagaaagtaatgccacacattgtgcttggcccctggtaagcagaggctttggggtcctagcccagtgcttctccaacactgaagtgcttgcagatcatctggggacctggtttgaatggagattctgattcagtgggttgggggcagagtttctgcagttccatcaggtcccccccaggtgcaggtgctgacaatactgctgccttacccgccatacattaaggagcagggtcctggtcctaaagagttattcaaatgaaggtggttcgacgccccgaacctcacctgacctcaactaacccttaaaaatgcacacctcatgagtctacctgagcattcaggcagcactgacaatagttatgcctgtactaaggagcatgattttaagaggctttggcccaatgcctataaaatgcccatttcgaagatatacaaaaacatacttcaaaaatgttaaacccttaccaacagcttttcccaggagaccatttgtattaccattacttgtataaatacacttcctgcttaaacttgacccaggtggctagcaaattagaaacaccattcatctctaacatatgatactgatgccatgtaaaggcctttaataagtcattgaaatttactgtgagactgtatgttttaattgcatttaaaaatatatagcttgaaagcagttaaactgattagtattcaggcactgagaatgatagtaataggatacaatgtataagctactcacttatctgatacttatttacctataaaatgagatttttgttttccactgtgctattacaaattttcttttgaaagtaggaactcttaagcaatggtaattgtgaataaaaattgatgagagtgttagctcctgtttcatatgaaattgaagtaattgttaactaaaaacaattccttagtaactgaactgtcatatttagaatggaaggaaaatgacagtttgtgaaagttcaaagcaatagtgcaattgaagaattgacctaagtaagctgacattatggttaataatagtattttagatttgtgcagcaaaataatttcataacttttttgtttttgttacttggataagatcaatctgttttattttagtaaatctttgcaggcaagttagagaaaatgcagtgtggcttaacgtctctttagtatgaagatttggccagaaaaagatacccagagaggaaatctaagataattataatggtccatactttttattgtatgaatcaaactcaagcataacattggccaaggaaaattaaataccattgctaacttgtgaaatggaagtctgtgatttcggagatgcaaagcattgtagtaaaaacaccaatgtgacctcgaccatctcagcccagatatcattcatatatctgttcaatgactattaaggtgcctactgtgtgctaggcactgtactggatactggggaccttgtctgtctggtttgctgctgtatcttctcccagggcattatatttatgatgaaagatgctgtggattcaattctttcagtcaagaataaacacagactttgtaggttcctgctgaataaagcaaatcccagaaacccagattttggaagaatcagcaaccccagcataaaataaacccctatcaaaatgtcagaggacatggcaaggtaaacttagcattttcaactttagaaccgggtcagcttcagggggactgctttcaaatcagccaaagagcctgtcagatcttcttagaaggaagaggttggtagttccctgctctgttttgaacatgctctagtttattaacctggggacattcccattgctgtcttaagtaagtctcatagccagctcctgtcacgtgactctcatatggattcattttcgggccagctctgaacaaagcatcatgaacatatgtgcttttggtcgtttgcaatgtgatggtggtggaggtaggtattggtttccttggaaggcatgataagaaagattcacaatggccaacagtgtgtatgaacaaaaaactgattggagcatcagctagtactgaaggtccttgctttgtgtcagaggcaaaggaacccaaggcgccaagtcctcagccttgagtgtactgctgacaactaaactcacaggctgcaaagcagacctctgatgaagatgcctgttatttcacatcactgtctttttgtgtatcatagtctgcaccttacaaatattaataaatgttccaataataggtg

SEQ ID NO: 134297 - DNA, 2193 bp, Homo sapiens
  Payload ID: 6229
  Gene Symbol: FGF10
  Gene Name: fibroblast growth factor 10
  Uniprot ID: O15520
  ENST ID: ENST00000264664
  CDS Start-End: 116-742
agggagctaaccagcagccaccacctcgagctctctccttgccttgcatcgggtcttacccttccagtatgttccttctgatgagacaatttccagtgccgagagtttcagtacaatgtggaaatggatactgacacattgtgcctcagcctttccccacctgcccggctgctgctgctgctgctttttgttgctgttcttggtgtcttccgtccctgtcacctgccaagcccttggtcaggacatggtgtcaccagaggccaccaactcttcttcctcctccttctcctctccttccagcgcgggaaggcatgtgcggagctacaatcaccttcaaggagatgtccgctggagaaagctattctctttcaccaagtactttctcaagattgagaagaacgggaaggtcagcgggaccaagaaggagaactgcccgtacagcatcctggagataacatcagtagaaatcggagttgttgccgtcaaagccattaacagcaactattacttagccatgaacaagaaggggaaactctatggctcaaaagaatttaacaatgactgtaagctgaaggagaggatagaggaaaatggatacaatacctatgcatcatttaactggcagcataatgggaggcaaatgtatgtggcattgaatggaaaaggagctccaaggagaggacagaaaacacgaaggaaaaacacctctgctcactttcttccaatggtggtacactcatagaggaaggcaacgtttgtggatgcagtagaaccaatggctcttttgccaagaatagtggatattcttcatgaagacagtagattgaaaggcaaagacacgttgcagatgtctgcttgcttaaaagaaagccagcctttgaaggtttttgtattcactgctgacatatgatgttcttttaattagttctgtgtcatgtcttataatcaagatataggcagatcgaatgggatagaagttattcccaagtgaaaaacattgtggctgggttttttgttgttgttgtcaagtttttgtttttaaacctctgagatagaacttaaaggacatagaacaatctgttgaaagaacgatcttcgggaaagttatttatggaatacgaactcatatcaaagacttcattgctcattcaagcctaatgaatcaatgaacagtaatacatgcaagcatttactggaaagcacttgggtcatatcatatgcacaaccaaaggagttctggatgtggtctcatggaataattgaatagaatttaaaaatataaacatgttagtgtgaaactgttctaacaatacaaatagtatggtatgcttgtgcattctgccttcatccctttctatttctttctaagttatttatttaataggatgttaaatatcttttggggttttaaagagtatctcagcagctgtcttctgatttatcttttctttttattcagcacaccacatgcatgttcacgacaaagtgtttttaaaacttggcgaacacttcaaaaataggagttgggattagggaagcagtatgagtgcccgtgtgctatcagttgacttaatttgcacttctgcagtaataaccatcaacaataaatatggcaatgctgtgccatggcttgagtgagagatgtctgctatcatttgaaaacatatattactctcgaggcttcctgtctcaagaaatagaccagaaggccaaattcttctctttcaatacatcagtttgcctccaagaatatactaaaaaaaggaaaattaattgctaaatacatttaaatagcctagcctcattatttactcatgatttcttgccaaatgtcatggcggtaaagaggctgtccacatctctaaaaaccctctgtaaattccacataatgcatctttcccaaaggaactatcaaagaatttggtatgaagcgcaactctcccaggggcttaaactgagcaaatcaaatatatactggtatatgtgtaaccatatacaaaaacctgttctagctgtatgatctagtctttacaaaaccaaataaaacttgttttctgtaaatttaaagagctttacaaagttccataatgtaaccatatcaaaattcattttgttagagcaggtatagaaaagagtacataagagtttaccaatcatcatcacattgtattccactaaataaatacataagcc

SEQ ID NO: 134298 - DNA, 1131 bp, Homo sapiens
  Payload ID: 6229
  Gene Symbol: FGF10
  Gene Name: fibroblast growth factor 10
  ENST ID: ENST00000513107
  CDS Start-End: 934-1131
aattagacagagctagaggcgccggcggaggctgcggccgcaacagccgcggcgaggaagggacctggcagcccccgagctcggtgcaaaggcatcgcgctctctcctcgctcccctgctcccccacccccttctctgcccctttcaccctccctctccctggcgttcccagcagcctagggtttcagatgtcccaccgccggttgaccccctcccccctcttctccacccctgcaaatgaggtttgaccagcagaggcagagcccacctctggcttagaatcactgacatttagactccaggcttcaacctgtttacaagcggactttccaaaggaagggggtgggagatagggccatacaaaacaccagccgccgtcccccaaaacaaaaagtgactttcggcagccttcaaatcggcaggcaccactaaaaacagaaaggaagagagggaagaaaacaacggcgactgggcagctgcctccacttctgacaactccaaagggatatacttgtagaagtggctcgcaggctggggctccgcagagagagaccagaagacctttttggcatctaacatggtgaagaaaggagtaaagaagagaacaaagtaactcctgggggagcgaagagcgctggtgaccaacaccaccaacgccaccaccagctcctgctgctgcggccacccacgtccaccatttaccgggaggctccagaggcgtaggcagcggatccgagaaaggagcgaggggagtcagccggcttttccgaggagttatggatgttggtgcattcacttctggccagatccgcgcccagagggagctaaccagcagccaccacctcgagctctctccttgccttgcatcgggtcttacccttccagtatgttccttctgatgagacaatttccagtgccgagagtttcagtacaatgtggaaatggatactgacacattgtgcctcagcctttccccacctgcccggctgctgctgctgctgctttttgttgctgttcttggtgtcttccgtccctgtcacctgccaagcccttggtcaggacatggtgtcaccagaggccaccaactcttcttcctcctccttctcctctccttccagcgcgggaaggcat

SEQ ID NO: 134299 - DNA, 3063 bp, Homo sapiens
  Payload ID: 6230
  Gene Symbol: FGF11
  Gene Name: fibroblast growth factor 11
  Uniprot ID: Q92914
  ENST ID: ENST00000293829
  CDS Start-End: 595-1272
ctgagacatattttggggggatttcagtgaaaaaagtgggggatcccctccatttagagtgtagcaaaggaaaaaacaccaaggttgggttccttcctgacattggcagtgccccagtaggggtgggatgagcgaatattcccaaagctaaagtcccacaccctgtagattacaagagtggatttggcaggagtgtgccccaaaatacagtggaaaggtgcctgaagatatttaaaccacgtcttggaaatttagtgggtcttggctttgggataggtgaagtgaggacagacactggagaggagggaaaggggacgttttcaataggaggcaaaactcgagggtgggatccactgaggagtacataggctgctggatctggtggagccagcactgggcccacgggtggtaactggctgctgtggaggggggtacgtgagggggggggtctggggcttatcctcaggtcctgtgggtggggcagcgagtcggggcctgagcgtcaagagcatgccctagtgagcgggctcctctgggggagcccagcgcgctccgggcgcctgccggtttgggggtgtctcctcccggggcgctatggcggcgctggccagtagcctgatccggcagaagcgggaggtccgcgagcccgggggcagccggccggtgtcggcgcagcggcgcgtgtgtccccgcggcaccaagtccctttgccagaagcagctcctcatcctgctgtccaaggtgcgactgtgcggggggcggcccgcgcggccggaccgcggcccggagcctcagctcaaaggcatcgtcaccaaactgttctgccgccagggtttctacctccaggcgaatcccgacggaagcatccagggcaccccagaggataccagctccttcacccacttcaacctgatccctgtgggcctccgtgtggtcaccatccagagcgccaagctgggtcactacatggccatgaatgctgagggactgctctacagttcgccgcatttcacagctgagtgtcgctttaaggagtgtgtctttgagaattactacgtcctgtacgcctctgctctctaccgccagcgtcgttctggccgggcctggtacctcggcctggacaaggagggccaggtcatgaagggaaaccgagttaagaagaccaaggcagctgcccactttctgcccaagctcctggaggtggccatgtaccaggagccttctctccacagtgtccccgaggcctccccttccagtccccctgccccctgaaatgtagtccctggactggaggttccctgcactcccagtgagccagccaccaccacaacctgtctcccagtcctgctctcacccctgctgccacacacatgccctgagcagccaggtcccactaggtgctctaccctgagggagcctaggggctgactgtgacttccgaggctgctgagacccttagatctttgggcctaggagggagtcagagagggggatgtctgaagatggtcctggctgatcacttctttctttccacactcacacaacgccatgccttttcctgagatggcgctgggagttcccacatggacagccagggcataaacacttcccaccccggctcagccagttcctggagtcctgtgccccttttcattgccactgagccatttctagattcactggagctcaggattcatgtgtccttctttccctactctaccttctaccttggtctggacacattctggaacactggacaccctcgccagggccacttctgcactagggctctgtgctggaacccaggcatgctgccagccttttctctggatctgtcaggcctctgtcattgactcagatggacccctggtttccaagtagaaagaggctagatttgggccttgtctagctgttggctttggcctgaaccggaaccagtctcagatgaccacgggtttaaccttcttatcccagagacacccaattctagagctttatggagccgtacttccccctgaatcctagctctaggacatagatcatgactctcagcccttttacccaggatggagctggggcctgtatagccatattattgttctaagtaagttctagccccaccctcccgccttcttgagtgatacctattacggatgagttctggaaaagacccagctatgattcataaaaacacttctggatgaatcaagaaccatttcttgtttttcctagataattctctaaaaatatgattcttccatatagaatgctaagcttatttttacatgcagtttctagctccttcaacccagctgaggtcgtgccagggagacagagtctggagaagggcagaggaattttggaaggatccctggctcatagtagggaagctgggatgggggaggggtcaaaattatggcatgactgaacctgcatctgtgttgggtggacatgaatacttagctacctcagcaggaattccttccaggtcccctttaaagctgaggtccttagagtaatatgtccttaataaaaaggacaaatggatacagccttgaccctcccagtgaggagaccccaattcagcaataagtctcacccttctcccctacaggtcaggccaagaagggtgaaggcctcttgcactccagacctcatacgccccaacagcttctaattggatagaacttgctttaccttacagctcacaacctcagctgggttttaggtacccaaaaagggcctgtctagattttttcagaaaaacgtggagtgctaggggcagcctggaaaagatggggaacctgctagtgaactaggagggagacttccatagcctcagacttggatagggtaggctgagggggccctaagggagggactaaggctccaaggcaggtcacttttccttaggctgttctacttctggcttgttgcaagaggagtagatgccccctcacccacacaaaccccactcagtctccacccaactcctggcactgctcccaggggatcgggtctccactccagctttctcaattaaagacgatttatacaactgaa

SEQ ID NO: 134300 - DNA, 928 bp, Homo sapiens
  Payload ID: 6230
  Gene Symbol: FGF11
  Gene Name: fibroblast growth factor 11
  ENST ID: ENST00000575235
  CDS Start-End: 438-743
aactgctgtcgccgccgccgccgccgcctcagcttcccacagccgctgccgctgccgccgctctgcctggtccagccaccggcccagtgctctgacttcgccggaccggggagctctgcagagacaccctcactccttcccgagggtccgggacgcctagccgggcgtggggggaagctccgtttgcgggggacagggagggaggagcctggagccgaagccagcgccacccgtcgccggatcaacaggacaggacagagcctcagctcaaaggcatcgtcaccaaactgttctgccgccagggtttctacctccaggcgaatcccgacggaagcatccagggcaccccagaggataccagctccttcacccacttcaacctgatccctgtgggcctccgtgtggtcaccatccagagcgccaagctgggtcactacatggccatgaatgctgagggactgctctacagttcgccgcatttcacagctgagtgtcgctttaaggagtgtgtctttgagaattactacgtcctgtacgcctctgctctctaccgccagcgtcgttctggccgggcctggtacctcggcctggacaaggagggccaggtcatgaagggaaaccgagttaagaagaccaaggcagctgcccactttctgcccaagctcctggaggtggccatgtaccaggagccttctctccacagtgtccccgaggcctccccttccagtccccctgccccctgaaatgtagtccctggactggaggttccctgcactcccagtgagccagccaccaccacaacctgtctcccagtcctgctctcacccctgctgccacacacatgccctgagcagccaggtcccactaggtgctctaccctgagggagcctaggggctgactgtgacttccgaggctgctgagaccctt

SEQ ID NO: 134301 - DNA, 990 bp, Homo sapiens
  Payload ID: 6230
  Gene Symbol: FGF11
  Gene Name: fibroblast growth factor 11
  ENST ID: ENST00000575398
  CDS Start-End: 275-580
ctctgagtaggaccgggcccccacgtgactcagcctgcctctccatctcctcagctcccaccccccatatccttgatgaatgtctctctctccagagcctcagctcaaaggcatcgtcaccaaactgttctgccgccagggtttctacctccaggcgaatcccgacggaagcatccagggcaccccagaggataccagctccttcacccacttcaacctgatccctgtgggcctccgtgtggtcaccatccagagcgccaagctgggtcactacatggccatgaatgctgagggactgctctacagttcgccgcatttcacagctgagtgtcgctttaaggagtgtgtctttgagaattactacgtcctgtacgcctctgctctctaccgccagcgtcgttctggccgggcctggtacctcggcctggacaaggagggccaggtcatgaagggaaaccgagttaagaagaccaaggcagctgcccactttctgcccaagctcctggaggtggccatgtaccaggagccttctctccacagtgtccccgaggcctccccttccagtccccctgccccctgaaatgtagtccctggactggaggttccctgcactcccagtgagccagccaccaccacaacctgtctcccagtcctgctctcacccctgctgccacacacatgccctgagcagccaggtcccactaggtgctctaccctgagggagcctaggggctgactgtgacttccgaggctgctgagacccttagatctttgggcctaggagggagtcagagagggggatgtctgaagatggtcctggctgatcacttctttctttccacactcacacaacgccatgccttttcctgagatggcgctgggagttcccacatggacagccagggcataaacacttcccaccccggctcagccagttcctggagtcctgtgccccttttcattgccactgagccatttctagattcactg

SEQ ID NO: 134302 - DNA, 2315 bp, Homo sapiens
  Payload ID: 6230
  Gene Symbol: FGF11
  Gene Name: fibroblast growth factor 11
  ENST ID: ENST00000575082
  CDS Start-End: 254-559
tctgagtaggaccgggcccccacgtgactcagcctgcctctccatctcctcagctcccaccccccatatccttgagcctcagctcaaaggcatcgtcaccaaactgttctgccgccagggtttctacctccaggcgaatcccgacggaagcatccagggcaccccagaggataccagctccttcacccacttcaacctgatccctgtgggcctccgtgtggtcaccatccagagcgccaagctgggtcactacatggccatgaatgctgagggactgctctacagttcgccgcatttcacagctgagtgtcgctttaaggagtgtgtctttgagaattactacgtcctgtacgcctctgctctctaccgccagcgtcgttctggccgggcctggtacctcggcctggacaaggagggccaggtcatgaagggaaaccgagttaagaagaccaaggcagctgcccactttctgcccaagctcctggaggtggccatgtaccaggagccttctctccacagtgtccccgaggcctccccttccagtccccctgccccctgaaatgtagtccctggactggaggttccctgcactcccagtgagccagccaccaccacaacctgtctcccagtcctgctctcacccctgctgccacacacatgccctgagcagccaggtcccactaggtgctctaccctgagggagcctaggggctgactgtgacttccgaggctgctgagacccttagatctttgggcctaggagggagtcagagagggggatgtctgaagatggtcctggctgatcacttctttctttccacactcacacaacgccatgccttttcctgagatggcgctgggagttcccacatggacagccagggcataaacacttcccaccccggctcagccagttcctggagtcctgtgccccttttcattgccactgagccatttctagattcactggagctcaggattcatgtgtccttctttccctactctaccttctaccttggtctggacacattctggaacactggacaccctcgccagggccacttctgcactagggctctgtgctggaacccaggcatgctgccagccttttctctggatctgtcaggcctctgtcattgactcagatggacccctggtttccaagtagaaagaggctagatttgggccttgtctagctgttggctttggcctgaaccggaaccagtctcagatgaccacgggtttaaccttcttatcccagagacacccaattctagagctttatggagccgtacttccccctgaatcctagctctaggacatagatcatgactctcagcccttttacccaggatggagctggggcctgtatagccatattattgttctaagtaagttctagccccaccctcccgccttcttgagtgatacctattacggatgagttctggaaaagacccagctatgattcataaaaacacttctggatgaatcaagaaccatttcttgtttttcctagataattctctaaaaatatgattcttccatatagaatgctaagcttatttttacatgcagtttctagctccttcaacccagctgaggtcgtgccagggagacagagtctggagaagggcagaggaattttggaaggatccctggctcatagtagggaagctgggatgggggaggggtcaaaattatggcatgactgaacctgcatctgtgttgggtggacatgaatacttagctacctcagcaggaattccttccaggtcccctttaaagctgaggtccttagagtaatatgtccttaataaaaaggacaaatggatacagccttgaccctcccagtgaggagaccccaattcagcaataagtctcacccttctcccctacaggtcaggccaagaagggtgaaggcctcttgcactccagacctcatacgccccaacagcttctaattggatagaacttgctttaccttacagctcacaacctcagctgggttttaggtacccaaaaagggcctgtctagattttttcagaaaaacgtggagtgctaggggcagcctggaaaagatggggaacctgctagtgaactaggagggagacttccatagcctcagacttggatagggtaggctgagggggccctaagggagggactaaggctccaaggcaggtcacttttccttaggctgttctacttctggcttgttgcaagaggagtagatgccccctcacccacacaaaccccactcagtctccacccaactcctggcactgctcccaggggatcgggtctccactcc

SEQ ID NO: 134303 - DNA, 2358 bp, Homo sapiens
  Payload ID: 6230
  Gene Symbol: FGF11
  Gene Name: fibroblast growth factor 11
  ENST ID: ENST00000572907
  CDS Start-End: 1771-2076
ctctgaagaatagggcccggctgaggggctccccgaaagtggaagggggtgggccaggacgacaaagtccctgccagactgtgcctcagtttcccttctcttttgtccataacccggagtctccttattttcgaggtcaaggggaaggcttgaggggctgcctggcgccccgaaagcctcgtagttcctgctcgtccccccttcccaacacagcagtccccacccccatcgtcctccgcctacgtgccggttctcgcgattctttcaatctggagcggaggggcccgggggtttccagatgcctgggtcaccccaaggatttctgcagctccagccgcacgcccccccccagcccccgcctgccccggttctcccgctcctccacgcctgggctcggttcctcctggtcgagctctgctggctccgagccaatctccccagctctccctcgggtgtccttgcagctacctcgccagccagccctctatgcgccctcctcctgtgacctgcgcttcaagaacggagctgggcacccctcccataacccccgcgccactccgaaatcgggtcccgtaggctcaggggaccctacgctggcaggaactcagacacagttcacggctagagatgggcgccgactcgggggtcgtaccacctacaaggggggacagggaagtcggcagagagcaagcgatgggggaggagagttgtgagagttagaattggtccccgtccatgtacgacagtcagggagtccctctggccctgctcccgcccgctcccagctcccctaagggtagccacctcgcgccctcctccccgcgccaccggctgcccatagtggtacaatccgcagcccaccctctgagtaggaccgggcccccacgtgactcagcctgcctctccatctcctcagctcccaccccccatatccttggtaaggtcccccttaccccaggcgagttacctggccgaaggggagaggctgagcctcagggagaactgggcccccgggagccagcggactgacagacagacagacagacagacagatgggtcagtgtcagacaggccggcgctgggccaaggcaaggctctcgccaagctagcggcagccgcagcaggtgctgagtcagcgtcaggcccagtcccacccccactcctgagggagagcccctaccctgtggtcaatttgctgctgccaagatcccccaccttcgcaaacacgctgccccttcagtacccctgctggtctccctctgtccctgccttttgatatatctctcccctccctcctcccccactccttcccccttctggttgagctgtagggtaggaattaagccatttaaataaatttcaataaattacactgaaagctcctggttataggaaacagaagggacccacaccagctttcccaggagtgaaagagaggtgggagagagcgtgcttggaggataagagagctggggccctgggaccctcttccttcctttcattctcctttcttccctctaatcctgccaagtgtaggaatgtttctgggaacggagatgtcattttcaaagatgaatgtctctctctccagagcctcagctcaaaggcatcgtcaccaaactgttctgccgccagggtttctacctccaggcgaatcccgacggaagcatccagggcaccccagaggataccagctccttcacccacttcaacctgatccctgtgggcctccgtgtggtcaccatccagagcgccaagctgggtcactacatggccatgaatgctgagggactgctctacagttcgccgcatttcacagctgagtgtcgctttaaggagtgtgtctttgagaattactacgtcctgtacgcctctgctctctaccgccagcgtcgttctggccgggcctggtacctcggcctggacaaggagggccaggtcatgaagggaaaccgagttaagaagaccaaggcagctgcccactttctgcccaagctcctggaggtggccatgtaccaggagccttctctccacagtgtccccgaggcctccccttccagtccccctgccccctgaaatgtagtccctggactggaggttccctgcactcccagtgagccagccaccaccacaacctgtctcccagtcctgctctcacccctgctgccacacacatgccctgagcagccaggtcccactaggtgctctaccctgagggagcctaggggctgactgtgacttccgaggctgctgagacccttagatctttgggcctaggagggagtcagagagggggatgtctgaagatggtcctggctgatcacttctttctttccacactcacacaacgccatgcct

SEQ ID NO: 134304 - DNA, 5406 bp, Homo sapiens
  Payload ID: 6231
  Gene Symbol: FGF12
  Gene Name: fibroblast growth factor 12
  Uniprot ID: P61328
  ENST ID: ENST00000445105
  CDS Start-End: 247-792
gtgccagcgcccatgcaaatctgctgtgcatccagagagcaaagtgggatgatctgtcactacacctgcagcaccacgctcggaggacagctcctgcctgcagcttccagacccaggaagcctgaggggaaggaaggaagtacgggcgaaatcatcagattggcttcccagatttgggaatctgaagcgggcccacatcttccggccaacttccattgaacttcccagcactcgaaagggaccgaaatggagagcaaagaaccccagctcaaagggattgtgacaaggttattcagccagcagggatacttcctgcagatgcacccagatggtaccattgatgggaccaaggacgaaaacagcgactacactctcttcaatctaattcccgtgggcctgcgtgtagtggccatccaaggagtgaaggctagcctctatgtggccatgaatggtgaaggctatctctacagttcagatgttttcactccagaatgcaaattcaaggaatctgtgtttgaaaactactatgtgatctattcttccacactgtaccgccagcaagaatcaggccgagcttggtttctgggactcaataaagaaggtcaaattatgaaggggaacagagtgaagaaaaccaagccctcatcacattttgtaccgaaacctattgaagtgtgtatgtacagagaaccatcgctacatgaaattggagaaaaacaagggcgttcaaggaaaagttctggaacaccaaccatgaatggaggcaaagttgtgaatcaagattcaacatagctgagaactctccccttcttccctctctcatcccttccccttcccttccttcccatttacccatttccttccagtaaatccacccaaggagaggaaaataaaatgacaacgcaagacctagtggctaagattctgcactcaaaatcttcctttgtgtaggacaagaaaattgaaccaaagcttgcttgttgcaatgtggtagaaaattcacgtgcacaaagattagcacacttaaaagcaaaggaaaaaataaatcagaactccataaatattaaattaaactgtattgttattagtagaaggctaattgtaatgaagacattaataaagatgaaataaacttattactttaaaggaaaggatttggagaattgaactcacaaactgatgttatatactcaatagcttaaactcatgataatgctgcgatgtgtggttttgcttgattttgtattttatttgggcatctggaattgacacaccattacattctgtttgcaggattttttttgtaaccatgaaattgaacatttccaaattataaactatgttaatacctataaaatatatagccaggaaccatttatcatcaagaaaagtgtaagaaattatttttgagatgtaatttaagattgttttatgtaaaaggaaaatcttgtatggcatcgaatagccttaatgagtttaattctttcacaaaaatgatttcaaattatcctagagtataacatttttatcaaagatattatttccggagttcttctttctttcttttttttttttttttagtaatttagcaaaaacattactgttctaatgctgaagtgacttttgccagtgccatgtccaggtggtgaggtataagttacttgctcttagcatttggtctgatttttttgctttgtggacacctttgagagtatccacaaagcaatgtctcaggtgtggacacctgagagcatgttttagaaagctttgtaccctgtcttgtggcaggaaagaaagaacaggggttttacataaggaaataagtcctaggaaattagtcaacgcaaattgcatttgcgtttgtaccttaccacagtcttatattgttttttaaactctgccatgaaatttggagacatgactgtgaaattcctaacttactatcttacaaagccagtagctaatttgttgctctatgtatgatcctgttacaagtccagtttgcaattcatttgtttcctagaacacagaagggtaccagtaatacactaaattttcaaggtgtgtagagaaataatatggaattagcagctatgactccaacagacaggattgtgtgagcagctgaaaggagcaaaaaagaactcagtgtaagagaaggcacatacatagttaagaatactaaagtatttttaaaaatcaaggaagaaataaatgttacacaatttgcattggaataaatagatctatttagtcctacaaatcaggagtggtgtagagacatccaaatttaaagaaaaaaaaacacaaaacagaatgttaaaaaatgtatgcagatttatggatattatcaatgagaagacatagcatgtaacttctcctatatctctactgtccagcatgtattgttccaaatatgactccctaaaatatatacactttgcagaagctctaggccctcacctcaaaccttgccattggttgccgtatttcaaggtcaatatagtttccctcactttacacaatcattattcttcaatagtggaccatatccttcaccaggtatcctatttctgttatctagaggttagcagaaaatgaaatgaaggaatttccctaagcagttgggaagaacaaattgtatgcatgtaggcaaagattttgaagatacatttgcaagagatatttgtttaaccaaaatatttggaaagtaacaaataaagacatttaaattttctaaaaatggacttgctcttctaggaaaagaatacccctggggcaaaaatataactctagctgtatttcttcttgtcactcttgattcaacttgattataaatacacctgtcactaccagaaccaaaaaaaaaaagaaaaaaatcccaagcacaaagcttattttatttgaaaaaaataaaaaagaaacttcaacactatgggacactggctcttttagcatgaaatgacttgagcttttgtagtgatgatacacatacacactcatcagtaaaacgatggtttcataaataacacaattgatgcaaatcataaaaatcaattacaattatgatttcatgacaaaatatatttaattaagtttgttatgaaaaaaatagagatatgaatcactaacaaaattcctccattttcagtggctattcatcatttatcatctagactcacatttgtctccttcctgatagcagttaagaaaaaattctaaccacacaatttgtatattgtttttctccgtattatgttaagcaaatgttcactgcagtaaaatgttttggaaattagctttgtcttatttccagtttagttcagagaattaattggaaacctgatttcttttacacataaacctgacaaaaaatgtagcttagagcaaagggtgaatgtttgcttaactcctgcttacttctcaagtacatgaaaactttaatagaatatgccagtattcactgagtttttaaaaatattaccatgtgtaaacatataatatccaacttcatccaaaaatatggttgagtttaagtactttgtttttcaggcttatttcaagtataataattctttgattttcattgttctgatttctgggtcttcaattcattcgtcacttttcctttttaagtaaaataagcttttttttttttttttttttttttttggagttgcattgggatttttcccaggaaaaaatatggcttttagtaatgctttgcaattggctacgcagatataaattaagatatgtttattctgagttcttattggaataagtttcaaaatcaacgagcttaagaatgaaaacaaaacttttgagagtctcacaaaatagctttctggtcaatacaccttacttgatttttaagctcgcagaataaagtatagaaacaaatggagctgaagttccatttgctaattcagagacttttgtgcttccgcaaattggagggcagcaagccatcctattctcatagtaatcgttttggctttgaaatttacatacaatttaatagcacatttttagccattatggattggcgcaataaagagatatcaatgtaatgcaatgtgatgctttatgggcctcattctaattcagaaagcttgtttaaaagaactaagactcttctgtttaataaaatagcaacaatctaatatctagattggtagtcctgcggtgccactagtgggagatgagagtattaagacaagagtaaggacaaggaaagacttaaaggttgcatattgaaaagtttggaattcctaatttgggagcactgatttcttggtgaagaagtaagtatgactacgttgccagtaattttttaaaaacatagacccagaaatagcaaatcgatttcaccctcataccttagtctacaaggccttgctcttgagaaggttttccatgatattgcttaatttcatctgcacaagatgagacacaaacataaaaattccctgctcattttaataccataaaaggctgaggttatttctctgtcataaaattgtaaatagcattttttaagtcaaaattacatttaaaacagtggattgttctacaaatatatatgtgtatatatacatatgcttctgaaataaggatatattatatgagtttttatttgatttgtggtctttagtcataggtaatcaaaaataaagagatttgaatgcaaaactttatacattaatgtacatttctaatgatggtacaaattgccactttataataaaaaagaaacaggtgggaataataatcaaagcacgtgttccttcagtactttggtgatttttaatcccccttgtgatgcacaggaaattattttttagttacaaaaagttatcttagaaatctatacttcccaatacagatttcatgttaagtcatatcaaattgagaatttgtggtgaaagaataggaaaaggatgctagatgctgatctttctttttcaggatttttcctggagcccaagttaaaaattcaatacttaaatctaagttaagtgaaaattaataatgttcagaatgatgtattgagctttagtaacagacggaagcaaaaaaaaataagaatatttaacattatgataatagccttaaaataatgtaataaaaattgcatcattaaatgttctattagttggaaagaatgagctgatgtttctttgtctttgctccaagtacaatttaaagacagtgacattcattttacttaaaattgttcaaaaagtccaaaacatactcccatggctagaattggtattagctccaatacaaggttaaatgttacaatcttaagaaattattgacactgaaatgtttagtaaacatgttgtatgagaaactaaacaaattaatgtttcatttttccattaaagcacagattat

SEQ ID NO: 134305 - DNA, 653 bp, Homo sapiens
  Payload ID: 6231
  Gene Symbol: FGF12
  Gene Name: fibroblast growth factor 12
  ENST ID: ENST00000418610
  CDS Start-End: 333-653
cacgctcggaggacagctcctgcctgcagcttccagacccaggtaaaaaaaaaaaaaaaaaaatctgagcgggcactgtgcatgcatttcagtatcagatgcgcgtcgcaacgtatcccctgtagaggcaatctgctgctgctcctaagtgtcctttggtggctgattgcagcttcaaggtttaagaaatcccatctttcaggaagcctgaggggaaggaaggaagtacgggcgaaatcatcagattggcttcccagatttgggaatctgaagcgggcccacatcttccggccaacttccattgaacttcccagcactcgaaagggaccgaaatggagagcaaagaaccccagctcaaagggattgtgacaaggttattcagccagcagggatacttcctgcagatgcacccagatggtaccattgatgggaccaaggacgaaaacagcgactacactctcttcaatctaattcccgtgggcctgcgtgtagtggccatccaaggagtgaaggctagcctctatgtggccatgaatggtgaaggctatctctacagttcagatgttttcactccagaatgcaaattcaaggaatctgtgtttgaaaactactatgtgatctattcttccacactgtaccgccagcaagaatca

SEQ ID NO: 134306 - DNA, 768 bp, Homo sapiens
  Payload ID: 6231
  Gene Symbol: FGF12
  Gene Name: fibroblast growth factor 12
  Uniprot ID: P61328
  ENST ID: ENST00000450716
  CDS Start-End: 192-737
ttaaagcaggagccttgagagcctgataagctgttgacacaagtgcttttgagaatagcaggaagcctgaggggaaggaaggaagtacgggcgaaatcatcagattggcttcccagatttgggaatctgaagcgggcccacatcttccggccaacttccattgaacttcccagcactcgaaagggaccgaaatggagagcaaagaaccccagctcaaagggattgtgacaaggttattcagccagcagggatacttcctgcagatgcacccagatggtaccattgatgggaccaaggacgaaaacagcgactacactctcttcaatctaattcccgtgggcctgcgtgtagtggccatccaaggagtgaaggctagcctctatgtggccatgaatggtgaaggctatctctacagttcagatgttttcactccagaatgcaaattcaaggaatctgtgtttgaaaactactatgtgatctattcttccacactgtaccgccagcaagaatcaggccgagcttggtttctgggactcaataaagaaggtcaaattatgaaggggaacagagtgaagaaaaccaagccctcatcacattttgtaccgaaacctattgaagtgtgtatgtacagagaaccatcgctacatgaaattggagaaaaacaagggcgttcaaggaaaagttctggaacaccaaccatgaatggaggcaaagttgtgaatcaagattcaacatagctgagaactctccccttcttccctctctcat

SEQ ID NO: 134307 - DNA, 603 bp, Homo sapiens
  Payload ID: 6231
  Gene Symbol: FGF12
  Gene Name: fibroblast growth factor 12
  ENST ID: ENST00000430714
  CDS Start-End: 148-582
gcagcttccagacccaggaagcctgaggggaaggaaggaagtacgggcgaaatcatcagattggcttcccagatttgggaatctgaagcgggcccacatcttccggccaacttccattgaacttcccagcactcgaaagggaccgaaatggagagcaaagctctcttcaatctaattcccgtgggcctgcgtgtagtggccatccaaggagtgaaggctagcctctatgtggccatgaatggtgaaggctatctctacagttcagatgttttcactccagaatgcaaattcaaggaatctgtgtttgaaaactactatgtgatctattcttccacactgtaccgccagcaagaatcaggccgagcttggtttctgggactcaataaagaaggtcaaattatgaaggggaacagagtgaagaaaaccaagccctcatcacattttgtaccgaaacctattgaagtgtgtatgtacagagaaccatcgctacatgaaattggagaaaaacaagggcgttcaaggaaaagttctggaacaccaaccatgaatggaggcaaagttgtgaatcaagattcaacatagctgagaactctccccttcttc

SEQ ID NO: 134308 - DNA, 540 bp, Homo sapiens
  Payload ID: 6231
  Gene Symbol: FGF12
  Gene Name: fibroblast growth factor 12
  ENST ID: ENST00000448795
  CDS Start-End: 118-540
actacacctgcagcaccacgctcggaggacagctcctgcctgcagcttccagacccagaaccccagctcaaagggattgtgacaaggttattcagccagcagggatacttcctgcagatgcacccagatggtaccattgatgggaccaaggacgaaaacagcgactacactctcttcaatctaattcccgtgggcctgcgtgtagtggccatccaaggagtgaaggctagcctctatgtggccatgaatggtgaaggctatctctacagttcagatgttttcactccagaatgcaaattcaaggaatctgtgtttgaaaactactatgtgatctattcttccacactgtaccgccagcaagaatcaggccgagcttggtttctgggactcaataaagaaggtcaaattatgaaggggaacagagtgaagaaaaccaagccctcatcacattttgtaccgaaacctattgaagtgtgtatgtacagagaaccatcgctacatgaaattggagaaaaacaagggcgttcaaggaaaagttct

SEQ ID NO: 134309 - DNA, 3058 bp, Homo sapiens
  Payload ID: 6231
  Gene Symbol: FGF12
  Gene Name: fibroblast growth factor 12
  Uniprot ID: P61328
  ENST ID: ENST00000454309
  CDS Start-End: 827-1558
agtgctgctggccgggagttgctctcaccgcagctggaaacagctgcccccgccccgcgcccctacccagactccgggtaaccgctcccacttcgcgcctctcggaattccagaactcgggtggccggcccctggaaagccgcagccggcgcgatgcattctgtagacctcaccctgctgggacggacctcctaatcttcagaaccgcgggccgcagggagttaaattgctgccttcctctccttctctcgtgcggttggtggcttgttttctaaaggaacgttttattcactttttagtattttctaccgggggcgcgctacccgcctgggtccagactctgctttgtaaacgggttttctatgtatgtatgtgtaggtatactttggacaccttacaacgcttgcgcctctccaacagaggcacgtcttgttattttgggcatcgttcttccccttccacttggtaccccgaacgcagtgtgactaaactccccactgccccttggacgccgatcgccttggggtgcaagtttggggtgcaaacgtctacttcgcaagagggcctgggaccgccccgccccgccccccggccgccagaggttggggaagtttacatctggattttcacacattttgtcgccactgcccagactttgactaaccttgtgagcgccgggttttcgatactgcagcctcctcaaattttagcactgcctccccgcgactgccctttccctggccgcccaggtcctgccctcgccccggcggagcgcaagccggagggcgcagtagaggctggggcctgaggccctcgctgagcagctatggctgcggcgatagccagctccttgatccggcagaagcggcaggcgagggagtccaacagcgaccgagtgtcggcctccaagcgccgctccagccccagcaaagacgggcgctccctgtgcgagaggcacgtcctcggggtgttcagcaaagtgcgcttctgcagcggccgcaagaggccggtgaggcggagaccagaaccccagctcaaagggattgtgacaaggttattcagccagcagggatacttcctgcagatgcacccagatggtaccattgatgggaccaaggacgaaaacagcgactacactctcttcaatctaattcccgtgggcctgcgtgtagtggccatccaaggagtgaaggctagcctctatgtggccatgaatggtgaaggctatctctacagttcagatgttttcactccagaatgcaaattcaaggaatctgtgtttgaaaactactatgtgatctattcttccacactgtaccgccagcaagaatcaggccgagcttggtttctgggactcaataaagaaggtcaaattatgaaggggaacagagtgaagaaaaccaagccctcatcacattttgtaccgaaacctattgaagtgtgtatgtacagagaaccatcgctacatgaaattggagaaaaacaagggcgttcaaggaaaagttctggaacaccaaccatgaatggaggcaaagttgtgaatcaagattcaacatagctgagaactctccccttcttccctctctcatcccttccccttcccttccttcccatttacccatttccttccagtaaatccacccaaggagaggaaaataaaatgacaacgcaagacctagtggctaagattctgcactcaaaatcttcctttgtgtaggacaagaaaattgaaccaaagcttgcttgttgcaatgtggtagaaaattcacgtgcacaaagattagcacacttaaaagcaaaggaaaaaataaatcagaactccataaatattaaattaaactgtattgttattagtagaaggctaattgtaatgaagacattaataaagatgaaataaacttattactttaaaggaaaggatttggagaattgaactcacaaactgatgttatatactcaatagcttaaactcatgataatgctgcgatgtgtggttttgcttgattttgtattttatttgggcatctggaattgacacaccattacattctgtttgcaggattttttttgtaaccatgaaattgaacatttccaaattataaactatgttaatacctataaaatatatagccaggaaccatttatcatcaagaaaagtgtaagaaattatttttgagatgtaatttaagattgttttatgtaaaaggaaaatcttgtatggcatcgaatagccttaatgagtttaattctttcacaaaaatgatttcaaattatcctagagtataacatttttatcaaagatattatttccggagttcttctttctttcttttttttttttttttagtaatttagcaaaaacattactgttctaatgctgaagtgacttttgccagtgccatgtccaggtggtgaggtataagttacttgctcttagcatttggtctgatttttttgctttgtggacacctttgagagtatccacaaagcaatgtctcaggtgtggacacctgagagcatgttttagaaagctttgtaccctgtcttgtggcaggaaagaaagaacaggggttttacataaggaaataagtcctaggaaattagtcaacgcaaattgcatttgcgtttgtaccttaccacagtcttatattgttttttaaactctgccatgaaatttggagacatgactgtgaaattcctaacttactatcttacaaagccagtagctaatttgttgctctatgtatgatcctgttacaagtccagtttgcaattcatttgtttcctagaacacagaagggtaccagtaatacactaaattttcaaggtgtgtagagaaataatatggaattagcagctatgactccaacagacaggattgtgtgagcagctgaaaggagcaaaaaagaactcagtgtaagagaaggcacatacatagttaagaatactaaagtatttttaaaaatcaaggaagaaataaatgttacacaatttgcattggaataaatagatctatttagtcctacaaatcaggagtggtgtagagacatccaaattt

SEQ ID NO: 134310 - DNA, 1939 bp, Homo sapiens
  Payload ID: 6232
  Gene Symbol: FGF13
  Gene Name: fibroblast growth factor 13
  Uniprot ID: Q92913
  ENST ID: ENST00000305414
  CDS Start-End: 85-663
aaactttctctgatctcctctctctctgtgtctgctccaaatgtagacagcaattgtctgggtaggaccagcttataaagaagcatggctttgttaaggaagtcgtattcagagcctcagcttaagggtatagttaccaagctatacagccgacaaggctaccacttgcagctgcaggcggatggaaccattgatggcaccaaagatgaggacagcacttacactctgtttaacctcatccctgtgggtctgcgagtggtggctatccaaggagttcaaaccaagctgtacttggcaatgaacagtgagggatacttgtacacctcggaacttttcacacctgagtgcaaattcaaagaatcagtgtttgaaaattattatgtgacatattcatcaatgatataccgtcagcagcagtcaggccgagggtggtatctgggtctgaacaaagaaggagagatcatgaaaggcaaccatgtgaagaagaacaagcctgcagctcattttctgcctaaaccactgaaagtggccatgtacaaggagccatcactgcacgatctcacggagttctcccgatctggaagcgggaccccaaccaagagcagaagtgtctctggcgtgctgaacggaggcaaatccatgagccacaatgaatcaacgtagccagtgagggcaaaagaagggctctgtaacagaaccttacctccaggtgctgttgaattcttctagcagtccttcacccaaaagttcaaatttgtcagtgacatttaccaaacaaacaggcagagttcactattctatctgccattagaccttcttatcatccatactaaagccccattatttagattgagcttgtgcataagaatgccaagcattttagtgaactaaatctgagagaaggactgccaaattttctcatgatctcacctatactttggggatgataatccaaaagtatttcacagcactaatgctgatcaaaatttgctctcccaccaagaaaatgtaaaagaccacaattgttcttcaaaaacaaacaaaacaaaacaaaacaaaattaactgcttaaatgttttgtcggggcaaacaaaattatgtgaattgtgttgttttcttggcttgatgttttctatctacgcttgattcacatgtactcttttctttggcatagtgcaactttatgatttctgaaattcaatggttctattgactttttgcgtcacttaatccaaatcaaccaaattcagggttgaatctgaattggcttctcaggctcaaggtaacagtgttcttgtggtttgaccaattgtttttctttctttttttttttttttagatttgtggtattctggtcaagttattgtgctgtactttgtgcgtagaaattgagttgtattgtcaaccccagtcagtaaagagaacttcaaaaaattatcctcaagtgtagatttctcttaattccatttgtgtatcatgttaaactattgttgtggcttcttgtgtaaagacaggaactgtggaactgtgatgttgtcttttgtgttgttaaaataagaaatgtcttatctgtatatgtatgagtcttcctgtcattgtatttggcacatgaatattgtgtacaaggaattgttaagactggttttccctcaacaacatatattatacttgctactggaaaagtgtttaagacttagctaggtttccatttagatcttcatatctgttgcatggaagaaagttgggttcttggcatagagttgcatgatatgtaagattttgtgcattcataattgttaaaaatctgtgttccaaaagtggacatagcatgtacaggcagttttctgtcctgtgcacaaaaagtttaaaaaagttgtttaatatttgttgttgtatacccaaatacgcaccgaataaactctttatattcattcaaaga

SEQ ID NO: 134311 - DNA, 19519 bp, Homo sapiens
  Payload ID: 6232
  Gene Symbol: FGF13
  Gene Name: fibroblast growth factor 13
  Uniprot ID: Q92913
  ENST ID: ENST00000315930
  CDS Start-End: 663-1400
gtgccgcgcccagagcagcagcaacagcgaagatgcgaggccattacctgtttgatccctgtcggaaacctggcacgggccaacttttcccgattatcacgccaagaagttgcaaggactagtcgaagactcggaggggccagggcgagggcgcgctcccccgcgcgctgcctcgtccctcctccgtccggccgcccgagctcccggcctctctcccgcccgcgctcactccctccgcccgcctccctcctctggcccccatcagaagggcaacagggcgagggggtccggcgaaattcggaccggagcagctggacatgcacggtgtccgccgggcgcaggggccgaccacacgcagtcgcgcagttcagcatccgcgtgccagtctcgcccgcgatcccgggcccggggctgtggcgtcgactccgacccaggcagccagcagcccgcgcgggagccggaccgccgccggaggagctcggacggcatgctgagccccctccttggctgaagcccgagtgcggagaagcccgggcaaacgcaggctaaggagaccaaagcggcgaagtcgcgagacagcggacaagcagcggaggagaaggaggaggaggcgaacccagagaggggcagcaaaagaagcggtggtggtgggcgtcgtggccatggcggcggctatcgccagctcgctcatccgtcagaagaggcaagcccgcgagcgcgagaaatccaacgcctgcaagtgtgtcagcagccccagcaaaggcaagaccagctgcgacaaaaacaagttaaatgtcttttcccgggtcaaactcttcggctccaagaagaggcgcagaagaagaccagagcctcagcttaagggtatagttaccaagctatacagccgacaaggctaccacttgcagctgcaggcggatggaaccattgatggcaccaaagatgaggacagcacttacactctgtttaacctcatccctgtgggtctgcgagtggtggctatccaaggagttcaaaccaagctgtacttggcaatgaacagtgagggatacttgtacacctcggaacttttcacacctgagtgcaaattcaaagaatcagtgtttgaaaattattatgtgacatattcatcaatgatataccgtcagcagcagtcaggccgagggtggtatctgggtctgaacaaagaaggagagatcatgaaaggcaaccatgtgaagaagaacaagcctgcagctcattttctgcctaaaccactgaaagtggccatgtacaaggagccatcactgcacgatctcacggagttctcccgatctggaagcgggaccccaaccaagagcagaagtgtctctggcgtgctgaacggaggcaaatccatgagccacaatgaatcaacgtagccagtgagggcaaaagaagggctctgtaacagaaccttacctccaggtgctgttgaattcttctagcagtccttcacccaaaagttcaaatttgtcagtgacatttaccaaacaaacaggcagagttcactattctatctgccattagaccttcttatcatccatactaaagccccattatttagattgagcttgtgcataagaatgccaagcattttagtgaactaaatctgagagaaggactgccaaattttctcatgatctcacctatactttggggatgataatccaaaagtatttcacagcactaatgctgatcaaaatttgctctcccaccaagaaaatgtaaaagaccacaattgttcttcaaaaacaaacaaaacaaaacaaaacaaaattaactgcttaaatgttttgtcggggcaaacaaaattatgtgaattgtgttgttttcttggcttgatgttttctatctacgcttgattcacatgtactcttttctttggcatagtgcaactttatgatttctgaaattcaatggttctattgactttttgcgtcacttaatccaaatcaaccaaattcagggttgaatctgaattggcttctcaggctcaaggtaacagtgttcttgtggtttgaccaattgtttttctttctttttttttttttttagatttgtggtattctggtcaagttattgtgctgtactttgtgcgtagaaattgagttgtattgtcaaccccagtcagtaaagagaacttcaaaaaattatcctcaagtgtagatttctcttaattccatttgtgtatcatgttaaactattgttgtggcttcttgtgtaaagacaggaactgtggaactgtgatgttgtcttttgtgttgttaaaataagaaatgtcttatctgtatatgtatgagtcttcctgtcattgtatttggcacatgaatattgtgtacaaggaattgttaagactggttttccctcaacaacatatattatacttgctactggaaaagtgtttaagacttagctaggtttccatttagatcttcatatctgttgcatggaagaaagttgggttcttggcatagagttgcatgatatgtaagattttgtgcattcataattgttaaaaatctgtgttccaaaagtggacatagcatgtacaggcagttttctgtcctgtgcacaaaaagtttaaaaaagttgtttaatatttgttgttgtatacccaaatacgcaccgaataaactctttatattcattcaaagaataatcttccaacatgtatttattgagcgtccattatgtgccagtaactgaagtagcaactggaagtaaacattgtataatgcagataaggtcactgtcctcagatagtctacagtctagagagtcatattaacatgaacactttaaagtgtgtttattttactagttactgtacttgcacttcagattggtacaaaggaattcacattcccgttcagtagtcaaattatacaaatgaggcgtttgtgctagtattttctctgccactcacagtgtcatttcccctctctgttgcttatttctctcctctctagagggaatacacaggactaaatagtgtcctttctacctttgagaactgaaggaaaatgtaaatttttttaaatgttgatgacttttctctagctccccaaagctgcattgtctggcaatgaacactttgagaacagtcaatacagatggtctctgacttacagtagttcaacttacattttttcgggggctttacagtggtacagaagcaataggcatttagtagaactcatactttaccatacaaccattttgctttttatttccagtacactattcaataaatgacatgagctattcaacactttttaattacaaaatttgctttgtagtacatgattttgtccaactgtaagctaatataagcgttctaagcacatttaaagtaggctaggctaagctatgatgtttgctaggttaggtgtattaaatgcattttcaacttaagatgggtttattggtatgtgacccccatcgtaagtgaaggatcatctgtatatggagggaagaattgtgaaatacataaaacgtagttgactagtgcttttcagagcatctgcaaataaaattactggggccccaaacagcctgcttttgcaaggaggggagactcctcatttctaagatgtttggaccagattcagcatgagctcctatccctgcccaccccagcccagtctaagtcaccttgtaatttcatgagataagtcctcctcatcctgcttcatcctgcctgagctctaaacacacctacatgaggtacgctcacctgcctagctatcttggatgcaggatcctttgtaccatgttttaaaaatcaggagatgctcactcaaccacctctccctattaactcttactaattttcaatcagtagggaaaagtagtgcattgtctccctctttctctaagaactttaaagtttggtcactgactacttcagttgctggtcttgctttttctgttgttcagaaatagtgtaggtctgctggtagtaagcaaattagcactatgtgggtctcagggatgcctgcgttaataggatggagtcaaaatgcccaggaagaatcctttacccccagcattctttttgagctgccttaaagttgctttaaacagacagtggtgttaaaataaattaataagtaaataaatagtcctcaaaccttcctacaagtgatgatatcaatactttcacacatcttcattacacacacacatacacacacaccctttcccaccccatcccctcatgcacatcctttagtagcattcctcctggcagaaaatactagtcctgccacataactgatgaaagaaaaaaagactctagtcaaatagttgtgggaaacacttcaaatactattgggtctcagatattagctcacatcagaatcacctggaaggcttgtaagactcagatcactggacttcaccttcagagtttctgattgagtgagtcttgtgtgggcccaaaacttggcatttctaacaagtttccaggtgatgctgaggctgttgatcctcgggactttgagaaccactggtattagttcattctcacgctgctataaagatactacctgagactgggtaatttataaaggaaagaggtttaattgactcacagttctgcatggctggggaggcctcaggaaacttaccatcatggcagaagatgaaggggaagcaaggaccttttccacgtggcagcaggagagagaatgggaaagcgccacttatcaaacagatttagtgagaacttcctcactatatgagacagcatggggaaaccgccccgaggatccaatcacctcccaccaggtccctccctcaacacattgggattacaactctaaatgagatttaggtggggacacagagccaaaccatatcacactggcatacactattcctttcttcaggattagcgtgcattagcaaattaatttctgaaaagtcttgtgttaaagaaatctgtttaacttttacaaatgctgagacaaacttattgggccacaaagccacattttcatggagcgtctattaacattgcagtagagtggtagtcctcaagctttttatgtgtacctgaatcacctgtggtgttttatatgcttcttttgttttaagcttggcctgggaatctcctgaatctgatacctactgttctatgccacagcacttaatgtcagtgttctatggcatggcacttaatgtcagttttccaccccatctgtgaacgtgtattcaatcattatactgtatttagcctgagaatgaatatggaaaagaaaacaacactttcttcaggctttttgcaactttttaaaagcaaaacaggctccaattccccctcccaggagttttgtttgtatccaaagagaggacatgctcattgccatggaatccttaaaggactgagagggaagtgatctgtggcactcctcccctccctaaccagtacatttgttccagttttaagccagtcaagctcaccgaagagtttttcaaagaccttagctacatggatttaactttaccaagcatccattgtccaaatgaacatatgagggaaaatgaatatctcttcatctacatcagctgaccataactatgctgtggataaggggtggtgggatcagaactgataaccattttcaacaaatttcatacgaatgtgtcttagaagcctcatttagatgcgatgtcattcatgggtaaaattgaaatgtgccttcactggcagagtctttaacaatctctgcaagacaatctacgcttttttctattgtttctgaaaatcctttcaacctctattcaaagccattttctcactttagaaattgattacagcagggctgtgattgtcagtacaaaaatctgtacagggatatggcagtggtataatagatgaccatttccaattataaaacaattagcaaagtatagctaggtcaggccactagtacccttcaaattcttaaccatatttacaaagacagcttttcataacttttattgctctgtccacaaagatgtggtctcatggtttcacacgattgagaatgctacaagtaatagtatactgaaaagaacatgtctctaattctggactgctctttatctccaagaaacagagagagagagaatgaaaaaaaatcccagcttagaggaattttggaagttactctttcatgaaccatcacattttctgggcctttgtaatctttaaacactgttactctttagaggttggtttgaatttgttgcacagagaacaataatctatgacaaattaatgaacccttttgctaatatcacatgagtacaagtatcttgtatttctcatcacatttaccgtaataaagaatgcagacaagtataatacatggcatcattttggggattttccaatttctatgtgggcatactggaagaagtttgtaacagttgcaattctgtcacaatgcaggaagtctttctagaacacacaatgtggatgattttcagttttagaattgtaaactaaccaaatgtcaattcagtttctcattttatattagtttttgttacaaacactgcctatttctcttttgtacaaacacttcacacacacacacacacacacgcgcacacacacacacacacacacacacacacaggcacacacacactagatgggcctccaaaagaactcagagctgctgtcttcctctgggaggttgatcatatgtctattcagttgggagaatggagcagtcaagttcaaaatccatgtggctctctggcttcagaagctatcctttcagctatgacacacacactaaatagtattgcccaggtttgccctacaacatgttagcatatctacatattttgtactgtaataatgtgtacgctcttaataatttgtttttaatgctgtgtaaagttagcaattagagtaagagaaacgtatgggataatgattgagtaaaatctcagctccttttgagtcaatcactcagcttgttggcacagtagatatttatgaccttaaatactgtcagcgcttcacagcacattactgaggcctggataaagcattcacacaaagataaatggattgaaactgtgtcaattttgtagaaaaagatattctggggtttagtaacagagaatttttctttccttactgcgattaataaagtggaactccaattgcaagtaactattcagttttatgttcttcacatatggaaacctctctgtcactaataccctgggacaaactggatgattaccatccaagtgttattttcttcctcgaaaatttcaaaaccagaatgaattagttctccaagtctggctatactatagttttcttcttaatgtaaaacagctgaataaaacagcttgaacaatatttgactttcatgggtcttaagaacgtttcaaaatacaccaccaatatatttaccaacatatttagtgccagatatacacagaacaaacactaccctattgtttctgtgtgcgtgtgtgtgtgtctgtgtctgtgtgtgtgtgtagcaggacactaaataaacaagtcatgttgctgttcttagggaagttttggtaaagagagcttcaaagttccttggagtcacctgcaaggctaactgtactaaaagcggaatttgcatgatctttctacaaactctcagtgtaaagtggtagatagacatgcaagcatcacacttagattgcaataaatgctgtgatgtaaaaaatacaatggaggaaaaatttttgattagggaaatttaaacattttcaaagaagagttaatgtttcagtggagtcttaaaagatgagtaggaattcaacagccagaagggaagtgtagacgctctgtgtcacataaaacaaaacagaacagaatagtataagtgaaggcatagagcttcacatgaaaggcacatgaaatagcactgggtatctctaaaatattaattagcctagtgtagctggacaatgaggggcagagcccctggtatgcaagtgatgtctgggaaaggagcaatctttctacagtgcctcattccatcatacctcattaccagaaaaacattatgagccacttaggcctgtattatttgagcatctctgaaatggagttgctctacatgttttgtagaaacctaatgagtaatttattctcatcagtagacaaaatgaaagaaagaaaatagactctgagcaaagtatgattcacaaccttgcctattaggctatagaagattgccctactaattcctccttttcgtctgttgaacaatctgtattttgcctgctcaaaaaggaattcctcaagttataggggcagtttgaccagtacaatcatatcagaaaaaaatcagcaaaattatgttctaacaacatcttcccatctaaagtgcacattttatttttttaaggtaacataattactacgaacaaccgaaatggtatataaaggtgaaaaattaaaataattttttttacagctccacgttacctcaccccctagaccctggtaaccaccattcaactctctgtttccattagttcaactttttaagattctttttatacaaaggatgtcatgtagcatttttttcttttttcatctggcttatttcacttagtttgcttatttcaacgtgctctgaagtttcatccatgtttatgtaaatggaaggagctccctctttatatggctaagatatatatatatattatattatatatatatatgtatatatatatattatatatatatatgtatatatatataattttctttcttcattcatctgtccgtgggcacttaggttgttccataacttatctattgtgaataatggtgcaatgggaatgaatgggagtgcagatgtctgtttggcatactgatttaatttcctttggatatataaccagaagtgggaatgctggatcatacagtagttctatttttacttttatgaggatctccatactgttttacataatggcttactaatttacattcccataaacagtgtacaagaatacctccttgccaacacattatcttttaagttttggataatattattcctattaataacatgtgtgatattacattgtggttttgatttgcatttcccttatgattaatgatgttaagtaccttttcagatatatgttggccatttgtatgtcttccttggagagatgtctattcagctccttggtccatttttcaaaatacagtttacttgtatttttgctattgacttgtatgagttccttatatattttggatattaaccccttatgagaaatatggtttgcaaatattttctcctattctgcaggttgccttttcgttttgtcgattatttcctttgctgggcagataatttttttattttattttttgaaacagtgtctcactctgtcacccaggctggagtgcagtggtgtgatcatgtctcaccacagccttgacctccccaggatcaggtgatcctcccacctcagtttttgtatttttagtagagatggagtttcaccctgttgcccaggctggtctaaaactcctgggctcaagccatcttgcccaccttgggacctcccaaagtgttaggattagaggcatgggccaccatgcctggctttgaaactttttaatttaatgtagtctgacttgtttatttttactttgttgcatgtgcttttggtgttacagccaaaaaagttattgccaagaccaatgccatagacattatttcttattctagtaattttacaattttaggtcttatgtttaagtttttaatcgattttgagttgatttttgtgtatggtataggataaaggtccaatttcattattttgtatttggatattcaatgtttaaaatacgatttattgaatggactatatttccccatgatgtgtttttagtgcctttgttgaagatttgttgatcatatatgtgtggatttgtttcttggctttctattctgttccattggtctatgtgtctgcttctatgccaataccatactgttttgattactatagctttacaatataatttgaaatcaggaaatgttctaaacttctttctcaagattgttttagatctttggggacttaggtggttccataaggttttaagaattttttttctatttctgtaaaaaattatattaagattttgatagtgcttgcattgactctgtagatcactttggttagtatcaacatttttgcaaaattaattcttccaaactatgaacacaggatactgttgcacttatttctcttcttcaattcctttcatcagtatcttatagtttttaatgtacagatttttcacctccttggttaaacttattcctaagtacattttcctttttgatgcaattgcaaatgggattgtttttctaatttattttattttgtttgtttgtttgtttgtttgtttttgagatggagtcttgctctgtcacccaggctggagtgcagtggtgtgatcttggctcaccacaacctctgcctcccgagttaaagggattctcttgcctcagcctcccgagtagctgggattataggcgcctaccaccatgcctggctaatttttgtatttttagtagatagagatggggtttcaccatgttggccaggctagtctcaaactcctgacctcaggtgatccaccttcctcggcctcccaaagcgctgggattacaggcgtgagccactgcacccagccactaatttattttttggatagttcattgttagtgtacagaaacaactgattttttatgttgattttgtatcaacattggtgaattccacccaacatttgaggaaaaactaataccaatccttctcaaaatcttccaaaaaaatgaagaggaaggagcacttccaaactcattttatgaagccagcattattctcataccattccagacaaggacactacaagaaaaaaaattacaggcccaaatccctgttgaacatagatgcaaaaatccacaacaaaatactagctaaaagaacttaacatcacatttaaaggatcattcaccataatcaagtgggatttcaccaatttcacttgggtagaattcaccaatgttgataaaaaaatcaacataaaaatcagttgtttcttcacacgaacaatgaactatccaaaaaataaagaacacaatcccatttgcaattgcaaaaaaatacttagaaataaatttagcaaaggaggtgaaagatctttatattaaaaactataaaatattgatgaaagtaattgaagaagacaaatggaacagatccctttgttcatagattggaagaattaatattacagaaatgttaatactaactaaagtgatctacagagtcaatgcaagccctatcaaaatcttaatcgaatcttttacagaaataaaaaaaaattctaaaattcatatggcaccacataagtccccaaaaatctttacaacttcactgaatttatttatcacttctaacatttttctgttggagtcattgggtttctgtattgaagagcatgtgatttgaaacagaccattttacttcttccgtcctgatttgcatgcattttatttctttttctcgacttattgctctaagcagaacttcaagtaccatgtggaatagaagtggcaagagtgagcattctcttcttcatcctgatttcagaagaaaagctttcagcatttcactactgactatcacgttagatgtgagtttgtcatatatatggcctttgttatatttagggatattccttctctacctaatgttttgaatgttttcatcatgaaagggtgttgattttttttcaaatgccttttctgtatctgttaaaatgatcatatgattattatccttcattgtcttattgttcatatttattgatttgagtatgttgagccatccttttatcccagggataactctcacttgattatggtgaatgatctttttaatgtgatgttaagttcttttagctagtattttgttgtggatttttgcatctatgttcaacagggatttgggactgtattccttttttttcttgtagtgtccttgcctggctttggtaggagaataatgctggtttcatagaaaaatgagtttagaagtgttcctcactcttcttttttttttggaagatttgagaaggattgatattagattttctttaaatgttgggtagaattcaccactgaagccatctggttctgggctttactttgttgggaagttcttttttaaaaaattgctgattcaatattctttttcattattgctctctacagattctctattcatgattcagtcttgctaggttgtggtatgtttctagaaatttatctgtttcttctagattacccaacttgtgtataattgttcataatagtctctaatgatcatttatatttctatggtatcagttgtaatgtcttctctttcatttctgattttatttgtttatgtcttttctctttcactctcagttactctagctaaaggcttgtctgttttttaatcttttcaaaaaacaactcagttttattgctcttttttatttttctagtttctatttcacttttttctgttctgatatttacttcattccttcttccgactttgggattagtttatggttcttttatagttccttgaggtgtaaagttaggtcgtttatttgattttttttttcttaatgtaggcatttatcactataaacttccttcttagaaatgccttttgctgcatcccatatattttggtatgttgtttttccacttttgtttgtctcaagttttttaaatttttcttttgatttgctctttgattctttggctatttaggagtgtattgtttaattttacagttttcctccctttactgatttccagtttcttagcattgtggtcagaaaagatatttggtatgatttcaatcttcttagttttgttaacacttgttttgtggcctaacagttgatgtatcttcaaaatgtacctgcgcaattacttgggacgaatgtacattctattgcttttggagggaatgttttgtatctgttaggtccatttggtctaaagtgtagttcaagtcaattccctattgattttctgtctgggtgatctgtccattgttgaaagctgggtatcaaagtcttctactactatactattacagtctatatttcctgttcatatctattaatacctgctttatatatttaggtgatccaatgttgggtgtgtatatattcaaaattgcatcttgttgatgaattgactcatttatttttatataatggcattctttgtctcttgttacagtttgtgactttaagtctgttttgtctgatatagtataggtgtctctgcttctttctggtttctatttacatgcaatatctttttaatctcttcactttcagtttatacgtgtccttgcagctaaagtgactatcttatagatagcaagtacttagttcttcctttttcatccattcagccactcactgtcttttgattagagaatttaatctacttacattaaaattaattatttataggtaaagacatactattgctactttgttaaatgtttttcagctgttttgtaagtttttttgtttctttcttcctctcttgctgtctttctttgtgattgatgattttcctgtagtactatggtttgatttctttttttttaataatttttatttttattttaagttccagggtacatgtgcaggatatgcaggtttgttacataggtaaacatgtgccatggtggtttgctgcaccttcaacccatcactgaggtgttcagccaagcatgcattagctatttttcctaatagtatctctccccacaccccaccccccttgacaggccccagtgtgtattgttcccctccctgtgtccatgtgttctcatgttcagctctcacttataagtgagaatacgcagtgtttggttttctgttcctgcaatagcttgctaagaataatggcttccagcgccatgtgtgtccctgaaaatgacatgatctcattcctttttatggctgcatagtatcccatggtgtatatgtgccacattttctttatccactgtatcattgatgggcatttgggttgattccacatctttgctcttttgaacagtgctgcagtgaacatatgcgtgcatgtatctttgtaatagaatgatttatattcctttgggtatatacctagtaatgggattgctgggtcaaatgttatttctggttctagatctcggagaaatcaccacactgtcttccacaatgtttgaactaatttactttcccaccagcagtgtaaaagtgttcctatttctctgcaaccttgccagcatctgtcattttttgactttttaataatcaccattgtgactggcatgagatggtatctccttgtggttctgatttgcatttctttaatgatcagtgatgttgaacttttttcatatgttcgttggcctcatgaatgtctttttttgagaagtgtctgttcatgtcctttgcccactttttgatgcggttttttttttcttgtatatttgcttaaattccttgtagattctggatattagaccgttgtcagatggatagattgcaaaaattttctcccactctgtaggttgcatgttcactgtgatagtttctgtctttctttctttttatattatacttgaagttctggggtacatgtgcagaatgtgcaggtttgttacataggtatgcacgtgccatggtggtttgctgcacccatcaacccgtcatctatattaagtgtttctcctaatgctttgacttcattatttctttcatttgattgagtatgctgtggatgttttctgttacttttttaattttattcattgtattcttcagcttcagaatttgtttgtttgtttgtttgtttgtttttcacagtttctatctctttgttgaacttattattttggtcatacattgttttcctgattctactgacttctttgtctgtgttctcatgtagcaacccaagcttatttaaaacaattatttttaatattttgtcaggaaatttgtagatctccatttttttttgttggcaactggaaaattactgagtttcttcggtggtattatttttgtgttgtttttggcaggtgttccttgaaatctcgtgttgccatgttcacatttgaagaagtagtctcctccttcagcctatactgactggcttcagaagagaaacagttataccagttagcctgactggggatactaagactcttgcacatcttttctgtagatgtgtcactcaagctctttttgagaaattttaagatcatctgtattttcttaatttcataaaaccaaaccaaattctgagagtttcccatttgttttctctaacgtggtgccctgaagtgctcaagtttttgtgccttctcccattcccacagagtcaagctgcctgcttctgcatgcacacaagttcacactcgctgtcagggtttgggccgtgtgcagggagcaagccaaggtagaggagagagggagacatgcaaagttttgggagcacccatgtgtcagcttcgggggtttacagttcaggcatcccaagccactagtgggtgggcctcctgatggagtctgtgaagttgttagtagtatatgtgtccttttgttgaatttccagtctctggttgctgtgagcccctaccgctgttccctgctcacagcctctcagtcactcagacatgatgatcccctcagtattctgagtggggatagaaagaagtaggcctcttggtcagtgtcccacgtggctaggaaagccaggcattcatttactacactctccctttcacccaatggagaaatcatgagtcaaagttgtatctcttggtgttgagttctgctagcttgagagacggttgacataagtagtgaaactattttctggttcttttcaatgtgcctattctcgtaattgttttgctccatctgtgagctggactaccagactcccacaaaggtactctcatacttgagtggttgtcaaaattgtagatagtggggaaatgacaggagaaaattcctgttctgccatcttgctgacatcaccccaatatctaaaatgcatattttaattatttttttccttgaataaagtttattttggaattgttgagttttacaaaataatttaaaatattctctctctctctctctctctctggggttgaggtctcactctgtcacccaggatggattacagtggcacaatcgcagctcactgcagcctcgaatttcttgggtcaagtgatcctcccacttcagcctcccaagtagctgggactacaaggcgtgtgccaccatgcccagctaatatttttacattttttgtagagatggggtctcactatgttgcccaggtgggtcttgaactcctggcatcatgtggtcctcccacctccacctcccaagtcctgaggataccaattgtgagtcactgtgcccagctatccccttctcactctctttttctctcacacacatgtgtgcatgcacagacacacacacctcatgttcattctctttaccatgatgatccttggttcttttacacagcttctttcagtttaccttacaatttagctcaacacaaattttaaaaaacttatagttacaatttaatttggcttggtccacacctctaacaaatttgatacaatctccaacttacggttgcaagttagttgattatattcacttccaagtatttcccccaacatttcattatgaaaatatatccatcaattaatgctcttatctataaaataattatttttttgcatttcaaaataagttacagacatcaatgcacttcatctttaaaccctttatcatgcatatcaggaagtagagtttaatatttctatatttcttgggggagaaatggagctaaaattatatactgtatcatatacaaacctgttaggtatatcaattcatgtgtattgacaaatgcgtgcaccatgtaacagaaactcctttcaagatatagaatattcctatcactacaaatattaatcaccaaaacaatggggagaatgtctctagggcatgtcagagaccttcactgcagcctctcccattataggccaggaggccttgaaggaaaaaaatggtttagtgggccaggcctcaggcacccccccttgctctttgcagccttgaaacatggtaccctgcgtccccagctgcttcagcttcagctgtggctaaaaggggccaacatacagctcaggccattgtttcagagagtgcaatccccaagctttggcagcttacacatggtgttgggcttgcaggagcacagaagtcaagaattgaggtttgggaacctctgcctagatttcagaggatgtatggaaatgcctggatgtccagacagaagtctgctgcaggggtagagctctcagggagaacctctgctagggcagtgcagaagggaaatgtggggttggagctcccccacagagtcttcactggggcactgtatagtggagctctgagaagagggccatagtcctccagaccccagaatggtagatccaccaatagcttgcaccatgcacctggaaaagccactggcactcaacaccagcccatgaaaagagctgtgagggtggctgcatcctgcaaagccacaggggaagagctgcccaaggctgtgggagcccaccccttgcatcattgtgacctggatagatgtgagacatggagcctaaggagatcattttggaactttaagctttaacgactgccctattggattttggacttgcatgggcctatagcccctttgttttggccaacttctcccatttggaatgggtatttttactcaattcctgtacccccattgtatcttggaaataactaacttgctttagattttacaggcttataggtggaagggacttgctttgtctcagatgagactttggacttggacttctgggttaatgtttgaatgagttaatactttgggggactattggaagggcatgattgtgttttgaaatgtgagaacatgagatttgggaggaactagggtcagaatgatatggtttggttttgtgttcccacccaaatctctccttgaattgtaataatccccatgtgtcaggggtgggaccaggtggaggactgaatcatgggggtggtttccctcatgctattctcatgatagtgatttataacagatccaatggttttataagcatctggcatttcccctgctggcactcattctctctcctgccaccctgtgaagaggggccttccaccatgattgtaagtctcctgaggcctccgaagccatgcggaactgtgagtcagttaaaactctttcctttataaattacctagtcttgggtatttctttatggaagcatgagaatgaactaatgcacagggtaaaaatttaaaaacaaacatacaaatgcaagtaaacaagccaatatttcaactgttcccattgcattatccttattctttatctatggtaccagaaaataatacatctgaaacaatttttttttcctgccatgatgtacactcaagtgggtccactggggtttctttcagtttcccaaatactagatatgactcttccctataccttatcttcatatgaagaaagctatgagaatatattaataactgaatatagtaacactactataggaataagcatgtgtatattccaactgatcttttaaaacttttattttgaaatatttatagattcaaaggaagatgcaaagagtatagggaagtgctatatgccctttatctagttcctctagtggtatcaacttacataactgcagtatcatatataaaccaagaaattggcatctgtataatccacagacattactcagacttctctagttttacatacactaatttgtatgtgtgtgtgtgtgtgcgtgcacgtttatgtgtgtaggtctatgcaattttaccacatgtgtatatttgggtaaccactacaatgatcaagatatggaactgttccgtcaccactaagatcccttgtgctattcctttataaacatctccctgtcatcctttttcacccataaaagctagtaaacactaatctgttcttcatccttataattttattatttcagaattgttatataaatgtcatcatacagtatataacacatagagattggcttttgtcactcagcacaattcccttgagatgcatccaaactgttgtgtatatcagtaatgcaatatgtttaatttctgtgtagtattccatggtagagatgtgccatagtttaactattcacctgttgaacaacatttgtgttctttctacttttgggctattacaaataaagttgctatgaacattcatgt

SEQ ID NO: 134312 - DNA, 352 bp, Homo sapiens
  Payload ID: 6232
  Gene Symbol: FGF13
  Gene Name: fibroblast growth factor 13
  ENST ID: ENST00000421460
  CDS Start-End: 223-352
acctccttccccccccccgccacccgacacctcctaatcctaaactccttatccaccccaaccctccgggaaggcaggagtttgcacccttcgacacgccgcgtgcaaagcagggggatctatcctccctggccacatgggcctttggctgatggaaaggctgggctttgaggaagctgcatagttctggatgacgccccccctggcacacaggaatacattatgttacgacaagattccatccaatctgcggaattaaagaaaaaagagtccccctttcgtgctaagtgtcacgaaatcttctgctgcccgctgaagcaagtacaccacaaagagaacacagagccggaag

SEQ ID NO: 134313 - DNA, 1165 bp, Homo sapiens
  Payload ID: 6232
  Gene Symbol: FGF13
  Gene Name: fibroblast growth factor 13
  Uniprot ID: Q92913
  ENST ID: ENST00000436198
  CDS Start-End: 251-1018
gagagttctttggaaggagagcgcgagcgagggagcgggcgagctccgagggggtgtgggtgtagggagagagagaaagagagcaggcagcggcggcggcggcagcggtggggaaaagcggattccgccccgaaccacaccgaggggagctcgtggtcgagacttgccgccctaagcactctcccaagtccgacccgctcggcgaggacttccgtcttctgagcgaaccttgtcaagcaagctgggatctatgagtggaaaggtgaccaagcccaaagaggagaaagatgcttctaaggttctggatgacgccccccctggcacacaggaatacattatgttacgacaagattccatccaatctgcggaattaaagaaaaaagagtccccctttcgtgctaagtgtcacgaaatcttctgctgcccgctgaagcaagtacaccacaaagagaacacagagccggaagagcctcagcttaagggtatagttaccaagctatacagccgacaaggctaccacttgcagctgcaggcggatggaaccattgatggcaccaaagatgaggacagcacttacactctgtttaacctcatccctgtgggtctgcgagtggtggctatccaaggagttcaaaccaagctgtacttggcaatgaacagtgagggatacttgtacacctcggaacttttcacacctgagtgcaaattcaaagaatcagtgtttgaaaattattatgtgacatattcatcaatgatataccgtcagcagcagtcaggccgagggtggtatctgggtctgaacaaagaaggagagatcatgaaaggcaaccatgtgaagaagaacaagcctgcagctcattttctgcctaaaccactgaaagtggccatgtacaaggagccatcactgcacgatctcacggagttctcccgatctggaagcgggaccccaaccaagagcagaagtgtctctggcgtgctgaacggaggcaaatccatgagccacaatgaatcaacgtagccagtgagggcaaaagaagggctctgtaacagaaccttacctccaggtgctgttgaattcttctagcagtccttcacccaaaagttcaaatttgtcagtgacatttaccaaacaaacaggcagagttcactattctatctgccatta

SEQ ID NO: 134314 - DNA, 687 bp, Homo sapiens
  Payload ID: 6232
  Gene Symbol: FGF13
  Gene Name: fibroblast growth factor 13
  ENST ID: ENST00000455663
  CDS Start-End: 68-687
gtgacttgctcctgcttgccttcctccatgattgtgaggcctccccagccacgtggaactaggtgtcatgaggacaagcatgaaaaaagtagggatgcatcatttgagttcttcaggaggaagctactacctaattctggatgacgccccccctggcacacaggaatacattatgttacgacaagattccatccaatctgcggaattaaagaaaaaagagtccccctttcgtgctaagtgtcacgaaatcttctgctgcccgctgaagcaagtacaccacaaagagaacacagagccggaagagcctcagcttaagggtatagttaccaagctatacagccgacaaggctaccacttgcagctgcaggcggatggaaccattgatggcaccaaagatgaggacagcacttacactctgtttaacctcatccctgtgggtctgcgagtggtggctatccaaggagttcaaaccaagctgtacttggcaatgaacagtgagggatacttgtacacctcggaacttttcacacctgagtgcaaattcaaagaatcagtgtttgaaaattattatgtgacatattcatcaatgatataccgtcagcagcagtcaggccgagggtggtatctgggtctgaacaaagaaggagagatcatgaaaggcaaccatgtgaagaagaacaagcctgc

SEQ ID NO: 134315 - DNA, 1990 bp, Homo sapiens
  Payload ID: 6232
  Gene Symbol: FGF13
  Gene Name: fibroblast growth factor 13
  Uniprot ID: Q92913
  ENST ID: ENST00000441825
  CDS Start-End: 39-719
ttctggatgacgccccccctggcacacaggaatacattatgttacgacaagattccatccaatctgcggaattaaagaaaaaagagtccccctttcgtgctaagtgtcacgaaatcttctgctgcccgctgaagcaagtacaccacaaagagaacacagagccggaagagcctcagcttaagggtatagttaccaagctatacagccgacaaggctaccacttgcagctgcaggcggatggaaccattgatggcaccaaagatgaggacagcacttacactctgtttaacctcatccctgtgggtctgcgagtggtggctatccaaggagttcaaaccaagctgtacttggcaatgaacagtgagggatacttgtacacctcggaacttttcacacctgagtgcaaattcaaagaatcagtgtttgaaaattattatgtgacatattcatcaatgatataccgtcagcagcagtcaggccgagggtggtatctgggtctgaacaaagaaggagagatcatgaaaggcaaccatgtgaagaagaacaagcctgcagctcattttctgcctaaaccactgaaagtggccatgtacaaggagccatcactgcacgatctcacggagttctcccgatctggaagcgggaccccaaccaagagcagaagtgtctctggcgtgctgaacggaggcaaatccatgagccacaatgaatcaacgtagccagtgagggcaaaagaagggctctgtaacagaaccttacctccaggtgctgttgaattcttctagcagtccttcacccaaaagttcaaatttgtcagtgacatttaccaaacaaacaggcagagttcactattctatctgccattagaccttcttatcatccatactaaagccccattatttagattgagcttgtgcataagaatgccaagcattttagtgaactaaatctgagagaaggactgccaaattttctcatgatctcacctatactttggggatgataatccaaaagtatttcacagcactaatgctgatcaaaatttgctctcccaccaagaaaatgtaaaagaccacaattgttcttcaaaaacaaacaaaacaaaacaaaacaaaattaactgcttaaatgttttgtcggggcaaacaaaattatgtgaattgtgttgttttcttggcttgatgttttctatctacgcttgattcacatgtactcttttctttggcatagtgcaactttatgatttctgaaattcaatggttctattgactttttgcgtcacttaatccaaatcaaccaaattcagggttgaatctgaattggcttctcaggctcaaggtaacagtgttcttgtggtttgaccaattgtttttctttctttttttttttttttagatttgtggtattctggtcaagttattgtgctgtactttgtgcgtagaaattgagttgtattgtcaaccccagtcagtaaagagaacttcaaaaaattatcctcaagtgtagatttctcttaattccatttgtgtatcatgttaaactattgttgtggcttcttgtgtaaagacaggaactgtggaactgtgatgttgtcttttgtgttgttaaaataagaaatgtcttatctgtatatgtatgagtcttcctgtcattgtatttggcacatgaatattgtgtacaaggaattgttaagactggttttccctcaacaacatatattatacttgctactggaaaagtgtttaagacttagctaggtttccatttagatcttcatatctgttgcatggaagaaagttgggttcttggcatagagttgcatgatatgtaagattttgtgcattcataattgttaaaaatctgtgttccaaaagtggacatagcatgtacaggcagttttctgtcctgtgcacaaaaagtttaaaaaagttgtttaatatttgttgttgtatacccaaatacgcaccgaataaactctttatattcattc

SEQ ID NO: 134316 - DNA, 652 bp, Homo sapiens
  Payload ID: 6232
  Gene Symbol: FGF13
  Gene Name: fibroblast growth factor 13
  ENST ID: ENST00000448673
  CDS Start-End: 359-652
gtgctttggctcagatgcagactattgcaaaccgcagaaactcacagtgacgacatgaccaagaagcttcctacccctggcctgggagcaagtgaccgtgggcgctaataacaacagggccctttaagattttggtccatggtgggatcttgcttgtttctcaccaccaggcccattgcgtctccacttctaaggcagcggcggcggcggcagcggtggggaaaagcggattccgccccgaaccacaccgaggggagctcgtggtcgagacttgccgccctaagcactctcccaagtccgacccgctcggcgaggacttccgtcttctgagcgaaccttgtcaagcaagctgggatctatgagtggaaaggtgaccaagcccaaagaggagaaagatgcttctaaggttctggatgacgccccccctggcacacaggaatacattatgttacgacaagattccatccaatctgcggaattaaagaaaaaagagtccccctttcgtgctaagtgtcacgaaatcttctgctgcccgctgaagcaagtacaccacaaagagaacacagagccggaagagcctcagcttaagggtatagttaccaagctatacagccgacaaggctaccacttgcagctgcaggcggatggaacc

SEQ ID NO: 134317 - DNA, 1039 bp, Homo sapiens
  Payload ID: 6232
  Gene Symbol: FGF13
  Gene Name: fibroblast growth factor 13
  Uniprot ID: Q92913
  ENST ID: ENST00000626909
  CDS Start-End: 268-867
gtggctctctaggaccggagagttctttggaaggagagcgcgagcgagggagcgggcgagctccgagggggtgtgggtgtagggagagagagaaagagagcaggcagcggcggcggcggcagcggtggggaaaagcggattccgccccgaaccacaccgaggggagctcgtggtcgagacttgccgccctaagcactctcccaagtccgacccgctcggcgaggacttccgtcttctgagcgaaccttgtcaagcaagctgggatctatgagtggaaaggtgaccaagcccaaagaggagaaagatgcttctaaggagcctcagcttaagggtatagttaccaagctatacagccgacaaggctaccacttgcagctgcaggcggatggaaccattgatggcaccaaagatgaggacagcacttacactctgtttaacctcatccctgtgggtctgcgagtggtggctatccaaggagttcaaaccaagctgtacttggcaatgaacagtgagggatacttgtacacctcggaacttttcacacctgagtgcaaattcaaagaatcagtgtttgaaaattattatgtgacatattcatcaatgatataccgtcagcagcagtcaggccgagggtggtatctgggtctgaacaaagaaggagagatcatgaaaggcaaccatgtgaagaagaacaagcctgcagctcattttctgcctaaaccactgaaagtggccatgtacaaggagccatcactgcacgatctcacggagttctcccgatctggaagcgggaccccaaccaagagcagaagtgtctctggcgtgctgaacggaggcaaatccatgagccacaatgaatcaacgtagccagtgagggcaaaagaagggctctgtaacagaaccttacctccaggtgctgttgaattcttctagcagtccttcacccaaaagttcaaatttgtcagtgacatttaccaaacaaacaggcagagttcactattctatctgccattagaccttcttatcatccatactaaag

SEQ ID NO: 134318 - DNA, 12882 bp, Homo sapiens
  Payload ID: 6233
  Gene Symbol: FGF14
  Gene Name: fibroblast growth factor 14
  Uniprot ID: Q92915
  ENST ID: ENST00000376131
  CDS Start-End: 97-855
ctggccgaaaacaaacaatcactgagaagtctcaaagaaatataccacgtgaggggaaaaaactgggagaagatccggaatattatcgtttttcctatggtaaaaccggtgcccctcttcaggagaactgatttcaaattattattatgcaaccacaaggatctcttctttctcagggtgtctaagctgctggattgcttttcgcccaaatcaatgtggtttctttggaacattttcagcaaaggaacgcatatgctgcagtgtctttgtggcaagagtcttaagaaaaacaagaacccaactgatccccagctcaagggtatagtgaccaggttatattgcaggcaaggctactacttgcaaatgcaccccgatggagctctcgatggaaccaaggatgacagcactaattctacactcttcaacctcataccagtgggactacgtgttgttgccatccagggagtgaaaacagggttgtatatagccatgaatggagaaggttacctctacccatcagaactttttacccctgaatgcaagtttaaagaatctgtttttgaaaattattatgtaatctactcatccatgttgtacagacaacaggaatctggtagagcctggtttttgggattaaataaggaagggcaagctatgaaagggaacagagtaaagaaaaccaaaccagcagctcattttctacccaagccattggaagttgccatgtaccgagaaccatctttgcatgatgttggggaaacggtcccgaagcctggggtgacgccaagtaaaagcacaagtgcgtctgcaataatgaatggaggcaaaccagtcaacaagagtaagacaacatagccagatcctcacaggtgttgtgacttattcgtcctgagcacagttgagtgatttatcctcaccagacattcctgctccgtggctgaagagcagcaggaagtaagctaatgcttattctttgctgtctccgaacttctctgttgcaagtggataaatctcaacctgttgcaccccccacaacaagaagacacctggataaccagctaaactcagaccatggaatgccctaccagatatggaatgcctttttaatatcttttctgtgactgtgacacttcatgtgaatgacatacttcacaagtacactcgataccttgcctgctgacagctacccataatcctttttgagtcctgtttcagcgaaatctatgtgtttaagttcaattttgtagcacacaaataatattgagtaatttctagttagacgctgtaaacctgtgctattacggatttctcttcttcccatttttacagggctgctcgctccactgtctgtgaccttttgcagggattttgttcctctaaatcttaaatgttgcagttggcttaggtcggagagcaatcagggaatcaggaagccttctaaacctattattacaaattgcatctataaagaaagattaagaaagattgttgtctctggctcacactatcgattaaacacacatatacgctctgtccagtagcagatactgtgctcccaaggtcggcattgcctgggtgggaaatggctcaaacacaatccagggaagctctctatgatatgtgtttgacatccccctctagtttctttgtgtgtgtgtgttttatacatatcacaagcttactggtaatggtaacatttgccttgcccagcgagcaagacccactggtttttgagaaagtgggtccaaagatttctgtaggccttgtaggcctgattaaggttcatttttcatctattaattctcattatttggaaaaaaaaaaaaaggaaaatcagtaattataacctacaagaattgcgctacctaaatccatttcagatatactccgtcctgtttttaatgaaccaaacttaacgccatccccgtttctggctgcgttcccctcatactcagcagagcatgggcaagacggctgttgtgttctttcctgcagcagcaatgcaaacgttagttataaattaattagactttaatatttttggtgtttaatgacaagtttttaaactggacatattaggaaaaatattttttttagctcagcatgctgagtccggtactgtgtatttcaccagtacatgcctctagctcagcatctggggctcatgttgcccagtggctgggttagaggtgccttgccatgatctcagaatacagtctgttgaattatcctagatgaaaataaaggcaaaccaacacattcatccatgaggattttggtccattccatttattttcttttattttgcattcttaatttcctttttagtttaacactgtttgtttgagcttagggaagacaactaccaagaaaggccaggaacagttgactacacaatgaagattccatgcaaaatgttcaatattggatctaaaggggttcaaaatgtttcatactaaactgtttgggaatttatttgttaactctgtgtacacctaataaaattcaatgttttcttctcagaagagttcattgagaccaaactgaacctcatttattgaaaattatatgtgggatcaatgtactggcctcttgttattctttctatgtgggaggatgacccagtcatcattttccccatctgcactgtatttattgggaaattattttgtcactgctttcataaatcttcttcatgacagcccttgcccagcattaaaaaattctggcctgcttagctgattaaaggtttagtagaaatttaactgtttgtttatgcttatttcattttcatattggattctacttgaataaataaaaagttagcagaacgtttgagtagatttattgccaatgatgctaaattacaaatctaacaaacaaaatgattcctttggtcatttttgatttggtgttatgtcatcttgaagcctattgtttttaacaggaacagttaaaatatattagataacttccattaaccaattattttcagaaaacatagatcccataatatgtggccaactatatgagtaattaactaacttgtaatacagtcaaatgggcttatggacactacttacagcagcaacacttcacttcacacaaacacacacatatacacacacacacacacacacacacacacacacacagagcaaacacccccatctatttgttactgataattagccctacttgctggtttctttttcccctgcaagtctgtttattggtttaaattaagacaagatttatttttgtaaatgactgagatttatgtaaatgtgtatctctgttgtgttttatatatggggtgtctataagggcatttatccctatgaaggatgtcaaatactttcttctaatatatgtttagacatattgcagaggggtccttgttatttgtaattgagttaggtcatttactttgtgtctggtctcacctgtagcatgggaagaggacagcaatgatgagctgcatgtagtaggtacctgtgtatcaagaactgttggtatgtattgctaatttgcatacaaagagtttgtctgtctgcattgtagtttgtgtttaatatcatttgttaaattcacaaatacaacatattgaataaaatatttatatgaaggcatattaaaaaacatcaaacaactttatgtaacaaaatggcattgcattactcaccaatatagagaaatgtcatgtaaataagttggtaaactcaatttccccctttaccatgccaaagaaaattttagctctttgatgatacctctcttgctatttgtttgggataagacttcgccatttttttcccctcagaaattaagtttgctgttattaagtaagaagtgcaatctgtcactactgatgttccgtatagtaaatctgatggaattcatttgtatttagactgtgtgttttgtacctccatgtgcatatgtccattgtatcaagtctctataatactccattccttctgcatgcatatctggtgtgggagggttatttctactgatttgttatagtagctgattgctttgccagtccctcaacaacgctcagaaatgttgttttggtatttcaagtgacaacatttttgttttctaatataagattgctttttaaaacattttgctaccactttacttggaaaaattagagaagacatgacaattctccaccctatgtaaagagcaaaatggaactgaacatcatttcattacaaatcctgaagaatttggagattcttgctctaaatgtttgcttgtcctgaatgtttttgggtagcagtggcttaaagagatccacgatgggtccaaaggactcccgctccagttcttctaatagtttgcctcttggggagcaagcagaagttctttatcatacctagccacttgcttaattaatgctttaagcactaaaagttgttatttttatcaggatgaacaatatcagatttggttgtctttaaaagcaaaaaccaaaaacttattctttaagtaagttagacacgtatcacttcatttaaaattatctccctaatattatggatcattaatatttgatacatattcaaaaagagaccacattgactaacatccagttgagaacaagatgaaaataattgaaatattttttccattttaattcagaacaaggctatatcaagggaaagcgactgggctaaatcctcaatttttttttccaaaatgcaggcatatcaaaatccaggatgtacatggtcttactttgagtgaaatagtagtcatagctgaggtttcttagcctacaatgtgacatagggcctgttgactctcttgaatatggagtagggtttcaaagtgttgacagttgagtctgcaaactaaggctgagttatattttagttttttttttttttcctggttttcactaagtctaattccaatgtctactggcagagattgtgtttgcatttgaggtagtggagggcggtactttccaagtgctgttggaatccagataaactcaaggagcccagaaagacaacgggtataatggctctcctcttatgacttagcactttagttgacttttttgaaaaagtctctgggtggaatacctcagtgatgatgatttgccaaacaagcagcgttagtgccaacaccttctctaaacttgctgcatcccttccaattgacattaatcccactgcaacttcctaaaaacaggaatgagccaatgagatttgcttattttctctcacccattacaagtaagtttgttcttgccctgcttgttttttagagggagtttctatcatagagttgaaaatcacatttaagaaggaaagagtttatgtctttacatgtaactattttattttttccaatctaaattcaatcacttcttaatagatatattggtgtttgcattgctggcatcaaaaccacacatacacacacaaacacacacatacacacaaacatagtggacagaaataagtaaaaatatttctgttttcaaagaaaaagcattccttagagtttaggtaccattaacttctactataatacagttccggtactatggtttctaactaaatgaacactagaacagagctgactatattttcatctttgtccaaaattttagatgaatcacattttgaactttttatggtatgataatttctccaatatctaaattctttttctgagaaaacaaatgccgaggacatttttgacactcttcttacatgagactatgaaaaagagcagcacttttgttgtagttgttgttgttaataaaaaggataataacatacagaggattataagaaaaataagacatacctgaggttttgtgatgagctatagagaatcaagggcagttccagtggagctgaggctgacaaagtactgcccagctgccagccaaatccacccttaagttgcttttgtatggcctgggagctcagaaggaattttttaaattttttttacagctttaaagtattaaacagaaaccaacaaagaagaatatgagacagggacgtacgtggtccgtaaagtttaactttctgatccttaataggaggataagcgccgtgatagagaaatccaaaggtcatttgtattacgatggctagataatgtaatgaattccaatgtctgtgcatcagcgaatacgtcatcaaaattgctacaaaacaataataataggttgttcacagcttaaaatgtttaggtagtgaagaggaaagaatataacctacattatttattgactacttatatttccctcattttacggaagagatctatcaatttacgtactcaataatagaactacaacatggttgcactccttaatctcaggatagagataacaatttttataaatctattacattatgagaacattgttagtactataaaaatcaggatcagttaaatgttctcttaaaataattttcaatattaaatttttaagtaactcagtggatgcatattttccttatttttggaaatttgacttataaagtttaagccatgactagaatatttacatcattaaaataaaatttccaagtaaaaattttcatcttaaagtaatacggaaatgattttgctacattattctaggattttacaaagtaattcacctttagaaaaaaagtggttttttttttagctctaaataattaaaggttgcctaaactaatgtgtataagtagatttacctgtaaatatgtaagggaagtcccaattattgtacactttcataattcaatgtgaatttcatacaaagcaaagtttcaccattaagaaaataaacattttgttcctatcactgagtgaatatttgtaatttctatttaagccatttctagatttttttttttttttggtcttttgtgagcttctgagattggtgccattttatcacagtatttctcgtcttgacttctttgcatgaccccaggtttccagtaagtaaggtatccttagaaaaaaaagtattttaagggaaatggatgcatacttcaggcccattttatatgtaactcaatattgtctttttaaaaggccacactaccatggaataaattaaaataaaaaatcagatttcttgtacgcataacccctgcccagttttaaaaatgtgatcccttatttctagaaacctaaaatagatatccctgaataacaattcatttttaattatcagtagatatatatactgacacagagtataaacaacttctgtcactatttatttaaaatgttaaattgtacatttttcataatttctttaagagaatcttctttggtgagtttaaagtgagagtagacaaataacttagtggctaaatgatttaatgtcagatgacttaatgaccagtttttgcccttgatccagccccactctgatattctacctcctgtgtgcttgtcttcattgtccccatattaaaatggtgactgatacggaattctggaaaaatctgatcgattaattaatgtgaatatgcatgttttccttagattctaatatggtctttcttgtgtaagaatgtggatttctaatagccatataactcaatgtttctcagtttgagccctattggcatttggggctggataattccttgtttgggggctgtcctgtacactgcgggatgctcagcagcatccctggcctctacccaccaaatgtctgcagcataccttcctacccgacccagtgtgacaatcaaaattgtctgtagatgttgccaaatgacttttgggtggaaaaattgctctcgttaggaaccacttatgttaattatggaagaatcttttttttctaatgttatttgcatctaaatttgcataactcatttctaataggtactcggatttcattcgtaattcagaaatagaaaaacatacaatggtctttttaacctgtcctagtggtgaatatacatggtttccttcgcatttatctgttctaatggcccagaaaaaataagaatccagacctctctcatgtaattgttaaggatattctgagccaagccagatttcacatgcatttccattccatccatcccagcattcacagtttccacagctacatattccattccctgcaataaaatacatataggtatcatgattatgatcaaaatgtgccaaatttaaacatgctattataaatcacaagtgtccacaatgaaatcatttcattcatccttggtagattttcttattgtgcaatgatgttattattacatcttattaagcagctgcgagacatctaatctttcaaacaattagtggcatttatttggtgccaccctttaccgatcagatagtcaccatcctgtatcactccagctaggcttttaggtgacaattttgttttcccttaaagagcaagttatatctgacttatgaataaatacagaaaaacataaggctctttgacataacatgaggcaggccaagtaatccgtgaagagagtcttacgtagtaaggatgggcagaaagcaaaggtctaacttaatgacacacaaagagtcatcttttaccttcagctagagctgaggagaagtatacatgtctctgtttcctcgtaacttggctaaacaaatgaatttataaccaattatgaggactcaataaattaggatagcagtggctatgacacggctgagccctctttatacctctcccccatacacacatccagttccctaaaagcaaccaacacatcaactagtggtacccagattctgtttaaaagaatatttcattccctataccatgttcaaagtaaaatggttgccaacaaaattcttttctgtgttcaatatacaactgcatacatgtgagtttgagggtggggaggttactttgtggaaggatcccaaataatcacaaaatttagcttcattctcttgtattcttctatgcctaggaataatgtgaggcttttgtgagggctttttcccaaatgcccacttcgcctttggtagatatttcatattcacggttggccctgttggtccagccacctaaagcattgcatgacgagtgtctcttggctctataacaaactgtggcatagagcaattagaaaaggttaatactgcacctgtacaaatgagaccatcatgtttgtcgcagtctctgtcatcacagtcacagaactccccagaaatataccactcttcagcagaacaaatgcacttcccacaatgacaagaacctgaaattacaaaggctattactcaccatcaccttataactaaaggtttccatctcgaatagaatatcgttgacacactgacaacaggcttctaataacccatcatccaaaggtaaaagtgtattgaatggctggtttctcagaggggagctttacttactgtaattcataaaggtcacccaggaaagccttcattatggatctagacagttgcaattagccttgaacaaatgtcccatggcccagtctggttgaaatgtcaatgagagcaggatggggttgattcttatagatggtcttccaaaaaagtattcaaaaatagattttttcctcctaaattgaatcatgtttttaaagtgcctgctctttaaaggaaatgaatagggaattgtattaaattaggttgcatttctaattaaaacaactactaaattattgtgcttataattttggattttcgtttacatgattttcttggagtaggagcacacctgcatattgggtggctaattaaagtgctaaaaatgcatacagtcactcagtatatttgccttgtgagactcatcctcaggaccctctgtcataaactgggatagctcaaattactcccaaagttcatattttatgaggctctggattcaactctttttccctccacttcacccatttctcctacctaactaaaaaacttcctctttggttatttaaaatatctttacttactgagtaaaaattttattaatgatatatttaaaataaaagaaaataaatgagatgatgaatggtatccaagacagaagttctctcagtctaaacagctttccatgacagactaaaaacccttacatggaaaaactgcctcaacgacagcaggaaagactttacaatgaaaaagaaacaaataaaaaggactttcttttccttctgtttccttgggttggttgttctttccaaacatgacttccatttactaaaagatggctgtattctttttgagtcaaaatcacgttgaaaaaatgtgcagttgaaaagagtattttgacatatttaacaaaactgcagaattggtaagttcaaaatatattgaaaaggggcaagaatcaatcattagtgcttcttttaaaacacagtgattaaaaatgagttaacagcctgggtgattaaagtgatcaggaaaaaggagttgtggtcatcacagatatcatgaaaggattcaggttcatgtgtctcaactatgtgatatttcatatcagggaaactggtatatgcatttcagctgcaaaaatccccaaagtccaaattaaatgtttgccatttcttgacacacttctcaaagtaagagtgcagtcagaattatttagattgtgacaattgtgttttttaacttcttgcgtagctatggcataattgtatttagtcttgacttgttttcctgagggtccaggttgatttgcatgctcttgaggaaatatacacgtcttctcagttttaataattgactgacagccctgtggtttctcaggacccagtgagctgctgctcccaggtcagtctgcaaaggatgctggttcccttgtggtctcatcaaggtgaggaatttcctgattttagagatttctttatcctaattttgaagactttctttcacatttctaggcataaaaaaatgtacagcactctactgcttgtttaacaaatggatagtgatatatctgccaacaaagaccacatggagtatttcattgactatcagagaagtttcctcgaaaggcaccatacttagtgttttatttccatgagtgaaggaaaattagttatttgaagtatttggctgtctttagttgtttctaaagtagtgctgattttatatgcccataatattcatatatacacccaggatatcattttatatatgtcacaattcatgaaatatcttatatttcatcttcaaacttatcctctggccctggaactattctaatcactgctcttgcttctggaatgcttagcttcatgccatagtagagcattttcagaaaactggtaagctcagctaaagctaatatggcatatatggatagaacatttgatgagtaaattccagttctgaaagtctactagtcgctgaaatacttagaataaaaaatgaggattgattttgtatgtgtcatgaaacagtagcatttctaggtcagcattttcccagctgtgttattctttcctgtttgtcaatgctcagtgcatcttagaggtaggaaattattctactgcttgtgaaactagaactagatagcacatagtaataacacagtgtgaatagttattaggacctattatagcacttttcctgtagaacgctctagctgttttcttccataacatgggtcaaattgtgcctctcttaaatgggaagcacacagggagagggttccatcagacagatgtaggctgcatgactatcaagaggtgagaaatggttcaactcagctggccaagacccactcacacccctgagacccagcctagccagagaacagctggctgatcttggcaggagttttagggcagatagttcatcaccacagcaccactaatccattcattttctttctcaatataaggacccttgagaatgttcccatctcccttctgtgcatttttgctggcttccatccctggggaatcagccacattttctcatgtgtcttcagggcatcttaggacataggaaggggaaagaaatgaaattttaccttcaaagatgagaatggaagagagaataaaggaaactgtcctggacctcacaggcaataaacaaacagttaactgaagacttcactctgattcaatccactcttctttttagtgatctgcctatctgtgatgtatctccaggcaaaaactttcatatacagtagtttaaaaatgagctgtttcttcctgcaggtctgactgcacaggcatattgagcgaggcaacttgaacaccaggctgaggccgattttgtgaagcatctttcactctttctcttttctggggatgtgggacaggttgtgggtgggtgagtgtgtgtgtatgctggacttctttggaagatgtgggacccaagaagtatcactgtgagagtttaaggagacagttaatgacatgtgtttacagccattgtcacacaacagcatctgtaagaagattggacgtgattatctggatctagcttgaagtagtcaaggcaaagatataattgtgtagtcttgaagccaaataaatccccaaatgaacaaaacaacccacaatgaattatatcatgtactttgcaaaggtagctaagcttagggaagacccggcactgcactaacctcatctctcttggttattcacaaaaacaatttgagtctaagggcaaggcacctttgtcagttgcccattccattactaatgttggactttctttttcattcaagcctgacaaaatgctgcaacctgacatcccagcaggcagttttcactattgtactaactactccatctgttatgaaggtcacaagaatgtatcttgttttaaatttttctatggagtgatttattgtcttggctataaatttgtaaagaaataaaacgctatttcttcatcgtc

SEQ ID NO: 134319 - DNA, 744 bp, Homo sapiens
  Payload ID: 6233
  Gene Symbol: FGF14
  Gene Name: fibroblast growth factor 14
  Uniprot ID: Q92915
  ENST ID: ENST00000376143
  CDS Start-End: 1-744
atggccgcggccatcgctagcggcttgatccgccagaagcggcaggcgcgggagcagcactgggaccggccgtctgccagcaggaggcggagcagccccagcaagaaccgcgggctctgcaacggcaacctggtggatatcttctccaaagtgcgcatcttcggcctcaagaagcgcaggttgcggcgccaagatccccagctcaagggtatagtgaccaggttatattgcaggcaaggctactacttgcaaatgcaccccgatggagctctcgatggaaccaaggatgacagcactaattctacactcttcaacctcataccagtgggactacgtgttgttgccatccagggagtgaaaacagggttgtatatagccatgaatggagaaggttacctctacccatcagaactttttacccctgaatgcaagtttaaagaatctgtttttgaaaattattatgtaatctactcatccatgttgtacagacaacaggaatctggtagagcctggtttttgggattaaataaggaagggcaagctatgaaagggaacagagtaaagaaaaccaaaccagcagctcattttctacccaagccattggaagttgccatgtaccgagaaccatctttgcatgatgttggggaaacggtcccgaagcctggggtgacgccaagtaaaagcacaagtgcgtctgcaataatgaatggaggcaaaccagtcaacaagagtaagacaacatag

SEQ ID NO: 134320 - DNA, 1650 bp, Homo sapiens
  Payload ID: 6234
  Gene Symbol: FGF16
  Gene Name: fibroblast growth factor 16
  Uniprot ID: O43320
  ENST ID: ENST00000439435
  CDS Start-End: 271-894
gagaggccgggggagatggatgcggaggggaagaggcactttgactgagagcaaggtcaggagcacgctgccccgcgctccccgccactgagaagttccttggacgcgaacagacgtcgactgcagctcggcagagcgcggagcaagcgagctagcgagggagcgccgccgaaccgcccgcgcccgctgcggggagaggcagttcgcgccccgtggccccggctcggcccgcgcgcgcccagcacaaccagcgccgcaatcggcccagccatggcagaggtggggggcgtcttcgcctccttggactgggatctacacggcttctcctcgtctctggggaacgtgcccttagctgactccccaggtttcctgaacgagcgcctgggccaaatcgaggggaagctgcagcgtggctcacccacagacttcgcccacctaaaggggatcctgcggcgccgccagctctactgccgcaccggcttccacctggagatcttccccaacggcacggtgcacgggacccgccacgaccacagccgcttcggaatcctggagtttatcagcctggctgtggggctgatcagcatccggggagtggactctggcctgtacctaggaatgaatgagcgaggagaactctatgggtcgaagaaactcacacgtgaatgtgttttccgggaacagtttgaagaaaactggtacaacacctatgcctcaaccttgtacaaacattcggactcagagagacagtattacgtggccctgaacaaagatggctcaccccgggagggatacaggactaaacgacaccagaaattcactcactttttacccaggcctgtagatccttctaagttgccctccatgtccagagacctctttcactataggtaatgaacctctggtgtgccctctgtgacccatgtaccctggggccacggttgtctctgcaagcactatattcatagcttttcaatccttccttcctatcattttagataacagaaaagcacttactgttgaactcaacccagctgttcccttgttgttcaaagtgtatatcaaggttgggttattttggggagggatggggggctgggctcgagggaatcttgtatatacttttttctttactcatgttccttcccctgaggtagcataacaaagaatgggagcccctgctaagggccaggggtgtcttaccccacaatttactcaaataccttgacaatgggtataaatgaaaggccaaggaatctgccacagatgctacctacagagctttggaaaagtctcattaagaaaatccttggggctacagccttgctgcaagccttccctgcattggctctgcagatttctcatctgtcctgacatgcagttttcctgtcattggaagtgggagatggggtaggttgtaagaaaatgatattaaaatgtaagcatggatactgtgcataaggacaaactatttataaaatgtatatgctatttattttatatatttatttatttcaaaataataattttatttttaatgagagatgcgatggctggattttcatcagaaagaataaggtcctactgaaacaggataaaatgagttattaaaggcttttactgacaataaaatttgtctttatattgtaa

SEQ ID NO: 134321 - DNA, 1714 bp, Homo sapiens
  Payload ID: 6235
  Gene Symbol: FGF17
  Gene Name: fibroblast growth factor 17
  Uniprot ID: O60258
  ENST ID: ENST00000359441
  CDS Start-End: 504-1154
tgcggctcacccttggggaggtggggcgccagacctgagtgcaggagacgcagacctggaagggctccccctccctgacctgccacacatcgagtttgtctgcgtcgagtttggccagtctgtgagggtcaggaatagagcaggagacagcagggccacctccttcagaaggcccccaccgctccatccctgcactgggtggcccaggagagactggcagcccagagggcacagcgcgcacgcccccacccgcatctgctttgcagcctcactggccaggaaggtggacacctcatacctcagtctcccaattacgccctcctcctccccctcctcctccctcttttctctcctcctcctcccctttctctcctcctcgcccccctgaaaacctgtggctcggagagaccttggcttctctgggactctacccctggggacttcccacatctgctcctgagcttgggggcaggggggcaaccgcctgaggaacctctccagcgatgggagccgcccgcctgctgcccaacctcactctgtgcttacagctgctgattctctgctgtcaaactcagggggagaatcacccgtctcctaattttaaccagtacgtgagggaccagggcgccatgaccgaccagctgagcaggcggcagatccgcgagtaccaactctacagcaggaccagtggcaagcacgtgcaggtcaccgggcgtcgcatctccgccaccgccgaggacggcaacaagtttgccaagctcatagtggagacggacacgtttggcagccgggttcgcatcaaaggggctgagagtgagaagtacatctgtatgaacaagaggggcaagctcatcgggaagcccagcgggaagagcaaagactgcgtgttcacggagatcgtgctggagaacaactatacggccttccagaacgcccggcacgagggctggttcatggccttcacgcggcaggggcggccccgccaggcttcccgcagccgccagaaccagcgcgaggcccacttcatcaagcgcctctaccaaggccagctgcccttccccaaccacgccgagaagcagaagcagttcgagtttgtgggctccgcccccacccgccggaccaagcgcacacggcggccccagcccctcacgtagtctgggaggcagggggcagcagcccctgggccgcctccccacccctttcccttcttaatccaaggactgggctggggtggcgggaggggagccagatccccgagggaggaccctgagggccgcgaagcatccgagcccccagctgggaaggggcaggccggtgccccaggggcggctggcacagtgcccccttcccggacgggtggcaggccctggagaggaactgagtgtcaccctgatctcaggccaccagcctctgccggcctcccagccgggctcctgaagcccgctgaaaggtcagcgactgaaggccttgcagacaaccgtctggaggtggctgtcctcaaaatctgcttctcggatctccctcagtctgcccccagcccccaaactcctcctggctagactgtaggaagggacttttgtttgtttgtttgtttcaggaaaaaagaaagggagagagaggaaaatagagggttgtccactcctcacattccacgacccaggcctgcaccccacccccaactcccagccccggaataaaaccattttcctgcaaa

SEQ ID NO: 134322 - DNA, 1706 bp, Homo sapiens
  Payload ID: 6235
  Gene Symbol: FGF17
  Gene Name: fibroblast growth factor 17
  Uniprot ID: O60258
  ENST ID: ENST00000518533
  CDS Start-End: 532-1149
accagagaccccagccccacttgacacctgcggctcacccttggggaggtggggcgccagacctgagtgcaggagacgcagacctggaagggctccccctccctgacctgccacacatcgagtttgtctgcgtcgagtttggccagtctgtgagggtcaggaatagagcaggagacagcagggccacctccttcagaaggcccccaccgctccatccctgcactgggtggcccaggagagactggcagcccagagggcacagcgcgcacgcccccacccgcatctgctttgcagcctcactggccaggaaggtggacacctcatacctcagtctcccaattacgccctcctcctccccctcctcctccctcttttctctcctcctcctcccctttctctcctcctcgcccccctgaaaacctgtggctcggagagaccttggcttctctgggactctacccctggggacttcccacatctgctcctgagcttgggggcaggggggcaaccgcctgaggaacctctccagcgatgggagccgcccgcctgctgcccaacctcactctgtgcttacagctgctgattctctgctgtcaaactcagtacgtgagggaccagggcgccatgaccgaccagctgagcaggcggcagatccgcgagtaccaactctacagcaggaccagtggcaagcacgtgcaggtcaccgggcgtcgcatctccgccaccgccgaggacggcaacaagtttgccaagctcatagtggagacggacacgtttggcagccgggttcgcatcaaaggggctgagagtgagaagtacatctgtatgaacaagaggggcaagctcatcgggaagcccagcgggaagagcaaagactgcgtgttcacggagatcgtgctggagaacaactatacggccttccagaacgcccggcacgagggctggttcatggccttcacgcggcaggggcggccccgccaggcttcccgcagccgccagaaccagcgcgaggcccacttcatcaagcgcctctaccaaggccagctgcccttccccaaccacgccgagaagcagaagcagttcgagtttgtgggctccgcccccacccgccggaccaagcgcacacggcggccccagcccctcacgtagtctgggaggcagggggcagcagcccctgggccgcctccccacccctttcccttcttaatccaaggactgggctggggtggcgggaggggagccagatccccgagggaggaccctgagggccgcgaagcatccgagcccccagctgggaaggggcaggccggtgccccaggggcggctggcacagtgcccccttcccggacgggtggcaggccctggagaggaactgagtgtcaccctgatctcaggccaccagcctctgccggcctcccagccgggctcctgaagcccgctgaaaggtcagcgactgaaggccttgcagacaaccgtctggaggtggctgtcctcaaaatctgcttctcggatctccctcagtctgcccccagcccccaaactcctcctggctagactgtaggaagggacttttgtttgtttgtttgtttcaggaaaaaagaaagggagagagaggaaaatagagggttgtccactcctcacattccacgacccaggcctgcaccccacccccaactcccagccccggaataaaaccattttcctgc

SEQ ID NO: 134323 - DNA, 1986 bp, Homo sapiens
  Payload ID: 6236
  Gene Symbol: FGF18
  Gene Name: fibroblast growth factor 18
  Uniprot ID: O76093
  ENST ID: ENST00000274625
  CDS Start-End: 545-1168
cgatgcgcacggccggagagacgcggaggaggagacatgagccggcgggcgcccagacggagcggccgtgacgctttcgcgctgcagccgcgcgccccgaccccggagcgctgacccctggccccacgcagctccgcgcccgggccggagagcgcaactcggcttccagacccgccgcgcatgctgtccccggactgagccgggcagccagcctcccacggacgcccggacggccggccggccagcagtgagcgagcttccccgcaccggccaggcgcctcctgcacagcggctgccgccccgcagcccctgcgccagcccggagggcgcagcgctcgggaggagccgcgcggggcgctgatgccgcagggcgcgccgcggagcgccccggagcagcagagtctgcagcagcagcagccggcgaggagggagcagcagcagcggcggcggcggcggcggcggcggcggaggcgcccggtcccggccgcgcggagcggacatgtgcaggctgggctaggagccgccgcctccctcccgcccagcgatgtattcagcgccctccgcctgcacttgcctgtgtttacacttcctgctgctgtgcttccaggtacaggtgctggttgccgaggagaacgtggacttccgcatccacgtggagaaccagacgcgggctcgggacgatgtgagccgtaagcagctgcggctgtaccagctctacagccggaccagtgggaaacacatccaggtcctgggccgcaggatcagtgcccgcggcgaggatggggacaagtatgcccagctcctagtggagacagacaccttcggtagtcaagtccggatcaagggcaaggagacggaattctacctgtgcatgaaccgcaaaggcaagctcgtggggaagcccgatggcaccagcaaggagtgtgtgttcatcgagaaggttctggagaacaactacacggccctgatgtcggctaagtactccggctggtacgtgggcttcaccaagaaggggcggccgcggaagggccccaagacccgggagaaccagcaggacgtgcatttcatgaagcgctaccccaaggggcagccggagcttcagaagcccttcaagtacacgacggtgaccaagaggtcccgtcggatccggcccacacaccctgcctaggccaccccgccgcggcccctcaggtcgccctggccacactcacactcccagaaaactgcatcagaggaatatttttacatgaaaaataaggaagaagctctatttttgtacattgtgtttaaaagaagacaaaaactgaaccaaaactcttggggggaggggtgataaggattttattgttgacttgaaacccccgatgacaaaagactcacgcaaagggactgtagtcaacccacaggtgcttgtctctctctaggaacagacaactctaaactcgtccccagaggaggacttgaatgaggaaaccaacactttgagaaaccaaagtcctttttcccaaaggttctgaaaggaaaaaaaaaaaaaacaaaaaaaaagaaaaacaaagagaaagtagtactccgcccaccaacaaactccccctaactttcccaatcctctgttcctgccccaaactccaacaaaaatcgctctctggtttgcagtcatttatttattgtccgctgcaagctgccccgagacaccgcgcagggaaggcgtgcccctgggaattctccgcgcctcgacctcccgacgacagacgcctcgtccaatcatggtgaccctgccttgctcgcagttctggaggatgctgctatcgaccttccgtgactcacgtgacctagtacaccaatgataagggaatattttaaaaccagctatattatatatattatatatatataagctatttatttcacctctctgtatattgcagtttcatgaaccaagtattactgcctcaacaattaaaaacaacagacaaattatttaaaaaa

SEQ ID NO: 134324 - DNA, 2447 bp, Homo sapiens
  Payload ID: 6237
  Gene Symbol: FGF19
  Gene Name: fibroblast growth factor 19
  Uniprot ID: O95750
  ENST ID: ENST00000294312
  CDS Start-End: 767-1417
tgaaagaacctgagactgtcggaactgccggggaaaattctacgggacggctttgacgtcagatgtgcggggctgcgaaagtcgggggagggagtgcgagtgggcttttaaggggaagggcactaaggccgaggtgaggcttttcccgacagagggtgaagggggcaaaactcggtgccccccaacctctggccccggggttcctgaccccgcccccgctagtgccccacgccgagtgcatccactgggagcctgaggcctgggggaagggccccagttgtcgattgctttacaaagtcaaactctcccagccaagaacctcggggccgctgcgcggtggggaggagttccccgaaacccggccgctaagcgaggcctcctcctcccgcagatccgaacggcctgggcggggtcaccccggctgggacaagaagccgccgcctgcctgcccgggcccggggagggggctggggctggggccggaggcggggtgtgagtgggtgtgtgcggggggcggaggcttgatgcaatcccgataagaaatgctcgggtgtcttgggcacctacccgtggggcccgtaaggcgctactatataaggctgccggcccggagccgccgcgccgtcagagcaggagcgctgcgtccaggatctagggccacgaccatcccaacccggcactcacagccccgcagcgcatcccggtcgccgcccagcctcccgcacccccatcgccggagctgcgccgagagccccagggaggtgccatgcggagcgggtgtgtggtggtccacgtatggatcctggccggcctctggctggccgtggccgggcgccccctcgccttctcggacgcggggccccacgtgcactacggctggggcgaccccatccgcctgcggcacctgtacacctccggcccccacgggctctccagctgcttcctgcgcatccgtgccgacggcgtcgtggactgcgcgcggggccagagcgcgcacagtttgctggagatcaaggcagtcgctctgcggaccgtggccatcaagggcgtgcacagcgtgcggtacctctgcatgggcgccgacggcaagatgcaggggctgcttcagtactcggaggaagactgtgctttcgaggaggagatccgcccagatggctacaatgtgtaccgatccgagaagcaccgcctcccggtctccctgagcagtgccaaacagcggcagctgtacaagaacagaggctttcttccactctctcatttcctgcccatgctgcccatggtcccagaggagcctgaggacctcaggggccacttggaatctgacatgttctcttcgcccctggagaccgacagcatggacccatttgggcttgtcaccggactggaggccgtgaggagtcccagctttgagaagtaactgagaccatgcccgggcctcttcactgctgccaggggctgtggtacctgcagcgtgggggacgtgcttctacaagaacagtcctgagtccacgttctgtttagctttaggaagaaacatctagaagttgtacatattcagagttttccattggcagtgccagtttctagccaatagacttgtctgatcataacattgtaagcctgtagcttgcccagctgctgcctgggcccccattctgctccctcgaggttgctggacaagctgctgcactgtctcagttctgcttgaatacctccatcgatggggaactcacttcctttggaaaaattcttatgtcaagctgaaattctctaattttttctcatcacttccccaggagcagccagaagacaggcagtagttttaatttcaggaacaggtgatccactctgtaaaacagcaggtaaatttcactcaaccccatgtgggaattgatctatatctctacttccagggaccatttgcccttcccaaatccctccaggccagaactgactggagcaggcatggcccaccaggcttcaggagtaggggaagcctggagccccactccagccctgggacaacttgagaattccccctgaggccagttctgtcatggatgctgtcctgagaataacttgctgtcccggtgtcacctgcttccatctcccagcccaccagccctctgcccacctcacatgcctccccatggattggggcctcccaggccccccaccttatgtcaacctgcacttcttgttcaaaaatcaggaaaagaaaagatttgaagaccccaagtcttgtcaataacttgctgtgtggaagcagcgggggaagacctagaaccctttccccagcacttggttttccaacatgatatttatgagtaatttattttgatatgtacatctcttattttcttacattatttatgcccccaaattatatttatgtatgtaagtgaggtttgttttgtatattaaaatggagtttgtttgtatcaaaa

SEQ ID NO: 134325 - DNA, 6775 bp, Homo sapiens
  Payload ID: 6238
  Gene Symbol: FGF2
  Gene Name: fibroblast growth factor 2 (basic)
  ENST ID: ENST00000264498
  CDS Start-End: 69-935
cggccccagaaaacccgagcgagtagggggcggcgcgcaggagggaggagaactgggggcgcgggaggctggtgggtgtggggggtggagatgtagaagatgtgacgccgcggcccggcgggtgccagattagcggacgcggtgcccgcggttgcaacgggatcccgggcgctgcagcttgggaggcggctctccccaggcggcgtccgcggagacacccatccgtgaaccccaggtcccgggccgccggctcgccgcgcaccaggggccggcggacagaagagcggccgagcggctcgaggctgggggaccgcgggcgcggccgcgcgctgccgggcgggaggctggggggccggggccggggccgtgccccggagcgggtcggaggccggggccggggccgggggacggcggctccccgcgcggctccagcggctcggggatcccggccgggccccgcagggaccatggcagccgggagcatcaccacgctgcccgccttgcccgaggatggcggcagcggcgccttcccgcccggccacttcaaggaccccaagcggctgtactgcaaaaacgggggcttcttcctgcgcatccaccccgacggccgagttgacggggtccgggagaagagcgaccctcacatcaagctacaacttcaagcagaagagagaggagttgtgtctatcaaaggagtgtgtgctaaccgttacctggctatgaaggaagatggaagattactggcttctaaatgtgttacggatgagtgtttcttttttgaacgattggaatctaataactacaatacttaccggtcaaggaaatacaccagttggtatgtggcactgaaacgaactgggcagtataaacttggatccaaaacaggacctgggcagaaagctatactttttcttccaatgtctgctaagagctgattttaatggccacatctaatctcatttcacatgaaagaagaagtatattttagaaatttgttaatgagagtaaaagaaaataaatgtgtatagctcagtttggataattggtcaaacaattttttatccagtagtaaaatatgtaaccattgtcccagtaaagaaaaataacaaaagttgtaaaatgtatattctcccttttatattgcatctgctgttacccagtgaagcttacctagagcaatgatctttttcacgcatttgctttattcgaaaagaggcttttaaaatgtgcatgtttagaaacaaaatttcttcatggaaatcatatacattagaaaatcacagtcagatgtttaatcaatccaaaatgtccactatttcttatgtcattcgttagtctacatgtttctaaacatataaatgtgaatttaatcaattcctttcatagttttataattctctggcagttccttatgatagagtttataaaacagtcctgtgtaaactgctggaagttcttccacagtcaggtcaattttgtcaaacccttctctgtacccatacagcagcagcctagcaactctgctggtgatgggagttgtattttcagtcttcgccaggtcattgagatccatccactcacatcttaagcattcttcctggcaaaaatttatggtgaatgaatatggctttaggcggcagatgatatacatatctgacttcccaaaagctccaggatttgtgtgctgttgccgaatactcaggacggacctgaattctgattttataccagtctcttcaaaaacttctcgaaccgctgtgtctcctacgtaaaaaaagagatgtacaaatcaataataattacacttttagaaactgtatcatcaaagattttcagttaaagtagcattatgtaaaggctcaaaacattaccctaacaaagtaaagttttcaatacaaattctttgccttgtggatatcaagaaatcccaaaatattttcttaccactgtaaattcaagaagcttttgaaatgctgaatatttctttggctgctacttggaggcttatctacctgtacatttttggggtcagctctttttaacttcttgctgctctttttcccaaaaggtaaaaatatagattgaaaagttaaaacattttgcatggctgcagttcctttgtttcttgagataagattccaaagaacttagattcatttcttcaacaccgaaatgctggaggtgtttgatcagttttcaagaaacttggaatataaataattttataattcaacaaaggttttcacattttataaggttgatttttcaattaaatgcaaatttgtgtggcaggatttttattgccattaacatatttttgtggctgctttttctacacatccagatggtccctctaactgggctttctctaattttgtgatgttctgtcattgtctcccaaagtatttaggagaagccctttaaaaagctgccttcctctaccactttgctggaaagcttcacaattgtcacagacaaagatttttgttccaatactcgttttgcctctatttttcttgtttgtcaaatagtaaatgatatttgcccttgcagtaattctactggtgaaaaacatgcaaagaagaggaagtcacagaaacatgtctcaattcccatgtgctgtgactgtagactgtcttaccatagactgtcttacccatcccctggatatgctcttgttttttccctctaatagctatggaaagatgcatagaaagagtataatgttttaaaacataaggcatttgtctgccatttttcaattacatgctgacttcccttacaattgagatttgcccataggttaaacatggttagaaacaactgaaagcataaaagaaaaatctaggccgggtgcagtggctcatgcctatattccctgcactttgggaggccaaagcaggaggatcgcttgagcccaggagttcaagaccaacctggtgaaaccccgtctctacaaaaaaacacaaaaaatagccaggcatggtggcgtgtacatgtggtctcagatacttgggaggctgaggtgggagggttgatcacttgaggctgagaggtcaaggttgcagtgagccataatcgtgccactgcagtccagcctaggcaacagagtgagactttgtctcaaaaaaagagaaattttccttaataagaaaagtaatttttactctgatgtgcaatacatttgttattaaatttattatttaagatggtagcactagtcttaaattgtataaaatatcccctaacatgtttaaatgtccatttttattcattatgctttgaaaaataattatggggaaatacatgtttgttattaaatttattattaaagatagtagcactagtcttaaatttgatataacatctcctaacttgtttaaatgtccatttttattctttatgtttgaaaataaattatggggatcctatttagctcttagtaccactaatcaaaagttcggcatgtagctcatgatctatgctgtttctatgtcgtggaagcactggatgggggtagtgagcaaatctgccctgctcagcagtcaccatagcagctgactgaaaatcagcactgcctgagtagttttgatcagtttaacttgaatcactaactgactgaaaattgaatgggcaaataagtgcttttgtctccagagtatgcgggagacccttccacctcaagatggatatttcttccccaaggatttcaagatgaattgaaatttttaatcaagatagtgtgctttattctgttgtattttttattattttaatatactgtaagccaaactgaaataacatttgctgttttataggtttgaagaacataggaaaaactaagaggttttgtttttatttttgctgatgaagagatatgtttaaatatgttgtattgttttgtttagttacaggacaataatgaaatggagtttatatttgttatttctattttgttatatttaataatagaattagattgaaataaaatataatgggaaataatctgcagaatgtgggttttcctggtgtttccctctgactctagtgcactgatgatctctgataaggctcagctgctttatagttctctggctaatgcagcagatactcttcctgccagtggtaatacgattttttaagaaggcagtttgtcaattttaatcttgtggatacctttatactcttagggtattattttatacaaaagccttgaggattgcattctattttctatatgaccctcttgatatttaaaaaacactatggataacaattcttcatttacctagtattatgaaagaatgaaggagttcaaacaaatgtgtttcccagttaactagggtttactgtttgagccaatataaatgtttaactgtttgtgatggcagtattcctaaagtacattgcatgttttcctaaatacagagtttaaataatttcagtaattcttagatgattcagcttcatcattaagaatatcttttgttttatgttgagttagaaatgccttcatatagacatagtctttcagacctctactgtcagttttcatttctagctgctttcagggttttatgaattttcaggcaaagctttaatttacactaagcttaggaagtatggctaatgccaacggcagtttttttcttcttaattccacatgactgaggcatatatgatctctgggtaggtgagttgttgtgacaaccacaagcactttttttttttttaaagaaaaaaaggtagtgaatttttaatcatctggactttaagaaggattctggagtatacttaggcctgaaattatatatatttggcttggaaatgtgtttttcttcaattacatctacaagtaagtacagctgaaattcagaggacccataagagttcacatgaaaaaaatcaatttatttgaaaaggcaagatgcaggagagaggaagccttgcaaacctgcagactgctttttgcccaatatagattgggtaaggctgcaaaacataagcttaattagctcacatgctctgctctcacgtggcaccagtggatagtgtgagagaattaggctgtagaacaaatggccttctctttcagcattcacaccactacaaaatcatcttttatatcaacagaagaataagcataaactaagcaaaaggtcaataagtacctgaaaccaagattggctagagatatatcttaatgcaatccattttctgatggattgttacgagttggctatataatgtatgtatggtattttgatttgtgtaaaagttttaaaaatcaagctttaagtacatggacatttttaaataaaatatttaaagacaatttagaaaattgccttaatatcattgttggctaaatagaataggggacatgcatattaaggaaaaggtcatggagaaataatattggtatcaaacaaatacattgatttgtcatgatacacattgaatttgatccaatagtttaaggaataggtaggaaaatttggtttctatttttcgatttcctgtaaatcagtgacataaataattcttagcttattttatatttccttgtcttaaatactgagctcagtaagttgtgttaggggattatttctcagttgagactttcttatatgacattttactatgttttgactacctgactattaaaaataaatagtagatacaattttcataaagtgaagaattatataatcactgctttataactgactttattatatttatttcaaagttcatttaaaggctactattcatcctctgtgatggaatggtcaggaatttgttttctcatagtttaattccaacaacaatattagtcgtatccaaaataacctttaatgctaaactttactgatgtatatccaaagcttctcattttcagacagattaatccagaagcagtcataaacagaagaataggtggtatgttcctaatgatattatttctactaatggaataaactgtaatattagaaattatgctgctaattatatcagctctgaggtaatttctgaaatgttcagactcagtcggaacaaattggaaaatttaaatttttattcttagctataaagcaagaaagtaaacacattaatttcctcaacatttttaagccaattaaaaatataaaagatacacaccaatatcttcttcaggctctgacaggcctcctggaaacttccacatatttttcaactgcagtataaagtcagaaaataaagttaacataactttcactaacacacacatatgtagatttcacaaaatccacctataattggtcaaagtggttgagaatatattttttagtaattgcatgcaaaatttttctagcttccatcctttctccctcgtttcttctttttttgggggagctggtaactgatgaaatcttttcccaccttttctcttcaggaaatataagtggttttgtttggttaacgtgatacattctgtatgaatgaaacattggagggaaacatctactgaatttctgtaatttaaaatattttgctgctagttaactatgaacagatagaagaatcttacagatgctgctataaataagtagaaaatataaatttcatcactaaaatatgctattttaaaatctatttcctatattgtatttctaatcagatgtattactcttattatttctattgtatgtgttaatgattttatgtaaaaatgtaattgcttttcatgagtagtatgaataaaattgattagtttgtgttttcttgtctccca

SEQ ID NO: 134326 - DNA, 3880 bp, Homo sapiens
  Payload ID: 6238
  Gene Symbol: FGF2
  Gene Name: fibroblast growth factor 2 (basic)
  Uniprot ID: P09038
  ENST ID: ENST00000608478
  CDS Start-End: 345-812
gccagattagcggacgcggtgcccgcggttgcaacgggatcccgggcgctgcagcttgggaggcggctctccccaggcggcgtccgcggagacacccatccgtgaaccccaggtcccgggccgccggctcgccgcgcaccaggggccggcggacagaagagcggccgagcggctcgaggctgggggaccgcgggcgcggccgcgcgctgccgggcgggaggctggggggccggggccggggccgtgccccggagcgggtcggaggccggggccggggccgggggacggcggctccccgcgcggctccagcggctcggggatcccggccgggccccgcagggaccatggcagccgggagcatcaccacgctgcccgccttgcccgaggatggcggcagcggcgccttcccgcccggccacttcaaggaccccaagcggctgtactgcaaaaacgggggcttcttcctgcgcatccaccccgacggccgagttgacggggtccgggagaagagcgaccctcacatcaagctacaacttcaagcagaagagagaggagttgtgtctatcaaaggagtgtgtgctaaccgttacctggctatgaaggaagatggaagattactggcttctaaatgtgttacggatgagtgtttcttttttgaacgattggaatctaataactacaatacttaccggtcaaggaaatacaccagttggtatgtggcactgaaacgaactgggcagtataaacttggatccaaaacaggacctgggcagaaagctatactttttcttccaatgtctgctaagagctgattttaatggccacatctaatctcatttcacatgaaagaagaagtatattttagaaatttgttaatgagagtaaaagaaaataaatgtgtatagctcagtttggataattggtcaaacaattttttatccagtagtaaaatatgtaaccattgtcccagtaaagaaaaataacaaaagttgtaaaatgtatattctcccttttatattgcatctgctgttacccagtgaagcttacctagagcaatgatctttttcacgcatttgctttattcgaaaagaggcttttaaaatgtgcatgtttagaaacaaaatttcttcatggaaatcatatacattagaaaatcacagtcagatgtttaatcaatccaaaatgtccactatttcttatgtcattcgttagtctacatgtttctaaacatataaatgtgaatttaatcaattcctttcatagttttataattctctggcagttccttatgatagagtttataaaacagtcctgtgtaaactgctggaagttcttccacagtcaggtcaattttgtcaaacccttctctgtacccatacagcagcagcctagcaactctgctggtgatgggagttgtattttcagtcttcgccaggtcattgagatccatccactcacatcttaagcattcttcctggcaaaaatttatggtgaatgaatatggctttaggcggcagatgatatacatatctgacttcccaaaagctccaggatttgtgtgctgttgccgaatactcaggacggacctgaattctgattttataccagtctcttcaaaaacttctcgaaccgctgtgtctcctacgtaaaaaaagagatgtacaaatcaataataattacacttttagaaactgtatcatcaaagattttcagttaaagtagcattatgtaaaggctcaaaacattaccctaacaaagtaaagttttcaatacaaattctttgccttgtggatatcaagaaatcccaaaatattttcttaccactgtaaattcaagaagcttttgaaatgctgaatatttctttggctgctacttggaggcttatctacctgtacatttttggggtcagctctttttaacttcttgctgctctttttcccaaaaggtaaaaatatagattgaaaagttaaaacattttgcatggctgcagttcctttgtttcttgagataagattccaaagaacttagattcatttcttcaacaccgaaatgctggaggtgtttgatcagttttcaagaaacttggaatataaataattttataattcaacaaaggttttcacattttataaggttgatttttcaattaaatgcaaatttgtgtggcaggatttttattgccattaacatatttttgtggctgctttttctacacatccagatggtccctctaactgggctttctctaattttgtgatgttctgtcattgtctcccaaagtatttaggagaagccctttaaaaagctgccttcctctaccactttgctggaaagcttcacaattgtcacagacaaagatttttgttccaatactcgttttgcctctatttttcttgtttgtcaaatagtaaatgatatttgcccttgcagtaattctactggtgaaaaacatgcaaagaagaggaagtcacagaaacatgtctcaattcccatgtgctgtgactgtagactgtcttaccatagactgtcttacccatcccctggatatgctcttgttttttccctctaatagctatggaaagatgcatagaaagagtataatgttttaaaacataaggcatttgtctgccatttttcaattacatgctgacttcccttacaattgagatttgcccataggttaaacatggttagaaacaactgaaagcataaaagaaaaatctaggccgggtgcagtggctcatgcctatattccctgcactttgggaggccaaagcaggaggatcgcttgagcccaggagttcaagaccaacctggtgaaaccccgtctctacaaaaaaacacaaaaaatagccaggcatggtggcgtgtacatgtggtctcagatacttgggaggctgaggtgggagggttgatcacttgaggctgagaggtcaaggttgcagtgagccataatcgtgccactgcagtccagcctaggcaacagagtgagactttgtctcaaaaaaagagaaattttccttaataagaaaagtaatttttactctgatgtgcaatacatttgttattaaatttattatttaagatggtagcactagtcttaaattgtataaaatatcccctaacatgtttaaatgtccatttttattcattatgctttgaaaaataattatggggaaatacatgtttgttattaaatttattattaaagatagtagcactagtcttaaatttgatataacatctcctaacttgtttaaatgtccatttttattctttatgtttgaaaataaattatggggatcctatttagctcttagtaccactaatcaaaagttcggcatgtagctcatgatctatgctgtttctatgtcgtggaagcactggatgggggtagtgagcaaatctgccctgctcagcagtcaccatagcagctgactgaaaatcagcactgcctgagtagttttgatcagtttaacttgaatcactaactgactgaaaattgaatgggcaaataagtgcttttgtctccagagtatgcgggagacccttccacctcaagatggatatttcttccccaaggatttcaagatgaattgaaatttttaatcaagatagtgtgctttattctgttgtattttttattattttaatatactgtaagccaaactgaaataacatttgctgttttataggtttgaagaacataggaaaaactaagaggttttgtttttatttttgctgatgaagagatatgtttaaatatgttgtattgttttgtttagttacaggacaataatgaaatggagtttatatttgttatttctattttgttatatttaataatagaattagattgaaataaaatataatgggaaat

SEQ ID NO: 134327 - DNA, 6774 bp, Homo sapiens
  Payload ID: 6238
  Gene Symbol: FGF2
  Gene Name: fibroblast growth factor 2 (basic)
  ENST ID: ENST00000614010
  CDS Start-End: 69-935
cggccccagaaaacccgagcgagtagggggcggcgcgcaggagggaggagaactgggggcgcgggaggctggtgggtgtggggggtggagatgtagaagatgtgacgccgcggcccggcgggtgccagattagcggacgcggtgcccgcggttgcaacgggatcccgggcgctgcagcttgggaggcggctctccccaggcggcgtccgcggagacacccatccgtgaaccccaggtcccgggccgccggctcgccgcgcaccaggggccggcggacagaagagcggccgagcggctcgaggctgggggaccgcgggcgcggccgcgcgctgccgggcgggaggctggggggccggggccggggccgtgccccggagcgggtcggaggccggggccggggccgggggacggcggctccccgcgcggctccagcggctcggggatcccggccgggccccgcagggaccatggcagccgggagcatcaccacgctgcccgccttgcccgaggatggcggcagcggcgccttcccgcccggccacttcaaggaccccaagcggctgtactgcaaaaacgggggcttcttcctgcgcatccaccccgacggccgagttgacggggtccgggagaagagcgaccctcacatcaagctacaacttcaagcagaagagagaggagttgtgtctatcaaaggagtgtgtgctaaccgttacctggctatgaaggaagatggaagattactggcttctaaatgtgttacggatgagtgtttcttttttgaacgattggaatctaataactacaatacttaccggtcaaggaaatacaccagttggtatgtggcactgaaacgaactgggcagtataaacttggatccaaaacaggacctgggcagaaagctatactttttcttccaatgtctgctaagagctgattttaatggccacatctaatctcatttcacatgaaagaagaagtatattttagaaatttgttaatgagagtaaaagaaaataaatgtgtatagctcagtttggataattggtcaaacaattttttatccagtagtaaaatatgtaaccattgtcccagtaaagaaaaataacaaaagttgtaaaatgtatattctcccttttatattgcatctgctgttacccagtgaagcttacctagagcaatgatctttttcacgcatttgctttattcgaaaagaggcttttaaaatgtgcatgtttagaaacaaaatttcttcatggaaatcatatacattagaaaatcacagtcagatgtttaatcaatccaaaatgtccactatttcttatgtcattcgttagtctacatgtttctaaacatataaatgtgaatttaatcaattcctttcatagttttataattctctggcagttccttatgatagagtttataaaacagtcctgtgtaaactgctggaagttcttccacagtcaggtcaattttgtcaaacccttctctgtacccatacagcagcagcctagcaactctgctggtgatgggagttgtattttcagtcttcgccaggtcattgagatccatccactcacatcttaagcattcttcctggcaaaaatttatggtgaatgaatatggctttaggcggcagatgatatacatatctgacttcccaaaagctccaggatttgtgtgctgttgccgaatactcaggacggacctgaattctgattttataccagtctcttcaaaaacttctcgaaccgctgtgtctcctacgtaaaaaaagagatgtacaaatcaataataattacacttttagaaactgtatcatcaaagattttcagttaaagtagcattatgtaaaggctcaaaacattaccctaacaaagtaaagttttcaatacaaattctttgccttgtggatatcaagaaatcccaaaatattttcttaccactgtaaattcaagaagcttttgaaatgctgaatatttctttggctgctacttggaggcttatctacctgtacatttttggggtcagctctttttaacttcttgctgctctttttcccaaaaggtaaaaatatagattgaaaagttaaaacattttgcatggctgcagttcctttgtttcttgagataagattccaaagaacttagattcatttcttcaacaccgaaatgctggaggtgtttgatcagttttcaagaaacttggaatataaataattttataattcaacaaaggttttcacattttataaggttgatttttcaattaaatgcaaatttgtgtggcaggatttttattgccattaacatatttttgtggctgctttttctacacatccagatggtccctctaactgggctttctctaattttgtgatgttctgtcattgtctcccaaagtatttaggagaagccctttaaaaagctgccttcctctaccactttgctggaaagcttcacaattgtcacagacaaagatttttgttccaatactcgttttgcctctatttttcttgtttgtcaaatagtaaatgatatttgcccttgcagtaattctactggtgaaaaacatgcaaagaagaggaagtcacagaaacatgtctcaattcccatgtgctgtgactgtagactgtcttaccatagactgtcttacccatcccctggatatgctcttgttttttccctctaatagctatggaaagatgcatagaaagagtataatgttttaaaacataaggcatttgtctgccatttttcaattacatgctgacttcccttacaattgagatttgcccataggttaaacatggttagaaacaactgaaagcataaaagaaaaatctaggccgggtgcagtggctcatgcctatattccctgcactttgggaggccaaagcaggaggatcgcttgagcccaggagttcaagaccaacctggtgaaaccccgtctctacaaaaaaacacaaaaaatagccaggcatggtggcgtgtacatgtggtctcagatacttgggaggctgaggtgggagggttgatcacttgaggctgagaggtcaaggttgcagtgagccataatcgtgccactgcagtccagcctaggcaacagagtgagactttgtctcaaaaaaagagaaattttccttaataagaaaagtaatttttactctgatgtgcaatacatttgttattaaatttattatttaagatggtagcactagtcttaaattgtataaaatatcccctaacatgtttaaatgtccatttttattcattatgctttgaaaaataattatggggaaatacatgtttgttattaaatttattattaaagatagtagcactagtcttaaatttgatataacatctcctaacttgtttaaatgtccatttttattctttatgtttgaaaataaattatggggatcctatttagctcttagtaccactaatcaaaagttcggcatgtagctcatgatctatgctgtttctatgtcgtggaagcactggatgggggtagtgagcaaatctgccctgctcagcagtcaccatagcagctgactgaaaatcagcactgcctgagtagttttgatcagtttaacttgaatcactaactgactgaaaattgaatgggcaaataagtgcttttgtctccagagtatgcgggagacccttccacctcaagatggatatttcttccccaaggatttcaagatgaattgaaatttttaatcaagatagtgtgctttattctgttgtattttttattattttaatatactgtaagccaaactgaaataacatttgctgttttataggtttgaagaacataggaaaaactaagaggttttgtttttatttttgctgatgaagagatatgtttaaatatgttgtattgttttgtttagttacaggacaataatgaaatggagtttatatttgttatttctattttgttatatttaataatagaattagattgaaataaaatataatgggaaataatctgcagaatgtgggttttcctggtgtttccctctgactctagtgcactgatgatctctgataaggctcagctgctttatagttctctggctaatgcagcagatactcttcctgccagtggtaatacgattttttaagaaggcagtttgtcaattttaatcttgtggatacctttatactcttagggtattattttatacaaaagccttgaggattgcattctattttctatatgaccctcttgatatttaaaaaacactatggataacaattcttcatttacctagtattatgaaagaatgaaggagttcaaacaaatgtgtttcccagttaactagggtttactgtttgagccaatataaatgtttaactgtttgtgatggcagtattcctaaagtacattgcatgttttcctaaatacagagtttaaataatttcagtaattcttagatgattcagcttcatcattaagaatatcttttgttttatgttgagttagaaatgccttcatatagacatagtctttcagacctctactgtcagttttcatttctagctgctttcagggttttatgaattttcaggcaaagctttaatttacactaagcttaggaagtatggctaatgccaacggcagtttttttcttcttaattccacatgactgaggcatatatgatctctgggtaggtgagttgttgtgacaaccacaagcactttttttttttttaaagaaaaaaaggtagtgaatttttaatcatctggactttaagaaggattctggagtatacttaggcctgaaattatatatatttggcttggaaatgtgtttttcttcaattacatctacaagtaagtacagctgaaattcagaggacccataagagttcacatgaaaaaaatcaatttatttgaaaaggcaagatgcaggagagaggaagccttgcaaacctgcagactgctttttgcccaatatagattgggtaaggctgcaaaacataagcttaattagctcacatgctctgctctcacgtggcaccagtggatagtgtgagagaattaggctgtagaacaaatggccttctctttcagcattcacaccactacaaaatcatcttttatatcaacagaagaataagcataaactaagcaaaaggtcaataagtacctgaaaccaagattggctagagatatatcttaatgcaatccattttctgatggattgttacgagttggctatataatgtatgtatggtattttgatttgtgtaaaagttttaaaaatcaagctttaagtacatggacatttttaaataaaatatttaaagacaatttagaaaattgccttaatatcattgttggctaaatagaataggggacatgcatattaaggaaaaggtcatggagaaataatattggtatcaaacaaatacattgatttgtcatgatacacattgaatttgatccaatagtttaaggaataggtaggaaaatttggtttctatttttcgatttcctgtaaatcagtgacataaataattcttagcttattttatatttccttgtcttaaatactgagctcagtaagttgtgttaggggattatttctcagttgagactttcttatatgacattttactatgttttgactacctgactattaaaaataaatagtagatacaattttcataaagtgaagaattatataatcactgctttataactgactttattatatttatttcaaagttcatttaaaggctactattcatcctctgtgatggaatggtcaggaatttgttttctcatagtttaattccaacaacaatattagtcgtatccaaaataacctttaatgctaaactttactgatgtatatccaaagcttctcattttcagacagattaatccagaagcagtcataaacagaagaataggtggtatgttcctaatgatattatttctactaatggaataaactgtaatattagaaattatgctgctaattatatcagctctgaggtaatttctgaaatgttcagactcagtcggaacaaattggaaaatttaaatttttattcttagctataaagcaagaaagtaaacacattaatttcctcaacatttttaagccaattaaaaatataaaagatacacaccaatatcttcttcaggctctgacaggcctcctggaaacttccacatatttttcaactgcagtataaagtcagaaaataaagttaacataactttcactaacacacacatatgtagatttcacaaaatccacctataattggtcaaagtggttgagaatatattttttagtaattgcatgcaaaatttttctagcttccatcctttctccctcgtttcttctttttttgggggagctggtaactgatgaaatcttttcccaccttttctcttcaggaaatataagtggttttgtttggttaacgtgatacattctgtatgaatgaaacattggagggaaacatctactgaatttctgtaatttaaaatattttgctgctagttaactatgaacagatagaagaatcttacagatgctgctataaataagtagaaaatataaatttcatcactaaaatatgctattttaaaatctatttcctatattgtatttctaatcagatgtattactcttattatttctattgtatgtgttaatgattttatgtaaaaatgtaattgcttttcatgagtagtatgaataaaattgattagtttgtgttttcttgtctccc

SEQ ID NO: 134328 - DNA, 1688 bp, Homo sapiens
  Payload ID: 6239
  Gene Symbol: FGF20
  Gene Name: fibroblast growth factor 20
  Uniprot ID: Q9NP95
  ENST ID: ENST00000180166
  CDS Start-End: 150-785
tgcaaagtccctccggagcgacctcagaggagtaaccgggccttaactttttgcgctcgttttgctataatttttctctatccacctccatcccacccccacaacactctttactgggggggtcttttgtgttccggatctccccctccatggctcccttagccgaagtcgggggctttctgggcggcctggagggcttgggccagcaggtgggttcgcatttcctgttgcctcctgccggggagcggccgccgctgctgggcgagcgcaggagcgcggcggagcggagcgcgcgcggcgggccgggggctgcgcagctggcgcacctgcacggcatcctgcgccgccggcagctctattgccgcaccggcttccacctgcagatcctgcccgacggcagcgtgcagggcacccggcaggaccacagcctcttcggtatcttggaattcatcagtgtggcagtgggactggtcagtattagaggtgtggacagtggtctctatcttggaatgaatgacaaaggagaactctatggatcagagaaacttacttccgaatgcatctttagggagcagtttgaagagaactggtataacacctattcatctaacatatataaacatggagacactggccgcaggtattttgtggcacttaacaaagacggaactccaagagatggcgccaggtccaagaggcatcagaaatttacacatttcttacctagaccagtggatccagaaagagttccagaattgtacaaggacctactgatgtacacttgaagtgcgatagtgacattatggaagagtcaaaccacaaccattctttcttgtcatagttcccatcataaaataatgacccaaggagacgttcaaaatattaaagtctattttctactgagagactggatttggaaagaatattgagaaaaaaaaccaaaaaaaattttgactagaaatagatcatgatcactctttatatgtggattaagttcccttagatacattggattagtccttaccagtagactgaagccaaaaatctgttaaactgtggataatgggaaccctcacatggttgctgctggtgcctcacctctctggattatgtttactttaaaatttatgttaaaaatagagacttcatgttgaagaaatggattgacttagccaagagcattgctacataaattctgaggaccttgtagaattcacaggttatggcattatatgttttaagaaaaaaaaaaactaaacaacacctgggtgaaacatgaactatgaaacatgccacaccaagacagaacactttttaaaagaatggacctatttatacactttcaatttgaaaatatttattatatatatttatttattaaagagtttattttttactgggatatgaagataatacaaagagtaaaaaacaacaaaacttccgttattgtgccattactttattgtggtgtcttgctctgtaaagaggacattattataccaccttaaccatagaatcagattttgaatttctttttaaaatatagtatagattatattttttatgcagtcaattgccttctaaatgtaacgttggtttcttttggcctagaaaaatgcctcattgatttgtattaaattcaacacacattcaaaagggaattaaacattttcatgcagtgttttggc

SEQ ID NO: 134329 - DNA, 434 bp, Homo sapiens
  Payload ID: 6239
  Gene Symbol: FGF20
  Gene Name: fibroblast growth factor 20
  ENST ID: ENST00000519941
  CDS Start-End: 1-340
cgccgccggcagctctattgccgcaccggcttccacctgcagatcctgcccgacggcagcgtgcagggcacccggcaggaccacagcctcttcggagaaacttacttccgaatgcatctttagggagcagtttgaagagaactggtataacacctattcatctaacatatataaacatggagacactggccgcaggtattttgtggcacttaacaaagacggaactccaagagatggcgccaggtccaagaggcatcagaaatttacacatttcttacctagaccagtggatccagaaagagttccagaattgtacaaggacctactgatgtacacttgaagtgcgatagtgacattatggaagagtcaaaccacaaccattctttcttgtcatagttcccatcataaaataatgacccaaggagacgttcaaa

SEQ ID NO: 134330 - DNA, 885 bp, Homo sapiens
  Payload ID: 6240
  Gene Symbol: FGF21
  Gene Name: fibroblast growth factor 21
  Uniprot ID: Q9NSA1
  ENST ID: ENST00000222157
  CDS Start-End: 151-780
ctgtcagctgaggatccagccgaaagaggagccaggcactcaggccacctgagtctactcacctggacaactggaatctggcaccaattctaaaccactcagcttctccgagctcacaccccggagatcacctgaggacccgagccattgatggactcggacgagaccgggttcgagcactcaggactgtgggtttctgtgctggctggtcttctgctgggagcctgccaggcacaccccatccctgactccagtcctctcctgcaattcgggggccaagtccggcagcggtacctctacacagatgatgcccagcagacagaagcccacctggagatcagggaggatgggacggtggggggcgctgctgaccagagccccgaaagtctcctgcagctgaaagccttgaagccgggagttattcaaatcttgggagtcaagacatccaggttcctgtgccagcggccagatggggccctgtatggatcgctccactttgaccctgaggcctgcagcttccgggagctgcttcttgaggacggatacaatgtttaccagtccgaagcccacggcctcccgctgcacctgccagggaacaagtccccacaccgggaccctgcaccccgaggaccagctcgcttcctgccactaccaggcctgccccccgcactcccggagccacccggaatcctggccccccagccccccgatgtgggctcctcggaccctctgagcatggtgggaccttcccagggccgaagccccagctacgcttcctgaagccagaggctgtttactatgacatctcctctttatttattaggttatttatcttatttatttttttatttttcttacttgagataataaagagttccagaggag

SEQ ID NO: 134331 - DNA, 1312 bp, Homo sapiens
  Payload ID: 6240
  Gene Symbol: FGF21
  Gene Name: fibroblast growth factor 21
  Uniprot ID: Q9NSA1
  ENST ID: ENST00000593756
  CDS Start-End: 573-1202
gaggcttccaaggcaggatacttgtgtctcagatgcggtcgcttctttcatacagcaattgccgccttgctgaggatcaaggaacctcagtgtcagatcacgccctccccccaaacttagaaattcagatggggcgcagaaatttctcttgttctgcgtgatctgcatagatggtccaagaggtggtttttccaggagcccagcacccctcctccctccgactcagacccaggagtctggccctccattgaaaggaccccaggttacatcatccattcaggctgcccttgccacgatggaattctgtagctcctgccaaatgggtcaaatatcatggttcaggcgcagggagggtgattgggcgggcctgtctgggtataaattctggagcttctgcatctatcccaaaaaacaagggtgttctgtcagctgaggatccagccgaaagaggagccaggcactcaggccacctgagtctactcacctggacaactggaatctggcaccaattctaaaccactcagcttctccgagctcacaccccggagatcacctgaggacccgagccattgatggactcggacgagaccgggttcgagcactcaggactgtgggtttctgtgctggctggtcttctgctgggagcctgccaggcacaccccatccctgactccagtcctctcctgcaattcgggggccaagtccggcagcggtacctctacacagatgatgcccagcagacagaagcccacctggagatcagggaggatgggacggtggggggcgctgctgaccagagccccgaaagtctcctgcagctgaaagccttgaagccgggagttattcaaatcttgggagtcaagacatccaggttcctgtgccagcggccagatggggccctgtatggatcgctccactttgaccctgaggcctgcagcttccgggagctgcttcttgaggacggatacaatgtttaccagtccgaagcccacggcctcccgctgcacctgccagggaacaagtccccacaccgggaccctgcaccccgaggaccagctcgcttcctgccactaccaggcctgccccccgcactcccggagccacccggaatcctggccccccagccccccgatgtgggctcctcggaccctctgagcatggtgggaccttcccagggccgaagccccagctacgcttcctgaagccagaggctgtttactatgacatctcctctttatttattaggttatttatcttatttatttttttatttttcttacttgagataataaagagttccagaggaggataa

SEQ ID NO: 134332 - DNA, 1311 bp, Homo sapiens
  Payload ID: 6241
  Gene Symbol: FGF22
  Gene Name: fibroblast growth factor 22
  Uniprot ID: Q9HCT0
  ENST ID: ENST00000215530
  CDS Start-End: 32-544
gacgagcgcgcagcgaaccgggtgccgggtcatgcgccgccgcctgtggctgggcctggcctggctgctgctggcgcgggcgccggacgccgcgggaaccccgagcgcgtcgcggggaccgcgcagctacccgcacctggagggcgacgtgcgctggcggcgcctcttctcctccactcacttcttcctgcgcgtggatcccggcggccgcgtgcagggcacccgctggcgccacggccaggacagcatcctggagatccgctctgtacacgtgggcgtcgtggtcatcaaagcagtgtcctcaggcttctacgtggccatgaaccgccggggccgcctctacgggtcgcgactctacaccgtggactgcaggttccgggagcgcatcgaagagaacggccacaacacctacgcctcacagcgctggcgccgccgcggccagcccatgttcctggcgctggacaggaggggggggccccggccaggcggccggacgcggcggtaccacctgtccgcccacttcctgcccgtcctggtctcctgaggccctgagaggccggcggctccccaaggtgcctgggctggtggcgaggggcccggccacgcttgttcttccccctgcgggctctgtaagcgctgagtgcccaccgtgtgcgggcgctgtggacacagcccaggagccctccaggggggtcccagcctgagggggtggtggccaccaagcaggttcaatcctgagttggggacctcgaggacccaacagggcgcctctcgggctgaaggacgcagacgtcgaaaggtcgagggggacgtcccaggcagggcccggcagaggcaggggctcggggtggggagcacgttgggagtgggggcaggagcggaggggaggggagggggccggggagacggtgacagacgccgcagaacaccagcctcgaagccggtcccgtcccgggaatctgcaaatacaacgccttgcgaggacaaaggcacctgcaggtgggacggagatggaggagcatccagggtggggggtccagggccccagtgtcctcacagggtcctcacgacaggaggcgggacagtgagagccagagagagatggggatgggccgcgctgtggccgtgaaggggaggaagggccctaagctgagggacgtgggtgcctccagatgctggggaaggcgggaacggttccgcactggagcccccgggagggaccggcctgctcctgccttgatatgagcccagtgggacccagtttggactctggcctccagaaccgccagaaaataaacgtagtaagccatc

SEQ ID NO: 134333 - DNA, 1288 bp, Homo sapiens
  Payload ID: 6241
  Gene Symbol: FGF22
  Gene Name: fibroblast growth factor 22
  ENST ID: ENST00000586042
  CDS Start-End: 32-529
gacgagcgcgcagcgaaccgggtgccgggtcatgcgccgccgcctgtggctgggcctggcctggctgctgctggcgcgggcgccggacgccgcgggaaccccgagcgcgtcgcggggaccgcgcagctacccgcacctggagggcgacgtgcgctggcggcgcctcttctcctccactcacttcttcctgcgcgtggatcccggcggccgcgtgcagggcacccgctggcgccacggccaggacagcatcctggagatccgctctgtacacgtgggcgtcgtggtcatcaaagcagtgtcctcaggcttctacgtggccatgaaccgccggggccgcctctacgggtcggttccgggagcgcatcgaagagaacggccacaacacctacgcctcacagcgctggcgccgccgcggccagcccatgttcctggcgctggacaggaggggggggccccggccaggcggccggacgcggcggtaccacctgtccgcccacttcctgcccgtcctggtctcctgaggccctgagaggccggcggctccccaaggtgcctgggctggtggcgaggggcccggccacgcttgttcttccccctgcgggctctgtaagcgctgagtgcccaccgtgtgcgggcgctgtggacacagcccaggagccctccaggggggtcccagcctgagggggtggtggccaccaagcaggttcaatcctgagttggggacctcgaggacccaacagggcgcctctcgggctgaaggacgcagacgtcgaaaggtcgagggggacgtcccaggcagggcccggcagaggcaggggctcggggtggggagcacgttgggagtgggggcaggagcggaggggaggggagggggccggggagacggtgacagacgccgcagaacaccagcctcgaagccggtcccgtcccgggaatctgcaaatacaacgccttgcgaggacaaaggcacctgcaggtgggacggagatggaggagcatccagggtggggggtccagggccccagtgtcctcacagggtcctcacgacaggaggcgggacagtgagagccagagagagatggggatgggccgcgctgtggccgtgaaggggaggaagggccctaagctgagggacgtgggtgcctccagatgctggggaaggcgggaacggttccgcactggagcccccgggagggaccggcctgctcctgccttgatatgagcccagtgggacccagtttggactctggcctccagaaccgccagaaaataaacgtagtaagccatc

SEQ ID NO: 134334 - DNA, 3018 bp, Homo sapiens
  Payload ID: 6242
  Gene Symbol: FGF23
  Gene Name: fibroblast growth factor 23
  Uniprot ID: Q9GZV9
  ENST ID: ENST00000237837
  CDS Start-End: 147-902
cggcaaaaaggagggaatccagtctaggatcctcacaccagctacttgcaagggagaaggaaaaggccagtaaggcctgggccaggagagtcccgacaggagtgtcaggtttcaatctcagcaccagccactcagagcagggcacgatgttgggggcccgcctcaggctctgggtctgtgccttgtgcagcgtctgcagcatgagcgtcctcagagcctatcccaatgcctccccactgctcggctccagctggggtggcctgatccacctgtacacagccacagccaggaacagctaccacctgcagatccacaagaatggccatgtggatggcgcaccccatcagaccatctacagtgccctgatgatcagatcagaggatgctggctttgtggtgattacaggtgtgatgagcagaagatacctctgcatggatttcagaggcaacatttttggatcacactatttcgacccggagaactgcaggttccaacaccagacgctggaaaacgggtacgacgtctaccactctcctcagtatcacttcctggtcagtctgggccgggcgaagagagccttcctgccaggcatgaacccacccccgtactcccagttcctgtcccggaggaacgagatccccctaattcacttcaacacccccataccacggcggcacacccggagcgccgaggacgactcggagcgggaccccctgaacgtgctgaagccccgggcccggatgaccccggccccggcctcctgttcacaggagctcccgagcgccgaggacaacagcccgatggccagtgacccattaggggtggtcaggggcggtcgagtgaacacgcacgctgggggaacgggcccggaaggctgccgccccttcgccaagttcatctagggtcgctggaagggcaccctctttaacccatccctcagcaaacgcagctcttcccaaggaccaggtcccttgacgttccgaggatgggaaaggtgacaggggcatgtatggaatttgctgcttctctggggtcccttccacaggaggtcctgtgagaaccaacctttgaggcccaagtcatggggtttcaccgccttcctcactccatatagaacacctttcccaataggaaaccccaacaggtaaactagaaatttccccttcatgaaggtagagagaaggggtctctcccaacatatttctcttccttgtgcctctcctctttatcacttttaagcataaaaaaaaaaaaaaaaaaaaaaaaaaaaaaaagcagtgggttcctgagctcaagactttgaaggtgtagggaagaggaaatcggagatcccagaagcttctccactgccctatgcatttatgttagatgccccgatcccactggcatttgagtgtgcaaaccttgacattaacagctgaatggggcaagttgatgaaaacactactttcaagccttcgttcttccttgagcatctctggggaagagctgtcaaaagactggtggtaggctggtgaaaacttgacagctagacttgatgcttgctgaaatgaggcaggaatcataatagaaaactcagcctccctacagggtgagcaccttctgtctcgctgtctccctctgtgcagccacagccagagggcccagaatggccccactctgttcccaagcagttcatgatacagcctcaccttttggccccatctctggtttttgaaaatttggtctaaggaataaatagcttttacactggctcacgaaaatctgccctgctagaatttgcttttcaaaatggaaataaattccaactctcctaagaggcatttaattaaggctctacttccaggttgagtaggaatccattctgaacaaactacaaaaatgtgactgggaagggggctttgagagactgggactgctctgggttaggttttctgtggactgaaaaatcgtgtccttttctctaaatgaagtggcatcaaggactcagggggaaagaaatcaggggacatgttatagaagttatgaaaagacaaccacatggtcaggctcttgtctgtggtctctagggctctgcagcagcagtggctcttcgattagttaaaactctcctaggctgacacatctgggtctcaatccccttggaaattcttggtgcattaaatgaagccttaccccattactgcggttcttcctgtaagggggctccattttcctccctctctttaaatgaccacctaaaggacagtatattaacaagcaaagtcgattcaacaacagcttcttcccagtcacttttttttttctcactgccatcacatactaaccttatactttgatctattctttttggttatgagagaaatgttgggcaactgtttttacctgatggttttaagctgaacttgaaggactggttcctattctgaaacagtaaaactatgtataatagtatatagccatgcatggcaaatattttaatatttctgttttcatttcctgttggaaatattatcctgcataatagctattggaggctcctcagtgaaagatcccaaaaggattttggtggaaaactagttgtaatctcacaaactcaacactaccatcaggggttttctttatggcaaagccaaaatagctcctacaatttcttatatccctcgtcatgtggcagtatttatttatttatttggaagtttgcctatccttctatatttatagatatttataaaaatgtaacccctttttcctttcttctgtttaaaataaaaataaaatttatctcagcttctgttagcttatcctctttgtagtactacttaaaagcatgtcggaatataagaataaaaaggattatgggaggggaacattagggaaatccagagaaggcaaaattgaaaaaaagattttagaattttaaaattttcaaagatttcttccattcataaggagactcaatgattttaattgatctagacagaattatttaagttttatcaatattggatttctggt

SEQ ID NO: 134335 - DNA, 892 bp, Homo sapiens
  Payload ID: 6243
  Gene Symbol: FGF3
  Gene Name: fibroblast growth factor 3
  Uniprot ID: P11487
  ENST ID: ENST00000334134
  CDS Start-End: 92-811
gagcacctcgcagctgtccggctgccgccccttccatgggcgccgcgctcgcctgcagccgccgccgccgcggggcgggcgcgatgccacgatgggcctaatctggctgctactgctcagcctgctggagcccggctggcccgcagcgggccctggggcgcggttgcggcgcgatgcgggcggccgtggcggcgtctacgagcaccttggcggggcgccccggcgccgcaagctctactgcgccacgaagtaccacctccagctgcacccgagcggccgcgtcaacggcagcctggagaacagcgcctacagtattttggagataacggcagtggaggtgggcattgtggccatcaggggtctcttctccgggcggtacctggccatgaacaagaggggacgactctatgcttcggagcactacagcgccgagtgcgagtttgtggagcggatccacgagctgggctataatacgtatgcctcccggctgtaccggacggtgtctagtacgcctggggcccgccggcagcccagcgccgagagactgtggtacgtgtctgtgaacggcaagggccggccccgcaggggcttcaagacccgccgcacacagaagtcctccctgttcctgccccgcgtgctggaccacagggaccacgagatggtgcggcagctacagagtgggctgcccagaccccctggtaagggggtccagccccgacggcggcggcagaagcagagcccggataacctggagccctctcacgttcaggcttcgagactgggctcccagctggaggccagtgcgcactagctgggcctggtggccaccgccagagctcctggcgacatcttggcgtggcagcctcttgactctgactctcctccttgagcc

SEQ ID NO: 134336 - DNA, 3233 bp, Homo sapiens
  Payload ID: 6244
  Gene Symbol: FGF4
  Gene Name: fibroblast growth factor 4
  Uniprot ID: P08620
  ENST ID: ENST00000168712
  CDS Start-End: 320-940
gggagcgggcgagtaggagggggcgccgggctatatatatagcggctcggcctcgggcgggcctggcgctcagggaggcgcgcactgctcctcagagtcccagctccagccgcgcgctttccgcccggctcgccgctccatgcagccggggtagagcccggcgcccgggggccccgtcgcttgcctcccgcacctcctcggttgcgcactcctgcccgaggtcggccgtgcgctcccgcgggacgccacaggcgcagctctgccccccagcttcccgggcgcactgaccgcctgaccgacgcacggccctcgggccgggatgtcggggcccgggacggccgcggtagcgctgctcccggcggtcctgctggccttgctggcgccctgggcgggccgagggggcgccgccgcacccactgcacccaacggcacgctggaggccgagctggagcgccgctgggagagcctggtggcgctctcgttggcgcgcctgccggtggcagcgcagcccaaggaggcggccgtccagagcggcgccggcgactacctgctgggcatcaagcggctgcggcggctctactgcaacgtgggcatcggcttccacctccaggcgctccccgacggccgcatcggcggcgcgcacgcggacacccgcgacagcctgctggagctctcgcccgtggagcggggcgtggtgagcatcttcggcgtggccagccggttcttcgtggccatgagcagcaagggcaagctctatggctcgcccttcttcaccgatgagtgcacgttcaaggagattctccttcccaacaactacaacgcctacgagtcctacaagtaccccggcatgttcatcgccctgagcaagaatgggaagaccaagaaggggaaccgagtgtcgcccaccatgaaggtcacccacttcctccccaggctgtgaccctccagaggacccttgcctcagcctcgggaagcccctgggagggcagtgccgagggtcaccttggtgcactttcttcggatgaagagtttaatgcaagagtaggtgtaagatatttaaattaattatttaaatgtgtatatattgccaccaaattatttatagttctgcgggtgtgttttttaattttctggggggaaaaaaagacaaaacaaaaaaccaactctgacttttctggtgcaacagtggagaatcttaccattggatttctttaacttgtcaaaagttgtcacgagtgtgctgctattctgtgttttaaaaaaaggtgacattggattccgatgtcatcccctgtagtatggcgtggagcatctctgtctggaaaggcccgcctgaggcttgggcagccagttcagggagctcccaggcttggctctcggctagcatcctcagaggcccactccctttgtgccctgttgctattaatcgggacatatcggtttacttcgggtacagaaagtgcggtgttgaagtcctcgctgccactctgtttttagatctgccaagactgacctttgaactttcctgtagtcaatcttcctcgatctaccagatgggagagacccttggacaactttataaactcctgtttgccttttttggatcagcgacagcccccatcgctgtgactattggggaaaagacgaagctctttcataaattccatggagaggaatcaatatcccactggaaggctagaaatggacaagatagtgtatttgcaatcacaaacaaaaccctagtgatgaaaaataatttgtgatggcagatgcttctgatggtgtgatagaatatgtttttgaaaacaaaccatcgaaccccccgccccacccccaaaacgggcttccctgtgtttagggagctttgggctagaactagctacgatttttaggtgaaatgtccttgtaattgtacaaagcacttggtgcagtgtttgcgtggagcagcctgctgctttctgatgcattccctgtttaagtgcgtttaacatctacctcacaagccctgaaaccccaggcaaaacccacagaaagctcatacccggtgcaggagtttgccatcccaagtggctttttttccatatgtagccaaaaaggattgcagatagcgtcggtgcgtcccattcgaaccttgtcacgtttgagctatctttaccctgtgatttacttttagtaagggtgatcatggtgaaaatatttgcagacagctgttacagtacactatatggtcaccaagtaaccttatatttttctttatatattttacaaatgtaacccctgtcattgaagcaaccgtggaagaggcagggtcggtgatgtttaaaaaaagttccgaggtgatggcaaacatttaattttaatgaatgactttttagagtttatacaaaatgaccttagcttgctaccagaaatgctccgaatgtttcgtcaagactttaatactctcctaggatgtttctgaactgtctcccgaattaactttatgggagtctacagacagcaagactggaaaatctgattggagtttttgtctttcacattccttttgaaaactctttgttcgaatgcaaatcatcgacttaaaatactattcttaaccaaggcctggaagaaagaagacacttgcaaagccgctaagacaggaccacacatcttaaactgctgttcctaccatgcactaaactgtttttaagttttaaaccacaccctaggctccaggagtgttcaggaaagatggtgtttgtaggtctccatgctgtttggcgttggggggtgtggagggatcatccgtcgactttctgaattttaatgtattcacttagtaacaaaccatgattgtcttaaatgccttaaattattatgagatttcttgtctcagagcccaatcagattgtcaggaattaacatgtgttaggtttgatcacccttgaccacttcttatagatatttcttcaacaaatcatgtgtgatgcctgtaggaacacaactgtacctttaaaatattgttttcatattgctgtgatggggattcgaggttcctgtatgtgccactgttttcagaatctgtagttttatacaggtgccgaccctcgttgtgatgtatgtgctgtgcacattgacatgctgaccgacaatgataagcgtttatcgtgtataaaaagacaccactggactggatgtacacaactgggaaaggaattaaaagctattaaaattgtgccttgaaatgccaa

SEQ ID NO: 134337 - DNA, 4555 bp, Homo sapiens
  Payload ID: 6245
  Gene Symbol: FGF5
  Gene Name: fibroblast growth factor 5
  Uniprot ID: P12034
  ENST ID: ENST00000312465
  CDS Start-End: 227-1033
gcaggcgtgcacggagcagtgagatcactggcgttataaatatcccggtgccagcgcggagatccgctcgggtggcctctctcttcccctctccccttctcttccccgaggctatgtccacccggtgcggcgaggcgggcagagccagaggcacgcagccgcacaggggctacagagcccagaatcagccctacaagatgcacttaggacccccgcggctggaagaatgagcttgtccttcctcctcctcctcttcttcagccacctgatcctcagcgcctgggctcacggggagaagcgtctcgcccccaaagggcaacccggacccgctgccactgataggaaccctagaggctccagcagcagacagagcagcagtagcgctatgtcttcctcttctgcctcctcctcccccgcagcttctctgggcagccaaggaagtggcttggagcagagcagtttccagtggagcccctcggggcgccggaccggcagcctctactgcagagtgggcatcggtttccatctgcagatctacccggatggcaaagtcaatggatcccacgaagccaatatgttaagtgttttggaaatatttgctgtgtctcaggggattgtaggaatacgaggagttttcagcaacaaatttttagcgatgtcaaaaaaaggaaaactccatgcaagtgccaagttcacagatgactgcaagttcagggagcgttttcaagaaaatagctataatacctatgcctcagcaatacatagaactgaaaaaacagggcgggagtggtatgtggccctgaataaaagaggaaaagccaaacgagggtgcagcccccgggttaaaccccagcatatctctacccattttctgccaagattcaagcagtcggagcagccagaactttctttcacggttactgttcctgaaaagaaaaagccacctagccctatcaagccaaagattcccctttctgcacctcggaaaaataccaactcagtgaaatacagactcaagtttcgctttggataatattcctcttggccttgtgagaaaccattctttcccctcaggagtttctataggtgtcttcagagttctgaagaaaaattactggacacagcttcagctatacttacactgtattgaagtcacgtcatttgtttcaatgtgactgaaacaaaatgttttttgataggaaggaaactggaattctttgtactaatacagggagcacactccttcagttcagcaagacataaagccttttgctttatgcttgagggatatttagaactttgtattttcggaaagttaaataacagggactacgtatttttctgacttttacagattaacctgaaagaacatacatgatacatttttatttttggtttccaaagaatattttgatgcagataaaatattttgttaacttttgtttttttttgtttgttttcttaaaagtacctctgcattgagcatattttcttacttttattattttaattaatatgacataagcaatcattttatgctgtttatgaattataaatgtgtttatagctcatttgtaatatggaaatcttttacatttttcctattcactgcacttttttattgtttttatttctagccatacctcagataatatgtttagttttacattttaaaatgtttaaattctctttcacagcaccaaaggctcagcttggatttgtgtgtatgtgtatgtcaattcatgacattatgtggaatcctaaacctttggtggctgggatatgatgggttagaagcaaggagaaaatataaggactttttgatggaattaaatgtgggaggtaaggaaaaggatttagaggtaaaagtacactaagtttgcaacatttattgagatctaagtctgtcttgccttcatttctctttttatctcccccttgccctcattcttgaacagctggaggaatacattttattctgtccatgaagcatacactatgaaattcaagtgcttaaaaatacttctatgactctctgctatcccactgtatagatccacagggagcaaacacttagaaatgatagagaactgaaggagatcaatggtttaacagttatccatgccaagtcccattgtcagaaatattcttattactcagtcaaacactctttgagcttcccttcctaaaggtaaccaatccagtgaatagatgtgcccttttataaggaaacttctgatgtttattaaaaaaactggccttttgatagaggtaacttaatttgggaatttgttgtgttgaaatggcatttaatttcaacctaaatactgactgctggacataaatcacagaaaatttaacttaagaaaatttacaaaatttattctcaggtaatcattttaataaagttctgcaaaatacacgtttatcttacattcagaaatgtggcaaaaaaggcatagctaaaggctaaacatatggctttagtagtaacaaaagggttcatagaaacttcatggtttgcatttaaacatgtttaaagtgtacttataaactatttttttcttaaagcaaactatgatttattttggtgcacaaatacaaagtggaaacttaccaaaattgaactagctaccatataagcagattgctttaatttgatgggaaaatagtacacacatatatataacaaataatatattaaaaaacccatccatcaactaaaacattatatgtatacatcagtatagtgttttattataaagccaattatctgattaagcattctttccactgaatgcataatgtttaaatagcataaaatgaaatgctacaaaaattgaactaatttatactttaaagtatttctgggttaaatgaaacaatgaaattttttagtatgttcaactctcatccaaatggcatatgaccctgtttacacagcctaaagctaaaaatattactctagtttattctaatctattgttaagtattgtgcactgtataccaagttcttagggcacatgaaaaattttagctgccaaacaggaactagtaaacatatgttcctaataagtgaagggaaagataataatgatggtcaacaataagccacgtcaatgcataagttgtataggctaaatgttgcttgtaggctacattaaactcaaatgtaatagtttatcttatactcctggtttgatttgattagcatattaacgtgaaagtaggatagctactaaatatatattatgcaagtcaggaatcattaatttcaaaatttaaagccatgctaaaattaaaaagaaaatattaaattacacaattacacttgtctttactggccatacaaaatgattttttttttttttttgagacagagtcttgctctgtcaccaggctggagtgcagtggcatgatctcggctcactgcaacctccaactccctggtttaagggattctcctgcctcagcctcccaagtagctgggattacagactcatgccaccacgccagctaatttttgtatttttagtagagacggggtttcaccatgttggtcaggatggtctcaatcctggcctcttgatagtcctgacctcatgatctgcccacctcggcctccccaaagtgctgggattacaggtacaatgatgtataattaatgcttagtgaagcataaagttacctacatcaattaattaaatgaacttatgtacagaaaacatgtataaatataagtctatactaatgcttacaactttctaagagggttcttgcttatgtagctttttattattttaagtaactagaaccaccaaatatcaaataaaattatttggttatggttatgttcatctaaacacaacaataacttttatattaatatttaggagtctattttgtctataggtgacaaacatctccagactaacatgtcagttttatcaattatattatgtttaattatttaagatttctttatgtggaacatctatagagataaatagaaattttcaataagatgtagtaacactgtgatttatctttcaagagtctctcttcacttccttctaaagagactaatttgagagtacaggtgcatattaattttcttggttctttcagctgaattatattggtccagaagttcaaaatcatgtgacaataataagggatactgacagaagttatttccaagtttgtgtatatattataaaaattacatatataaaactaaggcttttatttctgttatttttaagcttttatttcttgtagctaaaaataaaacatcataaatctggtaggtaaatttcttattaaatcaatcttgaaatagaaaatgtaataactttcttaccattaacattttttacccttccatagaagggagggaataaatcatgacttatcccattttcaataacaaaacgaaactatggcactaaccaaaaacttgcattctggcataatttttacagttgcagagaattgtttctgggctcattaaaaaaagtagtattgcagacattgctgcaatgggaagcagaca

SEQ ID NO: 134338 - DNA, 5234 bp, Homo sapiens
  Payload ID: 6245
  Gene Symbol: FGF5
  Gene Name: fibroblast growth factor 5
  Uniprot ID: P12034
  ENST ID: ENST00000456523
  CDS Start-End: 187-558
tatcccggtgccagcgcggagatccgctcgggtggcctctctcttcccctctccccttctcttccccgaggctatgtccacccggtgcggcgaggcgggcagagccagaggcacgcagccgcacaggggctacagagcccagaatcagccctacaagatgcacttaggacccccgcggctggaagaatgagcttgtccttcctcctcctcctcttcttcagccacctgatcctcagcgcctgggctcacggggagaagcgtctcgcccccaaagggcaacccggacccgctgccactgataggaaccctagaggctccagcagcagacagagcagcagtagcgctatgtcttcctcttctgcctcctcctcccccgcagcttctctgggcagccaaggaagtggcttggagcagagcagtttccagtggagcccctcggggcgccggaccggcagcctctactgcagagtgggcatcggtttccatctgcagatctacccggatggcaaagtcaatggatcccacgaagccaatatgttaagccaagttcacagatgactgcaagttcagggagcgttttcaagaaaatagctataatacctatgcctcagcaatacatagaactgaaaaaacagggcgggagtggtatgtggccctgaataaaagaggaaaagccaaacgagggtgcagcccccgggttaaaccccagcatatctctacccattttctgccaagattcaagcagtcggagcagccagaactttctttcacggttactgttcctgaaaagaaaaagccacctagccctatcaagccaaagattcccctttctgcacctcggaaaaataccaactcagtgaaatacagactcaagtttcgctttggataatattcctcttggccttgtgagaaaccattctttcccctcaggagtttctataggtgtcttcagagttctgaagaaaaattactggacacagcttcagctatacttacactgtattgaagtcacgtcatttgtttcaatgtgactgaaacaaaatgttttttgataggaaggaaactggaattctttgtactaatacagggagcacactccttcagttcagcaagacataaagccttttgctttatgcttgagggatatttagaactttgtattttcggaaagttaaataacagggactacgtatttttctgacttttacagattaacctgaaagaacatacatgatacatttttatttttggtttccaaagaatattttgatgcagataaaatattttgttaacttttgtttttttttgtttgttttcttaaaagtacctctgcattgagcatattttcttacttttattattttaattaatatgacataagcaatcattttatgctgtttatgaattataaatgtgtttatagctcatttgtaatatggaaatcttttacatttttcctattcactgcacttttttattgtttttatttctagccatacctcagataatatgtttagttttacattttaaaatgtttaaattctctttcacagcaccaaaggctcagcttggatttgtgtgtatgtgtatgtcaattcatgacattatgtggaatcctaaacctttggtggctgggatatgatgggttagaagcaaggagaaaatataaggactttttgatggaattaaatgtgggaggtaaggaaaaggatttagaggtaaaagtacactaagtttgcaacatttattgagatctaagtctgtcttgccttcatttctctttttatctcccccttgccctcattcttgaacagctggaggaatacattttattctgtccatgaagcatacactatgaaattcaagtgcttaaaaatacttctatgactctctgctatcccactgtatagatccacagggagcaaacacttagaaatgatagagaactgaaggagatcaatggtttaacagttatccatgccaagtcccattgtcagaaatattcttattactcagtcaaacactctttgagcttcccttcctaaaggtaaccaatccagtgaatagatgtgcccttttataaggaaacttctgatgtttattaaaaaaactggccttttgatagaggtaacttaatttgggaatttgttgtgttgaaatggcatttaatttcaacctaaatactgactgctggacataaatcacagaaaatttaacttaagaaaatttacaaaatttattctcaggtaatcattttaataaagttctgcaaaatacacgtttatcttacattcagaaatgtggcaaaaaaggcatagctaaaggctaaacatatggctttagtagtaacaaaagggttcatagaaacttcatggtttgcatttaaacatgtttaaagtgtacttataaactatttttttcttaaagcaaactatgatttattttggtgcacaaatacaaagtggaaacttaccaaaattgaactagctaccatataagcagattgctttaatttgatgggaaaatagtacacacatatatataacaaataatatattaaaaaacccatccatcaactaaaacattatatgtatacatcagtatagtgttttattataaagccaattatctgattaagcattctttccactgaatgcataatgtttaaatagcataaaatgaaatgctacaaaaattgaactaatttatactttaaagtatttctgggttaaatgaaacaatgaaattttttagtatgttcaactctcatccaaatggcatatgaccctgtttacacagcctaaagctaaaaatattactctagtttattctaatctattgttaagtattgtgcactgtataccaagttcttagggcacatgaaaaattttagctgccaaacaggaactagtaaacatatgttcctaataagtgaagggaaagataataatgatggtcaacaataagccacgtcaatgcataagttgtataggctaaatgttgcttgtaggctacattaaactcaaatgtaatagtttatcttatactcctggtttgatttgattagcatattaacgtgaaagtaggatagctactaaatatatattatgcaagtcaggaatcattaatttcaaaatttaaagccatgctaaaattaaaaagaaaatattaaattacacaattacacttgtctttactggccatacaaaatgattttttttttttttttgagacagagtcttgctctgtcaccaggctggagtgcagtggcatgatctcggctcactgcaacctccaactccctggtttaagggattctcctgcctcagcctcccaagtagctgggattacagactcatgccaccacgccagctaatttttgtatttttagtagagacggggtttcaccatgttggtcaggatggtctcaatcctggcctcttgatagtcctgacctcatgatctgcccacctcggcctccccaaagtgctgggattacaggtacaatgatgtataattaatgcttagtgaagcataaagttacctacatcaattaattaaatgaacttatgtacagaaaacatgtataaatataagtctatactaatgcttacaactttctaagagggttcttgcttatgtagctttttattattttaagtaactagaaccaccaaatatcaaataaaattatttggttatggttatgttcatctaaacacaacaataacttttatattaatatttaggagtctattttgtctataggtgacaaacatctccagactaacatgtcagttttatcaattatattatgtttaattatttaagatttctttatgtggaacatctatagagataaatagaaattttcaataagatgtagtaacactgtgatttatctttcaagagtctctcttcacttccttctaaagagactaatttgagagtacaggtgcatattaattttcttggttctttcagctgaattatattggtccagaagttcaaaatcatgtgacaataataagggatactgacagaagttatttccaagtttgtgtatatattataaaaattacatatataaaactaaggcttttatttctgttatttttaagcttttatttcttgtagctaaaaataaaacatcataaatctggtaggtaaatttcttattaaatcaatcttgaaatagaaaatgtaataactttcttaccattaacattttttacccttccatagaagggagggaataaatcatgacttatcccattttcaataacaaaacgaaactatggcactaaccaaaaacttgcattctggcataatttttacagttgcagagaattgtttctgggctcattaaaaaaagtagtattgcagacattgctgcaatgggaagcagacaataacttcttaaaggaattctacacctcctttaagatttacttaattgctacatctaaattctgataatttaaaatccattttaggtgataaaattttttaaaagttttgaaggaaacctctggataaatggacaaggcctaatttttttttgtagtcaatccaactgtactggccaatttttgaaataagattatatgattaggtattagcagagacaaagagttacctcctccatcttactctgccctatttgaaagtctcaggggagaaaagggaacaagatgctgatccaacctgagtggagtcaggtgaggcatctttacatctaagaatttttttttaaattttattattattatacttcaagttctagggtacatgtccacaatgcacatgtctgtcacacatgcacacatgtgccatgctggtgtgctgcacccaccaacctgtcatccagcattaggtatatctcctaatgctatccctcccctctccacccaccccacagcaggccccggtatgtgatgttccccttcgtgtgtccatgtgttcttattgttcaattcccacctatgagtgagaatatgtggtgtttggtttttggtccttgcaatagtttgctgagaatgatggtttccagcttcatccatgtccctacaaagaacatgaactcatcattttttatggctgcatagtattccatggtgtatatgtgccacattttcttaatccagtctatcattgttggacatttgggttggttccaagtctttgctattgtgaatagtgctgcaataaacatatgtgtgcatgtgtcttta

SEQ ID NO: 134339 - DNA, 658 bp, Homo sapiens
  Payload ID: 6245
  Gene Symbol: FGF5
  Gene Name: fibroblast growth factor 5
  ENST ID: ENST00000507780
  CDS Start-End: 1-360
aaccctagaggctccagcagcagacagagcagcagtagcgctatgtcttcctcttctgcctcctcctcccccgcagcttctctgggcagccaaggaagtggcttggagcagagcagtttccagtggagcccctcggggcgccggaccggcagcctctactgcagagtgggcatcggtttccatctgcagatctacccggatggcaaagtcaatggatcccacgaagccaatatgttaagtgttttggaaatatttgctgtgtctcaggggattgtaggaatacgaggagttttcagcaacaaatttttagcgatgtcaaaaaaaggaaaactccatgcaagtaacacactagaaacttaagtacaagcaaacttcagacccctttaaagggacgcttcggccgaggataccgcaatggatcaggaagaggggctgaaggccttggacaatattgtcactcaattcaacgcctatgaagatttcctggactcgcagatcactactgtggacttgtactacctggagccaatcccctccccagctacccccgctgcagggtggtgggggacagagtggagttcttgtcctgtgccacgggagaacccggacgcgcaggaattaacaagtcatcagtgctaggaagctgggaggcggacga

SEQ ID NO: 134340 - DNA, 743 bp, Homo sapiens
  Payload ID: 6246
  Gene Symbol: FGF6
  Gene Name: fibroblast growth factor 6
  Uniprot ID: P10767
  ENST ID: ENST00000228837
  CDS Start-End: 45-671
tttagggccattaattctgaccacgtgcctgagaggcaaggtggatggccctgggacagaaactgttcatcactatgtcccggggagcaggacgtctgcagggcacgctgtgggctctcgtcttcctaggcatcctagtgggcatggtggtgccctcgcctgcaggcacccgtgccaacaacacgctgctggactcgaggggctggggcaccctgctgtccaggtctcgcgccgggctagctggagagattgccggggtgaactgggaaagtggctatttggtggggatcaagcggcagcggaggctctactgcaacgtgggcatcggctttcacctccaggtgctccccgacggccggatcagcgggacccacgaggagaacccctacagcctgctggaaatttccactgtggagcgaggcgtggtgagtctctttggagtgagaagtgccctcttcgttgccatgaacagtaaaggaagattgtacgcaacgcccagcttccaagaagaatgcaagttcagagaaaccctcctgcccaacaattacaatgcctacgagtcagacttgtaccaagggacctacattgccctgagcaaatacggacgggtaaagcggggcagcaaggtgtccccgatcatgactgtcactcatttccttcccaggatctaaggacccacaaaagaaggctcacagatttaaagcatcatctgttcgattgaaattttgcaccagcgaagaatt

SEQ ID NO: 134341 - DNA, 335 bp, Homo sapiens
  Payload ID: 6246
  Gene Symbol: FGF6
  Gene Name: fibroblast growth factor 6
  ENST ID: ENST00000543077
  CDS Start-End: 1-96
actgtggagcgaggcgtggtgagtctctttggagtgagaagtgccctcttcgttgccatgaacagtaaaggaagattgtacgcaacggttaaataaaaagaaagaagatgactggagagtttacgtcaggaggaccccacagcctcccgagtttcctccctcccttcacactgccccttcctgagcttcccgtcatcagccctgtcatctccgtgccacgttcctgctgtggccatccccactctctcgcccctttcatgccatctctgggggtgatcccaatgtgccttcagtcgagcaactctgggttccaaataaatctatgttctcttgga

SEQ ID NO: 134342 - DNA, 5467 bp, Homo sapiens
  Payload ID: 6247
  Gene Symbol: FGF7
  Gene Name: fibroblast growth factor 7
  Uniprot ID: P21781
  ENST ID: ENST00000267843
  CDS Start-End: 612-1196
tagctccctctcatgaccattgaatactatacaagcctccttttattctcgctgttgtattcaactaacagctcactggctaagttttaattgcttccaatgaggtcagcaaaggtatttatcgaaaagccctgaataaaaggctcacacacacacacaagcacacacgcgctcacacacagagagaaaatccttctgcctgttgatttatggaaacaattatgattctgctggagaacttttcagctgagaaatagtttgtagctacagtagaaaggctcaagttgcaccaggcagacaacagacatggaattcttatatatccagctgttagcaacaaaacaaaagtcaaatagcaaacagcgtcacagcaactgaacttactacgaactgtttttatgaggatttatcaacagagttatttaaggaggaatcctgtgttgttatcaggaactaaaaggataaggctaacaatttggaaagagcaactactctttcttaaatcaatctacaattcacagataggaagaggtcaatgacctaggagtaacaatcaactcaagattcattttcattatgttattcatgaacacccggagcactacactataatgcacaaatggatactgacatggatcctgccaactttgctctacagatcatgctttcacattatctgtctagtgggtactatatctttagcttgcaatgacatgactccagagcaaatggctacaaatgtgaactgttccagccctgagcgacacacaagaagttatgattacatggaaggaggggatataagagtgagaagactcttctgtcgaacacagtggtacctgaggatcgataaaagaggcaaagtaaaagggacccaagagatgaagaataattacaatatcatggaaatcaggacagtggcagttggaattgtggcaatcaaaggggtggaaagtgaattctatcttgcaatgaacaaggaaggaaaactctatgcaaagaaagaatgcaatgaagattgtaacttcaaagaactaattctggaaaaccattacaacacatatgcatcagctaaatggacacacaacggaggggaaatgtttgttgccttaaatcaaaaggggattcctgtaagaggaaaaaaaacgaagaaagaacaaaaaacagcccactttcttcctatggcaataacttaattgcatatggtatataaagaaccagttccagcagggagatttctttaagtggactgttttctttcttctcaaaattttctttccttttattttttagtaatcaagaaaggctggaaaactactgaaaaactgatcaagctggacttgtgcatttatgtttgttttaagacactgcattaaagaaagatttgaaaagtatacacaaaaatcagatttagtaactaaaggttgtaaaaaattgtaaaactggttgtacaatcatgatgttagtaacagtaatttttttcttaaattaatttacccttaagagtatgttagatttgattatctgataatgattatttaaatattcctatctgcttataaaatggctgctataataataataatacagatgttgttatataaggtatatcagacctacaggcttctggcaggatttgtcagataatcaagccacactaactatggaaaatgagcagcattttaaatgctttctagtgaaaaattataatctacttaaactctaatcagaaaaaaaattctcaaaaaaactattatgaaagtcaataaaatagataatttaacaaaagtacaggattagaacatgcttatacctataaataagaacaaaatttctaatgctgctcaagtggaaagggtattgctaaaaggatgtttccaaaaatcttgtatataagatagcaacagtgattgatgataatactgtacttcatcttacttgccacaaaataacattttataaatcctcaaagtaaaattgagaaatctttaagtttttttcaagtaacataatctatctttgtataattcatatttgggaatatggcttttaataatgttcttcccacaaataatcatgcttttttcctatggttacagcattaaactctattttaagttgtttttgaactttattgttttgttatttaagtttatgttatttataaaaaaaaaaccttaataagctgtatctgtttcatatgcttttaattttaaaggaataacaaaactgtctggctcaacggcaagtttccctcccttttctgactgacactaagtctagcacacagcacttgggccagcaaatcctggaaggcagacaaaaataagagcctgaagcaatgcttacaatagatgtctcacacagaacaatacaaatatgtaaaaaatctttcaccacatattcttgccaattaattggatcatataagtaaaatcattacaaatataagtatttacaggattttaaagttagaatatatttgaatgcatgggtagaaaatatcatattttaaaactatgtatatttaaatttagtaattttctaatctctagaaatctctgctgttcaaaaggtggcagcactgaaagttgttttcctgttagatggcaagagcacaatgcccaaaatagaagatgcagttaagaataaggggccctgaatgtcatgaaggcttgaggtcagcctacagataacaggattattacaaggatgaatttccacttcaaaagtctttcattggcagatcttggtagcactttatatgttcaccaatgggaggtcaatatttatctaatttaaaaggtatgctaaccactgtggttttaatttcaaaatatttgtcattcaagtccctttacataaatagtatttggtaatacatttatagatgagagttatatgaaaaggctaggtcaacaaaaacaatagattcatttaattttcctgtggttgacctatacgaccaggatgtagaaaactagaaagaactgcccttcctcagatatactcttgggagagagcatgaatggtattctgaactatcacctgattcaaggactttgctagctaggttttgaggtcaggcttcagtaactgtagtcttgtgagcatattgagggcagaggaggacttagtttttcatatgtgtttccttagtgcctagcagactatctgttcataatcagttttcagtgtgaattcactgaatgtttatagacaaaagaaaatacacactaaaactaatcttcattttaaaagggtaaaacatgactatacagaaatttaaatagaaatagtgtatatacatataaaatacaagctatgttaggaccaaatgctctttgtctatggagttatacttccatcaaattacatagcaatgctgaattaggcaaaaccaacatttagtggtaaatccattcctggtagtataagtcacctaaaaaagacttctagaaatatgtactttaattatttgtttttctcctatttttaaatttattatgcaaattttagaaaataaaatttgctctagttacacacctttagaattctagaatattaaaactgtaaggggcctccatccctcttactcatttgtagtctaggaaattgagattttgatacacctaaggtcacgcagctgggtagatatacagctgtcacaagagtctagatcagttagcacatgctttctactcttcgattattagtattattagctaatggtctttggcatgtttttgttttttatttctgttgagatatagcctttacatttgtacacaaatgtgactatgtcttggcaatgcacttcatacacaatgactaatctatactgtgatgatttgactcaaaaggagaaaagaaattatgtagttttcaattctgattcctattcaccttttgtttatgaatggaaagctttgtgcaaaatatacatataagcagagtaagccttttaaaaatgttctttgaaagataaaattaaatacatgagtttctaacaattagaaaagaaaaaattaaaacatgaaatgataacaaaagtaaacaaaagatactttcaaagcagtgaacaaaacattttgacataagccataatataaattataatataaaaaataaaaaccatagtataaattgtcagcctttgagttggctacaaattcaatttaatgacagaagagaagggatgctggaggtaaattcttagggtttctatctcatagagtttgctcttctggttctctagactgccaaagaacataaagatgtgcgaggggacctagctgtagtaaaagcaatcctataacaagaaaaactctaaaacagtgccccttacgattttctactgaaatttctctaatagtagaggtgtaaaataagaagttagagaataatgcaaagggggcccaccacagacggaacatttcttttctcttaagactcatgtgatttttgcatcttactccataatatatttgtggttgcgttaatatgacaatgtctgcaattaaacaccagtaagcaaaattgatacatcagaatgacttgcagggcttatcatgcagtttggtttacatccctactccactgccatttacttgagcgtgaatgagacacaaaagattatttgcctcccataatccaactttacacataaataacacaaggctaaagaaaaccagaactcaaattcaccacgcataggagtgataacaaaaatatttaacagtcagtatgggtgattactggccaatcagaatacatcactgatacatcgaaatggatgcaggccactatgactaacttgtgggtatcatttctatgatcaccctaaaacagagttgggaaaatatctattaactggtctctctggtttgaattctcaatatgtatcttaatatgaaatagctcattaaaacttcatgtgtaactatttcagcattgttgtcagctactctttattccacttctgtacagtatttattcaaccaagctgctgctttcaatgaaggtcacttgttccttcagggacacatatactcccacctatcctttaattttgaatggtttgtcaggaaaatttactttctcttgagttgaaaaacttgacaggaagcaagaaataatacagtcctagcctctttccaataacatctgatttctccattctcaaactacacttctcaaggaaccagatatttactctcatctgggaagatgcctcttatgttttccttttacttcctggttatcatgtggttgcattttccaagttcttatcattgaatttatgagagcctatcaaaatttattttctttcatttatattctaataattgaaatgtgagatgaaaataacatttcacttatgaaaaacccttctcttgatgaatccttccatgtgttagttatctattgctgtgtaacaaattaaaacttaatggcttgaaacaaa

SEQ ID NO: 134343 - DNA, 1089 bp, Homo sapiens
  Payload ID: 6247
  Gene Symbol: FGF7
  Gene Name: fibroblast growth factor 7
  Uniprot ID: P21781
  ENST ID: ENST00000560765
  CDS Start-End: 450-1034
acacacgcgctcacacacagagagaaaatccttctgcctgttgatttatggaaacaattatgattctgctggagaacttttcagctgagaaatagtttgtagctacagtagaaaggctcaagttgcaccaggcagacaacagacatggaattcttatatatccagctgttagcaacaaaacaaaagtcaaatagcaaacagcgtcacagcaactgaacttactacgaactgtttttatgaggatttatcaacagagttatttaaggaggaatcctgtgttgttatcaggaactaaaaggataaggctaacaatttggaaagagcaactactctttcttaaatcaatctacaattcacagataggaagaggtcaatgacctaggagtaacaatcaactcaagattcattttcattatgttattcatgaacacccggagcactacactataatgcacaaatggatactgacatggatcctgccaactttgctctacagatcatgctttcacattatctgtctagtgggtactatatctttagcttgcaatgacatgactccagagcaaatggctacaaatgtgaactgttccagccctgagcgacacacaagaagttatgattacatggaaggaggggatataagagtgagaagactcttctgtcgaacacagtggtacctgaggatcgataaaagaggcaaagtaaaagggacccaagagatgaagaataattacaatatcatggaaatcaggacagtggcagttggaattgtggcaatcaaaggggtggaaagtgaattctatcttgcaatgaacaaggaaggaaaactctatgcaaagaaagaatgcaatgaagattgtaacttcaaagaactaattctggaaaaccattacaacacatatgcatcagctaaatggacacacaacggaggggaaatgtttgttgccttaaatcaaaaggggattcctgtaagaggaaaaaaaacgaagaaagaacaaaaaacagcccactttcttcctatggcaataacttaattgcatatggtatataaagaaccagttccagcagggagatttctttaagtggact

SEQ ID NO: 134344 - DNA, 579 bp, Homo sapiens
  Payload ID: 6247
  Gene Symbol: FGF7
  Gene Name: fibroblast growth factor 7
  ENST ID: ENST00000560979
  CDS Start-End: 213-579
acacgcgctcacacacagagagaaaatccttctgcctgttgatttatggaaacaattatgattctgctggagaacttttcagctgagaaatagtttgtagctacagtagaaaggctcaagttgcaccaggcagacaacagacatggaattcttatatatccagctgttagcaacaaaacaaccctgagcgacacacaagaagttatgattacatggaaggaggggatataagagtgagaagactcttctgtcgaacacagtggtacctgaggatcgataaaagaggcaaagtaaaagggacccaagagatgaagaataattacaatatcatggaaatcaggacagtggcagttggaattgtggcaatcaaaggggtggaaagtgaattctatcttgcaatgaacaaggaaggaaaactctatgcaaagaaagaatgcaatgaagattgtaacttcaaagaactaattctggaaaaccattacaacacatatgcatcagctaaatggacacacaacggaggggaaatgtttgttgccttaaatcaaaaggggattcctgtaagaggaaaaaaaacgaaga

SEQ ID NO: 134345 - DNA, 1688 bp, Homo sapiens
  Payload ID: 6247
  Gene Symbol: FGF7
  Gene Name: fibroblast growth factor 7
  Uniprot ID: P21781
  ENST ID: ENST00000560270
  CDS Start-End: 471-764
ggctcacacacacacacaagcacacacgcgctcacacacagagagaaaatccttctgcctgttgatttatggaaacaattatgattctgctggagaacttttcagctgagaaatagtttgtagctacagtagaaaggctcaagttgcaccaggcagacaacagacatggaattcttatatatccagctgttagcaacaaaacaaaagtcaaatagcaaacagcgtcacagcaactgaacttactacgaactgtttttatgaggatttatcaacagagttatttaaggaggaatcctgtgttgttatcaggaactaaaaggataaggctaacaatttggaaagagcaactactctttcttaaatcaatctacaattcacagataggaagaggtcaatgacctaggagtaacaatcaactcaagattcattttcattatgttattcatgaacacccggagcactacactataatgcacaaatggatactgacatggatcctgccaactttgctctacagatcatgctttcacattatctgtctagtgggtactatatctttagcttgcaatgacatgactccagagcaaatggctacaaatgtgaactgttccagccctgagcgacacacaagaagttatgattacatggaaggaggggatataagagtgagaagactcttctgtcgaacacagtggtacctgaggatcgataaaagaggcaaagtaaaagggacccaagagatgaagaataattacagtaagtaattttaagtactgctcatgaaccttagcaatctgttaatggatcaattttcaggtgatatgttttctcatcttccttttgcttcttggaaaaaaaattaaataaaatgtcacctaatttctctaaattgaactatgttgaactatgcccctaaaaatatctcttttaacagggcaaatctacttacattatagttggacctgataatccaagccaatttgaaaatatatactccttgtcctgaaaatgctcataagttaagcaaaatgtaaataatattattcacaccaaaatgtgacttaatattgtctaagcaaaactcattaagatatctaatttagaacttcataaattatcactaaaagctatttatcactagtttaaagagtagggaaattatttttattaatttgattttctttgaaataatattttcatgatgtaaattaaaatacttaatctgtgctaagatatgcattcctttgcaattgtgtataatgataaaatagaagggaatctgtggtatccttattcatttgagtcataatgagcttgtattaagttgatgacttatcaacttaggcagaaaaacagatctctcctaacgttttccttaactaaatcttttatgtcataaaagttctgtgctatcttaagaaaaatgtaaaggtgaggggaaaaaagtgggctggaagagatggtaattccatgtttttcaatttaaagccttacatttttcccaagaatcagttattcttcttatgttaaaatatcagggttgtgttttgcatttaatggttatgatgaataaccaacttcaatagtattaaatgtaatggaataagatacacacctcaacatgtacattaaggatttaaaatacttagtaaaaataaattttgtttacattactagcactcagaaaa

SEQ ID NO: 134346 - DNA, 3936 bp, Homo sapiens
  Payload ID: 6247
  Gene Symbol: FGF7
  Gene Name: fibroblast growth factor 7
  Uniprot ID: P21781
  ENST ID: ENST00000614567
  CDS Start-End: 530-1114
agttttaattgcttccaatgaggtcagcaaaggtatttatcgaaaagccctgaataaaaggctcacacacacacacaagcacacacgcgctcacacacagagagaaaatccttctgcctgttgatttatggaaacaattatgattctgctggagaacttttcagctgagaaatagtttgtagctacagtagaaaggctcaagttgcaccaggcagacaacagacatggaattcttatatatccagctgttagcaacaaaacaaaagtcaaatagcaaacagcgtcacagcaactgaacttactacgaactgtttttatgaggatttatcaacagagttatttaaggaggaatcctgtgttgttatcaggaactaaaaggataaggctaacaatttggaaagagcaactactctttcttaaatcaatctacaattcacagataggaagaggtcaatgacctaggagtaacaatcaactcaagattcattttcattatgttattcatgaacacccggagcactacactataatgcacaaatggatactgacatggatcctgccaactttgctctacagatcatgctttcacattatctgtctagtgggtactatatctttagcttgcaatgacatgactccagagcaaatggctacaaatgtgaactgttccagccctgagcgacacacaagaagttatgattacatggaaggaggggatataagagtgagaagactcttctgtcgaacacagtggtacctgaggatcgataaaagaggcaaagtaaaagggacccaagagatgaagaataattacaatatcatggaaatcaggacagtggcagttggaattgtggcaatcaaaggggtggaaagtgaattctatcttgcaatgaacaaggaaggaaaactctatgcaaagaaagaatgcaatgaagattgtaacttcaaagaactaattctggaaaaccattacaacacatatgcatcagctaaatggacacacaacggaggggaaatgtttgttgccttaaatcaaaaggggattcctgtaagaggaaaaaaaacgaagaaagaacaaaaaacagcccactttcttcctatggcaataacttaattgcatatggtatataaagaaccagttccagcagggagatttctttaagtggactgttttctttcttctcaaaattttctttccttttattttttagtaatcaagaaaggctggaaaactactgaaaaactgatcaagctggacttgtgcatttatgtttgttttaagacactgcattaaagaaagatttgaaaagtatacacaaaaatcagatttagtaactaaaggttgtaaaaaattgtaaaactggttgtacaatcatgatgttagtaacagtaatttttttcttaaattaatttacccttaagagtatgttagatttgattatctgataatgattatttaaatattcctatctgcttataaaatggctgctataataataataatacagatgttgttatataaggtatatcagacctacaggcttctggcaggatttgtcagataatcaagccacactaactatggaaaatgagcagcattttaaatgctttctagtgaaaaattataatctacttaaactctaatcagaaaaaaaattctcaaaaaaactattatgaaagtcaataaaatagataatttaacaaaagtacaggattagaacatgcttatacctataaataagaacaaaatttctaatgctgctcaagtggaaagggtattgctaaaaggatgtttccaaaaatcttgtatataagatagcaacagtgattgatgataatactgtacttcatcttacttgccacaaaataacattttataaatcctcaaagtaaaattgagaaatctttaagtttttttcaagtaacataatctatctttgtataattcatatttgggaatatggcttttaataatgttcttcccacaaataatcatgcttttttcctatggttacagcattaaactctattttaagttgtttttgaactttattgttttgttatttaagtttatgttatttataaaaaaaaaaccttaataagctgtatctgtttcatatgcttttaattttaaaggaataacaaaactgtctggctcaacggcaagtttccctcccttttctgactgacactaagtctagcacacagcacttgggccagcaaatcctggaaggcagacaaaaataagagcctgaagcaatgcttacaatagatgtctcacacagaacaatacaaatatgtaaaaaatctttcaccacatattcttgccaattaattggatcatataagtaaaatcattacaaatataagtatttacaggattttaaagttagaatatatttgaatgcatgggtagaaaatatcatattttaaaactatgtatatttaaatttagtaattttctaatctctagaaatctctgctgttcaaaaggtggcagcactgaaagttgttttcctgttagatggcaagagcacaatgcccaaaatagaagatgcagttaagaataaggggccctgaatgtcatgaaggcttgaggtcagcctacagataacaggattattacaaggatgaatttccacttcaaaagtctttcattggcagatcttggtagcactttatatgttcaccaatgggaggtcaatatttatctaatttaaaaggtatgctaaccactgtggttttaatttcaaaatatttgtcattcaagtccctttacataaatagtatttggtaatacatttatagatgagagttatatgaaaaggctaggtcaacaaaaacaatagattcatttaattttcctgtggttgacctatacgaccaggatgtagaaaactagaaagaactgcccttcctcagatatactcttgggagagagcatgaatggtattctgaactatcacctgattcaaggactttgctagctaggttttgaggtcaggcttcagtaactgtagtcttgtgagcatattgagggcagaggaggacttagtttttcatatgtgtttccttagtgcctagcagactatctgttcataatcagttttcagtgtgaattcactgaatgtttatagacaaaagaaaatacacactaaaactaatcttcattttaaaagggtaaaacatgactatacagaaatttaaatagaaatagtgtatatacatataaaatacaagctatgttaggaccaaatgctctttgtctatggagttatacttccatcaaattacatagcaatgctgaattaggcaaaaccaacatttagtggtaaatccattcctggtagtataagtcacctaaaaaagacttctagaaatatgtactttaattatttgtttttctcctatttttaaatttattatgcaaattttagaaaataaaatttgctctagttacacacctttagaattctagaatattaaaactgtaaggggcctccatccctcttactcatttgtagtctaggaaattgagattttgatacacctaaggtcacgcagctgggtagatatacagctgtcacaagagtctagatcagttagcacatgctttctactcttcgattattagtattattagctaatggtctttggcatgtttttgttttttatttctgttgagatatagcctttacatttgtacacaaatgtgactatgtcttggcaatgcacttcatacacaatgactaatctatactgtgatgatttgactcaaaaggagaaaagaaattatgtagttttcaattctgattcctattcaccttttgtttatgaatggaaagctttgtgcaaaatatacatataagcagagtaagccttttaaaaatgttctttgaaagataaaattaaatacatgagtttctaacaattaga

SEQ ID NO: 134347 - DNA, 799 bp, Homo sapiens
  Payload ID: 6248
  Gene Symbol: FGF8
  Gene Name: fibroblast growth factor 8 (androgen-induced)
  Uniprot ID: P55075
  ENST ID: ENST00000320185
  CDS Start-End: 60-794
gcggcggcccgcgggacggcgtgacccgccgggctctcggtgccccggggccgcgcgccatgggcagcccccgctccgcgctgagctgcctgctgttgcacttgctggtcctctgcctccaagcccaggaaggcccgggcaggggccctgcgctgggcagggagctcgcttccctgttccgggctggccgggagccccagggtgtctcccaacaggtaactgttcagtcctcacctaattttacacagcatgtgagggagcagagcctggtgacggatcagctcagccgccgcctcatccggacctaccaactctacagccgcaccagcgggaagcacgtgcaggtcctggccaacaagcgcatcaacgccatggcagaggacggcgaccccttcgcaaagctcatcgtggagacggacacctttggaagcagagttcgagtccgaggagccgagacgggcctctacatctgcatgaacaagaaggggaagctgatcgccaagagcaacggcaaaggcaaggactgcgtcttcacggagattgtgctggagaacaactacacagcgctgcagaatgccaagtacgagggctggtacatggccttcacccgcaagggccggccccgcaagggctccaagacgcggcagcaccagcgtgaggtccacttcatgaagcggctgccccggggccaccacaccaccgagcagagcctgcgcttcgagttcctcaactacccgcccttcacgcgcagcctgcgcggcagccagaggacttgggcccccgagccccgataggtgct

SEQ ID NO: 134348 - DNA, 823 bp, Homo sapiens
  Payload ID: 6248
  Gene Symbol: FGF8
  Gene Name: fibroblast growth factor 8 (androgen-induced)
  Uniprot ID: P55075
  ENST ID: ENST00000347978
  CDS Start-End: 171-818
gcggcgcggcgagcacgacgttccacgggacccgcggagccgcgtcgtgatcgccgccggcctcccgcacccgcaccctctccgctcgcgccctgctcagcgcgtcctcccgcggcggcccgcgggacggcgtgacccgccgggctctcggtgccccggggccgcgcgccatgggcagcccccgctccgcgctgagctgcctgctgttgcacttgctggtcctctgcctccaagcccaggtaactgttcagtcctcacctaattttacacagcatgtgagggagcagagcctggtgacggatcagctcagccgccgcctcatccggacctaccaactctacagccgcaccagcgggaagcacgtgcaggtcctggccaacaagcgcatcaacgccatggcagaggacggcgaccccttcgcaaagctcatcgtggagacggacacctttggaagcagagttcgagtccgaggagccgagacgggcctctacatctgcatgaacaagaaggggaagctgatcgccaagagcaacggcaaaggcaaggactgcgtcttcacggagattgtgctggagaacaactacacagcgctgcagaatgccaagtacgagggctggtacatggccttcacccgcaagggccggccccgcaagggctccaagacgcggcagcaccagcgtgaggtccacttcatgaagcggctgccccggggccaccacaccaccgagcagagcctgcgcttcgagttcctcaactacccgcccttcacgcgcagcctgcgcggcagccagaggacttgggcccccgagccccgataggtgct

SEQ ID NO: 134349 - DNA, 707 bp, Homo sapiens
  Payload ID: 6248
  Gene Symbol: FGF8
  Gene Name: fibroblast growth factor 8 (androgen-induced)
  Uniprot ID: P55075
  ENST ID: ENST00000344255
  CDS Start-End: 1-702
atgggcagcccccgctccgcgctgagctgcctgctgttgcacttgctggtcctctgcctccaagcccaggaaggcccgggcaggggccctgcgctgggcagggagctcgcttccctgttccgggctggccgggagccccagggtgtctcccaacagcatgtgagggagcagagcctggtgacggatcagctcagccgccgcctcatccggacctaccaactctacagccgcaccagcgggaagcacgtgcaggtcctggccaacaagcgcatcaacgccatggcagaggacggcgaccccttcgcaaagctcatcgtggagacggacacctttggaagcagagttcgagtccgaggagccgagacgggcctctacatctgcatgaacaagaaggggaagctgatcgccaagagcaacggcaaaggcaaggactgcgtcttcacggagattgtgctggagaacaactacacagcgctgcagaatgccaagtacgagggctggtacatggccttcacccgcaagggccggccccgcaagggctccaagacgcggcagcaccagcgtgaggtccacttcatgaagcggctgccccggggccaccacaccaccgagcagagcctgcgcttcgagttcctcaactacccgcccttcacgcgcagcctgcgcggcagccagaggacttgggcccccgagccccgataggtgct

SEQ ID NO: 134350 - DNA, 694 bp, Homo sapiens
  Payload ID: 6248
  Gene Symbol: FGF8
  Gene Name: fibroblast growth factor 8 (androgen-induced)
  Uniprot ID: P55075
  ENST ID: ENST00000346714
  CDS Start-End: 75-689
tcagcgcgtcctcccgcggcggcccgcgggacggcgtgacccgccgggctctcggtgccccggggccgcgcgccatgggcagcccccgctccgcgctgagctgcctgctgttgcacttgctggtcctctgcctccaagcccagcatgtgagggagcagagcctggtgacggatcagctcagccgccgcctcatccggacctaccaactctacagccgcaccagcgggaagcacgtgcaggtcctggccaacaagcgcatcaacgccatggcagaggacggcgaccccttcgcaaagctcatcgtggagacggacacctttggaagcagagttcgagtccgaggagccgagacgggcctctacatctgcatgaacaagaaggggaagctgatcgccaagagcaacggcaaaggcaaggactgcgtcttcacggagattgtgctggagaacaactacacagcgctgcagaatgccaagtacgagggctggtacatggccttcacccgcaagggccggccccgcaagggctccaagacgcggcagcaccagcgtgaggtccacttcatgaagcggctgccccggggccaccacaccaccgagcagagcctgcgcttcgagttcctcaactacccgcccttcacgcgcagcctgcgcggcagccagaggacttgggcccccgagccccgataggtgct

SEQ ID NO: 134351 - DNA, 1197 bp, Homo sapiens
  Payload ID: 6248
  Gene Symbol: FGF8
  Gene Name: fibroblast growth factor 8 (androgen-induced)
  ENST ID: ENST00000469792
  CDS Start-End: 198-311
tccggcagcggcgcacagcgattcggtgcggcgcggcgagcacgacgttccacgggacccgcggagccgcgtcgtgatcgccgccggcctcccgcacccgcaccctctccgctcgcgccctgctcagcgcgtcctcccgcggcggcccgcgggacggcgtgacccgccgggctctcggtgccccggggccgcgcgccatgggcagcccccgctccgcgctgagctgcctgctgttgcacttgctggtcctctgcctccaagcccaggtgaggaggggtgcgcggaggcgggggccgggcgcgccggtgtgagacccgggtgggcagcgccggtcgggggcaccgggactgactctgcggccggcgcgggagggctgagggcaccttagaaacccagccccgagccaccccgaggagggagctgaggcacagagaggtagcacccctcctgaggtcacacagcgacatgtgagggagcagagcctggtgacggatcagctcagccgccgcctcatccggacctaccaactctacagccgcaccagcgggaagcacgtgcaggtcctggccaacaagcgcatcaacgccatggcagaggacggcgaccccttcgcaaagctcatcgtggagacggacacctttggaagcagagttcgagtccgaggagccgagacgggcctctacatctgcatgaacaagaaggggaagctgatcgccaagagcaacggcaaaggcaaggactgcgtcttcacggagattgtgctggagaacaactacacagcgctgcagaatgccaagtacgagggctggtacatggccttcacccgcaagggccggccccgcaagggctccaagacgcggcagcaccagcgtgaggtccacttcatgaagcggctgccccggggccaccacaccaccgagcagagcctgcgcttcgagttcctcaactacccgcccttcacgcgcagcctgcgcggcagccagaggacttgggcccccgagccccgataggtgctgcctggccctccccacaatgccagaccgcagagaggctcatcctgtagggcacccaaaactcaagcaagatgagctgtgcgctgctctgcaggctggggaggtgctgggggagccctgggttccggttgttgatattgtttgctgttgggtttttgctgttttttttttttttttttttttt

SEQ ID NO: 134352 - DNA, 856 bp, Homo sapiens
  Payload ID: 6248
  Gene Symbol: FGF8
  Gene Name: fibroblast growth factor 8 (androgen-induced)
  ENST ID: ENST00000618991
  CDS Start-End: 235-657
accttgcgtccgcagtaccgacccgcacgctcttcagcgcatccctagtgaaggaggttctcccccagcccgtggctgttgcacttgctggtcctctgcctccaagcccagcatgtgagggagcagagcctggtgacggatcagctcagccgccgcctcatccggacctaccaactctacagccgcaccagcgggaagcacgtgcaggtcctggccaacaagcgcatcaacgccatggcagaggacggcgaccccttcgcaaagctcatcgtggagacggacacctttggaagcagagttcgagtccgaggagccgagacgggcctctacatctgcatgaacaagaaggggaagctgatcgccaagagcaacggcaaaggcaaggactgcgtcttcacggagattgtgctggagaacaactacacagcgctgcagaatgccaagtacgagggctggtacatggccttcacccgcaagggccggccccgcaagggctccaagacgcggcagcaccagcgtgaggtccacttcatgaagcggctgccccggggccaccacaccaccgagcagagcctgcgcttcgagttcctcaactacccgcccttcacgcgcagcctgcgcggcagccagaggacttgggcccccgagccccgataggtgctgcctggccctccccacaatgccagaccgcagagaggctcatcctgtagggcacccaaaactcaagcaagatgagctgtgcgctgctctgcaggctggggaggtgctgggggagccctgggttccggttgttgatattgtttgctgttgggtttttgctgtttttttttttttttttttttttaaaacaaaagag

SEQ ID NO: 134353 - DNA, 4220 bp, Homo sapiens
  Payload ID: 6249
  Gene Symbol: FGF9
  Gene Name: fibroblast growth factor 9
  Uniprot ID: P31371
  ENST ID: ENST00000382353
  CDS Start-End: 531-1157
ttccccttgaaggattcatgctgatgtctgcagagtcggttagagagtaaaaacagcgcatgccttcctggagtcaggatccgtaaattctgacgtagcccgtgcatcttaaaaatccctataataacgcctaggcatttaagttgctatggtcattctgatctcaaaccaaatggagaaactacggattttttttccttattacggtcggatgggatgaagaccttcctgcctgctaagagctggggatctatctatagagatacatagatatgtttatcaatatgtcagtgtgtgagtataaagtggtggtttcttagactatcagtggtttgaccttgaacctgtgccagtgaaacagcagattacttttatttatgcatttaatggattgaagaaaagaaccttttttttctctctctctctgcaactgcagtaagggaggggagttggatatacctcgcctaatatctcctgggttgacaccatcattattgtttattcttgtgctccaaaagccgagtcctctgatggctcccttaggtgaagttgggaactatttcggtgtgcaggatgcggtaccgtttgggaatgtgcccgtgttgccggtggacagcccggttttgttaagtgaccacctgggtcagtccgaagcaggggggctccccaggggacccgcagtcacggacttggatcatttaaaggggattctcaggcggaggcagctatactgcaggactggatttcacttagaaatcttccccaatggtactatccagggaaccaggaaagaccacagccgatttggcattctggaatttatcagtatagcagtgggcctggtcagcattcgaggcgtggacagtggactctacctcgggatgaatgagaagggggagctgtatggatcagaaaaactaacccaagagtgtgtattcagagaacagttcgaagaaaactggtataatacgtactcatcaaacctatataagcacgtggacactggaaggcgatactatgttgcattaaataaagatgggaccccgagagaagggactaggactaaacggcaccagaaattcacacattttttacctagaccagtggaccccgacaaagtacctgaactgtataaggatattctaagccaaagttgacaaagacagtttcttcacttgagcccttaaaaaagtaaccactataaaggtttcacgcggtgggttcttattgattcgctgtgtcatcacatcagctccactgttgccaaactttgtcgcatgcataatgtatgatggaggcttggatgggaatatgctgattttgttctgcacttaaaggcttctcctcctggagggctgcctagggccacttgcttgatttatcatgagagaagaggagagagagagagactgagcgctaggagtgtgtgtatgtgtgtgtgtgtgtgtgtgtgtgtgtgtgtatgtgtgtagcgggagatgtgggcggagcgagagcaaaaggactgcggcctgatgcatgctggaaaaagacacgcttttcatttctgatcagttgtacttcatcctatatcagcacagctgccatacttcgacttatcaggattctggctggtggcctgcgcgagggtgcagtcttacttaaaagactttcagttaattctcactggtatcatcgcagtgaacttaaagcaaagacctcttagtaaaaaataaaaaaaaataaaaaataaaaataaaaaaagttaaatttatttatagaaattccaaaggcaacattttatttattttatatatttatttattatatagagtttatttttaatgaaacatgtacaggccagataggcattttggaagctttaggctctgtaagcattaaatggcaaagtccgctatgaacctgtggtaaattcatgcaagtagatataatggtgcatggatataagaaattctaatgaccctaatgtactaaaggcgacaatctcttttgtgcccatattattgtaaacttatgcacatcgctcatgacactgagtattcactcttcagactgcttgtttcatagcttatcccagaggattaaagataaactgggtctcaaactttgattctgtgtctgcaatatttcctctctcataagtgactccactattgtaacttcatggttggaaaatatgagggttgatatatgtcttacttgtttaaatctgtcgcagaatataccaaagctaaataataactatgctttcattttagccgatctccagaatgacagtattaacatcaaacattgtattgatttagaattctcaaaaaaggaaaaaaaagtacatagcacagactattttttttaaagacgtaagaatcagattaacaggatcatacttgtaaactttttttggttcacttggctatcaaatatgaaattatagaagtatcataggggtcattgtaacatcttttagagaaaatggctatcagtgtgaactgtcataattacgtggtaatagcacccttagtaaaacttgcaaaatgaaactaataaatcgttatcaataatgacaatgagggggaaagtattatacttgttgactgtgttttgttttttaaaatggtctccacaagcgctcaatttttttagaggggatattactatatagaatatcttttacaaggcttttataacattttatgctgaaaagcataagaatacgtatttctttagtagcaataattttggaacttgcccttgggcaagcgagactatttcttactatatactaaggagaaaagagccaaattcttaaagcaatatttaagaaaaaaggaatttataacaaattctcatctacatatgacactttctagccagttgtgttgagaagtgcaaagtgacggtttaaacatgtgttgggatttattgaactaattttaaaatttactattcaaactttattttgctctgatgcacattctctatgaaaaataaaagtgtgtcactggtgagtgacagctgttatgagctagaagcgcatgacttattgtgacgatgtcttgcctttctgtggtccaagttggagtacatggcaatgccctcctgctgatgtgcattaaggaaaatctaagtctaatatttggaattaagatatattttagggggaggggacagaagcaatgtaaaatagttgatttatgataaagctcagaatgtcctcttcatttattttcttgttttattttcctttctaaacagaaactgcatttaattccaaaaagtagtattcttatttattatttaaccctttgctgctgctaaaatgtgcacatattcaggctttagtttttccaaaaggcattttttttttggctgaaaaatattaaacatttgaccacagggaagaatcaagtttctaggatgtcataggtatactatgtagcactgaaaaaattgattttaggtgacagccaaaagtagtcttaaagtagcatgagaccttagataatcgacctaaaagaaagaaaattgtgaaaaagacaaaaatcttcatgcattcctataaaacgctactttaaggtctacttttggagttaattttgtttggtactttttttttttttaagacgagcaaattgttatatgcttttggcaattgatacaataaactgtaatggtctgtaaataaataaatattgactcatgcgatttatgtaaatagtggaactgggagagtggatggctcagggtttcggtgtgggcattgtctcttgggcagtagagtgagtcatccccagctcatgggtttgcatccagttcttgtcttaagagacccaaagcccagtgaatggcagccctgagccactgtggaatgggggttctggtttcacaaacagatgcttagatagccaaaccactgtcttgttggtgccaacacttgcactgtggtcaaagacttaccgagcatgggctgaacaaccttcccatctgtcatgtgaatgtccccaagcagtggtgaaggacatgctaggtcagtgttggggaacctgccctgccaggtcctgttttgtagataaacaaatggctgccttctggtgtttttattctatttcatctcattaacactacaaccttgtgttatttacttgataatctgtaattgtatgtaaatacatacaggattatgtaatttgtgtaaatacataattacagagttttgaaaa

SEQ ID NO: 134354 - DNA, 1359 bp, Homo sapiens
  Payload ID: 6250
  Gene Symbol: FGFBP1
  Gene Name: fibroblast growth factor binding protein 1
  Uniprot ID: Q14512
  ENST ID: ENST00000382333
  CDS Start-End: 296-1000
gaatcattgcactccctactagagcggatgtgatgagggaaaaggagaactcagcactttccctgcaggaaccggctccctcggaggggcgtggctgggaggagctgtgagtaacgtgccacagtgttgtaaaaacccagtgagtgttataaaaacccagtcagcctggctcctgttgaatagtctaccccccttgcactctacctgacacagctgcagcctgcaattcactcgcactgcctgggattgcactggatccgtgtgctcagaacaaggtgaacgcccagctgcagccatgaagatctgtagcctcaccctgctctccttcctcctactggctgctcaggtgctcctggtggaggggaaaaaaaaagtgaagaatggacttcacagcaaagtggtctcagaacaaaaggacactctgggcaacacccagattaagcagaaaagcaggcccgggaacaaaggcaagtttgtcaccaaagaccaagccaactgcagatgggctgctactgagcaggaggagggcatctctctcaaggttgagtgcactcaattggaccatgaattttcctgtgtctttgctggcaatccaacctcatgcctaaagctcaaggatgagagagtctattggaaacaagttgcccggaatctgcgctcacagaaagacatctgtagatattccaagacagctgtgaaaaccagagtgtgcagaaaggattttccagaatccagtcttaagctagtcagctccactctatttgggaacacaaagcccaggaaggagaaaacagagatgtcccccagggagcacatcaaaggcaaagagaccaccccctctagcctagcagtgacccagaccatggccaccaaagctcccgagtgtgtggaggacccagatatggcaaaccagaggaagactgccctggagttctgtggagagacttggagctctctctgcacattcttcctcagcatagtgcaggacacgtcatgctaatgaggtcaaaagagaacgggttcccttaagagatgtcatgtcgtaagtccctctgtatactttaaagctctctacagtccccccaaaatatgaacttttgtgcttagtgagtgcaacgaaatatttaaacaagttttgtattttttgcttttgtgttttggaatttgccttatttttcttggatgcgatgttcagaggctgtttcctgcagcatgtatttccatggcccacacagctatgtgtttgagcagcgaagagtctttgagctgaatgagccagagtgataatttcagtgcaacgaactttctgctgaattaatggtaataaaactctgggtgtttttcagaaatacattcaaa

SEQ ID NO: 134355 - DNA, 1168 bp, Homo sapiens
  Payload ID: 6251
  Gene Symbol: FGFBP2
  Gene Name: fibroblast growth factor binding protein 2
  Uniprot ID: Q9BYJ0
  ENST ID: ENST00000259989
  CDS Start-End: 108-779
cttgcagagaaagagtcttttgtgcagcaccctttaaagggtgactcgtcccacttgtgttctctctcctggtgcagagttgcaagcaagtttatcggagtatcgccatgaagttcgtcccctgcctcctgctggtgaccttgtcctgcctggggactttgggtcaggccccgaggcaaaagcaaggaagcactggggaggaattccatttccagactggagggagagattcctgcactatgcgtcccagcagcttggggcaaggtgctggagaagtctggcttcgtgtcgactgccgcaacacagaccagacctactggtgtgagtacagggggcagcccagcatgtgccaggctttcgctgctgaccccaaaccttactggaatcaagccctgcaggagctgaggcgccttcaccatgcgtgccagggggccccggtgcttaggccatccgtgtgcagggaggctggaccccaggcccatatgcagcaggtgacttccagcctcaagggcagcccagagcccaaccagcagcctgaggctgggacgccatctctgaggcccaaggccacagtgaaactcacagaagcaacacagctgggaaaggactcgatggaagagctgggaaaagccaaacccaccacccgacccacagccaaacctacccagcctggacccaggcccggagggaatgaggaagcaaagaagaaggcctgggaacattgttggaaacccttccaggccctgtgcgcctttctcatcagcttcttccgagggtgacaggtgaaagacccctacagatctgacctctccctgacagacaaccatctctttttatattatgccgctttcaatccaacgttctcacactggaagaagagagtttctaatcagatgcaacggcccaaattcttgatctgcagcttctctgaagtttggaaaagaaaccttcctttctggagtttgcagagttcagcaatatgatagggaacaggtgctgatgggcccaagagtgacaagcatacacaactacttattatctgtagaagttttgctttgttgatctgagccttctatgaaagtttaaatatgtaacgcattcatgaatttccagtgttcagtaaatagcagctatgtgtgtgcaaaataaaagaatgatttcagaaata

SEQ ID NO: 134356 - DNA, 2545 bp, Homo sapiens
  Payload ID: 6252
  Gene Symbol: FGFBP3
  Gene Name: fibroblast growth factor binding protein 3
  Uniprot ID: Q8TAT2
  ENST ID: ENST00000311575
  CDS Start-End: 165-941
cacagggagccggctaaaacagactactcccccgtgcagtcgttccctctaccctaataaggctttggcgcctctcccagaactcggtcctggggaatgctctttgcctggtccagccccgacaaacgtggtctgagaacagcggagcgcggaaaccgcggagcatgactcctccgaagctgcgagcgtcgctgtcgccgtcgctgctgctgctgctgagtggttgcctcctcgcggctgctcggagggagaaaggggcggctagcaacgtggcggagccggtccccgggcccactggcggctcctcgggtcgcttcctcagccccgagcagcacgcgtgcagctggcagctcctgctgcccgccccggaggccgcagcgggcagcgagctggcgctgcgctgccagagcccggacggggcgcgccaccagtgcgcctaccgcgggcatccggagcgctgcgcagcctacgccgctcgccgcgcgcacttctggaagcaggtgctgggagggctgcgcaagaagcggaggccctgtcacgaccccgcgccgctccaggcccgcttgtgcgcgggcaagaagggccacggcgccgagctgcggctagtgccccgcgcgtccccgcccgcacgccccaccgtcgcgggattcgcgggggagtccaagccccgggcccggaaccgggggcggacccgggagcgtgcgtccggcccagccgctgggaccccgcctccccaaagcgcaccgcccaaagaaaacccctcagagaggaagaccaacgagggcaagaggaaggcggccttggtccccaacgaggagcgacccatggggaccgggcccgaccccgacgggctggacgggaacgcggagctcacggagacctactgcgctgagaagtggcactccctctgcaacttctttgtcaatttctggaacggctgagactgcctgccggcttagggagggttgatgggggaggcgtggggaagggaaagctaagggcgtcttagaccggggggtactgtgatagagattggggagaagtccaggttctcgaatgggggtgggggcaagggtaagggtgagatgcttgggatgagagtgtaaggggtatggagaatctctgggatagcagagaagttaaaaattttgaaaagtctcagtcctgattaagagcaggaaaaataatggaaacagaaataggcgtactttaaatgtgcaaaaactggagactggggagagaaatcgatgcagagggaggctgagaataagggggagatagagtgactaaagtgatgtgagtcccatgtggggagggggatgcaatgtttattgtttaacatttctattaaatgcagccatgagcaattgccaacctgagccaggttgaatcaatgtcttctcacttaatcagctaacaagactgcagactttttttccgtttctgaattggtataaacttggatgcggcgtggtgggtgtcatagataacctctatagggacagaagcctcacaggtcaaaactggctccaaggaaagttttgcagaatgatttcctttccattcttttagaagagctacctttttttttttttttccctgacagggtctggcttgcccaggctggagtgcggtggctagtcacaggtgtaataataggcactgcagtctccaactcctggcctcaagggatcctcacatcttagcctccagaatagctaggagtaggagtagctgggactacaagcatgcacagctgcacttggcttagaagtgctactttatttttatttttgagacagggtcttgtgtcatccagactggagcagtggtgcaattatggctcactgcggcctcgacattccagtctcaagtgatcctctgcctcagcctccggagtagccaggactacaggggtgtgccactagaagtgctactttttaacgaaatggtgactaatgttctggaactttcccattaaccttctgcatttagaaggaattatagatgttgagtgctccagtaaacagtgattctctttatatctgatttttttttttaaacagctaaaatgtaagtatgtatctcagagtcattttgaccattatggaagttgtatctctctgtttcatgtaactaattattaatatatttcatttttagtgtgatgtaatgagagactgtgtgtgtatgttaggtgctcaataaaaactgtatggttagatttaaagaagtggcaaggcaatggaaattctacctgcatttgatctacttccaagtacaccttgaattaagttcttaaacacatcttgaattgctgggaaaagacagaaactaagaagttgacataaagcaagagtcacaaactggcagccacctggccttatcattgttctatttgatttgcaccctggttctctttctttttcccttcctccccaccttcctcccatccattgttgaatctgtggatgcagagcccacggatgtggaggggcaactatatatatgtttttccattatatatataaatgtgtgtgtgtgt

SEQ ID NO: 134357 - DNA, 3816 bp, Homo sapiens
  Payload ID: 6253
  Gene Symbol: FGFR1
  Gene Name: fibroblast growth factor receptor 1
  Uniprot ID: P11362
  ENST ID: ENST00000326324
  CDS Start-End: 725-2920
cttgcggccacaggcgcggcgtcctcggcggcgggcggcagctagcgggagccgggacgccggtgcagccgcagcgcgcggaggaacccgggtgtgccgggagctgggcggccacgtccggacgggaccgagacccctcgtagcgcattgcggcgacctcgccttccccggccgcgagcgcgccgctgcttgaaaagccgcggaacccaaggacttttctccggtccgagctcggggcgccccgcagggcgcacggtacccgtgctgcagtcgggcacgccgcggcgccggggcctccgcagggcgatggagcccggtctgcaaggaaagtgaggcgccgccgctgcgttctggaggaggggggcacaaggtctggagaccccgggtggcggacgggagccctccccccgccccgcctccggggcaccagctccggctccattgttcccgcccgggctggaggcgccgagcaccgagcgccgccgggagtcgagcgccggccgcggagctcttgcgaccccgccaggacccgaacagagcccgggggcggcgggccggagccggggacgcgggcacacgcccgctcgcacaagccacggcggactctcccgaggcggaacctccacgccgagcgagggtcagtttgaaaaggaggatcgagctcactgtggagtatccatggagatgtggagccttgtcaccaacctctaactgcagaactgggatgtggagctggaagtgcctcctcttctgggctgtgctggtcacagccacactctgcaccgctaggccgtccccgaccttgcctgaacaagatgctctcccctcctcggaggatgatgatgatgatgatgactcctcttcagaggagaaagaaacagataacaccaaaccaaaccccgtagctccatattggacatccccagaaaagatggaaaagaaattgcatgcagtgccggctgccaagacagtgaagttcaaatgcccttccagtgggaccccaaaccccacactgcgctggttgaaaaatggcaaagaattcaaacctgaccacagaattggaggctacaaggtccgttatgccacctggagcatcataatggactctgtggtgccctctgacaagggcaactacacctgcattgtggagaatgagtacggcagcatcaaccacacataccagctggatgtcgtggagcggtcccctcaccggcccatcctgcaagcagggttgcccgccaacaaaacagtggccctgggtagcaacgtggagttcatgtgtaaggtgtacagtgacccgcagccgcacatccagtggctaaagcacatcgaggtgaatgggagcaagattggcccagacaacctgccttatgtccagatcttgaagactgctggagttaataccaccgacaaagagatggaggtgcttcacttaagaaatgtctcctttgaggacgcaggggagtatacgtgcttggcgggtaactctatcggactctcccatcactctgcatggttgaccgttctggaagccctggaagagaggccggcagtgatgacctcgcccctgtacctggagatcatcatctattgcacaggggccttcctcatctcctgcatggtggggtcggtcatcgtctacaagatgaagagtggtaccaagaagagtgacttccacagccagatggctgtgcacaagctggccaagagcatccctctgcgcagacaggtaacagtgtctgctgactccagtgcatccatgaactctggggttcttctggttcggccatcacggctctcctccagtgggactcccatgctagcaggggtctctgagtatgagcttcccgaagaccctcgctgggagctgcctcgggacagactggtcttaggcaaacccctgggagagggctgctttgggcaggtggtgttggcagaggctatcgggctggacaaggacaaacccaaccgtgtgaccaaagtggctgtgaagatgttgaagtcggacgcaacagagaaagacttgtcagacctgatctcagaaatggagatgatgaagatgatcgggaagcataagaatatcatcaacctgctgggggcctgcacgcaggatggtcccttgtatgtcatcgtggagtatgcctccaagggcaacctgcgggagtacctgcaggcccggaggcccccagggctggaatactgctacaaccccagccacaacccagaggagcagctctcctccaaggacctggtgtcctgcgcctaccaggtggcccgaggcatggagtatctggcctccaagaagtgcatacaccgagacctggcagccaggaatgtcctggtgacagaggacaatgtgatgaagatagcagactttggcctcgcacgggacattcaccacatcgactactataaaaagacaaccaacggccgactgcctgtgaagtggatggcacccgaggcattatttgaccggatctacacccaccagagtgatgtgtggtctttcggggtgctcctgtgggagatcttcactctgggcggctccccataccccggtgtgcctgtggaggaacttttcaagctgctgaaggagggtcaccgcatggacaagcccagtaactgcaccaacgagctgtacatgatgatgcgggactgctggcatgcagtgccctcacagagacccaccttcaagcagctggtggaagacctggaccgcatcgtggccttgacctccaaccaggagtacctggacctgtccatgcccctggaccagtactcccccagctttcccgacacccggagctctacgtgctcctcaggggaggattccgtcttctctcatgagccgctgcccgaggagccctgcctgccccgacacccagcccagcttgccaatggcggactcaaacgccgctgactgccacccacacgccctccccagactccaccgtcagctgtaaccctcacccacagcccctgctgggcccaccacctgtccgtccctgtcccctttcctgctggcaggagccggctgcctaccaggggccttcctgtgtggcctgccttcaccccactcagctcacctctccctccacctcctctccacctgctggtgagaggtgcaaagaggcagatctttgctgccagccacttcatcccctcccagatgttggaccaacacccctccctgccaccaggcactgcctggagggcagggagtgggagccaatgaacaggcatgcaagtgagagcttcctgagctttctcctgtcggtttggtctgttttgccttcacccataagcccctcgcactctggtggcaggtgccttgtcctcagggctacagcagtagggaggtcagtgcttcgtgcctcgattgaaggtgacctctgccccagataggtggtgccagtggcttattaattccgatactagtttgctttgctgaccaaatgcctggtaccagaggatggtgaggcgaaggccaggttgggggcagtgttgtggccctggggcccagccccaaactgggggctctgtatatagctatgaagaaaacacaaagtgtataaatctgagtatatatttacatgtctttttaaaagggtcgttaccagagatttacccatcgggtaagatgctcctggtggctgggaggcatcagttgctatatattaaaaacaaaaaagaaaaaaaaggaaaatgtttttaaaaaggtcatatattttttgctacttttgctgttttatttttttaaattatgttctaaacctattttcagtttaggtccctcaataaaaattgctgctgctt

SEQ ID NO: 134358 - DNA, 4157 bp, Homo sapiens
  Payload ID: 6253
  Gene Symbol: FGFR1
  Gene Name: fibroblast growth factor receptor 1
  Uniprot ID: P11362
  ENST ID: ENST00000335922
  CDS Start-End: 822-3260
gcgctcttgcggccacaggcgcggcgtcctcggcggcgggcggcagctagcgggagccgggacgccggtgcagccgcagcgcgcggaggaacccgggtgtgccgggagctgggcggccacgtccggacgggaccgagacccctcgtagcgcattgcggcgacctcgccttccccggccgcgagcgcgccgctgcttgaaaagccgcggaacccaaggacttttctccggtccgagctcggggcgccccgcagggcgcacggtacccgtgctgcagtcgggcacgccgcggcgccggggcctccgcagggcgatggagcccggtctgcaaggaaagtgaggcgccgccgctgcgttctggaggaggggggcacaaggtctggagaccccgggtggcggacgggagccctccccccgccccgcctccggggcaccagctccggctccattgttcccgcccgggctggaggcgccgagcaccgagcgccgccgggagtcgagcgccggccgcggagctcttgcgaccccgccaggacccgaacagagcccgggggcggcgggccggagccggggacgcgggcacacgcccgctcgcacaagccacggcggactctcccgaggcggaacctccacgccgagcgagggtcagtttgaaaaggaggatcgagctcactgtggagtatccatggagatgtggagccttgtcaccaacctctaactgcagaactgggatgtggagctggaagtgcctcctcttctgggctgtgctggtcacagccacactctgcaccgctaggccgtccccgaccttgcctgaacaaggatggcagctgtgacccgggatttcggtgagatgcttctgcactctggccgggtcctgccagccgaagcccagccctggggagcccctgtggaagtggagtccttcctggtccaccccggtgacctgctgcagcttcgctgtcggctgcgggacgatgtgcagagcatcaactggctgcgggacggggtgcagctggcggaaagcaaccgcacccgcatcacaggggaggaggtggaggtgcaggactccgtgcccgcagactccggcctctatgcttgcgtaaccagcagcccctcgggcagtgacaccacctacttctccgtcaatgtttcagatgctctcccctcctcggaggatgatgatgatgatgatgactcctcttcagaggagaaagaaacagataacaccaaaccaaaccgtatgcccgtagctccatattggacatccccagaaaagatggaaaagaaattgcatgcagtgccggctgccaagacagtgaagttcaaatgcccttccagtgggaccccaaaccccacactgcgctggttgaaaaatggcaaagaattcaaacctgaccacagaattggaggctacaaggtccgttatgccacctggagcatcataatggactctgtggtgccctctgacaagggcaactacacctgcattgtggagaatgagtacggcagcatcaaccacacataccagctggatgtcgtggagcggtcccctcaccggcccatcctgcaagcagggttgcccgccaacaaaacagtggccctgggtagcaacgtggagttcatgtgtaaggtgtacagtgacccgcagccgcacatccagtggctaaagcacatcgaggtgaatgggagcaagattggcccagacaacctgccttatgtccagatcttgaagactgctggagttaataccaccgacaaagagatggaggtgcttcacttaagaaatgtctcctttgaggacgcaggggagtatacgtgcttggcgggtaactctatcggactctcccatcactctgcatggttgaccgttctggaagccctggaagagaggccggcagtgatgacctcgcccctgtacctggagatcatcatctattgcacaggggccttcctcatctcctgcatggtggggtcggtcatcgtctacaagatgaagagtggtaccaagaagagtgacttccacagccagatggctgtgcacaagctggccaagagcatccctctgcgcagacaggtgtctgctgactccagtgcatccatgaactctggggttcttctggttcggccatcacggctctcctccagtgggactcccatgctagcaggggtctctgagtatgagcttcccgaagaccctcgctgggagctgcctcgggacagactggtcttaggcaaacccctgggagagggctgctttgggcaggtggtgttggcagaggctatcgggctggacaaggacaaacccaaccgtgtgaccaaagtggctgtgaagatgttgaagtcggacgcaacagagaaagacttgtcagacctgatctcagaaatggagatgatgaagatgatcgggaagcataagaatatcatcaacctgctgggggcctgcacgcaggatggtcccttgtatgtcatcgtggagtatgcctccaagggcaacctgcgggagtacctgcaggcccggaggcccccagggctggaatactgctacaaccccagccacaacccagaggagcagctctcctccaaggacctggtgtcctgcgcctaccaggtggcccgaggcatggagtatctggcctccaagaagtgcatacaccgagacctggcagccaggaatgtcctggtgacagaggacaatgtgatgaagatagcagactttggcctcgcacgggacattcaccacatcgactactataaaaagacaaccaacggccgactgcctgtgaagtggatggcacccgaggcattatttgaccggatctacacccaccagagtgatgtgtggtctttcggggtgctcctgtgggagatcttcactctgggcggctccccataccccggtgtgcctgtggaggaacttttcaagctgctgaaggagggtcaccgcatggacaagcccagtaactgcaccaacgagctgtacatgatgatgcgggactgctggcatgcagtgccctcacagagacccaccttcaagcagctggtggaagacctggaccgcatcgtggccttgacctccaaccaggagtacctggacctgtccatgcccctggaccagtactcccccagctttcccgacacccggagctctacgtgctcctcaggggaggattccgtcttctctcatgagccgctgcccgaggagccctgcctgccccgacacccagcccagcttgccaatggcggactcaaacgccgctgactgccacccacacgccctccccagactccaccgtcagctgtaaccctcacccacagcccctgctgggcccaccacctgtccgtccctgtcccctttcctgctggcaggagccggctgcctaccaggggccttcctgtgtggcctgccttcaccccactcagctcacctctccctccacctcctctccacctgctggtgagaggtgcaaagaggcagatctttgctgccagccacttcatcccctcccagatgttggaccaacacccctccctgccaccaggcactgcctggagggcagggagtgggagccaatgaacaggcatgcaagtgagagcttcctgagctttctcctgtcggtttggtctgttttgccttcacccataagcccctcgcactctggtggcaggtgccttgtcctcagggctacagcagtagggaggtcagtgcttcgtgcctcgattgaaggtgacctctgccccagataggtggtgccagtggcttattaattccgatactagtttgctttgctgaccaaatgcctggtaccagaggatggtgaggcgaaggccaggttgggggcagtgttgtggccctggggcccagccccaaactgggggctctgtatatagctatgaagaaaacacaaagtgtataaatctgagtatatatttacatgtctttttaaaagggtcgttaccagagatttacccatcgggtaagatgctcctggtggctgggaggcatcagttgctatatattaaaaacaaaaaagaaaaaaaaggaaaatgtttttaaaaaggtcatatattttttgctacttttgctgttttatttttttaaattatgttctaaacctattttcagtttaggtccctcaataaaaattgctgctgcttc

SEQ ID NO: 134359 - DNA, 6054 bp, Homo sapiens
  Payload ID: 6253
  Gene Symbol: FGFR1
  Gene Name: fibroblast growth factor receptor 1
  ENST ID: ENST00000341462
  CDS Start-End: 943-2046
agatgcaggggcgcaaacgccaaaggagaccaggctgtaggaagagaagggcagagcgccggacagctcggcccgctccccgtcctttggggccgcggctggggaactacaaggcccagcaggcagctgcagggggcggaggcggaggagggaccagcgcgggtgggagtgagagagcgagccctcgcgccccgccggcgcatagcgctcggagcgctcttgcggccacaggcgcggcgtcctcggcggcgggcggcagctagcgggagccgggacgccggtgcagccgcagcgcgcggaggaacccgggtgtgccgggagctgggcggccacgtccggacgggaccgagacccctcgtagcgcattgcggcgacctcgccttccccggccgcgagcgcgccgctgcttgaaaagccgcggaacccaaggacttttctccggtccgagctcggggcgccccgcagggcgcacggtacccgtgctgcagtcgggcacgccgcggcgccggggcctccgcagggcgatggagcccggtctgcaaggaaagtgaggcgccgccgctgcgttctggaggaggggggcacaaggtctggagaccccgggtggcggacgggagccctccccccgccccgcctccggggcaccagctccggctccattgttcccgcccgggctggaggcgccgagcaccgagcgccgccgggagtcgagcgccggccgcggagctcttgcgaccccgccaggacccgaacagagcccgggggcggcgggccggagccggggacgcgggcacacgcccgctcgcacaagccacggcggactctcccgaggcggaacctccacgccgagcgagggtcagtttgaaaaggaggatcgagctcactgtggagtatccatggagatgtggagccttgtcaccaacctctaactgcagaactgggatgtggagctggaagtgcctcctcttctgggctgtgctggtcacagccacactctgcaccgctaggccgtccccgaccttgcctgaacaagcccagccctggggagcccctgtggaagtggagtccttcctggtccaccccggtgacctgctgcagcttcgctgtcggctgcgggacgatgtgcagagcatcaactggctgcgggacggggtgcagctggcggaaagcaaccgcacccgcatcacaggggaggaggtggaggtgcaggactccgtgcccgcagactccggcctctatgcttgcgtaaccagcagcccctcgggcagtgacaccacctacttctccgtcaatgtttcagttcccatagatgctctcccctcctcggaggatgatgatgatgatgatgactcctcttcagaggagaaagaaacagataacaccaaaccaaaccccgtagctccatattggacatccccagaaaagatggaaaagaaattgcatgcagtgccggctgccaagacagtgaagttcaaatgcccttccagtgggaccccaaaccccacactgcgctggttgaaaaatggcaaagaattcaaacctgaccacagaattggaggctacaaggtccgttatgccacctggagcatcataatggactctgtggtgccctctgacaagggcaactacacctgcattgtggagaatgagtacggcagcatcaaccacacataccagctggatgtcgtggagcggtcccctcaccggcccatcctgcaagcagggttgcccgccaacaaaacagtggccctgggtagcaacgtggagttcatgtgtaaggtgtacagtgacccgcagccgcacatccagtggctaaagcacatcgaggtgaatgggagcaagattggcccagacaacctgccttatgtccagatcttgaagcattcggggattaatagctcggatgcggaggtgctgaccctgttcaatgtgacagaggcccagagcggggagtatgtgtgtaaggtttccaattatattggtgaagctaaccagtctgcgtggctcactgtcaccagacctgtggcaaaagactgctggagttaataccaccgacaaagagatggaggtgcttcacttaagaaatgtctcctttgaggacgcaggggagtatacgtgcttggcgggtaactctatcggactctcccatcactctgcatggttgaccgttctggaagccctggaagagaggccggcagtgatgacctcgcccctgtacctggagatcatcatctattgcacaggggccttcctcatctcctgcatggtggggtcggtcatcgtctacaagatgaagagtggtaccaagaagagtgacttccacagccagatggctgtgcacaagctggccaagagcatccctctgcgcagacaggtaacagtgtctgctgactccagtgcatccatgaactctggggttcttctggttcggccatcacggctctcctccagtgggactcccatgctagcaggggtctctgagtatgagcttcccgaagaccctcgctgggagctgcctcgggacagactggtcttaggcaaacccctgggagagggctgctttgggcaggtggtgttggcagaggctatcgggctggacaaggacaaacccaaccgtgtgaccaaagtggctgtgaagatgttgaagtcggacgcaacagagaaagacttgtcagacctgatctcagaaatggagatgatgaagatgatcgggaagcataagaatatcatcaacctgctgggggcctgcacgcaggatggtcccttgtatgtcatcgtggagtatgcctccaagggcaacctgcgggagtacctgcaggcccggaggcccccagggctggaatactgctacaaccccagccacaacccagaggagcagctctcctccaaggacctggtgtcctgcgcctaccaggtggcccgaggcatggagtatctggcctccaagaagtgcatacaccgagacctggcagccaggaatgtcctggtgacagaggacaatgtgatgaagatagcagactttggcctcgcacgggacattcaccacatcgactactataaaaagacaaccaacggccgactgcctgtgaagtggatggcacccgaggcattatttgaccggatctacacccaccagagtgatgtgtggtctttcggggtgctcctgtgggagatcttcactctgggcggctccccataccccggtgtgcctgtggaggaacttttcaagctgctgaaggagggtcaccgcatggacaagcccagtaactgcaccaacgagctgtacatgatgatgcgggactgctggcatgcagtgccctcacagagacccaccttcaagcagctggtggaagacctggaccgcatcgtggccttgacctccaaccaggagtacctggacctgtccatgcccctggaccagtactcccccagctttcccgacacccggagctctacgtgctcctcaggggaggattccgtcttctctcatgagccgctgcccgaggagccctgcctgccccgacacccagcccagcttgccaatggcggactcaaacgccgctgactgccacccacacgccctccccagactccaccgtcagctgtaaccctcacccacagcccctgctgggcccaccacctgtccgtccctgtcccctttcctgctggcaggagccggctgcctaccaggggccttcctgtgtggcctgccttcaccccactcagctcacctctccctccacctcctctccacctgctggtgagaggtgcaaagaggcagatctttgctgccagccacttcatcccctcccagatgttggaccaacacccctccctgccaccaggcactgcctggagggcagggagtgggagccaatgaacaggcatgcaagtgagagcttcctgagctttctcctgtcggtttggtctgttttgccttcacccataagcccctcgcactctggtggcaggtgccttgtcctcagggctacagcagtagggaggtcagtgcttcgtgcctcgattgaaggtgacctctgccccagataggtggtgccagtggcttattaattccgatactagtttgctttgctgaccaaatgcctggtaccagaggatggtgaggcgaaggccaggttgggggcagtgttgtggccctggggcccagccccaaactgggggctctgtatatagctatgaagaaaacacaaagtgtataaatctgagtatatatttacatgtctttttaaaagggtcgttaccagagatttacccatcgggtaagatgctcctggtggctgggaggcatcagttgctatatattaaaaacaaaaaagaaaaaaaaggaaaatgtttttaaaaaggtcatatattttttgctacttttgctgttttatttttttaaattatgttctaaacctattttcagtttaggtccctcaataaaaattgctgctgcttcatttatctatgggctgtatgaaaagggtgggaatgtccactggaaagaagggacacccacgggccctggggctaggtctgtcccgagggcaccgcatgctcccggcgcaggttccttgtaacctcttcttcctaggtcctgcacccagacctcacgacgcacctcctgcctctccgctgcttttggaaagtcagaaaaagaagatgtctgcttcgagggcaggaaccccatccatgcagtagaggcgctgggcagagagtcaaggcccagcagccatcgaccatggatggtttcctccaaggaaaccggtggggttgggctggggagggggcacctacctaggaatagccacggggtagagctacagtgattaagaggaaagcaagggcgcggttgctcacgcctgtaatcccagcactttgggacaccgaggtgggcagatcacttcaggtcaggagtttgagaccagcctggccaacttagtgaaaccccatctctactaaaaatgcaaaaattatccaggcatggtggcacacgcctgtaatcccagctccacaggaggctgaggcagaatcccttgaagctgggaggcggaggttgcagtgagccgagattgcgccattgcactccagcctgggcaacagagaaaacaaaaaggaaaacaaatgatgaaggtctgcagaaactgaaacccagacatgtgtctgccccctctatgtgggcatggttttgccagtgcttctaagtgcaggagaacatgtcacctgaggctagttttgcattcaggtccctggcttcgtttcttgttggtatgcctccccagatcgtccttcctgtatccatgtgaccagactgtatttgttgggactgtcgcagatcttggcttcttacagttcttcctgtccaaactccatcctgtccctcaggaacggggggaaaattctccgaatgtttttggttttttggctgcttggaatttacttctgccacctgctggtcatcactgtcctcactaagtggattctggctcccccgtacctcatggctcaaactaccactcctcagtcgctatattaaagcttatattttgctggattactgctaaatacaaaagaaagttcaatatgttttcatttctgtagggaaaatgggattgctgctttaaatttctgagctagggattttttggcagctgcagtgttggcgactattgtaaaattctctttgtttctctctgtaaatagcacctgctaacattacaatttgtatttatgtttaaagaaggcatcatttggtgaacagaactaggaaatgaatttttagctcttaaaagcatttgctttgagaccgcacaggagtgtctttccttgtaaaacagtgatgataatttctgccttggccctaccttgaagcaatgttgtgtgaagggatgaagaatctaaaagtcttcataagtccttgggagaggtgctagaaaaatataaggcactatcataattacagtgatgtccttgctgttactactcaaatcacccacaaatttccccaaagactgcgctagctgtcaaataaaagacagtgaaattgacctg

SEQ ID NO: 134360 - DNA, 3824 bp, Homo sapiens
  Payload ID: 6253
  Gene Symbol: FGFR1
  Gene Name: fibroblast growth factor receptor 1
  Uniprot ID: P11362
  ENST ID: ENST00000356207
  CDS Start-End: 725-2926
cttgcggccacaggcgcggcgtcctcggcggcgggcggcagctagcgggagccgggacgccggtgcagccgcagcgcgcggaggaacccgggtgtgccgggagctgggcggccacgtccggacgggaccgagacccctcgtagcgcattgcggcgacctcgccttccccggccgcgagcgcgccgctgcttgaaaagccgcggaacccaaggacttttctccggtccgagctcggggcgccccgcagggcgcacggtacccgtgctgcagtcgggcacgccgcggcgccggggcctccgcagggcgatggagcccggtctgcaaggaaagtgaggcgccgccgctgcgttctggaggaggggggcacaaggtctggagaccccgggtggcggacgggagccctccccccgccccgcctccggggcaccagctccggctccattgttcccgcccgggctggaggcgccgagcaccgagcgccgccgggagtcgagcgccggccgcggagctcttgcgaccccgccaggacccgaacagagcccgggggcggcgggccggagccggggacgcgggcacacgcccgctcgcacaagccacggcggactctcccgaggcggaacctccacgccgagcgagggtcagtttgaaaaggaggatcgagctcactgtggagtatccatggagatgtggagccttgtcaccaacctctaactgcagaactgggatgtggagctggaagtgcctcctcttctgggctgtgctggtcacagccacactctgcaccgctaggccgtccccgaccttgcctgaacaagatgctctcccctcctcggaggatgatgatgatgatgatgactcctcttcagaggagaaagaaacagataacaccaaaccaaaccgtatgcccgtagctccatattggacatccccagaaaagatggaaaagaaattgcatgcagtgccggctgccaagacagtgaagttcaaatgcccttccagtgggaccccaaaccccacactgcgctggttgaaaaatggcaaagaattcaaacctgaccacagaattggaggctacaaggtccgttatgccacctggagcatcataatggactctgtggtgccctctgacaagggcaactacacctgcattgtggagaatgagtacggcagcatcaaccacacataccagctggatgtcgtggagcggtcccctcaccggcccatcctgcaagcagggttgcccgccaacaaaacagtggccctgggtagcaacgtggagttcatgtgtaaggtgtacagtgacccgcagccgcacatccagtggctaaagcacatcgaggtgaatgggagcaagattggcccagacaacctgccttatgtccagatcttgaagactgctggagttaataccaccgacaaagagatggaggtgcttcacttaagaaatgtctcctttgaggacgcaggggagtatacgtgcttggcgggtaactctatcggactctcccatcactctgcatggttgaccgttctggaagccctggaagagaggccggcagtgatgacctcgcccctgtacctggagatcatcatctattgcacaggggccttcctcatctcctgcatggtggggtcggtcatcgtctacaagatgaagagtggtaccaagaagagtgacttccacagccagatggctgtgcacaagctggccaagagcatccctctgcgcagacaggtaacagtgtctgctgactccagtgcatccatgaactctggggttcttctggttcggccatcacggctctcctccagtgggactcccatgctagcaggggtctctgagtatgagcttcccgaagaccctcgctgggagctgcctcgggacagactggtcttaggcaaacccctgggagagggctgctttgggcaggtggtgttggcagaggctatcgggctggacaaggacaaacccaaccgtgtgaccaaagtggctgtgaagatgttgaagtcggacgcaacagagaaagacttgtcagacctgatctcagaaatggagatgatgaagatgatcgggaagcataagaatatcatcaacctgctgggggcctgcacgcaggatggtcccttgtatgtcatcgtggagtatgcctccaagggcaacctgcgggagtacctgcaggcccggaggcccccagggctggaatactgctacaaccccagccacaacccagaggagcagctctcctccaaggacctggtgtcctgcgcctaccaggtggcccgaggcatggagtatctggcctccaagaagtgcatacaccgagacctggcagccaggaatgtcctggtgacagaggacaatgtgatgaagatagcagactttggcctcgcacgggacattcaccacatcgactactataaaaagacaaccaacggccgactgcctgtgaagtggatggcacccgaggcattatttgaccggatctacacccaccagagtgatgtgtggtctttcggggtgctcctgtgggagatcttcactctgggcggctccccataccccggtgtgcctgtggaggaacttttcaagctgctgaaggagggtcaccgcatggacaagcccagtaactgcaccaacgagctgtacatgatgatgcgggactgctggcatgcagtgccctcacagagacccaccttcaagcagctggtggaagacctggaccgcatcgtggccttgacctccaaccaggagtacctggacctgtccatgcccctggaccagtactcccccagctttcccgacacccggagctctacgtgctcctcaggggaggattccgtcttctctcatgagccgctgcccgaggagccctgcctgccccgacacccagcccagcttgccaatggcggactcaaacgccgctgactgccacccacacgccctccccagactccaccgtcagctgtaaccctcacccacagcccctgctgggcccaccacctgtccgtccctgtcccctttcctgctggcaggagccggctgcctaccaggggccttcctgtgtggcctgccttcaccccactcagctcacctctccctccacctcctctccacctgctggtgagaggtgcaaagaggcagatctttgctgccagccacttcatcccctcccagatgttggaccaacacccctccctgccaccaggcactgcctggagggcagggagtgggagccaatgaacaggcatgcaagtgagagcttcctgagctttctcctgtcggtttggtctgttttgccttcacccataagcccctcgcactctggtggcaggtgccttgtcctcagggctacagcagtagggaggtcagtgcttcgtgcctcgattgaaggtgacctctgccccagataggtggtgccagtggcttattaattccgatactagtttgctttgctgaccaaatgcctggtaccagaggatggtgaggcgaaggccaggttgggggcagtgttgtggccctggggcccagccccaaactgggggctctgtatatagctatgaagaaaacacaaagtgtataaatctgagtatatatttacatgtctttttaaaagggtcgttaccagagatttacccatcgggtaagatgctcctggtggctgggaggcatcagttgctatatattaaaaacaaaaaagaaaaaaaaggaaaatgtttttaaaaaggtcatatattttttgctacttttgctgttttatttttttaaattatgttctaaacctattttcagtttaggtccctcaataaaaattgctgctgcttca

SEQ ID NO: 134361 - DNA, 5702 bp, Homo sapiens
  Payload ID: 6253
  Gene Symbol: FGFR1
  Gene Name: fibroblast growth factor receptor 1
  Uniprot ID: P11362
  ENST ID: ENST00000397091
  CDS Start-End: 750-3212
gccggcgcatagcgctcggagcgctcttgcggccacaggcgcggcgtcctcggcggcgggcggcagctagcgggagccgggacgccggtgcagccgcagcgcgcggaggaacccgggtgtgccgggagctgggcggccacgtccggacgggaccgagacccctcgtagcgcattgcggcgacctcgccttccccggccgcgagcgcgccgctgcttgaaaagccgcggaacccaaggacttttctccggtccgagctcggggcgccccgcagggcgcacggtacccgtgctgcagtcgggcacgccgcggcgccggggcctccgcagggcgatggagcccggtctgcaaggaaagtgaggcgccgccgctgcgttctggaggaggggggcacaaggtctggagaccccgggtggcggacgggagccctccccccgccccgcctccggggcaccagctccggctccattgttcccgcccgggctggaggcgccgagcaccgagcgccgccgggagtcgagcgccggccgcggagctcttgcgaccccgccaggacccgaacagagcccgggggcggcgggccggagccggggacgcgggcacacgcccgctcgcacaagccacggcggactctcccgaggcggaacctccacgccgagcgagggtcagtttgaaaaggaggatcgagctcactgtggagtatccatggagatgtggagccttgtcaccaacctctaactgcagaactgggatgtggagctggaagtgcctcctcttctgggctgtgctggtcacagccacactctgcaccgctaggccgtccccgaccttgcctgaacaagcccagccctggggagcccctgtggaagtggagtccttcctggtccaccccggtgacctgctgcagcttcgctgtcggctgcgggacgatgtgcagagcatcaactggctgcgggacggggtgcagctggcggaaagcaaccgcacccgcatcacaggggaggaggtggaggtgcaggactccgtgcccgcagactccggcctctatgcttgcgtaaccagcagcccctcgggcagtgacaccacctacttctccgtcaatgtttcagatgctctcccctcctcggaggatgatgatgatgatgatgactcctcttcagaggagaaagaaacagataacaccaaaccaaaccccgtagctccatattggacatccccagaaaagatggaaaagaaattgcatgcagtgccggctgccaagacagtgaagttcaaatgcccttccagtgggaccccaaaccccacactgcgctggttgaaaaatggcaaagaattcaaacctgaccacagaattggaggctacaaggtccgttatgccacctggagcatcataatggactctgtggtgccctctgacaagggcaactacacctgcattgtggagaatgagtacggcagcatcaaccacacataccagctggatgtcgtggagcggtcccctcaccggcccatcctgcaagcagggttgcccgccaacaaaacagtggccctgggtagcaacgtggagttcatgtgtaaggtgtacagtgacccgcagccgcacatccagtggctaaagcacatcgaggtgaatgggagcaagattggcccagacaacctgccttatgtccagatcttgaagactgctggagttaataccaccgacaaagagatggaggtgcttcacttaagaaatgtctcctttgaggacgcaggggagtatacgtgcttggcgggtaactctatcggactctcccatcactctgcatggttgaccgttctggaagccctggaagagaggccggcagtgatgacctcgcccctgtacctggagatcatcatctattgcacaggggccttcctcatctcctgcatggtggggtcggtcatcgtctacaagatgaagagtggtaccaagaagagtgacttccacagccagatggctgtgcacaagctggccaagagcatccctctgcgcagacaggtaacagtgtctgctgactccagtgcatccatgaactctggggttcttctggttcggccatcacggctctcctccagtgggactcccatgctagcaggggtctctgagtatgagcttcccgaagaccctcgctgggagctgcctcgggacagactggtcttaggcaaacccctgggagagggctgctttgggcaggtggtgttggcagaggctatcgggctggacaaggacaaacccaaccgtgtgaccaaagtggctgtgaagatgttgaagtcggacgcaacagagaaagacttgtcagacctgatctcagaaatggagatgatgaagatgatcgggaagcataagaatatcatcaacctgctgggggcctgcacgcaggatggtcccttgtatgtcatcgtggagtatgcctccaagggcaacctgcgggagtacctgcaggcccggaggcccccagggctggaatactgctacaaccccagccacaacccagaggagcagctctcctccaaggacctggtgtcctgcgcctaccaggtggcccgaggcatggagtatctggcctccaagaagtgcatacaccgagacctggcagccaggaatgtcctggtgacagaggacaatgtgatgaagatagcagactttggcctcgcacgggacattcaccacatcgactactataaaaagacaaccaacggccgactgcctgtgaagtggatggcacccgaggcattatttgaccggatctacacccaccagagtgatgtgtggtctttcggggtgctcctgtgggagatcttcactctgggcggctccccataccccggtgtgcctgtggaggaacttttcaagctgctgaaggagggtcaccgcatggacaagcccagtaactgcaccaacgagctgtacatgatgatgcgggactgctggcatgcagtgccctcacagagacccaccttcaagcagctggtggaagacctggaccgcatcgtggccttgacctccaaccaggagtacctggacctgtccatgcccctggaccagtactcccccagctttcccgacacccggagctctacgtgctcctcaggggaggattccgtcttctctcatgagccgctgcccgaggagccctgcctgccccgacacccagcccagcttgccaatggcggactcaaacgccgctgactgccacccacacgccctccccagactccaccgtcagctgtaaccctcacccacagcccctgctgggcccaccacctgtccgtccctgtcccctttcctgctggcaggagccggctgcctaccaggggccttcctgtgtggcctgccttcaccccactcagctcacctctccctccacctcctctccacctgctggtgagaggtgcaaagaggcagatctttgctgccagccacttcatcccctcccagatgttggaccaacacccctccctgccaccaggcactgcctggagggcagggagtgggagccaatgaacaggcatgcaagtgagagcttcctgagctttctcctgtcggtttggtctgttttgccttcacccataagcccctcgcactctggtggcaggtgccttgtcctcagggctacagcagtagggaggtcagtgcttcgtgcctcgattgaaggtgacctctgccccagataggtggtgccagtggcttattaattccgatactagtttgctttgctgaccaaatgcctggtaccagaggatggtgaggcgaaggccaggttgggggcagtgttgtggccctggggcccagccccaaactgggggctctgtatatagctatgaagaaaacacaaagtgtataaatctgagtatatatttacatgtctttttaaaagggtcgttaccagagatttacccatcgggtaagatgctcctggtggctgggaggcatcagttgctatatattaaaaacaaaaaagaaaaaaaaggaaaatgtttttaaaaaggtcatatattttttgctacttttgctgttttatttttttaaattatgttctaaacctattttcagtttaggtccctcaataaaaattgctgctgcttcatttatctatgggctgtatgaaaagggtgggaatgtccactggaaagaagggacacccacgggccctggggctaggtctgtcccgagggcaccgcatgctcccggcgcaggttccttgtaacctcttcttcctaggtcctgcacccagacctcacgacgcacctcctgcctctccgctgcttttggaaagtcagaaaaagaagatgtctgcttcgagggcaggaaccccatccatgcagtagaggcgctgggcagagagtcaaggcccagcagccatcgaccatggatggtttcctccaaggaaaccggtggggttgggctggggagggggcacctacctaggaatagccacggggtagagctacagtgattaagaggaaagcaagggcgcggttgctcacgcctgtaatcccagcactttgggacaccgaggtgggcagatcacttcaggtcaggagtttgagaccagcctggccaacttagtgaaaccccatctctactaaaaatgcaaaaattatccaggcatggtggcacacgcctgtaatcccagctccacaggaggctgaggcagaatcccttgaagctgggaggcggaggttgcagtgagccgagattgcgccattgcactccagcctgggcaacagagaaaacaaaaaggaaaacaaatgatgaaggtctgcagaaactgaaacccagacatgtgtctgccccctctatgtgggcatggttttgccagtgcttctaagtgcaggagaacatgtcacctgaggctagttttgcattcaggtccctggcttcgtttcttgttggtatgcctccccagatcgtccttcctgtatccatgtgaccagactgtatttgttgggactgtcgcagatcttggcttcttacagttcttcctgtccaaactccatcctgtccctcaggaacggggggaaaattctccgaatgtttttggttttttggctgcttggaatttacttctgccacctgctggtcatcactgtcctcactaagtggattctggctcccccgtacctcatggctcaaactaccactcctcagtcgctatattaaagcttatattttgctggattactgctaaatacaaaagaaagttcaatatgttttcatttctgtagggaaaatgggattgctgctttaaatttctgagctagggattttttggcagctgcagtgttggcgactattgtaaaattctctttgtttctctctgtaaatagcacctgctaacattacaatttgtatttatgtttaaagaaggcatcatttggtgaacagaactaggaaatgaatttttagctcttaaaagcatttgctttgagaccgcacaggagtgtctttccttgtaaaacagtgatgataatttctgccttggccctaccttgaagcaatgttgtgtgaagggatgaagaatctaaaagtcttcataagtccttgggagaggtgctagaaaaatataaggcactatcataattacagtgatgtccttgctgttactactcaaatcacccacaaatttccccaaagactgcgctagctgtcaaataaaagacagtgaaattgacctga

SEQ ID NO: 134362 - DNA, 2953 bp, Homo sapiens
  Payload ID: 6253
  Gene Symbol: FGFR1
  Gene Name: fibroblast growth factor receptor 1
  ENST ID: ENST00000397103
  CDS Start-End: 58-2259
gtggagtatccatggagatgtggagccttgtcaccaacctctaactgcagaactgggatgtggagctggaagtgcctcctcttctgggctgtgctggtcacagccacactctgcaccgctaggccgtccccgaccttgcctgaacaagatgctctcccctcctcggaggatgatgatgatgatgatgactcctcttcagaggagaaagaaacagataacaccaaaccaaaccccgtagctccatattggacatccccagaaaagatggaaaagaaattgcatgcagtgccggctgccaagacagtgaagttcaaatgcccttccagtgggaccccaaaccccacactgcgctggttgaaaaatggcaaagaattcaaacctgaccacagaattggaggctacaaggtccgttatgccacctggagcatcataatggactctgtggtgccctctgacaagggcaactacacctgcattgtggagaatgagtacggcagcatcaaccacacataccagctggatgtcgtggagcggtcccctcaccggcccatcctgcaagcagggttgcccgccaacaaaacagtggccctgggtagcaacgtggagttcatgtgtaaggtgtacagtgacccgcagccgcacatccagtggctaaagcacatcgaggtgaatgggagcaagattggcccagacaacctgccttatgtccagatcttgaagcattcggggattaatagctcggatgcggaggtgctgaccctgttcaatgtgacagaggcccagagcggggagtatgtgtgtaaggtttccaattatattggtgaagctaaccagtctgcgtggctcactgtcaccagacctgtggcaaaagccctggaagagaggccggcagtgatgacctcgcccctgtacctggagatcatcatctattgcacaggggccttcctcatctcctgcatggtggggtcggtcatcgtctacaagatgaagagtggtaccaagaagagtgacttccacagccagatggctgtgcacaagctggccaagagcatccctctgcgcagacaggtaacagtgtctgctgactccagtgcatccatgaactctggggttcttctggttcggccatcacggctctcctccagtgggactcccatgctagcaggggtctctgagtatgagcttcccgaagaccctcgctgggagctgcctcgggacagactggtcttaggcaaacccctgggagagggctgctttgggcaggtggtgttggcagaggctatcgggctggacaaggacaaacccaaccgtgtgaccaaagtggctgtgaagatgttgaagtcggacgcaacagagaaagacttgtcagacctgatctcagaaatggagatgatgaagatgatcgggaagcataagaatatcatcaacctgctgggggcctgcacgcaggatggtcccttgtatgtcatcgtggagtatgcctccaagggcaacctgcgggagtacctgcaggcccggaggcccccagggctggaatactgctacaaccccagccacaacccagaggagcagctctcctccaaggacctggtgtcctgcgcctaccaggtggcccgaggcatggagtatctggcctccaagaagtgcatacaccgagacctggcagccaggaatgtcctggtgacagaggacaatgtgatgaagatagcagactttggcctcgcacgggacattcaccacatcgactactataaaaagacaaccaacggccgactgcctgtgaagtggatggcacccgaggcattatttgaccggatctacacccaccagagtgatgtgtggtctttcggggtgctcctgtgggagatcttcactctgggcggctccccataccccggtgtgcctgtggaggaacttttcaagctgctgaaggagggtcaccgcatggacaagcccagtaactgcaccaacgagctgtacatgatgatgcgggactgctggcatgcagtgccctcacagagacccaccttcaagcagctggtggaagacctggaccgcatcgtggccttgacctccaaccaggagtacctggacctgtccatgcccctggaccagtactcccccagctttcccgacacccggagctctacgtgctcctcaggggaggattccgtcttctctcatgagccgctgcccgaggagccctgcctgccccgacacccagcccagcttgccaatggcggactcaaacgccgctgactgccacccacacgccctccccagactccaccgtcagctgtaaccctcacccacagcccctgctgggcccaccacctgtccgtccctgtcccctttcctgctggcaggagccggctgcctaccaggggccttcctgtgtggcctgccttcaccccactcagctcacctctccctccacctcctctccacctgctggtgagaggtgcaaagaggcagatctttgctgccagccacttcatcccctcccagatgttggaccaacacccctccctgccaccaggcactgcctggagggcagggagtgggagccaatgaacaggcatgcaagtgagagcttcctgagctttctcctgtcggtttggtctgttttgccttcacccataagcccctcgcactctggtggcaggtgccttgtcctcagggctacagcagtagggaggtcagtgcttcgtgcctcgattgaaggtgacctctgccccagataggtggtgccagtggcttattaattccgatactagtttgctttgctgaccaaatgcctggtaccagaggatggtgaggcgaaggccaggttgggggcagtgttgtggccctggggcccagccccaaactgggggctctgtatatagctatgaagaaaacacaaagtgtataaatctgagtatatatttacatgtctttttaaaagggtcgt

SEQ ID NO: 134363 - DNA, 2870 bp, Homo sapiens
  Payload ID: 6253
  Gene Symbol: FGFR1
  Gene Name: fibroblast growth factor receptor 1
  Uniprot ID: P11362
  ENST ID: ENST00000397108
  CDS Start-End: 302-2764
aacttttcctccaactcgcgctcgggagctggcgaggcggcggcggctcctcaaagtgggagagcttcaaggtcacgtggtccgtccagcccctgctatctcaccagacactgtccaccctgtatgttggatcagtactccagtgagaagacagcaggcactttcacccatgcagcccattcagtcttcataaccacctgtgatggaggcaagggtcagtttgaaaaggaggatcgagctcactgtggagtatccatggagatgtggagccttgtcaccaacctctaactgcagaactgggatgtggagctggaagtgcctcctcttctgggctgtgctggtcacagccacactctgcaccgctaggccgtccccgaccttgcctgaacaagcccagccctggggagcccctgtggaagtggagtccttcctggtccaccccggtgacctgctgcagcttcgctgtcggctgcgggacgatgtgcagagcatcaactggctgcgggacggggtgcagctggcggaaagcaaccgcacccgcatcacaggggaggaggtggaggtgcaggactccgtgcccgcagactccggcctctatgcttgcgtaaccagcagcccctcgggcagtgacaccacctacttctccgtcaatgtttcagatgctctcccctcctcggaggatgatgatgatgatgatgactcctcttcagaggagaaagaaacagataacaccaaaccaaaccccgtagctccatattggacatccccagaaaagatggaaaagaaattgcatgcagtgccggctgccaagacagtgaagttcaaatgcccttccagtgggaccccaaaccccacactgcgctggttgaaaaatggcaaagaattcaaacctgaccacagaattggaggctacaaggtccgttatgccacctggagcatcataatggactctgtggtgccctctgacaagggcaactacacctgcattgtggagaatgagtacggcagcatcaaccacacataccagctggatgtcgtggagcggtcccctcaccggcccatcctgcaagcagggttgcccgccaacaaaacagtggccctgggtagcaacgtggagttcatgtgtaaggtgtacagtgacccgcagccgcacatccagtggctaaagcacatcgaggtgaatgggagcaagattggcccagacaacctgccttatgtccagatcttgaagactgctggagttaataccaccgacaaagagatggaggtgcttcacttaagaaatgtctcctttgaggacgcaggggagtatacgtgcttggcgggtaactctatcggactctcccatcactctgcatggttgaccgttctggaagccctggaagagaggccggcagtgatgacctcgcccctgtacctggagatcatcatctattgcacaggggccttcctcatctcctgcatggtggggtcggtcatcgtctacaagatgaagagtggtaccaagaagagtgacttccacagccagatggctgtgcacaagctggccaagagcatccctctgcgcagacaggtaacagtgtctgctgactccagtgcatccatgaactctggggttcttctggttcggccatcacggctctcctccagtgggactcccatgctagcaggggtctctgagtatgagcttcccgaagaccctcgctgggagctgcctcgggacagactggtcttaggcaaacccctgggagagggctgctttgggcaggtggtgttggcagaggctatcgggctggacaaggacaaacccaaccgtgtgaccaaagtggctgtgaagatgttgaagtcggacgcaacagagaaagacttgtcagacctgatctcagaaatggagatgatgaagatgatcgggaagcataagaatatcatcaacctgctgggggcctgcacgcaggatggtcccttgtatgtcatcgtggagtatgcctccaagggcaacctgcgggagtacctgcaggcccggaggcccccagggctggaatactgctacaaccccagccacaacccagaggagcagctctcctccaaggacctggtgtcctgcgcctaccaggtggcccgaggcatggagtatctggcctccaagaagtgcatacaccgagacctggcagccaggaatgtcctggtgacagaggacaatgtgatgaagatagcagactttggcctcgcacgggacattcaccacatcgactactataaaaagacaaccaacggccgactgcctgtgaagtggatggcacccgaggcattatttgaccggatctacacccaccagagtgatgtgtggtctttcggggtgctcctgtgggagatcttcactctgggcggctccccataccccggtgtgcctgtggaggaacttttcaagctgctgaaggagggtcaccgcatggacaagcccagtaactgcaccaacgagctgtacatgatgatgcgggactgctggcatgcagtgccctcacagagacccaccttcaagcagctggtggaagacctggaccgcatcgtggccttgacctccaaccaggagtacctggacctgtccatgcccctggaccagtactcccccagctttcccgacacccggagctctacgtgctcctcaggggaggattccgtcttctctcatgagccgctgcccgaggagccctgcctgccccgacacccagcccagcttgccaatggcggactcaaacgccgctgactgccacccacacgccctccccagactccaccgtcagctgtaaccctcacccacagcccctgctgggcccaccacctgtccgtccctgtcccctttcctgctggca

SEQ ID NO: 134364 - DNA, 3680 bp, Homo sapiens
  Payload ID: 6253
  Gene Symbol: FGFR1
  Gene Name: fibroblast growth factor receptor 1
  Uniprot ID: P11362
  ENST ID: ENST00000397113
  CDS Start-End: 318-2780
gctttgcccgccgcagcccagccggggccggcgcctccctccgctcgccgcccgcccctttcacctcctggctccctcccgggcgatccgcgccccttgggtctcccctcccttccctccgtccgcgtctcctgcgccccctccctgcgctcgtcccgccgctcttcccgccgcccaacttttcctccaactcgcgctcgggagctggcgaggcggcggcggctcctcaggtcagtttgaaaaggaggatcgagctcactgtggagtatccatggagatgtggagccttgtcaccaacctctaactgcagaactgggatgtggagctggaagtgcctcctcttctgggctgtgctggtcacagccacactctgcaccgctaggccgtccccgaccttgcctgaacaagcccagccctggggagcccctgtggaagtggagtccttcctggtccaccccggtgacctgctgcagcttcgctgtcggctgcgggacgatgtgcagagcatcaactggctgcgggacggggtgcagctggcggaaagcaaccgcacccgcatcacaggggaggaggtggaggtgcaggactccgtgcccgcagactccggcctctatgcttgcgtaaccagcagcccctcgggcagtgacaccacctacttctccgtcaatgtttcagatgctctcccctcctcggaggatgatgatgatgatgatgactcctcttcagaggagaaagaaacagataacaccaaaccaaaccccgtagctccatattggacatccccagaaaagatggaaaagaaattgcatgcagtgccggctgccaagacagtgaagttcaaatgcccttccagtgggaccccaaaccccacactgcgctggttgaaaaatggcaaagaattcaaacctgaccacagaattggaggctacaaggtccgttatgccacctggagcatcataatggactctgtggtgccctctgacaagggcaactacacctgcattgtggagaatgagtacggcagcatcaaccacacataccagctggatgtcgtggagcggtcccctcaccggcccatcctgcaagcagggttgcccgccaacaaaacagtggccctgggtagcaacgtggagttcatgtgtaaggtgtacagtgacccgcagccgcacatccagtggctaaagcacatcgaggtgaatgggagcaagattggcccagacaacctgccttatgtccagatcttgaagactgctggagttaataccaccgacaaagagatggaggtgcttcacttaagaaatgtctcctttgaggacgcaggggagtatacgtgcttggcgggtaactctatcggactctcccatcactctgcatggttgaccgttctggaagccctggaagagaggccggcagtgatgacctcgcccctgtacctggagatcatcatctattgcacaggggccttcctcatctcctgcatggtggggtcggtcatcgtctacaagatgaagagtggtaccaagaagagtgacttccacagccagatggctgtgcacaagctggccaagagcatccctctgcgcagacaggtaacagtgtctgctgactccagtgcatccatgaactctggggttcttctggttcggccatcacggctctcctccagtgggactcccatgctagcaggggtctctgagtatgagcttcccgaagaccctcgctgggagctgcctcgggacagactggtcttaggcaaacccctgggagagggctgctttgggcaggtggtgttggcagaggctatcgggctggacaaggacaaacccaaccgtgtgaccaaagtggctgtgaagatgttgaagtcggacgcaacagagaaagacttgtcagacctgatctcagaaatggagatgatgaagatgatcgggaagcataagaatatcatcaacctgctgggggcctgcacgcaggatggtcccttgtatgtcatcgtggagtatgcctccaagggcaacctgcgggagtacctgcaggcccggaggcccccagggctggaatactgctacaaccccagccacaacccagaggagcagctctcctccaaggacctggtgtcctgcgcctaccaggtggcccgaggcatggagtatctggcctccaagaagtgcatacaccgagacctggcagccaggaatgtcctggtgacagaggacaatgtgatgaagatagcagactttggcctcgcacgggacattcaccacatcgactactataaaaagacaaccaacggccgactgcctgtgaagtggatggcacccgaggcattatttgaccggatctacacccaccagagtgatgtgtggtctttcggggtgctcctgtgggagatcttcactctgggcggctccccataccccggtgtgcctgtggaggaacttttcaagctgctgaaggagggtcaccgcatggacaagcccagtaactgcaccaacgagctgtacatgatgatgcgggactgctggcatgcagtgccctcacagagacccaccttcaagcagctggtggaagacctggaccgcatcgtggccttgacctccaaccaggagtacctggacctgtccatgcccctggaccagtactcccccagctttcccgacacccggagctctacgtgctcctcaggggaggattccgtcttctctcatgagccgctgcccgaggagccctgcctgccccgacacccagcccagcttgccaatggcggactcaaacgccgctgactgccacccacacgccctccccagactccaccgtcagctgtaaccctcacccacagcccctgctgggcccaccacctgtccgtccctgtcccctttcctgctggcaggagccggctgcctaccaggggccttcctgtgtggcctgccttcaccccactcagctcacctctccctccacctcctctccacctgctggtgagaggtgcaaagaggcagatctttgctgccagccacttcatcccctcccagatgttggaccaacacccctccctgccaccaggcactgcctggagggcagggagtgggagccaatgaacaggcatgcaagtgagagcttcctgagctttctcctgtcggtttggtctgttttgccttcacccataagcccctcgcactctggtggcaggtgccttgtcctcagggctacagcagtagggaggtcagtgcttcgtgcctcgattgaaggtgacctctgccccagataggtggtgccagtggcttattaattccgatactagtttgctttgctgaccaaatgcctggtaccagaggatggtgaggcgaaggccaggttgggggcagtgttgtggccctggggcccagccccaaactgggggctctgtatatagctatgaagaaaacacaaagtgtataaatctgagtatatatttacatgtctttttaaaagggtcgttaccagagatttacccatcgggtaagatgctcctggtggctgggaggcatcagttgctatatattaaaaacaaaaaagaaaaaaaaggaaaatgtttttaaaaaggtcatatattttttgctacttttgctgttttatttttttaaattatgttctaaacctattttcagtttaggtccctcaataaaaattgctgctgcttcatt

SEQ ID NO: 134365 - DNA, 529 bp, Homo sapiens
  Payload ID: 6253
  Gene Symbol: FGFR1
  Gene Name: fibroblast growth factor receptor 1
  ENST ID: ENST00000434187
  CDS Start-End: 366-529
aaattaaaactcagattcttcagcctgtcttgaccacctccctccttaacatttctggagacttggagatgcggcgttgagattcgggggagaaaagaaagttcccttggatcccgagttatttaagatctcaccaagttattcgccgccgctgtgggacctcccaggcccccttgccccccgcaacttctggactcatatccgtcagacatcacttgtcaccttccagcatcagggagaactggatccctcctggctccacactcttaggctctttggtcagtttgaaaaggaggatcgagctcactgtggagtatccatggagatgtggagccttgtcaccaacctctaactgcagaactgggatgtggagctggaagtgcctcctcttctgggctgtgctggtcacagccacactctgcaccgctaggccgtccccgaccttgcctgaacaagatgctctcccctcctcggaggatgatgatgatgatgatgactcctcttcagaggagaaagaaacagataacac

SEQ ID NO: 134366 - DNA, 5375 bp, Homo sapiens
  Payload ID: 6253
  Gene Symbol: FGFR1
  Gene Name: fibroblast growth factor receptor 1
  Uniprot ID: P11362
  ENST ID: ENST00000425967
  CDS Start-End: 324-2885
ccctttcacctcctggctccctcccgggcgatccgcgccccttgggtctcccctcccttccctccgtccgcgtctcctgcgccccctccctgcgctcgtcccgccgctcttcccgccgcccaacttttcctccaactcgcgctcgggagctggcgaggcggcggcggctcctcaaagtgggagagcttcaaggtcacgtggtccgtccagcccctgctatctcaccagacactgtccaccctgtatgttggatcagtactccagtgagaagacagcaggcactttcacccatgcagcccattcagtcttcataaccacctgtgatggaggcaagggtcagtttgaaaaggaggatcgagctcactgtggagtatccatggagatgtggagccttgtcaccaacctctaactgcagaactgggatgtggagctggaagtgcctcctcttctgggctgtgctggtcacagccacactctgcaccgctaggccgtccccgaccttgcctgaacaagcccagccctggggagcccctgtggaagtggagtccttcctggtccaccccggtgacctgctgcagcttcgctgtcggctgcgggacgatgtgcagagcatcaactggctgcgggacggggtgcagctggcggaaagcaaccgcacccgcatcacaggggaggaggtggaggtgcaggactccgtgcccgcagactccggcctctatgcttgcgtaaccagcagcccctcgggcagtgacaccacctacttctccgtcaatgtttcagatgctctcccctcctcggaggatgatgatgatgatgatgactcctcttcagaggagaaagaaacagataacaccaaaccaaaccccgtagctccatattggacatccccagaaaagatggaaaagaaattgcatgcagtgccggctgccaagacagtgaagttcaaatgcccttccagtgggaccccaaaccccacactgcgctggttgaaaaatggcaaagaattcaaacctgaccacagaattggaggctacaaggtccgttatgccacctggagcatcataatggactctgtggtgccctctgacaagggcaactacacctgcattgtggagaatgagtacggcagcatcaaccacacataccagctggatgtcgtggagcggtcccctcaccggcccatcctgcaagcagggttgcccgccaacaaaacagtggccctgggtagcaacgtggagttcatgtgtaaggtgtacagtgacccgcagccgcacatccagtggctaaagcacatcgaggtgaatgggagcaagattggcccagacaacctgccttatgtccagatcttgaagactgctggagttaataccaccgacaaagagatggaggtgcttcacttaagaaatgtctcctttgaggacgcaggggagtatacgtgcttggcgggtaactctatcggactctcccatcactctgcatggttgaccgttctggaagccctggaagagaggccggcagtgatgacctcgcccctgtacctggagatcatcatctattgcacaggggccttcctcatctcctgcatggtggggtcggtcatcgtctacaagatgaagagtggtaccaagaagagtgacttccacagccagatggctgtgcacaagctggccaagagcatccctctgcgcagacaggtaacagtgtctgctgactccagtgcatccatgaactctggggttcttctggttcggccatcacggctctcctccagtgggactcccatgctagcaggggtctctgagtatgagcttcccgaagaccctcgctgggagctgcctcgggacagactggtcttaggcaaacccctgggagagggctgctttgggcaggtggtgttggcagaggctatcgggctggacaaggacaaacccaaccgtgtgaccaaagtggctgtgaagatgttgaagtcggacgcaacagagaaagacttgtcagacctgatctcagaaatggagatgatgaagatgatcgggaagcataagaatatcatcaacctgctgggggcctgcacgcaggatggtcccttgtatgtcatcgtggagtatgcctccaagggcaacctgcgggagtacctgcaggcccggaggcccccagggctggaatactgctacaaccccagccacaacccagaggagcagctctcctccaaggacctggtgtcctgcgcctaccaggtggcccgaggcatggagtatctggcctccaagaagtgcatacaccgagacctggcagccaggaatgtcctggtgacagaggacaatgtgatgaagatagcagactttggcctcgcacgggacattcaccacatcgactactataaaaagacaaccaacggccgactgcctgtgaagtggatggcacccgaggcattatttgaccggatctacacccaccagagtgatgtgtggtctttcggggtgctcctgtgggagatcttcactctgggcggctccccataccccggtgtgcctgtggaggaacttttcaagctgctgaaggagggtcaccgcatggacaagcccagtaactgcaccaacgagctgtacatgatgatgcgggactgctggcatgcagtgccctcacagagacccaccttcaagcagctggtggaagacctggaccgcatcgtggccttgacctccaaccaggagtacctggacctgtccatgcccctggaccagtactcccccagctttcccgacacccggagctctacgtgctcctcaggggaggattccgtcttctctcatgagccgctgcccgaggagccctgcctgccccgacacccagcccagcttgccaatggcggactcaaacgccgctgactgccacccacacgccctccccagactccaccgtcagctgtaaccctcacccacagcccctgctgggcccaccacctgtccgtccctgtcccctttcctgctggcaggagccggctgcctaccaggggccttcctgtgtggcctgccttcaccccactcagctcacctctccctccacctcctctccacctgctggtgagaggtgcaaagaggcagatctttgctgccagccacttcatcccctcccagatgttggaccaacacccctccctgccaccaggcactgcctggagggcagggagtgggagccaatgaacaggcatgcaagtgagagcttcctgagctttctcctgtcggtttggtctgttttgccttcacccataagcccctcgcactctggtggcaggtgccttgtcctcagggctacagcagtagggaggtcagtgcttcgtgcctcgattgaaggtgacctctgccccagataggtggtgccagtggcttattaattccgatactagtttgctttgctgaccaaatgcctggtaccagaggatggtgaggcgaaggccaggttgggggcagtgttgtggccctggggcccagccccaaactgggggctctgtatatagctatgaagaaaacacaaagtgtataaatctgagtatatatttacatgtctttttaaaagggtcgttaccagagatttacccatcgggtaagatgctcctggtggctgggaggcatcagttgctatatattaaaaacaaaaaagaaaaaaaaggaaaatgtttttaaaaaggtcatatattttttgctacttttgctgttttatttttttaaattatgttctaaacctattttcagtttaggtccctcaataaaaattgctgctgcttcatttatctatgggctgtatgaaaagggtgggaatgtccactggaaagaagggacacccacgggccctggggctaggtctgtcccgagggcaccgcatgctcccggcgcaggttccttgtaacctcttcttcctaggtcctgcacccagacctcacgacgcacctcctgcctctccgctgcttttggaaagtcagaaaaagaagatgtctgcttcgagggcaggaaccccatccatgcagtagaggcgctgggcagagagtcaaggcccagcagccatcgaccatggatggtttcctccaaggaaaccggtggggttgggctggggagggggcacctacctaggaatagccacggggtagagctacagtgattaagaggaaagcaagggcgcggttgctcacgcctgtaatcccagcactttgggacaccgaggtgggcagatcacttcaggtcaggagtttgagaccagcctggccaacttagtgaaaccccatctctactaaaaatgcaaaaattatccaggcatggtggcacacgcctgtaatcccagctccacaggaggctgaggcagaatcccttgaagctgggaggcggaggttgcagtgagccgagattgcgccattgcactccagcctgggcaacagagaaaacaaaaaggaaaacaaatgatgaaggtctgcagaaactgaaacccagacatgtgtctgccccctctatgtgggcatggttttgccagtgcttctaagtgcaggagaacatgtcacctgaggctagttttgcattcaggtccctggcttcgtttcttgttggtatgcctccccagatcgtccttcctgtatccatgtgaccagactgtatttgttgggactgtcgcagatcttggcttcttacagttcttcctgtccaaactccatcctgtccctcaggaacggggggaaaattctccgaatgtttttggttttttggctgcttggaatttacttctgccacctgctggtcatcactgtcctcactaagtggattctggctcccccgtacctcatggctcaaactaccactcctcagtcgctatattaaagcttatattttgctggattactgctaaatacaaaagaaagttcaatatgttttcatttctgtagggaaaatgggattgctgctttaaatttctgagctagggattttttggcagctgcagtgttggcgactattgtaaaattctctttgtttctctctgtaaatagcacctgctaacattacaatttgtatttatgtttaaagaaggcatcatttggtgaacagaactaggaaatgaatttttagctcttaaaagcatttgctttgagaccgcacaggagtgtctttccttgtaaaacagtgatgataatttctgccttggccctaccttgaagcaatgttgtgtgaagggatgaagaatctaaaagtcttcataagtccttgggagaggtgctagaaaaatataaggcactatcataattacagtgatgtccttgctgttactactcaaatcacccacaaatttccccaaagactgcgctagctgtcaaataaaagacagtgaaattgacctga

SEQ ID NO: 134367 - DNA, 389 bp, Homo sapiens
  Payload ID: 6253
  Gene Symbol: FGFR1
  Gene Name: fibroblast growth factor receptor 1
  ENST ID: ENST00000440174
  CDS Start-End: 345-349
caaatttggaggaatgaaattctccagctagaaggcccaagaaagtcttatggaagaaacagcttcttaaggtggggttcagagaaaagggaagggctggcctgttgcagaacaaggaatggcatgaagaaagtcttgcacagaggcatggatgttgcttcgagctgtggcgccctatagaaatagaacatgagcagctggtcacagtggctcatgcctgtaatcccagcactttgggaggccaaggcaggcggattgcttgagcccatgagatggagatgagcctggacaacatgggtcagtttgaaaaggaggatcgagctcactgtggagtatccatggagatgtggagccttgtcaccaacctctaactgcagaactgggatgtg

SEQ ID NO: 134368 - DNA, 5900 bp, Homo sapiens
  Payload ID: 6253
  Gene Symbol: FGFR1
  Gene Name: fibroblast growth factor receptor 1
  Uniprot ID: P11362
  ENST ID: ENST00000447712
  CDS Start-End: 943-3411
agatgcaggggcgcaaacgccaaaggagaccaggctgtaggaagagaagggcagagcgccggacagctcggcccgctccccgtcctttggggccgcggctggggaactacaaggcccagcaggcagctgcagggggcggaggcggaggagggaccagcgcgggtgggagtgagagagcgagccctcgcgccccgccggcgcatagcgctcggagcgctcttgcggccacaggcgcggcgtcctcggcggcgggcggcagctagcgggagccgggacgccggtgcagccgcagcgcgcggaggaacccgggtgtgccgggagctgggcggccacgtccggacgggaccgagacccctcgtagcgcattgcggcgacctcgccttccccggccgcgagcgcgccgctgcttgaaaagccgcggaacccaaggacttttctccggtccgagctcggggcgccccgcagggcgcacggtacccgtgctgcagtcgggcacgccgcggcgccggggcctccgcagggcgatggagcccggtctgcaaggaaagtgaggcgccgccgctgcgttctggaggaggggggcacaaggtctggagaccccgggtggcggacgggagccctccccccgccccgcctccggggcaccagctccggctccattgttcccgcccgggctggaggcgccgagcaccgagcgccgccgggagtcgagcgccggccgcggagctcttgcgaccccgccaggacccgaacagagcccgggggcggcgggccggagccggggacgcgggcacacgcccgctcgcacaagccacggcggactctcccgaggcggaacctccacgccgagcgagggtcagtttgaaaaggaggatcgagctcactgtggagtatccatggagatgtggagccttgtcaccaacctctaactgcagaactgggatgtggagctggaagtgcctcctcttctgggctgtgctggtcacagccacactctgcaccgctaggccgtccccgaccttgcctgaacaagcccagccctggggagcccctgtggaagtggagtccttcctggtccaccccggtgacctgctgcagcttcgctgtcggctgcgggacgatgtgcagagcatcaactggctgcgggacggggtgcagctggcggaaagcaaccgcacccgcatcacaggggaggaggtggaggtgcaggactccgtgcccgcagactccggcctctatgcttgcgtaaccagcagcccctcgggcagtgacaccacctacttctccgtcaatgtttcagatgctctcccctcctcggaggatgatgatgatgatgatgactcctcttcagaggagaaagaaacagataacaccaaaccaaaccgtatgcccgtagctccatattggacatccccagaaaagatggaaaagaaattgcatgcagtgccggctgccaagacagtgaagttcaaatgcccttccagtgggaccccaaaccccacactgcgctggttgaaaaatggcaaagaattcaaacctgaccacagaattggaggctacaaggtccgttatgccacctggagcatcataatggactctgtggtgccctctgacaagggcaactacacctgcattgtggagaatgagtacggcagcatcaaccacacataccagctggatgtcgtggagcggtcccctcaccggcccatcctgcaagcagggttgcccgccaacaaaacagtggccctgggtagcaacgtggagttcatgtgtaaggtgtacagtgacccgcagccgcacatccagtggctaaagcacatcgaggtgaatgggagcaagattggcccagacaacctgccttatgtccagatcttgaagactgctggagttaataccaccgacaaagagatggaggtgcttcacttaagaaatgtctcctttgaggacgcaggggagtatacgtgcttggcgggtaactctatcggactctcccatcactctgcatggttgaccgttctggaagccctggaagagaggccggcagtgatgacctcgcccctgtacctggagatcatcatctattgcacaggggccttcctcatctcctgcatggtggggtcggtcatcgtctacaagatgaagagtggtaccaagaagagtgacttccacagccagatggctgtgcacaagctggccaagagcatccctctgcgcagacaggtaacagtgtctgctgactccagtgcatccatgaactctggggttcttctggttcggccatcacggctctcctccagtgggactcccatgctagcaggggtctctgagtatgagcttcccgaagaccctcgctgggagctgcctcgggacagactggtcttaggcaaacccctgggagagggctgctttgggcaggtggtgttggcagaggctatcgggctggacaaggacaaacccaaccgtgtgaccaaagtggctgtgaagatgttgaagtcggacgcaacagagaaagacttgtcagacctgatctcagaaatggagatgatgaagatgatcgggaagcataagaatatcatcaacctgctgggggcctgcacgcaggatggtcccttgtatgtcatcgtggagtatgcctccaagggcaacctgcgggagtacctgcaggcccggaggcccccagggctggaatactgctacaaccccagccacaacccagaggagcagctctcctccaaggacctggtgtcctgcgcctaccaggtggcccgaggcatggagtatctggcctccaagaagtgcatacaccgagacctggcagccaggaatgtcctggtgacagaggacaatgtgatgaagatagcagactttggcctcgcacgggacattcaccacatcgactactataaaaagacaaccaacggccgactgcctgtgaagtggatggcacccgaggcattatttgaccggatctacacccaccagagtgatgtgtggtctttcggggtgctcctgtgggagatcttcactctgggcggctccccataccccggtgtgcctgtggaggaacttttcaagctgctgaaggagggtcaccgcatggacaagcccagtaactgcaccaacgagctgtacatgatgatgcgggactgctggcatgcagtgccctcacagagacccaccttcaagcagctggtggaagacctggaccgcatcgtggccttgacctccaaccaggagtacctggacctgtccatgcccctggaccagtactcccccagctttcccgacacccggagctctacgtgctcctcaggggaggattccgtcttctctcatgagccgctgcccgaggagccctgcctgccccgacacccagcccagcttgccaatggcggactcaaacgccgctgactgccacccacacgccctccccagactccaccgtcagctgtaaccctcacccacagcccctgctgggcccaccacctgtccgtccctgtcccctttcctgctggcaggagccggctgcctaccaggggccttcctgtgtggcctgccttcaccccactcagctcacctctccctccacctcctctccacctgctggtgagaggtgcaaagaggcagatctttgctgccagccacttcatcccctcccagatgttggaccaacacccctccctgccaccaggcactgcctggagggcagggagtgggagccaatgaacaggcatgcaagtgagagcttcctgagctttctcctgtcggtttggtctgttttgccttcacccataagcccctcgcactctggtggcaggtgccttgtcctcagggctacagcagtagggaggtcagtgcttcgtgcctcgattgaaggtgacctctgccccagataggtggtgccagtggcttattaattccgatactagtttgctttgctgaccaaatgcctggtaccagaggatggtgaggcgaaggccaggttgggggcagtgttgtggccctggggcccagccccaaactgggggctctgtatatagctatgaagaaaacacaaagtgtataaatctgagtatatatttacatgtctttttaaaagggtcgttaccagagatttacccatcgggtaagatgctcctggtggctgggaggcatcagttgctatatattaaaaacaaaaaagaaaaaaaaggaaaatgtttttaaaaaggtcatatattttttgctacttttgctgttttatttttttaaattatgttctaaacctattttcagtttaggtccctcaataaaaattgctgctgcttcatttatctatgggctgtatgaaaagggtgggaatgtccactggaaagaagggacacccacgggccctggggctaggtctgtcccgagggcaccgcatgctcccggcgcaggttccttgtaacctcttcttcctaggtcctgcacccagacctcacgacgcacctcctgcctctccgctgcttttggaaagtcagaaaaagaagatgtctgcttcgagggcaggaaccccatccatgcagtagaggcgctgggcagagagtcaaggcccagcagccatcgaccatggatggtttcctccaaggaaaccggtggggttgggctggggagggggcacctacctaggaatagccacggggtagagctacagtgattaagaggaaagcaagggcgcggttgctcacgcctgtaatcccagcactttgggacaccgaggtgggcagatcacttcaggtcaggagtttgagaccagcctggccaacttagtgaaaccccatctctactaaaaatgcaaaaattatccaggcatggtggcacacgcctgtaatcccagctccacaggaggctgaggcagaatcccttgaagctgggaggcggaggttgcagtgagccgagattgcgccattgcactccagcctgggcaacagagaaaacaaaaaggaaaacaaatgatgaaggtctgcagaaactgaaacccagacatgtgtctgccccctctatgtgggcatggttttgccagtgcttctaagtgcaggagaacatgtcacctgaggctagttttgcattcaggtccctggcttcgtttcttgttggtatgcctccccagatcgtccttcctgtatccatgtgaccagactgtatttgttgggactgtcgcagatcttggcttcttacagttcttcctgtccaaactccatcctgtccctcaggaacggggggaaaattctccgaatgtttttggttttttggctgcttggaatttacttctgccacctgctggtcatcactgtcctcactaagtggattctggctcccccgtacctcatggctcaaactaccactcctcagtcgctatattaaagcttatattttgctggattactgctaaatacaaaagaaagttcaatatgttttcatttctgtagggaaaatgggattgctgctttaaatttctgagctagggattttttggcagctgcagtgttggcgactattgtaaaattctctttgtttctctctgtaaatagcacctgctaacattacaatttgtatttatgtttaaagaaggcatcatttggtgaacagaactaggaaatgaatttttagctcttaaaagcatttgctttgagaccgcacaggagtgtctttccttgtaaaacagtgatgataatttctgccttggccctaccttgaagcaatgttgtgtgaagggatgaagaatctaaaagtcttcataagtccttgggagaggtgctagaaaaatataaggcactatcataattacagtgatgtccttgctgttactactcaaatcacccacaaatttccccaaagactgcgctagctgtcaaataaaagacagtgaaattgacctg

SEQ ID NO: 134369 - DNA, 587 bp, Homo sapiens
  Payload ID: 6253
  Gene Symbol: FGFR1
  Gene Name: fibroblast growth factor receptor 1
  ENST ID: ENST00000413133
  CDS Start-End: 268-587
aactcgcgctcgggagctggcgaggcggcggcggctcctcaaccttgattctgcagtgggacctcccaggcccccttgccccccgcaacttctggactcatatccgtcagacatcacttgtcaccttccagcatcagggagaactggatccctcctggctccacactcttaggctctttggtcagtttgaaaaggaggatcgagctcactgtggagtatccatggagatgtggagccttgtcaccaacctctaactgcagaactgggatgtggagctggaagtgcctcctcttctgggctgtgctggtcacagccacactctgcaccgctaggccgtccccgaccttgcctgaacaagcccagccctggggagcccctgtggaagtggagtccttcctggtccaccccggtgacctgctgcagcttcgctgtcggctgcgggacgatgtgcagagcatcaactggctgcgggacggggtgcagctggcggaaagcaaccgcacccgcatcacaggggaggaggtggaggtgcaggactccgtgcccgcagactccggcctctatgcttgcgtaaccagcagcccctc

SEQ ID NO: 134370 - DNA, 5590 bp, Homo sapiens
  Payload ID: 6253
  Gene Symbol: FGFR1
  Gene Name: fibroblast growth factor receptor 1
  Uniprot ID: P11362
  ENST ID: ENST00000532791
  CDS Start-End: 731-3193
agcgctcttgcggccacaggcgcggcgtcctcggcggcgggcggcagctagcgggagccgggacgccggtgcagccgcagcgcgcggaggaacccgggtgtgccgggagctgggcggccacgtccggacgggaccgagacccctcgtagcgcattgcggcgacctcgccttccccggccgcgagcgcgccgctgcttgaaaagccgcggaacccaaggacttttctccggtccgagctcggggcgccccgcagggcgcacggtacccgtgctgcagtcgggcacgccgcggcgccggggcctccgcagggcgatggagcccggtctgcaaggaaagtgaggcgccgccgctgcgttctggaggaggggggcacaaggtctggagaccccgggtggcggacgggagccctccccccgccccgcctccggggcaccagctccggctccattgttcccgcccgggctggaggcgccgagcaccgagcgccgccgggagtcgagcgccggccgcggagctcttgcgaccccgccaggacccgaacagagcccgggggcggcgggccggagccggggacgcgggcacacgcccgctcgcacaagccacggcggactctcccgaggcggaacctccacgccgagcgagggtcagtttgaaaaggaggatcgagctcactgtggagtatccatggagatgtggagccttgtcaccaacctctaactgcagaactgggatgtggagctggaagtgcctcctcttctgggctgtgctggtcacagccacactctgcaccgctaggccgtccccgaccttgcctgaacaagcccagccctggggagcccctgtggaagtggagtccttcctggtccaccccggtgacctgctgcagcttcgctgtcggctgcgggacgatgtgcagagcatcaactggctgcgggacggggtgcagctggcggaaagcaaccgcacccgcatcacaggggaggaggtggaggtgcaggactccgtgcccgcagactccggcctctatgcttgcgtaaccagcagcccctcgggcagtgacaccacctacttctccgtcaatgtttcagatgctctcccctcctcggaggatgatgatgatgatgatgactcctcttcagaggagaaagaaacagataacaccaaaccaaaccgtatgcccgtagctccatattggacatccccagaaaagatggaaaagaaattgcatgcagtgccggctgccaagacagtgaagttcaaatgcccttccagtgggaccccaaaccccacactgcgctggttgaaaaatggcaaagaattcaaacctgaccacagaattggaggctacaaggtccgttatgccacctggagcatcataatggactctgtggtgccctctgacaagggcaactacacctgcattgtggagaatgagtacggcagcatcaaccacacataccagctggatgtcgtggagcggtcccctcaccggcccatcctgcaagcagggttgcccgccaacaaaacagtggccctgggtagcaacgtggagttcatgtgtaaggtgtacagtgacccgcagccgcacatccagtggctaaagcacatcgaggtgaatgggagcaagattggcccagacaacctgccttatgtccagatcttgaagactgctggagttaataccaccgacaaagagatggaggtgcttcacttaagaaatgtctcctttgaggacgcaggggagtatacgtgcttggcgggtaactctatcggactctcccatcactctgcatggttgaccgttctggaagccctggaagagaggccggcagtgatgacctcgcccctgtacctggagatcatcatctattgcacaggggccttcctcatctcctgcatggtggggtcggtcatcgtctacaagatgaagagtggtaccaagaagagtgacttccacagccagatggctgtgcacaagctggccaagagcatccctctgcgcagacaggtgtctgctgactccagtgcatccatgaactctggggttcttctggttcggccatcacggctctcctccagtgggactcccatgctagcaggggtctctgagtatgagcttcccgaagaccctcgctgggagctgcctcgggacagactggtcttaggcaaacccctgggagagggctgctttgggcaggtggtgttggcagaggctatcgggctggacaaggacaaacccaaccgtgtgaccaaagtggctgtgaagatgttgaagtcggacgcaacagagaaagacttgtcagacctgatctcagaaatggagatgatgaagatgatcgggaagcataagaatatcatcaacctgctgggggcctgcacgcaggatggtcccttgtatgtcatcgtggagtatgcctccaagggcaacctgcgggagtacctgcaggcccggaggcccccagggctggaatactgctacaaccccagccacaacccagaggagcagctctcctccaaggacctggtgtcctgcgcctaccaggtggcccgaggcatggagtatctggcctccaagaagtgcatacaccgagacctggcagccaggaatgtcctggtgacagaggacaatgtgatgaagatagcagactttggcctcgcacgggacattcaccacatcgactactataaaaagacaaccaacggccgactgcctgtgaagtggatggcacccgaggcattatttgaccggatctacacccaccagagtgatgtgtggtctttcggggtgctcctgtgggagatcttcactctgggcggctccccataccccggtgtgcctgtggaggaacttttcaagctgctgaaggagggtcaccgcatggacaagcccagtaactgcaccaacgagctgtacatgatgatgcgggactgctggcatgcagtgccctcacagagacccaccttcaagcagctggtggaagacctggaccgcatcgtggccttgacctccaaccaggagtacctggacctgtccatgcccctggaccagtactcccccagctttcccgacacccggagctctacgtgctcctcaggggaggattccgtcttctctcatgagccgctgcccgaggagccctgcctgccccgacacccagcccagcttgccaatggcggactcaaacgccgctgactgccacccacacgccctccccagactccaccgtcagctgtaaccctcacccacagcccctgctgggcccaccacctgtccgtccctgtcccctttcctgctggcaggagccggctgcctaccaggggccttcctgtgtggcctgccttcaccccactcagctcacctctccctccacctcctctccacctgctggtgagaggtgcaaagaggcagatctttgctgccagccacttcatcccctcccagatgttggaccaacacccctccctgccaccaggcactgcctggagggcagggagtgggagccaatgaacaggcatgcaagtgagagcttcctgagctttctcctgtcggtttggtctgttttgccttcacccataagcccctcgcactctggtggcaggtgccttgtcctcagggctacagcagtagggaggtcagtgcttcgtgcctcgattgaaggtgacctctgccccagataggtggtgccagtggcttattaattccgatactagtttgctttgctgaccaaatgcctggtaccagaggatggtgaggcgaaggccaggttgggggcagtgttgtggccctggggcccagccccaaactgggggctctgtatatagctatgaagaaaacacaaagtgtataaatctgagtatatatttacatgtctttttaaaagggtcgttaccagagatttacccatcgggtaagatgctcctggtggctgggaggcatcagttgctatatattaaaaacaaaaaagaaaaaaaaggaaaatgtttttaaaaaggtcatatattttttgctacttttgctgttttatttttttaaattatgttctaaacctattttcagtttaggtccctcaataaaaattgctgctgcttcatttatctatgggctgtatgaaaagggtgggaatgtccactggaaagaagggacacccacgggccctggggctaggtctgtcccgagggcaccgcatgctcccggcgcaggttccttgtaacctcttcttcctaggtcctgcacccagacctcacgacgcacctcctgcctctccgctgcttttggaaagtcagaaaaagaagatgtctgcttcgagggcaggaaccccatccatgcagtagaggcgctgggcagagagtcaaggcccagcagccatcgaccatggatggtttcctccaaggaaaccggtggggttgggctggggagggggcacctacctaggaatagccacggggtagagctacagtgattaagaggaaagcaagggcgcggttgctcacgcctgtaatcccagcactttgggacaccgaggtgggcagatcacttcaggtcaggagtttgagaccagcctggccaacttagtgaaaccccatctctactaaaaatgcaaaaattatccaggcatggtggcacacgcctgtaatcccagctccacaggaggctgaggcagaatcccttgaagctgggaggcggaggttgcagtgagccgagattgcgccattgcactccagcctgggcaacagagaaaacaaaaaggaaaacaaatgatgaaggtctgcagaaactgaaacccagacatgtgtctgccccctctatgtgggcatggttttgccagtgcttctaagtgcaggagaacatgtcacctgaggctagttttgcattcaggtccctggcttcgtttcttgttggtatgcctccccagatcgtccttcctgtatccatgtgaccagactgtatttgttgggactgtcgcagatcttggcttcttacagttcttcctgtccaaactccatcctgtccctcaggaacggggggaaaattctccgaatgtttttggttttttggctgcttggaatttacttctgccacctgctggtcatcactgtcctcactaagtggattctggctcccccgtacctcatggctcaaactaccactcctcagtcgctatattaaagcttatattttgctggattactgctaaatacaaaagaaagttcaatatgttttcatttctgtagggaaaatgggattgctgctttaaatttctgagctagggattttttggcagctgcagtgttggcgactattgtaaaattctctttgtttctctctgtaaatagcacctgctaacattacaatttgtatttatgtttaaagaaggcatcatttggtgaacagaactaggaaatgaatttttagctcttaaaagcatttgctttgagaccgcacaggagtgtctttccttgtaaaacagtgatgataatttctgccttggccctaccttgaagcaatgttgtgtgaagggatgaagaatctaaaagtcttcataagtccttgggagaggtgctagaaaaatataaggcactatcataatta

SEQ ID NO: 134371 - DNA, 826 bp, Homo sapiens
  Payload ID: 6253
  Gene Symbol: FGFR1
  Gene Name: fibroblast growth factor receptor 1
  Uniprot ID: P11362
  ENST ID: ENST00000484370
  CDS Start-End: 1-453
atgtggagctggaagtgcctcctcttctgggctgtgctggtcacagccacactctgcaccgctaggccgtccccgaccttgcctgaacaagcccagccctggggagcccctgtggaagtggagtccttcctggtccaccccggtgacctgctgcagcttcgctgtcggctgcgggacgatgtgcagagcatcaactggctgcgggacggggtgcagctggcggaaagcaaccgcacccgcatcacaggggaggaggtggaggtgcaggactccgtgcccgcagactccggcctctatgcttgcgtaaccagcagcccctcgggcagtgacaccacctacttctccgtcaatgtttcagcttgcccagatctccaggaggctaagtggtgctcggccagcttccactccatcactcccttgccatttggacttggtactcggcttagtgattagaggccctgaacaggtggtggtatccctgctctgctggagaggaacccagatgctctcccctcctcggaggatgatgatgatgatgatgactcctcttcagaggagaaagaaacagataacaccaaaccaaaccccgtagctccatattggacatccccagaaaagatggaaaagaaattgcatgcagtgccggctgccaagacagtgaagttcaaatgcccttccagtgggaccccaaaccccacactgcgctggttgaaaaatggcaaagaattcaaacctgaccacagaattggaggctacaaggtccgttatgccacctggagcatcataatggactctgtggtgccctctgacaagggcaactacacct

SEQ ID NO: 134372 - DNA, 657 bp, Homo sapiens
  Payload ID: 6253
  Gene Symbol: FGFR1
  Gene Name: fibroblast growth factor receptor 1
  ENST ID: ENST00000526742
  CDS Start-End: 222-657
ttgggtctcccctcccttccctccgtccgcgtctcctgcgccccctccctgcgctcgtcccgccgctcttcccgccgcccaacttttcctccaactcgcgctcgggagctggcgaggcggcggcggctcctcaggtcagtttgaaaaggaggatcgagctcactgtggagtatccatggagatgtggagccttgtcaccaacctctaactgcagaactgggatgtggagctggaagtgcctcctcttctgggctgtgctggtcacagccacactctgcaccgctaggccgtccccgaccttgcctgaacaagatgctctcccctcctcggaggatgatgatgatgatgatgactcctcttcagaggagaaagaaacagataacaccaaaccaaaccccgtagctccatattggacatccccagaaaagatggaaaagaaattgcatgcagtgccggctgccaagacagtgaagttcaaatgcccttccagtgggaccccaaaccccacactgcgctggttgaaaaatggcaaagaattcaaacctgaccacagaattggaggctacaaggtccgttatgccacctggagcatcataatggactctgtggtgccctctgacaagggcaactacacctgcattgtggagaatgagtacg

SEQ ID NO: 134373 - DNA, 467 bp, Homo sapiens
  Payload ID: 6253
  Gene Symbol: FGFR1
  Gene Name: fibroblast growth factor receptor 1
  ENST ID: ENST00000530568
  CDS Start-End: 211-467
accacctccctccttaacatttctggagacttggagatgcggcgttgagattcgggggagaaaagaaagttcccttggatcccgagttatttaagatctcaccaagttattcgccgccgctgggtcagtttgaaaaggaggatcgagctcactgtggagtatccatggagatgtggagccttgtcaccaacctctaactgcagaactgggatgtggagctggaagtgcctcctcttctgggctgtgctggtcacagccacactctgcaccgctaggccgtccccgaccttgcctgaacaagatgctctcccctcctcggaggatgatgatgatgatgatgactcctcttcagaggagaaagaaacagataacaccaaaccaaaccccgtagctccatattggacatccccagaaaagatggaaaagaaattgcatgcagtgccggctgccaagacagtgaagttcaa

SEQ ID NO: 134374 - DNA, 1155 bp, Homo sapiens
  Payload ID: 6253
  Gene Symbol: FGFR1
  Gene Name: fibroblast growth factor receptor 1
  ENST ID: ENST00000525001
  CDS Start-End: 260-1155
tttcacctcctggctccctcccgggcgatccgcgccccttgggtctcccctcccttccctccgtccgcgtctcctgcgccccctccctgcgctcgtcccgccgctcttcccgccgcccaacttttcctccaactcgcgctcgggagctggcgaggcggcggcggctcctcaggtcagtttgaaaaggaggatcgagctcactgtggagtatccatggagatgtggagccttgtcaccaacctctaactgcagaactgggatgtggagctggaagtgcctcctcttctgggctgtgctggtcacagccacactctgcaccgctaggccgtccccgaccttgcctgaacaagcccagccctggggagcccctgtggaagtggagtccttcctggtccaccccggtgacctgctgcagcttcgctgtcggctgcgggacgatgtgcagagcatcaactggctgcgggacggggtgcagctggcggaaagcaaccgcacccgcatcacaggggaggaggtggaggtgcaggactccgtgcccgcagactccggcctctatgcttgcgtaaccagcagcccctcgggcagtgacaccacctacttctccgtcaatgtttcagatgctctcccctcctcggaggatgatgatgatgatgatgactcctcttcagaggagaaagaaacagataacaccaaaccaaaccgtatgcccgtagctccatattggacatccccagaaaagatggaaaagaaattgcatgcagtgccggctgccaagacagtgaagttcaaatgcccttccagtgggaccccaaaccccacactgcgctggttgaaaaatggcaaagaattcaaacctgaccacagaattggaggctacaaggtccgttatgccacctggagcatcataatggactctgtggtgccctctgacaagggcaactacacctgcattgtggagaatgagtacggcagcatcaaccacacataccagctggatgtcgtggagcggtcccctcaccggcccatcctgcaagcagggttgcccgccaacaaaacagtggccctgggtagcaacgtggagttcatgtgtaaggtgtacagtgacccgcagccgcacatccagtggctaaagcacatcgaggtgaatgggagcaa

SEQ ID NO: 134375 - DNA, 842 bp, Homo sapiens
  Payload ID: 6253
  Gene Symbol: FGFR1
  Gene Name: fibroblast growth factor receptor 1
  ENST ID: ENST00000531196
  CDS Start-End: 1-405
gtgtcctgcgcctaccaggtggcccgaggcatggagtatctggcctccaagaagtgcatacaccgagacctggcagccaggaatgtcctggtgacagaggacaatgtgatgaagatagcagactttggcctcgcacgggacattcaccacatcgactactataaaaagacaaccaacggccgactgcctgtgaagtggatggcacccgaggcattatttgaccggatctacacccaccagagtgatgtgtggtctttcggggtgctcctgtgggagatcttcactctgggcggctccccataccccggtgtgcctgtggaggaacttttcaagctgctgaaggagggtcaccgcatggacaagcccagtaactgcaccaacgagcttcctgccgcaggtacatgatgatgcgggactgctggcatgcagtgccctcacagagacccaccttcaagcagctggtggaagacctggaccgcatcgtggccttgacctccaaccaggagtacctggacctgtccatgcccctggaccagtactcccccagctttcccgacacccggagctctacgtgctcctcaggggaggattccgtcttctctcatgagccgctgcccgaggagccctgcctgccccgacacccagcccagcttgccaatggcggactcaaacgccgctgactgccacccacacgccctccccagactccaccgtcagctgtaaccctcacccacagcccctgctgggcccaccacctgtccgtccctgtcccctttcctgctggcaggagccggctgcctaccaggggccttcctgtgtggcctgccttcaccccactcagc

SEQ ID NO: 134376 - DNA, 571 bp, Homo sapiens
  Payload ID: 6253
  Gene Symbol: FGFR1
  Gene Name: fibroblast growth factor receptor 1
  ENST ID: ENST00000533668
  CDS Start-End: 153-571
gcgctcgggagctggcgaggcggcggcggctcctcaatgctctcccctcctcggaggatgatgatgatgatgatgactcctcttcagaggagaaagaaacagataacaccaaaccaaaccccgtagctccatattggacatccccagaaaagatggaaaagaaattgcatgcagtgccggctgccaagacagtgaagttcaaatgcccttccagtgggaccccaaaccccacactgcgctggttgaaaaatggcaaagaattcaaacctgaccacagaattggaggctacaaggtccgttatgccacctggagcatcataatggactctgtggtgccctctgacaagggcaactacacctgcattgtggagaatgagtacggcagcatcaaccacacataccagctggatgtcgtggagcggtcccctcaccggcccatcctgcaagcagggttgcccgccaacaaaacagtggccctgggtagcaacgtggagttcatgtgtaaggtgtacagtgacccgcagccgcacatccagtggctaaagcacatcgaggtgaatgggagcaagat

SEQ ID NO: 134377 - DNA, 1608 bp, Homo sapiens
  Payload ID: 6253
  Gene Symbol: FGFR1
  Gene Name: fibroblast growth factor receptor 1
  ENST ID: ENST00000487647
  CDS Start-End: 1-186
atgtggagctggaagtgcctcctcttctgggctgtgctggtcacagccacactctgcaccgctaggccgtccccgaccttgcctgaacaagcttgcccagatctccaggaggctaagtggtgctcggccagcttccactccatcactcccttgccatttggacttggtactcggcttagtgattagaggccctgaacaggtggtggtatccctgctctgctggagaggaacccagatgctctcccctcctcggaggatgatgatgatgatgatgactcctcttcagaggagaaagaaacagataacaccaaaccaaaccgtatgcccgtagctccatattggacatccccagaaaagatggaaaagaaattgcatgcagtgccggctgccaagacagtgaagttcaaatgcccttccagtgggaccccaaaccccacactgcgctggttgaaaaatggcaaagaattcaaacctgaccacagaattggaggctacaaggtccgttatgccacctggagcatcataatggactctgtggtgccctctgacaagggcaactacacctgcattgtggagaatgagtacggcagcatcaaccacacataccagctggatgtcgtggagcggtcccctcaccggcccatcctgcaagcagggttgcccgccaacaaaacagtggccctgggtagcaacgtggagttcatgtgtaaggtgtacagtgacccgcagccgcacatccagtggctaaagcacatcgaggtgaatgggagcaagattggcccagacaacctgccttatgtccagatcttgaagactgctggagttaataccaccgacaaagagatggaggtgcttcacttaagaaatgtctcctttgaggacgcaggggagtatacgtgcttggcgggtaactctatcggactctcccatcactctgcatggttgaccgttctggaagccctggaagagaggccggcagtgatgacctcgcccctgtacctggagatcatcatctattgcacaggggccttcctcatctcctgcatggtggggtcggtcatcgtctacaagatgaagagtggtaccaagaagagtgacttccacagccagatggctgtgcacaagctggccaagagcatccctctgcgcagacaggtaacagtgtctgctgactccagtgcatccatgaactctggggttcttctggttcggccatcacggctctcctccagtgggactcccatgctagcaggggtctctgagtatgagcttcccgaagaccctcgctgggagctgcctcgggacagactggtcttaggcaaacccctgggagagggctgctttgggcaggtggtgttggcagaggctatcgggctggacaaggacaaacccaaccgtgtgaccaaagtggctgtgaagatgttgaagtcggacgcaacagagaaagacttgtcagacctgatctcagaaatggagatgatgaagatgatcgggaagcataagaatatcatcaacctgctgggggcctgcacgcaggatggtcccttgtatgtcatcgtggagtatgcctccaagggcaacctgcgggagtacctgcaggcccggagg

SEQ ID NO: 134378 - DNA, 688 bp, Homo sapiens
  Payload ID: 6253
  Gene Symbol: FGFR1
  Gene Name: fibroblast growth factor receptor 1
  ENST ID: ENST00000529552
  CDS Start-End: 263-688
ccctttcacctcctggctccctcccgggcgatccgcgccccttgggtctcccctcccttccctccgtccgcgtctcctgcgccccctccctgcgctcgtcccgccgctcttcccgccgcccaacttttcctccaactcgcgctcgggagctggcgaggcggcggcggctcctcaggtcagtttgaaaaggaggatcgagctcactgtggagtatccatggagatgtggagccttgtcaccaacctctaactgcagaactgggatgtggagctggaagtgcctcctcttctgggctgtgctggtcacagccacactctgcaccgctaggccgtccccgaccttgcctgaacaagatgctctcccctcctcggaggatgatgatgatgatgatgactcctcttcagaggagaaagaaacagataacaccaaaccaaaccgtatgcccgtagctccatattggacatccccagaaaagatggaaaagaaattgcatgcagtgccggctgccaagacagtgaagttcaaatgcccttccagtgggaccccaaaccccacactgcgctggttgaaaaatggcaaagaattcaaacctgaccacagaattggaggctacaaggtccgttatgccacctggagcatcataatggactctgtggtgccctctgacaagggcaactacacctgcatt

SEQ ID NO: 134379 - DNA, 5482 bp, Homo sapiens
  Payload ID: 6253
  Gene Symbol: FGFR1
  Gene Name: fibroblast growth factor receptor 1
  ENST ID: ENST00000619564
  CDS Start-End: 943-1629
agatgcaggggcgcaaacgccaaaggagaccaggctgtaggaagagaagggcagagcgccggacagctcggcccgctccccgtcctttggggccgcggctggggaactacaaggcccagcaggcagctgcagggggcggaggcggaggagggaccagcgcgggtgggagtgagagagcgagccctcgcgccccgccggcgcatagcgctcggagcgctcttgcggccacaggcgcggcgtcctcggcggcgggcggcagctagcgggagccgggacgccggtgcagccgcagcgcgcggaggaacccgggtgtgccgggagctgggcggccacgtccggacgggaccgagacccctcgtagcgcattgcggcgacctcgccttccccggccgcgagcgcgccgctgcttgaaaagccgcggaacccaaggacttttctccggtccgagctcggggcgccccgcagggcgcacggtacccgtgctgcagtcgggcacgccgcggcgccggggcctccgcagggcgatggagcccggtctgcaaggaaagtgaggcgccgccgctgcgttctggaggaggggggcacaaggtctggagaccccgggtggcggacgggagccctccccccgccccgcctccggggcaccagctccggctccattgttcccgcccgggctggaggcgccgagcaccgagcgccgccgggagtcgagcgccggccgcggagctcttgcgaccccgccaggacccgaacagagcccgggggcggcgggccggagccggggacgcgggcacacgcccgctcgcacaagccacggcggactctcccgaggcggaacctccacgccgagcgagggtcagtttgaaaaggaggatcgagctcactgtggagtatccatggagatgtggagccttgtcaccaacctctaactgcagaactgggatgtggagctggaagtgcctcctcttctgggctgtgctggtcacagccacactctgcaccgctaggccgtccccgaccttgcctgaacaagatgctctcccctcctcggaggatgatgatgatgatgatgactcctcttcagaggagaaagaaacagataacaccaaaccaaaccccgtagctccatattggacatccccagaaaagatggaaaagaaattgcatgcagtgccggctgccaagacagtgaagttcaaatgcccttccagtgggaccccaaaccccacactgcgctggttgaaaaatggcaaagaattcaaacctgaccacagaattggaggctacaaggtccgttatgccacctggagcatcataatggactctgtggtgccctctgacaagggcaactacacctgcattgtggagaatgagtacggcagcatcaaccacacataccagctggatgtcgtggagcggtcccctcaccggcccatcctgcaagcagggttgcccgccaacaaaacagtggccctgggtagcaacgtggagttcatgtgtaaggtgtacagtgacccgcagccgcacatccagtggctaaagcacatcgaggtgaatgggagcaagattggcccagacaacctgccttatgtccagatcttgaagccctggaagagaggccggcagtgatgacctcgcccctgtacctggagatcatcatctattgcacaggggccttcctcatctcctgcatggtggggtcggtcatcgtctacaagatgaagagtggtaccaagaagagtgacttccacagccagatggctgtgcacaagctggccaagagcatccctctgcgcagacaggtaacagtgtctgctgactccagtgcatccatgaactctggggttcttctggttcggccatcacggctctcctccagtgggactcccatgctagcaggggtctctgagtatgagcttcccgaagaccctcgctgggagctgcctcgggacagactggtcttaggcaaacccctgggagagggctgctttgggcaggtggtgttggcagaggctatcgggctggacaaggacaaacccaaccgtgtgaccaaagtggctgtgaagatgttgaagtcggacgcaacagagaaagacttgtcagacctgatctcagaaatggagatgatgaagatgatcgggaagcataagaatatcatcaacctgctgggggcctgcacgcaggatggtcccttgtatgtcatcgtggagtatgcctccaagggcaacctgcgggagtacctgcaggcccggaggcccccagggctggaatactgctacaaccccagccacaacccagaggagcagctctcctccaaggacctggtgtcctgcgcctaccaggtggcccgaggcatggagtatctggcctccaagaagtgcatacaccgagacctggcagccaggaatgtcctggtgacagaggacaatgtgatgaagatagcagactttggcctcgcacgggacattcaccacatcgactactataaaaagacaaccaacggccgactgcctgtgaagtggatggcacccgaggcattatttgaccggatctacacccaccagagtgatgtgtggtctttcggggtgctcctgtgggagatcttcactctgggcggctccccataccccggtgtgcctgtggaggaacttttcaagctgctgaaggagggtcaccgcatggacaagcccagtaactgcaccaacgagctgtacatgatgatgcgggactgctggcatgcagtgccctcacagagacccaccttcaagcagctggtggaagacctggaccgcatcgtggccttgacctccaaccaggagtacctggacctgtccatgcccctggaccagtactcccccagctttcccgacacccggagctctacgtgctcctcaggggaggattccgtcttctctcatgagccgctgcccgaggagccctgcctgccccgacacccagcccagcttgccaatggcggactcaaacgccgctgactgccacccacacgccctccccagactccaccgtcagctgtaaccctcacccacagcccctgctgggcccaccacctgtccgtccctgtcccctttcctgctggcaggagccggctgcctaccaggggccttcctgtgtggcctgccttcaccccactcagctcacctctccctccacctcctctccacctgctggtgagaggtgcaaagaggcagatctttgctgccagccacttcatcccctcccagatgttggaccaacacccctccctgccaccaggcactgcctggagggcagggagtgggagccaatgaacaggcatgcaagtgagagcttcctgagctttctcctgtcggtttggtctgttttgccttcacccataagcccctcgcactctggtggcaggtgccttgtcctcagggctacagcagtagggaggtcagtgcttcgtgcctcgattgaaggtgacctctgccccagataggtggtgccagtggcttattaattccgatactagtttgctttgctgaccaaatgcctggtaccagaggatggtgaggcgaaggccaggttgggggcagtgttgtggccctggggcccagccccaaactgggggctctgtatatagctatgaagaaaacacaaagtgtataaatctgagtatatatttacatgtctttttaaaagggtcgttaccagagatttacccatcgggtaagatgctcctggtggctgggaggcatcagttgctatatattaaaaacaaaaaagaaaaaaaaggaaaatgtttttaaaaaggtcatatattttttgctacttttgctgttttatttttttaaattatgttctaaacctattttcagtttaggtccctcaataaaaattgctgctgcttcatttatctatgggctgtatgaaaagggtgggaatgtccactggaaagaagggacacccacgggccctggggctaggtctgtcccgagggcaccgcatgctcccggcgcaggttccttgtaacctcttcttcctaggtcctgcacccagacctcacgacgcacctcctgcctctccgctgcttttggaaagtcagaaaaagaagatgtctgcttcgagggcaggaaccccatccatgcagtagaggcgctgggcagagagtcaaggcccagcagccatcgaccatggatggtttcctccaaggaaaccggtggggttgggctggggagggggcacctacctaggaatagccacggggtagagctacagtgattaagaggaaagcaagggcgcggttgctcacgcctgtaatcccagcactttgggacaccgaggtgggcagatcacttcaggtcaggagtttgagaccagcctggccaacttagtgaaaccccatctctactaaaaatgcaaaaattatccaggcatggtggcacacgcctgtaatcccagctccacaggaggctgaggcagaatcccttgaagctgggaggcggaggttgcagtgagccgagattgcgccattgcactccagcctgggcaacagagaaaacaaaaaggaaaacaaatgatgaaggtctgcagaaactgaaacccagacatgtgtctgccccctctatgtgggcatggttttgccagtgcttctaagtgcaggagaacatgtcacctgaggctagttttgcattcaggtccctggcttcgtttcttgttggtatgcctccccagatcgtccttcctgtatccatgtgaccagactgtatttgttgggactgtcgcagatcttggcttcttacagttcttcctgtccaaactccatcctgtccctcaggaacggggggaaaattctccgaatgtttttggttttttggctgcttggaatttacttctgccacctgctggtcatcactgtcctcactaagtggattctggctcccccgtacctcatggctcaaactaccactcctcagtcgctatattaaagcttatattttgctggattactgctaaatacaaaagaaagttcaatatgttttcatttctgtagggaaaatgggattgctgctttaaatttctgagctagggattttttggcagctgcagtgttggcgactattgtaaaattctctttgtttctctctgtaaatagcacctgctaacattacaatttgtatttatgtttaaagaaggcatcatttggtgaacagaactaggaaatgaatttttagctcttaaaagcatttgctttgagaccgcacaggagtgtctttccttgtaaaacagtgatgataatttctgccttggccctaccttgaagcaatgttgtgtgaagggatgaagaatctaaaagtcttcataagtccttgggagaggtgctagaaaaatataaggcactatcataattacagtgatgtccttgctgttactactcaaatcacccacaaatttccccaaagactgcgctagctgtcaaataaaagacagtgaaattgacctg

SEQ ID NO: 134380 - DNA, 2472 bp, Homo sapiens
  Payload ID: 6254
  Gene Symbol: FGFR2
  Gene Name: fibroblast growth factor receptor 2
  Uniprot ID: P21802
  ENST ID: ENST00000346997
  CDS Start-End: 13-2472
ggtaccgtaaccatggtcagctggggtcgtttcatctgcctggtcgtggtcaccatggcaaccttgtccctggcccggccctccttcagtttagttgaggataccacattagagccagaagagccaccaaccaaataccaaatctctcaaccagaagtgtacgtggctgcgccaggggagtcgctagaggtgcgctgcctgttgaaagatgccgccgtgatcagttggactaaggatggggtgcacttggggcccaacaataggacagtgcttattggggagtacttgcagataaagggcgccacgcctagagactccggcctctatgcttgtactgccagtaggactgtagacagtgaaacttggtacttcatggtgaatgtcacagatgccatctcatccggagatgatgaggatgacaccgatggtgcggaagattttgtcagtgagaacagtaacaacaagagagcaccatactggaccaacacagaaaagatggaaaagcggctccatgctgtgcctgcggccaacactgtcaagtttcgctgcccagccggggggaacccaatgccaaccatgcggtggctgaaaaacgggaaggagtttaagcaggagcatcgcattggaggctacaaggtacgaaaccagcactggagcctcattatggaaagtgtggtcccatctgacaagggaaattatacctgtgtagtggagaatgaatacgggtccatcaatcacacgtaccacctggatgttgtggagcgatcgcctcaccggcccatcctccaagccggactgccggcaaatgcctccacagtggtcggaggagacgtagagtttgtctgcaaggtttacagtgatgcccagccccacatccagtggatcaagcacgtggaaaagaacggcagtaaatacgggcccgacgggctgccctacctcaaggttctcaaggccgccggtgttaacaccacggacaaagagattgaggttctctatattcggaatgtaacttttgaggacgctggggaatatacgtgcttggcgggtaattctattgggatatcctttcactctgcatggttgacagttctgccagcgcctggaagagaaaaggagattacagcttccccagactacctggagatagccatttactgcataggggtcttcttaatcgcctgtatggtggtaacagtcatcctgtgccgaatgaagaacacgaccaagaagccagacttcagcagccagccggctgtgcacaagctgaccaaacgtatccccctgcggagacaggtttcggctgagtccagctcctccatgaactccaacaccccgctggtgaggataacaacacgcctctcttcaacggcagacacccccatgctggcaggggtctccgagtatgaacttccagaggacccaaaatgggagtttccaagagataagctgacactgggcaagcccctgggagaaggttgctttgggcaagtggtcatggcggaagcagtgggaattgacaaagacaagcccaaggaggcggtcaccgtggccgtgaagatgttgaaagatgatgccacagagaaagacctttctgatctggtgtcagagatggagatgatgaagatgattgggaaacacaagaatatcataaatcttcttggagcctgcacacaggatgggcctctctatgtcatagttgagtatgcctctaaaggcaacctccgagaatacctccgagcccggaggccacccgggatggagtactcctatgacattaaccgtgttcctgaggagcagatgaccttcaaggacttggtgtcatgcacctaccagctggccagaggcatggagtacttggcttcccaaaaatgtattcatcgagatttagcagccagaaatgttttggtaacagaaaacaatgtgatgaaaatagcagactttggactcgccagagatatcaacaatatagactattacaaaaagaccaccaatgggcggcttccagtcaagtggatggctccagaagccctgtttgatagagtatacactcatcagagtgatgtctggtccttcggggtgttaatgtgggagatcttcactttagggggctcgccctacccagggattcccgtggaggaactttttaagctgctgaaggaaggacacagaatggataagccagccaactgcaccaacgaactgtacatgatgatgagggactgttggcatgcagtgccctcccagagaccaacgttcaagcagttggtagaagacttggatcgaattctcactctcacaaccaatgaggaatacttggacctcagccaacctctcgaacagtattcacctagttaccctgacacaagaagttcttgttcttcaggagatgattctgttttttctccagaccccatgccttacgaaccatgccttcctcagtatccacacataaacggcagtgttaaaacatga

SEQ ID NO: 134381 - DNA, 2478 bp, Homo sapiens
  Payload ID: 6254
  Gene Symbol: FGFR2
  Gene Name: fibroblast growth factor receptor 2
  ENST ID: ENST00000351936
  CDS Start-End: 13-2478
ggtaccgtaaccatggtcagctggggtcgtttcatctgcctggtcgtggtcaccatggcaaccttgtccctggcccggccctccttcagtttagttgaggataccacattagagccagaagagccaccaaccaaataccaaatctctcaaccagaagtgtacgtggctgcgccaggggagtcgctagaggtgcgctgcctgttgaaagatgccgccgtgatcagttggactaaggatggggtgcacttggggcccaacaataggacagtgcttattggggagtacttgcagataaagggcgccacgcctagagactccggcctctatgcttgtactgccagtaggactgtagacagtgaaacttggtacttcatggtgaatgtcacagatgccatctcatccggagatgatgaggatgacaccgatggtgcggaagattttgtcagtgagaacagtaacaacaagagagcaccatactggaccaacacagaaaagatggaaaagcggctccatgctgtgcctgcggccaacactgtcaagtttcgctgcccagccggggggaacccaatgccaaccatgcggtggctgaaaaacgggaaggagtttaagcaggagcatcgcattggaggctacaaggtacgaaaccagcactggagcctcattatggaaagtgtggtcccatctgacaagggaaattatacctgtgtagtggagaatgaatacgggtccatcaatcacacgtaccacctggatgttgtggagcgatcgcctcaccggcccatcctccaagccggactgccggcaaatgcctccacagtggtcggaggagacgtagagtttgtctgcaaggtttacagtgatgcccagccccacatccagtggatcaagcacgtggaaaagaacggcagtaaatacgggcccgacgggctgccctacctcaaggttctcaaggttttcgccgccggtgttaacaccacggacaaagagattgaggttctctatattcggaatgtaacttttgaggacgctggggaatatacgtgcttggcgggtaattctattgggatatcctttcactctgcatggttgacagttctgccagcgcctggaagagaaaaggagattacagcttccccagactacctggagatagccatttactgcataggggtcttcttaatcgcctgtatggtggtaacagtcatcctgtgccgaatgaagaacacgaccaagaagccagacttcagcagccagccggctgtgcacaagctgaccaaacgtatccccctgcggagacaggtttcggctgagtccagctcctccatgaactccaacaccccgctggtgaggataacaacacgcctctcttcaacggcagacacccccatgctggcaggggtctccgagtatgaacttccagaggacccaaaatgggagtttccaagagataagctgacactgggcaagcccctgggagaaggttgctttgggcaagtggtcatggcggaagcagtgggaattgacaaagacaagcccaaggaggcggtcaccgtggccgtgaagatgttgaaagatgatgccacagagaaagacctttctgatctggtgtcagagatggagatgatgaagatgattgggaaacacaagaatatcataaatcttcttggagcctgcacacaggatgggcctctctatgtcatagttgagtatgcctctaaaggcaacctccgagaatacctccgagcccggaggccacccgggatggagtactcctatgacattaaccgtgttcctgaggagcagatgaccttcaaggacttggtgtcatgcacctaccagctggccagaggcatggagtacttggcttcccaaaaatgtattcatcgagatttagcagccagaaatgttttggtaacagaaaacaatgtgatgaaaatagcagactttggactcgccagagatatcaacaatatagactattacaaaaagaccaccaatgggcggcttccagtcaagtggatggctccagaagccctgtttgatagagtatacactcatcagagtgatgtctggtccttcggggtgttaatgtgggagatcttcactttagggggctcgccctacccagggattcccgtggaggaactttttaagctgctgaaggaaggacacagaatggataagccagccaactgcaccaacgaactgtacatgatgatgagggactgttggcatgcagtgccctcccagagaccaacgttcaagcagttggtagaagacttggatcgaattctcactctcacaaccaatgaggaatacttggacctcagccaacctctcgaacagtattcacctagttaccctgacacaagaagttcttgttcttcaggagatgattctgttttttctccagaccccatgccttacgaaccatgccttcctcagtatccacacataaacggcagtgttaaaacatga

SEQ ID NO: 134382 - DNA, 2593 bp, Homo sapiens
  Payload ID: 6254
  Gene Symbol: FGFR2
  Gene Name: fibroblast growth factor receptor 2
  ENST ID: ENST00000336553
  CDS Start-End: 586-2593
cgagggagcgcgcgcggccgccacaaagctcgggcgccgcggggctgcatgcggcgtacctggcccggcgcggcgactgctctccgggctggcgggggccggccgcgagccccgggggccccgaggccgcagcttgcctgcgcgctctgagccttcgcaactcgcgagcaaagtttggtggaggcaacgccaagcctgagtcctttcttcctctcgttccccaaatccgagggcagcccgcgggcgtcatgcccgcgctcctccgcagcctggggtacgcgtgaagcccgggaggcttggcgccggcgaagacccaaggaccactcttctgcgtttggagttgctccccgcaaccccgggctcgtcgctttctccatcccgacccacgcggggcgcggggacaacacaggtcgcggaggagcgttgccattcaagtgactgcagcagcagcggcagcgcctcggttcctgagcccaccgcaggctgaaggcattgcgcgtagtccatgcccgtagaggaagtgtgcagatgggattaacgtccacatggagatatggaagaggaccggggattggtaccgtaaccatggtcagctggggtcgtttcatctgcctggtcgtggtcaccatggcaaccttgtccctggcccggccctccttcagtttagttgaggataccacattagagccagaagatgccatctcatccggagatgatgaggatgacaccgatggtgcggaagattttgtcagtgagaacagtaacaacaagagagcaccatactggaccaacacagaaaagatggaaaagcggctccatgctgtgcctgcggccaacactgtcaagtttcgctgcccagccggggggaacccaatgccaaccatgcggtggctgaaaaacgggaaggagtttaagcaggagcatcgcattggaggctacaaggtacgaaaccagcactggagcctcattatggaaagtgtggtcccatctgacaagggaaattatacctgtgtagtggagaatgaatacgggtccatcaatcacacgtaccacctggatgttgtggagcgatcgcctcaccggcccatcctccaagccggactgccggcaaatgcctccacagtggtcggaggagacgtagagtttgtctgcaaggtttacagtgatgcccagccccacatccagtggatcaagcacgtggaaaagaacggcagtaaatacgggcccgacgggctgccctacctcaaggttctcaaggccgccggtgttaacaccacggacaaagagattgaggttctctatattcggaatgtaacttttgaggacgctggggaatatacgtgcttggcgggtaattctattgggatatcctttcactctgcatggttgacagttctgccagcgcctggaagagaaaaggagattacagcttccccagactacctggagatagccatttactgcataggggtcttcttaatcgcctgtatggtggtaacagtcatcctgtgccgaatgaagaacacgaccaagaagccagacttcagcagccagccggctgtgcacaagctgaccaaacgtatccccctgcggagacaggtttcggctgagtccagctcctccatgaactccaacaccccgctggtgaggataacaacacgcctctcttcaacggcagacacccccatgctggcaggggtctccgagtatgaacttccagaggacccaaaatgggagtttccaagagataagctgacactgggcaagcccctgggagaaggttgctttgggcaagtggtcatggcggaagcagtgggaattgacaaagacaagcccaaggaggcggtcaccgtggccgtgaagatgttgaaagatgatgccacagagaaagacctttctgatctggtgtcagagatggagatgatgaagatgattgggaaacacaagaatatcataaatcttcttggagcctgcacacaggatgggcctctctatgtcatagttgagtatgcctctaaaggcaacctccgagaatacctccgagcccggaggccacccgggatggagtactcctatgacattaaccgtgttcctgaggagcagatgaccttcaaggacttggtgtcatgcacctaccagctggccagaggcatggagtacttggcttcccaaaaatgtattcatcgagatttagcagccagaaatgttttggtaacagaaaacaatgtgatgaaaatagcagactttggactcgccagagatatcaacaatatagactattacaaaaagaccaccaatgggcggcttccagtcaagtggatggctccagaagccctgtttgatagagtatacactcatcagagtgatgtctggtccttcggggtgttaatgtgggagatcttcactttagggggctcgccctacccagggattcccgtggaggaactttttaagctgctgaaggaaggacacagaatggataagccagccaactgcaccaacgaactgtacatgatgatgagggactgttggcatgcagtgccctcccagagaccaacgttcaagcagttggtagaagacttggatcgaattc

SEQ ID NO: 134383 - DNA, 3547 bp, Homo sapiens
  Payload ID: 6254
  Gene Symbol: FGFR2
  Gene Name: fibroblast growth factor receptor 2
  Uniprot ID: P21802
  ENST ID: ENST00000356226
  CDS Start-End: 648-2762
ggcggcggctggaggagagcgcggtggagagccgagcgggcgggcggcgggtgcggagcgggcgagggagcgcgcgcggccgccacaaagctcgggcgccgcggggctgcatgcggcgtacctggcccggcgcggcgactgctctccgggctggcgggggccggccgcgagccccgggggccccgaggccgcagcttgcctgcgcgctctgagccttcgcaactcgcgagcaaagtttggtggaggcaacgccaagcctgagtcctttcttcctctcgttccccaaatccgagggcagcccgcgggcgtcatgcccgcgctcctccgcagcctggggtacgcgtgaagcccgggaggcttggcgccggcgaagacccaaggaccactcttctgcgtttggagttgctccccgcaaccccgggctcgtcgctttctccatcccgacccacgcggggcgcggggacaacacaggtcgcggaggagcgttgccattcaagtgactgcagcagcagcggcagcgcctcggttcctgagcccaccgcaggctgaaggcattgcgcgtagtccatgcccgtagaggaagtgtgcagatgggattaacgtccacatggagatatggaagaggaccggggattggtaccgtaaccatggtcagctggggtcgtttcatctgcctggtcgtggtcaccatggcaaccttgtccctggcccggccctccttcagtttagttgaggataccacattagagccagaaggagcaccatactggaccaacacagaaaagatggaaaagcggctccatgctgtgcctgcggccaacactgtcaagtttcgctgcccagccggggggaacccaatgccaaccatgcggtggctgaaaaacgggaaggagtttaagcaggagcatcgcattggaggctacaaggtacgaaaccagcactggagcctcattatggaaagtgtggtcccatctgacaagggaaattatacctgtgtagtggagaatgaatacgggtccatcaatcacacgtaccacctggatgttgtggagcgatcgcctcaccggcccatcctccaagccggactgccggcaaatgcctccacagtggtcggaggagacgtagagtttgtctgcaaggtttacagtgatgcccagccccacatccagtggatcaagcacgtggaaaagaacggcagtaaatacgggcccgacgggctgccctacctcaaggttctcaaggccgccggtgttaacaccacggacaaagagattgaggttctctatattcggaatgtaacttttgaggacgctggggaatatacgtgcttggcgggtaattctattgggatatcctttcactctgcatggttgacagttctgccagcgcctggaagagaaaaggagattacagcttccccagactacctggagatagccatttactgcataggggtcttcttaatcgcctgtatggtggtaacagtcatcctgtgccgaatgaagaacacgaccaagaagccagacttcagcagccagccggctgtgcacaagctgaccaaacgtatccccctgcggagacaggtttcggctgagtccagctcctccatgaactccaacaccccgctggtgaggataacaacacgcctctcttcaacggcagacacccccatgctggcaggggtctccgagtatgaacttccagaggacccaaaatgggagtttccaagagataagctgacactgggcaagcccctgggagaaggttgctttgggcaagtggtcatggcggaagcagtgggaattgacaaagacaagcccaaggaggcggtcaccgtggccgtgaagatgttgaaagatgatgccacagagaaagacctttctgatctggtgtcagagatggagatgatgaagatgattgggaaacacaagaatatcataaatcttcttggagcctgcacacaggatgggcctctctatgtcatagttgagtatgcctctaaaggcaacctccgagaatacctccgagcccggaggccacccgggatggagtactcctatgacattaaccgtgttcctgaggagcagatgaccttcaaggacttggtgtcatgcacctaccagctggccagaggcatggagtacttggcttcccaaaaatgtattcatcgagatttagcagccagaaatgttttggtaacagaaaacaatgtgatgaaaatagcagactttggactcgccagagatatcaacaatatagactattacaaaaagaccaccaatgggcggcttccagtcaagtggatggctccagaagccctgtttgatagagtatacactcatcagagtgatgtctggtccttcggggtgttaatgtgggagatcttcactttagggggctcgccctacccagggattcccgtggaggaactttttaagctgctgaaggaaggacacagaatggataagccagccaactgcaccaacgaactgtacatgatgatgagggactgttggcatgcagtgccctcccagagaccaacgttcaagcagttggtagaagacttggatcgaattctcactctcacaaccaatgaggaatacttggacctcagccaacctctcgaacagtattcacctagttaccctgacacaagaagttcttgttcttcaggagatgattctgttttttctccagaccccatgccttacgaaccatgccttcctcagtatccacacataaacggcagtgttaaaacatgaatgactgtgtctgcctgtccccaaacaggacagcactgggaacctagctacactgagcagggagaccatgcctcccagagcttgttgtctccacttgtatatatggatcagaggagtaaataattggaaaagtaatcagcatatgtgtaaagatttatacagttgaaaacttgtaatcttccccaggaggagaagaaggtttctggagcagtggactgccacaagccaccatgtaacccctctcacctgccgtgcgtactggctgtggaccagtaggactcaaggtggacgtgcgttctgccttccttgttaattttgtaataattggagaagatttatgtcagcacacacttacagagcacaaatgcagtatataggtgctggatgtatgtaaatatattcaaattatgtataaatatatattatatatttacaaggagttattttttgtattgattttaaatggatgtcccaatgcacctagaaaattggtctctctttttttaatagctatttgctaaatgctgttcttacacataatttcttaattttcaccgagcagaggtggaaaaatacttttgctttcagggaaaatggtataacgttaatttattaataaattggtaatatacaaaacaattaatcatttatagttttttttgtaatttaagtggcatttctatgcaggcagcacagcagactagttaatctattgcttggacttaactagttatcagatcctttgaaaagagaatatttacaatatatgactaatttggggaaaa

SEQ ID NO: 134384 - DNA, 3690 bp, Homo sapiens
  Payload ID: 6254
  Gene Symbol: FGFR2
  Gene Name: fibroblast growth factor receptor 2
  Uniprot ID: P21802
  ENST ID: ENST00000357555
  CDS Start-End: 320-2443
aatttgttgaggaatttccccctagccttgaccccttgacagctcccgctcctactcagtgctggggagaagtagggaggccttaagcgaagagatgggtctgcactttggaggagccggacactgttgactttcctgatgtgaaatctacccaggaacaaaacaccagtgactgcagcagcagcggcagcgcctcggttcctgagcccaccgcaggctgaaggcattgcgcgtagtccatgcccgtagaggaagtgtgcagatgggattaacgtccacatggagatatggaagaggaccggggattggtaccgtaaccatggtcagctggggtcgtttcatctgcctggtcgtggtcaccatggcaaccttgtccctggcccggccctccttcagtttagttgaggataccacattagagccagaagatgccatctcatccggagatgatgaggatgacaccgatggtgcggaagattttgtcagtgagaacagtaacaacaagagagcaccatactggaccaacacagaaaagatggaaaagcggctccatgctgtgcctgcggccaacactgtcaagtttcgctgcccagccggggggaacccaatgccaaccatgcggtggctgaaaaacgggaaggagtttaagcaggagcatcgcattggaggctacaaggtacgaaaccagcactggagcctcattatggaaagtgtggtcccatctgacaagggaaattatacctgtgtagtggagaatgaatacgggtccatcaatcacacgtaccacctggatgttgtggagcgatcgcctcaccggcccatcctccaagccggactgccggcaaatgcctccacagtggtcggaggagacgtagagtttgtctgcaaggtttacagtgatgcccagccccacatccagtggatcaagcacgtggaaaagaacggcagtaaatacgggcccgacgggctgccctacctcaaggttctcaaggccgccggtgttaacaccacggacaaagagattgaggttctctatattcggaatgtaacttttgaggacgctggggaatatacgtgcttggcgggtaattctattgggatatcctttcactctgcatggttgacagttctgccagcgcctggaagagaaaaggagattacagcttccccagactacctggagatagccatttactgcataggggtcttcttaatcgcctgtatggtggtaacagtcatcctgtgccgaatgaagaacacgaccaagaagccagacttcagcagccagccggctgtgcacaagctgaccaaacgtatccccctgcggagacaggtaacagtttcggctgagtccagctcctccatgaactccaacaccccgctggtgaggataacaacacgcctctcttcaacggcagacacccccatgctggcaggggtctccgagtatgaacttccagaggacccaaaatgggagtttccaagagataagctgacactgggcaagcccctgggagaaggttgctttgggcaagtggtcatggcggaagcagtgggaattgacaaagacaagcccaaggaggcggtcaccgtggccgtgaagatgttgaaagatgatgccacagagaaagacctttctgatctggtgtcagagatggagatgatgaagatgattgggaaacacaagaatatcataaatcttcttggagcctgcacacaggatgggcctctctatgtcatagttgagtatgcctctaaaggcaacctccgagaatacctccgagcccggaggccacccgggatggagtactcctatgacattaaccgtgttcctgaggagcagatgaccttcaaggacttggtgtcatgcacctaccagctggccagaggcatggagtacttggcttcccaaaaatgtattcatcgagatttagcagccagaaatgttttggtaacagaaaacaatgtgatgaaaatagcagactttggactcgccagagatatcaacaatatagactattacaaaaagaccaccaatgggcggcttccagtcaagtggatggctccagaagccctgtttgatagagtatacactcatcagagtgatgtctggtccttcggggtgttaatgtgggagatcttcactttagggggctcgccctacccagggattcccgtggaggaactttttaagctgctgaaggaaggacacagaatggataagccagccaactgcaccaacgaactgtacatgatgatgagggactgttggcatgcagtgccctcccagagaccaacgttcaagcagttggtagaagacttggatcgaattctcactctcacaaccaatgaggaggagaagaaggtttctggagcagtggactgccacaagccaccatgtaacccctctcacctgccgtgcgtactggctgtggaccagtaggactcaaggtggacgtgcgttctgccttccttgttaattttgtaataattggagaagatttatgtcagcacacacttacagagcacaaatgcagtatataggtgctggatgtatgtaaatatattcaaattatgtataaatatatattatatatttacaaggagttattttttgtattgattttaaatggatgtcccaatgcacctagaaaattggtctctctttttttaatagctatttgctaaatgctgttcttacacataatttcttaattttcaccgagcagaggtggaaaaatacttttgctttcagggaaaatggtataacgttaatttattaataaattggtaatatacaaaacaattaatcatttatagttttttttgtaatttaagtggcatttctatgcaggcagcacagcagactagttaatctattgcttggacttaactagttatcagatcctttgaaaagagaatatttacaatatatgactaatttggggaaaatgaagttttgatttatttgtgtttaaatgctgctgtcagacgattgttcttagacctcctaaatgccccatattaaaagaactcattcataggaaggtgtttcattttggtgtgcaaccctgtcattacgtcaacgcaacgtctaactggacttcccaagataaatggtaccagcgtcctcttaaaagatgccttaatccattccttgaggacagaccttagttgaaatgatagcagaatgtgcttctctctggcagctggccttctgcttctgagttgcacattaatcagattagcctgtattctcttcagtgaattttgataatggcttccagactctttggcgttggagacgcctgttaggatcttcaagtcccatcatagaaaattgaaacacagagttgttctgctgatagttttggggatacgtccatctttttaagggattgctttcatctaattctggcaggacctcaccaaaagatccagcctcatacctacatcagacaaaatatcgccgttgttccttctgtactaaagtattgtgttttgctttggaaacacccactcactttgcaatagccgtgcaagatgaatgcagattacactgatcttatgtgttacaaaattggagaaagtatttaataaaacctgttaatttttatactgacaataaaaatgtttctacagatattaatgttaacaagacaaaataaatgtcacgcaacttattttttt

SEQ ID NO: 134385 - DNA, 4255 bp, Homo sapiens
  Payload ID: 6254
  Gene Symbol: FGFR2
  Gene Name: fibroblast growth factor receptor 2
  Uniprot ID: P21802
  ENST ID: ENST00000358487
  CDS Start-End: 274-2739
cccaaggaccactcttctgcgtttggagttgctccccgcaaccccgggctcgtcgctttctccatcccgacccacgcggggcgcggggacaacacaggtcgcggaggagcgttgccattcaagtgactgcagcagcagcggcagcgcctcggttcctgagcccaccgcaggctgaaggcattgcgcgtagtccatgcccgtagaggaagtgtgcagatgggattaacgtccacatggagatatggaagaggaccggggattggtaccgtaaccatggtcagctggggtcgtttcatctgcctggtcgtggtcaccatggcaaccttgtccctggcccggccctccttcagtttagttgaggataccacattagagccagaagagccaccaaccaaataccaaatctctcaaccagaagtgtacgtggctgcgccaggggagtcgctagaggtgcgctgcctgttgaaagatgccgccgtgatcagttggactaaggatggggtgcacttggggcccaacaataggacagtgcttattggggagtacttgcagataaagggcgccacgcctagagactccggcctctatgcttgtactgccagtaggactgtagacagtgaaacttggtacttcatggtgaatgtcacagatgccatctcatccggagatgatgaggatgacaccgatggtgcggaagattttgtcagtgagaacagtaacaacaagagagcaccatactggaccaacacagaaaagatggaaaagcggctccatgctgtgcctgcggccaacactgtcaagtttcgctgcccagccggggggaacccaatgccaaccatgcggtggctgaaaaacgggaaggagtttaagcaggagcatcgcattggaggctacaaggtacgaaaccagcactggagcctcattatggaaagtgtggtcccatctgacaagggaaattatacctgtgtagtggagaatgaatacgggtccatcaatcacacgtaccacctggatgttgtggagcgatcgcctcaccggcccatcctccaagccggactgccggcaaatgcctccacagtggtcggaggagacgtagagtttgtctgcaaggtttacagtgatgcccagccccacatccagtggatcaagcacgtggaaaagaacggcagtaaatacgggcccgacgggctgccctacctcaaggttctcaaggccgccggtgttaacaccacggacaaagagattgaggttctctatattcggaatgtaacttttgaggacgctggggaatatacgtgcttggcgggtaattctattgggatatcctttcactctgcatggttgacagttctgccagcgcctggaagagaaaaggagattacagcttccccagactacctggagatagccatttactgcataggggtcttcttaatcgcctgtatggtggtaacagtcatcctgtgccgaatgaagaacacgaccaagaagccagacttcagcagccagccggctgtgcacaagctgaccaaacgtatccccctgcggagacaggtaacagtttcggctgagtccagctcctccatgaactccaacaccccgctggtgaggataacaacacgcctctcttcaacggcagacacccccatgctggcaggggtctccgagtatgaacttccagaggacccaaaatgggagtttccaagagataagctgacactgggcaagcccctgggagaaggttgctttgggcaagtggtcatggcggaagcagtgggaattgacaaagacaagcccaaggaggcggtcaccgtggccgtgaagatgttgaaagatgatgccacagagaaagacctttctgatctggtgtcagagatggagatgatgaagatgattgggaaacacaagaatatcataaatcttcttggagcctgcacacaggatgggcctctctatgtcatagttgagtatgcctctaaaggcaacctccgagaatacctccgagcccggaggccacccgggatggagtactcctatgacattaaccgtgttcctgaggagcagatgaccttcaaggacttggtgtcatgcacctaccagctggccagaggcatggagtacttggcttcccaaaaatgtattcatcgagatttagcagccagaaatgttttggtaacagaaaacaatgtgatgaaaatagcagactttggactcgccagagatatcaacaatatagactattacaaaaagaccaccaatgggcggcttccagtcaagtggatggctccagaagccctgtttgatagagtatacactcatcagagtgatgtctggtccttcggggtgttaatgtgggagatcttcactttagggggctcgccctacccagggattcccgtggaggaactttttaagctgctgaaggaaggacacagaatggataagccagccaactgcaccaacgaactgtacatgatgatgagggactgttggcatgcagtgccctcccagagaccaacgttcaagcagttggtagaagacttggatcgaattctcactctcacaaccaatgaggaatacttggacctcagccaacctctcgaacagtattcacctagttaccctgacacaagaagttcttgttcttcaggagatgattctgttttttctccagaccccatgccttacgaaccatgccttcctcagtatccacacataaacggcagtgttaaaacatgaatgactgtgtctgcctgtccccaaacaggacagcactgggaacctagctacactgagcagggagaccatgcctcccagagcttgttgtctccacttgtatatatggatcagaggagtaaataattggaaaagtaatcagcatatgtgtaaagatttatacagttgaaaacttgtaatcttccccaggaggagaagaaggtttctggagcagtggactgccacaagccaccatgtaacccctctcacctgccgtgcgtactggctgtggaccagtaggactcaaggtggacgtgcgttctgccttccttgttaattttgtaataattggagaagatttatgtcagcacacacttacagagcacaaatgcagtatataggtgctggatgtatgtaaatatattcaaattatgtataaatatatattatatatttacaaggagttattttttgtattgattttaaatggatgtcccaatgcacctagaaaattggtctctctttttttaatagctatttgctaaatgctgttcttacacataatttcttaattttcaccgagcagaggtggaaaaatacttttgctttcagggaaaatggtataacgttaatttattaataaattggtaatatacaaaacaattaatcatttatagttttttttgtaatttaagtggcatttctatgcaggcagcacagcagactagttaatctattgcttggacttaactagttatcagatcctttgaaaagagaatatttacaatatatgactaatttggggaaaatgaagttttgatttatttgtgtttaaatgctgctgtcagacgattgttcttagacctcctaaatgccccatattaaaagaactcattcataggaaggtgtttcattttggtgtgcaaccctgtcattacgtcaacgcaacgtctaactggacttcccaagataaatggtaccagcgtcctcttaaaagatgccttaatccattccttgaggacagaccttagttgaaatgatagcagaatgtgcttctctctggcagctggccttctgcttctgagttgcacattaatcagattagcctgtattctcttcagtgaattttgataatggcttccagactctttggcgttggagacgcctgttaggatcttcaagtcccatcatagaaaattgaaacacagagttgttctgctgatagttttggggatacgtccatctttttaagggattgctttcatctaattctggcaggacctcaccaaaagatccagcctcatacctacatcagacaaaatatcgccgttgttccttctgtactaaagtattgtgttttgctttggaaacacccactcactttgcaatagccgtgcaagatgaatgcagattacactgatcttatgtgttacaaaattggagaaagtatttaataaaacctgttaatttttatactgacaataaaaatgtttctacagatattaatgttaacaagacaaaataaatgtcacgcaactta

SEQ ID NO: 134386 - DNA, 1680 bp, Homo sapiens
  Payload ID: 6254
  Gene Symbol: FGFR2
  Gene Name: fibroblast growth factor receptor 2
  Uniprot ID: P21802
  ENST ID: ENST00000359354
  CDS Start-End: 488-1252
ccggccgcgagccccgggggccccgaggccgcagcttgcctgcgcgctctgagccttcgcaactcgcgagcaaagtttggtggaggcaacgccaagcctgagtcctttcttcctctcgttccccaaatccgagggcagcccgcgggcgtcatgcccgcgctcctccgcagcctggggtacgcgtgaagcccgggaggcttggcgccggcgaagacccaaggaccactcttctgcgtttggagttgctccccgcaaccccgggctcgtcgctttctccatcccgacccacgcggggcgcggggacaacacaggtcgcggaggagcgttgccattcaagtgactgcagcagcagcggcagcgcctcggttcctgagcccaccgcaggctgaaggcattgcgcgtagtccatgcccgtagaggaagtgtgcagatgggattaacgtccacatggagatatggaagaggaccggggattggtaccgtaaccatggtcagctggggtcgtttcatctgcctggtcgtggtcaccatggcaaccttgtccctggcccggccctccttcagtttagttgaggataccacattagagccagaagagccaccaaccaaataccaaatctctcaaccagaagtgtacgtggctgcgccaggggagtcgctagaggtgcgctgcctgttgaaagatgccgccgtgatcagttggactaaggatggggtgcacttggggcccaacaataggacagtgcttattggggagtacttgcagataaagggcgccacgcctagagactccggcctctatgcttgtactgccagtaggactgtagacagtgaaacttggtacttcatggtgaatgtcacagatgccatctcatccggagatgatgaggatgacaccgatggtgcggaagattttgtcagtgagaacagtaacaacaagagagcaccatactggaccaacacagaaaagatggaaaagcggctccatgctgtgcctgcggccaacactgtcaagtttcgctgcccagccggggggaacccaatgccaaccatgcggtggctgaaaaacgggaaggagtttaagcaggagcatcgcattggaggctacaaggtacgaaaccagcactggagcctcattatggaaagtgtggtcccatctgacaagggaaattatacctgtgtagtggagaatgaatacgggtccatcaatcacacgtaccacctggatgttgtgggcagccagggtttatgagctttgcatgatcctcatggttcccaagcgtcatctgtgtaaagtggacgtggtatgaaatgtctgacattttggaagctgagattactctgaaaatgttaattgggcaggtgaaaagggtacagatgtgctgtagcagacctttggttttaaaagagaagcatcatttccccaacagggcaactgtagaaggccagctgaagagtaaaggaaaaggtctgaggactgagcctgtggctggctggaaaaaggtgaatgttgagggcccttcacttccatcacaagaaagtcattagacggtaccaattcagtgtctgttcctggcatctatttcctctgtgcaaagggaaccatgtatatgagcttataaatacatttttgtcagagtgcacagataagtaggccattttaattaaacattgaagacc

SEQ ID NO: 134387 - DNA, 3001 bp, Homo sapiens
  Payload ID: 6254
  Gene Symbol: FGFR2
  Gene Name: fibroblast growth factor receptor 2
  Uniprot ID: P21802
  ENST ID: ENST00000360144
  CDS Start-End: 622-2664
gagagccgagcgggcgggcggcgggtgcggagcgggcgagggagcgcgcgcggccgccacaaagctcgggcgccgcggggctgcatgcggcgtacctggcccggcgcggcgactgctctccgggctggcgggggccggccgcgagccccgggggccccgaggccgcagcttgcctgcgcgctctgagccttcgcaactcgcgagcaaagtttggtggaggcaacgccaagcctgagtcctttcttcctctcgttccccaaatccgagggcagcccgcgggcgtcatgcccgcgctcctccgcagcctggggtacgcgtgaagcccgggaggcttggcgccggcgaagacccaaggaccactcttctgcgtttggagttgctccccgcaaccccgggctcgtcgctttctccatcccgacccacgcggggcgcggggacaacacaggtcgcggaggagcgttgccattcaagtgactgcagcagcagcggcagcgcctcggttcctgagcccaccgcaggctgaaggcattgcgcgtagtccatgcccgtagaggaagtgtgcagatgggattaacgtccacatggagatatggaagaggaccggggattggtaccgtaaccatggtcagctggggtcgtttcatctgcctggtcgtggtcaccatggcaaccttgtccctggcccggccctccttcagtttagttgaggataccacattagagccagaagatgccatctcatccggagatgatgaggatgacaccgatggtgcggaagattttgtcagtgagaacagtaacaacaagagagcaccatactggaccaacacagaaaagatggaaaagcggctccatgctgtgcctgcggccaacactgtcaagtttcgctgcccagccggggggaacccaatgccaaccatgcggtggctgaaaaacgggaaggagtttaagcaggagcatcgcattggaggctacaaggtacgaaaccagcactggagcctcattatggaaagtgtggtcccatctgacaagggaaattatacctgtgtagtggagaatgaatacgggtccatcaatcacacgtaccacctggatgttgtggagcgatcgcctcaccggcccatcctccaagccggactgccggcaaatgcctccacagtggtcggaggagacgtagagtttgtctgcaaggtttacagtgatgcccagccccacatccagtggatcaagcacgtggaaaagaacggcagtaaatacgggcccgacgggctgccctacctcaaggttctcaagcactcggggataaatagttccaatgcagaagtgctggctctgttcaatgtgaccgaggcggatgctggggaatatatatgtaaggtctccaattatatagggcaggccaaccagtctgcctggctcactgtcctgccaaaacagcaagcgcctggaagagaaaaggagattacagcttccccagactacctggagatagccatttactgcataggggtcttcttaatcgcctgtatggtggtaacagtcatcctgtgccgaatgaagaacacgaccaagaagccagacttcagcagccagccggctgtgcacaagctgaccaaacgtatccccctgcggagacaggtaacagtttcggctgagtccagctcctccatgaactccaacaccccgctggtgaggataacaacacgcctctcttcaacggcagacacccccatgctggcaggggtctccgagtatgaacttccagaggacccaaaatgggagtttccaagagataagctgacactgggcaagcccctgggagaaggttgctttgggcaagtggtcatggcggaagcagtgggaattgacaaagacaagcccaaggaggcggtcaccgtggccgtgaagatgttgaaagatgatgccacagagaaagacctttctgatctggtgtcagagatggagatgatgaagatgattgggaaacacaagaatatcataaatcttcttggagcctgcacacaggatgggcctctctatgtcatagttgagtatgcctctaaaggcaacctccgagaatacctccgagcccggaggccacccgggatggagtactcctatgacattaaccgtgttcctgaggagcagatgaccttcaaggacttggtgtcatgcacctaccagctggccagaggcatggagtacttggcttcccaaaaatgtattcatcgagatttagcagccagaaatgttttggtaacagaaaacaatgtgatgaaaatagcagactttggactcgccagagatatcaacaatatagactattacaaaaagaccaccaatgggcggcttccagtcaagtggatggctccagaagccctgtttgatagagtatacactcatcagagtgatgtctggtccttcggggtgttaatgtgggagatcttcactttagggggctcgccctacccagggattcccgtggaggaactttttaagctgctgaaggaaggacacagaatggataagccagccaactgcaccaacgaactgtacatgatgatgagggactgttggcatgcagtgccctcccagagaccaacgttcaagcagttggtagaagacttggatcgaattctcactctcacaaccaatgagatctgaaagtttatggcttcattgagaaactgggaaaagttggtcaggcgcagtggctcatgcctgtaatcccagcactttgggaggccgaggcaggcggatcatgaggtcaggagttccagaccagcctggccaacatggtgaaaccctgtctctactaaagatacaaaaaattagccgggcgtgttggtgtgcacctgtaatcccagctactccgggaggctgaggcaggagagtcacttgaaccggggaggcggaggttgcagtgagccgagatcatgccattgcattccagccttggcgacagagcgagactccgtctcaaaaaaaaaaaaaataaaaa

SEQ ID NO: 134388 - DNA, 2650 bp, Homo sapiens
  Payload ID: 6254
  Gene Symbol: FGFR2
  Gene Name: fibroblast growth factor receptor 2
  Uniprot ID: P21802
  ENST ID: ENST00000369056
  CDS Start-End: 25-2334
ggaccggggattggtaccgtaaccatggtcagctggggtcgtttcatctgcctggtcgtggtcaccatggcaaccttgtccctggcccggccctccttcagtttagttgaggataccacattagagccagaagagccaccaaccaaataccaaatctctcaaccagaagtgtacgtggctgcgccaggggagtcgctagaggtgcgctgcctgttgaaagatgccgccgtgatcagttggactaaggatggggtgcacttggggcccaacaataggacagtgcttattggggagtacttgcagataaagggcgccacgcctagagactccggcctctatgcttgtactgccagtaggactgtagacagtgaaacttggtacttcatggtgaatgtcacagatgccatctcatccggagatgatgaggatgacaccgatggtgcggaagattttgtcagtgagaacagtaacaacaagagagcaccatactggaccaacacagaaaagatggaaaagcggctccatgctgtgcctgcggccaacactgtcaagtttcgctgcccagccggggggaacccaatgccaaccatgcggtggctgaaaaacgggaaggagtttaagcaggagcatcgcattggaggctacaaggtacgaaaccagcactggagcctcattatggaaagtgtggtcccatctgacaagggaaattatacctgtgtagtggagaatgaatacgggtccatcaatcacacgtaccacctggatgttgtggagcgatcgcctcaccggcccatcctccaagccggactgccggcaaatgcctccacagtggtcggaggagacgtagagtttgtctgcaaggtttacagtgatgcccagccccacatccagtggatcaagcacgtggaaaagaacggcagtaaatacgggcccgacgggctgccctacctcaaggttctcaagcactcggggataaatagttccaatgcagaagtgctggctctgttcaatgtgaccgaggcggatgctggggaatatatatgtaaggtctccaattatatagggcaggccaaccagtctgcctggctcactgtcctgccaaaacagcaagcgcctggaagagaaaaggagattacagcttccccagactacctggagatagccatttactgcataggggtcttcttaatcgcctgtatggtggtaacagtcatcctgtgccgaatgaagaacacgaccaagaagccagacttcagcagccagccggctgtgcacaagctgaccaaacgtatccccctgcggagacaggtaacagtttcggctgagtccagctcctccatgaactccaacaccccgctggtgaggataacaacacgcctctcttcaacggcagacacccccatgctggcaggggtctccgagtatgaacttccagaggacccaaaatgggagtttccaagagataagctgacactgggcaagcccctgggagaaggttgctttgggcaagtggtcatggcggaagcagtgggaattgacaaagacaagcccaaggaggcggtcaccgtggccgtgaagatgttgaaagatgatgccacagagaaagacctttctgatctggtgtcagagatggagatgatgaagatgattgggaaacacaagaatatcataaatcttcttggagcctgcacacaggatgggcctctctatgtcatagttgagtatgcctctaaaggcaacctccgagaatacctccgagcccggaggccacccgggatggagtactcctatgacattaaccgtgttcctgaggagcagatgaccttcaaggacttggtgtcatgcacctaccagctggccagaggcatggagtacttggcttcccaaaaatgtattcatcgagatttagcagccagaaatgttttggtaacagaaaacaatgtgatgaaaatagcagactttggactcgccagagatatcaacaatatagactattacaaaaagaccaccaatgggcggcttccagtcaagtggatggctccagaagccctgtttgatagagtatacactcatcagagtgatgtctggtccttcggggtgttaatgtgggagatcttcactttagggggctcgccctacccagggattcccgtggaggaactttttaagctgctgaaggaaggacacagaatggataagccagccaactgcaccaacgaactgtacatgatgatgagggactgttggcatgcagtgccctcccagagaccaacgttcaagcagttggtagaagacttggatcgaattctcactctcacaaccaatgagatctgaaagtttatggcttcattgagaaactgggaaaagttggtcaggcgcagtggctcatgcctgtaatcccagcactttgggaggccgaggcaggcggatcatgaggtcaggagttccagaccagcctggccaacatggtgaaaccctgtctctactaaagatacaaaaaattagccgggcgtgttggtgtgcacctgtaatcccagctactccgggaggctgaggcaggagagtcacttgaaccggggaggcggaggttgcagtgagccgagatcatgccattgcattccagccttggcgacagagcgagactccgtct

SEQ ID NO: 134389 - DNA, 2727 bp, Homo sapiens
  Payload ID: 6254
  Gene Symbol: FGFR2
  Gene Name: fibroblast growth factor receptor 2
  Uniprot ID: P21802
  ENST ID: ENST00000369058
  CDS Start-End: 424-2727
cgcgagcaaagtttggtggaggcaacgccaagcctgagtcctttcttcctctcgttccccaaatccgagggcagcccgcgggcgtcatgcccgcgctcctccgcagcctggggtacgcgtgaagcccgggaggcttggcgccggcgaagacccaaggaccactcttctgcgtttggagttgctccccgcaaccccgggctcgtcgctttctccatcccgacccacgcggggcgcggggacaacacaggtcgcggaggagcgttgccattcaagtgactgcagcagcagcggcagcgcctcggttcctgagcccaccgcaggctgaaggcattgcgcgtagtccatgcccgtagaggaagtgtgcagatgggattaacgtccacatggagatatggaagaggaccggggattggtaccgtaaccatggtcagctggggtcgtttcatctgcctggtcgtggtcaccatggcaaccttgtccctggcccggccctccttcagtttagttgaggataccacattagagccagaagagccaccaaccaaataccaaatctctcaaccagaagtgtacgtggctgcgccaggggagtcgctagaggtgcgctgcctgttgaaagatgccgccgtgatcagttggactaaggatggggtgcacttggggcccaacaataggacagtgcttattggggagtacttgcagataaagggcgccacgcctagagactccggcctctatgcttgtactgccagtaggactgtagacagtgaaacttggtacttcatggtgaatgtcacagatgccatctcatccggagatgatgaggatgacaccgatggtgcggaagattttgtcagtgagaacagtaacaacaagagagcaccatactggaccaacacagaaaagatggaaaagcggctccatgctgtgcctgcggccaacactgtcaagtttcgctgcccagccggggggaacccaatgccaaccatgcggtggctgaaaaacgggaaggagtttaagcaggagcatcgcattggaggctacaaggtacgaaaccagcactggagcctcattatggaaagtgtggtcccatctgacaagggaaattatacctgtgtagtggagaatgaatacgggtccatcaatcacacgtaccacctggatgttgtggagcgatcgcctcaccggcccatcctccaagccggactgccggcaaatgcctccacagtggtcggaggagacgtagagtttgtctgcaaggtttacagtgatgcccagccccacatccagtggatcaagcacgtggaaaagaacggcagtaaatacgggcccgacgggctgccctacctcaaggttctcaagcactcggggataaatagttccaatgcagaagtgctggctctgttcaatgtgaccgaggcggatgctggggaatatatatgtaaggtctccaattatatagggcaggccaaccagtctgcctggctcactgtcctgccaaaacagcaagcgcctggaagagaaaaggagattacagcttccccagactacctggagatagccatttactgcataggggtcttcttaatcgcctgtatggtggtaacagtcatcctgtgccgaatgaagaacacgaccaagaagccagacttcagcagccagccggctgtgcacaagctgaccaaacgtatccccctgcggagacaggtaacagtttcggctgagtccagctcctccatgaactccaacaccccgctggtgaggataacaacacgcctctcttcaacggcagacacccccatgctggcaggggtctccgagtatgaacttccagaggacccaaaatgggagtttccaagagataagctgacactgggcaagcccctgggagaaggttgctttgggcaagtggtcatggcggaagcagtgggaattgacaaagacaagcccaaggaggcggtcaccgtggccgtgaagatgttgaaagatgatgccacagagaaagacctttctgatctggtgtcagagatggagatgatgaagatgattgggaaacacaagaatatcataaatcttcttggagcctgcacacaggatgggcctctctatgtcatagttgagtatgcctctaaaggcaacctccgagaatacctccgagcccggaggccacccgggatggagtactcctatgacattaaccgtgttcctgaggagcagatgaccttcaaggacttggtgtcatgcacctaccagctggccagaggcatggagtacttggcttcccaaaaatgtattcatcgagatttagcagccagaaatgttttggtaacagaaaacaatgtgatgaaaatagcagactttggactcgccagagatatcaacaatatagactattacaaaaagaccaccaatgggcggcttccagtcaagtggatggctccagaagccctgtttgatagagtatacactcatcagagtgatgtctggtccttcggggtgttaatgtgggagatcttcactttagggggctcgccctacccagggattcccgtggaggaactttttaagctgctgaaggaaggacacagaatggataagccagccaactgcaccaacgaactgtacatgatgatgagggactgttggcatgcagtgccctcccagagaccaacgttcaagcagttggtagaagacttggatcgaattctcactctcacaaccaatgag

SEQ ID NO: 134390 - DNA, 3003 bp, Homo sapiens
  Payload ID: 6254
  Gene Symbol: FGFR2
  Gene Name: fibroblast growth factor receptor 2
  ENST ID: ENST00000369059
  CDS Start-End: 642-2765
ggctggaggagagcgcggtggagagccgagcgggcgggcggcgggtgcggagcgggcgagggagcgcgcgcggccgccacaaagctcgggcgccgcggggctgcatgcggcgtacctggcccggcgcggcgactgctctccgggctggcgggggccggccgcgagccccgggggccccgaggccgcagcttgcctgcgcgctctgagccttcgcaactcgcgagcaaagtttggtggaggcaacgccaagcctgagtcctttcttcctctcgttccccaaatccgagggcagcccgcgggcgtcatgcccgcgctcctccgcagcctggggtacgcgtgaagcccgggaggcttggcgccggcgaagacccaaggaccactcttctgcgtttggagttgctccccgcaaccccgggctcgtcgctttctccatcccgacccacgcggggcgcggggacaacacaggtcgcggaggagcgttgccattcaagtgactgcagcagcagcggcagcgcctcggttcctgagcccaccgcaggctgaaggcattgcgcgtagtccatgcccgtagaggaagtgtgcagatgggattaacgtccacatggagatatggaagaggaccggggattggtaccgtaaccatggtcagctggggtcgtttcatctgcctggtcgtggtcaccatggcaaccttgtccctggcccggccctccttcagtttagttgaggataccacattagagccagaaggagcaccatactggaccaacacagaaaagatggaaaagcggctccatgctgtgcctgcggccaacactgtcaagtttcgctgcccagccggggggaacccaatgccaaccatgcggtggctgaaaaacgggaaggagtttaagcaggagcatcgcattggaggctacaaggtacgaaaccagcactggagcctcattatggaaagtgtggtcccatctgacaagggaaattatacctgtgtagtggagaatgaatacgggtccatcaatcacacgtaccacctggatgttgtggagcgatcgcctcaccggcccatcctccaagccggactgccggcaaatgcctccacagtggtcggaggagacgtagagtttgtctgcaaggtttacagtgatgcccagccccacatccagtggatcaagcacgtggaaaagaacggcagtaaatacgggcccgacgggctgccctacctcaaggttctcaagcactcggggataaatagttccaatgcagaagtgctggctctgttcaatgtgaccgaggcggatgctggggaatatatatgtaaggtctccaattatatagggcaggccaaccagtctgcctggctcactgtcctgccaaaacagcaagcgcctggaagagaaaaggagattacagcttccccagactacctggagatagccatttactgcataggggtcttcttaatcgcctgtatggtggtaacagtcatcctgtgccgaatgaagaacacgaccaagaagccagacttcagcagccagccggctgtgcacaagctgaccaaacgtatccccctgcggagacaggtaacagtttcggctgagtccagctcctccatgaactccaacaccccgctggtgaggataacaacacgcctctcttcaacggcagacacccccatgctggcaggggtctccgagtatgaacttccagaggacccaaaatgggagtttccaagagataagctgacactgggcaagcccctgggagaaggttgctttgggcaagtggtcatggcggaagcagtgggaattgacaaagacaagcccaaggaggcggtcaccgtggccgtgaagatgttgaaagatgatgccacagagaaagacctttctgatctggtgtcagagatggagatgatgaagatgattgggaaacacaagaatatcataaatcttcttggagcctgcacacaggatgggcctctctatgtcatagttgagtatgcctctaaaggcaacctccgagaatacctccgagcccggaggccacccgggatggagtactcctatgacattaaccgtgttcctgaggagcagatgaccttcaaggacttggtgtcatgcacctaccagctggccagaggcatggagtacttggcttcccaaaaatgtattcatcgagatttagcagccagaaatgttttggtaacagaaaacaatgtgatgaaaatagcagactttggactcgccagagatatcaacaatatagactattacaaaaagaccaccaatgggcggcttccagtcaagtggatggctccagaagccctgtttgatagagtatacactcatcagagtgatgtctggtccttcggggtgttaatgtgggagatcttcactttagggggctcgccctacccagggattcccgtggaggaactttttaagctgctgaaggaaggacacagaatggataagccagccaactgcaccaacgaactgtacatgatgatgagggactgttggcatgcagtgccctcccagagaccaacgttcaagcagttggtagaagacttggatcgaattctcactctcacaaccaatgaggaatacttggacctcagccaacctctcgaacagtattcacctagttaccctgacacaagaagttcttgttcttcaggagatgattctgttttttctccagaccccatgccttacgaaccatgccttcctcagtatccacacataaacggcagtgttaaaacatgaatgactgtgtctgcctgtccccaaacaggacagcactgggaacctagctacactgagcagggagaccatgcctcccagagcttgttgtctccacttgtatatatggatcagaggagtaaataattggaaaagtaatcagcatatgtgtaaagatttatacagttgaaaacttgtaatcttccccaggaggagaagaaggtttctggagcagtggactgccacaagccaccatgtaacc

SEQ ID NO: 134391 - DNA, 3244 bp, Homo sapiens
  Payload ID: 6254
  Gene Symbol: FGFR2
  Gene Name: fibroblast growth factor receptor 2
  Uniprot ID: P21802
  ENST ID: ENST00000369060
  CDS Start-End: 488-2605
ccggccgcgagccccgggggccccgaggccgcagcttgcctgcgcgctctgagccttcgcaactcgcgagcaaagtttggtggaggcaacgccaagcctgagtcctttcttcctctcgttccccaaatccgagggcagcccgcgggcgtcatgcccgcgctcctccgcagcctggggtacgcgtgaagcccgggaggcttggcgccggcgaagacccaaggaccactcttctgcgtttggagttgctccccgcaaccccgggctcgtcgctttctccatcccgacccacgcggggcgcggggacaacacaggtcgcggaggagcgttgccattcaagtgactgcagcagcagcggcagcgcctcggttcctgagcccaccgcaggctgaaggcattgcgcgtagtccatgcccgtagaggaagtgtgcagatgggattaacgtccacatggagatatggaagaggaccggggattggtaccgtaaccatggtcagctggggtcgtttcatctgcctggtcgtggtcaccatggcaaccttgtccctggcccggccctccttcagtttagttgaggataccacattagagccagaagagccaccaaccaaataccaaatctctcaaccagaagtgtacgtggctgcgccaggggagtcgctagaggtgcgctgcctgttgaaagatgccgccgtgatcagttggactaaggatggggtgcacttggggcccaacaataggacagtgcttattggggagtacttgcagataaagggcgccacgcctagagactccggcctctatgcttgtactgccagtaggactgtagacagtgaaacttggtacttcatggtgaatgtcacagatgccatctcatccggagatgatgaggatgacaccgatggtgcggaagattttgtcagtgagaacagtaacaacaagagagcaccatactggaccaacacagaaaagatggaaaagcggctccatgctgtgcctgcggccaacactgtcaagtttcgctgcccagccggggggaacccaatgccaaccatgcggtggctgaaaaacgggaaggagtttaagcaggagcatcgcattggaggctacaaggtacgaaaccagcactggagcctcattatggaaagtgtggtcccatctgacaagggaaattatacctgtgtagtggagaatgaatacgggtccatcaatcacacgtaccacctggatgttgtggagcgatcgcctcaccggcccatcctccaagccggactgccggcaaatgcctccacagtggtcggaggagacgtagagtttgtctgcaaggtttacagtgatgcccagccccacatccagtggatcaagcacgtggaaaagaacggcagtaaatacgggcccgacgggctgccctacctcaaggttctcaaggtttcggctgagtccagctcctccatgaactccaacaccccgctggtgaggataacaacacgcctctcttcaacggcagacacccccatgctggcaggggtctccgagtatgaacttccagaggacccaaaatgggagtttccaagagataagctgacactgggcaagcccctgggagaaggttgctttgggcaagtggtcatggcggaagcagtgggaattgacaaagacaagcccaaggaggcggtcaccgtggccgtgaagatgttgaaagatgatgccacagagaaagacctttctgatctggtgtcagagatggagatgatgaagatgattgggaaacacaagaatatcataaatcttcttggagcctgcacacaggatgggcctctctatgtcatagttgagtatgcctctaaaggcaacctccgagaatacctccgagcccggaggccacccgggatggagtactcctatgacattaaccgtgttcctgaggagcagatgaccttcaaggacttggtgtcatgcacctaccagctggccagaggcatggagtacttggcttcccaaaaatgtattcatcgagatttagcagccagaaatgttttggtaacagaaaacaatgtgatgaaaatagcagactttggactcgccagagatatcaacaatatagactattacaaaaagaccaccaatgggcggcttccagtcaagtggatggctccagaagccctgtttgatagagtatacactcatcagagtgatgtctggtccttcggggtgttaatgtgggagatcttcactttagggggctcgccctacccagggattcccgtggaggaactttttaagctgctgaaggaaggacacagaatggataagccagccaactgcaccaacgaactgtacatgatgatgagggactgttggcatgcagtgccctcccagagaccaacgttcaagcagttggtagaagacttggatcgaattctcactctcacaaccaatgaggaatacttggacctcagccaacctctcgaacagtattcacctagttaccctgacacaagaagttcttgttcttcaggagatgattctgttttttctccagaccccatgccttacgaaccatgccttcctcagtatccacacataaacggcagtgttaaaacatgaatgactgtgtctgcctgtccccaaacaggacagcactgggaacctagctacactgagcagggagaccatgcctcccagagcttgttgtctccacttgtatatatggatcagaggagtaaataattggaaaagtaatcagcatatgtgtaaagatttatacagttgaaaacttgtaatcttccccaggaggagaagaaggtttctggagcagtggactgccacaagccaccatgtaacccctctcacctgccgtgcgtactggctgtggaccagtaggactcaaggtggacgtgcgttctgccttccttgttaattttgtaataattggagaagatttatgtcagcacacacttacagagcacaaatgcagtatataggtgctggatgtatgtaaatatattcaaattatgtataaatatatattatatatttacaaggagttattttttgtattgattttaaatggatgtcccaatgcacctagaaaattggtctctctttttttaatagctatttgctaaatgctgttcttacacataatttcttaattttcaccgagcagaggtggaaaaatacttttgctttcagggaaaatggtataacgttaatttattaataaattggtaatatacaaaacaa

SEQ ID NO: 134392 - DNA, 3803 bp, Homo sapiens
  Payload ID: 6254
  Gene Symbol: FGFR2
  Gene Name: fibroblast growth factor receptor 2
  Uniprot ID: P21802
  ENST ID: ENST00000369061
  CDS Start-End: 151-2280
tgactgcagcagcagcggcagcgcctcggttcctgagcccaccgcaggctgaaggcattgcgcgtagtccatgcccgtagaggaagtgtgcagatgggattaacgtccacatggagatatggaagaggaccggggattggtaccgtaaccatggtcagctggggtcgtttcatctgcctggtcgtggtcaccatggcaaccttgtccctggcccggccctccttcagtttagttgaggataccacattagagccagaagagccaccaaccaaataccaaatctctcaaccagaagtgtacgtggctgcgccaggggagtcgctagaggtgcgctgcctgttgaaagatgccgccgtgatcagttggactaaggatggggtgcacttggggcccaacaataggacagtgcttattggggagtacttgcagataaagggcgccacgcctagagactccggcctctatgcttgtactgccagtaggactgtagacagtgaaacttggtacttcatggtgaatgtcacagatgccatctcatccggagatgatgaggatgacaccgatggtgcggaagattttgtcagtgagaacagtaacaacaagagagcaccatactggaccaacacagaaaagatggaaaagcggctccatgctgtgcctgcggccaacactgtcaagtttcgctgcccagccggggggaacccaatgccaaccatgcggtggctgaaaaacgggaaggagtttaagcaggagcatcgcattggaggctacaaggtacgaaaccagcactggagcctcattatggaaagtgtggtcccatctgacaagggaaattatacctgtgtagtggagaatgaatacgggtccatcaatcacacgtaccacctggatgttgtggcgcctggaagagaaaaggagattacagcttccccagactacctggagatagccatttactgcataggggtcttcttaatcgcctgtatggtggtaacagtcatcctgtgccgaatgaagaacacgaccaagaagccagacttcagcagccagccggctgtgcacaagctgaccaaacgtatccccctgcggagacaggtaacagtttcggctgagtccagctcctccatgaactccaacaccccgctggtgaggataacaacacgcctctcttcaacggcagacacccccatgctggcaggggtctccgagtatgaacttccagaggacccaaaatgggagtttccaagagataagctgacactgggcaagcccctgggagaaggttgctttgggcaagtggtcatggcggaagcagtgggaattgacaaagacaagcccaaggaggcggtcaccgtggccgtgaagatgttgaaagatgatgccacagagaaagacctttctgatctggtgtcagagatggagatgatgaagatgattgggaaacacaagaatatcataaatcttcttggagcctgcacacaggatgggcctctctatgtcatagttgagtatgcctctaaaggcaacctccgagaatacctccgagcccggaggccacccgggatggagtactcctatgacattaaccgtgttcctgaggagcagatgaccttcaaggacttggtgtcatgcacctaccagctggccagaggcatggagtacttggcttcccaaaaatgtattcatcgagatttagcagccagaaatgttttggtaacagaaaacaatgtgatgaaaatagcagactttggactcgccagagatatcaacaatatagactattacaaaaagaccaccaatgggcggcttccagtcaagtggatggctccagaagccctgtttgatagagtatacactcatcagagtgatgtctggtccttcggggtgttaatgtgggagatcttcactttagggggctcgccctacccagggattcccgtggaggaactttttaagctgctgaaggaaggacacagaatggataagccagccaactgcaccaacgaactgtacatgatgatgagggactgttggcatgcagtgccctcccagagaccaacgttcaagcagttggtagaagacttggatcgaattctcactctcacaaccaatgaggaatacttggacctcagccaacctctcgaacagtattcacctagttaccctgacacaagaagttcttgttcttcaggagatgattctgttttttctccagaccccatgccttacgaaccatgccttcctcagtatccacacataaacggcagtgttaaaacatgaatgactgtgtctgcctgtccccaaacaggacagcactgggaacctagctacactgagcagggagaccatgcctcccagagcttgttgtctccacttgtatatatggatcagaggagtaaataattggaaaagtaatcagcatatgtgtaaagatttatacagttgaaaacttgtaatcttccccaggaggagaagaaggtttctggagcagtggactgccacaagccaccatgtaacccctctcacctgccgtgcgtactggctgtggaccagtaggactcaaggtggacgtgcgttctgccttccttgttaattttgtaataattggagaagatttatgtcagcacacacttacagagcacaaatgcagtatataggtgctggatgtatgtaaatatattcaaattatgtataaatatatattatatatttacaaggagttattttttgtattgattttaaatggatgtcccaatgcacctagaaaattggtctctctttttttaatagctatttgctaaatgctgttcttacacataatttcttaattttcaccgagcagaggtggaaaaatacttttgctttcagggaaaatggtataacgttaatttattaataaattggtaatatacaaaacaattaatcatttatagttttttttgtaatttaagtggcatttctatgcaggcagcacagcagactagttaatctattgcttggacttaactagttatcagatcctttgaaaagagaatatttacaatatatgactaatttggggaaaatgaagttttgatttatttgtgtttaaatgctgctgtcagacgattgttcttagacctcctaaatgccccatattaaaagaactcattcataggaaggtgtttcattttggtgtgcaaccctgtcattacgtcaacgcaacgtctaactggacttcccaagataaatggtaccagcgtcctcttaaaagatgccttaatccattccttgaggacagaccttagttgaaatgatagcagaatgtgcttctctctggcagctggccttctgcttctgagttgcacattaatcagattagcctgtattctcttcagtgaattttgataatggcttccagactctttggcgttggagacgcctgttaggatcttcaagtcccatcatagaaaattgaaacacagagttgttctgctgatagttttggggatacgtccatctttttaagggattgctttcatctaattctggcaggacctcaccaaaagatccagcctcatacctacatcagacaaaatatcgccgttgttccttctgtactaaagtattgtgttttgctttggaaacacccactcactttgcaatagccgtgcaagatgaatgcagattacactgatcttatgtgttacaaaattggagaaagtatttaataaaacctgttaatttttatactgacaataaaaatgtttctacagatattaatgttaacaagacaaaataaatgtcacgcaacttattttttt

SEQ ID NO: 134393 - DNA, 1138 bp, Homo sapiens
  Payload ID: 6254
  Gene Symbol: FGFR2
  Gene Name: fibroblast growth factor receptor 2
  ENST ID: ENST00000429361
  CDS Start-End: 1-1116
ttcagcagccagccggctgtgcacaagctgaccaaacgtatccccctgcggagacaggtaacagtttcggctgagtccagctcctccatgaactccaacaccccgctggtgaggataacaacacgcctctcttcaacggcagacacccccatgctggcaggggtctccgagtatgaacttccagaggacccaaaatgggagtttccaagagataagctgacactgggcaagcccctgggagaaggttgctttgggcaagtggtcatggcggaagcagtgggaattgacaaagacaagcccaaggaggcggtcaccgtggccgtgaagatgttgaaagatgatgccacagagaaagacctttctgatctggtgtcagagatggagatgatgaagatgattgggaaacacaagaatatcataaatcttcttggagcctgcacacaggatgggcctctctatgtcatagttgagtatgcctctaaaggcaacctccgagaatacctccgagcccggaggccacccgggatggagtactcctatgacattaaccgtgttcctgaggagcagatgaccttcaaggacttggtgtcatgcacctaccagctggccagaggcatggagtacttggcttcccaaaaatgtattcatcgagatttagcagccagaaatgttttggtaacagaaaacaatgtgatgaaaatagcagactttggactcgccagagatatcaacaatatagactattacaaaaagaccaccaatgggcggcttccagtcaagtggatggctccagaagccctgtttgatagagtatacactcatcagagtgatgtctggtccttcggggtgttaatgtgggagatcttcactttagggggctcgccctacccagggattcccgtggaggaactttttaagctgctgaaggaaggacacagaatggataagccagccaactgcaccaacgaactgaatacttggacctcagccaacctctcgaacagtattcacctagttaccctgacacaagaagttcttgttcttcaggagatgattctgttttttctccagaccccatgccttacgaaccatgccttcctcagtatccacacataaacggcagtgttaaaacatgaat

SEQ ID NO: 134394 - DNA, 3061 bp, Homo sapiens
  Payload ID: 6254
  Gene Symbol: FGFR2
  Gene Name: fibroblast growth factor receptor 2
  Uniprot ID: P21802
  ENST ID: ENST00000457416
  CDS Start-End: 593-3061
gagcgggcgagggagcgcgcgcggccgccacaaagctcgggcgccgcggggctgcatgcggcgtacctggcccggcgcggcgactgctctccgggctggcgggggccggccgcgagccccgggggccccgaggccgcagcttgcctgcgcgctctgagccttcgcaactcgcgagcaaagtttggtggaggcaacgccaagcctgagtcctttcttcctctcgttccccaaatccgagggcagcccgcgggcgtcatgcccgcgctcctccgcagcctggggtacgcgtgaagcccgggaggcttggcgccggcgaagacccaaggaccactcttctgcgtttggagttgctccccgcaaccccgggctcgtcgctttctccatcccgacccacgcggggcgcggggacaacacaggtcgcggaggagcgttgccattcaagtgactgcagcagcagcggcagcgcctcggttcctgagcccaccgcaggctgaaggcattgcgcgtagtccatgcccgtagaggaagtgtgcagatgggattaacgtccacatggagatatggaagaggaccggggattggtaccgtaaccatggtcagctggggtcgtttcatctgcctggtcgtggtcaccatggcaaccttgtccctggcccggccctccttcagtttagttgaggataccacattagagccagaagagccaccaaccaaataccaaatctctcaaccagaagtgtacgtggctgcgccaggggagtcgctagaggtgcgctgcctgttgaaagatgccgccgtgatcagttggactaaggatggggtgcacttggggcccaacaataggacagtgcttattggggagtacttgcagataaagggcgccacgcctagagactccggcctctatgcttgtactgccagtaggactgtagacagtgaaacttggtacttcatggtgaatgtcacagatgccatctcatccggagatgatgaggatgacaccgatggtgcggaagattttgtcagtgagaacagtaacaacaagagagcaccatactggaccaacacagaaaagatggaaaagcggctccatgctgtgcctgcggccaacactgtcaagtttcgctgcccagccggggggaacccaatgccaaccatgcggtggctgaaaaacgggaaggagtttaagcaggagcatcgcattggaggctacaaggtacgaaaccagcactggagcctcattatggaaagtgtggtcccatctgacaagggaaattatacctgtgtagtggagaatgaatacgggtccatcaatcacacgtaccacctggatgttgtggagcgatcgcctcaccggcccatcctccaagccggactgccggcaaatgcctccacagtggtcggaggagacgtagagtttgtctgcaaggtttacagtgatgcccagccccacatccagtggatcaagcacgtggaaaagaacggcagtaaatacgggcccgacgggctgccctacctcaaggttctcaagcactcggggataaatagttccaatgcagaagtgctggctctgttcaatgtgaccgaggcggatgctggggaatatatatgtaaggtctccaattatatagggcaggccaaccagtctgcctggctcactgtcctgccaaaacagcaagcgcctggaagagaaaaggagattacagcttccccagactacctggagatagccatttactgcataggggtcttcttaatcgcctgtatggtggtaacagtcatcctgtgccgaatgaagaacacgaccaagaagccagacttcagcagccagccggctgtgcacaagctgaccaaacgtatccccctgcggagacaggtaacagtttcggctgagtccagctcctccatgaactccaacaccccgctggtgaggataacaacacgcctctcttcaacggcagacacccccatgctggcaggggtctccgagtatgaacttccagaggacccaaaatgggagtttccaagagataagctgacactgggcaagcccctgggagaaggttgctttgggcaagtggtcatggcggaagcagtgggaattgacaaagacaagcccaaggaggcggtcaccgtggccgtgaagatgttgaaagatgatgccacagagaaagacctttctgatctggtgtcagagatggagatgatgaagatgattgggaaacacaagaatatcataaatcttcttggagcctgcacacaggatgggcctctctatgtcatagttgagtatgcctctaaaggcaacctccgagaatacctccgagcccggaggccacccgggatggagtactcctatgacattaaccgtgttcctgaggagcagatgaccttcaaggacttggtgtcatgcacctaccagctggccagaggcatggagtacttggcttcccaaaaatgtattcatcgagatttagcagccagaaatgttttggtaacagaaaacaatgtgatgaaaatagcagactttggactcgccagagatatcaacaatatagactattacaaaaagaccaccaatgggcggcttccagtcaagtggatggctccagaagccctgtttgatagagtatacactcatcagagtgatgtctggtccttcggggtgttaatgtgggagatcttcactttagggggctcgccctacccagggattcccgtggaggaactttttaagctgctgaaggaaggacacagaatggataagccagccaactgcaccaacgaactgtacatgatgatgagggactgttggcatgcagtgccctcccagagaccaacgttcaagcagttggtagaagacttggatcgaattctcactctcacaaccaatgaggaatacttggacctcagccaacctctcgaacagtattcacctagttaccctgacacaagaagttcttgttcttcaggagatgattctgttttttctccagaccccatgccttacgaaccatgccttcctcagtatccacacataaacggcagtgttaaaacatga

SEQ ID NO: 134395 - DNA, 3990 bp, Homo sapiens
  Payload ID: 6254
  Gene Symbol: FGFR2
  Gene Name: fibroblast growth factor receptor 2
  ENST ID: ENST00000478859
  CDS Start-End: 716-2497
acagactctcccgcagaactgaccccagcaagaagcctttgggagcagtagagatggagtttcactatgttgcccaggctagccttgaactcctgacctcagatgatctgcccgcgcaggcctcccgaagtgctgggattacaggcatgagccaccgcacctggcctgccaactcttgttaagatctcgaaggaaacattttcttcccctgaaggaaacccagctatgcagacaccagctgataatcttgcattcctgaaagatgttgcacccctatggcaagtggcggctgctgaggctctgacgtgactcccaggcatgaacgctctcagctgtgtttacctcagctcctcgggagggagcctgggagactgacgcctgagttttacatcagtgtcaaaacccaagcacaacctagggagggacctcctgcctagtgtgtgtgggtcaggagatagaaaagctctcactgagtaaactggacaaggtcaatatacctcgctgattgagaagacttcactctctctgcaaagagacgtgtgtgttttagaggaagtgggagccccagccgattctgcaagacttccgagagtcagatatccagacagaagatgcggacacctgggtgaccagacagcgaagaggaaagaacaaaacgagcatgtgccaagcctgtgagggagaaagggcaacaaaccagtgaccttccacagaaatgtgtttaaacaaaacaaaacagctctttggcgttgctaagagactgccattttggaggaaagagcgatcgcctcaccggcccatcctccaagccggactgccggcaaatgcctccacagtggtcggaggagacgtagagtttgtctgcaaggtttacagtgatgcccagccccacatccagtggatcaagcacgtggaaaagaacggcagtaaatacgggcccgacgggctgccctacctcaaggttctcaaggccgccggtgttaacaccacggacaaagagattgaggttctctatattcggaatgtaacttttgaggacgctggggaatatacgtgcttggcgggtaattctattgggatatcctttcactctgcatggttgacagttctgccagcgcctggaagagaaaaggagattacagcttccccagactacctggagatagccatttactgcataggggtcttcttaatcgcctgtatggtggtaacagtcatcctgtgccgaatgaagaacacgaccaagaagccagacttcagcagccagccggctgtgcacaagctgaccaaacgtatccccctgcggagacaggtaacagtttcggctgagtccagctcctccatgaactccaacaccccgctggtgaggataacaacacgcctctcttcaacggcagacacccccatgctggcaggggtctccgagtatgaacttccagaggacccaaaatgggagtttccaagagataagctgacactgggcaagcccctgggagaaggttgctttgggcaagtggtcatggcggaagcagtgggaattgacaaagacaagcccaaggaggcggtcaccgtggccgtgaagatgttgaaagatgatgccacagagaaagacctttctgatctggtgtcagagatggagatgatgaagatgattgggaaacacaagaatatcataaatcttcttggagcctgcacacaggatgggcctctctatgtcatagttgagtatgcctctaaaggcaacctccgagaatacctccgagcccggaggccacccgggatggagtactcctatgacattaaccgtgttcctgaggagcagatgaccttcaaggacttggtgtcatgcacctaccagctggccagaggcatggagtacttggcttcccaaaaatgtattcatcgagatttagcagccagaaatgttttggtaacagaaaacaatgtgatgaaaatagcagactttggactcgccagagatatcaacaatatagactattacaaaaagaccaccaatgggcggcttccagtcaagtggatggctccagaagccctgtttgatagagtatacactcatcagagtgatgtctggtccttcggggtgttaatgtgggagatcttcactttagggggctcgccctacccagggattcccgtggaggaactttttaagctgctgaaggaaggacacagaatggataagccagccaactgcaccaacgaactgtacatgatgatgagggactgttggcatgcagtgccctcccagagaccaacgttcaagcagttggtagaagacttggatcgaattctcactctcacaaccaatgaggaatacttggacctcagccaacctctcgaacagtattcacctagttaccctgacacaagaagttcttgttcttcaggagatgattctgttttttctccagaccccatgccttacgaaccatgccttcctcagtatccacacataaacggcagtgttaaaacatgaatgactgtgtctgcctgtccccaaacaggacagcactgggaacctagctacactgagcagggagaccatgcctcccagagcttgttgtctccacttgtatatatggatcagaggagtaaataattggaaaagtaatcagcatatgtgtaaagatttatacagttgaaaacttgtaatcttccccaggaggagaagaaggtttctggagcagtggactgccacaagccaccatgtaacccctctcacctgccgtgcgtactggctgtggaccagtaggactcaaggtggacgtgcgttctgccttccttgttaattttgtaataattggagaagatttatgtcagcacacacttacagagcacaaatgcagtatataggtgctggatgtatgtaaatatattcaaattatgtataaatatatattatatatttacaaggagttattttttgtattgattttaaatggatgtcccaatgcacctagaaaattggtctctctttttttaatagctatttgctaaatgctgttcttacacataatttcttaattttcaccgagcagaggtggaaaaatacttttgctttcagggaaaatggtataacgttaatttattaataaattggtaatatacaaaacaattaatcatttatagttttttttgtaatttaagtggcatttctatgcaggcagcacagcagactagttaatctattgcttggacttaactagttatcagatcctttgaaaagagaatatttacaatatatgactaatttggggaaaatgaagttttgatttatttgtgtttaaatgctgctgtcagacgattgttcttagacctcctaaatgccccatattaaaagaactcattcataggaaggtgtttcattttggtgtgcaaccctgtcattacgtcaacgcaacgtctaactggacttcccaagataaatggtaccagcgtcctcttaaaagatgccttaatccattccttgaggacagaccttagttgaaatgatagcagaatgtgcttctctctggcagctggccttctgcttctgagttgcacattaatcagattagcctgtattctcttcagtgaattttgataatggcttccagactctttggcgttggagacgcctgttaggatcttcaagtcccatcatagaaaattgaaacacagagttgttctgctgatagttttggggatacgtccatctttttaagggattgctttcatctaattctggcaggacctcaccaaaagatccagcctcatacctacatcagacaaaatatcgccgttgttccttctgtactaaagtattgtgttttgctttggaaacacccactcactttgcaatagccgtgcaagatgaatgcagattacactgatcttatgtgttacaaaattggagaaagtatttaataaaacctgttaatttttatactgacaataaaaatgtttctacagatattaatgttaacaaga

SEQ ID NO: 134396 - DNA, 3501 bp, Homo sapiens
  Payload ID: 6254
  Gene Symbol: FGFR2
  Gene Name: fibroblast growth factor receptor 2
  ENST ID: ENST00000604236
  CDS Start-End: 603-1358
ggcgggtgcggagcgggcgagggagcgcgcgcggccgccacaaagctcgggcgccgcggggctgcatgcggcgtacctggcccggcgcggcgactgctctccgggctggcgggggccggccgcgagccccgggggccccgaggccgcagcttgcctgcgcgctctgagccttcgcaactcgcgagcaaagtttggtggaggcaacgccaagcctgagtcctttcttcctctcgttccccaaatccgagggcagcccgcgggcgtcatgcccgcgctcctccgcagcctggggtacgcgtgaagcccgggaggcttggcgccggcgaagacccaaggaccactcttctgcgtttggagttgctccccgcaaccccgggctcgtcgctttctccatcccgacccacgcggggcgcggggacaacacaggtcgcggaggagcgttgccattcaagtgactgcagcagcagcggcagcgcctcggttcctgagcccaccgcaggctgaaggcattgcgcgtagtccatgcccgtagaggaagtgtgcagatgggattaacgtccacatggagatatggaagaggaccggggattggtaccgtaaccatggtcagctggggtcgtttcatctgcctggtcgtggtcaccatggcaaccttgtccctggcccggccctccttcagtttagttgaggataccacattagagccagaaggagcaccatactggaccaacacagaaaagatggaaaagcggctccatgctgtgcctgcggccaacactgtcaagtttcgctgcccagccggggggaacccaatgccaaccatgcggtggctgaaaaacgggaaggagtttaagcaggagcatcgcattggaggctacaaggtacgaaaccagcactggagcctcattatggaaagtgtggtcccatctgacaagggaaattatacctgtgtagtggagaatgaatacgggtccatcaatcacacgtaccacctggatgttgtggagcgatcgcctcaccggcccatcctccaagccggactgccggcaaatgcctccacagtggtcggaggagacgtagagtttgtctgcaaggtttacagtgatgcccagccccacatccagtggatcaagcacgtggaaaagaacggcagtaaatacgggcccgacgggctgccctacctcaaggttctcaagcactcggggataaatagttccaatgcagaagtgctggctctgttcaatgtgaccgaggcggatgctggggaatatatatgtaaggtctccaattatatagggcaggccaaccagtctgcctggctcactgtcctgccaaaacagcaaggccgccggtgttaacaccacggacaaagagattgaggttctctatattcggaatgtaacttttgaggacgctggggaatatacgtgcttggcgggtaattctattgggatatcctttcactctgcatggttgacagttctgccagcgcctggaagagaaaaggagattacagcttccccagactacctggagatagccatttactgcataggggtcttcttaatcgcctgtatggtggtaacagtcatcctgtgccgaatgaagaacacgaccaagaagccagacttcagcagccagccggctgtgcacaagctgaccaaacgtatccccctgcggagacaggtaacagtttcggctgagtccagctcctccatgaactccaacaccccgctggtgaggataacaacacgcctctcttcaacggcagacacccccatgctggcaggggtctccgagtatgaacttccagaggacccaaaatgggagtttccaagagataagctgacactgggcaagcccctgggagaaggttgctttgggcaagtggtcatggcggaagcagtgggaattgacaaagacaagcccaaggaggcggtcaccgtggccgtgaagatgttgaaagatgatgccacagagaaagacctttctgatctggtgtcagagatggagatgatgaagatgattgggaaacacaagaatatcataaatcttcttggagcctgcacacaggatgggcctctctatgtcatagttgagtatgcctctaaaggcaacctccgagaatacctccgagcccggaggccacccgggatggagtactcctatgacattaaccgtgttcctgaggagcagatgaccttcaaggacttggtgtcatgcacctaccagctggccagaggcatggagtacttggcttcccaaaaatgtattcatcgagatttagcagccagaaatgttttggtaacagaaaacaatgtgatgaaaatagcagactttggactcgccagagatatcaacaatatagactattacaaaaagaccaccaatgggcggcttccagtcaagtggatggctccagaagccctgtttgatagagtatacactcatcagagtgatgtctggtccttcggggtgttaatgtgggagatcttcactttagggggctcgccctacccagggattcccgtggaggaactttttaagctgctgaaggaaggacacagaatggataagccagccaactgcaccaacgaactgtacatgatgatgagggactgttggcatgcagtgccctcccagagaccaacgttcaagcagttggtagaagacttggatcgaattctcactctcacaaccaatgaggaatacttggacctcagccaacctctcgaacagtattcacctagttaccctgacacaagaagttcttgttcttcaggagatgattctgttttttctccagaccccatgccttacgaaccatgccttcctcagtatccacacataaacggcagtgttaaaacatgaatgactgtgtctgcctgtccccaaacaggacagcactgggaacctagctacactgagcagggagaccatgcctcccagagcttgttgtctccacttgtatatatggatcagaggagtaaataattggaaaagtaatcagcatatgtgtaaagatttatacagttgaaaacttgtaatcttccccaggaggagaagaaggtttctggagcagtggactgccacaagccaccatgtaacccctctcacctgccgtgcgtactggctgtggaccagtaggactcaaggtggacgtgcgttctgccttccttgttaattttgtaataattggagaagatttatgtcagcacacacttacagagcacaaatgcagtatataggtgctggatgtatgtaaatatattcaaattatgtataaatatatattatatatttacaaggagttattttttgtattgattttaaatggatgtcccaatgcacctagaaaattggtctctctttttttaatagctatttgctaaatgctgttcttacacataatttcttaattttcaccgagcagaggtggaaaaatacttttgctttcagggaaaatggtataacgttaatttattaataaattggtaatat

SEQ ID NO: 134397 - DNA, 579 bp, Homo sapiens
  Payload ID: 6254
  Gene Symbol: FGFR2
  Gene Name: fibroblast growth factor receptor 2
  ENST ID: ENST00000613324
  CDS Start-End: 1-409
gtccctggcccggccctccttcagtttagttgaggataccacattagagccagaagagccaccaaccaaataccaaatctctcaaccagaagtgtacgtggctgcgccaggggagtcgctagaggtgcgctgcctgttgaaagatgccgccgtgatcagttggactaaggatggggtgcacttggggcccaacaataggacagtgcttattggggagtacttgcagataaagggcgccacgcctagagactccggcctctatgcttgtactgccagtaggactgtagacagtgaaacttggtacttcatggtgaatgtcacagatgccatctcatccggagatgatgaggatgacaccgatggtgcggaagattttgtcagtgagaacagtaacaacaagagtaagtaactgcccggctccgatggtccccgagagaggagcatggagggaagttctgcctgtcacctgtcttcttgtcgactcttctgcgccatgctgtgtcccgcggcccttgcctttccccgctgtgtctactttcctgactttcaaacctgagaataaaccagtgttgctgcaca

SEQ ID NO: 134398 - DNA, 4369 bp, Homo sapiens
  Payload ID: 6254
  Gene Symbol: FGFR2
  Gene Name: fibroblast growth factor receptor 2
  ENST ID: ENST00000613048
  CDS Start-End: 648-2846
ggcggcggctggaggagagcgcggtggagagccgagcgggcgggcggcgggtgcggagcgggcgagggagcgcgcgcggccgccacaaagctcgggcgccgcggggctgcatgcggcgtacctggcccggcgcggcgactgctctccgggctggcgggggccggccgcgagccccgggggccccgaggccgcagcttgcctgcgcgctctgagccttcgcaactcgcgagcaaagtttggtggaggcaacgccaagcctgagtcctttcttcctctcgttccccaaatccgagggcagcccgcgggcgtcatgcccgcgctcctccgcagcctggggtacgcgtgaagcccgggaggcttggcgccggcgaagacccaaggaccactcttctgcgtttggagttgctccccgcaaccccgggctcgtcgctttctccatcccgacccacgcggggcgcggggacaacacaggtcgcggaggagcgttgccattcaagtgactgcagcagcagcggcagcgcctcggttcctgagcccaccgcaggctgaaggcattgcgcgtagtccatgcccgtagaggaagtgtgcagatgggattaacgtccacatggagatatggaagaggaccggggattggtaccgtaaccatggtcagctggggtcgtttcatctgcctggtcgtggtcaccatggcaaccttgtccctggcccggccctccttcagtttagttgaggataccacattagagccagaagatgccatctcatccggagatgatgaggatgacaccgatggtgcggaagattttgtcagtgagaacagtaacaacaagagagcaccatactggaccaacacagaaaagatggaaaagcggctccatgctgtgcctgcggccaacactgtcaagtttcgctgcccagccggggggaacccaatgccaaccatgcggtggctgaaaaacgggaaggagtttaagcaggagcatcgcattggaggctacaaggtacgaaaccagcactggagcctcattatggaaagtgtggtcccatctgacaagggaaattatacctgtgtagtggagaatgaatacgggtccatcaatcacacgtaccacctggatgttgtggagcgatcgcctcaccggcccatcctccaagccggactgccggcaaatgcctccacagtggtcggaggagacgtagagtttgtctgcaaggtttacagtgatgcccagccccacatccagtggatcaagcacgtggaaaagaacggcagtaaatacgggcccgacgggctgccctacctcaaggttctcaaggccgccggtgttaacaccacggacaaagagattgaggttctctatattcggaatgtaacttttgaggacgctggggaatatacgtgcttggcgggtaattctattgggatatcctttcactctgcatggttgacagttctgccagcgcctggaagagaaaaggagattacagcttccccagactacctggagatagccatttactgcataggggtcttcttaatcgcctgtatggtggtaacagtcatcctgtgccgaatgaagaacacgaccaagaagccagacttcagcagccagccggctgtgcacaagctgaccaaacgtatccccctgcggagacaggtaacagtttcggctgagtccagctcctccatgaactccaacaccccgctggtgaggataacaacacgcctctcttcaacggcagacacccccatgctggcaggggtctccgagtatgaacttccagaggacccaaaatgggagtttccaagagataagctgacactgggcaagcccctgggagaaggttgctttgggcaagtggtcatggcggaagcagtgggaattgacaaagacaagcccaaggaggcggtcaccgtggccgtgaagatgttgaaagatgatgccacagagaaagacctttctgatctggtgtcagagatggagatgatgaagatgattgggaaacacaagaatatcataaatcttcttggagcctgcacacaggatgggcctctctatgtcatagttgagtatgcctctaaaggcaacctccgagaatacctccgagcccggaggccacccgggatggagtactcctatgacattaaccgtgttcctgaggagcagatgaccttcaaggacttggtgtcatgcacctaccagctggccagaggcatggagtacttggcttcccaaaaatgtattcatcgagatttagcagccagaaatgttttggtaacagaaaacaatgtgatgaaaatagcagactttggactcgccagagatatcaacaatatagactattacaaaaagaccaccaatgggcggcttccagtcaagtggatggctccagaagccctgtttgatagagtatacactcatcagagtgatgtctggtccttcggggtgttaatgtgggagatcttcactttagggggctcgccctacccagggattcccgtggaggaactttttaagctgctgaaggaaggacacagaatggataagccagccaactgcaccaacgaactgtacatgatgatgagggactgttggcatgcagtgccctcccagagaccaacgttcaagcagttggtagaagacttggatcgaattctcactctcacaaccaatgaggaatacttggacctcagccaacctctcgaacagtattcacctagttaccctgacacaagaagttcttgttcttcaggagatgattctgttttttctccagaccccatgccttacgaaccatgccttcctcagtatccacacataaacggcagtgttaaaacatgaatgactgtgtctgcctgtccccaaacaggacagcactgggaacctagctacactgagcagggagaccatgcctcccagagcttgttgtctccacttgtatatatggatcagaggagtaaataattggaaaagtaatcagcatatgtgtaaagatttatacagttgaaaacttgtaatcttccccaggaggagaagaaggtttctggagcagtggactgccacaagccaccatgtaacccctctcacctgccgtgcgtactggctgtggaccagtaggactcaaggtggacgtgcgttctgccttccttgttaattttgtaataattggagaagatttatgtcagcacacacttacagagcacaaatgcagtatataggtgctggatgtatgtaaatatattcaaattatgtataaatatatattatatatttacaaggagttattttttgtattgattttaaatggatgtcccaatgcacctagaaaattggtctctctttttttaatagctatttgctaaatgctgttcttacacataatttcttaattttcaccgagcagaggtggaaaaatacttttgctttcagggaaaatggtataacgttaatttattaataaattggtaatatacaaaacaattaatcatttatagttttttttgtaatttaagtggcatttctatgcaggcagcacagcagactagttaatctattgcttggacttaactagttatcagatcctttgaaaagagaatatttacaatatatgactaatttggggaaaatgaagttttgatttatttgtgtttaaatgctgctgtcagacgattgttcttagacctcctaaatgccccatattaaaagaactcattcataggaaggtgtttcattttggtgtgcaaccctgtcattacgtcaacgcaacgtctaactggacttcccaagataaatggtaccagcgtcctcttaaaagatgccttaatccattccttgaggacagaccttagttgaaatgatagcagaatgtgcttctctctggcagctggccttctgcttctgagttgcacattaatcagattagcctgtattctcttcagtgaattttgataatggcttccagactctttggcgttggagacgcctgttaggatcttcaagtcccatcatagaaaattgaaacacagagttgttctgctgatagttttggggatacgtccatctttttaagggattgctttcatctaattctggcaggacctcaccaaaagatccagcctcatacctacatcagacaaaatatcgccgttgttccttctgtactaaagtattgtgttttgctttggaaacacccactcactttgcaatagccgtgcaagatgaatgcagattacactgatcttatgtgttacaaaattggagaaagtatttaataaaacctgttaatttttatactgacaataaaaatgtttctacagatattaatgttaacaagacaaaataaatgtcacgcaacttattttttt

SEQ ID NO: 134399 - DNA, 435 bp, Homo sapiens
  Payload ID: 6254
  Gene Symbol: FGFR2
  Gene Name: fibroblast growth factor receptor 2
  ENST ID: ENST00000611527
  CDS Start-End: 71-265
aggaagtgtgcagatgggattaacgtccacatggagatatggaagaggaccggggattggtaccgtaaccatggtcagctggggtcgtttcatctgcctggtcgtggtcaccatggcaaccttgtccctggcccggccctccttcagtttagttgaggataccacattagagccagaagatgccatctcatccggagatgatgaggatgacaccgatggtgcggaagattttgtcagtgagaacagtaacaacaagagtaagtaactgcccggctccgatggtccccgagagaggagcatggagggaagttctgcctgtcacctgtcttcttgtcgactcttctgcgccatgctgtgtcccgcggcccttgcctttccccgctgtgtctactttcctgactttcaaacctgagaataaaccagtgttgctgcaca

SEQ ID NO: 134400 - DNA, 3733 bp, Homo sapiens
  Payload ID: 6255
  Gene Symbol: FGFR3
  Gene Name: fibroblast growth factor receptor 3
  Uniprot ID: P22607
  ENST ID: ENST00000352904
  CDS Start-End: 40-2124
cgcgcgctgcctgaggacgccgcggcccccgcccccgccatgggcgcccctgcctgcgccctcgcgctctgcgtggccgtggccatcgtggccggcgcctcctcggagtccttggggacggagcagcgcgtcgtggggcgagcggcagaagtcccgggcccagagcccggccagcaggagcagttggtcttcggcagcggggatgctgtggagctgagctgtcccccgcccgggggtggtcccatggggcccactgtctgggtcaaggatggcacagggctggtgccctcggagcgtgtcctggtggggccccagcggctgcaggtgctgaatgcctcccacgaggactccggggcctacagctgccggcagcggctcacgcagcgcgtactgtgccacttcagtgtgcgggtgacagacgctccatcctcgggagatgacgaagacggggaggacgaggctgaggacacaggtgtggacacaggggccccttactggacacggcccgagcggatggacaagaagctgctggccgtgccggccgccaacaccgtccgcttccgctgcccagccgctggcaaccccactccctccatctcctggctgaagaacggcagggagttccgcggcgagcaccgcattggaggcatcaagctgcggcatcagcagtggagcctggtcatggaaagcgtggtgccctcggaccgcggcaactacacctgcgtcgtggagaacaagtttggcagcatccggcagacgtacacgctggacgtgctggagcgctccccgcaccggcccatcctgcaggcggggctgccggccaaccagacggcggtgctgggcagcgacgtggagttccactgcaaggtgtacagtgacgcacagccccacatccagtggctcaagcacgtggaggtgaatggcagcaaggtgggcccggacggcacaccctacgttaccgtgctcaaggtgtccctggagtccaacgcgtccatgagctccaacacaccactggtgcgcatcgcaaggctgtcctcaggggagggccccacgctggccaatgtctccgagctcgagctgcctgccgaccccaaatgggagctgtctcgggcccggctgaccctgggcaagccccttggggagggctgcttcggccaggtggtcatggcggaggccatcggcattgacaaggaccgggccgccaagcctgtcaccgtagccgtgaagatgctgaaagacgatgccactgacaaggacctgtcggacctggtgtctgagatggagatgatgaagatgatcgggaaacacaaaaacatcatcaacctgctgggcgcctgcacgcagggcgggcccctgtacgtgctggtggagtacgcggccaagggtaacctgcgggagtttctgcgggcgcggcggcccccgggcctggactactccttcgacacctgcaagccgcccgaggagcagctcaccttcaaggacctggtgtcctgtgcctaccaggtggcccggggcatggagtacttggcctcccagaagtgcatccacagggacctggctgcccgcaatgtgctggtgaccgaggacaacgtgatgaagatcgcagacttcgggctggcccgggacgtgcacaacctcgactactacaagaagacgaccaacggccggctgcccgtgaagtggatggcgcctgaggccttgtttgaccgagtctacactcaccagagtgacgtctggtcctttggggtcctgctctgggagatcttcacgctggggggctccccgtaccccggcatccctgtggaggagctcttcaagctgctgaaggagggccaccgcatggacaagcccgccaactgcacacacgacctgtacatgatcatgcgggagtgctggcatgccgcgccctcccagaggcccaccttcaagcagctggtggaggacctggaccgtgtccttaccgtgacgtccaccgacgagtacctggacctgtcggcgcctttcgagcagtactccccgggtggccaggacacccccagctccagctcctcaggggacgactccgtgtttgcccacgacctgctgcccccggccccacccagcagtgggggctcgcggacgtgaagggccactggtccccaacaatgtgaggggtccctagcagcccaccctgctgctggtgcacagccactccccggcatgagactcagtgcagatggagagacagctacacagagctttggtctgtgtgtgtgtgtgtgcgtgtgtgtgtgtgtgtgtgcacatccgcgtgtgcctgtgtgcgtgcgcatcttgcctccaggtgcagaggtaccctgggtgtccccgctgctgtgcaacggtctcctgactggtgctgcagcaccgaggggcctttgttctggggggacccagtgcagaatgtaagtgggcccacccggtgggacccccgtggggcagggagctgggcccgacatggctccggcctctgcctttgcaccacgggacatcacagggtgggcctcggcccctcccacacccaaagctgagcctgcagggaagccccacatgtccagcaccttgtgcctggggtgttagtggcaccgcctccccacctccaggctttcccacttcccaccctgcccctcagagactgaaattacgggtacctgaagatgggagcctttaccttttatgcaaaaggtttattccggaaactagtgtacatttctataaatagatgctgtgtatatggtatatatacatatatatatataacatatatggaagaggaaaaggctggtacaacggaggcctgcgaccctgggggcacaggaggcaggcatggccctgggcggggcgtgggggggcgtggagggaggccccagggggtctcacccatgcaagcagaggaccagggccttttctggcaccgcagttttgttttaaaactggacctgtatatttgtaaagctatttatgggcccctggcactcttgttcccacaccccaacacttccagcatttagctggccacatggcggagagttttaatttttaacttattgacaaccgagaaggtttatcccgccgatagagggacggccaagaatgtacgtccagcctgccccggagctggaggatcccctccaagcctaaaaggttgttaatagttggaggtgattccagtgaagatattttatttcctttgtcctttttcaggagaattagatttctataggatttttctttaggagatttattttttggacttcaaagcaagctggtattttcatacaaattcttctaattgctgtgtgtcccaggcagggagacggtttccagggaggggccggccctgtgtgcaggttccgatgttattagatgttacaagtttatatatatctatatatataatttattgagtttttacaagatgtatttgttgtagacttaacacttcttacgcaatgcttctagagttttatagcctggactgctacctttcaaagcttggagggaagccgtgaattcagttggttcgttctgtactgttactgggccctgagtctgggcagctgtcccttgcttgcctgcagggccatggctcagggtggtctcttcttggggcccagtgcatggtggccagaggtgtcacccaaaccggcaggtgcgattttgttaacccagcgacgaactttccgaaaaataaagacacctggttgctaacctg

SEQ ID NO: 134401 - DNA, 4132 bp, Homo sapiens
  Payload ID: 6255
  Gene Symbol: FGFR3
  Gene Name: fibroblast growth factor receptor 3
  Uniprot ID: P22607
  ENST ID: ENST00000260795
  CDS Start-End: 103-2523
tctcccgagcggcgcccgcctcccgccggtgcccgcgccgggccgtggggggcagcatgcccgcgcgcgctgcctgaggacgccgcggcccccgcccccgccatgggcgcccctgcctgcgccctcgcgctctgcgtggccgtggccatcgtggccggcgcctcctcggagtccttggggacggagcagcgcgtcgtggggcgagcggcagaagtcccgggcccagagcccggccagcaggagcagttggtcttcggcagcggggatgctgtggagctgagctgtcccccgcccgggggtggtcccatggggcccactgtctgggtcaaggatggcacagggctggtgccctcggagcgtgtcctggtggggccccagcggctgcaggtgctgaatgcctcccacgaggactccggggcctacagctgccggcagcggctcacgcagcgcgtactgtgccacttcagtgtgcgggtgacagacgctccatcctcgggagatgacgaagacggggaggacgaggctgaggacacaggtgtggacacaggggccccttactggacacggcccgagcggatggacaagaagctgctggccgtgccggccgccaacaccgtccgcttccgctgcccagccgctggcaaccccactccctccatctcctggctgaagaacggcagggagttccgcggcgagcaccgcattggaggcatcaagctgcggcatcagcagtggagcctggtcatggaaagcgtggtgccctcggaccgcggcaactacacctgcgtcgtggagaacaagtttggcagcatccggcagacgtacacgctggacgtgctggagcgctccccgcaccggcccatcctgcaggcggggctgccggccaaccagacggcggtgctgggcagcgacgtggagttccactgcaaggtgtacagtgacgcacagccccacatccagtggctcaagcacgtggaggtgaatggcagcaaggtgggcccggacggcacaccctacgttaccgtgctcaagacggcgggcgctaacaccaccgacaaggagctagaggttctctccttgcacaacgtcacctttgaggacgccggggagtacacctgcctggcgggcaattctattgggttttctcatcactctgcgtggctggtggtgctgccagccgaggaggagctggtggaggctgacgaggcgggcagtgtgtatgcaggcatcctcagctacggggtgggcttcttcctgttcatcctggtggtggcggctgtgacgctctgccgcctgcgcagcccccccaagaaaggcctgggctcccccaccgtgcacaagatctcccgcttcccgctcaagcgacaggtgtccctggagtccaacgcgtccatgagctccaacacaccactggtgcgcatcgcaaggctgtcctcaggggagggccccacgctggccaatgtctccgagctcgagctgcctgccgaccccaaatgggagctgtctcgggcccggctgaccctgggcaagccccttggggagggctgcttcggccaggtggtcatggcggaggccatcggcattgacaaggaccgggccgccaagcctgtcaccgtagccgtgaagatgctgaaagacgatgccactgacaaggacctgtcggacctggtgtctgagatggagatgatgaagatgatcgggaaacacaaaaacatcatcaacctgctgggcgcctgcacgcagggcgggcccctgtacgtgctggtggagtacgcggccaagggtaacctgcgggagtttctgcgggcgcggcggcccccgggcctggactactccttcgacacctgcaagccgcccgaggagcagctcaccttcaaggacctggtgtcctgtgcctaccaggtggcccggggcatggagtacttggcctcccagaagtgcatccacagggacctggctgcccgcaatgtgctggtgaccgaggacaacgtgatgaagatcgcagacttcgggctggcccgggacgtgcacaacctcgactactacaagaagacgaccaacggccggctgcccgtgaagtggatggcgcctgaggccttgtttgaccgagtctacactcaccagagtgacgtctggtcctttggggtcctgctctgggagatcttcacgctggggggctccccgtaccccggcatccctgtggaggagctcttcaagctgctgaaggagggccaccgcatggacaagcccgccaactgcacacacgacctgtacatgatcatgcgggagtgctggcatgccgcgccctcccagaggcccaccttcaagcagctggtggaggacctggaccgtgtccttaccgtgacgtccaccgacgagtacctggacctgtcggcgcctttcgagcagtactccccgggtggccaggacacccccagctccagctcctcaggggacgactccgtgtttgcccacgacctgctgcccccggccccacccagcagtgggggctcgcggacgtgaagggccactggtccccaacaatgtgaggggtccctagcagcccaccctgctgctggtgcacagccactccccggcatgagactcagtgcagatggagagacagctacacagagctttggtctgtgtgtgtgtgtgtgcgtgtgtgtgtgtgtgtgtgcacatccgcgtgtgcctgtgtgcgtgcgcatcttgcctccaggtgcagaggtaccctgggtgtccccgctgctgtgcaacggtctcctgactggtgctgcagcaccgaggggcctttgttctggggggacccagtgcagaatgtaagtgggcccacccggtgggacccccgtggggcagggagctgggcccgacatggctccggcctctgcctttgcaccacgggacatcacagggtgggcctcggcccctcccacacccaaagctgagcctgcagggaagccccacatgtccagcaccttgtgcctggggtgttagtggcaccgcctccccacctccaggctttcccacttcccaccctgcccctcagagactgaaattacgggtacctgaagatgggagcctttaccttttatgcaaaaggtttattccggaaactagtgtacatttctataaatagatgctgtgtatatggtatatatacatatatatatataacatatatggaagaggaaaaggctggtacaacggaggcctgcgaccctgggggcacaggaggcaggcatggccctgggcggggcgtgggggggcgtggagggaggccccagggggtctcacccatgcaagcagaggaccagggccttttctggcaccgcagttttgttttaaaactggacctgtatatttgtaaagctatttatgggcccctggcactcttgttcccacaccccaacacttccagcatttagctggccacatggcggagagttttaatttttaacttattgacaaccgagaaggtttatcccgccgatagagggacggccaagaatgtacgtccagcctgccccggagctggaggatcccctccaagcctaaaaggttgttaatagttggaggtgattccagtgaagatattttatttcctttgtcctttttcaggagaattagatttctataggatttttctttaggagatttattttttggacttcaaagcaagctggtattttcatacaaattcttctaattgctgtgtgtcccaggcagggagacggtttccagggaggggccggccctgtgtgcaggttccgatgttattagatgttacaagtttatatatatctatatatataatttattgagtttttacaagatgtatttgttgtagacttaacacttcttacgcaatgcttctagagttttatagcctggactgctacctttcaaagcttggagggaagccgtgaattcagttggttcgttctgtactgttactgggccctgagtctgggcagctgtcccttgcttgcctgcagggccatggctcagggtggtctcttcttggggcccagtgcatggtggccagaggtgtcacccaaaccggcaggtgcgattttgttaacccagcgacgaactttccgaaaaataaagacacctggttgctaacctg

SEQ ID NO: 134402 - DNA, 4293 bp, Homo sapiens
  Payload ID: 6255
  Gene Symbol: FGFR3
  Gene Name: fibroblast growth factor receptor 3
  Uniprot ID: P22607
  ENST ID: ENST00000340107
  CDS Start-End: 257-2683
gtcgcgggcagctggcgccgcgcggtcctgctctgccggtcgcacggacgcaccggcgggccgccggccggagggacggggcgggagctgggcccgcggacagcgagccggagcgggagccgcgcgtagcgagccgggctccggcgctcgccagtctcccgagcggcgcccgcctcccgccggtgcccgcgccgggccgtggggggcagcatgcccgcgcgcgctgcctgaggacgccgcggcccccgcccccgccatgggcgcccctgcctgcgccctcgcgctctgcgtggccgtggccatcgtggccggcgcctcctcggagtccttggggacggagcagcgcgtcgtggggcgagcggcagaagtcccgggcccagagcccggccagcaggagcagttggtcttcggcagcggggatgctgtggagctgagctgtcccccgcccgggggtggtcccatggggcccactgtctgggtcaaggatggcacagggctggtgccctcggagcgtgtcctggtggggccccagcggctgcaggtgctgaatgcctcccacgaggactccggggcctacagctgccggcagcggctcacgcagcgcgtactgtgccacttcagtgtgcgggtgacagacgctccatcctcgggagatgacgaagacggggaggacgaggctgaggacacaggtgtggacacaggggccccttactggacacggcccgagcggatggacaagaagctgctggccgtgccggccgccaacaccgtccgcttccgctgcccagccgctggcaaccccactccctccatctcctggctgaagaacggcagggagttccgcggcgagcaccgcattggaggcatcaagctgcggcatcagcagtggagcctggtcatggaaagcgtggtgccctcggaccgcggcaactacacctgcgtcgtggagaacaagtttggcagcatccggcagacgtacacgctggacgtgctggagcgctccccgcaccggcccatcctgcaggcggggctgccggccaaccagacggcggtgctgggcagcgacgtggagttccactgcaaggtgtacagtgacgcacagccccacatccagtggctcaagcacgtggaggtgaatggcagcaaggtgggcccggacggcacaccctacgttaccgtgctcaagtcctggatcagtgagagtgtggaggccgacgtgcgcctccgcctggccaatgtgtcggagcgggacgggggcgagtacctctgtcgagccaccaatttcataggcgtggccgagaaggccttttggctgagcgttcacgggccccgagcagccgaggaggagctggtggaggctgacgaggcgggcagtgtgtatgcaggcatcctcagctacggggtgggcttcttcctgttcatcctggtggtggcggctgtgacgctctgccgcctgcgcagcccccccaagaaaggcctgggctcccccaccgtgcacaagatctcccgcttcccgctcaagcgacaggtgtccctggagtccaacgcgtccatgagctccaacacaccactggtgcgcatcgcaaggctgtcctcaggggagggccccacgctggccaatgtctccgagctcgagctgcctgccgaccccaaatgggagctgtctcgggcccggctgaccctgggcaagccccttggggagggctgcttcggccaggtggtcatggcggaggccatcggcattgacaaggaccgggccgccaagcctgtcaccgtagccgtgaagatgctgaaagacgatgccactgacaaggacctgtcggacctggtgtctgagatggagatgatgaagatgatcgggaaacacaaaaacatcatcaacctgctgggcgcctgcacgcagggcgggcccctgtacgtgctggtggagtacgcggccaagggtaacctgcgggagtttctgcgggcgcggcggcccccgggcctggactactccttcgacacctgcaagccgcccgaggagcagctcaccttcaaggacctggtgtcctgtgcctaccaggtggcccggggcatggagtacttggcctcccagaagtgcatccacagggacctggctgcccgcaatgtgctggtgaccgaggacaacgtgatgaagatcgcagacttcgggctggcccgggacgtgcacaacctcgactactacaagaagacgaccaacggccggctgcccgtgaagtggatggcgcctgaggccttgtttgaccgagtctacactcaccagagtgacgtctggtcctttggggtcctgctctgggagatcttcacgctggggggctccccgtaccccggcatccctgtggaggagctcttcaagctgctgaaggagggccaccgcatggacaagcccgccaactgcacacacgacctgtacatgatcatgcgggagtgctggcatgccgcgccctcccagaggcccaccttcaagcagctggtggaggacctggaccgtgtccttaccgtgacgtccaccgacgagtacctggacctgtcggcgcctttcgagcagtactccccgggtggccaggacacccccagctccagctcctcaggggacgactccgtgtttgcccacgacctgctgcccccggccccacccagcagtgggggctcgcggacgtgaagggccactggtccccaacaatgtgaggggtccctagcagcccaccctgctgctggtgcacagccactccccggcatgagactcagtgcagatggagagacagctacacagagctttggtctgtgtgtgtgtgtgtgcgtgtgtgtgtgtgtgtgtgcacatccgcgtgtgcctgtgtgcgtgcgcatcttgcctccaggtgcagaggtaccctgggtgtccccgctgctgtgcaacggtctcctgactggtgctgcagcaccgaggggcctttgttctggggggacccagtgcagaatgtaagtgggcccacccggtgggacccccgtggggcagggagctgggcccgacatggctccggcctctgcctttgcaccacgggacatcacagggtgggcctcggcccctcccacacccaaagctgagcctgcagggaagccccacatgtccagcaccttgtgcctggggtgttagtggcaccgcctccccacctccaggctttcccacttcccaccctgcccctcagagactgaaattacgggtacctgaagatgggagcctttaccttttatgcaaaaggtttattccggaaactagtgtacatttctataaatagatgctgtgtatatggtatatatacatatatatatataacatatatggaagaggaaaaggctggtacaacggaggcctgcgaccctgggggcacaggaggcaggcatggccctgggcggggcgtgggggggcgtggagggaggccccagggggtctcacccatgcaagcagaggaccagggccttttctggcaccgcagttttgttttaaaactggacctgtatatttgtaaagctatttatgggcccctggcactcttgttcccacaccccaacacttccagcatttagctggccacatggcggagagttttaatttttaacttattgacaaccgagaaggtttatcccgccgatagagggacggccaagaatgtacgtccagcctgccccggagctggaggatcccctccaagcctaaaaggttgttaatagttggaggtgattccagtgaagatattttatttcctttgtcctttttcaggagaattagatttctataggatttttctttaggagatttattttttggacttcaaagcaagctggtattttcatacaaattcttctaattgctgtgtgtcccaggcagggagacggtttccagggaggggccggccctgtgtgcaggttccgatgttattagatgttacaagtttatatatatctatatatataatttattgagtttttacaagatgtatttgttgtagacttaacacttcttacgcaatgcttctagagttttatagcctggactgctacctttcaaagcttggagggaagccgtgaattcagttggttcgttctgtactgttactgggccctgagtctgggcagctgtcccttgcttgcctgcagggccatggctcagggtggtctcttcttggggcccagtgcatggtggccagaggtgtcacccaaaccggcaggtgcgattttgttaacccagcgacgaactttccgaaaaataaagacacctggttgctaacctgg

SEQ ID NO: 134403 - DNA, 3951 bp, Homo sapiens
  Payload ID: 6255
  Gene Symbol: FGFR3
  Gene Name: fibroblast growth factor receptor 3
  Uniprot ID: P22607
  ENST ID: ENST00000412135
  CDS Start-End: 257-2341
gtcgcgggcagctggcgccgcgcggtcctgctctgccggtcgcacggacgcaccggcgggccgccggccggagggacggggcgggagctgggcccgcggacagcgagccggagcgggagccgcgcgtagcgagccgggctccggcgctcgccagtctcccgagcggcgcccgcctcccgccggtgcccgcgccgggccgtggggggcagcatgcccgcgcgcgctgcctgaggacgccgcggcccccgcccccgccatgggcgcccctgcctgcgccctcgcgctctgcgtggccgtggccatcgtggccggcgcctcctcggagtccttggggacggagcagcgcgtcgtggggcgagcggcagaagtcccgggcccagagcccggccagcaggagcagttggtcttcggcagcggggatgctgtggagctgagctgtcccccgcccgggggtggtcccatggggcccactgtctgggtcaaggatggcacagggctggtgccctcggagcgtgtcctggtggggccccagcggctgcaggtgctgaatgcctcccacgaggactccggggcctacagctgccggcagcggctcacgcagcgcgtactgtgccacttcagtgtgcgggtgacagacgctccatcctcgggagatgacgaagacggggaggacgaggctgaggacacaggtgtggacacaggggccccttactggacacggcccgagcggatggacaagaagctgctggccgtgccggccgccaacaccgtccgcttccgctgcccagccgctggcaaccccactccctccatctcctggctgaagaacggcagggagttccgcggcgagcaccgcattggaggcatcaagctgcggcatcagcagtggagcctggtcatggaaagcgtggtgccctcggaccgcggcaactacacctgcgtcgtggagaacaagtttggcagcatccggcagacgtacacgctggacgtgctggagcgctccccgcaccggcccatcctgcaggcggggctgccggccaaccagacggcggtgctgggcagcgacgtggagttccactgcaaggtgtacagtgacgcacagccccacatccagtggctcaagcacgtggaggtgaatggcagcaaggtgggcccggacggcacaccctacgttaccgtgctcaaggtgtccctggagtccaacgcgtccatgagctccaacacaccactggtgcgcatcgcaaggctgtcctcaggggagggccccacgctggccaatgtctccgagctcgagctgcctgccgaccccaaatgggagctgtctcgggcccggctgaccctgggcaagccccttggggagggctgcttcggccaggtggtcatggcggaggccatcggcattgacaaggaccgggccgccaagcctgtcaccgtagccgtgaagatgctgaaagacgatgccactgacaaggacctgtcggacctggtgtctgagatggagatgatgaagatgatcgggaaacacaaaaacatcatcaacctgctgggcgcctgcacgcagggcgggcccctgtacgtgctggtggagtacgcggccaagggtaacctgcgggagtttctgcgggcgcggcggcccccgggcctggactactccttcgacacctgcaagccgcccgaggagcagctcaccttcaaggacctggtgtcctgtgcctaccaggtggcccggggcatggagtacttggcctcccagaagtgcatccacagggacctggctgcccgcaatgtgctggtgaccgaggacaacgtgatgaagatcgcagacttcgggctggcccgggacgtgcacaacctcgactactacaagaagacgaccaacggccggctgcccgtgaagtggatggcgcctgaggccttgtttgaccgagtctacactcaccagagtgacgtctggtcctttggggtcctgctctgggagatcttcacgctggggggctccccgtaccccggcatccctgtggaggagctcttcaagctgctgaaggagggccaccgcatggacaagcccgccaactgcacacacgacctgtacatgatcatgcgggagtgctggcatgccgcgccctcccagaggcccaccttcaagcagctggtggaggacctggaccgtgtccttaccgtgacgtccaccgacgagtacctggacctgtcggcgcctttcgagcagtactccccgggtggccaggacacccccagctccagctcctcaggggacgactccgtgtttgcccacgacctgctgcccccggccccacccagcagtgggggctcgcggacgtgaagggccactggtccccaacaatgtgaggggtccctagcagcccaccctgctgctggtgcacagccactccccggcatgagactcagtgcagatggagagacagctacacagagctttggtctgtgtgtgtgtgtgtgcgtgtgtgtgtgtgtgtgtgcacatccgcgtgtgcctgtgtgcgtgcgcatcttgcctccaggtgcagaggtaccctgggtgtccccgctgctgtgcaacggtctcctgactggtgctgcagcaccgaggggcctttgttctggggggacccagtgcagaatgtaagtgggcccacccggtgggacccccgtggggcagggagctgggcccgacatggctccggcctctgcctttgcaccacgggacatcacagggtgggcctcggcccctcccacacccaaagctgagcctgcagggaagccccacatgtccagcaccttgtgcctggggtgttagtggcaccgcctccccacctccaggctttcccacttcccaccctgcccctcagagactgaaattacgggtacctgaagatgggagcctttaccttttatgcaaaaggtttattccggaaactagtgtacatttctataaatagatgctgtgtatatggtatatatacatatatatatataacatatatggaagaggaaaaggctggtacaacggaggcctgcgaccctgggggcacaggaggcaggcatggccctgggcggggcgtgggggggcgtggagggaggccccagggggtctcacccatgcaagcagaggaccagggccttttctggcaccgcagttttgttttaaaactggacctgtatatttgtaaagctatttatgggcccctggcactcttgttcccacaccccaacacttccagcatttagctggccacatggcggagagttttaatttttaacttattgacaaccgagaaggtttatcccgccgatagagggacggccaagaatgtacgtccagcctgccccggagctggaggatcccctccaagcctaaaaggttgttaatagttggaggtgattccagtgaagatattttatttcctttgtcctttttcaggagaattagatttctataggatttttctttaggagatttattttttggacttcaaagcaagctggtattttcatacaaattcttctaattgctgtgtgtcccaggcagggagacggtttccagggaggggccggccctgtgtgcaggttccgatgttattagatgttacaagtttatatatatctatatatataatttattgagtttttacaagatgtatttgttgtagacttaacacttcttacgcaatgcttctagagttttatagcctggactgctacctttcaaagcttggagggaagccgtgaattcagttggttcgttctgtactgttactgggccctgagtctgggcagctgtcccttgcttgcctgcagggccatggctcagggtggtctcttcttggggcccagtgcatggtggccagaggtgtcacccaaaccggcaggtgcgattttgttaacccagcgacgaactttccgaaaaataaagacacctggttgctaacctgg

SEQ ID NO: 134404 - DNA, 4287 bp, Homo sapiens
  Payload ID: 6255
  Gene Symbol: FGFR3
  Gene Name: fibroblast growth factor receptor 3
  Uniprot ID: P22607
  ENST ID: ENST00000440486
  CDS Start-End: 257-2677
gtcgcgggcagctggcgccgcgcggtcctgctctgccggtcgcacggacgcaccggcgggccgccggccggagggacggggcgggagctgggcccgcggacagcgagccggagcgggagccgcgcgtagcgagccgggctccggcgctcgccagtctcccgagcggcgcccgcctcccgccggtgcccgcgccgggccgtggggggcagcatgcccgcgcgcgctgcctgaggacgccgcggcccccgcccccgccatgggcgcccctgcctgcgccctcgcgctctgcgtggccgtggccatcgtggccggcgcctcctcggagtccttggggacggagcagcgcgtcgtggggcgagcggcagaagtcccgggcccagagcccggccagcaggagcagttggtcttcggcagcggggatgctgtggagctgagctgtcccccgcccgggggtggtcccatggggcccactgtctgggtcaaggatggcacagggctggtgccctcggagcgtgtcctggtggggccccagcggctgcaggtgctgaatgcctcccacgaggactccggggcctacagctgccggcagcggctcacgcagcgcgtactgtgccacttcagtgtgcgggtgacagacgctccatcctcgggagatgacgaagacggggaggacgaggctgaggacacaggtgtggacacaggggccccttactggacacggcccgagcggatggacaagaagctgctggccgtgccggccgccaacaccgtccgcttccgctgcccagccgctggcaaccccactccctccatctcctggctgaagaacggcagggagttccgcggcgagcaccgcattggaggcatcaagctgcggcatcagcagtggagcctggtcatggaaagcgtggtgccctcggaccgcggcaactacacctgcgtcgtggagaacaagtttggcagcatccggcagacgtacacgctggacgtgctggagcgctccccgcaccggcccatcctgcaggcggggctgccggccaaccagacggcggtgctgggcagcgacgtggagttccactgcaaggtgtacagtgacgcacagccccacatccagtggctcaagcacgtggaggtgaatggcagcaaggtgggcccggacggcacaccctacgttaccgtgctcaagacggcgggcgctaacaccaccgacaaggagctagaggttctctccttgcacaacgtcacctttgaggacgccggggagtacacctgcctggcgggcaattctattgggttttctcatcactctgcgtggctggtggtgctgccagccgaggaggagctggtggaggctgacgaggcgggcagtgtgtatgcaggcatcctcagctacggggtgggcttcttcctgttcatcctggtggtggcggctgtgacgctctgccgcctgcgcagcccccccaagaaaggcctgggctcccccaccgtgcacaagatctcccgcttcccgctcaagcgacaggtgtccctggagtccaacgcgtccatgagctccaacacaccactggtgcgcatcgcaaggctgtcctcaggggagggccccacgctggccaatgtctccgagctcgagctgcctgccgaccccaaatgggagctgtctcgggcccggctgaccctgggcaagccccttggggagggctgcttcggccaggtggtcatggcggaggccatcggcattgacaaggaccgggccgccaagcctgtcaccgtagccgtgaagatgctgaaagacgatgccactgacaaggacctgtcggacctggtgtctgagatggagatgatgaagatgatcgggaaacacaaaaacatcatcaacctgctgggcgcctgcacgcagggcgggcccctgtacgtgctggtggagtacgcggccaagggtaacctgcgggagtttctgcgggcgcggcggcccccgggcctggactactccttcgacacctgcaagccgcccgaggagcagctcaccttcaaggacctggtgtcctgtgcctaccaggtggcccggggcatggagtacttggcctcccagaagtgcatccacagggacctggctgcccgcaatgtgctggtgaccgaggacaacgtgatgaagatcgcagacttcgggctggcccgggacgtgcacaacctcgactactacaagaagacgaccaacggccggctgcccgtgaagtggatggcgcctgaggccttgtttgaccgagtctacactcaccagagtgacgtctggtcctttggggtcctgctctgggagatcttcacgctggggggctccccgtaccccggcatccctgtggaggagctcttcaagctgctgaaggagggccaccgcatggacaagcccgccaactgcacacacgacctgtacatgatcatgcgggagtgctggcatgccgcgccctcccagaggcccaccttcaagcagctggtggaggacctggaccgtgtccttaccgtgacgtccaccgacgagtacctggacctgtcggcgcctttcgagcagtactccccgggtggccaggacacccccagctccagctcctcaggggacgactccgtgtttgcccacgacctgctgcccccggccccacccagcagtgggggctcgcggacgtgaagggccactggtccccaacaatgtgaggggtccctagcagcccaccctgctgctggtgcacagccactccccggcatgagactcagtgcagatggagagacagctacacagagctttggtctgtgtgtgtgtgtgtgcgtgtgtgtgtgtgtgtgtgcacatccgcgtgtgcctgtgtgcgtgcgcatcttgcctccaggtgcagaggtaccctgggtgtccccgctgctgtgcaacggtctcctgactggtgctgcagcaccgaggggcctttgttctggggggacccagtgcagaatgtaagtgggcccacccggtgggacccccgtggggcagggagctgggcccgacatggctccggcctctgcctttgcaccacgggacatcacagggtgggcctcggcccctcccacacccaaagctgagcctgcagggaagccccacatgtccagcaccttgtgcctggggtgttagtggcaccgcctccccacctccaggctttcccacttcccaccctgcccctcagagactgaaattacgggtacctgaagatgggagcctttaccttttatgcaaaaggtttattccggaaactagtgtacatttctataaatagatgctgtgtatatggtatatatacatatatatatataacatatatggaagaggaaaaggctggtacaacggaggcctgcgaccctgggggcacaggaggcaggcatggccctgggcggggcgtgggggggcgtggagggaggccccagggggtctcacccatgcaagcagaggaccagggccttttctggcaccgcagttttgttttaaaactggacctgtatatttgtaaagctatttatgggcccctggcactcttgttcccacaccccaacacttccagcatttagctggccacatggcggagagttttaatttttaacttattgacaaccgagaaggtttatcccgccgatagagggacggccaagaatgtacgtccagcctgccccggagctggaggatcccctccaagcctaaaaggttgttaatagttggaggtgattccagtgaagatattttatttcctttgtcctttttcaggagaattagatttctataggatttttctttaggagatttattttttggacttcaaagcaagctggtattttcatacaaattcttctaattgctgtgtgtcccaggcagggagacggtttccagggaggggccggccctgtgtgcaggttccgatgttattagatgttacaagtttatatatatctatatatataatttattgagtttttacaagatgtatttgttgtagacttaacacttcttacgcaatgcttctagagttttatagcctggactgctacctttcaaagcttggagggaagccgtgaattcagttggttcgttctgtactgttactgggccctgagtctgggcagctgtcccttgcttgcctgcagggccatggctcagggtggtctcttcttggggcccagtgcatggtggccagaggtgtcacccaaaccggcaggtgcgattttgttaacccagcgacgaactttccgaaaaataaagacacctggttgctaacctgg

SEQ ID NO: 134405 - DNA, 4217 bp, Homo sapiens
  Payload ID: 6255
  Gene Symbol: FGFR3
  Gene Name: fibroblast growth factor receptor 3
  ENST ID: ENST00000481110
  CDS Start-End: 262-2640
gcggcgtcgcgggcagctggcgccgcgcggtcctgctctgccggtcgcacggacgcaccggcgggccgccggccggagggacggggcgggagctgggcccgcggacagcgagccggagcgggagccgcgcgtagcgagccgggctccggcgctcgccagtctcccgagcggcgcccgcctcccgccggtgcccgcgccgggccgtggggggcagcatgcccgcgcgcgctgcctgaggacgccgcggcccccgcccccgccatgggcgcccctgcctgcgccctcgcgctctgcgtggccgtggccatcgtggccggcgcctcctcggagtccttggggacggagcagcgcgtcgtggggcgagcggcagaagtcccgggcccagagcccggccagcaggagcagttggtcttcggcagcggggatgctgtggagctgagctgtcccccgcccgggggtggtcccatggggcccactgtctgggtcaaggatggcacagggctggtgccctcggagcgtgtcctggtggggccccagcggctgcaggtgctgaatgcctcccacgaggactccggggcctacagctgccggcagcggctcacgcagcgcgtactgtgccacttcagtgtgcgggtgacagacgctccatcctcgggagatgacgaagacggggaggacgaggctgaggacacaggtgtggacacaggggccccttactggacacggcccgagcggatggacaagaagctgctggccgtgccggccgccaacaccgtccgcttccgctgcccagccgctggcaaccccactccctccatctcctggctgaagaacggcagggagttccgcggcgagcaccgcattggaggcatcaagctgcggcatcagcagtggagcctggtcatggaaagcgtggtgccctcggaccgcggcaactacacctgcgtcgtggagaacaagtttggcagcatccggcagacgtacacgctggacgtgctggagcgctccccgcaccggcccatcctgcaggcggggctgccggccaaccagacggcggtgctgggcagcgacgtggagttccactgcaaggtgtacagtgacgcacagccccacatccagtggctcaagcacgtggaggtgaatggcagcaaggtgggcccggacggcacaccctacgttaccgtgctcaagacggcgggcgctaacaccaccgacaaggagctagaggttctctccttgcacaacgtcacctttgaggacgccggggagtacacctgcctggcgggcaattctattgggttttctcatcactctgcgtggctggtggtgctgccagccgaggaggagctggtggaggctgacgaggcgggcagtgtgtatgcaggcatcctcagctacggggtgggcttcttcctgttcatcctggtggtggcggctgtgacgctctgccgcctgcgcagcccccccaagaaaggcctgggctcccccaccgtgcacaagatctcccgcttcccgctcaagcgacagcaggtgtccctggagtccaacgcgtccatgagctccaacacaccactggtgcgcatcgcaaggctgtcctcaggggagggccccacgctggccaatgtctccgagctcgagctgcctgccgaccccaaatgggagctgtctcgggcccggctgaccctgggcaagccccttggggagggctgcttcggccaggtggtcatggcggaggccatcggcattgacaaggaccgggccgccaagcctgtcaccgtagccgtgaagatgctgaaagacgatgccactgacaaggacctgtcggacctggtgtctgagatggagatgatgaagatgatcgggaaacacaaaaacatcatcaacctgctgggcgcctgcacgcagggcgggcccctgtacgtgctggtggagtacgcggccaagggtaacctgcgggagtttctgcgggcgcggcggcccccgggcctggactactccttcgacacctgcaagccgcccgaggagcagctcaccttcaaggacctggtgtcctgtgcctaccaggtggcccggggcatggagtacttggcctcccagaagtgcatccacagggacctggctgcccgcaatgtgctggtgaccgaggacaacgtgatgaagatcgcagacttcgggctggcccgggacgtgcacaacctcgactactacaagaagacgaccaacctggtcctttggggtcctgctctgggagatcttcacgctggggggctccccgtaccccggcatccctgtggaggagctcttcaagctgctgaaggagggccaccgcatggacaagcccgccaactgcacacacgacctgtacatgatcatgcgggagtgctggcatgccgcgccctcccagaggcccaccttcaagcagctggtggaggacctggaccgtgtccttaccgtgacgtccaccgacgagtacctggacctgtcggcgcctttcgagcagtactccccgggtggccaggacacccccagctccagctcctcaggggacgactccgtgtttgcccacgacctgctgcccccggccccacccagcagtgggggctcgcggacgtgaagggccactggtccccaacaatgtgaggggtccctagcagcccaccctgctgctggtgcacagccactccccggcatgagactcagtgcagatggagagacagctacacagagctttggtctgtgtgtgtgtgtgtgcgtgtgtgtgtgtgtgtgtgcacatccgcgtgtgcctgtgtgcgtgcgcatcttgcctccaggtgcagaggtaccctgggtgtccccgctgctgtgcaacggtctcctgactggtgctgcagcaccgaggggcctttgttctggggggacccagtgcagaatgtaagtgggcccacccggtgggacccccgtggggcagggagctgggcccgacatggctccggcctctgcctttgcaccacgggacatcacagggtgggcctcggcccctcccacacccaaagctgagcctgcagggaagccccacatgtccagcaccttgtgcctggggtgttagtggcaccgcctccccacctccaggctttcccacttcccaccctgcccctcagagactgaaattacgggtacctgaagatgggagcctttaccttttatgcaaaaggtttattccggaaactagtgtacatttctataaatagatgctgtgtatatggtatatatacatatatatatataacatatatggaagaggaaaaggctggtacaacggaggcctgcgaccctgggggcacaggaggcaggcatggccctgggcggggcgtgggggggcgtggagggaggccccagggggtctcacccatgcaagcagaggaccagggccttttctggcaccgcagttttgttttaaaactggacctgtatatttgtaaagctatttatgggcccctggcactcttgttcccacaccccaacacttccagcatttagctggccacatggcggagagttttaatttttaacttattgacaaccgagaaggtttatcccgccgatagagggacggccaagaatgtacgtccagcctgccccggagctggaggatcccctccaagcctaaaaggttgttaatagttggaggtgattccagtgaagatattttatttcctttgtcctttttcaggagaattagatttctataggatttttctttaggagatttattttttggacttcaaagcaagctggtattttcatacaaattcttctaattgctgtgtgtcccaggcagggagacggtttccagggaggggccggccctgtgtgcaggttccgatgttattagatgttacaagtttatatatatctatatatataatttattgagtttttacaagatgtatttgttgtagacttaacacttcttacgcaatgcttctagagttttatagcctggactgctacctttcaaagcttggagggaagccgtgaattcagttggttcgttctgtactgttactgggccctgagtctgggcagctgtcccttgcttgcctgcagggccatggctcagggtggtctcttcttggggcccagtgcatggtggccagaggtgtcacccaaaccggcaggtgcgattttgttaacccagcgacgaactttccgaaaaataaagacacctggttgct

SEQ ID NO: 134406 - DNA, 336 bp, Homo sapiens
  Payload ID: 6255
  Gene Symbol: FGFR3
  Gene Name: fibroblast growth factor receptor 3
  ENST ID: ENST00000507588
  CDS Start-End: 1-336
aaccccactccctccatctcctggctgaagaacggcagggagttccgcggcgagcaccgcattggaggcatcaagctgcggcatcagcagtggagcctggtcatggaaagcgtggtgccctcggaccgcggcaactacacctgcgtcgtggagaacaagtttggcagcatccggcagacgtacacgctggacgtgctggagcgctccccgcaccggcccatcctgcaggcggggctgccggccaaccagacggcggtgctgggcagcgacgtggagttccactgcaagacggcgggcgctaacaccaccgacaaggagctagaggttctctccttg

SEQ ID NO: 134407 - DNA, 4438 bp, Homo sapiens
  Payload ID: 6255
  Gene Symbol: FGFR3
  Gene Name: fibroblast growth factor receptor 3
  ENST ID: ENST00000613647
  CDS Start-End: 257-1351
gtcgcgggcagctggcgccgcgcggtcctgctctgccggtcgcacggacgcaccggcgggccgccggccggagggacggggcgggagctgggcccgcggacagcgagccggagcgggagccgcgcgtagcgagccgggctccggcgctcgccagtctcccgagcggcgcccgcctcccgccggtgcccgcgccgggccgtggggggcagcatgcccgcgcgcgctgcctgaggacgccgcggcccccgcccccgccatgggcgcccctgcctgcgccctcgcgctctgcgtggccgtggccatcgtggccggcgcctcctcggagtccttggggacggagcagcgcgtcgtggggcgagcggcagaagtcccgggcccagagcccggccagcaggagcagttggtcttcggcagcggggatgctgtggagctgagctgtcccccgcccgggggtggtcccatggggcccactgtctgggtcaaggatggcacagggctggtgccctcggagcgtgtcctggtggggccccagcggctgcaggtgctgaatgcctcccacgaggactccggggcctacagctgccggcagcggctcacgcagcgcgtactgtgccacttcagtgtgcgggtgacagacgctccatcctcgggagatgacgaagacggggaggacgaggctgaggacacaggtgtggacacaggggccccttactggacacggcccgagcggatggacaagaagctgctggccgtgccggccgccaacaccgtccgcttccgctgcccagccgctggcaaccccactccctccatctcctggctgaagaacggcagggagttccgcggcgagcaccgcattggaggcatcaagctgcggcatcagcagtggagcctggtcatggaaagcgtggtgccctcggaccgcggcaactacacctgcgtcgtggagaacaagtttggcagcatccggcagacgtacacgctggacgtgctggagcgctccccgcaccggcccatcctgcaggcggggctgccggccaaccagacggcggtgctgggcagcgacgtggagttccactgcaaggtgtacagtgacgcacagccccacatccagtggctcaagcacgtggaggtgaatggcagcaaggtgggcccggacggcacaccctacgttaccgtgctcaagtcctggatcagtgagagtgtggaggccgacgtgcgcctccgcctggccaatgtgtcggagcgggacgggggcgagtacctctgtcgagccaccaatttcataggcgtggccgagaaggccttttggctgagcgttcacgggccccgagcagacggcgggcgctaacaccaccgacaaggagctagaggttctctccttgcacaacgtcacctttgaggacgccggggagtacacctgcctggcgggcaattctattgggttttctcatcactctgcgtggctggtggtgctgccagccgaggaggagctggtggaggctgacgaggcgggcagtgtgtatgcaggcatcctcagctacggggtgggcttcttcctgttcatcctggtggtggcggctgtgacgctctgccgcctgcgcagcccccccaagaaaggcctgggctcccccaccgtgcacaagatctcccgcttcccgctcaagcgacaggtgtccctggagtccaacgcgtccatgagctccaacacaccactggtgcgcatcgcaaggctgtcctcaggggagggccccacgctggccaatgtctccgagctcgagctgcctgccgaccccaaatgggagctgtctcgggcccggctgaccctgggcaagccccttggggagggctgcttcggccaggtggtcatggcggaggccatcggcattgacaaggaccgggccgccaagcctgtcaccgtagccgtgaagatgctgaaagacgatgccactgacaaggacctgtcggacctggtgtctgagatggagatgatgaagatgatcgggaaacacaaaaacatcatcaacctgctgggcgcctgcacgcagggcgggcccctgtacgtgctggtggagtacgcggccaagggtaacctgcgggagtttctgcgggcgcggcggcccccgggcctggactactccttcgacacctgcaagccgcccgaggagcagctcaccttcaaggacctggtgtcctgtgcctaccaggtggcccggggcatggagtacttggcctcccagaagtgcatccacagggacctggctgcccgcaatgtgctggtgaccgaggacaacgtgatgaagatcgcagacttcgggctggcccgggacgtgcacaacctcgactactacaagaagacgaccaacggccggctgcccgtgaagtggatggcgcctgaggccttgtttgaccgagtctacactcaccagagtgacgtctggtcctttggggtcctgctctgggagatcttcacgctggggggctccccgtaccccggcatccctgtggaggagctcttcaagctgctgaaggagggccaccgcatggacaagcccgccaactgcacacacgacctgtacatgatcatgcgggagtgctggcatgccgcgccctcccagaggcccaccttcaagcagctggtggaggacctggaccgtgtccttaccgtgacgtccaccgacgagtacctggacctgtcggcgcctttcgagcagtactccccgggtggccaggacacccccagctccagctcctcaggggacgactccgtgtttgcccacgacctgctgcccccggccccacccagcagtgggggctcgcggacgtgaagggccactggtccccaacaatgtgaggggtccctagcagcccaccctgctgctggtgcacagccactccccggcatgagactcagtgcagatggagagacagctacacagagctttggtctgtgtgtgtgtgtgtgcgtgtgtgtgtgtgtgtgtgcacatccgcgtgtgcctgtgtgcgtgcgcatcttgcctccaggtgcagaggtaccctgggtgtccccgctgctgtgcaacggtctcctgactggtgctgcagcaccgaggggcctttgttctggggggacccagtgcagaatgtaagtgggcccacccggtgggacccccgtggggcagggagctgggcccgacatggctccggcctctgcctttgcaccacgggacatcacagggtgggcctcggcccctcccacacccaaagctgagcctgcagggaagccccacatgtccagcaccttgtgcctggggtgttagtggcaccgcctccccacctccaggctttcccacttcccaccctgcccctcagagactgaaattacgggtacctgaagatgggagcctttaccttttatgcaaaaggtttattccggaaactagtgtacatttctataaatagatgctgtgtatatggtatatatacatatatatatataacatatatggaagaggaaaaggctggtacaacggaggcctgcgaccctgggggcacaggaggcaggcatggccctgggcggggcgtgggggggcgtggagggaggccccagggggtctcacccatgcaagcagaggaccagggccttttctggcaccgcagttttgttttaaaactggacctgtatatttgtaaagctatttatgggcccctggcactcttgttcccacaccccaacacttccagcatttagctggccacatggcggagagttttaatttttaacttattgacaaccgagaaggtttatcccgccgatagagggacggccaagaatgtacgtccagcctgccccggagctggaggatcccctccaagcctaaaaggttgttaatagttggaggtgattccagtgaagatattttatttcctttgtcctttttcaggagaattagatttctataggatttttctttaggagatttattttttggacttcaaagcaagctggtattttcatacaaattcttctaattgctgtgtgtcccaggcagggagacggtttccagggaggggccggccctgtgtgcaggttccgatgttattagatgttacaagtttatatatatctatatatataatttattgagtttttacaagatgtatttgttgtagacttaacacttcttacgcaatgcttctagagttttatagcctggactgctacctttcaaagcttggagggaagccgtgaattcagttggttcgttctgtactgttactgggccctgagtctgggcagctgtcccttgcttgcctgcagggccatggctcagggtggtctcttcttggggcccagtgcatggtggccagaggtgtcacccaaaccggcaggtgcgattttgttaacccagcgacgaactttccgaaaaataaagacacctggttgctaacctgg

SEQ ID NO: 134408 - DNA, 3122 bp, Homo sapiens
  Payload ID: 6256
  Gene Symbol: FGFR4
  Gene Name: fibroblast growth factor receptor 4
  Uniprot ID: P22455
  ENST ID: ENST00000292408
  CDS Start-End: 246-2654
cgctcgcggccacgccgccgtcgcgggtacattcctcgctcccggccgaggagcgctcgggctgtctgcggaccctgccgcgtgcaggggtcgcggccggctggagctgggagtgaggcggcggaggagccaggtgaggaggagccaggtgagcaggaccctgtgctgggcgcggagtcacgcaggctcgaggaaggcagttggtgggaagtccagcttgggtccctgagagctgtgagaaggagatgcggctgctgctggccctgttgggggtcctgctgagtgtgcctgggcctccagtcttgtccctggaggcctctgaggaagtggagcttgagccctgcctggctcccagcctggagcagcaagagcaggagctgacagtagcccttgggcagcctgtgcgtctgtgctgtgggcgggctgagcgtggtggccactggtacaaggagggcagtcgcctggcacctgctggccgtgtacggggctggaggggccgcctagagattgccagcttcctacctgaggatgctggccgctacctctgcctggcacgaggctccatgatcgtcctgcagaatctcaccttgattacaggtgactccttgacctccagcaacgatgatgaggaccccaagtcccatagggacccctcgaataggcacagttacccccagcaagcaccctactggacacacccccagcgcatggagaagaaactgcatgcagtacctgcggggaacaccgtcaagttccgctgtccagctgcaggcaaccccacgcccaccatccgctggcttaaggatggacaggcctttcatggggagaaccgcattggaggcattcggctgcgccatcagcactggagtctcgtgatggagagcgtggtgccctcggaccgcggcacatacacctgcctggtagagaacgctgtgggcagcatccgctataactacctgctagatgtgctggagcggtccccgcaccggcccatcctgcaggccgggctcccggccaacaccacagccgtggtgggcagcgacgtggagctgctgtgcaaggtgtacagcgatgcccagccccacatccagtggctgaagcacatcgtcatcaacggcagcagcttcggagccgacggtttcccctatgtgcaagtcctaaagactgcagacatcaatagctcagaggtggaggtcctgtacctgcggaacgtgtcagccgaggacgcaggcgagtacacctgcctcgcaggcaattccatcggcctctcctaccagtctgcctggctcacggtgctgccagaggaggaccccacatggaccgcagcagcgcccgaggccaggtatacggacatcatcctgtacgcgtcgggctccctggccttggctgtgctcctgctgctggccgggctgtatcgagggcaggcgctccacggccggcacccccgcccgcccgccactgtgcagaagctctcccgcttccctctggcccgacagttctccctggagtcaggctcttccggcaagtcaagctcatccctggtacgaggcgtgcgtctctcctccagcggccccgccttgctcgccggcctcgtgagtctagatctacctctcgacccactatgggagttcccccgggacaggctggtgcttgggaagcccctaggcgagggctgctttggccaggtagtacgtgcagaggcctttggcatggaccctgcccggcctgaccaagccagcactgtggccgtcaagatgctcaaagacaacgcctctgacaaggacctggccgacctggtctcggagatggaggtgatgaagctgatcggccgacacaagaacatcatcaacctgcttggtgtctgcacccaggaagggcccctgtacgtgatcgtggagtgcgccgccaagggaaacctgcgggagttcctgcgggcccggcgccccccaggccccgacctcagccccgacggtcctcggagcagtgaggggccgctctccttcccagtcctggtctcctgcgcctaccaggtggcccgaggcatgcagtatctggagtcccggaagtgtatccaccgggacctggctgcccgcaatgtgctggtgactgaggacaatgtgatgaagattgctgactttgggctggcccgcggcgtccaccacattgactactataagaaaaccagcaacggccgcctgcctgtgaagtggatggcgcccgaggccttgtttgaccgggtgtacacacaccagagtgacgtgtggtcttttgggatcctgctatgggagatcttcaccctcgggggctccccgtatcctggcatcccggtggaggagctgttctcgctgctgcgggagggacatcggatggaccgacccccacactgccccccagagctgtacgggctgatgcgtgagtgctggcacgcagcgccctcccagaggcctaccttcaagcagctggtggaggcgctggacaaggtcctgctggccgtctctgaggagtacctcgacctccgcctgaccttcggaccctattccccctctggtggggacgccagcagcacctgctcctccagcgattctgtcttcagccacgaccccctgccattgggatccagctccttccccttcgggtctggggtgcagacatgagcaaggctcaaggctgtgcaggcacataggctggtggccttgggccttggggctcagccacagcctgacacagtgctcgaccttgatagcatggggcccctggcccagagttgctgtgccgtgtccaagggccgtgcccttgcccttggagctgccgtgcctgtgtcctgatggcccaaatgtcagggttctgctcggcttcttggaccttggcgcttagtccccatcccgggtttggctgagcctggctggagagctgctatgctaaacctcctgcctcccaataccagcaggaggttctgggcctctgaaccccctttccccacacctccccctgctgctgctgccccagcgtcttgacgggagcattggcccctgagcccagagaagctggaagcctgccgaaaacaggagcaaatggcgttttataaattatttttttgaaataaagctctgtgtgcctgggtc

SEQ ID NO: 134409 - DNA, 2418 bp, Homo sapiens
  Payload ID: 6256
  Gene Symbol: FGFR4
  Gene Name: fibroblast growth factor receptor 4
  Uniprot ID: P22455
  ENST ID: ENST00000393637
  CDS Start-End: 37-2325
agtccagcttgggtccctgagagctgtgagaaggagatgcggctgctgctggccctgttgggggtcctgctgagtgtgcctgggcctccagtcttgtccctggaggcctctgaggaagtggagcttgagccctgcctggctcccagcctggagcagcaagagcaggagctgacagtagcccttgggcagcctgtgcgtctgtgctgtgggcgggctgagcgtggtggccactggtacaaggagggcagtcgcctggcacctgctggccgtgtacggggctggaggggccgcctagagattgccagcttcctacctgaggatgctggccgctacctctgcctggcacgaggctccatgatcgtcctgcagaatctcaccttgattacaggtgactccttgacctccagcaacgatgatgaggaccccaagtcccatagggacccctcgaataggcacagttacccccagcaagcaccctactggacacacccccagcgcatggagaagaaactgcatgcagtacctgcggggaacaccgtcaagttccgctgtccagctgcaggcaaccccacgcccaccatccgctggcttaaggatggacaggcctttcatggggagaaccgcattggaggcattcggctgcgccatcagcactggagtctcgtgatggagagcgtggtgccctcggaccgcggcacatacacctgcctggtagagaacgctgtgggcagcatccgctataactacctgctagatgtgctggagcggtccccgcaccggcccatcctgcaggccgggctcccggccaacaccacagccgtggtgggcagcgacgtggagctgctgtgcaaggtgtacagcgatgcccagccccacatccagtggctgaagcacatcgtcatcaacggcagcagcttcggagccgacggtttcccctatgtgcaagtcctaaagactgcagacatcaatagctcagaggtggaggtcctgtacctgcggaacgtgtcagccgaggacgcaggcgagtacacctgcctcgcaggcaattccatcggcctctcctaccagtctgcctggctcacggtgctgccaggtactgggcgcatcccccacctcacatgtgacagcctgactccagcaggcagaaccaagtctcccactttgcagttctccctggagtcaggctcttccggcaagtcaagctcatccctggtacgaggcgtgcgtctctcctccagcggccccgccttgctcgccggcctcgtgagtctagatctacctctcgacccactatgggagttcccccgggacaggctggtgcttgggaagcccctaggcgagggctgctttggccaggtagtacgtgcagaggcctttggcatggaccctgcccggcctgaccaagccagcactgtggccgtcaagatgctcaaagacaacgcctctgacaaggacctggccgacctggtctcggagatggaggtgatgaagctgatcggccgacacaagaacatcatcaacctgcttggtgtctgcacccaggaagggcccctgtacgtgatcgtggagtgcgccgccaagggaaacctgcgggagttcctgcgggcccggcgccccccaggccccgacctcagccccgacggtcctcggagcagtgaggggccgctctccttcccagtcctggtctcctgcgcctaccaggtggcccgaggcatgcagtatctggagtcccggaagtgtatccaccgggacctggctgcccgcaatgtgctggtgactgaggacaatgtgatgaagattgctgactttgggctggcccgcggcgtccaccacattgactactataagaaaaccagcaacggccgcctgcctgtgaagtggatggcgcccgaggccttgtttgaccgggtgtacacacaccagagtgacgtgtggtcttttgggatcctgctatgggagatcttcaccctcgggggctccccgtatcctggcatcccggtggaggagctgttctcgctgctgcgggagggacatcggatggaccgacccccacactgccccccagagctgtacgggctgatgcgtgagtgctggcacgcagcgccctcccagaggcctaccttcaagcagctggtggaggcgctggacaaggtcctgctggccgtctctgaggagtacctcgacctccgcctgaccttcggaccctattccccctctggtggggacgccagcagcacctgctcctccagcgattctgtcttcagccacgaccccctgccattgggatccagctccttccccttcgggtctggggtgcagacatgagcaaggctcaaggctgtgcaggcacataggctggtggccttgggccttggggctcagccacagcctgacacagtgctcgaccttgatagcatg

SEQ ID NO: 134410 - DNA, 2733 bp, Homo sapiens
  Payload ID: 6256
  Gene Symbol: FGFR4
  Gene Name: fibroblast growth factor receptor 4
  ENST ID: ENST00000393648
  CDS Start-End: 183-2387
gtcgcgggtacattcctcgctcccggccgaggagcgctcgggctgtctgcggaccctgccgcgtgcaggggtcgcggccggctggagctgggagtgaggcggcggaggagccaggtgaggaggagccaggaaggcagttggtgggaagtccagcttgggtccctgagagctgtgagaaggagatgcggctgctgctggccctgttgggggtcctgctgagtgtgcctgggcctccagtcttgtccctggaggcctctgaggaagtggagcttgagccctgcctggctcccagcctggagcagcaagagcaggagctgacagtagcccttgggcagcctgtgcgtctgtgctgtgggcgggctgagcgtggtggccactggtacaaggagggcagtcgcctggcacctgctggccgtgtacggggctggaggggccgcctagagattgccagcttcctacctgaggatgctggccgctacctctgcctggcacgaggctccatgatcgtcctgcagaatctcaccttgattacaggtgactccttgacctccagcaacgatgatgaggaccccaagtcccatagggacccctcgaataggcacagttacccccagcaagcaccctactggacacacccccagcgcatggagaagaaactgcatgcagtacctgcggggaacaccgtcaagttccgctgtccagctgcaggcaaccccacgcccaccatccgctggcttaaggatggacaggcctttcatggggagaaccgcattggaggcattcggctgcgccatcagcactggagtctcgtgatggagagcgtggtgccctcggaccgcggcacatacacctgcctggtagagaacgctgtgggcagcatccgctataactacctgctagatgtgctggagcggtccccgcaccggcccatcctgcaggccgggctcccggccaacaccacagccgtggtgggcagcgacgtggagctgctgtgcaaggtgtacagcgatgcccagccccacatccagtggctgaagcacatcgtcatcaacggcagcagcttcggagccgacggtttcccctatgtgcaagtcctaaagactgcagacatcaatagctcagaggtggaggtcctgtacctgcggaacgtgtcagccgaggacgcaggcgagtacacctgcctcgcaggcaattccatcggcctctcctaccagtctgcctggctcacggtgctgccagaggaggaccccacatggaccgcagcagcgcccgaggccagttctccctggagtcaggctcttccggcaagtcaagctcatccctggtacgaggcgtgcgtctctcctccagcggccccgccttgctcgccggcctcgctggtgcttgggaagcccctaggcgagggctgctttggccaggtagtacgtgcagaggcctttggcatggaccctgcccggcctgaccaagccagcactgtggccgtcaagatgctcaaagacaacgcctctgacaaggacctggccgacctggtctcggagatggaggtgatgaagctgatcggccgacacaagaacatcatcaacctgcttggtgtctgcacccaggaagggcccctgtacgtgatcgtggagtgcgccgccaagggaaacctgcgggagttcctgcgggcccggcgccccccaggccccgacctcagccccgacggtcctcggagcagtgaggggccgctctccttcccagtcctggtctcctgcgcctaccaggtggcccgaggcatgcagtatctggagtcccggaagtgtatccaccgggacctggctgcccgcaatgtgctggtgactgaggacaatgtgatgaagattgctgactttgggctggcccgcggcgtccaccacattgactactataagaaaaccagcaacggccgcctgcctgtgaagtggatggcgcccgaggccttgtttgaccgggtgtacacacaccagagtgacgtgtggtcttttgggatcctgctatgggagatcttcaccctcgggggctccccgtatcctggcatcccggtggaggagctgttctcgctgctgcgggagggacatcggatggaccgacccccacactgccccccagagctgtacgggctgatgcgtgagtgctggcacgcagcgccctcccagaggcctaccttcaagcagctggtggaggcgctggacaaggtcctgctggccgtctctgaggagtacctcgacctccgcctgaccttcggaccctattccccctctggtggggacgccagcagcacctgctcctccagcgattctgtcttcagccacgaccccctgccattgggatccagctccttccccttcgggtctggggtgcagacatgagcaaggctcaaggctgtgcaggcacataggctggtggccttgggccttggggctcagccacagcctgacacagtgctcgaccttgatagcatggggcccctggcccagagttgctgtgccgtgtccaagggccgtgcccttgcccttggagctgccgtgcctgtgtcctgatggcccaaatgtcagggttctgctcggcttcttggaccttggcgcttagtccccatcccgggtttggctgagcctggctggagagctgctatgctaaacctcctgcctcccaataccagcaggaggttctgggcctctgaaccccctttccccacacctccccctgctgctgctg

SEQ ID NO: 134411 - DNA, 713 bp, Homo sapiens
  Payload ID: 6256
  Gene Symbol: FGFR4
  Gene Name: fibroblast growth factor receptor 4
  ENST ID: ENST00000430285
  CDS Start-End: 28-246
tgggtccctgagagctgtgagaaggagatgcggctgctgctggccctgttgggggtcctgctgagtgtgcctgggcctccagtcttgtccctggaggcctctgaggaagtggagcttgcaagcattcatctatcactgtgtctgcgagagaggactggccttgcagggcgcagggccctaagctgggctgcagagctggtgagccctgcctggctcccagcctggagcagcaagagcaggagctgacagtagcccttgggcagcctgtgcgtctgtgctgtgggcgggctgagcgtggtggccactggtacaaggagggcagtcgcctggcacctgctggccgtgtacggggctggaggggccgcctagagattgccagcttcctacctgaggatgctggccgctacctctgcctggcacgaggctccatgatcgtcctgcagaatctcaccttgattacaggtgactccttgacctccagcaacgatgatgaggaccccaagtcccatagggacccctcgaataggcacagttacccccagcaagcaccctactggacacacccccagcgcatggagaagaaactgcatgcagtacctgcggggaacaccgtcaagttccgctgtccagctgcaggcaaccccacgcccaccatccgctggcttaaggatggacaggcctttcatggggagaaccgcattggaggcattcgg

SEQ ID NO: 134412 - DNA, 594 bp, Homo sapiens
  Payload ID: 6256
  Gene Symbol: FGFR4
  Gene Name: fibroblast growth factor receptor 4
  ENST ID: ENST00000513166
  CDS Start-End: 271-594
tcttcgcgccggcggcagagatgagggacctgaggccccgaaaagttcagtcacttagtgcccgggggcctccagcgcgagtgcgggaggctgaaggagaacccaggactgtctgatgcctaaggcaggccctccattcccacgtggggggtggtcggtcagcggtcagcagccatgggtgactcgactaaggactctgatatcagggcagcctggggaaggcagttggtgggaagtccagcttgggtccctgagagctgtgagaaggagatgcggctgctgctggccctgttgggggtcctgctgagtgtgcctgggcctccagtcttgtccctggaggcctctgaggaagtggagcttgagccctgcctggctcccagcctggagcagcaagagcaggagctgacagtagcccttgggcagcctgtgcgtctgtgctgtgggcgggctgagcgtggtggccactggtacaaggagggcagtcgcctggcacctgctggccgtgtacggggctggaggggccgcctagagattgccagcttcctacctgaggatgctggccgctacctctgcctggcacgaggctccatgatc

SEQ ID NO: 134413 - DNA, 838 bp, Homo sapiens
  Payload ID: 6256
  Gene Symbol: FGFR4
  Gene Name: fibroblast growth factor receptor 4
  ENST ID: ENST00000511076
  CDS Start-End: 1-838
caggtatacggacatcatcctgtacgcgtcgggctccctggccttggctgtgctcctgctgctggccgggctgtatcgagggcaggcgctccacggccggcacccccgcccgcccgccactgtgcagaagctctcccgcttccctctggcccgacagtcaggctcttccggcaagtcaagctcatccctggtacgaggcgtgcgtctctcctccagcggccccgccttgctcgccggcctcgtgagtctagatctacctctcgacccactatgggagttcccccgggacaggctggtgcttgggaagcccctaggcgagggctgctttggccaggtagtacgtgcagaggcctttggcatggaccctgcccggcctgaccaagccagcactgtggccgtcaagatgctcaaagacaacgcctctgacaaggacctggccgacctggtctcggagatggaggtgatgaagctgatcggccgacacaagaacatcatcaacctgcttggtgtctgcacccaggaagggcccctgtacgtgatcgtggagtgcgccgccaagggaaacctgcgggagttcctgcgggcccggcgccccccaggccccgacctcagccccgacggtcctcggagcagtgaggggccgctctccttcccagtcctggtctcctgcgcctaccaggtggcccgaggcatgcagtatctggagtcccggaagtgtatccaccgggacctggctgcccgcaatgtgctggtgactgaggacaatgtgatgaagattgctgactttgggctggcccgcggcgtccaccacattgactactataagaaaaccagcaac

SEQ ID NO: 134414 - DNA, 770 bp, Homo sapiens
  Payload ID: 6256
  Gene Symbol: FGFR4
  Gene Name: fibroblast growth factor receptor 4
  ENST ID: ENST00000503708
  CDS Start-End: 168-770
gtcgcgggtacattcctcgctcccggccgaggagcgctcgggctgtctgcggaccctgccgcgtgcaggggtcgcggccggctggagctgggagtgaggcggcggaggagccaggaaggcagttggtgggaagtccagcttgggtccctgagagctgtgagaaggagatgcggctgctgctggccctgttgggggtcctgctgagtgtgcctgggcctccagtcttgtccctggaggcctctgaggaagtggagcttgagccctgcctggctcccagcctggagcagcaagagcaggagctgacagtagcccttgggcagcctgtgcgtctgtgctgtgggcgggctgagcgtggtggccactggtacaaggagggcagtcgcctggcacctgctggccgtgtacggggctggaggggccgcctagagattgccagcttcctacctgaggatgctggccgctacctctgcctggcacgaggctccatgatcgtcctgcagaatctcaccttgattacaggtgactccttgacctccagcaacgatgatgaggaccccaagtcccatagggacccctcgaataggcacagttacccccagcaagcaccctactggacacacccccagcgcatggagaagaaactgcatgcagtacctgcggggaacaccgtcaagttccgctgtccagctgcaggcaaccccacgcccaccatccgctggcttaaggatggacaggcctttcatggggagaaccgcattggaggcattcgg

SEQ ID NO: 134415 - DNA, 2638 bp, Homo sapiens
  Payload ID: 6256
  Gene Symbol: FGFR4
  Gene Name: fibroblast growth factor receptor 4
  Uniprot ID: P22455
  ENST ID: ENST00000502906
  CDS Start-End: 174-2582
acattcctcgctcccggccgaggagcgctcgggctgtctgcggaccctgccgcgtgcaggggtcgcggccggctggagctgggagtgaggcggcggaggagccaggtgaggaggagccaggaaggcagttggtgggaagtccagcttgggtccctgagagctgtgagaaggagatgcggctgctgctggccctgttgggggtcctgctgagtgtgcctgggcctccagtcttgtccctggaggcctctgaggaagtggagcttgagccctgcctggctcccagcctggagcagcaagagcaggagctgacagtagcccttgggcagcctgtgcgtctgtgctgtgggcgggctgagcgtggtggccactggtacaaggagggcagtcgcctggcacctgctggccgtgtacggggctggaggggccgcctagagattgccagcttcctacctgaggatgctggccgctacctctgcctggcacgaggctccatgatcgtcctgcagaatctcaccttgattacaggtgactccttgacctccagcaacgatgatgaggaccccaagtcccatagggacccctcgaataggcacagttacccccagcaagcaccctactggacacacccccagcgcatggagaagaaactgcatgcagtacctgcggggaacaccgtcaagttccgctgtccagctgcaggcaaccccacgcccaccatccgctggcttaaggatggacaggcctttcatggggagaaccgcattggaggcattcggctgcgccatcagcactggagtctcgtgatggagagcgtggtgccctcggaccgcggcacatacacctgcctggtagagaacgctgtgggcagcatccgctataactacctgctagatgtgctggagcggtccccgcaccggcccatcctgcaggccgggctcccggccaacaccacagccgtggtgggcagcgacgtggagctgctgtgcaaggtgtacagcgatgcccagccccacatccagtggctgaagcacatcgtcatcaacggcagcagcttcggagccgacggtttcccctatgtgcaagtcctaaagactgcagacatcaatagctcagaggtggaggtcctgtacctgcggaacgtgtcagccgaggacgcaggcgagtacacctgcctcgcaggcaattccatcggcctctcctaccagtctgcctggctcacggtgctgccagaggaggaccccacatggaccgcagcagcgcccgaggccaggtatacggacatcatcctgtacgcgtcgggctccctggccttggctgtgctcctgctgctggccgggctgtatcgagggcaggcgctccacggccggcacccccgcccgcccgccactgtgcagaagctctcccgcttccctctggcccgacagttctccctggagtcaggctcttccggcaagtcaagctcatccctggtacgaggcgtgcgtctctcctccagcggccccgccttgctcgccggcctcgtgagtctagatctacctctcgacccactatgggagttcccccgggacaggctggtgcttgggaagcccctaggcgagggctgctttggccaggtagtacgtgcagaggcctttggcatggaccctgcccggcctgaccaagccagcactgtggccgtcaagatgctcaaagacaacgcctctgacaaggacctggccgacctggtctcggagatggaggtgatgaagctgatcggccgacacaagaacatcatcaacctgcttggtgtctgcacccaggaagggcccctgtacgtgatcgtggagtgcgccgccaagggaaacctgcgggagttcctgcgggcccggcgccccccaggccccgacctcagccccgacggtcctcggagcagtgaggggccgctctccttcccagtcctggtctcctgcgcctaccaggtggcccgaggcatgcagtatctggagtcccggaagtgtatccaccgggacctggctgcccgcaatgtgctggtgactgaggacaatgtgatgaagattgctgactttgggctggcccgcggcgtccaccacattgactactataagaaaaccagcaacggccgcctgcctgtgaagtggatggcgcccgaggccttgtttgaccgggtgtacacacaccagagtgacgtgtggtcttttgggatcctgctatgggagatcttcaccctcgggggctccccgtatcctggcatcccggtggaggagctgttctcgctgctgcgggagggacatcggatggaccgacccccacactgccccccagagctgtacgggctgatgcgtgagtgctggcacgcagcgccctcccagaggcctaccttcaagcagctggtggaggcgctggacaaggtcctgctggccgtctctgaggagtacctcgacctccgcctgaccttcggaccctattccccctctggtggggacgccagcagcacctgctcctccagcgattctgtcttcagccacgaccccctgccattgggatccagctccttccccttcgggtctggggtgcagacatgagcaaggctcaaggctgtgcaggcacataggctggtggccttgggccttggggctca

SEQ ID NO: 134416 - DNA, 552 bp, Homo sapiens
  Payload ID: 6256
  Gene Symbol: FGFR4
  Gene Name: fibroblast growth factor receptor 4
  ENST ID: ENST00000514472
  CDS Start-End: 210-552
acattcctcgctcccggccgaggagcgctcgggctgtctgcggaccctgccgcgtgcaggggtcgcggccggctggagctgggagtgaggcggcggaggagccaggtgaggaggagccaggtgagcaggaccctgtgctgggcgcggagtcacgcaggctcgagttggtgggaagtccagcttgggtccctgagagctgtgagaaggagatgcggctgctgctggccctgttgggggtcctgctgagtgtgcctgggcctccagtcttgtccctggaggcctctgaggaagtggagcttgagccctgcctggctcccagcctggagcagcaagagcaggagctgacagtagcccttgggcagcctgtgcgtctgtgctgtgggcgggctgagcgtggtggccactggtacaaggagggcagtcgcctggcacctgctggccgtgtacggggctggaggggccgcctagagattgccagcttcctacctgaggatgctggccgctacctctgcctggcacgaggctccatgatcgtcctgcagaatctcacct

SEQ ID NO: 134417 - DNA, 709 bp, Homo sapiens
  Payload ID: 6256
  Gene Symbol: FGFR4
  Gene Name: fibroblast growth factor receptor 4
  ENST ID: ENST00000510911
  CDS Start-End: 448-709
attcctcgctcccggccgaggagcgctcgggctgtctgcggaccctgccgcgtgcaggggtcgcggccggctggagctgggagtgaggcggcggaggagccaggtgaggaggagccagagacggggtttcaccgtgttagccaggatgttctcgatctcctgacctcgtgatccgcccacctcggcctcccaaagtgctgggattacaggtgtgaaccatcgcgcccagccgacttgtagttttttaaaactctgctggaagatgaaggttgaagagccgagggagaggatgtttccagaggcccatgcaagagatggccatgacctgccttgagaaggggcaggggaagccagatggactggaagtggagtggcagtgaccaaggaggaggaggaaggcagttggtgggaagtccagcttgggtccctgagagctgtgagaaggagatgcggctgctgctggccctgttgggggtcctgctgagtgtgcctgggcctccagtcttgtccctggaggcctctgaggaagtggagcttgagccctgcctggctcccagcctggagcagcaagagcaggagctgacagtagcccttgggcagcctgtgcgtctgtgctgtgggcgggctgagcgtggtggccactggtacaaggagggcagtcgcctggcacctgctggccgtgtacggggctggaggggccgcctagaga

SEQ ID NO: 134418 - DNA, 6550 bp, Homo sapiens
  Payload ID: 6257
  Gene Symbol: FRS2
  Gene Name: fibroblast growth factor receptor substrate 2
  Uniprot ID: Q8WU20
  ENST ID: ENST00000397997
  CDS Start-End: 190-1716
tcttcctatagatacgtaccaagattaacaatgactccaggatagagttatgaccaacactactaaaggttaaatcagcaaacaaagaaaacatggtattttgaaatatgattaaactcctgatgctgcagcagaggctaagaatattaatggccagatctagtgcacacatggtcttctgaagaagccatgggtagctgttgtagctgtccagataaagacactgtcccagataaccatcggaacaagtttaaggtcattaatgtggatgatgatgggaatgagttaggttctggcataatggaacttacagacacagaactgattttatacacccgcaaacgtgactcagtaaaatggcactacctctgcctgcgacgctatggctatgactcgaatctcttttcttttgaaagtggtcgaaggtgtcaaactggacaaggaatctttgcctttaagtgtgcccgtgcagaagaattatttaacatgttgcaagagattatgcaaaataatagtataaatgtggtggaagagccagttgtagaaagaaataatcatcagacagaattggaagtccctagaacacctcgaacacctacaactccaggatttgctgctcagaacttacctaatggatatccccgatatccctcatttggagatgcttcatcccatccgtcaagcagacatccttctgtgggaagtgctcgcctgccttcagtaggggaagaatctacacatcctttgcttgtggctgaggaacaagtacatacctatgtcaacactacaggtgtgcaagaagagcggaaaaaccgcacaagtgtgcatgttccattggaggcgagggtttctaacgctgaaagcagcacaccaaaagaagaaccaagtagtattgaggacagggatcctcagattcttcttgaacctgaaggagtcaaatttgttttagggccaacccctgttcaaaagcagttaatggaaaaagagaaactggagcaacttggaagagatcaagttagtggaagtggagcaaataacacagaatgggacactggctatgacagtgatgaacgaagagatgcaccctctgttaacaaactggtgtatgaaaatataaatgggctatctatccctagtgcctcaggggtcaggagaggtcgtctgacatccaccagtacctcagatacccagaatatcaacaactcagctcagagaagaactgcattattaaactatgaaaatctaccatctttgcctcctgtttgggaagcccgcaagctaagtagggatgaagatgacaatttaggaccaaagaccccatctctaaatggctaccataataatctagatccaatgcataactatgtaaatacagagaatgtaacagtgccagcaagtgctcacaaaatagaatattcaaggcgtcgggactgtacaccaacagtctttaactttgatatcagacgcccaagtttagaacacaggcagcttaattacatacaggttgacttggaaggtggcagtgactctgacaaccctcagactccaaaaacgcctacaactccccttccacaaacccctaccaggcgcacagagctgtatgccgtgatagacatcgagagaactgctgctatgtcaaatttgcagaaagcactgccacgagatgatggtacatctaggaaaactagacacaatagtactgatctgcccatgtgagcctggaaagcattgtgttgtttgcacctttgtgaagtttttaaaaatgaagatgcaagtgcttcattttcatttctaaacactaactccttttatagactgataaaatttttttctgaatatttcatgtgcatctttaactaaagggaattaatgtagagcaggtactccttaaagaacactaatttcattatatactactcgttgtacagcagcattcccgttttcacagtgcctatttaaaatgagagttgaagtaaatgacatgctggttgatttttatcaatattctggacttaacgcatacctttcatgtctaagtcatggttggcttttaaaactttttataaagcctcttgacaatgtacattgctaacaggtaactataggctttgaaagtaatgctcgtagattcagtgttcacagtatgtggcctccagcatgtaacatgaggaatcctttatttcattaattaatggctttttgacttgagccaaaacatatgtaaaggaaacagaagtaccgcacctcctcttacaccagtcagctcctttgccttcagtgttactagaaagcggcctgtgtccatgagtgtgctttgctgttggtgcactgaaaggcaggaaggagacaagattttctatttactcatctcatgatgtcatttgaagggcatgtccagatatcttaaaattataataggctcaagaatcagtctcaggtcactttacccaaaaacatttgaaaatctgaaccacaatctcctgaaagtttttctcctatagattgttgacaacacattgttttctggaggcatttgtgccattaggtttccatttatcttcagtttttttctttggtgtttgggatgtcttattttgttgccttatgtccttttcaatttaaaatgtttgagtttgtatatagttttgaaattggattatgtgttcattgttgtttagtttgcatttttgtcaaattatggttttgaaggttcatttggaacttactgttagtctgtaacagggttgcccttgtccagtatttatttataagctgtttacttttcaagttgataaaaacattctccaattctaaatttgcttgtgtccataggtgatctctttagcaaactgagaaaaaaaggaagctacttttaacatgcaaagttccctcaaggtgtaccgtgttgtctctgtgggcactcttccccagcactttagcagtaattcccccagctacacgctgcagttgtactctgcccactctagtgttcctcagctctgctgtccttttacttgtagctggatctttgattatccttcgatttccatgaaatattaatattgttgccagcatagcaggtacagtggaagtcttgtagcagtgagattgtatcataatttaggatttaaaatgaattaaagtttatataaactgaagagtctccatatgtcaaactcttggaaaatcaaagatgttccaatttcctaaacactagagaatacgagagaaggtagagtggaaaaggttaggtaaccttgcaaaatattttactattttctctaaatatgaggaagtttgagattatgatctggatctaccagatataactaaggttaatttagcatgaaaaagttttagtcatattggcatccaacctattcagtaaccgaatcataggacaatgatggattaggagaacaatagagtgggatcattataaagaaaataaattattaaaggtgtctttatcgttttagtgccatttttagtgtctttactataaatcaatatcagtgtattttatcattctatgtgcatagcagaattttcttttctcccttttgttcccctgtgaacttggtgcttattaaagtgctcactgttctcttaaaagagagcagtggtataggtgtgcagtttccatgatgcaggttccatttttaatatattgttccacttatcctttcttctgagtaaattgctaattgtgccaaatttatgtaatagtttttgtaatgtggaataagaattatgatggaaccattgcacatttttttctgaaacagccagtcaaggcagaacattaatctccaaatgcaagggctgatctatttattcattttggaggttgggtactttattctttctttccgtcatccttttcattgtttcccccggattctaattagtttttattttttttagataactccaatataatcattacagtttatgctttaaatactatgtgctttaaaaaggaaaatgggaccaatttgtctgctaagaatttgattttaggtactataagagtattaggaaaatatatacaactggtgttaatttctagatattttctagaaatcacttgtgttcctatttaataaaaggtaatttagaatactacttgtcctttgcagtagtttagtaatgggcattaagctgtgtcctcgaaggatgtacctattactaggtgcattttagaatgaaatattgatattttattagcatataattgtggccatatatctcagattttctgaggcagatctaattttagataattctgttggtagaccatgtgatccttctttttggttttggaaatataatcattgttaatgttttccctccaaatagaatactgttttatccatacaaatcataacagcatctatcccatgctagggttggaaactgatattggtattacttgtgttttttcttagtgtgttttatttcccagtttcatcttcttctaaaaatgaaaatatggtgccttccctccctccaggaagactggcaaatatttccttttatttactgctgctgtggagtgatgagatatgcactttactctttaagattcagcaaaaagcttttcacttctcagtatatccagaatacatcatatctgggacttaggaaaatttgccaagcaatctttgtttttatagatactaatgttgaccctctccagcgttcaatgttataaatagaacaagtcaagctagtgtttatctcctccccctccccaaaactgtggcacagcatataaaaatgtacctcaataatgttctattaaaaatgggacaggggccttatgttttcataatttcccaacaatgtgccgccatatttttgcctcaaggtaaaggttttaacagatgaaaaagtacttcccaattcccccgtgctattcctaacctataatgcccaaatgttttgtgcaatgtgtagtgtgtgtgtataaatacatatattcttgaaatagacataccatcagagacatcattcacaagtaactgatgtattggcatctcattcatatttctgatgtgtgaggtatatggtactaattaccttttccttgatgtttgccaaatttgaataaaggcattggtacgaaattacagaatgtaaagaaaatgtttttggcttgaaaaattaacatattttatgacgtaccacagtatactctgcccaaaccagcaccctatctatctttcctgttctttacatccctgttccccatccctacttcctcatttttggtataacacagttcttttgtagcatcattataattgcagttctatggcaattggacagttatagcatggaaacagactggtataagtagtacagtagtcaccagtgtgccacatttgcattagtaatgcaaaatatacattttataaaggacaaactttgtgttatgttttattttcattacattgtataatattgtaagactattgtatgtcctaatttgcattataaatgtttttttcctacgtaaaggcataaatatagcaactttgtataaaggtagcttattagatttttaattttttcttttataaaaaattgtccaacagtgggactaccattgccaaattgtatatgaaatatgaattttacccccatggttaatttcttttataaacattccatatttctctaataaaaagacataagtgatactgtactatgcatacattgtatcttaatgctgtttcagatcagcattttaaattttggtttgcatttttaatattggcaaaacgtaaccactgttaattaaaataaaaccttgttgtatatgtaacaacataattttccctctatcccttcccaccctttgttctctatttctccctatcagtgccaacttcatacattttgtagcatggcaataaaatataacttttacactgaggccgagtgtggctttttggaggaagtggggatgggacgattgccctctagttgtcctttgcatatgactgttttttgccatataagccatgtcatcaggcatgaaaagttttctcatatatgatgtaaacttgcttttaaggacaagtgtgaatgtgctttttaagcttaatttttgtcatgacaactaattttttttatctttggagaagtcagagttctttacaatcaaacgtttattaactggagtacttagaataagctagtaattgaatttagttcaagggctaagcaacacatttttaaatccttatttattgtagagtattagtatactgtcctacaaattatgtaaaatatggtttaatattagatgactttggattttgcaatgccttactgttgtcattctagcataaatatccataatgaggtactcaagttgatactggaagctgagctgatcatacactgacctgaagcattcatgaaaagctgctttattgaataaagtctgattggagttcttttcatgctcactttccccttattgctgaaagtagattgcaataaaaccccaataaaacgtttggtcggatatctactt

SEQ ID NO: 134419 - DNA, 521 bp, Homo sapiens
  Payload ID: 6257
  Gene Symbol: FRS2
  Gene Name: fibroblast growth factor receptor substrate 2
  ENST ID: ENST00000547414
  CDS Start-End: 428-521
ttttccaagattcgggccggagagaggccttgtaggcacagcggctgagactcgatctgctccaagtaggggctccagcgcgggtcggagtctgggggttcgcgcccgccgacccgcgccctgctccctctcagcacctgggcggacgaaatgaccattaagaagtagatgcccagatgcaaaagtgatgaaacagtccatttgtcataaagtaagatgcagctgtggcatgtcaaccagcttggaacaaaattgtatctgtttttctcagaagagaattccacaaggttaaatcagcaaacaaagaaaacatggtattttgaaatatgattaaactcctgatgctgcagcagaggctaagaatattaatggccagatctaggtcattaatgtggatgatgatgggaatgagttaggttctggcataatggaacttacagacacagaactgattttatacacccgcaaacgtgactcagtaaaatggcactacctctgcctgcgacgctatggctatgact

SEQ ID NO: 134420 - DNA, 6600 bp, Homo sapiens
  Payload ID: 6257
  Gene Symbol: FRS2
  Gene Name: fibroblast growth factor receptor substrate 2
  Uniprot ID: Q8WU20
  ENST ID: ENST00000550389
  CDS Start-End: 247-1773
gaggccttgtaggcacagcggctgagactcgatctgctccaagtaggggctccagcgcgggtcggagtctgggggttcgcgcccgccgacccgcgccctgctccctctcagcacctgggcggacggttaaatcagcaaacaaagaaaacatggtattttgaaatatgattaaactcctgatgctgcagcagaggctaagaatattaatggccagatctagtgcacacatggtcttctgaagaagccatgggtagctgttgtagctgtccagataaagacactgtcccagataaccatcggaacaagtttaaggtcattaatgtggatgatgatgggaatgagttaggttctggcataatggaacttacagacacagaactgattttatacacccgcaaacgtgactcagtaaaatggcactacctctgcctgcgacgctatggctatgactcgaatctcttttcttttgaaagtggtcgaaggtgtcaaactggacaaggaatctttgcctttaagtgtgcccgtgcagaagaattatttaacatgttgcaagagattatgcaaaataatagtataaatgtggtggaagagccagttgtagaaagaaataatcatcagacagaattggaagtccctagaacacctcgaacacctacaactccaggatttgctgctcagaacttacctaatggatatccccgatatccctcatttggagatgcttcatcccatccgtcaagcagacatccttctgtgggaagtgctcgcctgccttcagtaggggaagaatctacacatcctttgcttgtggctgaggaacaagtacatacctatgtcaacactacaggtgtgcaagaagagcggaaaaaccgcacaagtgtgcatgttccattggaggcgagggtttctaacgctgaaagcagcacaccaaaagaagaaccaagtagtattgaggacagggatcctcagattcttcttgaacctgaaggagtcaaatttgttttagggccaacccctgttcaaaagcagttaatggaaaaagagaaactggagcaacttggaagagatcaagttagtggaagtggagcaaataacacagaatgggacactggctatgacagtgatgaacgaagagatgcaccctctgttaacaaactggtgtatgaaaatataaatgggctatctatccctagtgcctcaggggtcaggagaggtcgtctgacatccaccagtacctcagatacccagaatatcaacaactcagctcagagaagaactgcattattaaactatgaaaatctaccatctttgcctcctgtttgggaagcccgcaagctaagtagggatgaagatgacaatttaggaccaaagaccccatctctaaatggctaccataataatctagatccaatgcataactatgtaaatacagagaatgtaacagtgccagcaagtgctcacaaaatagaatattcaaggcgtcgggactgtacaccaacagtctttaactttgatatcagacgcccaagtttagaacacaggcagcttaattacatacaggttgacttggaaggtggcagtgactctgacaaccctcagactccaaaaacgcctacaactccccttccacaaacccctaccaggcgcacagagctgtatgccgtgatagacatcgagagaactgctgctatgtcaaatttgcagaaagcactgccacgagatgatggtacatctaggaaaactagacacaatagtactgatctgcccatgtgagcctggaaagcattgtgttgtttgcacctttgtgaagtttttaaaaatgaagatgcaagtgcttcattttcatttctaaacactaactccttttatagactgataaaatttttttctgaatatttcatgtgcatctttaactaaagggaattaatgtagagcaggtactccttaaagaacactaatttcattatatactactcgttgtacagcagcattcccgttttcacagtgcctatttaaaatgagagttgaagtaaatgacatgctggttgatttttatcaatattctggacttaacgcatacctttcatgtctaagtcatggttggcttttaaaactttttataaagcctcttgacaatgtacattgctaacaggtaactataggctttgaaagtaatgctcgtagattcagtgttcacagtatgtggcctccagcatgtaacatgaggaatcctttatttcattaattaatggctttttgacttgagccaaaacatatgtaaaggaaacagaagtaccgcacctcctcttacaccagtcagctcctttgccttcagtgttactagaaagcggcctgtgtccatgagtgtgctttgctgttggtgcactgaaaggcaggaaggagacaagattttctatttactcatctcatgatgtcatttgaagggcatgtccagatatcttaaaattataataggctcaagaatcagtctcaggtcactttacccaaaaacatttgaaaatctgaaccacaatctcctgaaagtttttctcctatagattgttgacaacacattgttttctggaggcatttgtgccattaggtttccatttatcttcagtttttttctttggtgtttgggatgtcttattttgttgccttatgtccttttcaatttaaaatgtttgagtttgtatatagttttgaaattggattatgtgttcattgttgtttagtttgcatttttgtcaaattatggttttgaaggttcatttggaacttactgttagtctgtaacagggttgcccttgtccagtatttatttataagctgtttacttttcaagttgataaaaacattctccaattctaaatttgcttgtgtccataggtgatctctttagcaaactgagaaaaaaaggaagctacttttaacatgcaaagttccctcaaggtgtaccgtgttgtctctgtgggcactcttccccagcactttagcagtaattcccccagctacacgctgcagttgtactctgcccactctagtgttcctcagctctgctgtccttttacttgtagctggatctttgattatccttcgatttccatgaaatattaatattgttgccagcatagcaggtacagtggaagtcttgtagcagtgagattgtatcataatttaggatttaaaatgaattaaagtttatataaactgaagagtctccatatgtcaaactcttggaaaatcaaagatgttccaatttcctaaacactagagaatacgagagaaggtagagtggaaaaggttaggtaaccttgcaaaatattttactattttctctaaatatgaggaagtttgagattatgatctggatctaccagatataactaaggttaatttagcatgaaaaagttttagtcatattggcatccaacctattcagtaaccgaatcataggacaatgatggattaggagaacaatagagtgggatcattataaagaaaataaattattaaaggtgtctttatcgttttagtgccatttttagtgtctttactataaatcaatatcagtgtattttatcattctatgtgcatagcagaattttcttttctcccttttgttcccctgtgaacttggtgcttattaaagtgctcactgttctcttaaaagagagcagtggtataggtgtgcagtttccatgatgcaggttccatttttaatatattgttccacttatcctttcttctgagtaaattgctaattgtgccaaatttatgtaatagtttttgtaatgtggaataagaattatgatggaaccattgcacatttttttctgaaacagccagtcaaggcagaacattaatctccaaatgcaagggctgatctatttattcattttggaggttgggtactttattctttctttccgtcatccttttcattgtttcccccggattctaattagtttttattttttttagataactccaatataatcattacagtttatgctttaaatactatgtgctttaaaaaggaaaatgggaccaatttgtctgctaagaatttgattttaggtactataagagtattaggaaaatatatacaactggtgttaatttctagatattttctagaaatcacttgtgttcctatttaataaaaggtaatttagaatactacttgtcctttgcagtagtttagtaatgggcattaagctgtgtcctcgaaggatgtacctattactaggtgcattttagaatgaaatattgatattttattagcatataattgtggccatatatctcagattttctgaggcagatctaattttagataattctgttggtagaccatgtgatccttctttttggttttggaaatataatcattgttaatgttttccctccaaatagaatactgttttatccatacaaatcataacagcatctatcccatgctagggttggaaactgatattggtattacttgtgttttttcttagtgtgttttatttcccagtttcatcttcttctaaaaatgaaaatatggtgccttccctccctccaggaagactggcaaatatttccttttatttactgctgctgtggagtgatgagatatgcactttactctttaagattcagcaaaaagcttttcacttctcagtatatccagaatacatcatatctgggacttaggaaaatttgccaagcaatctttgtttttatagatactaatgttgaccctctccagcgttcaatgttataaatagaacaagtcaagctagtgtttatctcctccccctccccaaaactgtggcacagcatataaaaatgtacctcaataatgttctattaaaaatgggacaggggccttatgttttcataatttcccaacaatgtgccgccatatttttgcctcaaggtaaaggttttaacagatgaaaaagtacttcccaattcccccgtgctattcctaacctataatgcccaaatgttttgtgcaatgtgtagtgtgtgtgtataaatacatatattcttgaaatagacataccatcagagacatcattcacaagtaactgatgtattggcatctcattcatatttctgatgtgtgaggtatatggtactaattaccttttccttgatgtttgccaaatttgaataaaggcattggtacgaaattacagaatgtaaagaaaatgtttttggcttgaaaaattaacatattttatgacgtaccacagtatactctgcccaaaccagcaccctatctatctttcctgttctttacatccctgttccccatccctacttcctcatttttggtataacacagttcttttgtagcatcattataattgcagttctatggcaattggacagttatagcatggaaacagactggtataagtagtacagtagtcaccagtgtgccacatttgcattagtaatgcaaaatatacattttataaaggacaaactttgtgttatgttttattttcattacattgtataatattgtaagactattgtatgtcctaatttgcattataaatgtttttttcctacgtaaaggcataaatatagcaactttgtataaaggtagcttattagatttttaattttttcttttataaaaaattgtccaacagtgggactaccattgccaaattgtatatgaaatatgaattttacccccatggttaatttcttttataaacattccatatttctctaataaaaagacataagtgatactgtactatgcatacattgtatcttaatgctgtttcagatcagcattttaaattttggtttgcatttttaatattggcaaaacgtaaccactgttaattaaaataaaaccttgttgtatatgtaacaacataattttccctctatcccttcccaccctttgttctctatttctccctatcagtgccaacttcatacattttgtagcatggcaataaaatataacttttacactgaggccgagtgtggctttttggaggaagtggggatgggacgattgccctctagttgtcctttgcatatgactgttttttgccatataagccatgtcatcaggcatgaaaagttttctcatatatgatgtaaacttgcttttaaggacaagtgtgaatgtgctttttaagcttaatttttgtcatgacaactaattttttttatctttggagaagtcagagttctttacaatcaaacgtttattaactggagtacttagaataagctagtaattgaatttagttcaagggctaagcaacacatttttaaatccttatttattgtagagtattagtatactgtcctacaaattatgtaaaatatggtttaatattagatgactttggattttgcaatgccttactgttgtcattctagcataaatatccataatgaggtactcaagttgatactggaagctgagctgatcatacactgacctgaagcattcatgaaaagctgctttattgaataaagtctgattggagttcttttcatgctcactttccccttattgctgaaagtagattgcaataaaaccccaataaaacgtttggtcggata

SEQ ID NO: 134421 - DNA, 611 bp, Homo sapiens
  Payload ID: 6257
  Gene Symbol: FRS2
  Gene Name: fibroblast growth factor receptor substrate 2
  ENST ID: ENST00000547219
  CDS Start-End: 504-611
aaaacccttccctcccccgctcccccggaagtgcttttccaagattcgggccggagagaggccttgtaggcacagcggctgagactcgatctgctccaagtaggggctccagcgcgggtcggagtctgggggttcgcgcccgccgacccgcgccctgctccctctcagcacctgggcggacgctcctggcaaccactatttgagtttctgcctctacaaatttgactattctaggtacttcataaatgaccattaagaagtagatgcccagatgcaaaagtgatgaaacagtccatttgtcataaagtaagatgcagctgtggcatgtcaaccagcttggaacaaaattgtatctgtttttctcagaagagaattccacaaggttaaatcagcaaacaaagaaaacatggtattttgaaatatgattaaactcctgatgctgcagcagaggctaagaatattaatggccagatctagtgcacacatggtcttctgaagaagccatgggtagctgttgtagctgtccagataaagacactgtcccagataaccatcggaacaagtttaaggtcattaatgtggatgatgatgggaatgagttaggttctggc

SEQ ID NO: 134422 - DNA, 781 bp, Homo sapiens
  Payload ID: 6257
  Gene Symbol: FRS2
  Gene Name: fibroblast growth factor receptor substrate 2
  ENST ID: ENST00000550937
  CDS Start-End: 509-781
ggccttgtaggcacagcggctgagactcgatctgctccaagtaggggctccagcgcgggtcggagtctgggggttcgcgcccgccgacccgcgccctgctccctctcagcacctgggcggacgaaatgaccattaagaagtagatgcccagatgcaaaagtgatgaaacagtccatttgtcataaagtaagatgcagctgtggcatgtcaaccagcttggaacaaaattgtatctgtttttctcagaagagaattccacaaggagattttcttctttctaccatcatcaagatcaagcaggcaagtttacttgctgtcatcttctgcaagatacgtaccaagattaacaatgactccaggatagagttatgaccaacactactaaaggttaaatcagcaaacaaagaaaacatggtattttgaaatatgattaaactcctgatgctgcagcagaggctaagaatattaatggccagatctagtgcacacatggtcttctgaagaagccatgggtagctgttgtagctgtccagataaagacactgtcccagataaccatcggaacaagtttaaggtcattaatgtggatgatgatgggaatgagttaggttctggcataatggaacttacagacacagaactgattttatacacccgcaaacgtgactcagtaaaatggcactacctctgcctgcgacgctatggctatgactcgaatctcttttcttttgaaagtggtcgaaggtgtcaaactggacaaggaatctttgcctttaagtgt

SEQ ID NO: 134423 - DNA, 570 bp, Homo sapiens
  Payload ID: 6257
  Gene Symbol: FRS2
  Gene Name: fibroblast growth factor receptor substrate 2
  ENST ID: ENST00000550169
  CDS Start-End: 540-570
tcgatctgctccaagtaggggctccagcgcgggtcggagtctgggggttcgcgcccgccgacccgcgccctgctccctctcagcacctgggcggacggtacccaggctgaagtgcagtgtcacaatcatagctcaccacggtcttgaactcctgggctcaagcgatcattctgactcagcctcccaagtaggtaggaccacaggtgtacagaaatgaccattaagaagtagatgcccagatgcaaaagtgatgaaacagtccatttgtcataaagtaagatgcagctgtggcatgtcaaccagcttggaacaaaattgtatctgtttttctcagaagagaattccacaaggagattttcttctttctaccatcatcaagatcaagcaggcaagtttacttgctgtcatcttctgcaaggttaaatcagcaaacaaagaaaacatggtattttgaaatatgattaaactcctgatgctgcagcagaggctaagaatattaatggccagatctagtgcacacatggtcttctgaagaagccatgggtagctgttgtagctgtccagataaag

SEQ ID NO: 134424 - DNA, 597 bp, Homo sapiens
  Payload ID: 6257
  Gene Symbol: FRS2
  Gene Name: fibroblast growth factor receptor substrate 2
  ENST ID: ENST00000548154
  CDS Start-End: 477-597
ttttccaagattcgggccggagagaggccttgtaggcacagcggctgagactcgatctgctccaagtaggggctccagcgcgggtcggagtctgggggttcgcgcccgccgacccgcgccctgctccctctcagcacctgggcggacgaaatgaccattaagaagtagatgcccagatgcaaaagtgatgaaacagtccatttgtcataaagtaagatgcagctgtggcatgtcaaccagcttggaacaaaattgtatctgtttttctcagaagagaattccacaaggagattttcttctttctaccatcatcaagatcaagcaggcaagtttacttgctgtcatcttctgcaaggttaaatcagcaaacaaagaaaacatggtattttgaaatatgattaaactcctgatgctgcagcagaggctaagaatattaatggccagatctagtgcacacatggtcttctgaagaagccatgggtagctgttgtagctgtccagataaagacactgtcccagataaccatcggaacaagtttaaggtcattaatgtggatgatgatgggaatgagttaggttctggcataatggaactta

SEQ ID NO: 134425 - DNA, 584 bp, Homo sapiens
  Payload ID: 6257
  Gene Symbol: FRS2
  Gene Name: fibroblast growth factor receptor substrate 2
  ENST ID: ENST00000549092
  CDS Start-End: 486-584
acagcggctgagactcgatctgctccaagtaggggctccagcgcgggtcggagtctgggggttcgcgcccgccgacccgcgccctgctccctctcagcacctgggcggacggtacccaggctgaagtgcagtgtcacaatcatagctcaccacggtcttgaactcctgggctcaagcgatcattctgactcagcctcccaagtaggtaggaccacaggtgtacagaaatgaccattaagaagtagatgcccagatgcaaaagtgatgaaacagtccatttgtcataaagtaagatgcagctgtggcatgtcaaccagcttggaacaaaattgtatctgtttttctcagaagagaattccacaaggttaaatcagcaaacaaagaaaacatggtattttgaaatatgattaaactcctgatgctgcagcagaggctaagaatattaatggccagatctagtgcacacatggtcttctgaagaagccatgggtagctgttgtagctgtccagataaagacactgtcccagataaccatcggaacaagtttaaggtcattaatgtggatgatgatgggaatgagtta

SEQ ID NO: 134426 - DNA, 704 bp, Homo sapiens
  Payload ID: 6257
  Gene Symbol: FRS2
  Gene Name: fibroblast growth factor receptor substrate 2
  ENST ID: ENST00000551325
  CDS Start-End: 154-704
agaaattctcaatgtttttcttctgtttttaggttaaatcagcaaacaaagaaaacatggtattttgaaatatgattaaactcctgatgctgcagcagaggctaagaatattaatggccagatctagtgcacacatggtcttctgaagaagccatgggtagctgttgtagctgtccagataaagacactgtcccagataaccatcggaacaagtttaaggtcattaatgtggatgatgatgggaatgagttaggttctggcataatggaacttacagacacagaactgattttatacacccgcaaacgtgactcagtaaaatggcactacctctgcctgcgacgctatggctatgactcgaatctcttttcttttgaaagtggtcgaaggtgtcaaactggacaaggaatctttgcctttaagtgtgcccgtgcagaagaattatttaacatgttgcaagagattatgcaaaataatagtataaatgtggtggaagagccagttgtagaaagaaataatcatcagacagaattggaagtccctagaacacctcgaacacctacaactccaggatttgctgctcagaacttacctaatggatatccccgatatccctcatttggagatgcttcatcccatccgtcaagcagacatccttctgtgggaagtgctcgcctgccttcagtaggggaagaatctacaca

SEQ ID NO: 134427 - DNA, 545 bp, Homo sapiens
  Payload ID: 6257
  Gene Symbol: FRS2
  Gene Name: fibroblast growth factor receptor substrate 2
  ENST ID: ENST00000550316
  CDS Start-End: 510-545
agtgcttttccaagattcgggccggagagaggccttgtaggcacagcggctgagactcgatctgctccaagtaggggctccagcgcgggtcggagtctgggggttcgcgcccgccgacccgcgccctgctccctctcagcacctgggcggacgattgaaggtttgtggcaaccctgtattcagaattctgtatcagtgccatttttccagccagcgtgtgcttacttcatgtctctgggtcacattttgaaatgaccattaagaagtagatgcccagatgcaaaagtgatgaaacagtccatttgtcataaagtaagatgcagctgtggcatgtcaaccagcttggaacaaaattgtatctgtttttctcagaagagaattccacaaggttaaatcagcaaacaaagaaaacatggtattttgaaatatgattaaactcctgatgctgcagcagaggctaagaatattaatggccagatctagtgcacacatggtcttctgaagaagccatgggtagctgttgtagctgtccagataaagacact

SEQ ID NO: 134428 - DNA, 1952 bp, Homo sapiens
  Payload ID: 6257
  Gene Symbol: FRS2
  Gene Name: fibroblast growth factor receptor substrate 2
  Uniprot ID: Q8WU20
  ENST ID: ENST00000549921
  CDS Start-End: 417-1943
ggaagtgcttttccaagattcgggccggagagaggccttgtaggcacagcggctgagactcgatctgctccaagtaggggctccagcgcgggtcggagtctgggggttcgcgcccgccgacccgcgccctgctccctctcagcacctgggcggacgaaatgaccattaagaagtagatgcccagatgcaaaagtgatgaaacagtccatttgtcataaagtaagatgcagctgtggcatgtcaaccagcttggaacaaaattgtatctgtttttctcagaagagaattccacaaggttaaatcagcaaacaaagaaaacatggtattttgaaatatgattaaactcctgatgctgcagcagaggctaagaatattaatggccagatctagtgcacacatggtcttctgaagaagccatgggtagctgttgtagctgtccagataaagacactgtcccagataaccatcggaacaagtttaaggtcattaatgtggatgatgatgggaatgagttaggttctggcataatggaacttacagacacagaactgattttatacacccgcaaacgtgactcagtaaaatggcactacctctgcctgcgacgctatggctatgactcgaatctcttttcttttgaaagtggtcgaaggtgtcaaactggacaaggaatctttgcctttaagtgtgcccgtgcagaagaattatttaacatgttgcaagagattatgcaaaataatagtataaatgtggtggaagagccagttgtagaaagaaataatcatcagacagaattggaagtccctagaacacctcgaacacctacaactccaggatttgctgctcagaacttacctaatggatatccccgatatccctcatttggagatgcttcatcccatccgtcaagcagacatccttctgtgggaagtgctcgcctgccttcagtaggggaagaatctacacatcctttgcttgtggctgaggaacaagtacatacctatgtcaacactacaggtgtgcaagaagagcggaaaaaccgcacaagtgtgcatgttccattggaggcgagggtttctaacgctgaaagcagcacaccaaaagaagaaccaagtagtattgaggacagggatcctcagattcttcttgaacctgaaggagtcaaatttgttttagggccaacccctgttcaaaagcagttaatggaaaaagagaaactggagcaacttggaagagatcaagttagtggaagtggagcaaataacacagaatgggacactggctatgacagtgatgaacgaagagatgcaccctctgttaacaaactggtgtatgaaaatataaatgggctatctatccctagtgcctcaggggtcaggagaggtcgtctgacatccaccagtacctcagatacccagaatatcaacaactcagctcagagaagaactgcattattaaactatgaaaatctaccatctttgcctcctgtttgggaagcccgcaagctaagtagggatgaagatgacaatttaggaccaaagaccccatctctaaatggctaccataataatctagatccaatgcataactatgtaaatacagagaatgtaacagtgccagcaagtgctcacaaaatagaatattcaaggcgtcgggactgtacaccaacagtctttaactttgatatcagacgcccaagtttagaacacaggcagcttaattacatacaggttgacttggaaggtggcagtgactctgacaaccctcagactccaaaaacgcctacaactccccttccacaaacccctaccaggcgcacagagctgtatgccgtgatagacatcgagagaactgctgctatgtcaaatttgcagaaagcactgccacgagatgatggtacatctaggaaaactagacacaatagtactgatctgcccatgtgagcctggaaa

SEQ ID NO: 134429 - DNA, 2094 bp, Homo sapiens
  Payload ID: 6258
  Gene Symbol: FRS3
  Gene Name: fibroblast growth factor receptor substrate 3
  Uniprot ID: O43559
  ENST ID: ENST00000259748
  CDS Start-End: 173-1651
gctaggtgagccccaggtgtatcccagagggatccgggtgacttctctgcagactgtttgccatgacagcccaccaaggacggggggaataaagtgggaacccttccccatgcccctcccacggtcagctccccgatggcctgggtgagggcaggctggctgctctgacaccatggggagctgctgcagctgcctgaacagagacagcgttccagacaaccaccccaccaagttcaaggtgacaaatgtggatgatgagggggtggagctgggctctggggtgatggagctgacgcagagtgagctggtgctgcacctgcatcggcgtgaggccgtccgctggccttatctctgcttgcggcgctatggctacgactccaacctcttctcctttgagagtggccgccgatgtcagacaggccagggaatatttgcatttaagtgttcccgggctgaggaaatcttcaacctccttcaggatctgatgcagtgcaacagcatcaatgtgatggaagagcctgtcatcatcacccgcaatagccaccccgctgagcttgacctccctcgagccccccagccacccaatgctctaggctacactgtctccagcttttccaatggctgccctggagagggcccacgattctcagctccccggcggctctcgacaagcagcctgcggcacccctcgcttggggaagagtccacccatgccctcattgctcctgatgagcagtcccacacctatgtcaacacaccggccagtgaagatgaccaccgcaggggccgccactgcctgcagcccctgcctgagggtcaggcacccttcctcccgcaggcccggggacctgaccaacgggacccacaggtgttcttgcagccaggccaggtgaagtttgtgttgggcccgacccctgctcggcggcacatggtgaagtgccagggcctctgtcccagcctgcatgaccccccacaccacaataataacaatgaggccccttctgagtgtccagcccagcccaagtgcacctacgagaacgtcaccggggggctgtggcgaggggctggctggagactgagcccagaggagccgggctggaatggccttgcccaccgccgggccgccctgctgcactatgagaacctgcccccactgccccctgtgtgggaaagccaagcccagcagctgggaggggaggctggggatgatggggactcgagggatgggctcacaccctcttccaatggcttccctgatggtgaggaggacgagaccccactgcagaagcccaccagcacccgggccgccatccgcagccacggcagctttcctgtgccactgacccgccgccgcggctccccaagggtcttcaactttgatttccgccggccggggcccgagcccccaaggcagcttaactacatccaggtggagctaaagggctggggtggagaccgccctaaggggccccagaacccctcgagcccccaagcccccatgcccaccacccaccctgcccgaagctcagactcctacgccgtgattgacctcaaaaagaccgtggccatgtccaacctgcagagagctctgccccgagacgatggcaccgccaggaaaacccggcacaacagcaccgacctgcctctgtagggacttcccggtcctcaccaccctctgccccaccatgatccagcctctgcctcacactcctgtcctctgaacccaccctccccagggttcagggttgctttgcagaaggcatggaggtgggaccagatgcttccctgtgctggctggagtccccagagatatcagccaccgagtctcctggtctgtctccaggctggggagagaagggtgaccaggcgaggagggagccgagacgtcaactgtgaagggttcctgtgattgcgtttagcgccctcccgttctgtccatttgtcttgtctgccgactgtccgtgtgtgttttttttggttggaattttgaaacattttgtacctgttgattttatttatcagtttatttttctatttattgttttaaatgtaatttaacatatttattattaatataattatttttaaattctg

SEQ ID NO: 134430 - DNA, 2174 bp, Homo sapiens
  Payload ID: 6258
  Gene Symbol: FRS3
  Gene Name: fibroblast growth factor receptor substrate 3
  Uniprot ID: O43559
  ENST ID: ENST00000373018
  CDS Start-End: 253-1731
ggggaggccttagctccgggcgggcggcggctgctgcagcgggacccgggagcggggcccggcgccgcccgggccgcggggcgatgtgagccccaggtgtatcccagagggatccgggtgacttctctgcagactgtttgccatgacagcccaccaaggacggggggaataaagtgggaacccttccccatgcccctcccacggtcagctccccgatggcctgggtgagggcaggctggctgctctgacaccatggggagctgctgcagctgcctgaacagagacagcgttccagacaaccaccccaccaagttcaaggtgacaaatgtggatgatgagggggtggagctgggctctggggtgatggagctgacgcagagtgagctggtgctgcacctgcatcggcgtgaggccgtccgctggccttatctctgcttgcggcgctatggctacgactccaacctcttctcctttgagagtggccgccgatgtcagacaggccagggaatatttgcatttaagtgttcccgggctgaggaaatcttcaacctccttcaggatctgatgcagtgcaacagcatcaatgtgatggaagagcctgtcatcatcacccgcaatagccaccccgctgagcttgacctccctcgagccccccagccacccaatgctctaggctacactgtctccagcttttccaatggctgccctggagagggcccacgattctcagctccccggcggctctcgacaagcagcctgcggcacccctcgcttggggaagagtccacccatgccctcattgctcctgatgagcagtcccacacctatgtcaacacaccggccagtgaagatgaccaccgcaggggccgccactgcctgcagcccctgcctgagggtcaggcacccttcctcccgcaggcccggggacctgaccaacgggacccacaggtgttcttgcagccaggccaggtgaagtttgtgttgggcccgacccctgctcggcggcacatggtgaagtgccagggcctctgtcccagcctgcatgaccccccacaccacaataataacaatgaggccccttctgagtgtccagcccagcccaagtgcacctacgagaacgtcaccggggggctgtggcgaggggctggctggagactgagcccagaggagccgggctggaatggccttgcccaccgccgggccgccctgctgcactatgagaacctgcccccactgccccctgtgtgggaaagccaagcccagcagctgggaggggaggctggggatgatggggactcgagggatgggctcacaccctcttccaatggcttccctgatggtgaggaggacgagaccccactgcagaagcccaccagcacccgggccgccatccgcagccacggcagctttcctgtgccactgacccgccgccgcggctccccaagggtcttcaactttgatttccgccggccggggcccgagcccccaaggcagcttaactacatccaggtggagctaaagggctggggtggagaccgccctaaggggccccagaacccctcgagcccccaagcccccatgcccaccacccaccctgcccgaagctcagactcctacgccgtgattgacctcaaaaagaccgtggccatgtccaacctgcagagagctctgccccgagacgatggcaccgccaggaaaacccggcacaacagcaccgacctgcctctgtagggacttcccggtcctcaccaccctctgccccaccatgatccagcctctgcctcacactcctgtcctctgaacccaccctccccagggttcagggttgctttgcagaaggcatggaggtgggaccagatgcttccctgtgctggctggagtccccagagatatcagccaccgagtctcctggtctgtctccaggctggggagagaagggtgaccaggcgaggagggagccgagacgtcaactgtgaagggttcctgtgattgcgtttagcgccctcccgttctgtccatttgtcttgtctgccgactgtccgtgtgtgttttttttggttggaattttgaaacattttgtacctgttgattttatttatcagtttatttttctatttattgttttaaatgtaatttaacatatttattattaatataattatttttaaattctg

SEQ ID NO: 134431 - DNA, 474 bp, Homo sapiens
  Payload ID: 6258
  Gene Symbol: FRS3
  Gene Name: fibroblast growth factor receptor substrate 3
  ENST ID: ENST00000426290
  CDS Start-End: 34-474
cgcgtttacgctgggttttcaaccattcgctgaatggaaacgcctcgccgggcccgcagccctgtctctccgcagttcccagggcaggctggctgctctgacaccatggggagctgctgcagctgcctgaacagagacagcgttccagacaaccaccccaccaagttcaaggtgacaaatgtggatgatgagggggtggagctgggctctggggtgatggagctgacgcagagtgagctggtgctgcacctgcatcggcgtgaggccgtccgctggccttatctctgcttgcggcgctatggctacgactccaacctcttctcctttgagagtggccgccgatgtcagacaggccagggaatatttgcatttaagtgttcccgggctgaggaaatcttcaacctccttcaggatctgatgcagtgcaacagcatcaatgtgatggaagagcctgtcatcatcacccgcaatagc

SEQ ID NO: 134432 - DNA, 326 bp, Homo sapiens
  Payload ID: 6258
  Gene Symbol: FRS3
  Gene Name: fibroblast growth factor receptor substrate 3
  ENST ID: ENST00000422888
  CDS Start-End: 218-326
cgcggggtgggttcgggcggcccttggaacgctccggccagggatgcgcggtgagccccaggtgtatcccagagggatccgggtgacttctctgcagactgtttgccatgacagcccaccaaggacggggggaataaagtgggaacccttccccatgcccctcccacggtcagctccccgatggcctgggtgagggcaggctggctgctctgacaccatggggagctgctgcagctgcctgaacagagacagcgttccagacaaccaccccaccaagttcaaggtgacaaatgtggatgatgagggggtggagctgggctctgggg

SEQ ID NO: 134433 - DNA, 3100 bp, Homo sapiens
  Payload ID: 6259
  Gene Symbol: FGFRL1
  Gene Name: fibroblast growth factor receptor-like 1
  Uniprot ID: Q8N441
  ENST ID: ENST00000264748
  CDS Start-End: 36-1550
gcgcccccaatgtccccaggtccggacaggccgagatgacgccgagccccctgttgctgctcctgctgccgccgctgctgctgggggccttcccgccggccgccgccgcccgaggccccccaaagatggcggacaaggtggtcccacggcaggtggcccggctgggccgcactgtgcggctgcagtgcccagtggagggggacccgccgccgctgaccatgtggaccaaggatggccgcaccatccacagcggctggagccgcttccgcgtgctgccgcaggggctgaaggtgaagcaggtggagcgggaggatgccggcgtgtacgtgtgcaaggccaccaacggcttcggcagcctgagcgtcaactacaccctcgtcgtgctggatgacattagcccagggaaggagagcctggggcccgacagctcctctgggggtcaagaggaccccgccagccagcagtgggcacgaccgcgcttcacacagccctccaagatgaggcgccgggtgatcgcacggcccgtgggtagctccgtgcggctcaagtgcgtggccagcgggcaccctcggcccgacatcacgtggatgaaggacgaccaggccttgacgcgcccagaggccgctgagcccaggaagaagaagtggacactgagcctgaagaacctgcggccggaggacagcggcaaatacacctgccgcgtgtcgaaccgcgcgggcgccatcaacgccacctacaaggtggatgtgatccagcggacccgttccaagcccgtgctcacaggcacgcaccccgtgaacacgacggtggacttcggggggaccacgtccttccagtgcaaggtgcgcagcgacgtgaagccggtgatccagtggctgaagcgcgtggagtacggcgccgagggccgccacaactccaccatcgatgtgggcggccagaagtttgtggtgctgcccacgggtgacgtgtggtcgcggcccgacggctcctacctcaataagctgctcatcacccgtgcccgccaggacgatgcgggcatgtacatctgccttggcgccaacaccatgggctacagcttccgcagcgccttcctcaccgtgctgccagacccaaaaccgccagggccacctgtggcctcctcgtcctcggccactagcctgccgtggcccgtggtcatcggcatcccagccggcgctgtcttcatcctgggcaccctgctcctgtggctttgccaggcccagaagaagccgtgcacccccgcgcctgcccctcccctgcctgggcaccgcccgccggggacggcccgcgaccgcagcggagacaaggaccttccctcgttggccgccctcagcgctggccctggtgtggggctgtgtgaggagcatgggtctccggcagccccccagcacttactgggcccaggcccagttgctggccctaagttgtaccccaaactctacacagacatccacacacacacacacacacactctcacacacactcacacgtggagggcaaggtccaccagcacatccactatcagtgctagacggcaccgtatctgcagtgggcacgggggggccggccagacaggcagactgggaggatggaggacggagctgcagacgaaggcaggggacccatggcgaggaggaatggccagcaccccaggcagtctgtgtgtgaggcatagcccctggacacacacacacagacacacacactgcctggatgcatgtatgcacacacatgcgcgcacacgtgctccctgaaggcacacgtacgcacacacgcacatgcacagatatgccgcctgggcacacagataagctgcccaaatgcacgcacacgcacagagacatgccagaacatacaaggacatgctgcctgaacatacacacgcacacccatgcgcagatgtgctgcctggacacacacacacacacggatatgctgtctggacgcacacacgtgcagatatggtatccggacacacacgtgcacagatatgctgcctggacacacagataatgctgccttgacacacacatgcacggatattgcctggacacacacacacacacgtgtgcacagatatgctgtctggacacgcacacacatgcagatatgctgcctggacacacacttccagacacacgtgcacaggcgcagatatgctgcctggacacacgcagatatgctgtctagtcacacacacacgcagacatgctgtccggacacacacacgcatgcacagatatgctgtccggacacacacacgcacgcagatatgctgcctggacacacacacagataatgctgcctcaacactcacacacgtgcagatattgcctggacacacacatgtgcacagatatgctgtctggacatgcacacacgtgcagatatgctgtccggatacacacgcacgcacacatgcagatatgctgcctgggcacacacttccggacacacatgcacacacaggtgcagatatgctgcctggacacacgcagactgacgtgcttttgggagggtgtgccgtgaagcctgcagtacgtgtgccgtgaggctcatagttgatgagggactttccctgctccaccgtcactcccccaactctgcccgcctctgtccccgcctcagtccccgcctccatccccgcctctgtcccctggccttggcggctatttttgccacctgccttgggtgcccaggagtcccctactgctgtgggctggggttgggggcacagcagccccaagcctgagaggctggagcccatggctagtggctcatccccactgcattctccccctgacacagagaaggggccttggtatttatatttaagaaatgaagataatattaataatgatggaaggaagactgggttgcagggactgtggtctctcctggggcccgggacccgcctggtctttcagccatgctgatgaccacaccccgtccaggccagacaccaccccccaccccactgtcgtggtggccccagatctctgtaattttatgtagagtttgagctgaagccccgtatatttaatttattttgttaaacatgaaagtgcatcctttccctcc

SEQ ID NO: 134434 - DNA, 3639 bp, Homo sapiens
  Payload ID: 6259
  Gene Symbol: FGFRL1
  Gene Name: fibroblast growth factor receptor-like 1
  Uniprot ID: Q8N441
  ENST ID: ENST00000398484
  CDS Start-End: 581-2095
actttgcacgctcgcagccacgtttccgcacacctgtcccctttccacgcacctgtgtccggcagcccgcacatctgtgggagcgctgcctcctcgccagctgtccgggaagttcagcgccgctctcccacgggcgtgagaccgccccacccacctgtccgtgactgcagctccggccgggagggcggcagcaggtgagaggctgggaggcctcaggtgggaacatacctttggccaaaggcaccaggtaacccgaacgccccggggaggacccctgcctgcatcgccgcggccgtccccccctaccccgtccccagcagctccggctgggcgaggccctgcttctcccttctgctcccgaagaccccccggggcgcagacctggaagcctcgaagctcccgcggccgtccagtccgcccccttctgagcaaccagagagcggtctgggcccggcccggggctgcgcagaggtcagactgccgcgggcagggccggagcctgctctgggggtcgcggaggtgtctcgagagttgaggacccgacccgggcgcgcgcgggcgcaggtccggacaggccgagatgacgccgagccccctgttgctgctcctgctgccgccgctgctgctgggggccttcccgccggccgccgccgcccgaggccccccaaagatggcggacaaggtggtcccacggcaggtggcccggctgggccgcactgtgcggctgcagtgcccagtggagggggacccgccgccgctgaccatgtggaccaaggatggccgcaccatccacagcggctggagccgcttccgcgtgctgccgcaggggctgaaggtgaagcaggtggagcgggaggatgccggcgtgtacgtgtgcaaggccaccaacggcttcggcagcctgagcgtcaactacaccctcgtcgtgctggatgacattagcccagggaaggagagcctggggcccgacagctcctctgggggtcaagaggaccccgccagccagcagtgggcacgaccgcgcttcacacagccctccaagatgaggcgccgggtgatcgcacggcccgtgggtagctccgtgcggctcaagtgcgtggccagcgggcaccctcggcccgacatcacgtggatgaaggacgaccaggccttgacgcgcccagaggccgctgagcccaggaagaagaagtggacactgagcctgaagaacctgcggccggaggacagcggcaaatacacctgccgcgtgtcgaaccgcgcgggcgccatcaacgccacctacaaggtggatgtgatccagcggacccgttccaagcccgtgctcacaggcacgcaccccgtgaacacgacggtggacttcggggggaccacgtccttccagtgcaaggtgcgcagcgacgtgaagccggtgatccagtggctgaagcgcgtggagtacggcgccgagggccgccacaactccaccatcgatgtgggcggccagaagtttgtggtgctgcccacgggtgacgtgtggtcgcggcccgacggctcctacctcaataagctgctcatcacccgtgcccgccaggacgatgcgggcatgtacatctgccttggcgccaacaccatgggctacagcttccgcagcgccttcctcaccgtgctgccagacccaaaaccgccagggccacctgtggcctcctcgtcctcggccactagcctgccgtggcccgtggtcatcggcatcccagccggcgctgtcttcatcctgggcaccctgctcctgtggctttgccaggcccagaagaagccgtgcacccccgcgcctgcccctcccctgcctgggcaccgcccgccggggacggcccgcgaccgcagcggagacaaggaccttccctcgttggccgccctcagcgctggccctggtgtggggctgtgtgaggagcatgggtctccggcagccccccagcacttactgggcccaggcccagttgctggccctaagttgtaccccaaactctacacagacatccacacacacacacacacacactctcacacacactcacacgtggagggcaaggtccaccagcacatccactatcagtgctagacggcaccgtatctgcagtgggcacgggggggccggccagacaggcagactgggaggatggaggacggagctgcagacgaaggcaggggacccatggcgaggaggaatggccagcaccccaggcagtctgtgtgtgaggcatagcccctggacacacacacacagacacacacactgcctggatgcatgtatgcacacacatgcgcgcacacgtgctccctgaaggcacacgtacgcacacacgcacatgcacagatatgccgcctgggcacacagataagctgcccaaatgcacgcacacgcacagagacatgccagaacatacaaggacatgctgcctgaacatacacacgcacacccatgcgcagatgtgctgcctggacacacacacacacacggatatgctgtctggacgcacacacgtgcagatatggtatccggacacacacgtgcacagatatgctgcctggacacacagataatgctgccttgacacacacatgcacggatattgcctggacacacacacacacacgtgtgcacagatatgctgtctggacacgcacacacatgcagatatgctgcctggacacacacttccagacacacgtgcacaggcgcagatatgctgcctggacacacgcagatatgctgtctagtcacacacacacgcagacatgctgtccggacacacacacgcatgcacagatatgctgtccggacacacacacgcacgcagatatgctgcctggacacacacacagataatgctgcctcaacactcacacacgtgcagatattgcctggacacacacatgtgcacagatatgctgtctggacatgcacacacgtgcagatatgctgtccggatacacacgcacgcacacatgcagatatgctgcctgggcacacacttccggacacacatgcacacacaggtgcagatatgctgcctggacacacgcagactgacgtgcttttgggagggtgtgccgtgaagcctgcagtacgtgtgccgtgaggctcatagttgatgagggactttccctgctccaccgtcactcccccaactctgcccgcctctgtccccgcctcagtccccgcctccatccccgcctctgtcccctggccttggcggctatttttgccacctgccttgggtgcccaggagtcccctactgctgtgggctggggttgggggcacagcagccccaagcctgagaggctggagcccatggctagtggctcatccccactgcattctccccctgacacagagaaggggccttggtatttatatttaagaaatgaagataatattaataatgatggaaggaagactgggttgcagggactgtggtctctcctggggcccgggacccgcctggtctttcagccatgctgatgaccacaccccgtccaggccagacaccaccccccaccccactgtcgtggtggccccagatctctgtaattttatgtagagtttgagctgaagccccgtatatttaatttattttgttaaacatgaaagtgcatccttt

SEQ ID NO: 134435 - DNA, 1663 bp, Homo sapiens
  Payload ID: 6259
  Gene Symbol: FGFRL1
  Gene Name: fibroblast growth factor receptor-like 1
  Uniprot ID: Q8N441
  ENST ID: ENST00000504138
  CDS Start-End: 149-1663
aaatttgtccgctaatggcgcaggcgattatctgcggggcgctgagtgttgtgtgtcctgcgggcagggccggagttacaagcgccaggaatccagacggtgtttggagagggggggcggcgggggagcccggtccggacaggccgagatgacgccgagccccctgttgctgctcctgctgccgccgctgctgctgggggccttcccgccggccgccgccgcccgaggccccccaaagatggcggacaaggtggtcccacggcaggtggcccggctgggccgcactgtgcggctgcagtgcccagtggagggggacccgccgccgctgaccatgtggaccaaggatggccgcaccatccacagcggctggagccgcttccgcgtgctgccgcaggggctgaaggtgaagcaggtggagcgggaggatgccggcgtgtacgtgtgcaaggccaccaacggcttcggcagcctgagcgtcaactacaccctcgtcgtgctggatgacattagcccagggaaggagagcctggggcccgacagctcctctgggggtcaagaggaccccgccagccagcagtgggcacgaccgcgcttcacacagccctccaagatgaggcgccgggtgatcgcacggcccgtgggtagctccgtgcggctcaagtgcgtggccagcgggcaccctcggcccgacatcacgtggatgaaggacgaccaggccttgacgcgcccagaggccgctgagcccaggaagaagaagtggacactgagcctgaagaacctgcggccggaggacagcggcaaatacacctgccgcgtgtcgaaccgcgcgggcgccatcaacgccacctacaaggtggatgtgatccagcggacccgttccaagcccgtgctcacaggcacgcaccccgtgaacacgacggtggacttcggggggaccacgtccttccagtgcaaggtgcgcagcgacgtgaagccggtgatccagtggctgaagcgcgtggagtacggcgccgagggccgccacaactccaccatcgatgtgggcggccagaagtttgtggtgctgcccacgggtgacgtgtggtcgcggcccgacggctcctacctcaataagctgctcatcacccgtgcccgccaggacgatgcgggcatgtacatctgccttggcgccaacaccatgggctacagcttccgcagcgccttcctcaccgtgctgccagacccaaaaccgccagggccacctgtggcctcctcgtcctcggccactagcctgccgtggcccgtggtcatcggcatcccagccggcgctgtcttcatcctgggcaccctgctcctgtggctttgccaggcccagaagaagccgtgcacccccgcgcctgcccctcccctgcctgggcaccgcccgccggggacggcccgcgaccgcagcggagacaaggaccttccctcgttggccgccctcagcgctggccctggtgtggggctgtgtgaggagcatgggtctccggcagccccccagcacttactgggcccaggcccagttgctggccctaagttgtaccccaaactctacacagacatccacacacacacacacacacactctcacacacactcacacgtggagggcaaggtccaccagcacatccactatcagtgctag

SEQ ID NO: 134436 - DNA, 562 bp, Homo sapiens
  Payload ID: 6259
  Gene Symbol: FGFRL1
  Gene Name: fibroblast growth factor receptor-like 1
  ENST ID: ENST00000507339
  CDS Start-End: 106-562
gctaatggcgcaggcgattatctgcggggcgctgagtgttgtgtgtcctgcgggcagggccggagttacaagcgccaggaatccagacggtccggacaggccgagatgacgccgagccccctgttgctgctcctgctgccgccgctgctgctgggggccttcccgccggccgccgccgcccgaggccccccaaagatggcggacaaggtggtcccacggcaggtggcccggctgggccgcactgtgcggctgcagtgcccagtggagggggacccgccgccgctgaccatgtggaccaaggatggccgcaccatccacagcggctggagccgcttccgcgtgctgccgcaggggctgaaggtgaagcaggtggagcgggaggatgccggcgtgtacgtgtgcaaggccaccaacggcttcggcagcctgagcgtcaactacaccctcgtcgtgctggatgacattagcccagggaaggagagcctggggcccgacagctcctctgggggtcaagaggaccccgccagccagcagtgggcacgaccgcgcttcacacagccct

SEQ ID NO: 134437 - DNA, 2304 bp, Homo sapiens
  Payload ID: 6259
  Gene Symbol: FGFRL1
  Gene Name: fibroblast growth factor receptor-like 1
  Uniprot ID: Q8N441
  ENST ID: ENST00000510644
  CDS Start-End: 150-1664
gccgccccgccccgagaccgggcccgggggcgcggggcggcgggatgcggcgcccggggcggcgatgaccgcggagcgcacgccgcgggcccggccctgaccccgccgcccgcccgctgagccccccgccgaggtccggacaggccgagatgacgccgagccccctgttgctgctcctgctgccgccgctgctgctgggggccttcccgccggccgccgccgcccgaggccccccaaagatggcggacaaggtggtcccacggcaggtggcccggctgggccgcactgtgcggctgcagtgcccagtggagggggacccgccgccgctgaccatgtggaccaaggatggccgcaccatccacagcggctggagccgcttccgcgtgctgccgcaggggctgaaggtgaagcaggtggagcgggaggatgccggcgtgtacgtgtgcaaggccaccaacggcttcggcagcctgagcgtcaactacaccctcgtcgtgctggatgacattagcccagggaaggagagcctggggcccgacagctcctctgggggtcaagaggaccccgccagccagcagtgggcacgaccgcgcttcacacagccctccaagatgaggcgccgggtgatcgcacggcccgtgggtagctccgtgcggctcaagtgcgtggccagcgggcaccctcggcccgacatcacgtggatgaaggacgaccaggccttgacgcgcccagaggccgctgagcccaggaagaagaagtggacactgagcctgaagaacctgcggccggaggacagcggcaaatacacctgccgcgtgtcgaaccgcgcgggcgccatcaacgccacctacaaggtggatgtgatccagcggacccgttccaagcccgtgctcacaggcacgcaccccgtgaacacgacggtggacttcggggggaccacgtccttccagtgcaaggtgcgcagcgacgtgaagccggtgatccagtggctgaagcgcgtggagtacggcgccgagggccgccacaactccaccatcgatgtgggcggccagaagtttgtggtgctgcccacgggtgacgtgtggtcgcggcccgacggctcctacctcaataagctgctcatcacccgtgcccgccaggacgatgcgggcatgtacatctgccttggcgccaacaccatgggctacagcttccgcagcgccttcctcaccgtgctgccagacccaaaaccgccagggccacctgtggcctcctcgtcctcggccactagcctgccgtggcccgtggtcatcggcatcccagccggcgctgtcttcatcctgggcaccctgctcctgtggctttgccaggcccagaagaagccgtgcacccccgcgcctgcccctcccctgcctgggcaccgcccgccggggacggcccgcgaccgcagcggagacaaggaccttccctcgttggccgccctcagcgctggccctggtgtggggctgtgtgaggagcatgggtctccggcagccccccagcacttactgggcccaggcccagttgctggccctaagttgtaccccaaactctacacagacatccacacacacacacacacacactctcacacacactcacacgtggagggcaaggtccaccagcacatccactatcagtgctagacggcaccgtatctgcagtgggcacgggggggccggccagacaggcagactgggaggatggaggacggagctgcagacgaaggcaggggacccatggcgaggaggaatggccagcaccccaggcagtctgtgtgtgaggcatagcccctggacacacacacacagacacacacactgcctggatgcatgtatgcacacacatgcgcgcacacgtgctccctgaaggcacacgtacgcacacacgcacatgcacagatatgccgcctgggcacacagataagctgcccaaatgcacgcacacgcacagagacatgccagaacatacaaggacatgctgcctgaacatacacacgcacacccatgcgcagatgtgctgcctggacacacacacacacacggatatgctgtctggacgcacacacgtgcagatatggtatccggacacacacgtgcacagatatgctgcctggacacacagataatgctgccttgacacacacatgcacggatattgcctggacacacacacacacacgtgtgcacagatatgctgtctggacacgcacacacatgcagatatgctgcctggacacacacttccagacacacgtgcacaggcgcagatatgctgcctggacac

SEQ ID NO: 134438 - DNA, 571 bp, Homo sapiens
  Payload ID: 6259
  Gene Symbol: FGFRL1
  Gene Name: fibroblast growth factor receptor-like 1
  ENST ID: ENST00000512174
  CDS Start-End: 332-571
cgctaatggcgcaggcgattatctgcggggcgctgagtgttgtgtgtcctgcgggcagggccggagttacaagcgccaggaatccagacggtgtttggagagggggggcggcgggggagcccggtaattagtgtaaaccctttgtctgcctttgatacccacagcttctccccgctgcggcttcctccgcctggagcgcgggcggggagggcctgtggggagggcggccagacccctgatccccgcggcccgggaccggggagggcggtatctcccagttccacgtgttagtgacggcgcccccaatgtccccaggtccggacaggccgagatgacgccgagccccctgttgctgctcctgctgccgccgctgctgctgggggccttcccgccggccgccgccgcccgaggccccccaaagatggcggacaaggtggtcccacggcaggtggcccggctgggccgcactgtgcggctgcagtgcccagtggagggggacccgccgccgctgaccatgtggaccaaggatggccgcaccatccacagcggctggagccgcttccgcgtgctg

SEQ ID NO: 134439 - DNA, 3310 bp, Homo sapiens
  Payload ID: 6260
  Gene Symbol: FMOD
  Gene Name: fibromodulin
  Uniprot ID: Q06828
  ENST ID: ENST00000354955
  CDS Start-End: 465-1595
ttaagatgtctcttaccaaaccctggccctccccatccctgcatctgcctttgtggctttaatgagaaatccaggcgcttcataagagactgtacaaataacttctagggcgccactaactcattcagcagaaagggacccagggctgccaatgtttcagggaagataagtgagtggaaaaaaggtggtttttatagcgtcaggcggaccgaaggatttgcgtggttgagcgtgaactccgcccctgcagcagagctgaaaaaaaccaggatccgggttcctcagccccttttcacaatatttgattaggaatttggggcgggaccctggtctggcacaggcacgcacactctcagtagactctttcactcctctctctcttcctctctcacacgttctccaacccaaggaggccagacagagggacgtggtcactctctgaaaagttcaacttgagagacaaaatgcagtggacctccctcctgctgctggcagggctcttctccctctcccaggcccagtatgaagatgaccctcattggtggttccactacctccgcagccagcagtccacctactacgatccctatgacccttacccgtatgagacctacgagccttacccctatggggtggatgaagggccagcctacacctacggctctccatcccctccagatccccgcgactgcccccaggagtgcgactgcccacccaacttccccacggccatgtactgtgacaatcgcaacctcaagtacctgcccttcgttccctcccgcatgaagtatgtgtacttccagaacaaccagatcacctccatccaggaaggcgtctttgacaatgccacagggctgctctggattgctctccacggcaaccagatcaccagtgataaggtgggcaggaaggtcttctccaagctgaggcacctggagaggctgtacctggaccacaacaacctgacccggatgcccggtcccctgcctcgatccctgagagagctccatctcgaccacaaccagatctcacgggtccccaacaatgctctggaggggctggagaacctcacggccttgtacctccaacacaatgagatccaggaagtgggcagttccatgaggggcctccggtcactgatcttgctggacctgagttataaccaccttcggaaggtgcctgatgggctgccctcagctcttgagcagctgtacatggagcacaacaatgtctacaccgtccccgatagctacttccggggggcgcccaagctgctgtatgtgcggctgtcccacaacagtctaaccaacaatggcctggcctccaacaccttcaattccagcagcctccttgagctagacctctcctacaaccagctgcagaagatccccccagtcaacaccaacctggagaacctctacctccaaggcaataggatcaatgagttctccatcagcagcttctgcaccgtggtggacgtcgtgaacttctccaagctgcaggtgctgcgcctggacgggaacgagatcaagcgcagcgccatgcctgccgacgcgcccctctgcctgcgccttgccagcctcatcgagatctgagcagccctggcaccgggtactgggcggagagcccccgtggcatttggcttgatggtttggtttggcttttgctggaaggtccaggatggaccatgtgacagaagtccacgggcaccctctgtagtcttctttcctgtaggtggggttagggggggcgatcagggacaggcagccttctgctgaggacataggcagaagctcactcttttccagggacagaagtggtggtagatggaaggatccctggatgttccaaccccataaatctcacggctcttaagttcttcccaatgatctgaggtcatggaacttcaaaagtggcatgggcaatagtatataaccatacttttctaacaatccctggctgtctgtgagcagcacttgacagctctccctctgtgctgggctggtcgtgcagttactctgggctcccatttgttgcttctcaaaatatacctcttgcccagctgcctcttctgaaatccacttcacccactccactttcctccacagatgcctcttctgtgccttaagcagagtcaggagaccccaaggcatgtgagcatctgcccagcaacctgtggagacaacccacactgtgtctgagggtgaaaggacaccaggagtcacttctatacctccctaacctcacccctggaaagccaccagattggaggtcaccagcatgatgataatattcatgacctgatgtgggaggagacagccaacctcaggcttagatcaatgtatagggctatattttggcagctgggtagctctttgaaggtggataagacttcagaagaggaaaggccagactttgcttaccatcagcatctgcaatgggccaaacacacctcaaattggctgagttgagaaagcagccccagtagttccattcttgcccagcactttctgcattccaaacagcatcctacctgggtttttatccacaaaggtagcggccacatggtttttaaagtatgagaaacacagtttgtcctctccttttatccaagcaggaagattctatatcctgatggtagagacagactccaggcagccctggacttgctagcccaaagaaggaggatgtggttaatctgtttcacctggtttgtcctaaggccatagttaaaaagtaccagctctggctggggtccgtgaagcccaggccaggcagccaaatcttgcctgtgctgggcatacaaccctctgctttcacatctctgagctatatcctcattagtgaaggtggcttttgctttatagtttggctggggagcacttaattcttcccatttcaaaaggtaatgttgcctggggcttaacccacctgccctttgggcaaggttgggacaaagccatctgggcagtcaggggcaaggactgttggaggagagttagcccaagtataggctctgcccagatgccatcacatccctgatactgtgtatgctttgaagcaccttccctgagaagggaagaggggatctttggactacgttcttggctccagacctggaatccacaaaagccaaaccagctcatttcaacaaaggagctccgatgtgaggggcaaggctgccccctgccccagggctcttcagaaagcatctgcatgtgaacaccatcatgcctttataaaggatccttattacaggaaaagcatgagtggtggctaacctgaccaataaagttattttatgattgca

SEQ ID NO: 134440 - DNA, 8708 bp, Homo sapiens
  Payload ID: 6261
  Gene Symbol: FN1
  Gene Name: fibronectin 1
  Uniprot ID: P02751
  ENST ID: ENST00000323926
  CDS Start-End: 267-7607
gcccgcgccggctgtgctgcacagggggaggagagggaaccccaggcgcgagcgggaagaggggacctgcagccacaacttctctggtcctctgcatcccttctgtccctccacccgtccccttccccaccctctggcccccaccttcttggaggcgacaacccccgggaggcattagaagggatttttcccgcaggttgcgaagggaagcaaacttggtggcaacttgcctcccggtgcgggcgtctctcccccaccgtctcaacatgcttaggggtccggggcccgggctgctgctgctggccgtccagtgcctggggacagcggtgccctccacgggagcctcgaagagcaagaggcaggctcagcaaatggttcagccccagtccccggtggctgtcagtcaaagcaagcccggttgttatgacaatggaaaacactatcagataaatcaacagtgggagcggacctacctaggcaatgcgttggtttgtacttgttatggaggaagccgaggttttaactgcgagagtaaacctgaagctgaagagacttgctttgacaagtacactgggaacacttaccgagtgggtgacacttatgagcgtcctaaagactccatgatctgggactgtacctgcatcggggctgggcgagggagaataagctgtaccatcgcaaaccgctgccatgaagggggtcagtcctacaagattggtgacacctggaggagaccacatgagactggtggttacatgttagagtgtgtgtgtcttggtaatggaaaaggagaatggacctgcaagcccatagctgagaagtgttttgatcatgctgctgggacttcctatgtggtcggagaaacgtgggagaagccctaccaaggctggatgatggtagattgtacttgcctgggagaaggcagcggacgcatcacttgcacttctagaaatagatgcaacgatcaggacacaaggacatcctatagaattggagacacctggagcaagaaggataatcgaggaaacctgctccagtgcatctgcacaggcaacggccgaggagagtggaagtgtgagaggcacacctctgtgcagaccacatcgagcggatctggccccttcaccgatgttcgtgcagctgtttaccaaccgcagcctcacccccagcctcctccctatggccactgtgtcacagacagtggtgtggtctactctgtggggatgcagtggctgaagacacaaggaaataagcaaatgctttgcacgtgcctgggcaacggagtcagctgccaagagacagctgtaacccagacttacggtggcaactcaaatggagagccatgtgtcttaccattcacctacaatggcaggacgttctactcctgcaccacagaagggcgacaggacggacatctttggtgcagcacaacttcgaattatgagcaggaccagaaatactctttctgcacagaccacactgttttggttcagactcgaggaggaaattccaatggtgccttgtgccacttccccttcctatacaacaaccacaattacactgattgcacttctgagggcagaagagacaacatgaagtggtgtgggaccacacagaactatgatgccgaccagaagtttgggttctgccccatggctgcccacgaggaaatctgcacaaccaatgaaggggtcatgtaccgcattggagatcagtgggataagcagcatgacatgggtcacatgatgaggtgcacgtgtgttgggaatggtcgtggggaatggacatgcattgcctactcgcagcttcgagatcagtgcattgttgatgacatcacttacaatgtgaacgacacattccacaagcgtcatgaagaggggcacatgctgaactgtacatgcttcggtcagggtcggggcaggtggaagtgtgatcccgtcgaccaatgccaggattcagagactgggacgttttatcaaattggagattcatgggagaagtatgtgcatggtgtcagataccagtgctactgctatggccgtggcattggggagtggcattgccaacctttacagacctatccaagctcaagtggtcctgtcgaagtatttatcactgagactccgagtcagcccaactcccaccccatccagtggaatgcaccacagccatctcacatttccaagtacattctcaggtggagacctaaaaattctgtaggccgttggaaggaagctaccataccaggccacttaaactcctacaccatcaaaggcctgaagcctggtgtggtatacgagggccagctcatcagcatccagcagtacggccaccaagaagtgactcgctttgacttcaccaccaccagcaccagcacacctgtgaccagcaacaccgtgacaggagagacgactcccttttctcctcttgtggccacttctgaatctgtgaccgaaatcacagccagtagctttgtggtctcctgggtctcagcttccgacaccgtgtcgggattccgggtggaatatgagctgagtgaggagggagatgagccacagtacctggatcttccaagcacagccacttctgtgaacatccctgacctgcttcctggccgaaaatacattgtaaatgtctatcagatatctgaggatggggagcagagtttgatcctgtctacttcacaaacaacagcgcctgatgcccctcctgacacgactgtggaccaagttgatgacacctcaattgttgttcgctggagcagaccccaggctcccatcacagggtacagaatagtctattcgccatcagtagaaggtagcagcacagaactcaaccttcctgaaactgcaaactccgtcaccctcagtgacttgcaacctggtgttcagtataacatcactatctatgctgtggaagaaaatcaagaaagtacacctgttgtcattcaacaagaaaccactggcaccccacgctcagatacagtgccctctcccagggacctgcagtttgtggaagtgacagacgtgaaggtcaccatcatgtggacaccgcctgagagtgcagtgaccggctaccgtgtggatgtgatccccgtcaacctgcctggcgagcacgggcagaggctgcccatcagcaggaacacctttgcagaagtcaccgggctgtcccctggggtcacctattacttcaaagtctttgcagtgagccatgggagggagagcaagcctctgactgctcaacagacaaccaaactggatgctcccactaacctccagtttgtcaatgaaactgattctactgtcctggtgagatggactccacctcgggcccagataacaggataccgactgaccgtgggccttacccgaagaggacagcccaggcagtacaatgtgggtccctctgtctccaagtacccactgaggaatctgcagcctgcatctgagtacaccgtatccctcgtggccataaagggcaaccaagagagccccaaagccactggagtctttaccacactgcagcctgggagctctattccaccttacaacaccgaggtgactgagaccaccattgtgatcacatggacgcctgctccaagaattggttttaagctgggtgtacgaccaagccagggaggagaggcaccacgagaagtgacttcagactcaggaagcatcgttgtgtccggcttgactccaggagtagaatacgtctacaccatccaagtcctgagagatggacaggaaagagatgcgccaattgtaaacaaagtggtgacaccattgtctccaccaacaaacttgcatctggaggcaaaccctgacactggagtgctcacagtctcctgggagaggagcaccaccccagacattactggttatagaattaccacaacccctacaaacggccagcagggaaattctttggaagaagtggtccatgctgatcagagctcctgcacttttgataacctgagtcccggcctggagtacaatgtcagtgtttacactgtcaaggatgacaaggaaagtgtccctatctctgataccatcatcccagaggtgccccaactcactgacctaagctttgttgatataaccgattcaagcatcggcctgaggtggaccccgctaaactcttccaccattattgggtaccgcatcacagtagttgcggcaggagaaggtatccctatttttgaagattttgtggactcctcagtaggatactacacagtcacagggctggagccgggcattgactatgatatcagcgttatcactctcattaatggcggcgagagtgcccctactacactgacacaacaaacggctgttcctcctcccactgacctgcgattcaccaacattggtccagacaccatgcgtgtcacctgggctccacccccatccattgatttaaccaacttcctggtgcgttactcacctgtgaaaaatgaggaagatgttgcagagttgtcaatttctccttcagacaatgcagtggtcttaacaaatctcctgcctggtacagaatatgtagtgagtgtctccagtgtctacgaacaacatgagagcacacctcttagaggaagacagaaaacaggtcttgattccccaactggcattgacttttctgatattactgccaactcttttactgtgcactggattgctcctcgagccaccatcactggctacaggatccgccatcatcccgagcacttcagtgggagacctcgagaagatcgggtgccccactctcggaattccatcaccctcaccaacctcactccaggcacagagtatgtggtcagcatcgttgctcttaatggcagagaggaaagtcccttattgattggccaacaatcaacagtttctgatgttccgagggacctggaagttgttgctgcgacccccaccagcctactgatcagctgggatgctcctgctgtcacagtgagatattacaggatcacttacggagagacaggaggaaatagccctgtccaggagttcactgtgcctgggagcaagtctacagctaccatcagcggccttaaacctggagttgattataccatcactgtgtatgctgtcactggccgtggagacagccccgcaagcagcaagccaatttccattaattaccgaacagaaattgacaaaccatcccagatgcaagtgaccgatgttcaggacaacagcattagtgtcaagtggctgccttcaagttcccctgttactggttacagagtaaccaccactcccaaaaatggaccaggaccaacaaaaactaaaactgcaggtccagatcaaacagaaatgactattgaaggcttgcagcccacagtggagtatgtggttagtgtctatgctcagaatccaagcggagagagtcagcctctggttcagactgcagtaaccaacattgatcgccctaaaggactggcattcactgatgtggatgtcgattccatcaaaattgcttgggaaagcccacaggggcaagtttccaggtacagggtgacctactcgagccctgaggatggaatccatgagctattccctgcacctgatggtgaagaagacactgcagagctgcaaggcctcagaccgggttctgagtacacagtcagtgtggttgccttgcacgatgatatggagagccagcccctgattggaacccagtccacagctattcctgcaccaactgacctgaagttcactcaggtcacacccacaagcctgagcgcccagtggacaccacccaatgttcagctcactggatatcgagtgcgggtgacccccaaggagaagaccggaccaatgaaagaaatcaaccttgctcctgacagctcatccgtggttgtatcaggacttatggtggccaccaaatatgaagtgagtgtctatgctcttaaggacactttgacaagcagaccagctcagggagttgtcaccactctggagaatgtcagcccaccaagaagggctcgtgtgacagatgctactgagaccaccatcaccattagctggagaaccaagactgagacgatcactggcttccaagttgatgccgttccagccaatggccagactccaatccagagaaccatcaagccagatgtcagaagctacaccatcacaggtttacaaccaggcactgactacaagatctacctgtacaccttgaatgacaatgctcggagctcccctgtggtcatcgacgcctccactgccattgatgcaccatccaacctgcgtttcctggccaccacacccaattccttgctggtatcatggcagccgccacgtgccaggattaccggctacatcatcaagtatgagaagcctgggtctcctcccagagaagtggtccctcggccccgccctggtgtcacagaggctactattactggcctggaaccgggaaccgaatatacaatttatgtcattgccctgaagaataatcagaagagcgagcccctgattggaaggaaaaagacagacgagcttccccaactggtaacccttccacaccccaatcttcatggaccagagatcttggatgttccttccacagttcaaaagacccctttcgtcacccaccctgggtatgacactggaaatggtattcagcttcctggcacttctggtcagcaacccagtgttgggcaacaaatgatctttgaggaacatggttttaggcggaccacaccgcccacaacggccacccccataaggcataggccaagaccatacccgccgaatgtaggacaagaagctctctctcagacaaccatctcatgggccccattccaggacacttctgagtacatcatttcatgtcatcctgttggcactgatgaagaacccttacagttcagggttcctggaacttctaccagtgccactctgacaggcctcaccagaggtgccacctacaacgtcatagtggaggcactgaaagaccagcagaggcataaggttcgggaagaggttgttaccgtgggcaactctgtcaacgaaggcttgaaccaacctacggatgactcgtgctttgacccctacacagtttcccattatgccgttggagatgagtgggaacgaatgtctgaatcaggctttaaactgttgtgccagtgcttaggctttggaagtggtcatttcagatgtgattcatctagatggtgccatgacaatggtgtgaactacaagattggagagaagtgggaccgtcagggagaaaatggccagatgatgagctgcacatgtcttgggaacggaaaaggagaattcaagtgtgaccctcatgaggcaacgtgttatgatgatgggaagacataccacgtaggagaacagtggcagaaggaatatctcggtgccatttgctcctgcacatgctttggaggccagcggggctggcgctgtgacaactgccgcagacctgggggtgaacccagtcccgaaggcactactggccagtcctacaaccagtattctcagagataccatcagagaacaaacactaatgttaattgcccaattgagtgcttcatgcctttagatgtacaggctgacagagaagattcccgagagtaaatcatctttccaatccagaggaacaagcatgtctctctgccaagatccatctaaactggagtgatgttagcagacccagcttagagttcttctttctttcttaagccctttgctctggaggaagttctccagcttcagctcaactcacagcttctccaagcatcaccctgggagtttcctgagggttttctcataaatgagggctgcacattgcctgttctgcttcgaagtattcaataccgctcagtattttaaatgaagtgattctaagatttggtttgggatcaataggaaagcatatgcagccaaccaagatgcaaatgttttgaaatgatatgaccaaaattttaagtaggaaagtcacccaaacacttctgctttcacttaagtgtctggcccgcaatactgtaggaacaagcatgatcttgttactgtgatattttaaatatccacagtactcactttttccaaatgatcctagtaattgcctagaaatatctttctcttacctgttatttatcaatttttcccagtatttttatacggaaaaaattgtattgaaaacacttagtatgcagttgataagaggaatttggtataattatggtgggtgattattttttatactgtatgtgccaaagctttactactgtggaaagacaactgttttaataaaagatttacattccacaacttgaagttcatctatttgatataagacaccttcgggggaaataattcctgtgaatattctttttcaattcagcaaacatttgaaaatctatgatgtgcaagtctaattgttgatttcagtacaagattttctaaatcagttgctacaaaaactgattggtttttgtcacttcatctcttcactaatggagatagctttacactttctgctttaatagatttaagtggaccccaatatttattaaaattgctagtttaccgttcagaagtataatagaaataatctttagttgctcttttctaaccattgtaattcttcccttcttccctccacctttccttcattgaataaacctctgttcaaagagattgcctgcaagggaaataaaaatgactaagatattaaaa

SEQ ID NO: 134441 - DNA, 8435 bp, Homo sapiens
  Payload ID: 6261
  Gene Symbol: FN1
  Gene Name: fibronectin 1
  Uniprot ID: P02751
  ENST ID: ENST00000336916
  CDS Start-End: 267-7334
gcccgcgccggctgtgctgcacagggggaggagagggaaccccaggcgcgagcgggaagaggggacctgcagccacaacttctctggtcctctgcatcccttctgtccctccacccgtccccttccccaccctctggcccccaccttcttggaggcgacaacccccgggaggcattagaagggatttttcccgcaggttgcgaagggaagcaaacttggtggcaacttgcctcccggtgcgggcgtctctcccccaccgtctcaacatgcttaggggtccggggcccgggctgctgctgctggccgtccagtgcctggggacagcggtgccctccacgggagcctcgaagagcaagaggcaggctcagcaaatggttcagccccagtccccggtggctgtcagtcaaagcaagcccggttgttatgacaatggaaaacactatcagataaatcaacagtgggagcggacctacctaggcaatgcgttggtttgtacttgttatggaggaagccgaggttttaactgcgagagtaaacctgaagctgaagagacttgctttgacaagtacactgggaacacttaccgagtgggtgacacttatgagcgtcctaaagactccatgatctgggactgtacctgcatcggggctgggcgagggagaataagctgtaccatcgcaaaccgctgccatgaagggggtcagtcctacaagattggtgacacctggaggagaccacatgagactggtggttacatgttagagtgtgtgtgtcttggtaatggaaaaggagaatggacctgcaagcccatagctgagaagtgttttgatcatgctgctgggacttcctatgtggtcggagaaacgtgggagaagccctaccaaggctggatgatggtagattgtacttgcctgggagaaggcagcggacgcatcacttgcacttctagaaatagatgcaacgatcaggacacaaggacatcctatagaattggagacacctggagcaagaaggataatcgaggaaacctgctccagtgcatctgcacaggcaacggccgaggagagtggaagtgtgagaggcacacctctgtgcagaccacatcgagcggatctggccccttcaccgatgttcgtgcagctgtttaccaaccgcagcctcacccccagcctcctccctatggccactgtgtcacagacagtggtgtggtctactctgtggggatgcagtggctgaagacacaaggaaataagcaaatgctttgcacgtgcctgggcaacggagtcagctgccaagagacagctgtaacccagacttacggtggcaactcaaatggagagccatgtgtcttaccattcacctacaatggcaggacgttctactcctgcaccacagaagggcgacaggacggacatctttggtgcagcacaacttcgaattatgagcaggaccagaaatactctttctgcacagaccacactgttttggttcagactcgaggaggaaattccaatggtgccttgtgccacttccccttcctatacaacaaccacaattacactgattgcacttctgagggcagaagagacaacatgaagtggtgtgggaccacacagaactatgatgccgaccagaagtttgggttctgccccatggctgcccacgaggaaatctgcacaaccaatgaaggggtcatgtaccgcattggagatcagtgggataagcagcatgacatgggtcacatgatgaggtgcacgtgtgttgggaatggtcgtggggaatggacatgcattgcctactcgcagcttcgagatcagtgcattgttgatgacatcacttacaatgtgaacgacacattccacaagcgtcatgaagaggggcacatgctgaactgtacatgcttcggtcagggtcggggcaggtggaagtgtgatcccgtcgaccaatgccaggattcagagactgggacgttttatcaaattggagattcatgggagaagtatgtgcatggtgtcagataccagtgctactgctatggccgtggcattggggagtggcattgccaacctttacagacctatccaagctcaagtggtcctgtcgaagtatttatcactgagactccgagtcagcccaactcccaccccatccagtggaatgcaccacagccatctcacatttccaagtacattctcaggtggagacctaaaaattctgtaggccgttggaaggaagctaccataccaggccacttaaactcctacaccatcaaaggcctgaagcctggtgtggtatacgagggccagctcatcagcatccagcagtacggccaccaagaagtgactcgctttgacttcaccaccaccagcaccagcacacctgtgaccagcaacaccgtgacaggagagacgactcccttttctcctcttgtggccacttctgaatctgtgaccgaaatcacagccagtagctttgtggtctcctgggtctcagcttccgacaccgtgtcgggattccgggtggaatatgagctgagtgaggagggagatgagccacagtacctggatcttccaagcacagccacttctgtgaacatccctgacctgcttcctggccgaaaatacattgtaaatgtctatcagatatctgaggatggggagcagagtttgatcctgtctacttcacaaacaacagcgcctgatgcccctcctgacacgactgtggaccaagttgatgacacctcaattgttgttcgctggagcagaccccaggctcccatcacagggtacagaatagtctattcgccatcagtagaaggtagcagcacagaactcaaccttcctgaaactgcaaactccgtcaccctcagtgacttgcaacctggtgttcagtataacatcactatctatgctgtggaagaaaatcaagaaagtacacctgttgtcattcaacaagaaaccactggcaccccacgctcagatacagtgccctctcccagggacctgcagtttgtggaagtgacagacgtgaaggtcaccatcatgtggacaccgcctgagagtgcagtgaccggctaccgtgtggatgtgatccccgtcaacctgcctggcgagcacgggcagaggctgcccatcagcaggaacacctttgcagaagtcaccgggctgtcccctggggtcacctattacttcaaagtctttgcagtgagccatgggagggagagcaagcctctgactgctcaacagacaaccaaactggatgctcccactaacctccagtttgtcaatgaaactgattctactgtcctggtgagatggactccacctcgggcccagataacaggataccgactgaccgtgggccttacccgaagaggacagcccaggcagtacaatgtgggtccctctgtctccaagtacccactgaggaatctgcagcctgcatctgagtacaccgtatccctcgtggccataaagggcaaccaagagagccccaaagccactggagtctttaccacactgcagcctgggagctctattccaccttacaacaccgaggtgactgagaccaccattgtgatcacatggacgcctgctccaagaattggttttaagctgggtgtacgaccaagccagggaggagaggcaccacgagaagtgacttcagactcaggaagcatcgttgtgtccggcttgactccaggagtagaatacgtctacaccatccaagtcctgagagatggacaggaaagagatgcgccaattgtaaacaaagtggtgacaccattgtctccaccaacaaacttgcatctggaggcaaaccctgacactggagtgctcacagtctcctgggagaggagcaccaccccagacattactggttatagaattaccacaacccctacaaacggccagcagggaaattctttggaagaagtggtccatgctgatcagagctcctgcacttttgataacctgagtcccggcctggagtacaatgtcagtgtttacactgtcaaggatgacaaggaaagtgtccctatctctgataccatcatcccagctgttcctcctcccactgacctgcgattcaccaacattggtccagacaccatgcgtgtcacctgggctccacccccatccattgatttaaccaacttcctggtgcgttactcacctgtgaaaaatgaggaagatgttgcagagttgtcaatttctccttcagacaatgcagtggtcttaacaaatctcctgcctggtacagaatatgtagtgagtgtctccagtgtctacgaacaacatgagagcacacctcttagaggaagacagaaaacaggtcttgattccccaactggcattgacttttctgatattactgccaactcttttactgtgcactggattgctcctcgagccaccatcactggctacaggatccgccatcatcccgagcacttcagtgggagacctcgagaagatcgggtgccccactctcggaattccatcaccctcaccaacctcactccaggcacagagtatgtggtcagcatcgttgctcttaatggcagagaggaaagtcccttattgattggccaacaatcaacagtttctgatgttccgagggacctggaagttgttgctgcgacccccaccagcctactgatcagctgggatgctcctgctgtcacagtgagatattacaggatcacttacggagagacaggaggaaatagccctgtccaggagttcactgtgcctgggagcaagtctacagctaccatcagcggccttaaacctggagttgattataccatcactgtgtatgctgtcactggccgtggagacagccccgcaagcagcaagccaatttccattaattaccgaacagaaattgacaaaccatcccagatgcaagtgaccgatgttcaggacaacagcattagtgtcaagtggctgccttcaagttcccctgttactggttacagagtaaccaccactcccaaaaatggaccaggaccaacaaaaactaaaactgcaggtccagatcaaacagaaatgactattgaaggcttgcagcccacagtggagtatgtggttagtgtctatgctcagaatccaagcggagagagtcagcctctggttcagactgcagtaaccaacattgatcgccctaaaggactggcattcactgatgtggatgtcgattccatcaaaattgcttgggaaagcccacaggggcaagtttccaggtacagggtgacctactcgagccctgaggatggaatccatgagctattccctgcacctgatggtgaagaagacactgcagagctgcaaggcctcagaccgggttctgagtacacagtcagtgtggttgccttgcacgatgatatggagagccagcccctgattggaacccagtccacagctattcctgcaccaactgacctgaagttcactcaggtcacacccacaagcctgagcgcccagtggacaccacccaatgttcagctcactggatatcgagtgcgggtgacccccaaggagaagaccggaccaatgaaagaaatcaaccttgctcctgacagctcatccgtggttgtatcaggacttatggtggccaccaaatatgaagtgagtgtctatgctcttaaggacactttgacaagcagaccagctcagggagttgtcaccactctggagaatgtcagcccaccaagaagggctcgtgtgacagatgctactgagaccaccatcaccattagctggagaaccaagactgagacgatcactggcttccaagttgatgccgttccagccaatggccagactccaatccagagaaccatcaagccagatgtcagaagctacaccatcacaggtttacaaccaggcactgactacaagatctacctgtacaccttgaatgacaatgctcggagctcccctgtggtcatcgacgcctccactgccattgatgcaccatccaacctgcgtttcctggccaccacacccaattccttgctggtatcatggcagccgccacgtgccaggattaccggctacatcatcaagtatgagaagcctgggtctcctcccagagaagtggtccctcggccccgccctggtgtcacagaggctactattactggcctggaaccgggaaccgaatatacaatttatgtcattgccctgaagaataatcagaagagcgagcccctgattggaaggaaaaagacagacgagcttccccaactggtaacccttccacaccccaatcttcatggaccagagatcttggatgttccttccacagttcaaaagacccctttcgtcacccaccctgggtatgacactggaaatggtattcagcttcctggcacttctggtcagcaacccagtgttgggcaacaaatgatctttgaggaacatggttttaggcggaccacaccgcccacaacggccacccccataaggcataggccaagaccatacccgccgaatgtaggacaagaagctctctctcagacaaccatctcatgggccccattccaggacacttctgagtacatcatttcatgtcatcctgttggcactgatgaagaacccttacagttcagggttcctggaacttctaccagtgccactctgacaggcctcaccagaggtgccacctacaacgtcatagtggaggcactgaaagaccagcagaggcataaggttcgggaagaggttgttaccgtgggcaactctgtcaacgaaggcttgaaccaacctacggatgactcgtgctttgacccctacacagtttcccattatgccgttggagatgagtgggaacgaatgtctgaatcaggctttaaactgttgtgccagtgcttaggctttggaagtggtcatttcagatgtgattcatctagatggtgccatgacaatggtgtgaactacaagattggagagaagtgggaccgtcagggagaaaatggccagatgatgagctgcacatgtcttgggaacggaaaaggagaattcaagtgtgaccctcatgaggcaacgtgttatgatgatgggaagacataccacgtaggagaacagtggcagaaggaatatctcggtgccatttgctcctgcacatgctttggaggccagcggggctggcgctgtgacaactgccgcagacctgggggtgaacccagtcccgaaggcactactggccagtcctacaaccagtattctcagagataccatcagagaacaaacactaatgttaattgcccaattgagtgcttcatgcctttagatgtacaggctgacagagaagattcccgagagtaaatcatctttccaatccagaggaacaagcatgtctctctgccaagatccatctaaactggagtgatgttagcagacccagcttagagttcttctttctttcttaagccctttgctctggaggaagttctccagcttcagctcaactcacagcttctccaagcatcaccctgggagtttcctgagggttttctcataaatgagggctgcacattgcctgttctgcttcgaagtattcaataccgctcagtattttaaatgaagtgattctaagatttggtttgggatcaataggaaagcatatgcagccaaccaagatgcaaatgttttgaaatgatatgaccaaaattttaagtaggaaagtcacccaaacacttctgctttcacttaagtgtctggcccgcaatactgtaggaacaagcatgatcttgttactgtgatattttaaatatccacagtactcactttttccaaatgatcctagtaattgcctagaaatatctttctcttacctgttatttatcaatttttcccagtatttttatacggaaaaaattgtattgaaaacacttagtatgcagttgataagaggaatttggtataattatggtgggtgattattttttatactgtatgtgccaaagctttactactgtggaaagacaactgttttaataaaagatttacattccacaacttgaagttcatctatttgatataagacaccttcgggggaaataattcctgtgaatattctttttcaattcagcaaacatttgaaaatctatgatgtgcaagtctaattgttgatttcagtacaagattttctaaatcagttgctacaaaaactgattggtttttgtcacttcatctcttcactaatggagatagctttacactttctgctttaatagatttaagtggaccccaatatttattaaaattgctagtttaccgttcagaagtataatagaaataatctttagttgctcttttctaaccattgtaattcttcccttcttccctccacctttccttcattgaataaacctctgttcaaagagattgcctgcaagggaaataaaaatgactaagatattaaaa

SEQ ID NO: 134442 - DNA, 8905 bp, Homo sapiens
  Payload ID: 6261
  Gene Symbol: FN1
  Gene Name: fibronectin 1
  Uniprot ID: P02751
  ENST ID: ENST00000354785
  CDS Start-End: 371-7804
cggggcggggacagcccggcgggtctctcctcccccgcgccccgggcctccagaggggcgggaggggaccgtcccatataagccccggctcccggcgctcggacgcccgcgccggctgtgctgcacagggggaggagagggaaccccaggcgcgagcgggaagaggggacctgcagccacaacttctctggtcctctgcatcccttctgtccctccacccgtccccttccccaccctctggcccccaccttcttggaggcgacaacccccgggaggcattagaagggatttttcccgcaggttgcgaagggaagcaaacttggtggcaacttgcctcccggtgcgggcgtctctcccccaccgtctcaacatgcttaggggtccggggcccgggctgctgctgctggccgtccagtgcctggggacagcggtgccctccacgggagcctcgaagagcaagaggcaggctcagcaaatggttcagccccagtccccggtggctgtcagtcaaagcaagcccggttgttatgacaatggaaaacactatcagataaatcaacagtgggagcggacctacctaggcaatgcgttggtttgtacttgttatggaggaagccgaggttttaactgcgagagtaaacctgaagctgaagagacttgctttgacaagtacactgggaacacttaccgagtgggtgacacttatgagcgtcctaaagactccatgatctgggactgtacctgcatcggggctgggcgagggagaataagctgtaccatcgcaaaccgctgccatgaagggggtcagtcctacaagattggtgacacctggaggagaccacatgagactggtggttacatgttagagtgtgtgtgtcttggtaatggaaaaggagaatggacctgcaagcccatagctgagaagtgttttgatcatgctgctgggacttcctatgtggtcggagaaacgtgggagaagccctaccaaggctggatgatggtagattgtacttgcctgggagaaggcagcggacgcatcacttgcacttctagaaatagatgcaacgatcaggacacaaggacatcctatagaattggagacacctggagcaagaaggataatcgaggaaacctgctccagtgcatctgcacaggcaacggccgaggagagtggaagtgtgagaggcacacctctgtgcagaccacatcgagcggatctggccccttcaccgatgttcgtgcagctgtttaccaaccgcagcctcacccccagcctcctccctatggccactgtgtcacagacagtggtgtggtctactctgtggggatgcagtggctgaagacacaaggaaataagcaaatgctttgcacgtgcctgggcaacggagtcagctgccaagagacagctgtaacccagacttacggtggcaactcaaatggagagccatgtgtcttaccattcacctacaatggcaggacgttctactcctgcaccacagaagggcgacaggacggacatctttggtgcagcacaacttcgaattatgagcaggaccagaaatactctttctgcacagaccacactgttttggttcagactcgaggaggaaattccaatggtgccttgtgccacttccccttcctatacaacaaccacaattacactgattgcacttctgagggcagaagagacaacatgaagtggtgtgggaccacacagaactatgatgccgaccagaagtttgggttctgccccatggctgcccacgaggaaatctgcacaaccaatgaaggggtcatgtaccgcattggagatcagtgggataagcagcatgacatgggtcacatgatgaggtgcacgtgtgttgggaatggtcgtggggaatggacatgcattgcctactcgcagcttcgagatcagtgcattgttgatgacatcacttacaatgtgaacgacacattccacaagcgtcatgaagaggggcacatgctgaactgtacatgcttcggtcagggtcggggcaggtggaagtgtgatcccgtcgaccaatgccaggattcagagactgggacgttttatcaaattggagattcatgggagaagtatgtgcatggtgtcagataccagtgctactgctatggccgtggcattggggagtggcattgccaacctttacagacctatccaagctcaagtggtcctgtcgaagtatttatcactgagactccgagtcagcccaactcccaccccatccagtggaatgcaccacagccatctcacatttccaagtacattctcaggtggagacctaaaaattctgtaggccgttggaaggaagctaccataccaggccacttaaactcctacaccatcaaaggcctgaagcctggtgtggtatacgagggccagctcatcagcatccagcagtacggccaccaagaagtgactcgctttgacttcaccaccaccagcaccagcacacctgtgaccagcaacaccgtgacaggagagacgactcccttttctcctcttgtggccacttctgaatctgtgaccgaaatcacagccagtagctttgtggtctcctgggtctcagcttccgacaccgtgtcgggattccgggtggaatatgagctgagtgaggagggagatgagccacagtacctggatcttccaagcacagccacttctgtgaacatccctgacctgcttcctggccgaaaatacattgtaaatgtctatcagatatctgaggatggggagcagagtttgatcctgtctacttcacaaacaacagcgcctgatgcccctcctgacacgactgtggaccaagttgatgacacctcaattgttgttcgctggagcagaccccaggctcccatcacagggtacagaatagtctattcgccatcagtagaaggtagcagcacagaactcaaccttcctgaaactgcaaactccgtcaccctcagtgacttgcaacctggtgttcagtataacatcactatctatgctgtggaagaaaatcaagaaagtacacctgttgtcattcaacaagaaaccactggcaccccacgctcagatacagtgccctctcccagggacctgcagtttgtggaagtgacagacgtgaaggtcaccatcatgtggacaccgcctgagagtgcagtgaccggctaccgtgtggatgtgatccccgtcaacctgcctggcgagcacgggcagaggctgcccatcagcaggaacacctttgcagaagtcaccgggctgtcccctggggtcacctattacttcaaagtctttgcagtgagccatgggagggagagcaagcctctgactgctcaacagacaaccaaactggatgctcccactaacctccagtttgtcaatgaaactgattctactgtcctggtgagatggactccacctcgggcccagataacaggataccgactgaccgtgggccttacccgaagaggacagcccaggcagtacaatgtgggtccctctgtctccaagtacccactgaggaatctgcagcctgcatctgagtacaccgtatccctcgtggccataaagggcaaccaagagagccccaaagccactggagtctttaccacactgcagcctgggagctctattccaccttacaacaccgaggtgactgagaccaccattgtgatcacatggacgcctgctccaagaattggttttaagctgggtgtacgaccaagccagggaggagaggcaccacgagaagtgacttcagactcaggaagcatcgttgtgtccggcttgactccaggagtagaatacgtctacaccatccaagtcctgagagatggacaggaaagagatgcgccaattgtaaacaaagtggtgacaccattgtctccaccaacaaacttgcatctggaggcaaaccctgacactggagtgctcacagtctcctgggagaggagcaccaccccagacattactggttatagaattaccacaacccctacaaacggccagcagggaaattctttggaagaagtggtccatgctgatcagagctcctgcacttttgataacctgagtcccggcctggagtacaatgtcagtgtttacactgtcaaggatgacaaggaaagtgtccctatctctgataccatcatcccagaggtgccccaactcactgacctaagctttgttgatataaccgattcaagcatcggcctgaggtggaccccgctaaactcttccaccattattgggtaccgcatcacagtagttgcggcaggagaaggtatccctatttttgaagattttgtggactcctcagtaggatactacacagtcacagggctggagccgggcattgactatgatatcagcgttatcactctcattaatggcggcgagagtgcccctactacactgacacaacaaacggctgttcctcctcccactgacctgcgattcaccaacattggtccagacaccatgcgtgtcacctgggctccacccccatccattgatttaaccaacttcctggtgcgttactcacctgtgaaaaatgaggaagatgttgcagagttgtcaatttctccttcagacaatgcagtggtcttaacaaatctcctgcctggtacagaatatgtagtgagtgtctccagtgtctacgaacaacatgagagcacacctcttagaggaagacagaaaacaggtcttgattccccaactggcattgacttttctgatattactgccaactcttttactgtgcactggattgctcctcgagccaccatcactggctacaggatccgccatcatcccgagcacttcagtgggagacctcgagaagatcgggtgccccactctcggaattccatcaccctcaccaacctcactccaggcacagagtatgtggtcagcatcgttgctcttaatggcagagaggaaagtcccttattgattggccaacaatcaacagtttctgatgttccgagggacctggaagttgttgctgcgacccccaccagcctactgatcagctgggatgctcctgctgtcacagtgagatattacaggatcacttacggagagacaggaggaaatagccctgtccaggagttcactgtgcctgggagcaagtctacagctaccatcagcggccttaaacctggagttgattataccatcactgtgtatgctgtcactggccgtggagacagccccgcaagcagcaagccaatttccattaattaccgaacagaaattgacaaaccatcccagatgcaagtgaccgatgttcaggacaacagcattagtgtcaagtggctgccttcaagttcccctgttactggttacagagtaaccaccactcccaaaaatggaccaggaccaacaaaaactaaaactgcaggtccagatcaaacagaaatgactattgaaggcttgcagcccacagtggagtatgtggttagtgtctatgctcagaatccaagcggagagagtcagcctctggttcagactgcagtaaccaacattgatcgccctaaaggactggcattcactgatgtggatgtcgattccatcaaaattgcttgggaaagcccacaggggcaagtttccaggtacagggtgacctactcgagccctgaggatggaatccatgagctattccctgcacctgatggtgaagaagacactgcagagctgcaaggcctcagaccgggttctgagtacacagtcagtgtggttgccttgcacgatgatatggagagccagcccctgattggaacccagtccacagctattcctgcaccaactgacctgaagttcactcaggtcacacccacaagcctgagcgcccagtggacaccacccaatgttcagctcactggatatcgagtgcgggtgacccccaaggagaagaccggaccaatgaaagaaatcaaccttgctcctgacagctcatccgtggttgtatcaggacttatggtggccaccaaatatgaagtgagtgtctatgctcttaaggacactttgacaagcagaccagctcagggagttgtcaccactctggagaatgtcagcccaccaagaagggctcgtgtgacagatgctactgagaccaccatcaccattagctggagaaccaagactgagacgatcactggcttccaagttgatgccgttccagccaatggccagactccaatccagagaaccatcaagccagatgtcagaagctacaccatcacaggtttacaaccaggcactgactacaagatctacctgtacaccttgaatgacaatgctcggagctcccctgtggtcatcgacgcctccactgccattgatgcaccatccaacctgcgtttcctggccaccacacccaattccttgctggtatcatggcagccgccacgtgccaggattaccggctacatcatcaagtatgagaagcctgggtctcctcccagagaagtggtccctcggccccgccctggtgtcacagaggctactattactggcctggaaccgggaaccgaatatacaatttatgtcattgccctgaagaataatcagaagagcgagcccctgattggaaggaaaaagacagacgagcttccccaactggtaacccttccacaccccaatcttcatggaccagagatcttggatgttccttccacagttcaaaagacccctttcgtcacccaccctgggtatgacactggaaatggtattcagcttcctggcacttctggtcagcaacccagtgttgggcaacaaatgatctttgaggaacatggttttaggcggaccacaccgcccacaacggccacccccataaggcataggccaagaccatacccgccgaatgtaggtgaggaaatccaaattggtcacatccccagggaagatgtagactatcacctgtacccacacggtccgggactcaatccaaatgcctctacaggacaagaagctctctctcagacaaccatctcatgggccccattccaggacacttctgagtacatcatttcatgtcatcctgttggcactgatgaagaacccttacagttcagggttcctggaacttctaccagtgccactctgacaggcctcaccagaggtgccacctacaacgtcatagtggaggcactgaaagaccagcagaggcataaggttcgggaagaggttgttaccgtgggcaactctgtcaacgaaggcttgaaccaacctacggatgactcgtgctttgacccctacacagtttcccattatgccgttggagatgagtgggaacgaatgtctgaatcaggctttaaactgttgtgccagtgcttaggctttggaagtggtcatttcagatgtgattcatctagatggtgccatgacaatggtgtgaactacaagattggagagaagtgggaccgtcagggagaaaatggccagatgatgagctgcacatgtcttgggaacggaaaaggagaattcaagtgtgaccctcatgaggcaacgtgttatgatgatgggaagacataccacgtaggagaacagtggcagaaggaatatctcggtgccatttgctcctgcacatgctttggaggccagcggggctggcgctgtgacaactgccgcagacctgggggtgaacccagtcccgaaggcactactggccagtcctacaaccagtattctcagagataccatcagagaacaaacactaatgttaattgcccaattgagtgcttcatgcctttagatgtacaggctgacagagaagattcccgagagtaaatcatctttccaatccagaggaacaagcatgtctctctgccaagatccatctaaactggagtgatgttagcagacccagcttagagttcttctttctttcttaagccctttgctctggaggaagttctccagcttcagctcaactcacagcttctccaagcatcaccctgggagtttcctgagggttttctcataaatgagggctgcacattgcctgttctgcttcgaagtattcaataccgctcagtattttaaatgaagtgattctaagatttggtttgggatcaataggaaagcatatgcagccaaccaagatgcaaatgttttgaaatgatatgaccaaaattttaagtaggaaagtcacccaaacacttctgctttcacttaagtgtctggcccgcaatactgtaggaacaagcatgatcttgttactgtgatattttaaatatccacagtactcactttttccaaatgatcctagtaattgcctagaaatatctttctcttacctgttatttatcaatttttcccagtatttttatacggaaaaaattgtattgaaaacacttagtatgcagttgataagaggaatttggtataattatggtgggtgattattttttatactgtatgtgccaaagctttactactgtggaaagacaactgttttaataaaagatttacattccacaacttgaagttcatctatttgatataagacaccttcgggggaaataattcctgtgaatattctttttcaattcagcaaacatttgaaaatctatgatgtgcaagtctaattgttgatttcagtacaagattttctaaatcagttgctacaaaaactgattggtttttgtcacttcatctcttcactaatggagatagctttacactttctgctttaatagatttaagtggaccccaatatttattaaaattgctagtttaccgttcagaagtataatagaaataatctttagttgctcttttctaaccattgtaattcttcccttcttccctccacctttccttcattgaataaacctctgttcaaagagattgcctgcaagggaaataaaaatgactaagatattaaaa

SEQ ID NO: 134443 - DNA, 7846 bp, Homo sapiens
  Payload ID: 6261
  Gene Symbol: FN1
  Gene Name: fibronectin 1
  Uniprot ID: P02751
  ENST ID: ENST00000356005
  CDS Start-End: 267-7157
gcccgcgccggctgtgctgcacagggggaggagagggaaccccaggcgcgagcgggaagaggggacctgcagccacaacttctctggtcctctgcatcccttctgtccctccacccgtccccttccccaccctctggcccccaccttcttggaggcgacaacccccgggaggcattagaagggatttttcccgcaggttgcgaagggaagcaaacttggtggcaacttgcctcccggtgcgggcgtctctcccccaccgtctcaacatgcttaggggtccggggcccgggctgctgctgctggccgtccagtgcctggggacagcggtgccctccacgggagcctcgaagagcaagaggcaggctcagcaaatggttcagccccagtccccggtggctgtcagtcaaagcaagcccggttgttatgacaatggaaaacactatcagataaatcaacagtgggagcggacctacctaggcaatgcgttggtttgtacttgttatggaggaagccgaggttttaactgcgagagtaaacctgaagctgaagagacttgctttgacaagtacactgggaacacttaccgagtgggtgacacttatgagcgtcctaaagactccatgatctgggactgtacctgcatcggggctgggcgagggagaataagctgtaccatcgcaaaccgctgccatgaagggggtcagtcctacaagattggtgacacctggaggagaccacatgagactggtggttacatgttagagtgtgtgtgtcttggtaatggaaaaggagaatggacctgcaagcccatagctgagaagtgttttgatcatgctgctgggacttcctatgtggtcggagaaacgtgggagaagccctaccaaggctggatgatggtagattgtacttgcctgggagaaggcagcggacgcatcacttgcacttctagaaatagatgcaacgatcaggacacaaggacatcctatagaattggagacacctggagcaagaaggataatcgaggaaacctgctccagtgcatctgcacaggcaacggccgaggagagtggaagtgtgagaggcacacctctgtgcagaccacatcgagcggatctggccccttcaccgatgttcgtgcagctgtttaccaaccgcagcctcacccccagcctcctccctatggccactgtgtcacagacagtggtgtggtctactctgtggggatgcagtggctgaagacacaaggaaataagcaaatgctttgcacgtgcctgggcaacggagtcagctgccaagagacagctgtaacccagacttacggtggcaactcaaatggagagccatgtgtcttaccattcacctacaatggcaggacgttctactcctgcaccacagaagggcgacaggacggacatctttggtgcagcacaacttcgaattatgagcaggaccagaaatactctttctgcacagaccacactgttttggttcagactcgaggaggaaattccaatggtgccttgtgccacttccccttcctatacaacaaccacaattacactgattgcacttctgagggcagaagagacaacatgaagtggtgtgggaccacacagaactatgatgccgaccagaagtttgggttctgccccatggctgcccacgaggaaatctgcacaaccaatgaaggggtcatgtaccgcattggagatcagtgggataagcagcatgacatgggtcacatgatgaggtgcacgtgtgttgggaatggtcgtggggaatggacatgcattgcctactcgcagcttcgagatcagtgcattgttgatgacatcacttacaatgtgaacgacacattccacaagcgtcatgaagaggggcacatgctgaactgtacatgcttcggtcagggtcggggcaggtggaagtgtgatcccgtcgaccaatgccaggattcagagactgggacgttttatcaaattggagattcatgggagaagtatgtgcatggtgtcagataccagtgctactgctatggccgtggcattggggagtggcattgccaacctttacagacctatccaagctcaagtggtcctgtcgaagtatttatcactgagactccgagtcagcccaactcccaccccatccagtggaatgcaccacagccatctcacatttccaagtacattctcaggtggagacctaaaaattctgtaggccgttggaaggaagctaccataccaggccacttaaactcctacaccatcaaaggcctgaagcctggtgtggtatacgagggccagctcatcagcatccagcagtacggccaccaagaagtgactcgctttgacttcaccaccaccagcaccagcacacctgtgaccagcaacaccgtgacaggagagacgactcccttttctcctcttgtggccacttctgaatctgtgaccgaaatcacagccagtagctttgtggtctcctgggtctcagcttccgacaccgtgtcgggattccgggtggaatatgagctgagtgaggagggagatgagccacagtacctggatcttccaagcacagccacttctgtgaacatccctgacctgcttcctggccgaaaatacattgtaaatgtctatcagatatctgaggatggggagcagagtttgatcctgtctacttcacaaacaacagcgcctgatgcccctcctgacacgactgtggaccaagttgatgacacctcaattgttgttcgctggagcagaccccaggctcccatcacagggtacagaatagtctattcgccatcagtagaaggtagcagcacagaactcaaccttcctgaaactgcaaactccgtcaccctcagtgacttgcaacctggtgttcagtataacatcactatctatgctgtggaagaaaatcaagaaagtacacctgttgtcattcaacaagaaaccactggcaccccacgctcagatacagtgccctctcccagggacctgcagtttgtggaagtgacagacgtgaaggtcaccatcatgtggacaccgcctgagagtgcagtgaccggctaccgtgtggatgtgatccccgtcaacctgcctggcgagcacgggcagaggctgcccatcagcaggaacacctttgcagaagtcaccgggctgtcccctggggtcacctattacttcaaagtctttgcagtgagccatgggagggagagcaagcctctgactgctcaacagacaaccaaactggatgctcccactaacctccagtttgtcaatgaaactgattctactgtcctggtgagatggactccacctcgggcccagataacaggataccgactgaccgtgggccttacccgaagaggacagcccaggcagtacaatgtgggtccctctgtctccaagtacccactgaggaatctgcagcctgcatctgagtacaccgtatccctcgtggccataaagggcaaccaagagagccccaaagccactggagtctttaccacactgcagcctgggagctctattccaccttacaacaccgaggtgactgagaccaccattgtgatcacatggacgcctgctccaagaattggttttaagctgggtgtacgaccaagccagggaggagaggcaccacgagaagtgacttcagactcaggaagcatcgttgtgtccggcttgactccaggagtagaatacgtctacaccatccaagtcctgagagatggacaggaaagagatgcgccaattgtaaacaaagtggtgacaccattgtctccaccaacaaacttgcatctggaggcaaaccctgacactggagtgctcacagtctcctgggagaggagcaccaccccagacattactggttatagaattaccacaacccctacaaacggccagcagggaaattctttggaagaagtggtccatgctgatcagagctcctgcacttttgataacctgagtcccggcctggagtacaatgtcagtgtttacactgtcaaggatgacaaggaaagtgtccctatctctgataccatcatcccagctgttcctcctcccactgacctgcgattcaccaacattggtccagacaccatgcgtgtcacctgggctccacccccatccattgatttaaccaacttcctggtgcgttactcacctgtgaaaaatgaggaagatgttgcagagttgtcaatttctccttcagacaatgcagtggtcttaacaaatctcctgcctggtacagaatatgtagtgagtgtctccagtgtctacgaacaacatgagagcacacctcttagaggaagacagaaaacaggtcttgattccccaactggcattgacttttctgatattactgccaactcttttactgtgcactggattgctcctcgagccaccatcactggctacaggatccgccatcatcccgagcacttcagtgggagacctcgagaagatcgggtgccccactctcggaattccatcaccctcaccaacctcactccaggcacagagtatgtggtcagcatcgttgctcttaatggcagagaggaaagtcccttattgattggccaacaatcaacagtttctgatgttccgagggacctggaagttgttgctgcgacccccaccagcctactgatcagctgggatgctcctgctgtcacagtgagatattacaggatcacttacggagagacaggaggaaatagccctgtccaggagttcactgtgcctgggagcaagtctacagctaccatcagcggccttaaacctggagttgattataccatcactgtgtatgctgtcactggccgtggagacagccccgcaagcagcaagccaatttccattaattaccgaacagaaattgacaaaccatcccagatgcaagtgaccgatgttcaggacaacagcattagtgtcaagtggctgccttcaagttcccctgttactggttacagagtaaccaccactcccaaaaatggaccaggaccaacaaaaactaaaactgcaggtccagatcaaacagaaatgactattgaaggcttgcagcccacagtggagtatgtggttagtgtctatgctcagaatccaagcggagagagtcagcctctggttcagactgcagtaaccactattcctgcaccaactgacctgaagttcactcaggtcacacccacaagcctgagcgcccagtggacaccacccaatgttcagctcactggatatcgagtgcgggtgacccccaaggagaagaccggaccaatgaaagaaatcaaccttgctcctgacagctcatccgtggttgtatcaggacttatggtggccaccaaatatgaagtgagtgtctatgctcttaaggacactttgacaagcagaccagctcagggagttgtcaccactctggagaatgtcagcccaccaagaagggctcgtgtgacagatgctactgagaccaccatcaccattagctggagaaccaagactgagacgatcactggcttccaagttgatgccgttccagccaatggccagactccaatccagagaaccatcaagccagatgtcagaagctacaccatcacaggtttacaaccaggcactgactacaagatctacctgtacaccttgaatgacaatgctcggagctcccctgtggtcatcgacgcctccactgccattgatgcaccatccaacctgcgtttcctggccaccacacccaattccttgctggtatcatggcagccgccacgtgccaggattaccggctacatcatcaagtatgagaagcctgggtctcctcccagagaagtggtccctcggccccgccctggtgtcacagaggctactattactggcctggaaccgggaaccgaatatacaatttatgtcattgccctgaagaataatcagaagagcgagcccctgattggaaggaaaaagacagacgagcttccccaactggtaacccttccacaccccaatcttcatggaccagagatcttggatgttccttccacagttcaaaagacccctttcgtcacccaccctgggtatgacactggaaatggtattcagcttcctggcacttctggtcagcaacccagtgttgggcaacaaatgatctttgaggaacatggttttaggcggaccacaccgcccacaacggccacccccataaggcataggccaagaccatacccgccgaatgtaggtgaggaaatccaaattggtcacatccccagggaagatgtagactatcacctgtacccacacggtccgggactcaatccaaatgcctctacaggacaagaagctctctctcagacaaccatctcatgggccccattccaggacacttctgagtacatcatttcatgtcatcctgttggcactgatgaagaacccttacagttcagggttcctggaacttctaccagtgccactctgacaggcctcaccagaggtgccacctacaacgtcatagtggaggcactgaaagaccagcagaggcataaggttcgggaagaggttgttaccgtgggcaactctgtcaacgaaggcttgaaccaacctacggatgactcgtgctttgacccctacacagtttcccattatgccgttggagatgagtgggaacgaatgtctgaatcaggctttaaactgttgtgccagtgcttaggctttggaagtggtcatttcagatgtgattcatctagatggtgccatgacaatggtgtgaactacaagattggagagaagtgggaccgtcagggagaaaatggccagatgatgagctgcacatgtcttgggaacggaaaaggagaattcaagtgtgaccctcatgaggcaacgtgttatgatgatgggaagacataccacgtaggagaacagtggcagaaggaatatctcggtgccatttgctcctgcacatgctttggaggccagcggggctggcgctgtgacaactgccgcagacctgggggtgaacccagtcccgaaggcactactggccagtcctacaaccagtattctcagagataccatcagagaacaaacactaatgttaattgcccaattgagtgcttcatgcctttagatgtacaggctgacagagaagattcccgagagtaaatcatctttccaatccagaggaacaagcatgtctctctgccaagatccatctaaactggagtgatgttagcagacccagcttagagttcttctttctttcttaagccctttgctctggaggaagttctccagcttcagctcaactcacagcttctccaagcatcaccctgggagtttcctgagggttttctcataaatgagggctgcacattgcctgttctgcttcgaagtattcaataccgctcagtattttaaatgaagtgattctaagatttggtttgggatcaataggaaagcatatgcagccaaccaagatgcaaatgttttgaaatgatatgaccaaaattttaagtaggaaagtcacccaaacacttctgctttcacttaagtgtctggcccgcaatactgtaggaacaagcatgatcttgttactgtgatattttaaatatccacagtactcactttttccaaatgatcctagtaattgcctagaaatatctttctcttacctgttatttatcaatttttcccagtatttttatacggaaaaaattgtattgaaaacacttagtatgcagttgataagaggaatttggtataattatggtgggtgattattttttatactgtatgtgccaaagctttactactgtggaaagacaactgttttaataaaagatttacattcc

SEQ ID NO: 134444 - DNA, 7898 bp, Homo sapiens
  Payload ID: 6261
  Gene Symbol: FN1
  Gene Name: fibronectin 1
  Uniprot ID: P02751
  ENST ID: ENST00000357867
  CDS Start-End: 267-6797
gcccgcgccggctgtgctgcacagggggaggagagggaaccccaggcgcgagcgggaagaggggacctgcagccacaacttctctggtcctctgcatcccttctgtccctccacccgtccccttccccaccctctggcccccaccttcttggaggcgacaacccccgggaggcattagaagggatttttcccgcaggttgcgaagggaagcaaacttggtggcaacttgcctcccggtgcgggcgtctctcccccaccgtctcaacatgcttaggggtccggggcccgggctgctgctgctggccgtccagtgcctggggacagcggtgccctccacgggagcctcgaagagcaagaggcaggctcagcaaatggttcagccccagtccccggtggctgtcagtcaaagcaagcccggttgttatgacaatggaaaacactatcagataaatcaacagtgggagcggacctacctaggcaatgcgttggtttgtacttgttatggaggaagccgaggttttaactgcgagagtaaacctgaagctgaagagacttgctttgacaagtacactgggaacacttaccgagtgggtgacacttatgagcgtcctaaagactccatgatctgggactgtacctgcatcggggctgggcgagggagaataagctgtaccatcgcaaaccgctgccatgaagggggtcagtcctacaagattggtgacacctggaggagaccacatgagactggtggttacatgttagagtgtgtgtgtcttggtaatggaaaaggagaatggacctgcaagcccatagctgagaagtgttttgatcatgctgctgggacttcctatgtggtcggagaaacgtgggagaagccctaccaaggctggatgatggtagattgtacttgcctgggagaaggcagcggacgcatcacttgcacttctagaaatagatgcaacgatcaggacacaaggacatcctatagaattggagacacctggagcaagaaggataatcgaggaaacctgctccagtgcatctgcacaggcaacggccgaggagagtggaagtgtgagaggcacacctctgtgcagaccacatcgagcggatctggccccttcaccgatgttcgtgcagctgtttaccaaccgcagcctcacccccagcctcctccctatggccactgtgtcacagacagtggtgtggtctactctgtggggatgcagtggctgaagacacaaggaaataagcaaatgctttgcacgtgcctgggcaacggagtcagctgccaagagacagctgtaacccagacttacggtggcaactcaaatggagagccatgtgtcttaccattcacctacaatggcaggacgttctactcctgcaccacagaagggcgacaggacggacatctttggtgcagcacaacttcgaattatgagcaggaccagaaatactctttctgcacagaccacactgttttggttcagactcgaggaggaaattccaatggtgccttgtgccacttccccttcctatacaacaaccacaattacactgattgcacttctgagggcagaagagacaacatgaagtggtgtgggaccacacagaactatgatgccgaccagaagtttgggttctgccccatggctgcccacgaggaaatctgcacaaccaatgaaggggtcatgtaccgcattggagatcagtgggataagcagcatgacatgggtcacatgatgaggtgcacgtgtgttgggaatggtcgtggggaatggacatgcattgcctactcgcagcttcgagatcagtgcattgttgatgacatcacttacaatgtgaacgacacattccacaagcgtcatgaagaggggcacatgctgaactgtacatgcttcggtcagggtcggggcaggtggaagtgtgatcccgtcgaccaatgccaggattcagagactgggacgttttatcaaattggagattcatgggagaagtatgtgcatggtgtcagataccagtgctactgctatggccgtggcattggggagtggcattgccaacctttacagacctatccaagctcaagtggtcctgtcgaagtatttatcactgagactccgagtcagcccaactcccaccccatccagtggaatgcaccacagccatctcacatttccaagtacattctcaggtggagacctaaaaattctgtaggccgttggaaggaagctaccataccaggccacttaaactcctacaccatcaaaggcctgaagcctggtgtggtatacgagggccagctcatcagcatccagcagtacggccaccaagaagtgactcgctttgacttcaccaccaccagcaccagcacacctgtgaccagcaacaccgtgacaggagagacgactcccttttctcctcttgtggccacttctgaatctgtgaccgaaatcacagccagtagctttgtggtctcctgggtctcagcttccgacaccgtgtcgggattccgggtggaatatgagctgagtgaggagggagatgagccacagtacctggatcttccaagcacagccacttctgtgaacatccctgacctgcttcctggccgaaaatacattgtaaatgtctatcagatatctgaggatggggagcagagtttgatcctgtctacttcacaaacaacagcgcctgatgcccctcctgacacgactgtggaccaagttgatgacacctcaattgttgttcgctggagcagaccccaggctcccatcacagggtacagaatagtctattcgccatcagtagaaggtagcagcacagaactcaaccttcctgaaactgcaaactccgtcaccctcagtgacttgcaacctggtgttcagtataacatcactatctatgctgtggaagaaaatcaagaaagtacacctgttgtcattcaacaagaaaccactggcaccccacgctcagatacagtgccctctcccagggacctgcagtttgtggaagtgacagacgtgaaggtcaccatcatgtggacaccgcctgagagtgcagtgaccggctaccgtgtggatgtgatccccgtcaacctgcctggcgagcacgggcagaggctgcccatcagcaggaacacctttgcagaagtcaccgggctgtcccctggggtcacctattacttcaaagtctttgcagtgagccatgggagggagagcaagcctctgactgctcaacagacaaccaaactggatgctcccactaacctccagtttgtcaatgaaactgattctactgtcctggtgagatggactccacctcgggcccagataacaggataccgactgaccgtgggccttacccgaagaggacagcccaggcagtacaatgtgggtccctctgtctccaagtacccactgaggaatctgcagcctgcatctgagtacaccgtatccctcgtggccataaagggcaaccaagagagccccaaagccactggagtctttaccacactgcagcctgggagctctattccaccttacaacaccgaggtgactgagaccaccattgtgatcacatggacgcctgctccaagaattggttttaagctgggtgtacgaccaagccagggaggagaggcaccacgagaagtgacttcagactcaggaagcatcgttgtgtccggcttgactccaggagtagaatacgtctacaccatccaagtcctgagagatggacaggaaagagatgcgccaattgtaaacaaagtggtgacaccattgtctccaccaacaaacttgcatctggaggcaaaccctgacactggagtgctcacagtctcctgggagaggagcaccaccccagacattactggttatagaattaccacaacccctacaaacggccagcagggaaattctttggaagaagtggtccatgctgatcagagctcctgcacttttgataacctgagtcccggcctggagtacaatgtcagtgtttacactgtcaaggatgacaaggaaagtgtccctatctctgataccatcatcccagctgttcctcctcccactgacctgcgattcaccaacattggtccagacaccatgcgtgtcacctgggctccacccccatccattgatttaaccaacttcctggtgcgttactcacctgtgaaaaatgaggaagatgttgcagagttgtcaatttctccttcagacaatgcagtggtcttaacaaatctcctgcctggtacagaatatgtagtgagtgtctccagtgtctacgaacaacatgagagcacacctcttagaggaagacagaaaacaggtcttgattccccaactggcattgacttttctgatattactgccaactcttttactgtgcactggattgctcctcgagccaccatcactggctacaggatccgccatcatcccgagcacttcagtgggagacctcgagaagatcgggtgccccactctcggaattccatcaccctcaccaacctcactccaggcacagagtatgtggtcagcatcgttgctcttaatggcagagaggaaagtcccttattgattggccaacaatcaacagtttctgatgttccgagggacctggaagttgttgctgcgacccccaccagcctactgatcagctgggatgctcctgctgtcacagtgagatattacaggatcacttacggagagacaggaggaaatagccctgtccaggagttcactgtgcctgggagcaagtctacagctaccatcagcggccttaaacctggagttgattataccatcactgtgtatgctgtcactggccgtggagacagccccgcaagcagcaagccaatttccattaattaccgaacagaaattgacaaaccatcccagatgcaagtgaccgatgttcaggacaacagcattagtgtcaagtggctgccttcaagttcccctgttactggttacagagtaaccaccactcccaaaaatggaccaggaccaacaaaaactaaaactgcaggtccagatcaaacagaaatgactattgaaggcttgcagcccacagtggagtatgtggttagtgtctatgctcagaatccaagcggagagagtcagcctctggttcagactgcagtaaccactattcctgcaccaactgacctgaagttcactcaggtcacacccacaagcctgagcgcccagtggacaccacccaatgttcagctcactggatatcgagtgcgggtgacccccaaggagaagaccggaccaatgaaagaaatcaaccttgctcctgacagctcatccgtggttgtatcaggacttatggtggccaccaaatatgaagtgagtgtctatgctcttaaggacactttgacaagcagaccagctcagggagttgtcaccactctggagaatgtcagcccaccaagaagggctcgtgtgacagatgctactgagaccaccatcaccattagctggagaaccaagactgagacgatcactggcttccaagttgatgccgttccagccaatggccagactccaatccagagaaccatcaagccagatgtcagaagctacaccatcacaggtttacaaccaggcactgactacaagatctacctgtacaccttgaatgacaatgctcggagctcccctgtggtcatcgacgcctccactgccattgatgcaccatccaacctgcgtttcctggccaccacacccaattccttgctggtatcatggcagccgccacgtgccaggattaccggctacatcatcaagtatgagaagcctgggtctcctcccagagaagtggtccctcggccccgccctggtgtcacagaggctactattactggcctggaaccgggaaccgaatatacaatttatgtcattgccctgaagaataatcagaagagcgagcccctgattggaaggaaaaagacaggacaagaagctctctctcagacaaccatctcatgggccccattccaggacacttctgagtacatcatttcatgtcatcctgttggcactgatgaagaacccttacagttcagggttcctggaacttctaccagtgccactctgacaggcctcaccagaggtgccacctacaacgtcatagtggaggcactgaaagaccagcagaggcataaggttcgggaagaggttgttaccgtgggcaactctgtcaacgaaggcttgaaccaacctacggatgactcgtgctttgacccctacacagtttcccattatgccgttggagatgagtgggaacgaatgtctgaatcaggctttaaactgttgtgccagtgcttaggctttggaagtggtcatttcagatgtgattcatctagatggtgccatgacaatggtgtgaactacaagattggagagaagtgggaccgtcagggagaaaatggccagatgatgagctgcacatgtcttgggaacggaaaaggagaattcaagtgtgaccctcatgaggcaacgtgttatgatgatgggaagacataccacgtaggagaacagtggcagaaggaatatctcggtgccatttgctcctgcacatgctttggaggccagcggggctggcgctgtgacaactgccgcagacctgggggtgaacccagtcccgaaggcactactggccagtcctacaaccagtattctcagagataccatcagagaacaaacactaatgttaattgcccaattgagtgcttcatgcctttagatgtacaggctgacagagaagattcccgagagtaaatcatctttccaatccagaggaacaagcatgtctctctgccaagatccatctaaactggagtgatgttagcagacccagcttagagttcttctttctttcttaagccctttgctctggaggaagttctccagcttcagctcaactcacagcttctccaagcatcaccctgggagtttcctgagggttttctcataaatgagggctgcacattgcctgttctgcttcgaagtattcaataccgctcagtattttaaatgaagtgattctaagatttggtttgggatcaataggaaagcatatgcagccaaccaagatgcaaatgttttgaaatgatatgaccaaaattttaagtaggaaagtcacccaaacacttctgctttcacttaagtgtctggcccgcaatactgtaggaacaagcatgatcttgttactgtgatattttaaatatccacagtactcactttttccaaatgatcctagtaattgcctagaaatatctttctcttacctgttatttatcaatttttcccagtatttttatacggaaaaaattgtattgaaaacacttagtatgcagttgataagaggaatttggtataattatggtgggtgattattttttatactgtatgtgccaaagctttactactgtggaaagacaactgttttaataaaagatttacattccacaacttgaagttcatctatttgatataagacaccttcgggggaaataattcctgtgaatattctttttcaattcagcaaacatttgaaaatctatgatgtgcaagtctaattgttgatttcagtacaagattttctaaatcagttgctacaaaaactgattggtttttgtcacttcatctcttcactaatggagatagctttacactttctgctttaatagatttaagtggaccccaatatttattaaaattgctagtttaccgttcagaagtataatagaaataatctttagttgctcttttctaaccattgtaattcttcccttcttccctccacctttccttcattgaataaacctctgttcaaagagattgcctgcaagggaaataaaaatgactaagatattaaaa

SEQ ID NO: 134445 - DNA, 8524 bp, Homo sapiens
  Payload ID: 6261
  Gene Symbol: FN1
  Gene Name: fibronectin 1
  Uniprot ID: P02751
  ENST ID: ENST00000359671
  CDS Start-End: 267-7427
gcccgcgccggctgtgctgcacagggggaggagagggaaccccaggcgcgagcgggaagaggggacctgcagccacaacttctctggtcctctgcatcccttctgtccctccacccgtccccttccccaccctctggcccccaccttcttggaggcgacaacccccgggaggcattagaagggatttttcccgcaggttgcgaagggaagcaaacttggtggcaacttgcctcccggtgcgggcgtctctcccccaccgtctcaacatgcttaggggtccggggcccgggctgctgctgctggccgtccagtgcctggggacagcggtgccctccacgggagcctcgaagagcaagaggcaggctcagcaaatggttcagccccagtccccggtggctgtcagtcaaagcaagcccggttgttatgacaatggaaaacactatcagataaatcaacagtgggagcggacctacctaggcaatgcgttggtttgtacttgttatggaggaagccgaggttttaactgcgagagtaaacctgaagctgaagagacttgctttgacaagtacactgggaacacttaccgagtgggtgacacttatgagcgtcctaaagactccatgatctgggactgtacctgcatcggggctgggcgagggagaataagctgtaccatcgcaaaccgctgccatgaagggggtcagtcctacaagattggtgacacctggaggagaccacatgagactggtggttacatgttagagtgtgtgtgtcttggtaatggaaaaggagaatggacctgcaagcccatagctgagaagtgttttgatcatgctgctgggacttcctatgtggtcggagaaacgtgggagaagccctaccaaggctggatgatggtagattgtacttgcctgggagaaggcagcggacgcatcacttgcacttctagaaatagatgcaacgatcaggacacaaggacatcctatagaattggagacacctggagcaagaaggataatcgaggaaacctgctccagtgcatctgcacaggcaacggccgaggagagtggaagtgtgagaggcacacctctgtgcagaccacatcgagcggatctggccccttcaccgatgttcgtgcagctgtttaccaaccgcagcctcacccccagcctcctccctatggccactgtgtcacagacagtggtgtggtctactctgtggggatgcagtggctgaagacacaaggaaataagcaaatgctttgcacgtgcctgggcaacggagtcagctgccaagagacagctgtaacccagacttacggtggcaactcaaatggagagccatgtgtcttaccattcacctacaatggcaggacgttctactcctgcaccacagaagggcgacaggacggacatctttggtgcagcacaacttcgaattatgagcaggaccagaaatactctttctgcacagaccacactgttttggttcagactcgaggaggaaattccaatggtgccttgtgccacttccccttcctatacaacaaccacaattacactgattgcacttctgagggcagaagagacaacatgaagtggtgtgggaccacacagaactatgatgccgaccagaagtttgggttctgccccatggctgcccacgaggaaatctgcacaaccaatgaaggggtcatgtaccgcattggagatcagtgggataagcagcatgacatgggtcacatgatgaggtgcacgtgtgttgggaatggtcgtggggaatggacatgcattgcctactcgcagcttcgagatcagtgcattgttgatgacatcacttacaatgtgaacgacacattccacaagcgtcatgaagaggggcacatgctgaactgtacatgcttcggtcagggtcggggcaggtggaagtgtgatcccgtcgaccaatgccaggattcagagactgggacgttttatcaaattggagattcatgggagaagtatgtgcatggtgtcagataccagtgctactgctatggccgtggcattggggagtggcattgccaacctttacagacctatccaagctcaagtggtcctgtcgaagtatttatcactgagactccgagtcagcccaactcccaccccatccagtggaatgcaccacagccatctcacatttccaagtacattctcaggtggagacctaaaaattctgtaggccgttggaaggaagctaccataccaggccacttaaactcctacaccatcaaaggcctgaagcctggtgtggtatacgagggccagctcatcagcatccagcagtacggccaccaagaagtgactcgctttgacttcaccaccaccagcaccagcacacctgtgaccagcaacaccgtgacaggagagacgactcccttttctcctcttgtggccacttctgaatctgtgaccgaaatcacagccagtagctttgtggtctcctgggtctcagcttccgacaccgtgtcgggattccgggtggaatatgagctgagtgaggagggagatgagccacagtacctggatcttccaagcacagccacttctgtgaacatccctgacctgcttcctggccgaaaatacattgtaaatgtctatcagatatctgaggatggggagcagagtttgatcctgtctacttcacaaacaacagcgcctgatgcccctcctgacacgactgtggaccaagttgatgacacctcaattgttgttcgctggagcagaccccaggctcccatcacagggtacagaatagtctattcgccatcagtagaaggtagcagcacagaactcaaccttcctgaaactgcaaactccgtcaccctcagtgacttgcaacctggtgttcagtataacatcactatctatgctgtggaagaaaatcaagaaagtacacctgttgtcattcaacaagaaaccactggcaccccacgctcagatacagtgccctctcccagggacctgcagtttgtggaagtgacagacgtgaaggtcaccatcatgtggacaccgcctgagagtgcagtgaccggctaccgtgtggatgtgatccccgtcaacctgcctggcgagcacgggcagaggctgcccatcagcaggaacacctttgcagaagtcaccgggctgtcccctggggtcacctattacttcaaagtctttgcagtgagccatgggagggagagcaagcctctgactgctcaacagacaaccaaactggatgctcccactaacctccagtttgtcaatgaaactgattctactgtcctggtgagatggactccacctcgggcccagataacaggataccgactgaccgtgggccttacccgaagaggacagcccaggcagtacaatgtgggtccctctgtctccaagtacccactgaggaatctgcagcctgcatctgagtacaccgtatccctcgtggccataaagggcaaccaagagagccccaaagccactggagtctttaccacactgcagcctgggagctctattccaccttacaacaccgaggtgactgagaccaccattgtgatcacatggacgcctgctccaagaattggttttaagctgggtgtacgaccaagccagggaggagaggcaccacgagaagtgacttcagactcaggaagcatcgttgtgtccggcttgactccaggagtagaatacgtctacaccatccaagtcctgagagatggacaggaaagagatgcgccaattgtaaacaaagtggtgacaccattgtctccaccaacaaacttgcatctggaggcaaaccctgacactggagtgctcacagtctcctgggagaggagcaccaccccagacattactggttatagaattaccacaacccctacaaacggccagcagggaaattctttggaagaagtggtccatgctgatcagagctcctgcacttttgataacctgagtcccggcctggagtacaatgtcagtgtttacactgtcaaggatgacaaggaaagtgtccctatctctgataccatcatcccagctgttcctcctcccactgacctgcgattcaccaacattggtccagacaccatgcgtgtcacctgggctccacccccatccattgatttaaccaacttcctggtgcgttactcacctgtgaaaaatgaggaagatgttgcagagttgtcaatttctccttcagacaatgcagtggtcttaacaaatctcctgcctggtacagaatatgtagtgagtgtctccagtgtctacgaacaacatgagagcacacctcttagaggaagacagaaaacaggtcttgattccccaactggcattgacttttctgatattactgccaactcttttactgtgcactggattgctcctcgagccaccatcactggctacaggatccgccatcatcccgagcacttcagtgggagacctcgagaagatcgggtgccccactctcggaattccatcaccctcaccaacctcactccaggcacagagtatgtggtcagcatcgttgctcttaatggcagagaggaaagtcccttattgattggccaacaatcaacagtttctgatgttccgagggacctggaagttgttgctgcgacccccaccagcctactgatcagctgggatgctcctgctgtcacagtgagatattacaggatcacttacggagagacaggaggaaatagccctgtccaggagttcactgtgcctgggagcaagtctacagctaccatcagcggccttaaacctggagttgattataccatcactgtgtatgctgtcactggccgtggagacagccccgcaagcagcaagccaatttccattaattaccgaacagaaattgacaaaccatcccagatgcaagtgaccgatgttcaggacaacagcattagtgtcaagtggctgccttcaagttcccctgttactggttacagagtaaccaccactcccaaaaatggaccaggaccaacaaaaactaaaactgcaggtccagatcaaacagaaatgactattgaaggcttgcagcccacagtggagtatgtggttagtgtctatgctcagaatccaagcggagagagtcagcctctggttcagactgcagtaaccaacattgatcgccctaaaggactggcattcactgatgtggatgtcgattccatcaaaattgcttgggaaagcccacaggggcaagtttccaggtacagggtgacctactcgagccctgaggatggaatccatgagctattccctgcacctgatggtgaagaagacactgcagagctgcaaggcctcagaccgggttctgagtacacagtcagtgtggttgccttgcacgatgatatggagagccagcccctgattggaacccagtccacagctattcctgcaccaactgacctgaagttcactcaggtcacacccacaagcctgagcgcccagtggacaccacccaatgttcagctcactggatatcgagtgcgggtgacccccaaggagaagaccggaccaatgaaagaaatcaaccttgctcctgacagctcatccgtggttgtatcaggacttatggtggccaccaaatatgaagtgagtgtctatgctcttaaggacactttgacaagcagaccagctcagggagttgtcaccactctggagaatgtcagcccaccaagaagggctcgtgtgacagatgctactgagaccaccatcaccattagctggagaaccaagactgagacgatcactggcttccaagttgatgccgttccagccaatggccagactccaatccagagaaccatcaagccagatgtcagaagctacaccatcacaggtttacaaccaggcactgactacaagatctacctgtacaccttgaatgacaatgctcggagctcccctgtggtcatcgacgcctccactgccattgatgcaccatccaacctgcgtttcctggccaccacacccaattccttgctggtatcatggcagccgccacgtgccaggattaccggctacatcatcaagtatgagaagcctgggtctcctcccagagaagtggtccctcggccccgccctggtgtcacagaggctactattactggcctggaaccgggaaccgaatatacaatttatgtcattgccctgaagaataatcagaagagcgagcccctgattggaaggaaaaagacagacgagcttccccaactggtaacccttccacaccccaatcttcatggaccagagatcttggatgttccttccacagttcaaaagacccctttcgtcacccaccctgggtatgacactggaaatggtattcagcttcctggcacttctggtcagcaacccagtgttgggcaacaaatgatctttgaggaacatggttttaggcggaccacaccgcccacaacggccacccccataaggcataggccaagaccatacccgccgaatgtaggtgaggaaatccaaattggtcacatccccagggaagatgtagactatcacctgtacccacacggtccgggactcaatccaaatgcctctacaggacaagaagctctctctcagacaaccatctcatgggccccattccaggacacttctgagtacatcatttcatgtcatcctgttggcactgatgaagaacccttacagttcagggttcctggaacttctaccagtgccactctgacaggcctcaccagaggtgccacctacaacgtcatagtggaggcactgaaagaccagcagaggcataaggttcgggaagaggttgttaccgtgggcaactctgtcaacgaaggcttgaaccaacctacggatgactcgtgctttgacccctacacagtttcccattatgccgttggagatgagtgggaacgaatgtctgaatcaggctttaaactgttgtgccagtgcttaggctttggaagtggtcatttcagatgtgattcatctagatggtgccatgacaatggtgtgaactacaagattggagagaagtgggaccgtcagggagaaaatggccagatgatgagctgcacatgtcttgggaacggaaaaggagaattcaagtgtgaccctcatgaggcaacgtgttatgatgatgggaagacataccacgtaggagaacagtggcagaaggaatatctcggtgccatttgctcctgcacatgctttggaggccagcggggctggcgctgtgacaactgccgcagacctgggggtgaacccagtcccgaaggcactactggccagtcctacaaccagtattctcagagataccatcagagaacaaacactaatgttaattgcccaattgagtgcttcatgcctttagatgtacaggctgacagagaagattcccgagagtaaatcatctttccaatccagaggaacaagcatgtctctctgccaagatccatctaaactggagtgatgttagcagacccagcttagagttcttctttctttcttaagccctttgctctggaggaagttctccagcttcagctcaactcacagcttctccaagcatcaccctgggagtttcctgagggttttctcataaatgagggctgcacattgcctgttctgcttcgaagtattcaataccgctcagtattttaaatgaagtgattctaagatttggtttgggatcaataggaaagcatatgcagccaaccaagatgcaaatgttttgaaatgatatgaccaaaattttaagtaggaaagtcacccaaacacttctgctttcacttaagtgtctggcccgcaatactgtaggaacaagcatgatcttgttactgtgatattttaaatatccacagtactcactttttccaaatgatcctagtaattgcctagaaatatctttctcttacctgttatttatcaatttttcccagtatttttatacggaaaaaattgtattgaaaacacttagtatgcagttgataagaggaatttggtataattatggtgggtgattattttttatactgtatgtgccaaagctttactactgtggaaagacaactgttttaataaaagatttacattccacaacttgaagttcatctatttgatataagacaccttcgggggaaataattcctgtgaatattctttttcaattcagcaaacatttgaaaatctatgatgtgcaagtctaattgttgatttcagtacaagattttctaaatcagttgctacaaaaactgattggtttttgtcacttcatctcttcactaatggagatagctttacactttctgctttaatagatttaagtggaccccaatatttattaaaattgctagtttaccgttcagaagtataatagaaataatctttagttgctcttttctaaccattgtaattcttcccttcttccctccacctttccttcattgaataaacctctgttcaaagagattgcctgcaagggaaataaaaatgactaagatatt

SEQ ID NO: 134446 - DNA, 723 bp, Homo sapiens
  Payload ID: 6261
  Gene Symbol: FN1
  Gene Name: fibronectin 1
  ENST ID: ENST00000438981
  CDS Start-End: 1-723
tacctgtacaccttgaatgacaatgctcggagctcccctgtggtcatcgacgcctccactgccattgatgcaccatccaacctgcgtttcctggccaccacacccaattccttgctggtatcatggcagccgccacgtgccaggattaccggctacatcatcaagtatgagaagcctgggtctcctcccagagaagtggtccctcggccccgccctggtgtcacagaggctactattactggcctggaaccgggaaccgaatatacaatttatgtcattgccctgaagaataatcagaagagcgagcccctgattggaaggaaaaagacagttcaaaagacccctttcgtcacccaccctgggtatgacactggaaatggtattcagcttcctggcacttctggtcagcaacccagtgttgggcaacaaatgatctttgaggaacatggttttaggcggaccacaccgcccacaacggccacccccataaggcataggccaagaccatacccgccgaatgtaggtgaggaaatccaaattggtcacatccccagggaagatgtagactatcacctgtacccacacggtccgggactcaatccaaatgcctctacaggacaagaagctctctctcagacaaccatctcatgggccccattccaggacacttctgagtacatcatttcatgtcatcctgttggcactgatgaagaacccttacag

SEQ ID NO: 134447 - DNA, 8103 bp, Homo sapiens
  Payload ID: 6261
  Gene Symbol: FN1
  Gene Name: fibronectin 1
  Uniprot ID: P02751
  ENST ID: ENST00000421182
  CDS Start-End: 266-6988
cccgcgccggctgtgctgcacagggggaggagagggaaccccaggcgcgagcgggaagaggggacctgcagccacaacttctctggtcctctgcatcccttctgtccctccacccgtccccttccccaccctctggcccccaccttcttggaggcgacaacccccgggaggcattagaagggatttttcccgcaggttgcgaagggaagcaaacttggtggcaacttgcctcccggtgcgggcgtctctcccccaccgtctcaacatgcttaggggtccggggcccgggctgctgctgctggccgtccagtgcctggggacagcggtgccctccacgggagcctcgaagagcaagaggcaggctcagcaaatggttcagccccagtccccggtggctgtcagtcaaagcaagcccggttgttatgacaatggaaaacactatcagataaatcaacagtgggagcggacctacctaggcaatgcgttggtttgtacttgttatggaggaagccgaggttttaactgcgagagtaaacctgaagctgaagagacttgctttgacaagtacactgggaacacttaccgagtgggtgacacttatgagcgtcctaaagactccatgatctgggactgtacctgcatcggggctgggcgagggagaataagctgtaccatcgcaaaccgctgccatgaagggggtcagtcctacaagattggtgacacctggaggagaccacatgagactggtggttacatgttagagtgtgtgtgtcttggtaatggaaaaggagaatggacctgcaagcccatagctgagaagtgttttgatcatgctgctgggacttcctatgtggtcggagaaacgtgggagaagccctaccaaggctggatgatggtagattgtacttgcctgggagaaggcagcggacgcatcacttgcacttctagaaatagatgcaacgatcaggacacaaggacatcctatagaattggagacacctggagcaagaaggataatcgaggaaacctgctccagtgcatctgcacaggcaacggccgaggagagtggaagtgtgagaggcacacctctgtgcagaccacatcgagcggatctggccccttcaccgatgttcgtgcagctgtttaccaaccgcagcctcacccccagcctcctccctatggccactgtgtcacagacagtggtgtggtctactctgtggggatgcagtggctgaagacacaaggaaataagcaaatgctttgcacgtgcctgggcaacggagtcagctgccaagagacagctgtaacccagacttacggtggcaactcaaatggagagccatgtgtcttaccattcacctacaatggcaggacgttctactcctgcaccacagaagggcgacaggacggacatctttggtgcagcacaacttcgaattatgagcaggaccagaaatactctttctgcacagaccacactgttttggttcagactcgaggaggaaattccaatggtgccttgtgccacttccccttcctatacaacaaccacaattacactgattgcacttctgagggcagaagagacaacatgaagtggtgtgggaccacacagaactatgatgccgaccagaagtttgggttctgccccatggctgcccacgaggaaatctgcacaaccaatgaaggggtcatgtaccgcattggagatcagtgggataagcagcatgacatgggtcacatgatgaggtgcacgtgtgttgggaatggtcgtggggaatggacatgcattgcctactcgcagcttcgagatcagtgcattgttgatgacatcacttacaatgtgaacgacacattccacaagcgtcatgaagaggggcacatgctgaactgtacatgcttcggtcagggtcggggcaggtggaagtgtgatcccgtcgaccaatgccaggattcagagactgggacgttttatcaaattggagattcatgggagaagtatgtgcatggtgtcagataccagtgctactgctatggccgtggcattggggagtggcattgccaacctttacagacctatccaagctcaagtggtcctgtcgaagtatttatcactgagactccgagtcagcccaactcccaccccatccagtggaatgcaccacagccatctcacatttccaagtacattctcaggtggagacctaaaaattctgtaggccgttggaaggaagctaccataccaggccacttaaactcctacaccatcaaaggcctgaagcctggtgtggtatacgagggccagctcatcagcatccagcagtacggccaccaagaagtgactcgctttgacttcaccaccaccagcaccagcacacctgtgaccagcaacaccgtgacaggagagacgactcccttttctcctcttgtggccacttctgaatctgtgaccgaaatcacagccagtagctttgtggtctcctgggtctcagcttccgacaccgtgtcgggattccgggtggaatatgagctgagtgaggagggagatgagccacagtacctggatcttccaagcacagccacttctgtgaacatccctgacctgcttcctggccgaaaatacattgtaaatgtctatcagatatctgaggatggggagcagagtttgatcctgtctacttcacaaacaacagcgcctgatgcccctcctgacacgactgtggaccaagttgatgacacctcaattgttgttcgctggagcagaccccaggctcccatcacagggtacagaatagtctattcgccatcagtagaaggtagcagcacagaactcaaccttcctgaaactgcaaactccgtcaccctcagtgacttgcaacctggtgttcagtataacatcactatctatgctgtggaagaaaatcaagaaagtacacctgttgtcattcaacaagaaaccactggcaccccacgctcagatacagtgccctctcccagggacctgcagtttgtggaagtgacagacgtgaaggtcaccatcatgtggacaccgcctgagagtgcagtgaccggctaccgtgtggatgtgatccccgtcaacctgcctggcgagcacgggcagaggctgcccatcagcaggaacacctttgcagaagtcaccgggctgtcccctggggtcacctattacttcaaagtctttgcagtgagccatgggagggagagcaagcctctgactgctcaacagacaaccaaactggatgctcccactaacctccagtttgtcaatgaaactgattctactgtcctggtgagatggactccacctcgggcccagataacaggataccgactgaccgtgggccttacccgaagaggacagcccaggcagtacaatgtgggtccctctgtctccaagtacccactgaggaatctgcagcctgcatctgagtacaccgtatccctcgtggccataaagggcaaccaagagagccccaaagccactggagtctttaccacactgcagcctgggagctctattccaccttacaacaccgaggtgactgagaccaccattgtgatcacatggacgcctgctccaagaattggttttaagctgggtgtacgaccaagccagggaggagaggcaccacgagaagtgacttcagactcaggaagcatcgttgtgtccggcttgactccaggagtagaatacgtctacaccatccaagtcctgagagatggacaggaaagagatgcgccaattgtaaacaaagtggtgacaccattgtctccaccaacaaacttgcatctggaggcaaaccctgacactggagtgctcacagtctcctgggagaggagcaccaccccagacattactggttatagaattaccacaacccctacaaacggccagcagggaaattctttggaagaagtggtccatgctgatcagagctcctgcacttttgataacctgagtcccggcctggagtacaatgtcagtgtttacactgtcaaggatgacaaggaaagtgtccctatctctgataccatcatcccagctgttcctcctcccactgacctgcgattcaccaacattggtccagacaccatgcgtgtcacctgggctccacccccatccattgatttaaccaacttcctggtgcgttactcacctgtgaaaaatgaggaagatgttgcagagttgtcaatttctccttcagacaatgcagtggtcttaacaaatctcctgcctggtacagaatatgtagtgagtgtctccagtgtctacgaacaacatgagagcacacctcttagaggaagacagaaaacaggtcttgattccccaactggcattgacttttctgatattactgccaactcttttactgtgcactggattgctcctcgagccaccatcactggctacaggatccgccatcatcccgagcacttcagtgggagacctcgagaagatcgggtgccccactctcggaattccatcaccctcaccaacctcactccaggcacagagtatgtggtcagcatcgttgctcttaatggcagagaggaaagtcccttattgattggccaacaatcaacagtttctgatgttccgagggacctggaagttgttgctgcgacccccaccagcctactgatcagctgggatgctcctgctgtcacagtgagatattacaggatcacttacggagagacaggaggaaatagccctgtccaggagttcactgtgcctgggagcaagtctacagctaccatcagcggccttaaacctggagttgattataccatcactgtgtatgctgtcactggccgtggagacagccccgcaagcagcaagccaatttccattaattaccgaacagaaattgacaaaccatcccagatgcaagtgaccgatgttcaggacaacagcattagtgtcaagtggctgccttcaagttcccctgttactggttacagagtaaccaccactcccaaaaatggaccaggaccaacaaaaactaaaactgcaggtccagatcaaacagaaatgactattgaaggcttgcagcccacagtggagtatgtggttagtgtctatgctcagaatccaagcggagagagtcagcctctggttcagactgcagtaaccactattcctgcaccaactgacctgaagttcactcaggtcacacccacaagcctgagcgcccagtggacaccacccaatgttcagctcactggatatcgagtgcgggtgacccccaaggagaagaccggaccaatgaaagaaatcaaccttgctcctgacagctcatccgtggttgtatcaggacttatggtggccaccaaatatgaagtgagtgtctatgctcttaaggacactttgacaagcagaccagctcagggagttgtcaccactctggagaatgtcagcccaccaagaagggctcgtgtgacagatgctactgagaccaccatcaccattagctggagaaccaagactgagacgatcactggcttccaagttgatgccgttccagccaatggccagactccaatccagagaaccatcaagccagatgtcagaagctacaccatcacaggtttacaaccaggcactgactacaagatctacctgtacaccttgaatgacaatgctcggagctcccctgtggtcatcgacgcctccactgccattgatgcaccatccaacctgcgtttcctggccaccacacccaattccttgctggtatcatggcagccgccacgtgccaggattaccggctacatcatcaagtatgagaagcctgggtctcctcccagagaagtggtccctcggccccgccctggtgtcacagaggctactattactggcctggaaccgggaaccgaatatacaatttatgtcattgccctgaagaataatcagaagagcgagcccctgattggaaggaaaaagacagttcaaaagacccctttcgtcacccaccctgggtatgacactggaaatggtattcagcttcctggcacttctggtcagcaacccagtgttgggcaacaaatgatctttgaggaacatggttttaggcggaccacaccgcccacaacggccacccccataaggcataggccaagaccatacccgccgaatgtaggacaagaagctctctctcagacaaccatctcatgggccccattccaggacacttctgagtacatcatttcatgtcatcctgttggcactgatgaagaacccttacagttcagggttcctggaacttctaccagtgccactctgacaggcctcaccagaggtgccacctacaacgtcatagtggaggcactgaaagaccagcagaggcataaggttcgggaagaggttgttaccgtgggcaactctgtcaacgaaggcttgaaccaacctacggatgactcgtgctttgacccctacacagtttcccattatgccgttggagatgagtgggaacgaatgtctgaatcaggctttaaactgttgtgccagtgcttaggctttggaagtggtcatttcagatgtgattcatctagatggtgccatgacaatggtgtgaactacaagattggagagaagtgggaccgtcagggagaaaatggccagatgatgagctgcacatgtcttgggaacggaaaaggagaattcaagtgtgaccctcatgaggcaacgtgttatgatgatgggaagacataccacgtaggagaacagtggcagaaggaatatctcggtgccatttgctcctgcacatgctttggaggccagcggggctggcgctgtgacaactgccgcagacctgggggtgaacccagtcccgaaggcactactggccagtcctacaaccagtattctcagagataccatcagagaacaaacactaatgttaattgcccaattgagtgcttcatgcctttagatgtacaggctgacagagaagattcccgagagtaaatcatctttccaatccagaggaacaagcatgtctctctgccaagatccatctaaactggagtgatgttagcagacccagcttagagttcttctttctttcttaagccctttgctctggaggaagttctccagcttcagctcaactcacagcttctccaagcatcaccctgggagtttcctgagggttttctcataaatgagggctgcacattgcctgttctgcttcgaagtattcaataccgctcagtattttaaatgaagtgattctaagatttggtttgggatcaataggaaagcatatgcagccaaccaagatgcaaatgttttgaaatgatatgaccaaaattttaagtaggaaagtcacccaaacacttctgctttcacttaagtgtctggcccgcaatactgtaggaacaagcatgatcttgttactgtgatattttaaatatccacagtactcactttttccaaatgatcctagtaattgcctagaaatatctttctcttacctgttatttatcaatttttcccagtatttttatacggaaaaaattgtattgaaaacacttagtatgcagttgataagaggaatttggtataattatggtgggtgattattttttatactgtatgtgccaaagctttactactgtggaaagacaactgttttaataaaagatttacattccacaacttgaagttcatctatttgatataagacaccttcgggggaaataattcctgtgaatattctttttcaattcagcaaacatttgaaaatctatgatgtgcaagtctaattgttgatttcagtacaagattttctaaatcagttgctacaaaaactgattggtttttgtcacttcatctcttcactaatggagatagctttacactttctgctttaatagatttaagtggaccccaatatttattaaaattgctagtttaccgttcagaagtataatagaaataatctttagttgctcttttctaaccattgtaattcttcccttcttccctccacctttccttcattgaataaacctctgttcaaagagattgcctgcaagggaaataaaaatgactaagatattaaaagtatttgaatagta

SEQ ID NO: 134448 - DNA, 2388 bp, Homo sapiens
  Payload ID: 6261
  Gene Symbol: FN1
  Gene Name: fibronectin 1
  Uniprot ID: P02751
  ENST ID: ENST00000426059
  CDS Start-End: 272-2245
cggacgcccgcgccggctgtgctgcacagggggaggagagggaaccccaggcgcgagcgggaagaggggacctgcagccacaacttctctggtcctctgcatcccttctgtccctccacccgtccccttccccaccctctggcccccaccttcttggaggcgacaacccccgggaggcattagaagggatttttcccgcaggttgcgaagggaagcaaacttggtggcaacttgcctcccggtgcgggcgtctctcccccaccgtctcaacatgcttaggggtccggggcccgggctgctgctgctggccgtccagtgcctggggacagcggtgccctccacgggagcctcgaagagcaagaggcaggctcagcaaatggttcagccccagtccccggtggctgtcagtcaaagcaagcccggttgttatgacaatggaaaacactatcagataaatcaacagtgggagcggacctacctaggcaatgcgttggtttgtacttgttatggaggaagccgaggttttaactgcgagagtaaacctgaagctgaagagacttgctttgacaagtacactgggaacacttaccgagtgggtgacacttatgagcgtcctaaagactccatgatctgggactgtacctgcatcggggctgggcgagggagaataagctgtaccatcgcaaaccgctgccatgaagggggtcagtcctacaagattggtgacacctggaggagaccacatgagactggtggttacatgttagagtgtgtgtgtcttggtaatggaaaaggagaatggacctgcaagcccatagctgagaagtgttttgatcatgctgctgggacttcctatgtggtcggagaaacgtgggagaagccctaccaaggctggatgatggtagattgtacttgcctgggagaaggcagcggacgcatcacttgcacttctagaaatagatgcaacgatcaggacacaaggacatcctatagaattggagacacctggagcaagaaggataatcgaggaaacctgctccagtgcatctgcacaggcaacggccgaggagagtggaagtgtgagaggcacacctctgtgcagaccacatcgagcggatctggccccttcaccgatgttcgtgcagctgtttaccaaccgcagcctcacccccagcctcctccctatggccactgtgtcacagacagtggtgtggtctactctgtggggatgcagtggctgaagacacaaggaaataagcaaatgctttgcacgtgcctgggcaacggagtcagctgccaagagacagctgtaacccagacttacggtggcaactcaaatggagagccatgtgtcttaccattcacctacaatggcaggacgttctactcctgcaccacagaagggcgacaggacggacatctttggtgcagcacaacttcgaattatgagcaggaccagaaatactctttctgcacagaccacactgttttggttcagactcgaggaggaaattccaatggtgccttgtgccacttccccttcctatacaacaaccacaattacactgattgcacttctgagggcagaagagacaacatgaagtggtgtgggaccacacagaactatgatgccgaccagaagtttgggttctgccccatggctgcccacgaggaaatctgcacaaccaatgaaggggtcatgtaccgcattggagatcagtgggataagcagcatgacatgggtcacatgatgaggtgcacgtgtgttgggaatggtcgtggggaatggacatgcattgcctactcgcagcttcgagatcagtgcattgttgatgacatcacttacaatgtgaacgacacattccacaagcgtcatgaagaggggcacatgctgaactgtacatgcttcggtcagggtcggggcaggtggaagtgtgatcccgtcgaccaatgccaggattcagagactgggacgttttatcaaattggagattcatgggagaagtatgtgcatggtgtcagataccagtgctactgctatggccgtggcattggggagtggcattgccaacctttacagacctatccaagctcaagtggtcctgtcgaagtatttatcactgagactccgagtcagcccaactcccaccccatccagtggaatgcaccacagccatctcacatttccaagtacattctcaggtggagacctgtgagtatcccacccagaaaccttggatactgagtctcctaatcttatcaattctgatggtttctttttttcccagcttttgagccaacaactctgattaactattcctatagcatttactatatttgtttagtgaacaaacaatatgtggtcaattaaattgacttgtagactga

SEQ ID NO: 134449 - DNA, 7759 bp, Homo sapiens
  Payload ID: 6261
  Gene Symbol: FN1
  Gene Name: fibronectin 1
  Uniprot ID: P02751
  ENST ID: ENST00000432072
  CDS Start-End: 266-7069
cccgcgccggctgtgctgcacagggggaggagagggaaccccaggcgcgagcgggaagaggggacctgcagccacaacttctctggtcctctgcatcccttctgtccctccacccgtccccttccccaccctctggcccccaccttcttggaggcgacaacccccgggaggcattagaagggatttttcccgcaggttgcgaagggaagcaaacttggtggcaacttgcctcccggtgcgggcgtctctcccccaccgtctcaacatgcttaggggtccggggcccgggctgctgctgctggccgtccagtgcctggggacagcggtgccctccacgggagcctcgaagagcaagaggcaggctcagcaaatggttcagccccagtccccggtggctgtcagtcaaagcaagcccggttgttatgacaatggaaaacactatcagataaatcaacagtgggagcggacctacctaggcaatgcgttggtttgtacttgttatggaggaagccgaggttttaactgcgagagtaaacctgaagctgaagagacttgctttgacaagtacactgggaacacttaccgagtgggtgacacttatgagcgtcctaaagactccatgatctgggactgtacctgcatcggggctgggcgagggagaataagctgtaccatcgcaaaccgctgccatgaagggggtcagtcctacaagattggtgacacctggaggagaccacatgagactggtggttacatgttagagtgtgtgtgtcttggtaatggaaaaggagaatggacctgcaagcccatagctgagaagtgttttgatcatgctgctgggacttcctatgtggtcggagaaacgtgggagaagccctaccaaggctggatgatggtagattgtacttgcctgggagaaggcagcggacgcatcacttgcacttctagaaatagatgcaacgatcaggacacaaggacatcctatagaattggagacacctggagcaagaaggataatcgaggaaacctgctccagtgcatctgcacaggcaacggccgaggagagtggaagtgtgagaggcacacctctgtgcagaccacatcgagcggatctggccccttcaccgatgttcgtgcagctgtttaccaaccgcagcctcacccccagcctcctccctatggccactgtgtcacagacagtggtgtggtctactctgtggggatgcagtggctgaagacacaaggaaataagcaaatgctttgcacgtgcctgggcaacggagtcagctgccaagagacagctgtaacccagacttacggtggcaactcaaatggagagccatgtgtcttaccattcacctacaatggcaggacgttctactcctgcaccacagaagggcgacaggacggacatctttggtgcagcacaacttcgaattatgagcaggaccagaaatactctttctgcacagaccacactgttttggttcagactcgaggaggaaattccaatggtgccttgtgccacttccccttcctatacaacaaccacaattacactgattgcacttctgagggcagaagagacaacatgaagtggtgtgggaccacacagaactatgatgccgaccagaagtttgggttctgccccatggctgcccacgaggaaatctgcacaaccaatgaaggggtcatgtaccgcattggagatcagtgggataagcagcatgacatgggtcacatgatgaggtgcacgtgtgttgggaatggtcgtggggaatggacatgcattgcctactcgcagcttcgagatcagtgcattgttgatgacatcacttacaatgtgaacgacacattccacaagcgtcatgaagaggggcacatgctgaactgtacatgcttcggtcagggtcggggcaggtggaagtgtgatcccgtcgaccaatgccaggattcagagactgggacgttttatcaaattggagattcatgggagaagtatgtgcatggtgtcagataccagtgctactgctatggccgtggcattggggagtggcattgccaacctttacagacctatccaagctcaagtggtcctgtcgaagtatttatcactgagactccgagtcagcccaactcccaccccatccagtggaatgcaccacagccatctcacatttccaagtacattctcaggtggagacctaaaaattctgtaggccgttggaaggaagctaccataccaggccacttaaactcctacaccatcaaaggcctgaagcctggtgtggtatacgagggccagctcatcagcatccagcagtacggccaccaagaagtgactcgctttgacttcaccaccaccagcaccagcacacctgtgaccagcaacaccgtgacaggagagacgactcccttttctcctcttgtggccacttctgaatctgtgaccgaaatcacagccagtagctttgtggtctcctgggtctcagcttccgacaccgtgtcgggattccgggtggaatatgagctgagtgaggagggagatgagccacagtacctggatcttccaagcacagccacttctgtgaacatccctgacctgcttcctggccgaaaatacattgtaaatgtctatcagatatctgaggatggggagcagagtttgatcctgtctacttcacaaacaacagcgcctgatgcccctcctgacacgactgtggaccaagttgatgacacctcaattgttgttcgctggagcagaccccaggctcccatcacagggtacagaatagtctattcgccatcagtagaaggtagcagcacagaactcaaccttcctgaaactgcaaactccgtcaccctcagtgacttgcaacctggtgttcagtataacatcactatctatgctgtggaagaaaatcaagaaagtacacctgttgtcattcaacaagaaaccactggcaccccacgctcagatacagtgccctctcccagggacctgcagtttgtggaagtgacagacgtgaaggtcaccatcatgtggacaccgcctgagagtgcagtgaccggctaccgtgtggatgtgatccccgtcaacctgcctggcgagcacgggcagaggctgcccatcagcaggaacacctttgcagaagtcaccgggctgtcccctggggtcacctattacttcaaagtctttgcagtgagccatgggagggagagcaagcctctgactgctcaacagacaaccaaactggatgctcccactaacctccagtttgtcaatgaaactgattctactgtcctggtgagatggactccacctcgggcccagataacaggataccgactgaccgtgggccttacccgaagaggacagcccaggcagtacaatgtgggtccctctgtctccaagtacccactgaggaatctgcagcctgcatctgagtacaccgtatccctcgtggccataaagggcaaccaagagagccccaaagccactggagtctttaccacactgcagcctgggagctctattccaccttacaacaccgaggtgactgagaccaccattgtgatcacatggacgcctgctccaagaattggttttaagctgggtgtacgaccaagccagggaggagaggcaccacgagaagtgacttcagactcaggaagcatcgttgtgtccggcttgactccaggagtagaatacgtctacaccatccaagtcctgagagatggacaggaaagagatgcgccaattgtaaacaaagtggtgacaccattgtctccaccaacaaacttgcatctggaggcaaaccctgacactggagtgctcacagtctcctgggagaggagcaccaccccagacattactggttatagaattaccacaacccctacaaacggccagcagggaaattctttggaagaagtggtccatgctgatcagagctcctgcacttttgataacctgagtcccggcctggagtacaatgtcagtgtttacactgtcaaggatgacaaggaaagtgtccctatctctgataccatcatcccagaggtgccccaactcactgacctaagctttgttgatataaccgattcaagcatcggcctgaggtggaccccgctaaactcttccaccattattgggtaccgcatcacagtagttgcggcaggagaaggtatccctatttttgaagattttgtggactcctcagtaggatactacacagtcacagggctggagccgggcattgactatgatatcagcgttatcactctcattaatggcggcgagagtgcccctactacactgacacaacaaacggctgttcctcctcccactgacctgcgattcaccaacattggtccagacaccatgcgtgtcacctgggctccacccccatccattgatttaaccaacttcctggtgcgttactcacctgtgaaaaatgaggaagatgttgcagagttgtcaatttctccttcagacaatgcagtggtcttaacaaatctcctgcctggtacagaatatgtagtgagtgtctccagtgtctacgaacaacatgagagcacacctcttagaggaagacagaaaacaggtcttgattccccaactggcattgacttttctgatattactgccaactcttttactgtgcactggattgctcctcgagccaccatcactggctacaggatccgccatcatcccgagcacttcagtgggagacctcgagaagatcgggtgccccactctcggaattccatcaccctcaccaacctcactccaggcacagagtatgtggtcagcatcgttgctcttaatggcagagaggaaagtcccttattgattggccaacaatcaacagtttctgatgttccgagggacctggaagttgttgctgcgacccccaccagcctactgatcagctgggatgctcctgctgtcacagtgagatattacaggatcacttacggagagacaggaggaaatagccctgtccaggagttcactgtgcctgggagcaagtctacagctaccatcagcggccttaaacctggagttgattataccatcactgtgtatgctgtcactggccgtggagacagccccgcaagcagcaagccaatttccattaattaccgaacagaaattgacaaaccatcccagatgcaagtgaccgatgttcaggacaacagcattagtgtcaagtggctgccttcaagttcccctgttactggttacagagtaaccaccactcccaaaaatggaccaggaccaacaaaaactaaaactgcaggtccagatcaaacagaaatgactattgaaggcttgcagcccacagtggagtatgtggttagtgtctatgctcagaatccaagcggagagagtcagcctctggttcagactgcagtaaccactattcctgcaccaactgacctgaagttcactcaggtcacacccacaagcctgagcgcccagtggacaccacccaatgttcagctcactggatatcgagtgcgggtgacccccaaggagaagaccggaccaatgaaagaaatcaaccttgctcctgacagctcatccgtggttgtatcaggacttatggtggccaccaaatatgaagtgagtgtctatgctcttaaggacactttgacaagcagaccagctcagggagttgtcaccactctggagaatgtcagcccaccaagaagggctcgtgtgacagatgctactgagaccaccatcaccattagctggagaaccaagactgagacgatcactggcttccaagttgatgccgttccagccaatggccagactccaatccagagaaccatcaagccagatgtcagaagctacaccatcacaggtttacaaccaggcactgactacaagatctacctgtacaccttgaatgacaatgctcggagctcccctgtggtcatcgacgcctccactgccattgatgcaccatccaacctgcgtttcctggccaccacacccaattccttgctggtatcatggcagccgccacgtgccaggattaccggctacatcatcaagtatgagaagcctgggtctcctcccagagaagtggtccctcggccccgccctggtgtcacagaggctactattactggcctggaaccgggaaccgaatatacaatttatgtcattgccctgaagaataatcagaagagcgagcccctgattggaaggaaaaagacaggacaagaagctctctctcagacaaccatctcatgggccccattccaggacacttctgagtacatcatttcatgtcatcctgttggcactgatgaagaacccttacagttcagggttcctggaacttctaccagtgccactctgacaggcctcaccagaggtgccacctacaacgtcatagtggaggcactgaaagaccagcagaggcataaggttcgggaagaggttgttaccgtgggcaactctgtcaacgaaggcttgaaccaacctacggatgactcgtgctttgacccctacacagtttcccattatgccgttggagatgagtgggaacgaatgtctgaatcaggctttaaactgttgtgccagtgcttaggctttggaagtggtcatttcagatgtgattcatctagatggtgccatgacaatggtgtgaactacaagattggagagaagtgggaccgtcagggagaaaatggccagatgatgagctgcacatgtcttgggaacggaaaaggagaattcaagtgtgaccctcatgaggcaacgtgttatgatgatgggaagacataccacgtaggagaacagtggcagaaggaatatctcggtgccatttgctcctgcacatgctttggaggccagcggggctggcgctgtgacaactgccgcagacctgggggtgaacccagtcccgaaggcactactggccagtcctacaaccagtattctcagagataccatcagagaacaaacactaatgttaattgcccaattgagtgcttcatgcctttagatgtacaggctgacagagaagattcccgagagtaaatcatctttccaatccagaggaacaagcatgtctctctgccaagatccatctaaactggagtgatgttagcagacccagcttagagttcttctttctttcttaagccctttgctctggaggaagttctccagcttcagctcaactcacagcttctccaagcatcaccctgggagtttcctgagggttttctcataaatgagggctgcacattgcctgttctgcttcgaagtattcaataccgctcagtattttaaatgaagtgattctaagatttggtttgggatcaataggaaagcatatgcagccaaccaagatgcaaatgttttgaaatgatatgaccaaaattttaagtaggaaagtcacccaaacacttctgctttcacttaagtgtctggcccgcaatactgtaggaacaagcatgatcttgttactgtgatattttaaatatccacagtactcactttttccaaatgatcctagtaattgcctagaaatatctttctcttacctgttatttatcaatttttcccagtatttttatacggaaaaaattgtattgaaaacacttagtatgcagttgataagaggaatttggtataattatggtgggtgattattttttatactgtatgtgccaaagctttactactgtggaaagacaactgttttaataaaagatttacattcca

SEQ ID NO: 134450 - DNA, 7952 bp, Homo sapiens
  Payload ID: 6261
  Gene Symbol: FN1
  Gene Name: fibronectin 1
  Uniprot ID: P02751
  ENST ID: ENST00000446046
  CDS Start-End: 267-7259
gcccgcgccggctgtgctgcacagggggaggagagggaaccccaggcgcgagcgggaagaggggacctgcagccacaacttctctggtcctctgcatcccttctgtccctccacccgtccccttccccaccctctggcccccaccttcttggaggcgacaacccccgggaggcattagaagggatttttcccgcaggttgcgaagggaagcaaacttggtggcaacttgcctcccggtgcgggcgtctctcccccaccgtctcaacatgcttaggggtccggggcccgggctgctgctgctggccgtccagtgcctggggacagcggtgccctccacgggagcctcgaagagcaagaggcaggctcagcaaatggttcagccccagtccccggtggctgtcagtcaaagcaagcccggttgttatgacaatggaaaacactatcagataaatcaacagtgggagcggacctacctaggcaatgcgttggtttgtacttgttatggaggaagccgaggttttaactgcgagagtaaacctgaagctgaagagacttgctttgacaagtacactgggaacacttaccgagtgggtgacacttatgagcgtcctaaagactccatgatctgggactgtacctgcatcggggctgggcgagggagaataagctgtaccatcgcaaaccgctgccatgaagggggtcagtcctacaagattggtgacacctggaggagaccacatgagactggtggttacatgttagagtgtgtgtgtcttggtaatggaaaaggagaatggacctgcaagcccatagctgagaagtgttttgatcatgctgctgggacttcctatgtggtcggagaaacgtgggagaagccctaccaaggctggatgatggtagattgtacttgcctgggagaaggcagcggacgcatcacttgcacttctagaaatagatgcaacgatcaggacacaaggacatcctatagaattggagacacctggagcaagaaggataatcgaggaaacctgctccagtgcatctgcacaggcaacggccgaggagagtggaagtgtgagaggcacacctctgtgcagaccacatcgagcggatctggccccttcaccgatgttcgtgcagctgtttaccaaccgcagcctcacccccagcctcctccctatggccactgtgtcacagacagtggtgtggtctactctgtggggatgcagtggctgaagacacaaggaaataagcaaatgctttgcacgtgcctgggcaacggagtcagctgccaagagacagctgtaacccagacttacggtggcaactcaaatggagagccatgtgtcttaccattcacctacaatggcaggacgttctactcctgcaccacagaagggcgacaggacggacatctttggtgcagcacaacttcgaattatgagcaggaccagaaatactctttctgcacagaccacactgttttggttcagactcgaggaggaaattccaatggtgccttgtgccacttccccttcctatacaacaaccacaattacactgattgcacttctgagggcagaagagacaacatgaagtggtgtgggaccacacagaactatgatgccgaccagaagtttgggttctgccccatggctgcccacgaggaaatctgcacaaccaatgaaggggtcatgtaccgcattggagatcagtgggataagcagcatgacatgggtcacatgatgaggtgcacgtgtgttgggaatggtcgtggggaatggacatgcattgcctactcgcagcttcgagatcagtgcattgttgatgacatcacttacaatgtgaacgacacattccacaagcgtcatgaagaggggcacatgctgaactgtacatgcttcggtcagggtcggggcaggtggaagtgtgatcccgtcgaccaatgccaggattcagagactgggacgttttatcaaattggagattcatgggagaagtatgtgcatggtgtcagataccagtgctactgctatggccgtggcattggggagtggcattgccaacctttacagacctatccaagctcaagtggtcctgtcgaagtatttatcactgagactccgagtcagcccaactcccaccccatccagtggaatgcaccacagccatctcacatttccaagtacattctcaggtggagacctaaaaattctgtaggccgttggaaggaagctaccataccaggccacttaaactcctacaccatcaaaggcctgaagcctggtgtggtatacgagggccagctcatcagcatccagcagtacggccaccaagaagtgactcgctttgacttcaccaccaccagcaccagcacacctgtgaccagcaacaccgtgacaggagagacgactcccttttctcctcttgtggccacttctgaatctgtgaccgaaatcacagccagtagctttgtggtctcctgggtctcagcttccgacaccgtgtcgggattccgggtggaatatgagctgagtgaggagggagatgagccacagtacctggatcttccaagcacagccacttctgtgaacatccctgacctgcttcctggccgaaaatacattgtaaatgtctatcagatatctgaggatggggagcagagtttgatcctgtctacttcacaaacaacagcgcctgatgcccctcctgacacgactgtggaccaagttgatgacacctcaattgttgttcgctggagcagaccccaggctcccatcacagggtacagaatagtctattcgccatcagtagaaggtagcagcacagaactcaaccttcctgaaactgcaaactccgtcaccctcagtgacttgcaacctggtgttcagtataacatcactatctatgctgtggaagaaaatcaagaaagtacacctgttgtcattcaacaagaaaccactggcaccccacgctcagatacagtgccctctcccagggacctgcagtttgtggaagtgacagacgtgaaggtcaccatcatgtggacaccgcctgagagtgcagtgaccggctaccgtgtggatgtgatccccgtcaacctgcctggcgagcacgggcagaggctgcccatcagcaggaacacctttgcagaagtcaccgggctgtcccctggggtcacctattacttcaaagtctttgcagtgagccatgggagggagagcaagcctctgactgctcaacagacaaccaaactggatgctcccactaacctccagtttgtcaatgaaactgattctactgtcctggtgagatggactccacctcgggcccagataacaggataccgactgaccgtgggccttacccgaagaggacagcccaggcagtacaatgtgggtccctctgtctccaagtacccactgaggaatctgcagcctgcatctgagtacaccgtatccctcgtggccataaagggcaaccaagagagccccaaagccactggagtctttaccacactgcagcctgggagctctattccaccttacaacaccgaggtgactgagaccaccattgtgatcacatggacgcctgctccaagaattggttttaagctgggtgtacgaccaagccagggaggagaggcaccacgagaagtgacttcagactcaggaagcatcgttgtgtccggcttgactccaggagtagaatacgtctacaccatccaagtcctgagagatggacaggaaagagatgcgccaattgtaaacaaagtggtgacaccattgtctccaccaacaaacttgcatctggaggcaaaccctgacactggagtgctcacagtctcctgggagaggagcaccaccccagacattactggttatagaattaccacaacccctacaaacggccagcagggaaattctttggaagaagtggtccatgctgatcagagctcctgcacttttgataacctgagtcccggcctggagtacaatgtcagtgtttacactgtcaaggatgacaaggaaagtgtccctatctctgataccatcatcccagctgttcctcctcccactgacctgcgattcaccaacattggtccagacaccatgcgtgtcacctgggctccacccccatccattgatttaaccaacttcctggtgcgttactcacctgtgaaaaatgaggaagatgttgcagagttgtcaatttctccttcagacaatgcagtggtcttaacaaatctcctgcctggtacagaatatgtagtgagtgtctccagtgtctacgaacaacatgagagcacacctcttagaggaagacagaaaacaggtcttgattccccaactggcattgacttttctgatattactgccaactcttttactgtgcactggattgctcctcgagccaccatcactggctacaggatccgccatcatcccgagcacttcagtgggagacctcgagaagatcgggtgccccactctcggaattccatcaccctcaccaacctcactccaggcacagagtatgtggtcagcatcgttgctcttaatggcagagaggaaagtcccttattgattggccaacaatcaacagtttctgatgttccgagggacctggaagttgttgctgcgacccccaccagcctactgatcagctgggatgctcctgctgtcacagtgagatattacaggatcacttacggagagacaggaggaaatagccctgtccaggagttcactgtgcctgggagcaagtctacagctaccatcagcggccttaaacctggagttgattataccatcactgtgtatgctgtcactggccgtggagacagccccgcaagcagcaagccaatttccattaattaccgaacagaaattgacaaaccatcccagatgcaagtgaccgatgttcaggacaacagcattagtgtcaagtggctgccttcaagttcccctgttactggttacagagtaaccaccactcccaaaaatggaccaggaccaacaaaaactaaaactgcaggtccagatcaaacagaaatgactattgaaggcttgcagcccacagtggagtatgtggttagtgtctatgctcagaatccaagcggagagagtcagcctctggttcagactgcagtaaccaacattgatcgccctaaaggactggcattcactgatgtggatgtcgattccatcaaaattgcttgggaaagcccacaggggcaagtttccaggtacagggtgacctactcgagccctgaggatggaatccatgagctattccctgcacctgatggtgaagaagacactgcagagctgcaaggcctcagaccgggttctgagtacacagtcagtgtggttgccttgcacgatgatatggagagccagcccctgattggaacccagtccacagctattcctgcaccaactgacctgaagttcactcaggtcacacccacaagcctgagcgcccagtggacaccacccaatgttcagctcactggatatcgagtgcgggtgacccccaaggagaagaccggaccaatgaaagaaatcaaccttgctcctgacagctcatccgtggttgtatcaggacttatggtggccaccaaatatgaagtgagtgtctatgctcttaaggacactttgacaagcagaccagctcagggagttgtcaccactctggagaatgtcagcccaccaagaagggctcgtgtgacagatgctactgagaccaccatcaccattagctggagaaccaagactgagacgatcactggcttccaagttgatgccgttccagccaatggccagactccaatccagagaaccatcaagccagatgtcagaagctacaccatcacaggtttacaaccaggcactgactacaagatctacctgtacaccttgaatgacaatgctcggagctcccctgtggtcatcgacgcctccactgccattgatgcaccatccaacctgcgtttcctggccaccacacccaattccttgctggtatcatggcagccgccacgtgccaggattaccggctacatcatcaagtatgagaagcctgggtctcctcccagagaagtggtccctcggccccgccctggtgtcacagaggctactattactggcctggaaccgggaaccgaatatacaatttatgtcattgccctgaagaataatcagaagagcgagcccctgattggaaggaaaaagacagttcaaaagacccctttcgtcacccaccctgggtatgacactggaaatggtattcagcttcctggcacttctggtcagcaacccagtgttgggcaacaaatgatctttgaggaacatggttttaggcggaccacaccgcccacaacggccacccccataaggcataggccaagaccatacccgccgaatgtaggacaagaagctctctctcagacaaccatctcatgggccccattccaggacacttctgagtacatcatttcatgtcatcctgttggcactgatgaagaacccttacagttcagggttcctggaacttctaccagtgccactctgacaggcctcaccagaggtgccacctacaacgtcatagtggaggcactgaaagaccagcagaggcataaggttcgggaagaggttgttaccgtgggcaactctgtcaacgaaggcttgaaccaacctacggatgactcgtgctttgacccctacacagtttcccattatgccgttggagatgagtgggaacgaatgtctgaatcaggctttaaactgttgtgccagtgcttaggctttggaagtggtcatttcagatgtgattcatctagatggtgccatgacaatggtgtgaactacaagattggagagaagtgggaccgtcagggagaaaatggccagatgatgagctgcacatgtcttgggaacggaaaaggagaattcaagtgtgaccctcatgaggcaacgtgttatgatgatgggaagacataccacgtaggagaacagtggcagaaggaatatctcggtgccatttgctcctgcacatgctttggaggccagcggggctggcgctgtgacaactgccgcagacctgggggtgaacccagtcccgaaggcactactggccagtcctacaaccagtattctcagagataccatcagagaacaaacactaatgttaattgcccaattgagtgcttcatgcctttagatgtacaggctgacagagaagattcccgagagtaaatcatctttccaatccagaggaacaagcatgtctctctgccaagatccatctaaactggagtgatgttagcagacccagcttagagttcttctttctttcttaagccctttgctctggaggaagttctccagcttcagctcaactcacagcttctccaagcatcaccctgggagtttcctgagggttttctcataaatgagggctgcacattgcctgttctgcttcgaagtattcaataccgctcagtattttaaatgaagtgattctaagatttggtttgggatcaataggaaagcatatgcagccaaccaagatgcaaatgttttgaaatgatatgaccaaaattttaagtaggaaagtcacccaaacacttctgctttcacttaagtgtctggcccgcaatactgtaggaacaagcatgatcttgttactgtgatattttaaatatccacagtactcactttttccaaatgatcctagtaattgcctagaaatatctttctcttacctgttatttatcaatttttcccagtatttttatacggaaaaaattgtattgaaaacacttagtatgcagttgataagaggaatttggtataattatggtgggtgattattttttatactgtatgtgccaaagctttactactgtggaaagacaactgttttaataaaagatttacattccacaa

SEQ ID NO: 134451 - DNA, 7762 bp, Homo sapiens
  Payload ID: 6261
  Gene Symbol: FN1
  Gene Name: fibronectin 1
  Uniprot ID: P02751
  ENST ID: ENST00000443816
  CDS Start-End: 272-7069
cggacgcccgcgccggctgtgctgcacagggggaggagagggaaccccaggcgcgagcgggaagaggggacctgcagccacaacttctctggtcctctgcatcccttctgtccctccacccgtccccttccccaccctctggcccccaccttcttggaggcgacaacccccgggaggcattagaagggatttttcccgcaggttgcgaagggaagcaaacttggtggcaacttgcctcccggtgcgggcgtctctcccccaccgtctcaacatgcttaggggtccggggcccgggctgctgctgctggccgtccagtgcctggggacagcggtgccctccacgggagcctcgaagagcaagaggcaggctcagcaaatggttcagccccagtccccggtggctgtcagtcaaagcaagcccggttgttatgacaatggaaaacactatcagataaatcaacagtgggagcggacctacctaggcaatgcgttggtttgtacttgttatggaggaagccgaggttttaactgcgagagtaaacctgaagctgaagagacttgctttgacaagtacactgggaacacttaccgagtgggtgacacttatgagcgtcctaaagactccatgatctgggactgtacctgcatcggggctgggcgagggagaataagctgtaccatcgcaaaccgctgccatgaagggggtcagtcctacaagattggtgacacctggaggagaccacatgagactggtggttacatgttagagtgtgtgtgtcttggtaatggaaaaggagaatggacctgcaagcccatagctgagaagtgttttgatcatgctgctgggacttcctatgtggtcggagaaacgtgggagaagccctaccaaggctggatgatggtagattgtacttgcctgggagaaggcagcggacgcatcacttgcacttctagaaatagatgcaacgatcaggacacaaggacatcctatagaattggagacacctggagcaagaaggataatcgaggaaacctgctccagtgcatctgcacaggcaacggccgaggagagtggaagtgtgagaggcacacctctgtgcagaccacatcgagcggatctggccccttcaccgatgttcgtgcagctgtttaccaaccgcagcctcacccccagcctcctccctatggccactgtgtcacagacagtggtgtggtctactctgtggggatgcagtggctgaagacacaaggaaataagcaaatgctttgcacgtgcctgggcaacggagtcagctgccaagagacagctgtaacccagacttacggtggcaactcaaatggagagccatgtgtcttaccattcacctacaatggcaggacgttctactcctgcaccacagaagggcgacaggacggacatctttggtgcagcacaacttcgaattatgagcaggaccagaaatactctttctgcacagaccacactgttttggttcagactcgaggaggaaattccaatggtgccttgtgccacttccccttcctatacaacaaccacaattacactgattgcacttctgagggcagaagagacaacatgaagtggtgtgggaccacacagaactatgatgccgaccagaagtttgggttctgccccatggctgcccacgaggaaatctgcacaaccaatgaaggggtcatgtaccgcattggagatcagtgggataagcagcatgacatgggtcacatgatgaggtgcacgtgtgttgggaatggtcgtggggaatggacatgcattgcctactcgcagcttcgagatcagtgcattgttgatgacatcacttacaatgtgaacgacacattccacaagcgtcatgaagaggggcacatgctgaactgtacatgcttcggtcagggtcggggcaggtggaagtgtgatcccgtcgaccaatgccaggattcagagactgggacgttttatcaaattggagattcatgggagaagtatgtgcatggtgtcagataccagtgctactgctatggccgtggcattggggagtggcattgccaacctttacagacctatccaagctcaagtggtcctgtcgaagtatttatcactgagactccgagtcagcccaactcccaccccatccagtggaatgcaccacagccatctcacatttccaagtacattctcaggtggagacctaaaaattctgtaggccgttggaaggaagctaccataccaggccacttaaactcctacaccatcaaaggcctgaagcctggtgtggtatacgagggccagctcatcagcatccagcagtacggccaccaagaagtgactcgctttgacttcaccaccaccagcaccagcacacctgtgaccagcaacaccgtgacaggagagacgactcccttttctcctcttgtggccacttctgaatctgtgaccgaaatcacagccagtagctttgtggtctcctgggtctcagcttccgacaccgtgtcgggattccgggtggaatatgagctgagtgaggagggagatgagccacagtacctggatcttccaagcacagccacttctgtgaacatccctgacctgcttcctggccgaaaatacattgtaaatgtctatcagatatctgaggatggggagcagagtttgatcctgtctacttcacaaacaacagcgcctgatgcccctcctgacacgactgtggaccaagttgatgacacctcaattgttgttcgctggagcagaccccaggctcccatcacagggtacagaatagtctattcgccatcagtagaaggtagcagcacagaactcaaccttcctgaaactgcaaactccgtcaccctcagtgacttgcaacctggtgttcagtataacatcactatctatgctgtggaagaaaatcaagaaagtacacctgttgtcattcaacaagaaaccactggcaccccacgctcagatacagtgccctctcccagggacctgcagtttgtggaagtgacagacgtgaaggtcaccatcatgtggacaccgcctgagagtgcagtgaccggctaccgtgtggatgtgatccccgtcaacctgcctggcgagcacgggcagaggctgcccatcagcaggaacacctttgcagaagtcaccgggctgtcccctggggtcacctattacttcaaagtctttgcagtgagccatgggagggagagcaagcctctgactgctcaacagacaaccaaactggatgctcccactaacctccagtttgtcaatgaaactgattctactgtcctggtgagatggactccacctcgggcccagataacaggataccgactgaccgtgggccttacccgaagaggacagcccaggcagtacaatgtgggtccctctgtctccaagtacccactgaggaatctgcagcctgcatctgagtacaccgtatccctcgtggccataaagggcaaccaagagagccccaaagccactggagtctttaccacactgcagcctgggagctctattccaccttacaacaccgaggtgactgagaccaccattgtgatcacatggacgcctgctccaagaattggttttaagctgggtgtacgaccaagccagggaggagaggcaccacgagaagtgacttcagactcaggaagcatcgttgtgtccggcttgactccaggagtagaatacgtctacaccatccaagtcctgagagatggacaggaaagagatgcgccaattgtaaacaaagtggtgacaccattgtctccaccaacaaacttgcatctggaggcaaaccctgacactggagtgctcacagtctcctgggagaggagcaccaccccagacattactggttatagaattaccacaacccctacaaacggccagcagggaaattctttggaagaagtggtccatgctgatcagagctcctgcacttttgataacctgagtcccggcctggagtacaatgtcagtgtttacactgtcaaggatgacaaggaaagtgtccctatctctgataccatcatcccagctgttcctcctcccactgacctgcgattcaccaacattggtccagacaccatgcgtgtcacctgggctccacccccatccattgatttaaccaacttcctggtgcgttactcacctgtgaaaaatgaggaagatgttgcagagttgtcaatttctccttcagacaatgcagtggtcttaacaaatctcctgcctggtacagaatatgtagtgagtgtctccagtgtctacgaacaacatgagagcacacctcttagaggaagacagaaaacaggtcttgattccccaactggcattgacttttctgatattactgccaactcttttactgtgcactggattgctcctcgagccaccatcactggctacaggatccgccatcatcccgagcacttcagtgggagacctcgagaagatcgggtgccccactctcggaattccatcaccctcaccaacctcactccaggcacagagtatgtggtcagcatcgttgctcttaatggcagagaggaaagtcccttattgattggccaacaatcaacagtttctgatgttccgagggacctggaagttgttgctgcgacccccaccagcctactgatcagctgggatgctcctgctgtcacagtgagatattacaggatcacttacggagagacaggaggaaatagccctgtccaggagttcactgtgcctgggagcaagtctacagctaccatcagcggccttaaacctggagttgattataccatcactgtgtatgctgtcactggccgtggagacagccccgcaagcagcaagccaatttccattaattaccgaacagaaattgacaaaccatcccagatgcaagtgaccgatgttcaggacaacagcattagtgtcaagtggctgccttcaagttcccctgttactggttacagagtaaccaccactcccaaaaatggaccaggaccaacaaaaactaaaactgcaggtccagatcaaacagaaatgactattgaaggcttgcagcccacagtggagtatgtggttagtgtctatgctcagaatccaagcggagagagtcagcctctggttcagactgcagtaaccactattcctgcaccaactgacctgaagttcactcaggtcacacccacaagcctgagcgcccagtggacaccacccaatgttcagctcactggatatcgagtgcgggtgacccccaaggagaagaccggaccaatgaaagaaatcaaccttgctcctgacagctcatccgtggttgtatcaggacttatggtggccaccaaatatgaagtgagtgtctatgctcttaaggacactttgacaagcagaccagctcagggagttgtcaccactctggagaatgtcagcccaccaagaagggctcgtgtgacagatgctactgagaccaccatcaccattagctggagaaccaagactgagacgatcactggcttccaagttgatgccgttccagccaatggccagactccaatccagagaaccatcaagccagatgtcagaagctacaccatcacaggtttacaaccaggcactgactacaagatctacctgtacaccttgaatgacaatgctcggagctcccctgtggtcatcgacgcctccactgccattgatgcaccatccaacctgcgtttcctggccaccacacccaattccttgctggtatcatggcagccgccacgtgccaggattaccggctacatcatcaagtatgagaagcctgggtctcctcccagagaagtggtccctcggccccgccctggtgtcacagaggctactattactggcctggaaccgggaaccgaatatacaatttatgtcattgccctgaagaataatcagaagagcgagcccctgattggaaggaaaaagacagacgagcttccccaactggtaacccttccacaccccaatcttcatggaccagagatcttggatgttccttccacagttcaaaagacccctttcgtcacccaccctgggtatgacactggaaatggtattcagcttcctggcacttctggtcagcaacccagtgttgggcaacaaatgatctttgaggaacatggttttaggcggaccacaccgcccacaacggccacccccataaggcataggccaagaccatacccgccgaatgtaggacaagaagctctctctcagacaaccatctcatgggccccattccaggacacttctgagtacatcatttcatgtcatcctgttggcactgatgaagaacccttacagttcagggttcctggaacttctaccagtgccactctgacaggcctcaccagaggtgccacctacaacgtcatagtggaggcactgaaagaccagcagaggcataaggttcgggaagaggttgttaccgtgggcaactctgtcaacgaaggcttgaaccaacctacggatgactcgtgctttgacccctacacagtttcccattatgccgttggagatgagtgggaacgaatgtctgaatcaggctttaaactgttgtgccagtgcttaggctttggaagtggtcatttcagatgtgattcatctagatggtgccatgacaatggtgtgaactacaagattggagagaagtgggaccgtcagggagaaaatggccagatgatgagctgcacatgtcttgggaacggaaaaggagaattcaagtgtgaccctcatgaggcaacgtgttatgatgatgggaagacataccacgtaggagaacagtggcagaaggaatatctcggtgccatttgctcctgcacatgctttggaggccagcggggctggcgctgtgacaactgccgcagacctgggggtgaacccagtcccgaaggcactactggccagtcctacaaccagtattctcagagataccatcagagaacaaacactaatgttaattgcccaattgagtgcttcatgcctttagatgtacaggctgacagagaagattcccgagagtaaatcatctttccaatccagaggaacaagcatgtctctctgccaagatccatctaaactggagtgatgttagcagacccagcttagagttcttctttctttcttaagccctttgctctggaggaagttctccagcttcagctcaactcacagcttctccaagcatcaccctgggagtttcctgagggttttctcataaatgagggctgcacattgcctgttctgcttcgaagtattcaataccgctcagtattttaaatgaagtgattctaagatttggtttgggatcaataggaaagcatatgcagccaaccaagatgcaaatgttttgaaatgatatgaccaaaattttaagtaggaaagtcacccaaacacttctgctttcacttaagtgtctggcccgcaatactgtaggaacaagcatgatcttgttactgtgatattttaaatatccacagtactcactttttccaaatgatcctagtaattgcctagaaatatctttctcttacctgttatttatcaatttttcccagtatttttatacggaaaaaattgtattgaaaacacttagtatgcagttgataagaggaatttggtataattatggtgggtgattattttttatactgtatgtgccaaagctttactactgtggaaagacaactgttttaataaaagatttacattccacaa

SEQ ID NO: 134452 - DNA, 3720 bp, Homo sapiens
  Payload ID: 6261
  Gene Symbol: FN1
  Gene Name: fibronectin 1
  ENST ID: ENST00000456923
  CDS Start-End: 1-3312
ctgaggtggaccccgctaaactcttccaccattattgggtaccgcatcacagtagttgcggcaggagaaggtatccctatttttgaagattttgtggactcctcagtaggatactacacagtcacagggctggagccgggcattgactatgatatcagcgttatcactctcattaatggcggcgagagtgcccctactacactgacacaacaaacggctgttcctcctcccactgacctgcgattcaccaacattggtccagacaccatgcgtgtcacctgggctccacccccatccattgatttaaccaacttcctggtgcgttactcacctgtgaaaaatgaggaagatgttgcagagttgtcaatttctccttcagacaatgcagtggtcttaacaaatctcctgcctggtacagaatatgtagtgagtgtctccagtgtctacgaacaacatgagagcacacctcttagaggaagacagaaaacaggtcttgattccccaactggcattgacttttctgatattactgccaactcttttactgtgcactggattgctcctcgagccaccatcactggctacaggatccgccatcatcccgagcacttcagtgggagacctcgagaagatcgggtgccccactctcggaattccatcaccctcaccaacctcactccaggcacagagtatgtggtcagcatcgttgctcttaatggcagagaggaaagtcccttattgattggccaacaatcaacagtttctgatgttccgagggacctggaagttgttgctgcgacccccaccagcctactgatcagctgggatgctcctgctgtcacagtgagatattacaggatcacttacggagagacaggaggaaatagccctgtccaggagttcactgtgcctgggagcaagtctacagctaccatcagcggccttaaacctggagttgattataccatcactgtgtatgctgtcactggccgtggagacagccccgcaagcagcaagccaatttccattaattaccgaacagaaattgacaaaccatcccagatgcaagtgaccgatgttcaggacaacagcattagtgtcaagtggctgccttcaagttcccctgttactggttacagagtaaccaccactcccaaaaatggaccaggaccaacaaaaactaaaactgcaggtccagatcaaacagaaatgactattgaaggcttgcagcccacagtggagtatgtggttagtgtctatgctcagaatccaagcggagagagtcagcctctggttcagactgcagtaaccactattcctgcaccaactgacctgaagttcactcaggtcacacccacaagcctgagcgcccagtggacaccacccaatgttcagctcactggatatcgagtgcgggtgacccccaaggagaagaccggaccaatgaaagaaatcaaccttgctcctgacagctcatccgtggttgtatcaggacttatggtggccaccaaatatgaagtgagtgtctatgctcttaaggacactttgacaagcagaccagctcagggagttgtcaccactctggagaatgtcagcccaccaagaagggctcgtgtgacagatgctactgagaccaccatcaccattagctggagaaccaagactgagacgatcactggcttccaagttgatgccgttccagccaatggccagactccaatccagagaaccatcaagccagatgtcagaagctacaccatcacaggtttacaaccaggcactgactacaagatctacctgtacaccttgaatgacaatgctcggagctcccctgtggtcatcgacgcctccactgccattgatgcaccatccaacctgcgtttcctggccaccacacccaattccttgctggtatcatggcagccgccacgtgccaggattaccggctacatcatcaagtatgagaagcctgggtctcctcccagagaagtggtccctcggccccgccctggtgtcacagaggctactattactggcctggaaccgggaaccgaatatacaatttatgtcattgccctgaagaataatcagaagagcgagcccctgattggaaggaaaaagacagacgagcttccccaactggtaacccttccacaccccaatcttcatggaccagagatcttggatgttccttccacagttcaaaagacccctttcgtcacccaccctgggtatgacactggaaatggtattcagcttcctggcacttctggtcagcaacccagtgttgggcaacaaatgatctttgaggaacatggttttaggcggaccacaccgcccacaacggccacccccataaggcataggccaagaccatacccgccgaatgtaggtgaggaaatccaaattggtcacatccccagggaagatgtagactatcacctgtacccacacggtccgggactcaatccaaatgcctctacaggacaagaagctctctctcagacaaccatctcatgggccccattccaggacacttctgagtacatcatttcatgtcatcctgttggcactgatgaagaacccttacagttcagggttcctggaacttctaccagtgccactctgacaggcctcaccagaggtgccacctacaacgtcatagtggaggcactgaaagaccagcagaggcataaggttcgggaagaggttgttaccgtgggcaactctgtcaacgaaggcttgaaccaacctacggatgactcgtgctttgacccctacacagtttcccattatgccgttggagatgagtgggaacgaatgtctgaatcaggctttaaactgttgtgccagtgcttaggctttggaagtggtcatttcagatgtgattcatctagatggtgccatgacaatggtgtgaactacaagattggagagaagtgggaccgtcagggagaaaatggccagatgatgagctgcacatgtcttgggaacggaaaaggagaattcaagtgtgaccctcatgaggcaacgtgttatgatgatgggaagacataccacgtaggagaacagtggcagaaggaatatctcggtgccatttgctcctgcacatgctttggaggccagcggggctggcgctgtgacaactgccgcagacctgggggtgaacccagtcccgaaggcactactggccagtcctacaaccagtattctcagagataccatcagagaacaaacactaatgttaattgcccaattgagtgcttcatgcctttagatgtacaggctgacagagaagattcccgagagtaaatcatctttccaatccagaggaacaagcatgtctctctgccaagatccatctaaactggagtgatgttagcagacccagcttagagttcttctttctttcttaagccctttgctctggaggaagttctccagcttcagctcaactcacagcttctccaagcatcaccctgggagtttcctgagggttttctcataaatgagggctgcacattgcctgttctgcttcgaagtattcaataccgctcagtattttaaatgaagtgattctaagatttggtttgggatcaataggaaagcatatgcagccaaccaagatgcaaatgttttgaaatgatatgaccaaaattttaagtaggaaagtcacccaaacacttctgctttcacttaagtgtctggcccgcaatactg

SEQ ID NO: 134453 - DNA, 3949 bp, Homo sapiens
  Payload ID: 6262
  Gene Symbol: FLRT1
  Gene Name: fibronectin leucine rich transmembrane protein 1
  Uniprot ID: Q9NZU1
  ENST ID: ENST00000246841
  CDS Start-End: 1044-3068
tggcaggtgaggaagcaggcagtgggcgagaagatggattcctttttggacagacaagaccagagagtgaagcgggaataactcatcctccctacctccccagcaaggaaacctctacaaacaggagcagccaagcaggactgaggcccttgccccccaagcatcttctcaaagaagggcatgtgggggcctgacagctcagctgcatgtgtcagcagctccagccccaccatgaacatctgaactcctcagcggggtaatggaccccctcctttcccccggagacacagcctgagtggcaggaatacagagcctttggagagtggctccctctcagctccgtcatgcaagaacactctctgcacccagcccattctgccaagtgacttaaaggaattaaaaaaaaaaaaagccttggtaaacaaaaagggggtaaaagccacgcagaggcccttcagaagaggtggcgggctgcagacaaaagggcaagagttgaaaagggctgtggaggtagcaagcagcagaggccaccctgctcagggctgggtgccaggccacagggcatgcccgacgaacagggagtcggaaccccctcaggccaccctcgggagtcctggggtccagaggggtgtccctgtaccccttgcacacaggaccctcactctgcagggataagccagctgcgcctgcagcctagggtgccaaggaggctgctgattgtggcccacagcctcatctgaacgccaggagaccaggataccgaggcaccggatcccctctctgtgccctggggagccccagtgctgcccagtcaccccagggctgaggtctgcgtccctagtggtgcaaggcctggtaggaccacggggcagggaatgtgagcgccatctgagctcacggtgtcctgagtcgcggcttcgtgactttggcaggggcctccggaccagtgaccccagtcaaacccagagggtcttgggcggcagcgacgaaggaggtattcaggctccaggccaggtggggccggacgcccccagccatccaccatggtggtggcacaccccaccgccactgccaccaccacgcccactgccactgtcacggccaccgttgtgatgaccacggccaccatggacctgcgggactggctgttcctctgctacgggctcatcgccttcctgacggaggtcatcgacagcaccacctgcccctcggtgtgccgctgcgacaacggcttcatctactgcaacgaccggggactcacatccatccccgcagatatccctgatgatgccaccaccctctacctgcagaacaaccagatcaacaacgccggcatcccccaggacctcaagaccaaggtcaacgtgcaggtcatctacctatacgagaatgacctggatgagttccccatcaacctgccccgctccctccgggagctgcacctgcaggacaacaatgtgcgcaccattgccagggactcgctggcccgcatcccgctgctggagaagctgcacctggatgacaactccgtgtccaccgtcagcattgaggaggacgccttcgccgacagcaaacagctcaagctgctcttcctgagccggaaccacctgagcagcatcccctcggggctgccgcacacgctggaggagctgcggctggatgacaaccgcatctccaccatcccgctgcatgccttcaagggcctcaacagcctgcggcgcctggtgctggacggtaacctgctggccaaccagcgcatcgccgacgacaccttcagccgcctacagaacctcacagagctctcgctggtgcgcaattcgctggccgcgccacccctcaacctgcccagcgcccacctgcagaagctctacctgcaggacaatgccatcagccacatcccctacaacacgctggccaagatgcgtgagctggagcggctggacctgtccaacaacaacctgaccacgctgccccgcggcctgttcgacgacctggggaacctggcccagctgctgctcaggaacaacccttggttttgtggctgcaacctcatgtggctgcgggactgggtgaaggcacgggcggccgtggtcaacgtgcggggcctcatgtgccagggccctgagaaggtccggggcatggccatcaaggacattaccagcgagatggacgagtgttttgagacggggccgcagggcggcgtggccaatgcggctgccaagaccacggccagcaaccacgcctctgccaccacgccccagggttccctgtttaccctcaaggccaaaaggccagggctgcgcctccccgactccaacattgactaccccatggccacgggtgatggcgccaagaccctggccatccacgtgaaggccctgacggcagactccatccgcatcacgtggaaggccacgctccccgcctcctctttccggctcagttggctgcgcctgggccacagcccagccgtgggctccatcacggagaccttggtgcagggggacaagacagagtacctgctgacagccctggagcccaagtccacctacatcatctgcatggtcaccatggagaccagcaatgcctacgtagctgatgagacacccgtgtgtgccaaggcagagacagccgacagctatggccctaccaccacactcaaccaggagcagaacgctggccccatggcgagcctgcccctggcgggcatcatcggcggggcagtggctctggtcttcctcttcctggtcctgggggccatctgctggtacgtgcaccaggctggcgagctgctgacccgggagagggcctacaaccggggcagcaggaaaaaggatgactatatggagtcagggaccaagaaggataactccatcctggaaatccgcggccctgggctgcagatgctgcccatcaacccgtaccgcgccaaagaagagtacgtggtccacactatcttcccctccaacggcagcagcctctgcaaggccacacacaccattggctacggcaccacgcggggctaccgggacggcggcatccccgacatagactactcctacacatgatgcccgcccacccgggctgccccgcctcagccccagctgccctggcgtggccatgtggctttgcccagcctgctgcaatccaagagagcaaggaagagaaattccatgggtgactttcctccgcagaaagcaaagtttggggagggctgacgattttgtagaacacaacagtgacaattttttttaaaagaatagaaggcaggagggggaattcgacattgttgaagacataatttataccaagttatgccagttggggagggaaggactaaaaataatattgcaggcagggctgggttgggttttttttttttcccccctgaactggaaggatactacctgtacaacatctgtggacacctcatgctctgttcaaggccatcacaaaggaaccgccagggagaagcagccggctctcaaagctcccacgcagctctcccgccactggccactcgctggcgacccgatggaaggttttcaggctcctcacaaaggagagagggaagaaaagatcttttgccctggagatatggtcctgaaatctctcccctggcttattccataccatttcccttgcagatttgcagaaacatggcatctttcactgcattctttgaacaatcatgtagtcgattaaaaaaaaaaaacaaacttttttttcctaggctgaagccctcttcagttccatgcaccacgctccgtagaagccccggcggaagccgtagctttccctgccacctggaggtgcatctgtctgcctgtctatccctgtcgcggtgtctctaagtacagatgggtagatagagccacatgcacggtccttaccgttcttcttgggtcagttcttaccatttcctgaacaatagaattgtgaaagtgtt

SEQ ID NO: 134454 - DNA, 32767 bp, Homo sapiens
  Payload ID: 6263
  Gene Symbol: FLRT2
  Gene Name: fibronectin leucine rich transmembrane protein 2
  Uniprot ID: O43155
  ENST ID: ENST00000330753
  CDS Start-End: 768-2750
agttgtacgttcgaaacctgtcgccgtcacttgcgcgtttggcattatccattgtcaccgcggaggaacgagcgctcgagatatcatcagtgcccgcaaatctccgcgccaaggcgctgagctactcctttccgaggtgcgcctctggtcctccgtccctggtgcccagcagcggcgaggcggcatctccgctcccgccgccgtgtccaccgagccctgggatcagggtggcagttctcaacgatgggcaggagggacctcggcggcgacccctaaaacaataccatgccccgggatccccgctgctgccgcgccagcgtcttccctttccacctccctgaccctgtcggattcggatgagcccattgcaaggagaagacgcagccgtcagattgcagattgagcttaaccaagaagttcgtaggctaatcaaggctggcttgacctacaaaagaagaagagagttctgcctgcccacttgggcttgtgttgacacggctgataacttgccatcacctgttgccagtgtggaaaaattctccctgttgaattttttgcacatggaggacagcagcaaagagggcaacacaggctgataagaccagagacagcagggagattattttaccatacgccctcaggacgttccctctagctggagttctggacttcaacagaaccccatccagtcattttgattttgctgtttattttttttttctttttctttttcccaccacattgtattttatttccgtacttcagaaatgggcctacagaccacaaagtggcccagccatggggcttttttcctgaagtcttggcttatcatttccctggggctctactcacaggtgtccaaactcctggcctgccctagtgtgtgccgctgcgacaggaactttgtctactgtaatgagcgaagcttgacctcagtgcctcttgggatcccggagggcgtaactgtactctacctccacaacaaccaaattaataatgctggatttcctgcagaactgcacaatgtacagtcggtgcacacggtctacctgtatggcaaccaactggacgaattccccatgaaccttcccaagaatgtcagagttctccatttgcaggaaaacaatattcagaccatttcacgggctgctcttgcccagctcttgaagcttgaagagctgcacctggatgacaactccatatccacagtgggggtggaagacggggccttccgggaggctattagcctcaaattgttgtttttgtctaagaatcacctgagcagtgtgcctgttgggcttcctgtggacttgcaagagctgagagtggatgaaaatcgaattgctgtcatatccgacatggccttccagaatctcacgagcttggagcgtcttattgtggacgggaacctcctgaccaacaagggtatcgccgagggcaccttcagccatctcaccaagctcaaggaattttcaattgtacgtaattcgctgtcccaccctcctcccgatctcccaggtacgcatctgatcaggctctatttgcaggacaaccagataaaccacattcctttgacagccttctcaaatctgcgtaagctggaacggctggatatatccaacaaccaactgcggatgctgactcaaggggtttttgataatctctccaacctgaagcagctcactgctcggaataacccttggttttgtgactgcagtattaaatgggtcacagaatggctcaaatatatcccttcatctctcaacgtgcggggtttcatgtgccaaggtcctgaacaagtccgggggatggccgtcagggaattaaatatgaatcttttgtcctgtcccaccacgacccccggcctgcctctcttcaccccagccccaagtacagcttctccgaccactcagcctcccaccctctctattccaaaccctagcagaagctacacgcctccaactcctaccacatcgaaacttcccacgattcctgactgggatggcagagaaagagtgaccccacctatttctgaacggatccagctctctatccattttgtgaatgatacttccattcaagtcagctggctctctctcttcaccgtgatggcatacaaactcacatgggtgaaaatgggccacagtttagtagggggcatcgttcaggagcgcatagtcagcggtgagaagcaacacctgagcctggttaacttagagccccgatccacctatcggatttgtttagtgccactggatgcttttaactaccgcgcggtagaagacaccatttgttcagaggccaccacccatgcctcctatctgaacaacggcagcaacacagcgtccagccatgagcagacgacgtcccacagcatgggctccccctttctgctggcgggcttgatcgggggcgcggtgatatttgtgctggtggtcttgctcagcgtcttttgctggcatatgcacaaaaaggggcgctacacctcccagaagtggaaatacaaccggggccggcggaaagatgattattgcgaggcaggcaccaagaaggacaactccatcctggagatgacagaaaccagttttcagatcgtctccttaaataacgatcaactccttaaaggagatttcagactgcagcccatttacaccccaaatgggggcattaattacacagactgccatatccccaacaacatgcgatactgcaacagcagcgtgccagacctggagcactgccatacgtgacagccagaggcccagcgttatcaaggcggacaattagactcttgagaacacactcgtgtgtgcacataaagacacgcagattacatttgataaatgttacacagatgcatttgtgcatttgaatactctgtaatttatacggtgtactatataatgggatttaaaaaaagtgctatcttttctatttcaagttaattacaaacagttttgtaactctttgctttttaaatcttaaaaaaaaaaaagttgctgaagtactgtacagggttgtacaatgagaacccaatgccaaggcaaaaagaacgagtgatttttccttaggatacacatcaaccactttgctgttgaagctgtcagaataaattcctggtggtcagatgaaagggcagattaaatggactcatcagggtaagaggaataatatgggtaaaacaagaaatggcccgatagtttcacactattcctatacctccaggtccggaagacaggtaaaaaattctataatgtaagaatggaggtagttaccctgatttgaccctgtgtgggaaatgctgaaagcaccaggaggaagccggttcccgtgagataagttaacccggcctgacagaatcaagaaaattgagatgagatttgaaaggacccgaaaatgcaggggttggctttctgactgggaacttaaaaatcactcttcatgcttccctggtcctatgtgataacagagttagagacttgagtctgatttcagtcatcttcagggaccagtctgatgttgtagcaagaagactccctttaaaagtgttactgttcaaatcatatatcaggttgaatcacattcaacagagatatattctagaatacttttttagaagaggctaataaagggaagaattatattgaatggaattatttttgataatgagaattatttgggtagattcactgaggctatgtcaacatgatatttagaccaacaggtgatcaatgtttggaaaatacaacaatgacttatttaaaaattacccttcctgctatttagacaaaaacaactgatcagtggttctgttatgtcagctgactttgttagtatcatgttgaaatagcttgaagtaatatcttttatccccttgcaaattcttgtcttccaatcatctcccatatattttcataattagttgtttatgacacctttgtttttctccctctgttcagtatttcaaggaaaattatggatgccagtcttggctgcacaagatatccattacgtacttatacattttaaaatgagtactaattttcactgctaataattctgtaaggacacatcaaagctggccaaaataatgaattttttttaaaaagcaatacctggtttccaccttggactgactttgatcctgttccacttttgaaattttatttgttccttttccatcgtggatgttcctctactttggcaattgtggagggctaatcaatcttatgttagcaggacaacccatgaaaaacaagtcagagagtgaaggctttttcccctaatcctggcagagcagggcgtagaaaagagaggatgtccgtgcttaattctagatacttttgagacaacaccttcagaaaacacataatttaatctttgccatccttagatagagaagggctatagatcacatacgttatcaaaaactactcccttggaaaaaatatctttcgaaaatcaaatttaaacatttcactctgtgctgcatatttcttttaccattgaccattattatagggacccatgaagtaaatgtcacaatcatcttactagctctctctctctcagcaaaataaaactgtgatgtgtcttctttgtaaaagtttaggtataaaatgctatgcaactttttctttatagtaagagctttattttctttaataatatagcccaacttatatgttttaatctcccttgtccctcagaataagcagaaaatataactgcagctgtatgtcgtagacacaagaattgaaactgtgcagtcagtagagctgaacttagctatgaattaatttaaattaattctaaagtgactctggtttccattttagtctattagctagagggttttggctgttgctttttttaaagttaggtccacacagtgaagggaaaagagtctgtgaaggtgatcagtgtagcagtaagacatctaaaatcaagacaatgacatgggggctttgtgtacttagctggataattcccttctactgtcctcttccccttggctgtgtagataaaattgtgcattcaaatgatggtactttgacttttgagggtttttatttctgttattcacaaaatactcattctcatttatgtatattgtatgtttaacccccagtgggatttctggctgctgaaaccactttgggccaggaagaacaaggatgaagaggttcctgtcatttcttatggggttcacagaattatttggggcttaaatggtacaatggagacagtcatgtgcaatgcttaagatggtctgacagggtcccttttgctggaggtgttcctgaagagattgaacctagtaacaggctttattttcaccttgtgtacaacatggcaaagactgctaagattaaaatccgtctcccatttgttacagcctcacctgcaccaggatagaaagcacgtgatggaatctgtgatgtctaatgtgtcttatgaaaattgccaaacaactgtccctggggattctgctttgattggcatttttagtcatgggaatgtatatttgctgatatatctgctctgtgtttgggcctctcttgctgtcattatgatgtattttgagatgattagtcaagagtcaaggttgcgagtacaggccaagaccatgggaaaaaaagccatgctcactggccaataaagagcttgatgctgcctggccaaatgaggtgactcagatagaatctgatcccattcagagcttggtaaatgtcactgtacagaagacattgaaaaggaagaggcatagtcatgatcaaaaggatatattgacagttatctatagccagggtagttgttaatacctgcttgtttggggagatatgtttgattatagagagactctgggccaccctcaaacaccgtcagatgcattagcagcccactgcatgggacaatcgcaggcagatacgaggaatgtatcccctgcctattttccttgtgtaacaaatggaaaacattctcccctgtgagaaataatgcaatttctaattatctggatgttcgttgaaaatatattagacattctccctgaggttaaaaacaaaaagtacgtgaccagtctggtaagaagtattaatgaagtagctaatattacagcttcattttctactagcacctatcataatggtcttagtcatttcacacaaatcagaacttccttccccaccagggaggacaacatcttcatgctgtgattgaagcatccattcagaacacgaggcaatattgcagtccacagggaatggatgcttcacttgatctccggaccttggctgcagaggccatcgcagcttttgaaaagtgaaggggttaattcccattggtgtctttgcttatagcatttttctctaacctataacaaggagacattacattttactttagaacatgagaatagcagttttgctcatgacttaccattccagctgcatgggaaagcaaagcagaaaacagtgccccaaatggaaaaaagatactcacacagaacaaaacagttcttggtcttgttcttggtcttgtcaaaccttgcctgatgctctttctaaagtcaaaatatgaatgctaagaaggcataacctacatccttctctgatttcttcagcagggtcaaaagacagttactagcaatggggaatgcttgtcactgtggagaaagagttttgtatatgtctgataccgttgttataacaaaacaaatttttttactatagttttttgttttctacctgcacacccaccagaagagcacaaagcaaggccattgcaacaggcatttaaaaattattatcaaacatgcacatgcttgtacacacacacacacacacacacaaacaggggcatttgtaaaggtgtccctggaatgtaagatttataatgtttaaggcaaggtgaaggcattgccaagtgtgtgtcgctcataggactagtgtatattcactgaaagttaacctgatgatttgttattgtttgaaccatatgctgatttgcttctggtttctgtttagtgtgttctctctgataaggggctgaaagattctgcatcacacatcctctgagacctaccatgtcgcacactttgttaatgacaaacttcactctacactatacagtaccttgttgatatattcagtaaagtcttattttaaaagaaaaccacattgtgtttatctgagtaagttcattgggatacagtcaatacttgtgctgttaatgtagaagaaatgacgcaggagggcaggaataaaagaggtaataggactttcgtattctcctatcatgaatatgacttgcatttctaaaggccatttgatcctttttgtgtgaggagtttatatgaaatcctcatgttcttttaaatttcccaactaaattgtgtgttcctacgaataccttttaggtatgcacacatacacagagcatcttattttatactggtgaaatctatgttgtttaggatacagataatgtcattgtatttatcctatcagaataggcttttcccctatttcaaaatagatgctattggctttattttttatttttaaattttttttaaacacggtcttaccatgttgcccaggctggtctcaaactcctagatgcaagcaatcatcccacctcgatcacccaaagtgctgggagtacaggcagaggacaccatgcccagccacgctattggttttaaatgtcagatttctttaagaattctcatagtacttttctgccgcagaatttatagcacatctgtccatcctttcaataggcactcaaggaaatgtatctattcatatgctcaacttcaattgattagtctcatatgatttttcagaaccccttttgctaacccctcttggccatttcattaataatgtatttgacagagattgaatcaggaaataaattcatgacatttcagttaactagtattacctgtttgtagaatctctgttggaacattgactatgaaagacagtgctaacaagtaattcatattacttttggggattttatgtaaagtaacatctatgctattcttgggtacttttgccaagagttacagaccttattctatacagactaaaccattagtcaaaaaataccattcattcaaaataattcattaatgtcctcctactctgttccaaacactaggctgagttcagaggcctcacagaatagtgaaatgcgttcttagccaaatcaggcaaatcttctccctcactatgtccctgaagaaatctcttcatctgatatatttactattcatctactttctacagcactatgttagggtcttccggggattcagagaaaagtgtctgtgagccattaagaaactcacagatcaggtaataaacactttttctaatgcattccagtgtctcagagcctgcataatcactttatactacttcattaaattgacaggacatctaaggtgacaaaagagatgtttctacctgttggtaaggttgatgcaactgtcataattagatgttcttggtttttaatagatgcagcaatgagagagtacattgctaaagtcagaacttaatttgaattaaattttcaagtttccaccaagtatttgaaaacttagaaattgtatttcgtaattacacatgcagacatttaaatttttattaagcaccacgatggaactcaatctaaaggaataatggcacctgataattactaacaacctttgtttatataagaccttgtgcaaactgtgtgataacgtatgtttgcattctgtctttaaaataaccctgtaaggtgcgttattttaatttttagattttaaaacttagcttcaagagaaattaagtgattagtctatagctacaaatcctgtaaatggcagagtcaggaattaccactgagcatgactccatggactcttaattgttttcctgcctcttaataaattgaccatccttgagactgactagccttcagatttttcatgatggagctatcataacttctcagtggatacatatattatcatttatggcaaataaagggaacattttagaagcctcaaaattcttgtcttttaaagcccttggtcatccattcctattttttataaaaattctttttgtgattatttgatggctgcacatttatctgatttgaaggtttcagatggaatcaagatatgtctgtacccatagggtgagctgaaagagctactaaaaggtcttcagttgggttatttttaggaatgaatttgtttcgtacttgagatgttgctctaagtattttgtagattccgctgaaaaagcacgtatgtcacaatctattagggcattagtaaactggcttctgaatttatgctctttttttttcccataacatagataaaaatgtgtgctttaggggatattatataagctttattttcactggctctactgaaagttaaggatacaaaagtttttaatggtaataacccaaactatatgtcattttagcacacacataccaatgggtgatcatatctgtcttttttttttttttttttttttggtatgaagtctaaactagacgaaaacctcaatatatccttaggggaattcttattacttcaatgacataataaacctcagtattgggtcactcttttcctaatataaaaaactatgctggctcaaaaagtcttctaaactccctagttgggataggatgggcctttgttggtttagttttgatttcattcagcaaatatttaccgaggcctggtaagttctggtgcagaataagaatgttttccaggagagttaaattttgctcatcaaaaatctttcttggaagctgctggtttttaaccgtcagcctgggctctttctgcctctttgctttttttgagcagaatatggccaggctggtctcaaactcctgatcttaggtgatccacccacctaggcctcccaaagtgctgggattacaggcatgagccacaccactgcatttaaataatcagcctaggattctgctagttccagcaccagagtggcctctcaaatgtgttttctcctcttggttccctgactctgacttggttaagacccttcctttagtctttttctaatttagcctttccaacacattgaaggacaaagggtaatcataatctataaggaatgcctgagtacgatactgcagtgcttgcaaaacatgcgtttttattgcttgcaagatagaattcaaactctttgtgtgacttatgtatcctactacatgttgctccctgacatttcttaccaatattgcctcctccttcattacatgctctagattatatatatataattacatatataatctagattttatatatatatatatatgaaatgagcaaacaaaatgctttcagtttatcttcctgggatctcaagttccttcaaaccactatatatgtgctcaaggtctttcatcctgtgacattcccctttgcctgatgacatatttgtcctttaagatacaagtcaaagacctctcttccaaagccgctggaatcacacctgccaattatctgaccgctttgtgcggttaatataactttaaaatacatttatttttagcacctatatattgtaattttttgtgagtctgcttcatgcctatacaatggggcccctggaaacagaaaacatattctgtaaattgttgtacctcatccagtgttaagagccatgcccaggccctggtgggtgcccagctacaggggaagagccactctgtcagttgcttatggccagatggctctttttttaatagccccagaaagagctgtggagttctgacttgtgcaaaattagccttgctcaaagaccacagtatgcgttttacaagaacaaacaaacatatatattttccttaaaatctcttgattactcatcaacatttttaaaagaaattttgtttttatgattatttggtggccatgcatctgatttgaaagctttagatggaatcagtatgtctacattcataggatgtgctgagataacaattaaaaagacctgaagaacatctttttattttatttatttatttttttttgagttggagtctcactctgtcaccagattggagtgcagtggcacaagctcggctcactgcaacctccgcctcccgggttcaagcaattctcctgcctcagcctcctgcgtagctgggactacaggcgtgcaccaccatgcctggctaattttttgtatttttagtagagatgggttttgccacattggccaggctagtctcgaactcctgacctcaggtgatccccccacctaggcctcccaaagtgctgggattacaggtgtgagccactgcgcccagccaagaacatcctttttatatattacagacaaactcaaaactgaaccagcttgcagaaaagcatacaaagaggtatctttaaaaatcaccttaatcccagcactttgggaggccgaggtgggcagatcacgaggtcaagaaatcaagaccatcctggccaacatggtgaaaccctgtctctactaaaaatacaaaaaatttagccgggcttggtggtgcgtgcctgtagtcccagctactcaggaggctgaggcaggagaattgcttgaacctaggaggtggaggttgcagtgagccaagatcatgccattgcactccagcctggtgacagagtgagactcaaaaaaaaaaaaaaaaaaatcaccttgcaacaaaatatcgccatcatgaaaagtccacaaagcacaagtagacacaaagttaaacatttcgacagtcggctagtcaaaatgaattctttgcatgtgaaaagcagagattttttttttttcatcttcatcagcaaaattaaaaaagacagtcattattcactatgtcatatcccatataaaaatacagcatatatcatttaaaggttcacattgtgttatcttggttattgccatgagaatagtctttcctagaaatgatatgcttgtaaagaagggagtggagagtggtagttattaagaaatcagtttgaaatcaagctgacttactttggaatcctgcttcaaccactgacctgccaatttgccttggcaataacttgcactttagggttatcagtgtacttttcctaaaatggggacaatgatgtctaacacatatggtggttgtcagaattaaaggcatatatagtagttgacagagtatctggtactgagtatacattgaataaatgacatgaagcaccatgtatttttcatgcagatgtaattcacaagcacatggtgacaaattgccagctttttatgatgaaaatcaaatttcttgtgtattggggtaagaattacatgtagagatgatctatttaaaggtaattagcattcaaaattcctcaaaacactcaataatttgcacagctattatcaagatgggtctgtcagaaaggttttcattattctgtattctttctgggggaaaaaaattgggaagatgaggtgccatgggataacacacaaccatggcaggccttttttctcatggtgtgtgggatcattgaacaacatggttgaacagaaagagaacagacttctttataatgtagcatatattctatctggttgctagagtacacatagatgtagttattgctgaaaattaattcagaatatgtgggtgtcaaaagagccccaggaatgagcattcagaaggcattggaaatcaaaatactaaaaacaaaatcaagataagctgagcacagtggctcatgcctataatcgcagtactttgggaggccaaggtgggaggattgcttgaggtcaggatttccagaccagcctgggcaatgcagtgagaccctatctctaaaaaaaaaaaaaaaaattagccaggagtggtggcatgtgcctatagtcccagctacttgggaggttgaagcaggagggtcacttgagcccaggagatcaagattacattgagctctgattgtgccactgcactccagcttaggcaactgagcaagaccctgtctcaaaaaaaaaaaaaaagtaataaatttctgatattgtttcaaaaatctataatttctagtaagacatagttttatttgatgctagtacaccaccaattacggcatttaaatccacactgggtttgctgatagtggggatggtagcagtcaaatggaagaacattttaatgtctctacaatgcaggtgcaatagtctaccacctgtcatgtggttactttttgcaatcgatatcattattaagtttggaagctggttgttattaacaggcatgcatcctcttcagctggatcacgttgttttctttctgtacactttgtggtagttaatagtctcaaagcaattcactcactacggtctgtattagcattattttcctttctatttatgtctttccttgcttaataaatgcagaagttcagacatttgatgaggggggaaatatactttttcagtccttgactgcatgatttaattggtttcaggacagttatttggcaagtagtatcaatgggtactggcattcctgtggtctgctgccaatctctattctgtttggactagtgtctgttttgactggtaggcctcagctatcctattgctaagtattttacataactgccctcattagttggaatatagcatgctttactagtgtatctgaagtaaggaggaagcaggaagtgagctgttttgtaatggaggccaattatatctaacagcaactgtgtctataagactgtagcctattggatgggaagttatattatgaaaacatgatgaatcttttaaattctgagtccaatgctgtctacatctaaatttaaatcctggctcatactaaccttggtccttgggcatgtatatgcttcaattttctcatctgtacatgggttaataacaacactcacctcaacagtaaccatactgcacagtgcctgacacatataaagtgctcaataaatgccagctactttctgaaaatatatggaattagtgtgcaaaaagttgggctatataactcaaatctcctttgtatcttggataagaccacttctctctcgggcttgtttcttatagtcaaaagcgcaggaatttagttgatctcccaagttactttggaccttaaattctgttttatggttgttcattttctatgtagtttagatttggttcattggactgatttgtgttctgtgtgcttttaaaattcaggaagatgtgactaggatagataaagcaaacatataaacactcagtttcattgacttaagtataaagactaacatgtttctcattagttataataaccttaaacttgatatgttagggaagcaacctgcataaccattaaaatcaggagctacagaatcacaaagaactgtgactttgtatctgtgtgatattatttaatgtccctaagcctcagtttcctcatatatgaaatgaggtactaatacttttaaggatttgatgagataatttatatcatcttcacttcagtggttggcatatattcaaacccattatggctgaaaaattacaaatgaatagaaagagaagcaagtgaaaacaaaactcattagttcaaccacttctccctcaaaacaaggaaatacaaactatattactaagtagactattaataaaacactttatttaagtcaaaattatcaaagatagagtgtcgtacaataaaaattgtataaaaaattgtttattaaaatattaaatattttatgttttcaagccattatataacagctattaaaccctaatatttgacagagaaagaattatgagaatagctagaaaatattaaataataaatgtggtttatttttgatggaatagaacagattttaaccctgatccctgccacttttatctgaaccttgaacaaacatacaattatggtttaaaaaaaagaaagatgaaaactttttagaataattaggaaattcttctttcccagaccttcaatacttttataaaaccactacttagcagctaacaatgaaatgttcatttcaaaatgtttagtctttaaagcggttacctaagaatatctgccagtgaacactagctttatttcatcacatcatacacctgaatgtaatcaacattgctttattaaagatgtttatataatttttatataatacacacttccaataattgataatagtctaatgattgatattttaaattaatggcttgtaattgtgtaattggaaagtggtccttgggactcagattaaggtatcattacctgttctttcataagctgttatttatgcttctcattaattagttctttgttatgaaatctttaaaagttcattaattctgtaaagggaatttaataaaatgcaagcagattagtaaaataatttgttttaaagttagttttaaatattatgctacctctataaaggaccaaaatagtatttttaaaagaatttatcaaagtaactataataaaagtatttaatggtatttgtattgcaaacattgaaattctacctggcagtttaaagaacatcactaacattgcctaaatgtaggaaaatcaaaggtgaagtcacctgcagaaaaaaaaaaaaaaaaaacaaaaaacattcttattaatcttaactaattttctttagtgacagaaattcaaacttcgagacatgtttgaaacattttatttcagtaaatatagctgtcactatggaagtaattactctaaaggaaatctgttttaaaaagccagtataaactgaaaagtaagcaacaaaacatcttcaggaaaagaaaaagaaaggcaaataaaatgtttatatgaaattacgaacattctgggccgggtgtggtggctcatgcctgtaatcccagcacttttggaggctgaggtgggtgaattatttatttgaggtcaggagtttgagactagcttggccaacatggtgaaagcccgcctttactaaaaatacaaaaattagcagggtatggtggcaggcgcctgttatcccagctacttgggaggctgaggcagcagaattgcttgaacctgggaggcggaggttgcagtgagctgagatagtgccactgcattctagcctgggtgacagagcgatacttcgtctccaaaaaaaaaaaaaaaaaaaaaaaaagagagagactaacattctaacagacaaaacaaaaacaaaaaacaaaaaaacacattttacaaaacaataatctaagtgggcaagtaaatactggtgtgacatacatttttagggaaaaactagcaacatgttttgtggagataaatgtaaacacattttacacatacaaatcttttctggcatgggtacaaatgtaactaatcaagtgtaatttataaactataaaaaattttcatctagacaaagaagttattaaaagcattaacaagtagttgaaaatattatccctctaagtattagaaagttaaactgcagtaattaaaagtcatataagaatcaccatggcatagacatggtaggaaaagcattagctttggcgttcaaatattgactcattcacttaccagctgtgttctccagtcaaaaaacttcacctctttaatgtttggtttcatattttttaaaaggtataacaaaaacacctaccacagtgttggtgtgaagactcatttaaagttactagcacagtgtctagtatatacagttgctttgttacattaactccattcaatattctttctttccacaatcgtctgtcactcccggtagaactaagtgattttccatgctcctgcaatgacagcaaatttcccccagtctgctcttccatgaatatctcagacagagaagggtgccttctcatgtgatcaggagtgatgtagctttgagggtggacccaccattcctgccatattccttgggtaggctcatctatcacttgtcttaaaggaagatttgaaacataatagtttcctttgcgcttctgtggatgtctctgaaaaagctggcagggcacacactcttgcaaatttttcatgttgtaatcacccaccagtggtaataatagggttaattatatgaacccatatagtagtgtcatttaaagggaatttaaattctctcttgtccttactctgctccaccatcctccactgtgcttgaaatgcctatcattatccttattcttttgataccaggcatcactacaaaatgtatacacattacctagattttcaagaagtgaaatgtttagtaaccattatgatggaagctgggactaggtgacttattctaaatgtaacaattaccggtagagaatgggataaaggacaactgagtgtggatagagaaaggagaaatggaagagtttggagcacgggccattgcgatggacagacgccaccgcagagagcaaggtttacctgtgtggttggcattcttggaagtgctctggttctattggcagagatccttgctgttagcctcttgcctttcgcccaggctgaagacagagtgctttcccatggttctgtctttttctccaggcaacacttcctgatgactgatcaatattggggtaggaagtcttagacatcttactccagctcagatcagctctgatgggctgcaggctcagtttaggcttcccttgagatttcatcatggctttacttctccctctaccagtcctggttcttcatagccttccacaggtgtcagctgcaaaaaccctcccaagtaagcctcttgtatgctactctgtctcagagtccatttccttgggaacccaacctgctacagcctacttcacacttcttctcaaggctgtcttgaattcctccaacaatagacccgttattatgtgaaagtgtgaggctgggcccaagggatttctttacttattgagcagagcgaagtaacattaatttgtgttataaccactgaatgttctaattccatgaatttaaatgacgcacctgaacatatatgaggcctagattttgctgcatgtccgcaaacctattttgatcaaccagtactgaacttttccccttctcttatgattgtcaaataaccttgttatatgctaaaaataaaagattaaaaaacatacagtgcaaaaaagcaaacaaaagttagctaataatcaattctttgaacgaagcccagtgaaaccaagtttatcaactctatctgaaaataaaaatgtccaagaaaatgacaatcaaaacgattagtgcattaggataagtgtcgtctcttgtagatagataaaaactaaactgaaaccaaaagaatttccagagcaggcagtctctattctgtaacaaggttttctcatgatccagttattttaaggatacctgcaggatcccacaggttttctcagggatttgctggaagctgggaaagtgatgactctcattcactgttgccctgtttccttttccttgacaaattcagttaaccggatggcaagttgtttatgagcatgccttctcgttaagttgacaaaatcttgacaggagtaaaagataatcgaattctctttgtgaagtgatttatggttttaaaataagcagcttttcttgaaagtagtttaccgggttgggcaaaaagaggatgagtattaaaggtcattaggcattcaaggtaccacatttactttctacaatgcaagtagaagaaggggccccaccagtcattctgagacgtgtttccattttctgctactttttagtgagcccaaatgatggtagcaatgattgatttatctcaatcttcttgtatagctgctgaattttctctcatgagtttggctaaaattagagtgtgtgttagtagaatttatatttatagactattgatattattatgtgcattacccattttaaagatggaaacactgaagcccccagaaaggactggctaagctcttacaataagtgatggaatgagctttgaaaacacagggcttaggatttcaaatcaggctgttttccctcaccgcaccatggtgcttcactagcagaaattctttatttttttttttttcctttttttttttttttgagacagtgtctcgctctgtcccccaggccagagtgcagcggcgtgatctcgactcactgcaagctccgccttccgagttcacaccattctcctgcctcagtctcccgagtagctgggactacaggctcctgccaccacgcctggctaatattttgtatttttagtagagacgaggtttcaccgtgttagccaggatggtctcgatttcctgacctcgtgatccgcccgcctcggcctcccaaagtgctgggattacaggcgtgagccactgccccccacccactagcagaaattcttaacagttattgttatctaactacttgactagtgtagattctgctgtgagcttgtggtggttccttctgcagataaagcaaaggaaatctggaaatggccaacctgaatactttatttccaaaactgtatattttatcaggacagtaaggcaatcagtggagtaatgatccttccaaactgctgactacatctagaatcatgcaattattagtttttaataaagatcgtgaccaagctttccttgggaagtaaactttggtcaccacaatatacatagcaagtattaaatatcttgagaggttttctttaattgtttaattcataggaaagccactgggagccttctgggagccagaagcaaattaggagacacagaattatttaataataatggtaataatgactaagttctctcatcaaggtctgtaccatgattgaactacttgctgccataaattttttactattgaataaatatgctttgtgaatattccatacatttgctaagttctcactggtcaggttcagtctttgctattagagtcgagcatctctgcaaagagatttgagccccttgagtagaacataggccacatagtgtggcaaacacatcattagaaactgcctcctattcactctcttaatagcttgagagaattgtacacaaacgtttctaaaatacagatcctaccttaggcttttcggctgcacagctgaatcgcctctgtgaaaatcctgacctcgctttcttctggcctttcttccccgtgaccttgggcaagttgcttaaactgtagccataatttcctcatagatttggtatgagttaaaatgcatagaaagcatgtactacatctagtgcatttctccataatgtgggtggcaattattctaatcccttccacaaagtatttagtctatgacttatttctgcgaaaacccacgaaagtgaaaactaacaatagagaagccttttaaaaacctaacagcctccaaagactgaagaagagagcatggtgtttaatgccagggtggaaagctgtgacagtcagctttttccctggatatggcttattggtattcattattcccaattccttctatatgccttcctttctggatagaatcgatcacatttgctggactccattatgtttggattctatgtataaattaggttctaccaattacaggcacgtgtgcaggattttcaaggtagaagtgaagtggaaactctcttcttactaatgtcagtcttgggcccaagaggccatcaggcacggtgcccataatcagtgttttagtgtctggtcactatcttcagtggagtcaggtgatgtgaatagcagcaggagagacctgatttctggataaggactacagtagtacgtccttggacgcaacagtttaagaggtagttcctgatttattcccctcccctttccaattcattccctgattttgtgcacacctaatacttatattaaatacctctcctgctttgaataaatggaataatttctgtttcctgcattttatcttgttggattaagtatttgataataaaactgattgtgggtctacttacctaagggtataaatttgatattggttacctaaactgtctgaatttgaaagtagagacaatcttattcatgcataatggatcactgataatttttggcttgcaatgagaaaaaaaaatcagcagctgaaattattacctgagatcacctggaatgaagagcctattaaagccaaggctttggtgaccaatgtgattgcttcagaattttatgatgagaatgtaaatataataattgtgaggtaggctgaagcatgtatagaaagaaaacaacaaattcagagttttaaataactggctcaaggcaagtcagaggtccaaggagcatctatgattatctccgacactattttatttcttacagtttcaaggttgctgttgacaaaaaaaaaaaaaaagaaagaaagaaaaaaatggcacacagtgtctgatcttgtttattgctgaaatataatttcagttgaatcacaccctcatcaggtcttctctgtgaaaattagggcattgagtgagaaatatcagaaacccagagcattataatgggaatgttaggtaggtttaaattattctgactatactgaacccccaagtccgatgagccttctttgccagtagaactccttcatctctgttatataaggttgattctgcctttgtggggagaactaacttacctgaggtaactaatgtaaaatagcttgttctgatcacctcactgcctccaagtctagagttagagctcgttcccagtgtctcagtagggcttaaatatgaagtataaactgggaagaaaaggctaaaataacaacaaaaaaacggcaatagtttgttattttttatcaggagaaatctgcggactatgtatggcaacagactcaaagggaggtacaccaggtaggaaaaatcataaccagattgggccatattagccaatatgggtacatatactagagcctgcatgcaatgagcttacccaaccagctcagagtgattataattgttttgctttctggattggttgactgaaatctggactcaatggtgagtcacactaattgaagttgagatggaagaaattccttggcatattgtagaatctgaaatataggttgtatatttattagtcagtttggactgctgtaacaaaaataccatagactgagtggcttaaacaataaacatttattacttccaattcttgaggctgtgaagcccaagatcaagttgcctgcagatctggtgtctggtgatgctcctctttttgagttgtaaacaactgccctcagaaggctctctcctgtctctttttattaggtcattattctcaacatgagggctccacccttatggattaattgcctcccaaaggcctcatcttcaaacactattccactcggggctaggatgtcaacatatgaaatttaggggcacataaatatacagtccataacagggagataggaacattggagtaacccatcatatgattcactttaatgtctaaaaacatctcatgagagagttcagagggtatttcttttttttctttctttctttctttctttctttctttctttctttctttctttctttctttctttctttcttccttccttccttccttcctttctttcctttctcctttttcttttttttgttttgagacaggttctctctctgtcacccaggcaggaatgcagtggcgtgatctcagctcactgcaacctccgcctcctgggttcaagcgattctcctgcctcagcctcctgagtagctgggactacaggcgtgcaccaccacacctgactaatttttgtgtttttagtagagacggggtttcaccatattagccaggctgctctcaaactcctgacctcaggtgatccacccgcctcagcttcccaaatcgctgggtttacaggcgtgagccattgcacctggccagagggtgtttctttaaggcatttattaatgcattgatgaggactctcctcttttagatagagatgaaagtgtagatgctgcccacaaaatgtgctccctgtttaagtggggttggtggaatcctggagtgacagagaacaaacgacaacatttagtccagttgcagcagagtggttgtggtttttattataagcattaaaagtatagtagtaggaaactgtgtttaacctgttttcaagaatggataattgctcattatagcttcatgaataatatagatgttcagccaacttaagttgtacctgaattgtgcaaatgaaggaaagatgcaggtttggcaaattgaagccagactaattatcacaatgtagtatcattaacactcacacaattcccagattcaaggtgcagcagtggatatttctaagacgtcctcatttaacttgatttttttttttaatctatgaagtagttggctatgttttggagaatatacaattaatgtaagtttactcaggtggtaattccagttgctatggttgtggaagatatggtctctacttaaacaaattcaactgagctatggcatctccaatgcaactgtcaatttagaaatttctttctttttatctcaataggcaaagaacactaaagtagtctgctttcactttcattaacacgccccatggagatatcatgaattactctcaggcccttgattatcttatcataccagaggatgtcccacaggtctacagcttaataacatcatgtgactgaagtggaagaactggaaggaaaagataacctagaaactcagtaattcacatgcattcaagaaggtagaagaaaattctcactaaaactcagggacatgccaccttttgcaaatttctgggagtttagtccggcatgtctggaaatcctttccaaagaaactgggcctgttcttgatgggctccctggatgtttgaaggcaacatatactagttttagatgcgctgcttcgatactttggattcaatacttagtaatccctaaagctgtgaatttggagtttgttgctgaggaagagtagactctctagcttttccaggctgtggtccaggctgctgtctttgctacttggttacaatgatccagcaaattcaacggtgcataaaatgtttcaggcagatggtcatgcagtttgtaaaactttgccaatctcgtaggagattaatagcgtagagctctgtggttctgaagcaaaatcatgctttctttcttagattattaatctccttgtgagggacagttcttgtcttgctaatagaaatagatgccgaaagaggctcaactgttggctattggatcccgagtagtaatgcaactgaactgtaatcatgagttttgatcaaccaaccataaagttgagcttgggcagcagaactcctacatcaagtaaaaagtatatatatacacacatatgtgtgtatgtatatgtatacctatatatatgtatacatatgtatatatgtacacatgtgtatatatgtatatacatatatgtatacatgtgtatatatgtatacatgtgtatatatgtatatacatatatgtatatagaagtatatatacacatataaatgtgtgcgtgtatatatatatgattggctgagtgctctatttgttgcttgagcaggtgttcaccctcccacataaattcatcctacttaattggcactttttcttcaacccatacctgcttctcagagaaactatagagaagaggaaacttccaagtgagcaggtctttgaatggtacatctatttgttcactctgcttggaaacaaaggtttcactaagcatggatacaatttggatcattggtaataaggagacttagggaagaaatacgtgttaaggattgttcataagtggcagaacctatgagaatattcatgccacatgttatttcttttcagaagatcttcctagttgaggaatctttcagagattcagtagataaggtgatctattatatggatgtcaagctgtccttttccccagccaccctcctcacgtcttgctcaatgacttcatgaatgaaaagtttatgatagcaaagatgttggtaacatatgcattcaacaacatagttcatttggtagagtcaatactgagtacctaagagcccaattctgatactctcatattgcactattcactaggaggttcagcaatctatttagtggcaggtggtgacagtggatttcttctcttatggaaaggacaactatccatattgaaatagacaattactctgtatatagatttgcctgccttgtaaccatgcctttgcatctgtttacttacttaatgggacattattatggtgacccatacaacatcacttttaaacagtggatttatttatggcacagaggttaagaaaatgaactcaggccggtaagagtcactgttatcattcaccacaagttgcctgaagcaaccagcctttaaaatactataatggactgtggaaaaatcagttagagtgtcacttggatgaagctgtaattggaagttgaggacactgtcattcagaataagatgtatgatctgaattagtggccaatacctggccctttttgtctgtagttaaatgtgatgtgaggaaataccaaagctcatggtaatctcagatgtcattggacagagaagctcacagaccaaattaagatgctgaagtcagatgacttatgaatcaatttaaaacaaatcatgagaaggaagggaggaaaggatgaagtaggtttgcagtcctcttagaagaaggtaaaagtgggtagaatggaccatagtacttgaatcttgagttcagaatcagatattcttcctccttggcctcttctgtttcagggcttctcgaatttttttttcttttatttattttttgagatggagtcttgctctaccacccaggctggagtgcagtggcacaatcttggctcaatgcaacctccttctcccaggttcaaggaattctcctgccttagcctctcgagtagatgagattgcaggtgcccaccactacacccagctaatttttgttttttttggtagagatggggtttcaccatgttggccaggctggttctgcctcttgactttatcatccttcctctctgatggtatggttatgtggaccagaactgaagtttaaggaaggggcttaagatatggaagttgcctgggaccaacatactctgtccaagagacacagtgacacatacatgcacagctgaccaaagctatagcttcccaattacttgatgaacagctatgaatgttgtttctttttcttagacaaagtgcatatctgctcaagatggatgtcactaatgtgcaactgatccacaacctcatacaattttagtatctcatatgcttcgtgtacatgtcatgtatgaaggtgcctgaggtaccccatgtatatatagcatgttatgaatgttaggcatattttggtctttcctttctatctatgtttagtatgcacaagacatacttattttacctttgcttaatatgccttatagtttactaacttacttaacagaggagttttgttttcttgttatctgtagcagaattgaatgttgcccagcaatataatatatgtaaatcataccaaattatatgtgtttaaaactcaagggatggaactgggagagataacactcatttttcacctacgcatcactcacaatatttagctctccttccacatgatgttgggatatgatggcttagaagtcttactagtcaatggaagaatgtttctcttccaagaggacacaacaatgattcatttgaactctatgattgccactgaataatttggtctttccatgcctataagcaaagaagttacgtgtattaactggaacaattggtcctgattattaaggagagtaagtttttcctacaaagagatgtatgtatgggacccagggaattttacagaaacatctctaagaacttccatgcttttttgtcaagttaaatggacaactatcgcaaccacatacaggcagaaccactaagagtaaaaacccctcaggaattaggattcgggtcaccctgcttggcagagccctaattagtcacagtgctaggtgaggtcaaaagtaatatgaaataggaagaggataaacagtgtcataaacaactgtgatcttatggccagttgcagagtaagaaattaataactactcctgttctcttctttgccttgttatgcatgtactgactttttacctctttctttttccctacaattttataaaaatggtgatacatttgtaatttgtccctcaaattacagactatcagcttgaaactatgattggaattgaaggttaaagaaaacccagctatagattcagtgactaacaaaatttggggacagtgtaagcctcattctaattgcataaggaatagttactgtatgttaggcaggtgcatgttgttattgctacttttttcaagtctaagttctaggtacaaagtgtacactgtactggatttagtatttgacatctattttcacatccttctaggagtcatcttgtactaaagaagctgtaagcccacatgtgcatttcccagagtcccttgttgctagggggctgaatgcgaacgaggtttcaccattaaatatacttatacatttggaaaggcaaaaatgaggcagaggccatctttgtgttgctggtttgattagcaagtttgctaagacatgagtgtcaagggaagttgaggtggagatggtggctatatggtgcagctgttttcctgattcccagagagcaatcactcagatgtgctcttgtacttaatacttccactggcagtcccttttctttcctcttttagttcttcctataattttctaagtgtataattgcccattttccctaaatacctaggtaggttttatttcctaaactggacctcttaccaaacacagatgagatgtactgtctgccaccctaactgcccataggactccaccaaggatgccaactctaagtggtcatttacctctgtgattgtgtttttaatgcctgcctcccattaagttataagatccaggaatttaataatttattttgataaggacttaacacaatgcttggcacataagaggaattaaataacatttttctgaatgaatagattttaaaccatgtgtgagcagtcacagaattcactgatctattataatttaccaattcctttgcatcatagcacccatgcaaaatattttggctacagggagtgctccaattttgatactctccctgtcaatatgcctattaccccaatataatttaagattgacagggagagcatcagtattctgcagtctgattgcagaagcatatatgtaaaaatataccttttagaaatgattttagaatctggaaatttacaaactattaattttcttttctacagtttcctccagaaagcccctatgtatttattccggttaacaattttacttgagtagaaatcacttgactcaaattttgatgatttaatagctcattgaaagaactagcctgaagcagataaaatatgttgcagatgctgtaactcttatttgcatccattggtcttttggtttatgtgctttaataatttgaaaaacaagaagataatcaggaaccaagatggatatgtgtgtcttgaggcagaacttaattcaaaattgttcagtgttttgtcagatgaactccttaaccacatttgttatcagtagcacacaatatattggattaagtttttgaatgatgtgcaaagatgatgccagattgatcctaacaaacataaagctcagaatcaaaaccagaatgttgttttgatcatactggttttaggcaaaggattttaagataaattctttcatactggaatttgtgatactatccacacttttcctcactataaaatttaatgaaccttatatcattaatatttttgtgtcaatggtgagttcttcttttttctttacctgagttgtatcaacagtttcaaaggagagagagtgtttttggtaaaggcaataaattattttttaatgtacatcttatacacataaaatactttctcatattctgaagaatgaagcatttctgtcctaggtgattataaagtttgttgctatagtatttcattattttttattagaaaatattttaataacacaagaaagtaaagaaagtaatacaaggaacactcatgtacacatcaaccagctttgtctgaaattaatatcatcctaaatttgcttcattgcttttattcattaaaaattacaaatacaattgaagcccttgaacccctcacctgtcacactatcctctttgctttgtcaaatacttactacgttcatatgtattgatgtacagtatagccttattttacgtgttttaaatttatacataaacaatttcaaactctatgaatcattctacattttgctattttgtgttcaatatcctgttgtcgaaacatttccatgttcctttaattcattcattggcaatacagtataatatgttattgtatagatacatatatatttaaaatatataggtattttaattttactgtattatattgttgaacatttccactgttttacattttttagtatcataaactatccttcaatgaacactcttttaatgtcatctggtgtcaggtatgagagttcctaaacacacacagtgtatctagaatttgaattgctaaaattgaacattcaattttcatttttaactttactaaatactgtaaaattgttctctgtgtgccaattttctttaccactggtaaaatgtgagtttccactttcacatgcttgccatttcctattgcaaaacatttaagtatttatgtttgtgataaaaatggagtcttattttgattttaatttgtacttccccagttcctgttgtgtttaagtttgttttttatttatttattatctgttcatgattttcttcattttttctcttactggttcatattctctatacatgctgaatggtgttagctagctatattctttgcaataattattaaaattttctttttcttttctttttttaagagacaaggtcttaccctgtcatccaggctaggatgcagtagcacgatcttagcttactgtagactccaactcctgggctcaagagatactctcctgccttggtttcctaaagtgctgggattataggcctgagccactggcctgttttgtttttcttaatataaggctatacatttccctctaagaactaatttagctgcctccctcaatcttttatatgtaattttaagttaatattcagctttaaacttttctaattcaattatcttttttgattaatcaattgtttaggataatgtctcaaaacttttttggtatatagatatctttaattacatatttctaaattattttcatttaagtcaaaggacatagcctggaaagtattcgtttgtttgtgtgtgtgtgtgtgtgtgtgtgtgtgtatttgttgtgatttgtttttatgttttagcaatttggtcagttgctttaaattagagattttgcctgattgttatctacagaattctatgcaactccattacattaagctaatatcgcttcattttatctctcatcacattttgtttttgtttgtttgtgctgtgaattattgagataatgggttaaatgtatgtgcctgtgtccatttatttcaataatatcttatactatgactctatattattaattgggaagattttagaatacttaacgtatgttttctaattaagcagtgacccacttaatttctcagaagtacattttgttttattgctttaaactctattttgattgtttttaatctgatcatacagacttttattttggctgatattttcgttacttttttcttatttttatcctttctatgtctttatgattaaattgtgtgccttacaaggaggttttactttttccctcaatggatttggaagatatatgttctatttttatttctgttgttggtttcctgaaaatctcagcatgcatatttgacttaaattctaaaattaataaacactttcttaatttcctgaacaataaaaggaatttcaaacatattattggtcatcatcacctgcctattaaatatgctttcccactagggctggggctaatggaaaatacatcttaaaaagtcttctgtgtaaaacatgggactcaaaacaacactaggaaaatagcgtagatcagataattctcattaaatcagctgtttattaaaaaaagcaatgagcaaggaacaacaaagtctccttaggaggcaaaacaaagtattattaaaagtatgtttgatgttgctgaagattctttcataaacatattaaagtcaattataattctgtttttaatgaccttattagctcagatgatgttttaatgatttgagtttatgtattatttgaagaatctctaaatagcactattaagtgctctgatatgcagtaatatttatattgagaagcaacttttttaattgtttggggaaagacttctatttcttatgacatgcttccttttcattgaggaatacccaagataccaagttttctttcagaagtaatttgcattttccaccttgaagttgtatttgccattttgtttgttgccataggaaaattcttttttgagaatttttttcttataacgttcttcatctgattaaacaaacaaaaaacccatctttatttttagactaaaagcctttgaataaaatattatacaactttaaataaatttaagatgacattatgacttattaggccacagttaaatatgagcttcatctattagtgagtcaatcataggattttcacacatggcttttgttcacagtaagttatatcaattaagttgcttagaatgaacatatagctgaactaataagcatgaaatattttcactgatttataagaatccagaaattatcaatgagttttctttttctattatttaaaaaagtttttgcttggcaaatcttcccctctaggagattaaagtattttttgctcattaatcaatgtaagaacaccttactttacattcattgaactctgaggttatagaactgtgaacttttcgatttgttcggcttggggaatgtcatagttcattctgtgagtggaagttgcctttaaccacatgagaacaaataagggaatattaaggttttaactcaaggcagctgatatgcaatggctgggataatggccattacctaaaagaaagaaggcagcaaatggttccagacatttataattatgcatctgaagtcagaacaccttttctttttaaacattttcaatttgtgatctgcttgaggacttgtacatagataggctcaagatattttgagtcacatatgtaaatgaaatgttttgagcaaagttgtaaccctgcccacaaaatagctttgctagggaacagatgtaacttggagaagtaccaattttgtcattctagatgagaaatcttctggtgccatcaatgggatgcaatttggctagtcacacctgggtgaccaatatccggaggctctacgtcaagtcattgaacatggatggatgctccattaagtcatttaaaataaacttcctagcaagtgatctctagcatctcaatttaactgtatcctttggagatttaaggaaaactgacaaagct

SEQ ID NO: 134455 - DNA, 3278 bp, Homo sapiens
  Payload ID: 6263
  Gene Symbol: FLRT2
  Gene Name: fibronectin leucine rich transmembrane protein 2
  Uniprot ID: O43155
  ENST ID: ENST00000554746
  CDS Start-End: 706-2688
catcagtgcccgcaaatctccgcgccaaggcgctgagctactcctttccgaggtgcgcctctggtcctccgtccctggtgcccagcagcggcgaggcggcatctccgctcccgccgccgtgtccaccgagccctgggatcagggtggcagttctcaacgatgggcaggagggacctcggcggcgacccctaaaacaataccatgccccgggatccccgctgctgccgcgccagcgtcttccctttccacctccctgaccctgtcggattcggatgagcccattgcaaggagaagacgcagccgtcaggtaaaaggggctgcgttgccagattgcagattgagcttaaccaagaagttcgtaggctaatcaaggctggcttgacctacaaaagaagaagagagttctgcctgcccacttgggcttgtgttgacacggctgataacttgccatcacctgttgccagtgtggaaaaattctccctgttgaattttttgcacatggaggacagcagcaaagagggcaacacaggctgataagaccagagacagcagggagattattttaccatacgccctcaggacgttccctctagctggagttctggacttcaacagaaccccatccagtcattttgattttgctgtttattttttttttctttttctttttcccaccacattgtattttatttccgtacttcagaaatgggcctacagaccacaaagtggcccagccatggggcttttttcctgaagtcttggcttatcatttccctggggctctactcacaggtgtccaaactcctggcctgccctagtgtgtgccgctgcgacaggaactttgtctactgtaatgagcgaagcttgacctcagtgcctcttgggatcccggagggcgtaactgtactctacctccacaacaaccaaattaataatgctggatttcctgcagaactgcacaatgtacagtcggtgcacacggtctacctgtatggcaaccaactggacgaattccccatgaaccttcccaagaatgtcagagttctccatttgcaggaaaacaatattcagaccatttcacgggctgctcttgcccagctcttgaagcttgaagagctgcacctggatgacaactccatatccacagtgggggtggaagacggggccttccgggaggctattagcctcaaattgttgtttttgtctaagaatcacctgagcagtgtgcctgttgggcttcctgtggacttgcaagagctgagagtggatgaaaatcgaattgctgtcatatccgacatggccttccagaatctcacgagcttggagcgtcttattgtggacgggaacctcctgaccaacaagggtatcgccgagggcaccttcagccatctcaccaagctcaaggaattttcaattgtacgtaattcgctgtcccaccctcctcccgatctcccaggtacgcatctgatcaggctctatttgcaggacaaccagataaaccacattcctttgacagccttctcaaatctgcgtaagctggaacggctggatatatccaacaaccaactgcggatgctgactcaaggggtttttgataatctctccaacctgaagcagctcactgctcggaataacccttggttttgtgactgcagtattaaatgggtcacagaatggctcaaatatatcccttcatctctcaacgtgcggggtttcatgtgccaaggtcctgaacaagtccgggggatggccgtcagggaattaaatatgaatcttttgtcctgtcccaccacgacccccggcctgcctctcttcaccccagccccaagtacagcttctccgaccactcagcctcccaccctctctattccaaaccctagcagaagctacacgcctccaactcctaccacatcgaaacttcccacgattcctgactgggatggcagagaaagagtgaccccacctatttctgaacggatccagctctctatccattttgtgaatgatacttccattcaagtcagctggctctctctcttcaccgtgatggcatacaaactcacatgggtgaaaatgggccacagtttagtagggggcatcgttcaggagcgcatagtcagcggtgagaagcaacacctgagcctggttaacttagagccccgatccacctatcggatttgtttagtgccactggatgcttttaactaccgcgcggtagaagacaccatttgttcagaggccaccacccatgcctcctatctgaacaacggcagcaacacagcgtccagccatgagcagacgacgtcccacagcatgggctccccctttctgctggcgggcttgatcgggggcgcggtgatatttgtgctggtggtcttgctcagcgtcttttgctggcatatgcacaaaaaggggcgctacacctcccagaagtggaaatacaaccggggccggcggaaagatgattattgcgaggcaggcaccaagaaggacaactccatcctggagatgacagaaaccagttttcagatcgtctccttaaataacgatcaactccttaaaggagatttcagactgcagcccatttacaccccaaatgggggcattaattacacagactgccatatccccaacaacatgcgatactgcaacagcagcgtgccagacctggagcactgccatacgtgacagccagaggcccagcgttatcaaggcggacaattagactcttgagaacacactcgtgtgtgcacataaagacacgcagattacatttgataaatgttacacagatgcatttgtgcatttgaatactctgtaatttatacggtgtactatataatgggatttaaaaaaagtgctatcttttctatttcaagttaattacaaacagttttgtaactctttgctttttaaatcttaaaaaaaaaaaagttgctgaagtactgtacagggttgtacaatgagaacccaatgccaaggcaaaaagaacgagtgatttttccttaggatacacatcaaccactttgctgttgaagctgtcagaataaattcctggtggtcagatgaaagggcagattaaatggactcatcagggtaagaggaataatatgggtaaaacaagaaatggcccgatagtttcacactattcctatacctccaggtccggaagacaggtaaaaaattctataatgtaagaatggaggtagttaccctgatttgaccctgtgtgggaaatgctgaaagcaccaggaggaagccggttcccgtgagataag

SEQ ID NO: 134456 - DNA, 3971 bp, Homo sapiens
  Payload ID: 6264
  Gene Symbol: FLRT3
  Gene Name: fibronectin leucine rich transmembrane protein 3
  Uniprot ID: Q9NZU0
  ENST ID: ENST00000341420
  CDS Start-End: 460-2409
ctgtgtgcagtaaactggaatgctctccctcgctcactcctcagtgtaggagtgatctgaagcaggacaagctcagcctgcagctgccgtgggctttgtgtggactggacgcagagcttgggagacgggggagggctattactccaattcactgtcaatggaattacagctatagcggcagtgtatataggattgctttttctcgtcttcctggagatgctcagtcccagtatattttaaggaagagaaatataaaggaaatttagtatgcctccttttctttaaatgaagaatttagtttcctttacttcttaaaagagaatacctgttcttgtataacgtgactgcaccagacattctgaaaaatcagcaagaagcaaaagctggaaatagctatttcacagcagggttctgaagtaacggaagctaccttgtataaagacctcaacactgctgaccatgatcagcgcagcctggagcatcttcctcatcgggactaaaattgggctgttccttcaagtagcacctctatcagttatggctaaatcctgtccatctgtgtgtcgctgcgatgcgggtttcatttactgtaatgatcgctttctgacatccattccaacaggaataccagaggatgctacaactctctaccttcagaacaaccaaataaataatgctgggattccttcagatttgaaaaacttgctgaaagtagaaagaatatacctataccacaacagtttagatgaatttcctaccaacctcccaaagtatgtaaaagagttacatttgcaagaaaataacataaggactatcacttatgattcactttcaaaaattccctatctggaagaattacatttagatgacaactctgtctctgcagttagcatagaagagggagcattccgagacagcaactatctccgactgcttttcctgtcccgtaatcaccttagcacaattccctggggtttgcccaggactatagaagaactacgcttggatgataatcgcatatccactatttcatcaccatctcttcaaggtctcactagtctaaaacgcctggttctagatggaaacctgttgaacaatcatggtttaggtgacaaagttttcttcaacctagttaatttgacagagctgtccctggtgcggaattccctgactgctgcaccagtaaaccttccaggcacaaacctgaggaagctttatcttcaagataaccacatcaatcgggtgcccccaaatgctttttcttatctaaggcagctctatcgactggatatgtccaataataacctaagtaatttacctcagggtatctttgatgatttggacaatataacacaactgattcttcgcaacaatccctggtattgcgggtgcaagatgaaatgggtacgtgactggttacaatcactacctgtgaaggtcaacgtgcgtgggctcatgtgccaagccccagaaaaggttcgtgggatggctattaaggatctcaatgcagaactgtttgattgtaaggacagtgggattgtaagcaccattcagataaccactgcaatacccaacacagtgtatcctgcccaaggacagtggccagctccagtgaccaaacagccagatattaagaaccccaagctcactaaggatcaccaaaccacagggagtccctcaagaaaaacaattacaattactgtgaagtctgtcacctctgataccattcatatctcttggaaacttgctctacctatgactgctttgagactcagctggcttaaactgggccatagcccggcatttggatctataacagaaacaattgtaacaggggaacgcagtgagtacttggtcacagccctggagcctgattcaccctataaagtatgcatggttcccatggaaaccagcaacctctacctatttgatgaaactcctgtttgtattgagactgaaactgcaccccttcgaatgtacaaccctacaaccaccctcaatcgagagcaagagaaagaaccttacaaaaaccccaatttacctttggctgccatcattggtggggctgtggccctggttaccattgcccttcttgctttagtgtgttggtatgttcataggaatggatcgctcttctcaaggaactgtgcatatagcaaagggaggagaagaaaggatgactatgcagaagctggcactaagaaggacaactctatcctggaaatcagggaaacttcttttcagatgttaccaataagcaatgaacccatctcgaaggaggagtttgtaatacacaccatatttcctcctaatggaatgaatctgtacaaaaacaatcacagtgaaagcagtagtaaccgaagctacagagacagtggtattccagactcagatcactcacactcatgatgctgaaggactcacagcagacttgtgttttgggttttttaaacctaagggaggtgatggtaggaaccctgttctactgcaaaacactggaaaaagagactgaaaaaaagcaatgtactgtacatttgccatataatttatatttaagaactttttattaaaagtttcaaatttcaggttactgctgcgattgatgtagtggagatgcctgaacacaattctatattttagtattttttagtaatttgtactgtattttccttgcaaatattggagttataaaccatttactttgtgttctactgagtaagatgacttgttgactgtgaaagtgaattttcttgctgtgtcgaacaatcaggactgcattcatatgagatccttgtagtataagcacaggccatttttcactttggtattaataaaatgtaaaaaaaaaaaactggctgaatggctgaatgagataaaatttaattttaaaaaatggttatgaaataatgttccaattattaaatttgtattatcccagtggtattcaataaatcaaaatgtgtgaagtaatgggcaatatcaaacttcctgcatatctccatttttgctctaggcaaattaattatccttaaaaaagttaagcatatcttctgaactgaatacatcagctggcataaaaggagcatgaagtctgttaaagccattgtcagcaaagctttgaaaataaaggacttcacaaaaacggtaatgtaaatgtgcttccaagttggggggaaaatgtgtacttaggaaaacatggaaacttagacttgtatagtgtaatgaacacaaataccaaaactgcattttggttttgcctataccatcctgatttttgaaaagtgaattataaacacaaaattgttagtgtttatgatgtttttatcataaaggatgtcagagaaactttatgcatattaaaaatgtaatgtaattataagcgattcccctcaacaatccagagaaagtagttctttaaataagagataatttaaagaaaaataaatactagacatcaaatttagatctggtttatgtcaaaggttttaacactgtacataaatgttcaatttacttttacaaagatcaagaatactgcccattactgtcacaattttccagatattatataatgaactcgtaatgtaacatttccttctagcttcctactgaattgtgagctgttacttgttgaaaaaccatatcacttttctgttgccatgattttttttttttcaacaaaaaaccaaagtgcattgtacgccctttggccagtcttgtatgtgccttgatccaacgctacatgtattcagcttttaaaactccacaaatttttcatactccttaaatatgaaaaattatggtcttattgctgaataaaacttttaaaaagtacagaataattgtgcttgctttttcaggattgtgttactatcactaagtagcaaattgcccagcacattagtcctaaacgtcccatgtatttttctaggcataaaaataaaagttggctaaaaattttaaaaaatcaa

SEQ ID NO: 134457 - DNA, 4776 bp, Homo sapiens
  Payload ID: 6264
  Gene Symbol: FLRT3
  Gene Name: fibronectin leucine rich transmembrane protein 3
  Uniprot ID: Q9NZU0
  ENST ID: ENST00000378053
  CDS Start-End: 258-2207
agtaaactggaatgctctccctcgctcactcctcagtgtaggagtgatctgaagcaggacaagctcagcctgcagctgccgtgggctttgtgtggactggacgcagagcttgggagacgggggagggctattactccaattcactgtcaatggaattacagctatagcggcagtgtatataggattgctttttctcgtcttcctgggttctgaagtaacggaagctaccttgtataaagacctcaacactgctgaccatgatcagcgcagcctggagcatcttcctcatcgggactaaaattgggctgttccttcaagtagcacctctatcagttatggctaaatcctgtccatctgtgtgtcgctgcgatgcgggtttcatttactgtaatgatcgctttctgacatccattccaacaggaataccagaggatgctacaactctctaccttcagaacaaccaaataaataatgctgggattccttcagatttgaaaaacttgctgaaagtagaaagaatatacctataccacaacagtttagatgaatttcctaccaacctcccaaagtatgtaaaagagttacatttgcaagaaaataacataaggactatcacttatgattcactttcaaaaattccctatctggaagaattacatttagatgacaactctgtctctgcagttagcatagaagagggagcattccgagacagcaactatctccgactgcttttcctgtcccgtaatcaccttagcacaattccctggggtttgcccaggactatagaagaactacgcttggatgataatcgcatatccactatttcatcaccatctcttcaaggtctcactagtctaaaacgcctggttctagatggaaacctgttgaacaatcatggtttaggtgacaaagttttcttcaacctagttaatttgacagagctgtccctggtgcggaattccctgactgctgcaccagtaaaccttccaggcacaaacctgaggaagctttatcttcaagataaccacatcaatcgggtgcccccaaatgctttttcttatctaaggcagctctatcgactggatatgtccaataataacctaagtaatttacctcagggtatctttgatgatttggacaatataacacaactgattcttcgcaacaatccctggtattgcgggtgcaagatgaaatgggtacgtgactggttacaatcactacctgtgaaggtcaacgtgcgtgggctcatgtgccaagccccagaaaaggttcgtgggatggctattaaggatctcaatgcagaactgtttgattgtaaggacagtgggattgtaagcaccattcagataaccactgcaatacccaacacagtgtatcctgcccaaggacagtggccagctccagtgaccaaacagccagatattaagaaccccaagctcactaaggatcaccaaaccacagggagtccctcaagaaaaacaattacaattactgtgaagtctgtcacctctgataccattcatatctcttggaaacttgctctacctatgactgctttgagactcagctggcttaaactgggccatagcccggcatttggatctataacagaaacaattgtaacaggggaacgcagtgagtacttggtcacagccctggagcctgattcaccctataaagtatgcatggttcccatggaaaccagcaacctctacctatttgatgaaactcctgtttgtattgagactgaaactgcaccccttcgaatgtacaaccctacaaccaccctcaatcgagagcaagagaaagaaccttacaaaaaccccaatttacctttggctgccatcattggtggggctgtggccctggttaccattgcccttcttgctttagtgtgttggtatgttcataggaatggatcgctcttctcaaggaactgtgcatatagcaaagggaggagaagaaaggatgactatgcagaagctggcactaagaaggacaactctatcctggaaatcagggaaacttcttttcagatgttaccaataagcaatgaacccatctcgaaggaggagtttgtaatacacaccatatttcctcctaatggaatgaatctgtacaaaaacaatcacagtgaaagcagtagtaaccgaagctacagagacagtggtattccagactcagatcactcacactcatgatgctgaaggactcacagcagacttgtgttttgggttttttaaacctaagggaggtgatggtaggaaccctgttctactgcaaaacactggaaaaagagactgaaaaaaagcaatgtactgtacatttgccatataatttatatttaagaactttttattaaaagtttcaaatttcaggttactgctgcgattgatgtagtggagatgcctgaacacaattctatattttagtattttttagtaatttgtactgtattttccttgcaaatattggagttataaaccatttactttgtgttctactgagtaagatgacttgttgactgtgaaagtgaattttcttgctgtgtcgaacaatcaggactgcattcatatgagatccttgtagtataagcacaggccatttttcactttggtattaataaaatgtaaaaaaaaaaaactggctgaatggctgaatgagataaaatttaattttaaaaaatggttatgaaataatgttccaattattaaatttgtattatcccagtggtattcaataaatcaaaatgtgtgaagtaatgggcaatatcaaacttcctgcatatctccatttttgctctaggcaaattaattatccttaaaaaagttaagcatatcttctgaactgaatacatcagctggcataaaaggagcatgaagtctgttaaagccattgtcagcaaagctttgaaaataaaggacttcacaaaaacggtaatgtaaatgtgcttccaagttggggggaaaatgtgtacttaggaaaacatggaaacttagacttgtatagtgtaatgaacacaaataccaaaactgcattttggttttgcctataccatcctgatttttgaaaagtgaattataaacacaaaattgttagtgtttatgatgtttttatcataaaggatgtcagagaaactttatgcatattaaaaatgtaatgtaattataagcgattcccctcaacaatccagagaaagtagttctttaaataagagataatttaaagaaaaataaatactagacatcaaatttagatctggtttatgtcaaaggttttaacactgtacataaatgttcaatttacttttacaaagatcaagaatactgcccattactgtcacaattttccagatattatataatgaactcgtaatgtaacatttccttctagcttcctactgaattgtgagctgttacttgttgaaaaaccatatcacttttctgttgccatgattttttttttttcaacaaaaaaccaaagtgcattgtacgccctttggccagtcttgtatgtgccttgatccaacgctacatgtattcagcttttaaaactccacaaatttttcatactccttaaatatgaaaaattatggtcttattgctgaataaaacttttaaaaagtacagaataattgtgcttgctttttcaggattgtgttactatcactaagtagcaaattgcccagcacattagtcctaaacgtcccatgtatttttctaggcataaaaataaaagttggctaaaaattttaaaaaatcaacatcttgaggttgtgtatcattttacttcaaagagttcagtgtttcatgtataaatgtatttcctcttacttatacactgtatagatggaaaatttaagaaatggtttcaaagcctttctctcttaggcgcactgctgccactgtcctgatactttttaaggtggtctttgaaaaactgtttttttaaaatagccttttagtagagtgagttggcatttgtgatactgtgaaatacacactttctctttgtccctgtttctggcatacaactcctaaaatccttgcaatcttcaaagtgatatattttcatatgctaatgagttcactgatagctggcaggccctaggtagcttcaagataaagtctgatcattgaaaagaccaagacatgattatagggttgggacttacaaccccaaaccctaacctccagagagggcgaagtggatgaagattaagttgatcaccagtgaccagtggtttaatcaagcatgcctatgtaatcaagcctccataaaaaaacaaaaggtcaagatttggagagcttccagattgctgaacatgtggtggttcctgcaggatggcatgcctggagagggcatggaagctctgtgcccacctagacctcaccttatgtttcctgccatctggatcctttgtaacatcctttataatacgtcagtaaatctgtttccttgcattttgtgagctgttgtagcaaattaatagaacacaaaaaggggatcctgggaaaccaaacttgaagctgactagtcttgcaactggtgtctgaagaggaggcagttttgtgggaataagccctcaacctgtgggatatgacacaatttccaggtagacagtgttgggattaaactgaattggaggacacccagctggtatctgctgaagaactgattgcttgcgtggtgtatggggcaaaacttgttaagacaagtcttctatgttgattattgttgaatgagagaattaaacacacatacacactt

SEQ ID NO: 134458 - DNA, 522 bp, Homo sapiens
  Payload ID: 6265
  Gene Symbol: FANK1
  Gene Name: fibronectin type III and ankyrin repeat domains 1
  ENST ID: ENST00000368689
  CDS Start-End: 65-466
tgtcacacagataaatatgagtcacaggagtttgttgtacatagtattacatcacccagaaatcatgccaccctcaaagcctcatccacctgtcgtgggcaaagtgactcatcacagcattgaattatactgggatctggaaaagaaagccaaacgccaaggacctcaagagcagtggttcaggttctcgattgaagaagaagaccccaaaatgcacacttatggtatcatttatacgggatatgcaacgaagcatgttgttgaaggtctggaaccaaggacgctgtacagatttcgcctgaaggtcaccagcccctctggggagtgtgagtacagcccactcgtctcagtgtctacaaccagtagcatttggcttggaggagagcccataagtagtgagcacttgcaccgggctgtcagtgtgaatgatgaagatttgctggtccgaatacttcaaggagggtgagagaactctgtcagttgttttttttcccccatgcctataaagtgcatagaaataca

SEQ ID NO: 134459 - DNA, 949 bp, Homo sapiens
  Payload ID: 6265
  Gene Symbol: FANK1
  Gene Name: fibronectin type III and ankyrin repeat domains 1
  ENST ID: ENST00000368691
  CDS Start-End: 85-933
gttccttcttccacatgtatccctcagtatctagaaccctgaaattggtttctctaagaaaaccaagaggcccataaggaaatcatgccaccctcaaagcctcatccacctgtcgtgggcaaagtgactcatcacagcattgaattatactgggatctggaaaagaaagccaaacgccaaggacctcaagagcagtggttcaggttctcgattgaagaagaagaccccaaaatgcacacttatggtatcatttatacgggatatgcaacgaagcatgttgttgaaggtctggaaccaaggacgctgtacagatttcgcctgaaggtcaccagcccctctggggagtgtgagtacagcccactcgtctcagtgtctacaaccagtagcatttggcttggaggagagcccataagtagtgagcacttgcaccgggctgtcagtgtgaatgatgaagatttgctggtccgaatacttcaaggaggccgtgttaaggttgatgttcccaataagtttggctttaccgctctgatggttgctgcccagaaaggatacaccagtctaatgctggcgtgctatgcgggacacctagatgttgtgaaatatctccgaagacatggcgcttcttggcaggctagagacctgggaggctgtacagctctgcactgggctgcagatggaggccactgcagtgtgattgagtggatgataaaggatggctgtgaggtagacgtcgtggacactggttcaggatggaccccactcatgagagtctctgcggtgtcgggaaatcagagggtggcctctcttctaattgatgctggggccaatgtgaatgtgaaggacagaaatggaaagacgccccttatgagtgtagtctccttattagaagaaaggaaaaaaaagcagaggccaaagaagtcttgtgtctgctgatgagagcaccactcat

SEQ ID NO: 134460 - DNA, 1294 bp, Homo sapiens
  Payload ID: 6265
  Gene Symbol: FANK1
  Gene Name: fibronectin type III and ankyrin repeat domains 1
  Uniprot ID: Q8TC84
  ENST ID: ENST00000368693
  CDS Start-End: 105-1142
cacttcgcctccgggttgtcagggcaaccgtagcgacgccggccctggctgagaggcgttaggagtccgggggttcgcccgcggaggccggggagcagccgaccatggagccccagaaaatcatgccaccctcaaagcctcatccacctgtcgtgggcaaagtgactcatcacagcattgaattatactgggatctggaaaagaaagccaaacgccaaggacctcaagagcagtggttcaggttctcgattgaagaagaagaccccaaaatgcacacttatggtatcatttatacgggatatgcaacgaagcatgttgttgaaggtctggaaccaaggacgctgtacagatttcgcctgaaggtcaccagcccctctggggagtgtgagtacagcccactcgtctcagtgtctacaaccagagagcccataagtagtgagcacttgcaccgggctgtcagtgtgaatgatgaagatttgctggtccgaatacttcaaggaggccgtgttaaggttgatgttcccaataagtttggctttaccgctctgatggttgctgcccagaaaggatacaccaggcttgtgaaaatcctagtttctaatggcacagacgtgaatctgaagaatggaagtggcaaggacagtctaatgctggcgtgctatgcgggacacctagatgttgtgaaatatctccgaagacatggcgcttcttggcaggctagagacctgggaggctgtacagctctgcactgggctgcagatggaggccactgcagtgtgattgagtggatgataaaggatggctgtgaggtagacgtcgtggacactggttcaggatggaccccactcatgagagtctctgcggtgtcgggaaatcagagggtggcctctcttctaattgatgctggggccaatgtgaatgtgaaggacagaaatggaaagacgccccttatggtggctgtgttaaataatcatgaagagttagttcagttacttcttgacaaaggggcagatgcaagtgtaaaaaatgagttcggcaaaggtgtcctagaaatggccagagtttttgacagacagagtgtagtctccttattagaagaaaggaaaaaaaagcagaggccaaagaagtcttgtgtctgctgatgagagcaccactcatctgcgaaacgcacgtaaaacaaagtgaaccgtgactgttaaactagggatgggaaattctgcatcttggggggctgtacatttatttatttagttgaagattcactgatcccactttgaaatacatctttttacct

SEQ ID NO: 134461 - DNA, 1296 bp, Homo sapiens
  Payload ID: 6265
  Gene Symbol: FANK1
  Gene Name: fibronectin type III and ankyrin repeat domains 1
  ENST ID: ENST00000368695
  CDS Start-End: 123-1142
cacttcgcctccgggttgtcagggcaaccgtagcgacgccggccctggctgagaggcgttaggagtccgggggttcgcccgcggaggccggggagcagccgaccatggagccccagaaaatcatgccaccctcaaagcctcatccacctgtcgtgggcaaagtgactcatcacagcattgaattatactgggatctggaaaagaaagccaaacgccaaggacctcaagagcagtggttcaggttctcgattgaagaagaagaccccaaaatgcacacttatggtatcatttatacgggatatgcaacgaagcatgttgttgaaggtctggaaccaaggacgctgtacagatttcgcctgaaggtcaccagcccctctggggagtgtgagtacagcccactcgtctcagtgtctacaaccagagagcccataagtagtgagcacttgcaccgggctgtcagtgtgaatgatgaagatttgctggtccgaatacttcaaggaggccgtgttaaggttgatgttcccaataagtttggctttaccgctctgatggttgctgcccagaaaggatacaccaggcttgtgaaaatcctagtttctaatggcacagacgtgaatctgaagaatggaagtggcaaggacagtctaatgctggcgtgctatgcgggacacctagatgttgtgaaatatctccgaagacatggcgcttcttggcaggctagagacctgggaggctgtacagctctgcactgggctgcagatggaggccactgcagtgtgattgagtggatgataaaggatggctgtgaggtagacgtcgtggacactggttcaggatggaccccactcatgagagtctctgcggtgtcgggaaatcagagggtggcctctcttctaattgatgctggggccaatgtgaatgtgaaggacagaaatggaaagacgccccttatggtggctgtgttaaataatcatgaagagttagttcagttacttcttgacaaaggggcagatgcaagtgtaaaaaatgagttcggcaaaggtgtcctagaaatggccagagtttttgacagacagagtgtagtctccttattagaagaaaggaaaaaaaagcagaggccaaagaagtcttgtgtctgctgatgagagcaccactcatctgcgaaacgcacgtaaaacaaagtgaaccgtgactgttaaactagggatgggaaattctgcatcttggggggctgtacatttatttatttagttgaagattcactgatcccactttgaaatacatctttttacctaa

SEQ ID NO: 134462 - DNA, 499 bp, Homo sapiens
  Payload ID: 6265
  Gene Symbol: FANK1
  Gene Name: fibronectin type III and ankyrin repeat domains 1
  ENST ID: ENST00000417114
  CDS Start-End: 129-499
tgggctgtgaaaaaaatcatttgttcaacactgatgtcgtgatacaaggacgtgaagatgtgagtcattgtgacatcaccagccagaattgctgggattcagtgagatgactcacagtaagagaaatcatgccaccctcaaagcctcatccacctgtcgtgggcaaagtgactcatcacagcattgaattatactgggatctggaaaagaaagccaaacgccaaggacctcaagagcagtggttcaggttctcgattgaagaagaagaccccaaaatgcacacttatggtatcatttatacgggatatgcaacgaagcatgttgttgaaggtctggaaccaaggacgctgtacagatttcgcctgaaggtcaccagcccctctggggagtgtgagtacagcccactcgtctcagtgtctacaaccagagagcccataagtagtgagcacttgcaccgggctgtcagtgtgaatgatgaagatttgctggtccgaatact

SEQ ID NO: 134463 - DNA, 753 bp, Homo sapiens
  Payload ID: 6265
  Gene Symbol: FANK1
  Gene Name: fibronectin type III and ankyrin repeat domains 1
  ENST ID: ENST00000456942
  CDS Start-End: 1-599
gagagcccataagtagtgagcacttgcaccgggctgtcagtgtgaatgatgaagatttgctggtccgaatacttcaaggaggccgtgttaaggttgatgttcccaataagtttggctttaccgctctgatggttgctgcccagaaaggatacaccaggcttgtgaaaatcctagtttctaatggcacagacgtgaatctgaagaatggaagtggcaaggacagtctaatgctggcgtgctatgcgggacacctagatgttgtgaaatatctccgaagacatggcgcttcttggcaggctagagacctgggaggctgtacagctctgcactgggctgcagatggaggccactgcagtgtgattgagtggatgataaaggatggctgtgaggtagacgtcgtggacactggttcaggatggaccccactcatgagagtctctgcggtgtcgggaaatcagagggtggcctctcttctaattgatgctggggccaatgtgaatgtgaaggacagaaatggaaagacgccccttatgagtgtagtctccttattagaagaaaggaaaaaaaagcagaggccaaagaagtcttgtgtctgctgatgagagcaccactcatctgcgaaacgcacgtaaaacaaagtgaaccgtgactgttaaactagggatgggaaattctgcatcttggggggctgtacatttatttatttagttgaagattcactgatcccactttgaaatacatctttttacctaa

SEQ ID NO: 134464 - DNA, 672 bp, Homo sapiens
  Payload ID: 6265
  Gene Symbol: FANK1
  Gene Name: fibronectin type III and ankyrin repeat domains 1
  ENST ID: ENST00000445510
  CDS Start-End: 275-672
agtgtctggttcagtagttccttcttccacatgtatccctcagtatctagaaccctgaaattggtttctctaagaaaaccaagaggcccataagggtaatgtatactgttgatttttatggttatttttcaaaaactaatattttaaacatatcaaaattatttcaaatggtaatgtactcaatgtaccatttggtttaagatgttaacattttgccatatatgtcataaagtcttttcatgaagaaatcaaaccttacaaatatactgaaatcatgccaccctcaaagcctcatccacctgtcgtgggcaaagtgactcatcacagcattgaattatactgggatctggaaaagaaagccaaacgccaaggacctcaagagcagtggttcaggttctcgattgaagaagaagaccccaaaatgcacacttatggtatcatttatacgggatatgcaacgaagcatgttgttgaaggtctggaaccaaggacgctgtacagatttcgcctgaaggtcaccagcccctctggggagtgtgagtacagcccactcgtctcagtgtctacaaccagtagcatttggcttggaggagagcccataagtagtgagcacttgcaccgggctgtcagtgtgaatgatgaagatttgctggtccgaatacttcaaggagg

SEQ ID NO: 134465 - DNA, 1831 bp, Homo sapiens
  Payload ID: 6266
  Gene Symbol: FSD1
  Gene Name: fibronectin type III and SPRY domain containing 1
  Uniprot ID: Q9BTV5
  ENST ID: ENST00000221856
  CDS Start-End: 148-1638
aatgcgcgcggtgatggagcgctaaccgggggcgcggcggcggcgagggctcggcgggccattggctaccggccgcggcaaaggcagcttggggacccagcgtgcgcggggcccgcgggccgggccggggtgacctgggctgcagccatggaagaacagagggaggccctgaggaagatcatcaaaacactggctgtgaagaatgaagaaattcagagctttatctactccctgaaacagatgctgctgaacgtggaggcgaactcggcgaaggtgcaggaggacctcgaagcagagttccagtccctcttctccctcctggaggagctgaaagaaggcatgcttatgaagataaaacaggaccgtgccagccgtacctacgagctgcagaaccagctggctgcctgcacgcgggccctggagagctccgaggagcttctggagacagccaaccagactctgcaggccatggacagcgaggactttcctcaggctgccaagcaaatcaaagatggagtgaccatggcccctgccttccggctatcattgaaagcgaaggtcagtgacaacatgagtcacctcatggtggacttcgcgcaagagcggcagatgctacaggcactcaagttcctgcctgtgcccagcgcacccgtgatcgacctggctgagtccctggtggcagataactgtgtgaccctggtgtggcgcatgccggatgaggacagcaagattgaccactacgtgctggagtaccggcggaccaacttcgagggcccgccccgcctcaaggaggaccagccctggatggtcatcgagggcatccggcagacagagtacaccctgacaggtctcaagtttgacatgaaatacatgaacttccgtgtgaaggcctgtaacaaggcagttgcaggagagttctctgagccggtgactctggagacaccagcgttcatgttccgcctggatgcgtccacatcccaccagaacctgcgggtggatgatctctccgtggagtgggacgctatgggcgggaaggtgcaggatatcaaggctcgcgagaaagatggcaaggggcggacggcgtctcccatcaactccccagccagaggtactccatctcccaagaggatgccctcaggtcgtgggggacgggaccgcttcaccgctgagtcctacacagttctgggggacacgctgatcgacggcggggagcattactgggaggtgcgctacgagccggacagcaaggcgttcggcgtgggcgtggcctaccgcagcctgggccgcttcgagcaactgggcaagacggccgcctcctggtgcctgcacgtcaacaattggctgcaggtcagcttcacggccaagcacgccaacaaggtcaaggtgctggacgcccccgtgcccgactgcctgggtgtgcactgtgacttccaccaaggcctcctgtccttctacaatgcccgcaccaaacaagtgctgcacactttcaagaccaggttcacacagccgctgctgcctgctttcacggtatggtgtggcagcttccaggtgacgacaggcctgcaggtccccagtgctgtgcgctgcctgcaaaagcgaggcagtgctaccagcagctccaacaccagcctcacctaggcccccaggcacccacccagctggggtgtttttgggggagtcgccgccaagcccaggctgctggagccaggcaccctcctctgtcacttgctgcttggagccttaactccagatgggggggtcaccaagagggagtgggcaccctggcgggccctctccccacctcacctcttaataaaggtcagacactggc

SEQ ID NO: 134466 - DNA, 401 bp, Homo sapiens
  Payload ID: 6266
  Gene Symbol: FSD1
  Gene Name: fibronectin type III and SPRY domain containing 1
  ENST ID: ENST00000594438
  CDS Start-End: 1-379
gccggacagcaaggcgttcggcgtgggcgtggcctaccgcagcctgggccgcttcgagcaactgggcaagacggccgcctcctggtgcctgcacgtcaacaattggctgcaggtcagcttcacggccaagcacgccaacaaggtcaaggtgctggacgcccccgtgcccgactgcctgggcctcctgtccttctacaatgcccgcaccaaacaagtgctgcacactttcaagaccaggttcacacagccgctgctgcctgctttcacggtatggtgtggcagcttccaggtgacgacaggcctgcaggtccccagtgctgtgcgctgcctgcaaaagcgaggcagtgctaccagcagctccaacaccagcctcacctaggcccccaggcacccacccagct

SEQ ID NO: 134467 - DNA, 254 bp, Homo sapiens
  Payload ID: 6266
  Gene Symbol: FSD1
  Gene Name: fibronectin type III and SPRY domain containing 1
  ENST ID: ENST00000601006
  CDS Start-End: 59-254
tggggacccagcgtgcgcggggcccgcgggccgggccggggtgacctgggctgcagccatggaagaacagagggaggccctgaggaagatcatcaaaacactggctgtgaagaatgaagaaattcagagctttatctactccctgaaacagatgctgctgaacgtggaggcgaactcggcgaaggtgcgctacgagccggacagcaaggcgttcggcgtgggcgtggcctaccgcagcctgggccgcttcgagc

SEQ ID NO: 134468 - DNA, 653 bp, Homo sapiens
  Payload ID: 6266
  Gene Symbol: FSD1
  Gene Name: fibronectin type III and SPRY domain containing 1
  ENST ID: ENST00000597480
  CDS Start-End: 1-530
gctttatctactccctgaaacagatgctgctgaacgtggaggcgaactcggcgaaggtgcaggaggacctcgaagcagagttccagtccctcttctccctcctggaggagctgaaagaaggcatgcttatgaagataaaacaggaccgtgccagccgtacctacgagctgcagaaccagctggctgcctgcacgcgggccctggagagctccgaggagcttctggagacagccaaccagactctgcaggccatggacagcgaggactttcctcaggctgccaagcaaatcaaagatggagtgaccatggcccctgccttccggctatcattgaaagcgaaggtcagtgacaacatgagtcacctcatggtggacttcgcgcaagagcggcagatgctacaggcactcaagttcctgcctgtgcccagcgcacccgtgatcgacctggctgagtccctggtccccagtgctgtgcgctgcctgcaaaagcgaggcagtgctaccagcagctccaacaccagcctcacctaggcccccaggcacccacccagctggggtgtttttgggggagtcgccgccaagcccaggctgctggagccaggcaccctcctctgtcacttgctgcttggagccttaactccagatgggggggtc

SEQ ID NO: 134469 - DNA, 1634 bp, Homo sapiens
  Payload ID: 6266
  Gene Symbol: FSD1
  Gene Name: fibronectin type III and SPRY domain containing 1
  ENST ID: ENST00000597590
  CDS Start-End: 72-1385
ggcaaaggcagcttggggacccagcgtgcgcggggcccgcgggccgggccggggtgacctgggctgcagccatggaagaacagagggaggccctgaggaagatcatcaaaacactggctgtgaagaatgaagaaattcagagctttatctactccctgaaacagatgctgctgaacgtggaggcgaactcggcgaaggtgcaggaggacctcgaagcagagttccagtccctcttctccctcctggaggagctgaaagaaggcatgcttatgaagataaaacaggaccgtgccagccgtacctacgagctgcagaaccagctggctgcctgcacgcgggccctggagagctccgaggagcttctggagacagccaaccagactctgcaggccatggacagcgaggactttcctcaggctgccaagcaaatcaaagatggagtgaccatggcccctgccttccggctatcattgaaagcgaaggtcagtgacaacatgagtcacctcatggtggacttcgcgcaagagcggcagatgctacaggcactcaagttcctgcctgtgcccagcgcacccgtgatcgacctggctgagtccctggtggcagataactgtgtgaccctggtgtggcgcatgccggatgaggacagcaagattgaccactacgtgctggagtaccggcggaccaacttcgagggcccgccccgcctcaaggaggaccagccctggatggtcatcgagggcatccggcagacagagtacaccctgacaggtctcaagtttgacatgaaatacatgaacttccgtgtgaaggcctgtaacaaggcagttgcaggagagttctctgagccggtgactctggagacaccagcgttcatgttccgcctggatgcgtccacatcccaccagaacctgcgggtggatgatctctccgtggagtgggacgctatgggcgggaaggtgcaggatatcaaggctcgcgagaaagatggcaaggggcggacggcgtctcccatcaactccccagccagaggtactccatctcccaagaggatgccctcaggtcgtgggggacgggaccgcttcaccgctgagtcctacacagttctgggggacacgctgatcgacggcggggagcattactgggaggtgcgctacgagccggacagcaaggcgttcggcgtgggcgtggcctaccgcagcctgggccgcttcgagcaactgggcaagacggccgcctcctggtgcctgcacgtcaacaattggctgcaggcctcctgtccttctacaatgcccgcaccaaacaagtgctgcacactttcaagaccaggttcacacagccgctgctgcctgctttcacggtatggtgtggcagcttccaggtgacgacaggcctgcaggtccccagtgctgtgcgctgcctgcaaaagcgaggcagtgctaccagcagctccaacaccagcctcacctaggcccccaggcacccacccagctggggtgtttttgggggagtcgccgccaagcccaggctgctggagccaggcaccctcctctgtcacttgctgcttggagccttaactccagatgggggggtcaccaagagggagtgggcaccctggcgggccctctccccac

SEQ ID NO: 134470 - DNA, 7062 bp, Homo sapiens
  Payload ID: 6267
  Gene Symbol: FSD1L
  Gene Name: fibronectin type III and SPRY domain containing 1-like
  ENST ID: ENST00000374707
  CDS Start-End: 177-1112
gaacctggtaagctcctggaggtaaaactcacaaatgtgtggggacactcctatgactgggtctccttggagctggactctcagacattctgctgtattccttaatccccaaagctccagagatagatccagtagagtgtttggtggcagataactctgtaacagtggcttggagaatgccagaagaagataataagattgaccattttatactggaacataggaagactaattttgatggacttccacgtgtaaaggatgagcgatgctgggagataattgataatattaagggtactgaatatacactatcaggcttaaaatttgattcaaagtatatgaatttcagagtgcgagcttgtaacaaggctgtggctggagagtattctgatccagtgactctagagaccaaagcacttaacttcaatttggataactcctcatcccatttgaacctgaaagttgaagatacatgtgtagagtgggatcctactggaggaaaaggtcaagaaagtaaaattaaaggaaaagagaacaagggcagaagtggtacaccatccccaaaacgaacatctgtaggctccaggccaccagcagtaagaggcagtagagatcgttttactggagaatcatacacagtgctgggagacactgctattgaaagtggacaacattattgggaggtcaaggcccagaaggattgtaaatcctacagtgtgggagtagcatacaaaacgttggggaaatttgaccaattgggaaagacaaacactagttggtgtatccatgtcaacaactggctacaaaacacatttgcagcaaagcataataataaagtcaaagctttggatgttactgttcctgaaaaaataggtgtattttgtgattttgatgggggtcaactttcattctatgatgcaaattctaaacagttgctatattcctttaagacaaaatttactcagccagtactacctggtttcatggtatggtgtggtggactttctttgagtactgggatgcaggttccaagtgctgtgagaacacttcagaaaagtgaaaatggaatgactggttcagctagcagcctgaacaatgttgttactcaatagtgtctactcagaatacgtttaccctccgtcttgattaggtggccttttctgtgcagttactaatcacaggaatttggtagtagtgaaaatcaggtttgctgtgttctgctttgaggcctggaatcttttatcattaaacacctagtacgaagcatttgcaggaacctactgtgcagtatcatagaagcaagcagataccaagcaaaaaactgatgattgaagagtaaatgggggaaaaggcagtgtttaattaacataaaaactcatttttgtatttcttggattactttgactattctaatgtttaattacatatggtaaccctaaggcctggggagaaaagcttttaaatcttgccttctttcttctgtactttgtctttttaaaatctcattactatctattatttagttctaacacagaagctttaaaaatacatagtcatccaaggttttctaaaaattgaaatcatatgttgggaatggtaaaaaggttttcaaatggtttatttttcctcttttataaataagttttacaaaattttcctcttttgtttattgactagattgtatataattttcttttttccaaaatattgtgataagaaatttctagacacaacagcttaaaatcacccaaatttcagttctttacctactgcactaacaatggcaaggggggtattctttatatgttgccttgtttaactacagttcttttcattccatcactttaggtgatgggtaagatttttgaaagccttatattttttgattttgttgtctagtttaatcctacctttaatagttgtgtttggtaaaattcccacttgaatgtgacactgataataattatgctgatttttagcatctcttataggaatcaaagtttattaaagttacatagaggattgaaaaatgtatatcactcaatttttatctaagaaggataggttataaagggaggtacctaaatactcaaataatgtatatattctttttcataacatatggaatgctttaagcaattgttttgaaaaaaatctgcgtatctttgacttaattggcacatgactttttcaagcagccattcattcagaggtttgttttctctcagtccttttgctacattcactttcttttcaaagaaatgttaattattacaaaaattgacatagatatctttcccaaacttggggtaaaacccatggttatgtggaacataactgttcttaaaaagtcaattataatttgtaactcacatcctttgagctaaactaaattaaaattacagtatttaataattctttgggcatttttaagaggtctgaatttgtatttttcttcatttttgaaactttacatttgttgactttttttcattctcatttaaaatatattgtgctatgataaccaaccttcttccaaggagtgaccattactgcctacatttgcgttgctttctacatagagacttgtataatagtattaatagtagctcattctctctaaaaatttactgcccactgataggatgttttgtttccttgataaaacaaatgtaaatgaggaattttatttgaattggaatattgtttttctagaggacattcatatctgcactattatctgatgacatgttggtaattttaaagactgcaaggcagtttagagaatgaagtaaaccaatagatactcttttgattctccaaagaaatataattttggtttttgttcctcagagagagtttgaaagaaattttcagatgttctgttccctatagagggcctattccaggatctaaatgaatgggaatttataattcctttcatagactcaaacctgaaagcagaaatttttagtagttgagttgctttaagtgaattttaacaaatatgacacagaaaaggtcagatgctgttgtataaaattttttactagtgtgtcttatataattctttcttctcattaattcagtgcctttttcctctaagcatactcttggtccatgccccatgcagtgtcaactgatgtttaagctacagagcattgttgtagtggtgagggccctctgttgcaggggcatggggaaatgcatatattaatcaggggctggaggagtatacatgattcttgtgttcatgttgtcatttgaaactcttcacataaaattttctaatattcatttggaaaacctctccactggagaggtttcatctctgagaggttttgtaataatagtgtaagttcagtaaatccagtccaaattctcatcacatgtattatttgatactaaattttcaattattacttcaaaataagagtctgaggatttcttcttactggcgttcttaaaggtctctaaaattaaagaacaagatgtggttttttgtttaagacgtttttagtttatttgttgttaagttaaactggagaaagtttgtcatcctcattttcaaactgaaaactaatcaaatatagtgcctatttagtctcaaaataaggtaactattaacttgattatactatataatattctcaattacatttgaatttaaaaatattgagctcttgattacaatttaatacattgtaaaaagtattaaatcctttgaaacatcttttgttgcttatttagtttttgtttctacaggtcaaacatgattgctttctataaaagaaatgcttgagaggttgactataatggatatgtcacaggtataaaacagttgttttctaaaaacatgcatttagtatggcattctcttttagcaactgaattcccaacgagttttattaagctggatatcgaaatgaaggagctgccttaagcactttagaaaaagaatttttttacaattcattttgactctcatggctgaccatgtcattatgtctttaaattttggtaaatatgtagataccaagcattaataactaatgcacacagaaatttaatatacagcaattctttgaatgttccaggtgtacgtaaactaactgaaagtattaaggacatgcctgtctatacatgggtttcattgatggtatctgtatcatcttgacaaatcgtgaactgctgctgtatggctagactttgcctatttactctgttatgcaaacagtaatttttccctatgttatgaagagagacatattggcttgctttaatttacttatttatgaaattaaagcatgaataatatgtataatttgaattttttgtgactgatccttggcagtataaatgataaaagtaaatgtaatggaatcttttaattaggctaagatatgctatttcataacttatgtagaatgatttttatctatatactttgtccataaaattataattgtttatgtaattttattgtttcttatggaaacaattggaaaagtatatggaaaatgattatttcaaagaatatttatttaaagagggaagtgtagacttcttactgtaaaatatgtgattccaggcttaagaaattgattatattttaaaataattatttttttaaaaacgtaatttgtttttaaaagatgagtctccattcattggctaatccatacagcaaatatttgagtgtttgtgatatggcagtaaaaatgtgattactttgtatgtacattaaccaaaaccagtgaagtttgatggactgtgcatagagttttgcagcttttgagtagtgtgacagagtttgcctcttaaaattgttttgctaataagtcagaagtttaaaatgtgttatagtttgctaaaaaaaaatcaaattaactgcatataaaatggttcacttttatatagtcacatgtaatgggcctgaaaaagtttcttctttgattatgtagttactctagatacattcttttagggaagtgtatggtcaacatatatttactcagtatacagataaccacaaagttgttatttttaaccaaaatatacatttcataatgttggcactggagtattataagagatcatgaatgtttccttaattatcatggcaagattacctcacgttcagtatagtttagttttgtgtgtatcttacagtatgcatgttctgaaattatttgtgatcctgatatgtcacatataatagctttgttacctggagtatttgattaacctaaacagtttaagcattttgaattagttggagtttaaatggattacatttggtgtatattgtcttcattgaaaagatattgttggatatgccacatcagagttagcattgacttataaataaataccagaatttaccagagtacacttttctcttcagatgactcaattattaaataaaagaatatttcttatttctgggtcaatataaggtactgacttctgatgcataatcacttaagctatgtgagtttaaactggtatcttttcttagtggtacccattcaatgtaagctggtccatgggaatggacatgaagaggatttcacagtatgtagagcagaaggcacgtgaatgtgtttgctttggcttggagcttattaagttttgactacggttaaaataagtcaaatagtaagtggtaaaacacatttttgttagtattggaactttctggagaacataagggctatgagaatgcatatatatattttttaacatttcctatatatctaaggtaccaaagcactgagtctaatttacctattaagggagactctttaaaatcaactttataactaattcatactataagacagataatagctaaagttttggaataatttatattaaaagccgcaagtcttaaaaatccctggatatgacataaaaaggattttggcttcttttttgaagtatttaaaattaatcaccttagctctaccatatactagatctgtgaccgctacacaaattgtttatcatctttgggtctctattgccttctttataaaataagtgtaagttgttcagcctgcctcacagggctgttgtgaggaaataaaatgaaatggagtatgtgaaattgcttcagcaacagcaaagtgctacgtaaatgtaaagtgttgtttttagctaataatggatttaagtgtttggataattgtagatgcatttactttgataaagcgtgtgcttaaagtggtatcaccagtgatttctaacatgattttaaaaaaataaaaccccaattaaaatgttctttaatattcatttaatttgtgcatgacttgtggcctttttgtattttctcaagcctattactctagagctgtaaaagctcttgcacagcattgttgtgtcagtgtagaatagtggcataaataaatgaattaagctacatttccatgcaggcatttgcactttgaagttagggctgcccagtgccacatgcaaagagtgtatttggtctaaacagttctttccaaacaaccaaatggctgggcagcttgttgtcacggataaatgatataaaatgtaaccactgaacatttgacaactttgttgcattatcatttttaaaaaaagatgaagcatttcaaaatcttgttaacctggttatctcttggtatctctcctgacatatttgttttgctttaaattggattaaatggtttacaggttatctgaatctacagatttagtatgtctattatctggacatgattttgctatgcagttgtgataataaaaattctaattcctcaggtttggccttttaagttatggctgaagacctttaatgatacttatgatgcactcagtgccatacaatagtgttttaagaagcacatggcctcattttccttagaaacaagacaaagcctttttaaaatgtttttttttcactttaaaatagggtattcaaagtggagtaacgtgtattttgaaatgattttgtgttctatatagaatgtcccagttaagattttacagaagcacctggaatatctcattaaaaatttaaaaactctt

SEQ ID NO: 134471 - DNA, 7664 bp, Homo sapiens
  Payload ID: 6267
  Gene Symbol: FSD1L
  Gene Name: fibronectin type III and SPRY domain containing 1-like
  ENST ID: ENST00000374710
  CDS Start-End: 188-1714
ctttcaccctggcaaccgcggcgtgactacggcgcgcgcggtctgggcgcggacgggtggggccgggcggtgccggtgcgggctggggcagtgcagtgagtagcggtcttggggtgtgcgatctcgctgagcctcctcacacggttcgtcgtctcgggttcgagcccagtgggcttagccactcgccatggactcccagaaagaagctctacagaggatcatttcaactctggcaaataaaaatgatgaaattcagaactttattgatacactacatcatacactaaaaggagttcaggaaaattcgtccaacatactctcagagttagatgaagaatttgatagtttatactctatactggatgaagtaaaagaaagtatgattaactgtatcaagcaggaacaagctcgtaaatcccaagagttacagagtcagattagtcaatgtaataatgccctggagaactctgaagaactattagaatttgcaacaaggtcattagatataaaggaacctgaagaattttcaaaggctgccagacagatcaaggatagagtcacaatggcttcagcctttcgcctttctttgaaaccaaaggtcagtgacaacatgactcatttaatggtggatttctcacaggaaagacagatgctgcaaactttgaagtttttgccagtccccaaagctccagagatagatccagtagagtgtttggtggcagataactctgtaacagtggcttggagaatgccagaagaagataataagattgaccattttatactggaacataggaagactaattttgatggacttccacgtgtaaaggatgagcgatgctgggagataattgataatattaagggtactgaatatacactatcaggcttaaaatttgattcaaagtatatgaatttcagagtgcgagcttgtaacaaggctgtggctggagagtattctgatccagtgactctagagaccaaagcacttaacttcaatttggataactcctcatcccatttgaacctgaaagttgaagatacatgtgtagagtgggatcctactggaggaaaaggtcaagaaagtaaaattaaaggaaaagagaacaagggcagtgtccatgttacttcactgaagaaacatacaagtggtacaccatccccaaaacgaacatctgtaggctccaggccaccagcagtaagaggcagtagagatcgttttactggagaatcatacacagtgctgggagacactgctattgaaagtggacaacattattgggaggtcaaggcccagaaggattgtaaatcctacagtgtgggagtagcatacaaaacgttggggaaatttgaccaattgggaaagacaaacactagttggtgtatccatgtcaacaactggctacaaaacacatttgcagcaaagcataataataaagtcaaagctttggatgttactgttcctgaaaaaataggtgtattttgtgattttgatgggggtcaactttcattctatgatgcaaattctaaacagttgctatattcctttaagacaaaatttactcagccagtactacctggtttcatggtatggtgtggtggactttctttgagtactgggatgcaggttccaagtgctgtgagaacacttcagaaaagtgaaaatggaatgactggttcagctagcagcctgaacaatgttgttactcaatagtgtctactcagaatacgtttaccctccgtcttgattaggtggccttttctgtgcagttactaatcacaggaatttggtagtagtgaaaatcaggtttgctgtgttctgctttgaggcctggaatcttttatcattaaacacctagtacgaagcatttgcaggaacctactgtgcagtatcatagaagcaagcagataccaagcaaaaaactgatgattgaagagtaaatgggggaaaaggcagtgtttaattaacataaaaactcatttttgtatttcttggattactttgactattctaatgtttaattacatatggtaaccctaaggcctggggagaaaagcttttaaatcttgccttctttcttctgtactttgtctttttaaaatctcattactatctattatttagttctaacacagaagctttaaaaatacatagtcatccaaggttttctaaaaattgaaatcatatgttgggaatggtaaaaaggttttcaaatggtttatttttcctcttttataaataagttttacaaaattttcctcttttgtttattgactagattgtatataattttcttttttccaaaatattgtgataagaaatttctagacacaacagcttaaaatcacccaaatttcagttctttacctactgcactaacaatggcaaggggggtattctttatatgttgccttgtttaactacagttcttttcattccatcactttaggtgatgggtaagatttttgaaagccttatattttttgattttgttgtctagtttaatcctacctttaatagttgtgtttggtaaaattcccacttgaatgtgacactgataataattatgctgatttttagcatctcttataggaatcaaagtttattaaagttacatagaggattgaaaaatgtatatcactcaatttttatctaagaaggataggttataaagggaggtacctaaatactcaaataatgtatatattctttttcataacatatggaatgctttaagcaattgttttgaaaaaaatctgcgtatctttgacttaattggcacatgactttttcaagcagccattcattcagaggtttgttttctctcagtccttttgctacattcactttcttttcaaagaaatgttaattattacaaaaattgacatagatatctttcccaaacttggggtaaaacccatggttatgtggaacataactgttcttaaaaagtcaattataatttgtaactcacatcctttgagctaaactaaattaaaattacagtatttaataattctttgggcatttttaagaggtctgaatttgtatttttcttcatttttgaaactttacatttgttgactttttttcattctcatttaaaatatattgtgctatgataaccaaccttcttccaaggagtgaccattactgcctacatttgcgttgctttctacatagagacttgtataatagtattaatagtagctcattctctctaaaaatttactgcccactgataggatgttttgtttccttgataaaacaaatgtaaatgaggaattttatttgaattggaatattgtttttctagaggacattcatatctgcactattatctgatgacatgttggtaattttaaagactgcaaggcagtttagagaatgaagtaaaccaatagatactcttttgattctccaaagaaatataattttggtttttgttcctcagagagagtttgaaagaaattttcagatgttctgttccctatagagggcctattccaggatctaaatgaatgggaatttataattcctttcatagactcaaacctgaaagcagaaatttttagtagttgagttgctttaagtgaattttaacaaatatgacacagaaaaggtcagatgctgttgtataaaattttttactagtgtgtcttatataattctttcttctcattaattcagtgcctttttcctctaagcatactcttggtccatgccccatgcagtgtcaactgatgtttaagctacagagcattgttgtagtggtgagggccctctgttgcaggggcatggggaaatgcatatattaatcaggggctggaggagtatacatgattcttgtgttcatgttgtcatttgaaactcttcacataaaattttctaatattcatttggaaaacctctccactggagaggtttcatctctgagaggttttgtaataatagtgtaagttcagtaaatccagtccaaattctcatcacatgtattatttgatactaaattttcaattattacttcaaaataagagtctgaggatttcttcttactggcgttcttaaaggtctctaaaattaaagaacaagatgtggttttttgtttaagacgtttttagtttatttgttgttaagttaaactggagaaagtttgtcatcctcattttcaaactgaaaactaatcaaatatagtgcctatttagtctcaaaataaggtaactattaacttgattatactatataatattctcaattacatttgaatttaaaaatattgagctcttgattacaatttaatacattgtaaaaagtattaaatcctttgaaacatcttttgttgcttatttagtttttgtttctacaggtcaaacatgattgctttctataaaagaaatgcttgagaggttgactataatggatatgtcacaggtataaaacagttgttttctaaaaacatgcatttagtatggcattctcttttagcaactgaattcccaacgagttttattaagctggatatcgaaatgaaggagctgccttaagcactttagaaaaagaatttttttacaattcattttgactctcatggctgaccatgtcattatgtctttaaattttggtaaatatgtagataccaagcattaataactaatgcacacagaaatttaatatacagcaattctttgaatgttccaggtgtacgtaaactaactgaaagtattaaggacatgcctgtctatacatgggtttcattgatggtatctgtatcatcttgacaaatcgtgaactgctgctgtatggctagactttgcctatttactctgttatgcaaacagtaatttttccctatgttatgaagagagacatattggcttgctttaatttacttatttatgaaattaaagcatgaataatatgtataatttgaattttttgtgactgatccttggcagtataaatgataaaagtaaatgtaatggaatcttttaattaggctaagatatgctatttcataacttatgtagaatgatttttatctatatactttgtccataaaattataattgtttatgtaattttattgtttcttatggaaacaattggaaaagtatatggaaaatgattatttcaaagaatatttatttaaagagggaagtgtagacttcttactgtaaaatatgtgattccaggcttaagaaattgattatattttaaaataattatttttttaaaaacgtaatttgtttttaaaagatgagtctccattcattggctaatccatacagcaaatatttgagtgtttgtgatatggcagtaaaaatgtgattactttgtatgtacattaaccaaaaccagtgaagtttgatggactgtgcatagagttttgcagcttttgagtagtgtgacagagtttgcctcttaaaattgttttgctaataagtcagaagtttaaaatgtgttatagtttgctaaaaaaaaatcaaattaactgcatataaaatggttcacttttatatagtcacatgtaatgggcctgaaaaagtttcttctttgattatgtagttactctagatacattcttttagggaagtgtatggtcaacatatatttactcagtatacagataaccacaaagttgttatttttaaccaaaatatacatttcataatgttggcactggagtattataagagatcatgaatgtttccttaattatcatggcaagattacctcacgttcagtatagtttagttttgtgtgtatcttacagtatgcatgttctgaaattatttgtgatcctgatatgtcacatataatagctttgttacctggagtatttgattaacctaaacagtttaagcattttgaattagttggagtttaaatggattacatttggtgtatattgtcttcattgaaaagatattgttggatatgccacatcagagttagcattgacttataaataaataccagaatttaccagagtacacttttctcttcagatgactcaattattaaataaaagaatatttcttatttctgggtcaatataaggtactgacttctgatgcataatcacttaagctatgtgagtttaaactggtatcttttcttagtggtacccattcaatgtaagctggtccatgggaatggacatgaagaggatttcacagtatgtagagcagaaggcacgtgaatgtgtttgctttggcttggagcttattaagttttgactacggttaaaataagtcaaatagtaagtggtaaaacacatttttgttagtattggaactttctggagaacataagggctatgagaatgcatatatatattttttaacatttcctatatatctaaggtaccaaagcactgagtctaatttacctattaagggagactctttaaaatcaactttataactaattcatactataagacagataatagctaaagttttggaataatttatattaaaagccgcaagtcttaaaaatccctggatatgacataaaaaggattttggcttcttttttgaagtatttaaaattaatcaccttagctctaccatatactagatctgtgaccgctacacaaattgtttatcatctttgggtctctattgccttctttataaaataagtgtaagttgttcagcctgcctcacagggctgttgtgaggaaataaaatgaaatggagtatgtgaaattgcttcagcaacagcaaagtgctacgtaaatgtaaagtgttgtttttagctaataatggatttaagtgtttggataattgtagatgcatttactttgataaagcgtgtgcttaaagtggtatcaccagtgatttctaacatgattttaaaaaaataaaaccccaattaaaatgttctttaatattcatttaatttgtgcatgacttgtggcctttttgtattttctcaagcctattactctagagctgtaaaagctcttgcacagcattgttgtgtcagtgtagaatagtggcataaataaatgaattaagctacatttccatgcaggcatttgcactttgaagttagggctgcccagtgccacatgcaaagagtgtatttggtctaaacagttctttccaaacaaccaaatggctgggcagcttgttgtcacggataaatgatataaaatgtaaccactgaacatttgacaactttgttgcattatcatttttaaaaaaagatgaagcatttcaaaatcttgttaacctggttatctcttggtatctctcctgacatatttgttttgctttaaattggattaaatggtttacaggttatctgaatctacagatttagtatgtctattatctggacatgattttgctatgcagttgtgataataaaaattctaattcctcaggtttggccttttaagttatggctgaagacctttaatgatacttatgatgcactcagtgccatacaatagtgttttaagaagcacatggcctcattttccttagaaacaagacaaagcctttttaaaatgtttttttttcactttaaaatagggtattcaaagtggagtaacgtgtattttgaaatgattttgtgttctatatagaatgtcccagttaagattttacagaagcacctggaatatctcattaaaaatttaaaaactctt

SEQ ID NO: 134472 - DNA, 1947 bp, Homo sapiens
  Payload ID: 6267
  Gene Symbol: FSD1L
  Gene Name: fibronectin type III and SPRY domain containing 1-like
  ENST ID: ENST00000394926
  CDS Start-End: 99-1628
agtgcagtgagtagcggtcttggggtgtgcgatctcgctgagcctcctcacacggttcgtcgtctcgggttcgagcccagtgggcttagccactcgccatggactcccagaaagaagctctacagaggatcatttcaactctggcaaataaaaatgatgaaattcagaactttattgatacactacatcatacactaaaaggagttcaggaaaattcgtccaacatactctcagagttagatgaagaatttgatagtttatactctatactggatgaagtaaaagaaagtatgattaactgtatcaagcaggaacaagctcgtaaatcccaagagttacagagtcagattagtcaatgtaataatgccctggagaactctgaagaactattagaatttgcaacaaggtcattagatataaaggaacctgaagaattttcaaaggctgccagacagatcaaggatagagtcacaatggcttcagcctttcgcctttctttgaaaccaaaggtcagtgacaacatgactcatttaatggtggatttctcacaggaaagacagatgctgcaaactttgaagtttttgccagtccccaaagctccagagatagatccagtagagtgtttggtggcagataactctgtaacagtggcttggagaatgccagaagaagataataagattgaccattttatactggaacataggaagactaattttgatggacttccacgtgtaaaggatgagcgatgctgggagataattgataatattaagggtactgaatatacactatcaggcttaaaatttgattcaaagtatatgaatttcagagtgcgagcttgtaacaaggctgtggctggagagtattctgatccagtgactctagagaccaaagcacttaacttcaatttggataactcctcatcccatttgaacctgaaagttgaagatacatgtgtagagtgggatcctactggaggaaaaggtcaagaaagtaaaattaaaggaaaagagaacaagggcagtgtccatgttacttcactgaagaaacatacaagaagtggtacaccatccccaaaacgaacatctgtaggctccaggccaccagcagtaagaggcagtagagatcgttttactggagaatcatacacagtgctgggagacactgctattgaaagtggacaacattattgggaggtcaaggcccagaaggattgtaaatcctacagtgtgggagtagcatacaaaacgttggggaaatttgaccaattgggaaagacaaacactagttggtgtatccatgtcaacaactggctacaaaacacatttgcagcaaagcataataataaagtcaaagctttggatgttactgttcctgaaaaaataggtgtattttgtgattttgatgggggtcaactttcattctatgatgcaaattctaaacagttgctatattcctttaagacaaaatttactcagccagtactacctggtttcatggtatggtgtggtggactttctttgagtactgggatgcaggttccaagtgctgtgagaacacttcagaaaagtgaaaatggaatgactggttcagctagcagcctgaacaatgttgttactcaatagtgtctactcagaatacgtttaccctccgtcttgattaggtggccttttctgtgcagttactaatcacaggaatttggtagtagtgaaaatcaggtttgctgtgttctgctttgaggcctggaatcttttatcattaaacacctagtacgaagcatttgcaggaacctactgtgcagtatcatagaagcaagcagataccaagcaaaaaactgatgattgaagagtaaatgggggaaaaggcagtgtttaattaacataaaaactcatttttgtatttcttggattactttgactattctaatgtttaattacatatggt

SEQ ID NO: 134473 - DNA, 1804 bp, Homo sapiens
  Payload ID: 6267
  Gene Symbol: FSD1L
  Gene Name: fibronectin type III and SPRY domain containing 1-like
  Uniprot ID: Q9BXM9
  ENST ID: ENST00000481272
  CDS Start-End: 120-1712
ggtgccggtgcgggctggggcagtgcagtgagtagcggtcttggggtgtgcgatctcgctgagcctcctcacacggttcgtcgtctcgggttcgagcccagtgggcttagccactcgccatggactcccagaaatactgctttaaggagaatgaaaacgttacagttgataaagcctgttttctgatctctaacatcactattggaccagagtctattaacttgcagcaggaagctctacagaggatcatttcaactctggcaaataaaaatgatgaaattcagaactttattgatacactacatcatacactaaaaggagttcaggaaaattcgtccaacatactctcagagttagatgaagaatttgatagtttatactctatactggatgaagtaaaagaaagtatgattaactgtatcaagcaggaacaagctcgtaaatcccaagagttacagagtcagattagtcaatgtaataatgccctggagaactctgaagaactattagaatttgcaacaaggtcattagatataaaggaacctgaagaattttcaaaggctgccagacagatcaaggatagagtcacaatggcttcagcctttcgcctttctttgaaaccaaaggtcagtgacaacatgactcatttaatggtggatttctcacaggaaagacagatgctgcaaactttgaagtttttgccagtccccaaagctccagagatagatccagtagagtgtttggtggcagataactctgtaacagtggcttggagaatgccagaagaagataataagattgaccattttatactggaacataggaagactaattttgatggacttccacgtgtaaaggatgagcgatgctgggagataattgataatattaagggtactgaatatacactatcaggcttaaaatttgattcaaagtatatgaatttcagagtgcgagcttgtaacaaggctgtggctggagagtattctgatccagtgactctagagaccaaagcacttaacttcaatttggataactcctcatcccatttgaacctgaaagttgaagatacatgtgtagagtgggatcctactggaggaaaaggtcaagaaagtaaaattaaaggaaaagagaacaagggcagaagtggtacaccatccccaaaacgaacatctgtaggctccaggccaccagcagtaagaggcagtagagatcgttttactggagaatcatacacagtgctgggagacactgctattgaaagtggacaacattattgggaggtcaaggcccagaaggattgtaaatcctacagtgtgggagtagcatacaaaacgttggggaaatttgaccaattgggaaagacaaacactagttggtgtatccatgtcaacaactggctacaaaacacatttgcagcaaagcataataataaagtcaaagctttggatgttactgttcctgaaaaaataggtgtattttgtgattttgatgggggtcaactttcattctatgatgcaaattctaaacagttgctatattcctttaagacaaaatttactcagccagtactacctggtttcatggtatggtgtggtggactttctttgagtactgggatgcaggttccaagtgctgtgagaacacttcagaaaagtgaaaatggaatgactggttcagctagcagcctgaacaatgttgttactcaatagtgtctactcagaatacgtttaccctccgtcttgattaggtggccttttctgtgcagttactaatcacaggaatttggtagtagtgaaaatca

SEQ ID NO: 134474 - DNA, 1711 bp, Homo sapiens
  Payload ID: 6267
  Gene Symbol: FSD1L
  Gene Name: fibronectin type III and SPRY domain containing 1-like
  ENST ID: ENST00000484973
  CDS Start-End: 99-1592
agtgcagtgagtagcggtcttggggtgtgcgatctcgctgagcctcctcacacggttcgtcgtctcgggttcgagcccagtgggcttagccactcgccatggactcccagaaagaagctctacagaggatcatttcaactctggcaaataaaaatgatgaaattcagaactttattgatacactacatcatacactaaaaggagttcaggaaaattcgtccaacatactctcagagttagatgaagaatttgatagtttatactctatactggatgaagtaaaagaaagtatgattaactgtatcaagcaggaacaagctcgtaaatcccaagagttacagagtcagattagtcaatgtaataatgccctggagaactctgaagaactattagaatttgcaacaaggtcattagatataaaggaacctgaagaattttcaaaggctgccagacagatcaaggatagagtcacaatggcttcagcctttcgcctttctttgaaaccaaaggtcagtgacaacatgactcatttaatggtggatttctcacaggaaagacagatgctgcaaactttgaagtttttgccagtccccaaagctccagagatagatccagtagagtgtttggtggcagataactctgtaacagtggcttggagaatgccagaagaagataataagattgaccattttatactggaacataggaagactaattttgatggacttccacgtgtaaaggatgagcgatgctgggagataattgataatattaagggtactgaatatacactatcaggcttaaaatttgattcaaagtatatgaatttcagagtgcgagcttgtaacaaggctgtggctggagagtattctgatccagtgactctagagaccaaagcacttaacttcaatttggataactcctcatcccatttgaacctgaaagttgaagatacatgtgtagagtgggatcctactggaggaaaaggtcaagaaagtaaaattaaaggaaaagagaacaagggcagtggtacaccatccccaaaacgaacatctgtaggctccaggccaccagcagtaagaggcagtagagatcgttttactggagaatcatacacagtgctgggagacactgctattgaaagtggacaacattattgggaggtcaaggcccagaaggattgtaaatcctacagtgtgggagtagcatacaaaacgttggggaaatttgaccaattgggaaagacaaacactagttggtgtatccatgtcaacaactggctacaaaacacatttgcagcaaagcataataataaagtcaaagctttggatgttactgttcctgaaaaaataggtgtattttgtgattttgatgggggtcaactttcattctatgatgcaaattctaaacagttgctatattcctttaagacaaaatttactcagccagtactacctggtttcatggtatggtgtggtggactttctttgagtactgggatgcaggttccaagtgctgtgagaacacttcagaaaagtgaaaatggaatgactggttcagctagcagcctgaacaatgttgttactcaatagtgtctactcagaatacgtttaccctccgtcttgattaggtggccttttctgtgcagttactaatcacaggaatttggtagtagtgaaaatcaggtttgctgtgttctgctttgaggcct

SEQ ID NO: 134475 - DNA, 1906 bp, Homo sapiens
  Payload ID: 6267
  Gene Symbol: FSD1L
  Gene Name: fibronectin type III and SPRY domain containing 1-like
  ENST ID: ENST00000495708
  CDS Start-End: 426-1571
tttccttcccgggccctccgcaccggccggctgctggatgcccagtggcctatttcagggccggagagaccgctatcgctggaggaaaaaggatgggggaagggagtgcagcctgcagaggcactagcggtagacagacgggcggcgctccccaccctccacggctacttcccgggagcagtcagccgctgcgcgcaggcgcggtgcgctcctcagcccctcccttctgcgggccgccctttcaccctggcaaccgcggcgtgactacggcgcgcgcggtctgggcgcggacgggtggggccgggcggtgccggtgcgggctggggcagtgcagtgagtagcggtcttggggtgtgcgatctcgctgagcctcctcacacggttcgtcgtctcgggttcgagcccagtgggcttagccactcgccatggactcccagaaatactgctttaaggagaatgaaaacgttacagttgataaagcctgttttctgatctctaacatcactattggaccagagtctattaacttgcagcaggaagctctacagaggatcatttcaactctggcaaataaaaatgatgaaattcagaactttattgatacactacatcatacactaaaaggagttcaggaaaattcgtccaacatactctcagagttagatgaagaatttgatagtttatactctatactggatgaagtaaaagaaagtatgattaactgtatcaagcaggaacaagctcgtaaatcccaagagttacagagtcagattagtcaatgtaataatgccctggagaactctgaagaactattagaatttgcaacaaggtcattagatataaaggaacctgaagaattttcaaaggctgccagacagatcaaggatagagtcacaatggcttcagcctttcgcctttctttgaaaccaaaggtcagtgacaacatgactcatttaatggtggatttctcacaggaaagacagatgctgcaaactttgaagtttttgccagtccccaaagctccagagatagatccagtagagtgtttggtggcagataactctgtaacagtggcttggagaatgccagaagaagataataagattgaccattttatactggaacataggaagactaattttgatggacttccacgtgtaaaggatgagcgatgctgggagataattgataatattaagggtactgaatatacactatcaggcttaaaatttgattcaaagtatatgaatttcagagtgcgagcttgtaacaaggctgtggctggagagtattctgatccagtgactctagagaccaaagcacttaacttcaatttggataactcctcatcccatttgaacctgaaagttgaagatacatgtgtagagtgggatcctactggaggaaaaggtcaagaaagtaaaattaaaggaaaagagaacaagggcagttacaaatttttaaaaattgtttttctgttatcaaaagagctcttaatacattttgaagcagtgctaagtgaaatttttctctttatttgtatgacgttcactttctatttgttgccctgagttacttgggaaatatttttcagaatgcatgtttcctctcagcagacactctgaccaccagttggggaggcaaactatcagtgtattttgaaaaagtttcctgattgtttctgaatctgctgtgccttttcagttgacaatcattgatttattacaaaatgccaaaggcctttgttttttcaatttagtactttggctcaggaagatacaggtgttccttaattgatagtatcacatactctactcagctgagctcattctagtcagatattgtacacctactctgtactgaggatacagagatgagatgtggttcctagcaacagttagttccc

SEQ ID NO: 134476 - DNA, 1836 bp, Homo sapiens
  Payload ID: 6267
  Gene Symbol: FSD1L
  Gene Name: fibronectin type III and SPRY domain containing 1-like
  Uniprot ID: Q9BXM9
  ENST ID: ENST00000469022
  CDS Start-End: 177-614
gcaaccgcggcgtgactacggcgcgcgcggtctgggcgcggacgggtggggccgggcggtgccggtgcgggctggggcagtgcagtgagtagcggtcttggggtgtgcgatctcgctgagcctcctcacacggttcgtcgtctcgggttcgagcccagtgggcttagccactcgccatggactcccagaaagaagctctacagaggatcatttcaactctggcaaataaaaatgatgaaattcagaactttattgatacactacatcatacactaaaaggagttcaggaaaattcgtccaacatactctcagagttagatgaagaatttgatagtttatactctatactggatgaagtaaaagaaagtatgattaactgtatcaagcaggaacaagctcgtaaatcccaagagttacagagtcagattagtcaatgtaataatgccctggagaactctgaagaactattagaatttgcaacaaggtcattagatataaaggaacctgaagaattttcaaaggtacacaaaaactgcattaatacacttaacaagggaagttgtatttttaaaaaggcgtttttgtttttctttagttttggatttctttactgatttctaatactaataaagccttggggtttcttgataagtaaaatgctggctgttcatttattccaaagcaaacacttagaagtgtgtgtctttagggtcatcaacaaatatgtttaaaaagtgtttctgtgtttctgtctatgagctgcttgggaaagcatcatcactttatgcacatgagcactgtaattgtgtaacttcttattgcagataaatgcccccactgcttaatttaagtaactgaatgttttattacaacatggaaatgtagatccttacttaagggatatgtttagtataaaaatgtaaaaagtagagcaagaagcctgctaatgttttaacttagatcctggtgtttaagtgattgtaaattgtaaattgtaattttttttttaagtagggtcattttaaatgattaccattttgtcaaatcaaaactcagaaatgtagaatatattttaaaatgatgtgaaaagatttggaaattaagctatataattagcaaaaattactgtgtagttatcaagataaaatttgagtttgatgttatttacttcacctttgtggagtatgtagtgagctgcattgtgttagaaaggtagctttataactgatttatgcctagtgattgttttcattttatgattttctgtgaacttgaaggtagaaaaaacttccttgagaaggtaacatttgccaccttacatctttggatattaaaattgaactttaattgatttcttcttttaaacacatgaatcaaaacaaaagttcttttgctgtaagccaatgcatgaattaattctttaaatttggaggtgagttgtaaagaagcttactaatgcacataggtggacttattatataaaggaattacaagggaaatgtactatatttaaaagtactttaaaagtatgatatgttggccaggtatggtggctcatgcctgtaatcccagcactatgggaagccaaggtgggtggtttgcttgagcccaggagtttgaggccagcttgggcaacatgatgagatcctgcctgtacaaaatacacaaaaaaattagccgggcatggtgatgtgcacctgtagtcccagctactcgaaggctgagatgggaggattgcctgagcctaggaagttgaggctgcaccgagctgtgattacactgctgcactctagcctgggcaacagagcgagaccctatctcaaacaaaacaaaaca

SEQ ID NO: 134477 - DNA, 6418 bp, Homo sapiens
  Payload ID: 6268
  Gene Symbol: FSD2
  Gene Name: fibronectin type III and SPRY domain containing 2
  Uniprot ID: A1L4K1
  ENST ID: ENST00000334574
  CDS Start-End: 183-2432
atgcagaggtcactaggaaggaaagcctgctgaacacagattcaattttctagcagaactccaggtcctctgagttaaaggaagcatttatggacgcttagcagggcccagatattcactattaagtgtccaggaaggatctttcttatataaaggtgcttctgaggacttccagagttacaatggaggaggaatcgggggaggaactggggctggacaggtctactcccaaggatttccacttttaccacatggacctgtatgactctgaagacagactgcacctctttccagaagagaacactaggatgaggaaagtagtccaagctgaaatggccaatgagtcaagaggagcaggggatggtaaggctcaaagagaccttcaagaggaagtggatgaacttgtccacttatatggacttgaagatgatcatgaattaggggatgagtttgttgatgaaaacatacccagaacaggggtttcagaatatcctccttatatgatgaagaggagagacccagccagggagcagagagactggagacttagtggagaggcagcggaggccgaggacctgggcttcggagggtggggctcagcaggccagtgccaggacttgcgggaagcctataggtacacacacggccgtgccagcgaggagtatgaatgctatgtcatccccgaggaagaggatgaagaagaagctgctgatgtcttctgtgtcacttgtaagactccaataagagcttttcagaaggtttttgatgaacataaggagcatgaagtgatcccactcaatgaagcactggaaagtgccaaggatgaaattcacaaaaacatgtacaaattggaaaagcagataattgagatggaaaactttgcaaatcatttggaggaggttttcatcactgtggaggagaattttggaaaacaagaacaaaactttgagtcacattacaacgagatcttggaaacacttgctcaaaaatatgaggaaaaaatacaagctctaggggagaaaaagaaagagaagctggaagccttatatggacaactggtcagctgtggagaaaacctagatacttgcaaagaactgatggaaacaatagaggagatgtgtcacgaggagaaggtggatttcataaaggatgcagtggctatggctgacagactcgggaaattcctgaaaacaaaaacagacgtggaaatctctgcacagcctgagtttgaagaccagaccttggatttctctgatgtggagcagctgatgggctccattaacaccattccagctccttctgctccagtcataaatccacaggtccctaactcagccacaggttcctcagtccgagtgtgctggagcttatactccgacgacactgtggagagctatcagctgtcctaccggccagtgcaggacagctcacctgggacggaccaagcagagtttacagtgactgtcaaagaaacatattgctcagtgacaaaccttgtgccaaatacccagtatgaattttgggtcacagctcacaacagggctggccccagcccctctagcgagcgtgcagtgtacatgacagcaccttctccccccattattaaaaccaaagagataaggagctgtgaagaggctgtgctgatttgctgggagtctgggaacctgaatcctgtggactcgtacactgtggagctgacccaggctgaaagtccagaagcctcgggtgtaactgagtctgttgtgggcatcccgacctgcgagtccgtggtgcagctgcagccggggcggagctacattatctatgtgcgagccctcaatatggggggccccagcgtgaggagcgagccagctacagtccacaccataggaagctactttcgcctaaacaaggacacttgccatccctggctgaccatttctgaagacggacttacggctgtacgaagtgaaaggagaacccccgccagggagctgtcacccagcgacactcacttcaccaggtgtgttgctgtcatgggaaatctaattccagtccgagggcaccattactgggaggtggaggtggatgagcatttggactacagagttggtgtggcctttgcagatgtccgtaaacaggaggatctgggagcaaattgcctctcctggtgcatgaggcacacatttgcatcatcaaggcataagtatgaatttctgcacaacagaacaactccagatataagaataacagttccaccaaagaagattggcattctattagactatgaacattcaaagttgtcatttttcaatgtggacctttctcagcatctatatacatttagttgtcagcttcacgaatttgtgcatccctgtttttctttggaaaagcctgggtgtctaaaggtacataatggcatttcaatgccaaaacatgtcactttctattagaacattctgatgtccagtttcctgtcttccatgcctacccctctcgcagctgctcacgccttagctggctgaacctggcacttaagcaccatgtgcccagcacaatttatggctcatgctattatctgactggtgtgctagcgctcatttcacccaacctggattctagtcctgtgtgctgctacctgtgtgctgctaggatagtcattaccaggcccagctgtaaaataaaggctcagactaaacgaactcaaaagtctttgaagctgtcaaactatattcgtgtatatgcaaaatatcttgagtttccaagacctagagagcttgggagaggacgagggtagtcttaatggctccagcagcaccagtacacccatgcatttcatgagtcagccaagaatacacttgagaaggcgagaggctgtctgtagagaaccagggaagctgtgtgcccttctcaatgtcttctaccctcgttttcccaatagtgagcagcactgtggtgaggtcccttccactgtgtactctgcatacagggtattccctgttccactcctacacagtatgcaccactctctaattttgaaattacctctataatgcctaattccatgaagggagggacagtgcctgttttgttcattgctagatcaccaagggctaacacataacagctgtcaccaagtatttgttgaataaattagtatcttcttcagccactgctctttggcctcttactgctctccatgtgaaggatggcagggctctttcaaaactacagcaaaggacctatggccaagaaatgggaaaaaacctagaatggaggcagcgtgaaagaacagaagggcatctgtggcatattagcaaatgcacaacaattttttaaaagaaattaacagcccaccaaagggcaaagctgagcacgggaaggaagactgatctctagctaggcagctttcaggcatcctgcctcactgcccccaggccattctgtgagctcaatgcccaactccatcagctacattcctggttctcctgttcaagtttccagttgccacttaagctctgcacacacagcattttcaaagcttgtgagtgaagctgcagaataattccatttgtgaagcaattacaattcagtatcatgtcccacagatgcctctaaacccagatatgccctaatctcatcatttaaggttttgtgtttaaaaaaaaaaagtccacttttcttttttctggcgaaaccccgtctctactaaaaatacaaaaaattagccgggcatggtggtgggcgcctgtaatcccagctactcaggaggctgaggcaggagaattgcttgaacccgggggcagaggctgcagtgagccgagattgtgccactgcactccagccttggcaacaagagcgcaactctgtctcaaaaacaaacaaacaaacaaacaaaaaacctctgatgttttccagcacctgcaaagtctgacaaactgaaagactctcatctcctactaaactctgcctactcgtataaatggcagctcagattcctgaattaacaattcacactgacaatttaataactcgttatacacacacacacctatcctgccaagctggactgtctactctgaaacaagggacagcagatgtaagcacagaaatagttccagttataaacaattaaaagatacatatcatgtatatttaaaaatgttctcggccgggcgcggtggctcacgcctgtaatcccagcactttggggggccaaggtggatggatcacaaggtcaggagatcgagaccatcctggctaatacggtgaaaccccgtctctactaaaaatacaaaaaaattagccgggactggtggcgggcgcctgtagtcccagctactcgggaggctgaggcaggagaatggcgtgaacccgggaggtggagcttgcagtgagccgagatggctcacagatcaagactccatctcaaaaaaaaaaaaaaaaaaagttctcagctactgaaatagaaactaccaagtaagaaacaggatatcacagagaaggcaagtttgaattcagggttctaataggctttatggaatactacacgttagtatgaacacggataaatggattaaaaactcaacacgtataaagttttaattaaatttttatttgaccaagaaaaaactgtctagaattgcctgacatttaaaatccacttaaagcagattagcaacttcaagcatcacaattattcagcataaagagcctttgttgaaacatctttctcatttatttagaagaaaacatctagaacagaaccaagcaaaacttttgtatttttgtaaaaaatctcaattcctgaaactactataaacaatctactgaaactgtattcagcaagggacagatttacctcaaggccatgttcacctgcaacctgctgataagtctgttaaaaaacaaagcaaaaaaaagagtttttaaaaattagaccactgtagccacaatccctaacactggacagttaaaacaaaagttatcaaaatctgttcttttcttagctttacctgtatcactttataactcctgagaaagtcattcacataagctgtggcctccccaccttaacaaaggggaaaaagaatatgtaaaaccaccacagaatcttggcgtaaactaacatgggtttagtaatacagagtacagtattcaggatttaaggcacccttacaagtcagaattggaaagttggtttgagacttgcaatctaaaatgacactgatttctgataaaattaaatgacttttatttagaaaagtgtgtttaataaattacttcctgctggttcaaatgacacacaatcactttgtatacatccaataagatatttctgaagtgtatacttggtcaaaagtaaaaagcagagcaaatgcatggacagtggggccttcttcttaatacttctcatcctccaaaatctgttaaaatcatcatcttccacaactcacacactggaagctgtccacagcacaattcactgtgatgtggcattctgtaaataagactacattggtcttgatgcaaggcggttcagctaccagactgcactataagaaaagtcctctcctcaacttaccaagaaaacttcgccaatttctagtcaccttcctatcaattagtagagcaagattctcacatgttcactatgtctttctccagttttctcatctataagtgtactactcctattttctataggaagacaatggaaagcgtgtaattgctgttggtagataagtaggtcttgaatttattttgcaaacaagacctgttctatctaccttttcatttaggaggctaaaagcagagtcagcttgatttcaaggactctattttcttagtctccagaagaacataaccaaatccagcttttaaaacactgtcctttaacaagtcaagatactcaaataaagatcatgtataacttcaagctataggagattaactctgtacatatgcttgtttcactgtaaccaatggttaattaatctaaatgcaagagaaaagttatttggaaagaagaccccagctggtcagcatcttttctgtcatcaggaagtctcctggaaggagtatgactatgacctgggcacaacaactgcccctaagttagtacttattttagagttgctactgaacaggtggtggttcttgtcaagtatatcatgtctgactactttactgcttgttttctgctatcaccagttccagaaaaaaaaaaaaaaaaaattaagcccaactcactaattgattgctttttcattttcccagactgtgacagaatcatggtttttagctctattttcaccttactcaaatcctggaggaattaaactatcatttatttgaaatgttacaaattagcctgcagttgattcaaacaacatgtagtcactcagacatagcaaataaaaatgttttggtatatgaa

SEQ ID NO: 134478 - DNA, 2356 bp, Homo sapiens
  Payload ID: 6268
  Gene Symbol: FSD2
  Gene Name: fibronectin type III and SPRY domain containing 2
  Uniprot ID: A1L4K1
  ENST ID: ENST00000541889
  CDS Start-End: 168-2282
ggaaggaaagcctgctgaacacagattcaattttctagcagaactccaggtcctctgagttaaaggaagcatttatggacgcttagcagggcccagatattcactattaagtgtccaggaaggatctttcttatataaaggtgcttctgaggacttccagagttacaatggaggaggaatcgggggaggaactggggctggacaggtctactcccaaggatttccacttttaccacatggacctgtatgactctgaagacagactgcacctctttccagaagagaacactaggatgaggaaagtagtccaagctgaaatggccaatgagtcaagaggagcaggggatggtaaggctcaaagagaccttcaagaggaagtggatgaacttgtccacttatatggacttgaagatgatcatgaattaggggatgagtttgttgatgaaaacatacccagaacaggggtttcagaatatcctccttatatgatgaagaggagagacccagccagggagcagagagactggagacttagtggagaggcagcggaggccgaggacctgggcttcggagggtggggctcagcaggccagtgccaggacttgcgggaagcctataggtacacacacggccgtgccagcgaggagtatgaatgctatgtcatccccgaggaagaggatgaagaagaagctgctgatgtcttctgtgtcacttgtaagactccaataagagcttttcagaaggtttttgatgaacataaggagcatgaagtgatcccactcaatgaagcactggaaagtgccaaggatgaaattcacaaaaacatgtacaaattggaaaagcagataattgagatggaaaactttgcaaatcatttggaggaggttttcatcactgtggaggagaattttggaaaacaagaacaaaactttgagtcacattacaacgagatcttggaaacacttgctcaaaaatatgaggaaaaaatacaagctctaggggagaaaaagaaagagaagctggaagccttatatggacaactggtcagctgtggagaaaacctagatacttgcaaagaactgatggaaacaatagaggagatgtgtcacgaggagaaggtggatttcataaaggatgcagtggctatggctgacagactcgggaaattcctgaaaacaaaaacagacgtggaaatctctgcacagcctgagtttgaagaccagaccttggatttctctgatgtggagcagctgatgggctccattaacaccattccagctccttctgctccagtcataaatccacaggtccctaactcagccacaggttcctcagtccgagtgtgctggagcttatactccgacgacactgtggagagctatcagctgtcctaccggccagtgcaggacagctcacctgggacggaccaagcagcaccttctccccccattattaaaaccaaagagataaggagctgtgaagaggctgtgctgatttgctgggagtctgggaacctgaatcctgtggactcgtacactgtggagctgacccaggctgaaagtccagaagcctcgggtgtaactgagtctgttgtgggcatcccgacctgcgagtccgtggtgcagctgcagccggggcggagctacattatctatgtgcgagccctcaatatggggggccccagcgtgaggagcgagccagctacagtccacaccataggaagctactttcgcctaaacaaggacacttgccatccctggctgaccatttctgaagacggacttacggctgtacgaagtgaaaggagaacccccgccagggagctgtcacccagcgacactcacttcaccaggtgtgttgctgtcatgggaaatctaattccagtccgagggcaccattactgggaggtggaggtggatgagcatttggactacagagttggtgtggcctttgcagatgtccgtaaacaggaggatctgggagcaaattgcctctcctggtgcatgaggcacacatttgcatcatcaaggcataagtatgaatttctgcacaacagaacaactccagatataagaataacagttccaccaaagaagattggcattctattagactatgaacattcaaagttgtcatttttcaatgtggacctttctcagcatctatatacatttagttgtcagcttcacgaatttgtgcatccctgtttttctttggaaaagcctgggtgtctaaaggtacataatggcatttcaatgccaaaacatgtcactttctattagaacattctgatgtccagtttcctgtcttccatgcctacccctctcgcagctgctcacgccttagctggctgaac

SEQ ID NO: 134479 - DNA, 603 bp, Homo sapiens
  Payload ID: 6268
  Gene Symbol: FSD2
  Gene Name: fibronectin type III and SPRY domain containing 2
  ENST ID: ENST00000561368
  CDS Start-End: 301-603
catgcagaggtcactaggaaggaaagcctgctgaacacagattcaattttctagcagaactccaggtcctctgagttaaaggaagcatttatggacgcttagcagccactggggaccagctctggccaggacaattccgtttgccatgatgtgggttgaaatcacaacttctcccgggcgcagtggctcacgcctctaatcccagcactttgggaggccaagggcccagatattcactattaagtgtccaggaaggatctttcttatataaaggtgcttctgaggacttccagagttacaatggaggaggaatcgggggaggaactggggctggacaggtctactcccaaggatttccacttttaccacatggacctgtatgactctgaagacagactgcacctctttccagaagagaacactaggatgaggaaagtagtccaagctgaaatggccaatgagtcaagaggagcaggggatggtaaggctcaaagagaccttcaagaggaagtggatgaacttgtccacttatatggacttgaagatgatcatgaattaggggatgagtttgttgatgaaaacatacccagaacaggggtttca

SEQ ID NO: 134480 - DNA, 6552 bp, Homo sapiens
  Payload ID: 6269
  Gene Symbol: FNDC1
  Gene Name: fibronectin type III domain containing 1
  Uniprot ID: Q4ZHG4
  ENST ID: ENST00000297267
  CDS Start-End: 201-5885
ctcagtggcggagcgcggctgccggtgtgcggccgggagcgatcgccgcggggcaggggcgcggcgggcaccgcgcagagcgcgcagaacagacggacggcggcggggacccgacggcggcgcctcggcactccccagactccggccagcgcccccctgccagccgcaagcacccagccccggcccaccccgggctctcgatggcccccgaggccggggcgaccctgcgcgcgccgcgccggctgtcctgggcggcgctgctgctcttggccgcgctgctccccgtcgcctcctcggcggcggcctcagttgaccacccactgaagccaaggcatgtgaaactgctgtccactaaaatgggcctgaaagtcacgtgggacccacccaaagatgctaccagtagacctgtggagcattacaacattgcctatgggaagtcactgaaaagtcttaaatacatcaaggtgaatgcggagacatactccttccttattgaggatgtggagccgggggtagtgtactttgtgctgcttactgcagaaaaccacagtggagtgagccgtcctgtttacagagctgaaagcccacctggaggtgaatggatcgagattgatggttttcccattaagggtccaggaccatttaatgaaaccgtcacagaaaaggaagtgcccaacaagcccttgcgtgtgcgtgtccggtcctcagatgacaggctgtccgttgcgtggaaggcaccacgcctgtctggagccaagagtccacgcagatcacggggttttctcctgggctacggggagagtggccggaagatgaattatgttccactgacaagagatgaacggacacacgaaattaaaaagctagcctcggaatccgtgtatgtggtctccctgcagtccatgaactctcagggccggagccaaccagtctacagggctgccctaacaaagcgaaagatttcagaagaggacgaattggatgtacctgacgacatcagcgtccgggttatgtcatctcagtctgtgcttgtgtcctgggtggatcctgttctggaaaaacagaagaaagttgttgcatcaagacagtacaccgtgcgctatcgagagaagggggaattggccaggtgggattataagcagatcgctaacaggcgtgtgctgattgagaacctgattccagacactgtgtatgaatttgcagtccgtatttcacagggtgaaagagatggcaaatggagtacgtcagtcttccaaagaacaccagaatctgcccctaccacagctcctgaaaacttgaacgtctggccagtcaatggcaaacctacagttgtcgctgcatcttgggatgcgctaccagagactgaggggaaagtgaaagaatacattctttcatacgccccggctctcaaaccatttggagcaaagtccctcacctatcctggagacactacttctgccctggtggatggtctgcagcctggggaacgctatcttttcaaaatccgggccacaaacaggagaggcctgggacctcactccaaagccttcattgtcgctatgccaacaaccagtaaggcggatgttgagcagaacacggaggacaatgggaaacccgaaaaacctgagccttcctcaccttctcccagagctccagcttcctcccaacacccctctgtgcctgcttctccccaagggagaaatgccaaggaccttcttcttgacttgaagaacaaaatattggctaatggtggggcgccccgaaaaccccagcttcgcgccaagaaggcagaggagctggatcttcagtcgacagaaatcactggggaggaggagctgggttcccgggaggactcgcccatgtcaccctcagacacccaagaccagaaacggaccctgaggccgccaagtagacacggccactcggtggttgctcccggcaggactgcagtgagggcccggatgccagcgctgccccgaagggaaggcgtagataagcctggcttttccctggccacgcagccccgcccaggggcgcccccctcggcttcggcctctcctgcccaccacgcgtccacccagggcacctctcatcgtccttccctgcctgccagcttgaatgacaacgacttggtggactcagacgaagatgagcgcgctgtgggctccctccaccccaagggcgccttcgcccagccccggccagccctgtcccccagccgccagtccccgtccagcgttctccgcgacagaagctctgtgcaccccggcgcaaagccagcctcgccggcccggaggaccccccattcaggggccgcagaggaagattccagtgcctcagccccaccctcaagactttctccaccccatgggggatcatctcggctgctgcccacccagccacacctgagctctccactttccaagggcgggaaggatggtgaggacgccccagccaccaactccaatgcgccatcacggtccaccatgtcctcctccgtctcttctcatctctcgtccaggacgcaggtctctgagggagcggaggcttctgatggtgaaagccacggtgacggcgatagggaagacggcggaaggcaggcggaggccacggcccagacgctgcgggcccggcctgcctctggacacttccatttgctcagacacaaaccctttgctgccaacgggaggtctccaagcaggttcagcattgggcggggacctcggctgcagccctccagctccccacagtcgactgtgccctcccgagcccaccccagggttccctctcactctgattcccaccctaagcttagctcaggtatccatggagacgaggaggatgagaagccgcttcctgccaccgttgtcaatgaccacgtgccttcctcctccaggcagcccatctcccggggctgggaggacttaaggagaagcccgcagagaggggccagcctgcatcggaaggaacccatcccagagaaccccaaatccacaggggcagatacacatcctcagggcaagtactcctccctggcctccaaggctcaggatgttcaacagagcacagacgcggacacggagggtcattctcccaaagcacagccagggtccacagaccgccacgcgtcccctgctcgtccgcccgcagcacggtcacagcagcatcccagtgttcccagaaggatgacacccggccgggccccacaacagcagccccctcctcccgtcgccacgtcccagcaccacccgggaccccagagcagagacgcgggtcggtcaccttcccagcccaggctctcactgacccaggccgggcggccccgccccacgtcgcagggccgctcccactcctcctcggacccttacacggcgagctccagagggatgctccccacggccctccagaaccaggacgaggatgcccagggcagctacgacgacgacagcacagaagtcgaggcccaggatgtgcgggcccccgcgcacgccgcgcgcgccaaggaggcagctgcgtcccttcccaagcaccagcaggtggagtctcccacaggcgcaggggcaggtggcgaccacaggtcccagcgcggacatgcggcctcccccgccaggcccagccgacccggcggcccccagtcccgcgcccgggtacccagcagggcagcgccggggaagtcggagcctccttccaagcggcccctgtcctccaagtcccagcagtcggtctcagccgaggacgacgaggaggaggacgcgggattttttaaaggcgggaaagaagaccttctgtcttcctctgtgccaaagtggccctcttcctccactcccaggggcggcaaagacgccgatgggagcctcgccaaggaagagagggagcctgccatcgcgcttgcccctcgcggagggagcctggctcctgtgaagcgacctctccccccacctccaggcagctcccccagggcctcccacgtcccttcccgactgccgcctcgcagcgctgccaccgtgagccccgtcgcgggcacccacccctggccgcagtacaccacgcgcgccccacctggccacttctccaccaccccgatgctgtccttgcgccagaggatgatgcatgccagattccgtaaccctctctcccgacagcctgccagaccctcttacagacaaggttataatggcagaccaaatgtagaagggaaagtccttcctggtagtaatggaaaaccgaatggacagagaattatcaatggccctcaaggaacaaagtgggttgtggaccttgatcgtgggttagtattgaatgcagaaggaaggtacctccaagattcacatggaaatcctcttcggattaaactaggaggagatggtcgaaccattgtagatctggaagggacccccgtggtgagtcctgacggcctcccactctttgggcaggggcgacatggcacacctctggccaatgcccaagataagccaattttgagtcttggaggaaagccgctggtgggcttggaggtcatcaaaaaaaccacccatccccctaccactaccatgcagcccaccactactacgacgcccctgcctaccactacaaccccgaggcccaccactgccaccacccgccgcacgaccaccacccgccgcacgaccaccaggcgtccaacaaccacagtccgaaccactacgcggacaaccaccaccaccacccccacacccaccactcccatccccacctgtccccctgggaccttggaacggcacgacgatgatggcaacctgataatgagctccaatgggatcccagagtgctacgctgaagaagatgagttctcaggcttggagactgacactgcagtacctacggaagaggcctacgttatatatgatgaagattatgaatttgagacgtcaaggccaccaaccaccactgagccttcgaccactgctaccacaccgagggtgatcccagaggaaggcgccatcagttcctttcctgaagaagaatttgatctggctggaaggaaacgatttgttgctccttacgtgacgtacctaaataaagacccatcagccccgtgctctctgactgatgcactggatcacttccaagtggacagcctggatgaaatcatccccaatgacctgaagaagagtgacctgcctccccagcatgctccccgcaacatcaccgtggtggccgtggaaggttgccactcatttgtcattgtggactgggacaaagccaccccaggagatgtggtcacaggttacttggtttacagtgcatcctatgaagacttcatcaggaacaagtggtccactcaagcttcatcagtaactcacttgcccattgagaacctaaagcccaacacgaggtattattttaaagtgcaagcacaaaatcctcatggctacggacctatcagcccttcggtctcatttgtcaccgaatcagataatcctctgcttgttgtgaggcccccaggcggtgagcctatctggatcccattcgctttcaaacatgatcccagctacacggactgccatggacggcaatatgtgaagcgcacgtggtatcgaaagttcgtgggagttgttctttgtaattcactgaggtataaaatctacctcagtgacaacctgaaagatacattctacagcattggagacagctggggaagaggtgaagaccattgccaatttgtggattcacaccttgatggaagaacagggcctcagtcctatgtagaagccctccctactattcaaggctactatcgccagtatcgtcaggagcctgtcaggtttgggaacatcggcttcggaaccccctactactatgtgggctggtacgagtgtggggtctccatccctggaaagtggtaatcacaggaccgtcatgctgcaagcttgccctgcccagccccaccaactaagtcgcactaggggctgtgagcaaagacagccagcgtgctcagccccgctgccctaggtgccaggaaggtcatagatggacactggccattctggtcatctcagtctggaactcagtcccacttcttggcctggacaatgaacaggattcagttttgctgttaactttgcttctctacttttttttgtttgtttgtaatagcacatcccagagacatcagaaaccagcaactgattcagtgtgatttccagactttttaggcatgaaattcggacacttcagtatttccaggaatagcatatgcacgctgttcttgcttcatggaatgctacatgctttctgtttttctcattttggatttctccaaaactaactgaatttaagcttcaggtccctttgtatgcagtagaaaggaattattaaaaacaccaccaaagaaaataaatatatcctacttgaaatttactctatggacttacccactgctagaataaatgtatcaaatcttatttgtaaattctcaattttgatatatatatgtatatatgcatatacatatccacacttgtctgcaagaatattgattaaaattgctaaatttgtacttgttcaccagat

SEQ ID NO: 134481 - DNA, 6034 bp, Homo sapiens
  Payload ID: 6269
  Gene Symbol: FNDC1
  Gene Name: fibronectin type III domain containing 1
  ENST ID: ENST00000329629
  CDS Start-End: 1-5371
gccaaggcatgtgaaactgctgtccactaaaatgggcctgaaagtcacgtgggacccacccaaagatgctaccagtagacctgtggagcattacaacattgcctatgggaagtcactgaaaagtcttaaatacatcaaggtgaatgcggagacatactccttccttattgaggatgtggagccgggggtagtgtactttgtgctgcttactgcagaaaaccacagtggagtgagccgtcctgtttacagagctgaaagcccacctggaggtgaatggatcgagattgatggttttcccattaagggtccaggaccatttaatgaaaccgtcacagaaaaggaagtgcccaacaagcccttgcgtgtgcgtgtccggtcctcagatgacaggctgtccgttgcgtggaaggcaccacgcctgtctggagccaagagtccacgcagatcacggggttttctcctgggctacggggagagtggccggaagatgaattatgttccactgacaagagatgaacggacacacgaaattaaaaagctagcctcggaatccgtgtatgtggtctccctgcagtccatgaactctcagggccggagccaaccagtctacagggctgccctaacaaagcgaaagatttcagaagaggacgaattggatgtacctgacgacatcagcgtccgggttatgtcatctcagtctgtgcttgtgtcctgggtggatcctgttctggaaaaacagaagaaagttgttgcatcaagacagtacaccgtgcgctatcgagagaagggggaattggccaggtgggattataagcagatcgctaacaggcgtgtgctgattgagaacctgattccagacactgtgtatgaatttgcagtccgtatttcacagggtgaaagagatggcaaatggagtacgtcagtcttccaaagaacaccagaatctgcccctaccacagctcctgaaaacttgaacgtctggccagtcaatggcaaacctacagttgtcgctgcatcttgggatgcgctaccagagactgaggggaaagtgaaagccagtaaggcggatgttgagcagaacacggaggacaatgggaaacccgaaaaacctgagccttcctcaccttctcccagagctccagcttcctcccaacacccctctgtgcctgcttctccccaagggagaaatgccaaggaccttcttcttgacttgaagaacaaaatattggctaatggtggggcgccccgaaaaccccagcttcgcgccaagaaggcagaggagctggatcttcagtcgacagaaatcactggggaggaggagctgggttcccgggaggactcgcccatgtcaccctcagacacccaagaccagaaacggaccctgaggccgccaagtagacacggccactcggtggttgctcccggcaggactgcagtgagggcccggatgccagcgctgccccgaagggaaggcgtagataagcctggcttttccctggccacgcagccccgcccaggggcgcccccctcggcttcggcctctcctgcccaccacgcgtccacccagggcacctctcatcgtccttccctgcctgccagcttgaatgacaacgacttggtggactcagacgaagatgagcgcgctgtgggctccctccaccccaagggcgccttcgcccagccccggccagccctgtcccccagccgccagtccccgtccagcgttctccgcgacagaagctctgtgcaccccggcgcaaagccagcctcgccggcccggaggaccccccattcaggggccgcagaggaagattccagtgcctcagccccaccctcaagactttctccaccccatgggggatcatctcggctgctgcccacccagccacacctgagctctccactttccaagggcgggaaggatggtgaggacgccccagccaccaactccaatgcgccatcacggtccaccatgtcctcctccgtctcttctcatctctcgtccaggacgcaggtctctgagggagcggaggcttctgatggtgaaagccacggtgacggcgatagggaagacggcggaaggcaggcggaggccacggcccagacgctgcgggcccggcctgcctctggacacttccatttgctcagacacaaaccctttgctgccaacgggaggtctccaagcaggttcagcattgggcggggacctcggctgcagccctccagctccccacagtcgactgtgccctcccgagcccaccccagggttccctctcactctgattcccaccctaagcttagctcaggtatccatggagacgaggaggatgagaagccgcttcctgccaccgttgtcaatgaccacgtgccttcctcctccaggcagcccatctcccggggctgggaggacttaaggagaagcccgcagagaggggccagcctgcatcggaaggaacccatcccagagaaccccaaatccacaggggcagatacacatcctcagggcaagtactcctccctggcctccaaggctcaggatgttcaacagagcacagacgcggacacggagggtcattctcccaaagcacagccagggtccacagaccgccacgcgtcccctgctcgtccgcccgcagcacggtcacagcagcatcccagtgttcccagaaggatgacacccggccgggccccacaacagcagccccctcctcccgtcgccacgtcccagcaccacccgggaccccagagcagagacgcgggtcggtcaccttcccagcccaggctctcactgacccaggccgggcggccccgccccacgtcgcagggccgctcccactcctcctcggacccttacacggcgagctccagagggatgctccccacggccctccagaaccaggacgaggatgcccagggcagctacgacgacgacagcacagaagtcgaggcccaggatgtgcgggcccccgcgcacgccgcgcgcgccaaggaggcagctgcgtcccttcccaagcaccagcaggtggagtctcccacaggcgcaggggcaggtggcgaccacaggtcccagcgcggacatgcggcctcccccgccaggcccagccgacccggcggcccccagtcccgcgcccgggtacccagcagggcagcgccggggaagtcggagcctccttccaagcggcccctgtcctccaagtcccagcagtcggtctcagccgaggacgacgaggaggaggacgcgggattttttaaaggcgggaaagaagaccttctgtcttcctctgtgccaaagtggccctcttcctccactcccaggggcggcaaagacgccgatgggagcctcgccaaggaagagagggagcctgccatcgcgcttgcccctcgcggagggagcctggctcctgtgaagcgacctctccccccacctccaggcagctcccccagggcctcccacgtcccttcccgactgccgcctcgcagcgctgccaccgtgagccccgtcgcgggcacccacccctggccgcagtacaccacgcgcgccccacctggccacttctccaccaccccgatgctgtccttgcgccagaggatgatgcatgccagattccgtaaccctctctcccgacagcctgccagaccctcttacagacaaggttataatggcagaccaaatgtagaagggaaagtccttcctggtagtaatggaaaaccgaatggacagagaattatcaatggccctcaaggaacaaagtgggttgtggaccttgatcgtgggttagtattgaatgcagaaggaaggtacctccaagattcacatggaaatcctcttcggattaaactaggaggagatggtcgaaccattgtagatctggaagggacccccgtggtgagtcctgacggcctcccactctttgggcaggggcgacatggcacacctctggccaatgcccaagataagccaattttgagtcttggaggaaagccgctggtgggcttggaggtcatcaaaaaaaccacccatccccctaccactaccatgcagcccaccactactacgacgcccctgcctaccactacaaccccgaggcccaccactgccaccacccgccgcacgaccaccacccgccgcacgaccaccaggcgtccaacaaccacagtccgaaccactacgcggacaaccaccaccaccacccccacacccaccactcccatccccacctgtccccctgggaccttggaacggcacgacgatgatggcaacctgataatgagctccaatgggatcccagagtgctacgctgaagaagatgagttctcaggcttggagactgacactgcagtacctacggaagaggcctacgttatatatgatgaagattatgaatttgagacgtcaaggccaccaaccaccactgagccttcgaccactgctaccacaccgagggtgatcccagaggaaggcgccatcagttcctttcctgaagaagaatttgatctggctggaaggaaacgatttgttgctccttacgtgacgtacctaaataaagacccatcagccccgtgctctctgactgatgcactggatcacttccaagtggacagcctggatgaaatcatccccaatgacctgaagaagagtgacctgcctccccagcatgctccccgcaacatcaccgtggtggccgtggaaggttgccactcatttgtcattgtggactgggacaaagccaccccaggagatgtggtcacaggttacttggtttacagtgcatcctatgaagacttcatcaggaacaagtggtccactcaagcttcatcagtaactcacttgcccattgagaacctaaagcccaacacgaggtattattttaaagtgcaagcacaaaatcctcatggctacggacctatcagcccttcggtctcatttgtcaccgaatcagataatcctctgcttgttgtgaggcccccaggcggtgagcctatctggatcccattcgctttcaaacatgatcccagctacacggactgccatggacggcaatatgtgaagcgcacgtggtatcgaaagttcgtgggagttgttctttgtaattcactgaggtataaaatctacctcagtgacaacctgaaagatacattctacagcattggagacagctggggaagaggtgaagaccattgccaatttgtggattcacaccttgatggaagaacagggcctcagtcctatgtagaagccctccctactattcaaggctactatcgccagtatcgtcaggagcctgtcaggtttgggaacatcggcttcggaaccccctactactatgtgggctggtacgagtgtggggtctccatccctggaaagtggtaatcacaggaccgtcatgctgcaagcttgccctgcccagccccaccaactaagtcgcactaggggctgtgagcaaagacagccagcgtgctcagccccgctgccctaggtgccaggaaggtcatagatggacactggccattctggtcatctcagtctggaactcagtcccacttcttggcctggacaatgaacaggattcagttttgctgttaactttgcttctctacttttttttgtttgtttgtaatagcacatcccagagacatcagaaaccagcaactgattcagtgtgatttccagactttttaggcatgaaattcggacacttcagtatttccaggaatagcatatgcacgctgttcttgcttcatggaatgctacatgctttctgtttttctcattttggatttctccaaaactaactgaatttaagcttcaggtccctttgtatgcagtagaaaggaattattaaaaacaccaccaaagaaaataaatatatcctacttgaaatttactctatggacttacccactgctagaataaatgtatcaaatcttatttgtaaattctcaattttgatatatatatgtatatatgcatatacatatccacacttgtctgcaagaatattgattaaaattgctaaatttgtacttgttcacc

SEQ ID NO: 134482 - DNA, 5714 bp, Homo sapiens
  Payload ID: 6270
  Gene Symbol: FNDC3A
  Gene Name: fibronectin type III domain containing 3A
  Uniprot ID: Q9Y2H6
  ENST ID: ENST00000398316
  CDS Start-End: 88-3516
agccgttctccaattaaagctgttaacgtgtactacgctgtttccttgttggattttcttgttctctgctgctactgtaaaaacgaaatgagtggtcctgctcaggttccaatgatgtccccaaatggttctgtgcctcctatctatgtgcctcctggatatgccccacaggttattgaagacaatggtgttcgaagagttgtcgtggtccctcaggcaccagagtttcaccctggtagtcacacagttctccaccgttctccacatcctcctctacctggtttcattcctgtcccaactatgatgccgcctccaccacgtcatatgtactcacccgtgactggagctggagacatgacaacacagtatatgccacagtatcagtcttcacaagtctatggagatgtagatgctcactctacacatggaaggtccaactttagagatgaacgatctagtaaaacatatgaacgtttgcagaaaaaattgaaggatcgccaaggaacacagaaagataaaatgagcagtccaccatcatcaccccagaaatgcccttctcccattaatgaacataatggacttataaaaggacaaattgctggtggtataaacacaggatcagcaaaaatcaagtctgggaaggggaaaggtggtacacaagttgatacagaaattgaagaaaaagatgaagaaactaaagcatttgaagcacttctttccaacattgtcaaaccagtggcctccgacatccaggcaaggacagtagtacttacctggtcaccaccttccagcctcattaatggtgaaacagatgaaagtagtgtaccagagctctatggttatgaagttctgatctcaagtactggaaaagatgggaaatacaaaagtgtatatgtaggagaagaaacaaatatcactttaaatgatctcaagccagccatggattaccatgcaaaagtccaggcagaatataattctataaagggaactccttcagaggctgaaatctttaccaccttgagctgtgaacctgatatacctaatccaccaaggatagccaatcggaccaaaaattcactcactttgcaatggaaggcacctagtgacaatggttctaaaatccaaaactttgtattagaatgggatgaaggaaaaggaaatggagaattttgtcagtgttacatgggctcacagaaacaatttaaaattactaaactttcaccagcaatgggctgtaaattcagactatcggccagaaatgactatggtacaagtggttttagtgaagaagtcttatattacacctcaggctgtgctccttctatgccagcaagtcctgtattaaccaaggctggaattacttggttatccttacaatggagtaagccctcaggaacaccatcagatgaaggaatttcttacattttagagatggaggaagaaacttcaggatatggttttaagcctaaatatgatggagaagatcttgcttacacagtgaaaaatctcagacgtagtactaagtataaatttaaggttattgcttacaactcagaaggtaaaagtaatccaagtgaagtagtagaatttactacttgccctgataaaccaggcatacctgtaaagccttcagtgaaaggaaagatacattcacacagttttaaaataacctgggatccaccaaaagacaatggcggagcaaccatcaataaatatgtagtggagatggcagaaggttctaacggaaacaaatgggaaatgatatacagtggtgctaccagggaacatctttgtgatcgactgaatccaggctgtttctatcgtttacgagtttactgcatcagtgatggaggacagagtgcggtctctgaatctttacttgtgcagactccagctgtgcctcctggcccatgcctccctcccagattacagggtagacccaaagcaaaagaaatacagttacgatggggaccccctctggttgatggtggatcacccatttcctgttacagtgtggaaatgtctcctatagaaaaagatgaacctagagaagtttaccaaggttctgaagtagaatgtacagtgagcagccttcttcctggaaagacatacagcttcagactacgtgcagctaacaaaatggggtttggaccattttcagaaaaatgtgatattactacagcccctgggccaccagatcagtgcaagccccctcaagtgacatgtagatctgcaacttgtgcacaagtgaattgggaggttcctttgagtaatggaacagatgtcactgaatatcgactggagtggggaggagttgaaggaagtatgcagatatgttactgtgggcctggtctcagttatgaaataaaaggactttcaccagcaactacctattattgcagggtccaggctctgagtgttgtgggtgcaggccctttcagtgaagtagtagcctgtgtgactccaccatcagttcctggcattgtgacctgtcttcaagaaataagcgatgatgagatagaaaatccccattattcaccttctacatgccttgcaataagctgggaaaagccttgtgatcatggttcggaaatccttgcctacagcatagactttggagataaacaatccctaacagtgggaaaggttacaagctatattatcaacaatttgcaaccagatacaacatacagaatacgaattcaagccttgaatagccttggagctggtcctttcagccatatgataaaattaaaaactaagcctctccctcctgatccacctcgtctggaatgtgttgcctttagccaccagaaccttaagctgaaatggggagaaggaactccaaagacattgtcaaccgattctattcagtaccaccttcagatggaggataagaatggacggtttgtatccctatacagaggaccatgtcatacatacaaagtacaaagacttaatgagtcaacatcctataaattctgtattcaagcttgtaatgaagctggggaaggtcccctctcccaagaatatattttcactactccaaaatctgtcccagctgccttgaaagcccccaaaatagagaaagtaaatgatcacatttgtgaaattacatgggagtgtttacagccaatgaaaggtgatccagttatttacagtcttcaagttatgttgggaaaagattcagaattcaaacagatttacaagggtcccgactcttccttccggtattccagccttcagctgaactgtgaatatcgcttccgtgtatgtgccattcgccagtgccaagactctctgggacaccaggacctcgtaggtccctacagcaccacagtgctcttcatctctcagaggactgaaccaccagccagcaccaacagagacactgtggaaagcacaaggacccgacgggcactgagtgacgagcagtgtgctgccgtcatccttgtgctgtttgctttcttttccattttgattgcctttatcattcagtactttgtaatcaagtgaaaatataactttattttttaactctattacattttattttgtcatgtactaaaattatttctgtattgcttttataaaaaacagtggcatttagcactggcattgagactatagcacatcatttttgccattttcagtgcttatattgttaggtagaggctggcactttattagaatgcaagccacaaaaatatcaattttgttttttttgttagggtgggtcttctttttttctttccctctctctttttttaacaaatgccttcttatagaaaaactttctaagaggcaacaatttagaatggatattttgacgaatcggcatgagtgtaacagtgataacctgatctgtttgttttaaagattattaccaagtgaaaaattcagaatgaatagaatttacactaacatgctatataaaatgttaaagtctgatgctgtgaaagcaatctagtgctatatttctacctcctcatttgtcttaattatttggtaagtgggattatgatgagtaactggaggggcttagaaacaaaaactggatgaaagagtatgcatgaagaaaagcttctttgataaatgtggagttcttcattataaatatatattcatgaattcacagataagtacttaaagaacagacagtttacttggcctaaaaatattttgatgtttactcaaaaagtacctcttcaggtcttgagaacatggaaaagaattgagtgcttttaaatactttttagaaagtaatcataaaagtaaattgaatttcaaacctatttggcttctgttttgtgaacctttgaactatatgtatgtgtataagggtatacacatacatatatggcatataacaagtgtacacatatacacataacaagtgtagaagtatatattacatacatacactcactctgtctggtataggctaattttgaagaactcccataagtttctgctgcttctcccataactgctgccaccaccatcagaattcataatcaaacctaacctttttgtttggggcaccaaatctgaagacaaaattaatttgcaccagtaaacttcaagctgctttctttcttgaaaactaaacgtttaacgtataatgtctgtttggatactgttccaaattgttgattgcatgtggttaatgttgcattagagcactttgcaattgcataattcattaatgttttgtgagcttgcatttgtgagttattggatgatcagactgaattttgtcaagtatcacattgtacatcttgcctagatgtcgatgactgcaagtaataatacagtttataatgaaactatctacaattcttgttttagcacatctgttatccgtaaaacacctgtaactagcttttttaatttattatttgaattttaggatagcgaatcactaatttttagttgctgaggttggcattttagtgattattaagcacttctgtcagtctttgaaaaaagaacgtattttttgtgctttgaagatctctgaagaatttcttttataatagaatgggcatgtattgtaacagttttatgtcaaatgatctgtgctgtagaaaaacattaacccttgttcaaaaaagaaatggataaacttggcctttctaagtggtaagaatgacctgtcactataatatactgtatgtttacattttatttaaatttaatctcttatgtatagggtgataaccttccccagaaacaacagtgattgcgattgttttctagaaacttctttaaagtgccacatttggcagtacaaatgagtctgagtgtaatagcccagagatttatatatagttgaatgtctaaaatggtaaaatgtgccactgtgtcaagttacagtggcttatgtttttcatagtaattcaaatgaacttcctatttttgatagtaaatgtcatttaatagtatacttgccatttgagcctcactgcaaaattagtgcagaggagaaaacaatttttaatgtaatcttgattttacctcatatactgtacattccaaaaactctaaactttttaaagattatagatacactaccaaacatatcaccttaaaattgtataaggctgaatgaacttcatacaaatgaaaaaaatctcataaaaatacataaactatgtagcaaaagtatctgtaaaatccatggaaaataaaagttgtatcattctttttga

SEQ ID NO: 134483 - DNA, 6286 bp, Homo sapiens
  Payload ID: 6270
  Gene Symbol: FNDC3A
  Gene Name: fibronectin type III domain containing 3A
  Uniprot ID: Q9Y2H6
  ENST ID: ENST00000492622
  CDS Start-End: 306-3902
ctcccggctccgtagtaagcatggcggcggcggcgttcgtggtccctcgggtgaaacagaaagcgggagctacgcggagagggagcgaagagcggggctgaggcggcggcgtcactgccaggaaacaaccccaacagtcagcgcgccggcggccgcggcggccctgagagctgactctgcagctgaggtagagagacaacgatcaggaaccctaagaagaggcgccagaggagccgccttctgcctcagaacggcgtgactcggagaattggagcgttattcagtatattaatgtcttattgataatggcagaacatccaccactactggatacaactcagatcttaagtagtgatatttctcttttgtctgcccctattgtaagtgcagatggaacacaacaggttattctggtacaagttaacccaggagaagcatttacaataagaagagaagatggacagtttcagtgcattacaggtcctgctcaggttccaatgatgtccccaaatggttctgtgcctcctatctatgtgcctcctggatatgccccacaggttattgaagacaatggtgttcgaagagttgtcgtggtccctcaggcaccagagtttcaccctggtagtcacacagttctccaccgttctccacatcctcctctacctggtttcattcctgtcccaactatgatgccgcctccaccacgtcatatgtactcacccgtgactggagctggagacatgacaacacagtatatgccacagtatcagtcttcacaagtctatggagatgtagatgctcactctacacatggaaggtccaactttagagatgaacgatctagtaaaacatatgaacgtttgcagaaaaaattgaaggatcgccaaggaacacagaaagataaaatgagcagtccaccatcatcaccccagaaatgcccttctcccattaatgaacataatggacttataaaaggacaaattgctggtggtataaacacaggatcagcaaaaatcaagtctgggaaggggaaaggtggtacacaagttgatacagaaattgaagaaaaagatgaagaaactaaagcatttgaagcacttctttccaacattgtcaaaccagtggcctccgacatccaggcaaggacagtagtacttacctggtcaccaccttccagcctcattaatggtgaaacagatgaaagtagtgtaccagagctctatggttatgaagttctgatctcaagtactggaaaagatgggaaatacaaaagtgtatatgtaggagaagaaacaaatatcactttaaatgatctcaagccagccatggattaccatgcaaaagtccaggcagaatataattctataaagggaactccttcagaggctgaaatctttaccaccttgagctgtgaacctgatatacctaatccaccaaggatagccaatcggaccaaaaattcactcactttgcaatggaaggcacctagtgacaatggttctaaaatccaaaactttgtattagaatgggatgaaggaaaaggaaatggagaattttgtcagtgttacatgggctcacagaaacaatttaaaattactaaactttcaccagcaatgggctgtaaattcagactatcggccagaaatgactatggtacaagtggttttagtgaagaagtcttatattacacctcaggctgtgctccttctatgccagcaagtcctgtattaaccaaggctggaattacttggttatccttacaatggagtaagccctcaggaacaccatcagatgaaggaatttcttacattttagagatggaggaagaaacttcaggatatggttttaagcctaaatatgatggagaagatcttgcttacacagtgaaaaatctcagacgtagtactaagtataaatttaaggttattgcttacaactcagaaggtaaaagtaatccaagtgaagtagtagaatttactacttgccctgataaaccaggcatacctgtaaagccttcagtgaaaggaaagatacattcacacagttttaaaataacctgggatccaccaaaagacaatggcggagcaaccatcaataaatatgtagtggagatggcagaaggttctaacggaaacaaatgggaaatgatatacagtggtgctaccagggaacatctttgtgatcgactgaatccaggctgtttctatcgtttacgagtttactgcatcagtgatggaggacagagtgcggtctctgaatctttacttgtgcagactccagctgtgcctcctggcccatgcctccctcccagattacagggtagacccaaagcaaaagaaatacagttacgatggggaccccctctggttgatggtggatcacccatttcctgttacagtgtggaaatgtctcctatagaaaaagatgaacctagagaagtttaccaaggttctgaagtagaatgtacagtgagcagccttcttcctggaaagacatacagcttcagactacgtgcagctaacaaaatggggtttggaccattttcagaaaaatgtgatattactacagcccctgggccaccagatcagtgcaagccccctcaagtgacatgtagatctgcaacttgtgcacaagtgaattgggaggttcctttgagtaatggaacagatgtcactgaatatcgactggagtggggaggagttgaaggaagtatgcagatatgttactgtgggcctggtctcagttatgaaataaaaggactttcaccagcaactacctattattgcagggtccaggctctgagtgttgtgggtgcaggccctttcagtgaagtagtagcctgtgtgactccaccatcagttcctggcattgtgacctgtcttcaagaaataagcgatgatgagatagaaaatccccattattcaccttctacatgccttgcaataagctgggaaaagccttgtgatcatggttcggaaatccttgcctacagcatagactttggagataaacaatccctaacagtgggaaaggttacaagctatattatcaacaatttgcaaccagatacaacatacagaatacgaattcaagccttgaatagccttggagctggtcctttcagccatatgataaaattaaaaactaagcctctccctcctgatccacctcgtctggaatgtgttgcctttagccaccagaaccttaagctgaaatggggagaaggaactccaaagacattgtcaaccgattctattcagtaccaccttcagatggaggataagaatggacggtttgtatccctatacagaggaccatgtcatacatacaaagtacaaagacttaatgagtcaacatcctataaattctgtattcaagcttgtaatgaagctggggaaggtcccctctcccaagaatatattttcactactccaaaatctgtcccagctgccttgaaagcccccaaaatagagaaagtaaatgatcacatttgtgaaattacatgggagtgtttacagccaatgaaaggtgatccagttatttacagtcttcaagttatgttgggaaaagattcagaattcaaacagatttacaagggtcccgactcttccttccggtattccagccttcagctgaactgtgaatatcgcttccgtgtatgtgccattcgccagtgccaagactctctgggacaccaggacctcgtaggtccctacagcaccacagtgctcttcatctctcagaggactgaaccaccagccagcaccaacagagacactgtggaaagcacaaggacccgacgggcactgagtgacgagcagtgtgctgccgtcatccttgtgctgtttgctttcttttccattttgattgcctttatcattcagtactttgtaatcaagtgaaaatataactttattttttaactctattacattttattttgtcatgtactaaaattatttctgtattgcttttataaaaaacagtggcatttagcactggcattgagactatagcacatcatttttgccattttcagtgcttatattgttaggtagaggctggcactttattagaatgcaagccacaaaaatatcaattttgttttttttgttagggtgggtcttctttttttctttccctctctctttttttaacaaatgccttcttatagaaaaactttctaagaggcaacaatttagaatggatattttgacgaatcggcatgagtgtaacagtgataacctgatctgtttgttttaaagattattaccaagtgaaaaattcagaatgaatagaatttacactaacatgctatataaaatgttaaagtctgatgctgtgaaagcaatctagtgctatatttctacctcctcatttgtcttaattatttggtaagtgggattatgatgagtaactggaggggcttagaaacaaaaactggatgaaagagtatgcatgaagaaaagcttctttgataaatgtggagttcttcattataaatatatattcatgaattcacagataagtacttaaagaacagacagtttacttggcctaaaaatattttgatgtttactcaaaaagtacctcttcaggtcttgagaacatggaaaagaattgagtgcttttaaatactttttagaaagtaatcataaaagtaaattgaatttcaaacctatttggcttctgttttgtgaacctttgaactatatgtatgtgtataagggtatacacatacatatatggcatataacaagtgtacacatatacacataacaagtgtagaagtatatattacatacatacactcactctgtctggtataggctaattttgaagaactcccataagtttctgctgcttctcccataactgctgccaccaccatcagaattcataatcaaacctaacctttttgtttggggcaccaaatctgaagacaaaattaatttgcaccagtaaacttcaagctgctttctttcttgaaaactaaacgtttaacgtataatgtctgtttggatactgttccaaattgttgattgcatgtggttaatgttgcattagagcactttgcaattgcataattcattaatgttttgtgagcttgcatttgtgagttattggatgatcagactgaattttgtcaagtatcacattgtacatcttgcctagatgtcgatgactgcaagtaataatacagtttataatgaaactatctacaattcttgttttagcacatctgttatccgtaaaacacctgtaactagcttttttaatttattatttgaattttaggatagcgaatcactaatttttagttgctgaggttggcattttagtgattattaagcacttctgtcagtctttgaaaaaagaacgtattttttgtgctttgaagatctctgaagaatttcttttataatagaatgggcatgtattgtaacagttttatgtcaaatgatctgtgctgtagaaaaacattaacccttgttcaaaaaagaaatggataaacttggcctttctaagtggtaagaatgacctgtcactataatatactgtatgtttacattttatttaaatttaatctcttatgtatagggtgataaccttccccagaaacaacagtgattgcgattgttttctagaaacttctttaaagtgccacatttggcagtacaaatgagtctgagtgtaatagcccagagatttatatatagttgaatgtctaaaatggtaaaatgtgccactgtgtcaagttacagtggcttatgtttttcatagtaattcaaatgaacttcctatttttgatagtaaatgtcatttaatagtatacttgccatttgagcctcactgcaaaattagtgcagaggagaaaacaatttttaatgtaatcttgattttacctcatatactgtacattccaaaaactctaaactttttaaagattatagatacactaccaaacatatcaccttaaaattgtataaggctgaatgaacttcatacaaatgaaaaaaatctcataaaaatacataaactatgtagcaaaagtatctgtaaaatccatggaaaataaaagttgtatcattctttttgagatacgtttattgtattcatatatattcattatttgctacctgtttaagaaagtgaaatgttatggtctcccctcttccaatgagcttaaaacatttttcccaacagtatataaatcttcaacatgagaggatgtatatttattatataaagcccagtaaagaataaaattagaagttttatccta

SEQ ID NO: 134484 - DNA, 582 bp, Homo sapiens
  Payload ID: 6270
  Gene Symbol: FNDC3A
  Gene Name: fibronectin type III domain containing 3A
  ENST ID: ENST00000497644
  CDS Start-End: 1-420
gtgggaaaggttacaagctatattatcaacaatttgcaaccagatacaacatacagaatacgaattcaagccttgaatagccttggagctggtcctttcagccatatgataaaattaaaaactaagcctctccctcctgatccacctcgtctggaatgtgttgcctttagccaccagaaccttaagctgaaatggggagaaggaactccaaagacattgtcaaccgattctattcagtaccaccttcagatggaggataagaatggacgaaacatccaatcaaaaataatgggatgcattcaacttatagataacatattaggagaaatatgtatgatattcaacttcattgaacagttcaagtgggtttgtatccctatacagaggaccatgtcatacatacaaagtacaaagacttaatgagtcaacatcctataaattctgtattcaagcttgtaatgaagctggggaaggtcccctctcccaagaatatattttcactactccaaaatctgtcccagctgccttgaaagcccccaaaatagagaaagtaaatgatcacatttgtgaaattacatggga

SEQ ID NO: 134485 - DNA, 6082 bp, Homo sapiens
  Payload ID: 6270
  Gene Symbol: FNDC3A
  Gene Name: fibronectin type III domain containing 3A
  ENST ID: ENST00000484074
  CDS Start-End: 285-2339
agccgccgaacttgaacgcttttctgaagagagttttccccgctcatcttggggttaaaacctcgaaaacccgccctctgtttgatcctgcgtggctgcttccagtacctggcagttcctctccccgggcgagttaaccacctgttcagtcgggaggtggactcgaggctgcagtcctcgcccggttttaacaacctggatcttcgaacttttgacacggctttggaaacgacgtcatgtgttagaattggagcgttattcagtatattaatgtcttattgataatggcagaacatccaccactactggatacaactcagatcttaagtagtgatatttctcttttgtctgcccctattgtaagtgcagatggaacacaacaggttattctggtacaagttaacccaggagaagcatttacaataagaagagaagatggacagtttcagtgcattacaggtcctgctcaggttccaatgatgtccccaaatggttctgtgcctcctatctatgtgcctcctggatatgccccacaggttattgaagacaatggtgttcgaagagttgtcgtggtccctcaggcaccagagtttcaccctggtagtcacacagttctccaccgttctccacatcctcctctacctggtttcattcctgtcccaactatgatgccgcctccaccacgtcatatgtactcacccgtgactggagctggagacatgacaacacagtatatgccacagtatcagtcttcacaagtctatggagatgtagatgctcactctacacatggaaggtccaactttagagatgaacgatctagtaaaacatatgaacgtttgcagaaaaaattgaaggatcgccaaggaacacagaaagataaaatgagcagtccaccatcatcaccccagaaatgcccttctcccattaatgaacataatggacttataaaaggacaaattgctggtggtataaacacaggatcagcaaaaatcaagtctgggaaggggaaaggtggtacacaagttgatacagaaattgaagaaaaagatgaagaaactaaagcatttgaagcacttctttccaacattgtcaaaccagtggcctccgacatccaggcaaggacagtagtacttacctggtcaccaccttccagcctcattaatggtgaaacagatgaaagtagtgtaccagagctctatggttatgaagttctgatctcaagtactggaaaagatgggaaatacaaaagtgtatatgtaggagaagaaacaaatatcactttaaatgatctcaagccagccatggattaccatgcaaaagtccaggcagaatataattctataaagggaactccttcagaggctgaaatctttaccaccttgagctgtgaacctgatatacctaatccaccaaggatagccaatcggaccaaaaattcactcactttgcaatggaaggcacctagtgacaatggttctaaaatccaaaactttgtattagaatgggatgaaggaaaaggaaatggagaattttgtcagtgttacatgggctcacagaaacaatttaaaattactaaactttcaccagcaatgggctgtaaattcagactatcggccagaaatgactatggtacaagtggttttagtgaagaagtcttatattacacctcaggctgtgctccttctatgccagcaagtcctgtattaaccaaggctggaattacttggttatccttacaatggagtaagccctcaggaacaccatcagatgaaggaatttcttacattttagagatggaggaagaaacttcaggatatggttttaagcctaaatatgatggagaagatcttgcttacacagtgaaaaatctcagacgtagtactaagtataaatttaaggttattgcttacaactcagaaggtaaaagtaatccaagtgaagtagtagaatttactacttgccctgataaaccaggcatacctgtaaagccttcagtgaaaggaaagatacattcacacagttttaaaataacctgggatccaccaaaagacaatggcggagcaaccatcaataaatatgtagtggagatggcagaaggttctaacggaaacaaatgggaaatgatatacagtggtgctaccagggaacatctttgtgatcgactgaatccaggctgtttctatcgtttacgagtttactgcatcagtgatggaggacagagtgcggtctctgaatctttacttgtgcagactccagctgtgcctcctggcccatgcctccctcccagattacagggtagacccaaagcaaaagaaatacagaccccctctggttgatggtggatcacccatttcctgttacagtgtggaaatgtctcctatagaaaaagatgaacctagagaagtttaccaaggttctgaagtagaatgtacagtgagcagccttcttcctggaaagacatacagcttcagactacgtgcagctaacaaaatggggtttggaccattttcagaaaaatgtgatattactacagcccctgggccaccagatcagtgcaagccccctcaagtgacatgtagatctgcaacttgtgcacaagtgaattgggaggttcctttgagtaatggaacagatgtcactgaatatcgactggagtggggaggagttgaaggaagtatgcagatatgttactgtgggcctggtctcagttatgaaataaaaggactttcaccagcaactacctattattgcagggtccaggctctgagtgttgtgggtgcaggccctttcagtgaagtagtagcctgtgtgactccaccatcagttcctggcattgtgacctgtcttcaagaaataagcgatgatgagatagaaaatccccattattcaccttctacatgccttgcaataagctgggaaaagccttgtgatcatggttcggaaatccttgcctacagcatagactttggagataaacaatccctaacagtgggaaaggttacaagctatattatcaacaatttgcaaccagatacaacatacagaatacgaattcaagccttgaatagccttggagctggtcctttcagccatatgataaaattaaaaactaagcctctccctcctgatccacctcgtctggaatgtgttgcctttagccaccagaaccttaagctgaaatggggagaaggaactccaaagacattgtcaaccgattctattcagtaccaccttcagatggaggataagaatggacggtttgtatccctatacagaggaccatgtcatacatacaaagtacaaagacttaatgagtcaacatcctataaattctgtattcaagcttgtaatgaagctggggaaggtcccctctcccaagaatatattttcactactccaaaatctgtcccagctgccttgaaagcccccaaaatagagaaagtaaatgatcacatttgtgaaattacatgggagtgtttacagccaatgaaaggtgatccagttatttacagtcttcaagttatgttgggaaaagattcagaattcaaacagatttacaagggtcccgactcttccttccggtattccagccttcagctgaactgtgaatatcgcttccgtgtatgtgccattcgccagtgccaagactctctgggacaccaggacctcgtaggtccctacagcaccacagtgctcttcatctctcagaggactgaaccaccagccagcaccaacagagacactgtggaaagcacaaggacccgacgggcactgagtgacgagcagtgtgctgccgtcatccttgtgctgtttgctttcttttccattttgattgcctttatcattcagtactttgtaatcaagtgaaaatataactttattttttaactctattacattttattttgtcatgtactaaaattatttctgtattgcttttataaaaaacagtggcatttagcactggcattgagactatagcacatcatttttgccattttcagtgcttatattgttaggtagaggctggcactttattagaatgcaagccacaaaaatatcaattttgttttttttgttagggtgggtcttctttttttctttccctctctctttttttaacaaatgccttcttatagaaaaactttctaagaggcaacaatttagaatggatattttgacgaatcggcatgagtgtaacagtgataacctgatctgtttgttttaaagattattaccaagtgaaaaattcagaatgaatagaatttacactaacatgctatataaaatgttaaagtctgatgctgtgaaagcaatctagtgctatatttctacctcctcatttgtcttaattatttggtaagtgggattatgatgagtaactggaggggcttagaaacaaaaactggatgaaagagtatgcatgaagaaaagcttctttgataaatgtggagttcttcattataaatatatattcatgaattcacagataagtacttaaagaacagacagtttacttggcctaaaaatattttgatgtttactcaaaaagtacctcttcaggtcttgagaacatggaaaagaattgagtgcttttaaatactttttagaaagtaatcataaaagtaaattgaatttcaaacctatttggcttctgttttgtgaacctttgaactatatgtatgtgtataagggtatacacatacatatatggcatataacaagtgtacacatatacacataacaagtgtagaagtatatattacatacatacactcactctgtctggtataggctaattttgaagaactcccataagtttctgctgcttctcccataactgctgccaccaccatcagaattcataatcaaacctaacctttttgtttggggcaccaaatctgaagacaaaattaatttgcaccagtaaacttcaagctgctttctttcttgaaaactaaacgtttaacgtataatgtctgtttggatactgttccaaattgttgattgcatgtggttaatgttgcattagagcactttgcaattgcataattcattaatgttttgtgagcttgcatttgtgagttattggatgatcagactgaattttgtcaagtatcacattgtacatcttgcctagatgtcgatgactgcaagtaataatacagtttataatgaaactatctacaattcttgttttagcacatctgttatccgtaaaacacctgtaactagcttttttaatttattatttgaattttaggatagcgaatcactaatttttagttgctgaggttggcattttagtgattattaagcacttctgtcagtctttgaaaaaagaacgtattttttgtgctttgaagatctctgaagaatttcttttataatagaatgggcatgtattgtaacagttttatgtcaaatgatctgtgctgtagaaaaacattaacccttgttcaaaaaagaaatggataaacttggcctttctaagtggtaagaatgacctgtcactataatatactgtatgtttacattttatttaaatttaatctcttatgtatagggtgataaccttccccagaaacaacagtgattgcgattgttttctagaaacttctttaaagtgccacatttggcagtacaaatgagtctgagtgtaatagcccagagatttatatatagttgaatgtctaaaatggtaaaatgtgccactgtgtcaagttacagtggcttatgtttttcatagtaattcaaatgaacttcctatttttgatagtaaatgtcatttaatagtatacttgccatttgagcctcactgcaaaattagtgcagaggagaaaacaatttttaatgtaatcttgattttacctcatatactgtacattccaaaaactctaaactttttaaagattatagatacactaccaaacatatcaccttaaaattgtataaggctgaatgaacttcatacaaatgaaaaaaatctcataaaaatacataaactatgtagcaaaagtatctgtaaaatccatggaaaataaaagttgtatcattctttttgagatacgtttattgt

SEQ ID NO: 134486 - DNA, 6328 bp, Homo sapiens
  Payload ID: 6270
  Gene Symbol: FNDC3A
  Gene Name: fibronectin type III domain containing 3A
  Uniprot ID: Q9Y2H6
  ENST ID: ENST00000541916
  CDS Start-End: 349-3945
ggggcggaatcctcctgagaggatcgcccagcacccgcggcgccttcggctttggccgcccggcagccgccgaacttgaacgcttttctgaagagagttttccccgctcatcttggggttaaaacctcgaaaacccgccctctgtttgatcctgcgtggctgcttccagtacctggcagttcctctccccgggcgagttaaccacctgttcagtcgggaggtggactcgaggctgcagtcctcgcccggttttaacaacctggatcttcgaacttttgacacggctttggaaacgacgtcatgtgttagaattggagcgttattcagtatattaatgtcttattgataatggcagaacatccaccactactggatacaactcagatcttaagtagtgatatttctcttttgtctgcccctattgtaagtgcagatggaacacaacaggttattctggtacaagttaacccaggagaagcatttacaataagaagagaagatggacagtttcagtgcattacaggtcctgctcaggttccaatgatgtccccaaatggttctgtgcctcctatctatgtgcctcctggatatgccccacaggttattgaagacaatggtgttcgaagagttgtcgtggtccctcaggcaccagagtttcaccctggtagtcacacagttctccaccgttctccacatcctcctctacctggtttcattcctgtcccaactatgatgccgcctccaccacgtcatatgtactcacccgtgactggagctggagacatgacaacacagtatatgccacagtatcagtcttcacaagtctatggagatgtagatgctcactctacacatggaaggtccaactttagagatgaacgatctagtaaaacatatgaacgtttgcagaaaaaattgaaggatcgccaaggaacacagaaagataaaatgagcagtccaccatcatcaccccagaaatgcccttctcccattaatgaacataatggacttataaaaggacaaattgctggtggtataaacacaggatcagcaaaaatcaagtctgggaaggggaaaggtggtacacaagttgatacagaaattgaagaaaaagatgaagaaactaaagcatttgaagcacttctttccaacattgtcaaaccagtggcctccgacatccaggcaaggacagtagtacttacctggtcaccaccttccagcctcattaatggtgaaacagatgaaagtagtgtaccagagctctatggttatgaagttctgatctcaagtactggaaaagatgggaaatacaaaagtgtatatgtaggagaagaaacaaatatcactttaaatgatctcaagccagccatggattaccatgcaaaagtccaggcagaatataattctataaagggaactccttcagaggctgaaatctttaccaccttgagctgtgaacctgatatacctaatccaccaaggatagccaatcggaccaaaaattcactcactttgcaatggaaggcacctagtgacaatggttctaaaatccaaaactttgtattagaatgggatgaaggaaaaggaaatggagaattttgtcagtgttacatgggctcacagaaacaatttaaaattactaaactttcaccagcaatgggctgtaaattcagactatcggccagaaatgactatggtacaagtggttttagtgaagaagtcttatattacacctcaggctgtgctccttctatgccagcaagtcctgtattaaccaaggctggaattacttggttatccttacaatggagtaagccctcaggaacaccatcagatgaaggaatttcttacattttagagatggaggaagaaacttcaggatatggttttaagcctaaatatgatggagaagatcttgcttacacagtgaaaaatctcagacgtagtactaagtataaatttaaggttattgcttacaactcagaaggtaaaagtaatccaagtgaagtagtagaatttactacttgccctgataaaccaggcatacctgtaaagccttcagtgaaaggaaagatacattcacacagttttaaaataacctgggatccaccaaaagacaatggcggagcaaccatcaataaatatgtagtggagatggcagaaggttctaacggaaacaaatgggaaatgatatacagtggtgctaccagggaacatctttgtgatcgactgaatccaggctgtttctatcgtttacgagtttactgcatcagtgatggaggacagagtgcggtctctgaatctttacttgtgcagactccagctgtgcctcctggcccatgcctccctcccagattacagggtagacccaaagcaaaagaaatacagttacgatggggaccccctctggttgatggtggatcacccatttcctgttacagtgtggaaatgtctcctatagaaaaagatgaacctagagaagtttaccaaggttctgaagtagaatgtacagtgagcagccttcttcctggaaagacatacagcttcagactacgtgcagctaacaaaatggggtttggaccattttcagaaaaatgtgatattactacagcccctgggccaccagatcagtgcaagccccctcaagtgacatgtagatctgcaacttgtgcacaagtgaattgggaggttcctttgagtaatggaacagatgtcactgaatatcgactggagtggggaggagttgaaggaagtatgcagatatgttactgtgggcctggtctcagttatgaaataaaaggactttcaccagcaactacctattattgcagggtccaggctctgagtgttgtgggtgcaggccctttcagtgaagtagtagcctgtgtgactccaccatcagttcctggcattgtgacctgtcttcaagaaataagcgatgatgagatagaaaatccccattattcaccttctacatgccttgcaataagctgggaaaagccttgtgatcatggttcggaaatccttgcctacagcatagactttggagataaacaatccctaacagtgggaaaggttacaagctatattatcaacaatttgcaaccagatacaacatacagaatacgaattcaagccttgaatagccttggagctggtcctttcagccatatgataaaattaaaaactaagcctctccctcctgatccacctcgtctggaatgtgttgcctttagccaccagaaccttaagctgaaatggggagaaggaactccaaagacattgtcaaccgattctattcagtaccaccttcagatggaggataagaatggacggtttgtatccctatacagaggaccatgtcatacatacaaagtacaaagacttaatgagtcaacatcctataaattctgtattcaagcttgtaatgaagctggggaaggtcccctctcccaagaatatattttcactactccaaaatctgtcccagctgccttgaaagcccccaaaatagagaaagtaaatgatcacatttgtgaaattacatgggagtgtttacagccaatgaaaggtgatccagttatttacagtcttcaagttatgttgggaaaagattcagaattcaaacagatttacaagggtcccgactcttccttccggtattccagccttcagctgaactgtgaatatcgcttccgtgtatgtgccattcgccagtgccaagactctctgggacaccaggacctcgtaggtccctacagcaccacagtgctcttcatctctcagaggactgaaccaccagccagcaccaacagagacactgtggaaagcacaaggacccgacgggcactgagtgacgagcagtgtgctgccgtcatccttgtgctgtttgctttcttttccattttgattgcctttatcattcagtactttgtaatcaagtgaaaatataactttattttttaactctattacattttattttgtcatgtactaaaattatttctgtattgcttttataaaaaacagtggcatttagcactggcattgagactatagcacatcatttttgccattttcagtgcttatattgttaggtagaggctggcactttattagaatgcaagccacaaaaatatcaattttgttttttttgttagggtgggtcttctttttttctttccctctctctttttttaacaaatgccttcttatagaaaaactttctaagaggcaacaatttagaatggatattttgacgaatcggcatgagtgtaacagtgataacctgatctgtttgttttaaagattattaccaagtgaaaaattcagaatgaatagaatttacactaacatgctatataaaatgttaaagtctgatgctgtgaaagcaatctagtgctatatttctacctcctcatttgtcttaattatttggtaagtgggattatgatgagtaactggaggggcttagaaacaaaaactggatgaaagagtatgcatgaagaaaagcttctttgataaatgtggagttcttcattataaatatatattcatgaattcacagataagtacttaaagaacagacagtttacttggcctaaaaatattttgatgtttactcaaaaagtacctcttcaggtcttgagaacatggaaaagaattgagtgcttttaaatactttttagaaagtaatcataaaagtaaattgaatttcaaacctatttggcttctgttttgtgaacctttgaactatatgtatgtgtataagggtatacacatacatatatggcatataacaagtgtacacatatacacataacaagtgtagaagtatatattacatacatacactcactctgtctggtataggctaattttgaagaactcccataagtttctgctgcttctcccataactgctgccaccaccatcagaattcataatcaaacctaacctttttgtttggggcaccaaatctgaagacaaaattaatttgcaccagtaaacttcaagctgctttctttcttgaaaactaaacgtttaacgtataatgtctgtttggatactgttccaaattgttgattgcatgtggttaatgttgcattagagcactttgcaattgcataattcattaatgttttgtgagcttgcatttgtgagttattggatgatcagactgaattttgtcaagtatcacattgtacatcttgcctagatgtcgatgactgcaagtaataatacagtttataatgaaactatctacaattcttgttttagcacatctgttatccgtaaaacacctgtaactagcttttttaatttattatttgaattttaggatagcgaatcactaatttttagttgctgaggttggcattttagtgattattaagcacttctgtcagtctttgaaaaaagaacgtattttttgtgctttgaagatctctgaagaatttcttttataatagaatgggcatgtattgtaacagttttatgtcaaatgatctgtgctgtagaaaaacattaacccttgttcaaaaaagaaatggataaacttggcctttctaagtggtaagaatgacctgtcactataatatactgtatgtttacattttatttaaatttaatctcttatgtatagggtgataaccttccccagaaacaacagtgattgcgattgttttctagaaacttctttaaagtgccacatttggcagtacaaatgagtctgagtgtaatagcccagagatttatatatagttgaatgtctaaaatggtaaaatgtgccactgtgtcaagttacagtggcttatgtttttcatagtaattcaaatgaacttcctatttttgatagtaaatgtcatttaatagtatacttgccatttgagcctcactgcaaaattagtgcagaggagaaaacaatttttaatgtaatcttgattttacctcatatactgtacattccaaaaactctaaactttttaaagattatagatacactaccaaacatatcaccttaaaattgtataaggctgaatgaacttcatacaaatgaaaaaaatctcataaaaatacataaactatgtagcaaaagtatctgtaaaatccatggaaaataaaagttgtatcattctttttgagatacgtttattgtattcatatatattcattatttgctacctgtttaagaaagtgaaatgttatggtctcccctcttccaatgagcttaaaacatttttcccaacagtatataaatcttcaacatgagaggatgtatatttattatataaagcccagtaaagaataaaattagaagttttatcct

SEQ ID NO: 134487 - DNA, 2037 bp, Homo sapiens
  Payload ID: 6270
  Gene Symbol: FNDC3A
  Gene Name: fibronectin type III domain containing 3A
  ENST ID: ENST00000378383
  CDS Start-End: 149-1129
gcggccctgagagctgactctgcagctgaggtagagagacaacgatcaggaaccctaagaagaggcgccagaggagccgccttctgcctcagaacggcgtgactcggagaattggagcgttattcagtatattaatgtcttattgataatggcagaacatccaccactactggatacaactcagatcttaagtagtgatatttctcttttgtctgcccctattgtaagtgcagatggaacacaacaggttattctggtacaagttaacccaggagaagcatttacaataagaagagaagatggacagtttcagtgcattacaggtcctgctcaggttccaatgatgtccccaaatggttctgtgcctcctatctatgtgcctcctggatatgccccacaggttattgaagacaatggtgttcgaagagttgtcgtggtccctcaggcaccagagtttcaccctggtagtcacacagttctccaccgttctccacatcctcctctacctggtttcattcctgtcccaactatgatgccgcctccaccacgtcatatgtactcacccgtgactggagctggagacatgacaacacagtatatgccacagtatcagtcttcacaagtctatggagatgtagatgctcactctacacatggaaggtccaactttagagatgaacgatctagtaaaacatatgaacgtttgcagaaaaaattgaaggatcgccaaggaacacagaaagataaaatgagcagtccaccatcatcaccccagaaatgcccttctcccattaatgaacataatggacttataaaaggacaaattgctggtggtataaacacaggatcagcaaaaatcaagtctgggaaggggaaaggtggtacacaagttgatacagaaattgaagaaaaagatgaagaaactaaagcatttgaagcacttctttccaacattgtcaaaccagtggcctccgacatccaggcaaggacagtagtacttacctggtcaccaccttccagcctcattaatggtgaaacagatgaaagtagtgtaccagagctctatggttatgaagttctgatctcaagtactggaaaagatgggaaatacaaaagtgtatatgtgtaggtatttgttgttttgctttctcccattgtgtaaattaatggtttattataaagagcttattactaattttgctctacttttccttcttcacgcttttattctgaatctttaagttggctaatgatagtgatttcaatgtaaatggtccaaatgtagcttggtacacatttctgtctaccttccttcagaataatcacttttattggccacattcagctttttttttcccagtaggctccctaatagatggttcagtattcacgtattcttaatgcattaaatataagttgtagtatgtagaacccatgaccaaaaatggacaattcatgattgtaaactcataaagtatgacattgctcctctaaggactggatttaattcttacatgtacaagctcatgtcctgttgtaaaatgaatttagtagcactgttatttatttgcatgttagtatgtttatagtcatattttgaaaacttacgtatttctttccttggtttaaaagtatattacacacagccaggcacggtggctcacgcctgtaatcccagcactttgggaggctgaggcgggtggatcacctgagttcagcagttcgagaccagcctggccaacacggtgaaaccccgtctttactaaaaatataaaaattagccaggggtggtggcacatgcctgtagtcccagctacttaggacgctgaggcaggagaatcgcttgaacctggcaggtggcagttgcagtgagccaagatcgcgtcattgcactccagcctgagtgacagagtgagactccatctcaagaaaaaaataaaagtatattacgcaccacgaagccttagaaagattcagtagctaaagttgtgacatttatgattgacagttttgaaataaattattctgtccatattc

SEQ ID NO: 134488 - DNA, 7904 bp, Homo sapiens
  Payload ID: 6271
  Gene Symbol: FNDC3B
  Gene Name: fibronectin type III domain containing 3B
  Uniprot ID: Q53EP0
  ENST ID: ENST00000336824
  CDS Start-End: 100-3714
aagctcgggcgggggagcggggcgcggcgggaaggagcgggcgacccggtgtgtgggccagcggagctccggaagccagttgagggaagttctccatgaatgtacgtcacaatgatgatgaccgaccaaatccctctggaactgccaccattgctgaacggagaggtagccatgatgccccacttggtgaatggagatgcagctcagcaggttattctcgttcaagttaatccaggtgagactttcacaataagagcagaggatggaacacttcagtgcattcaaggacctgctgaagttcccatgatgtcacccaatggatccattcctcccattcatgtgcctccaggttatatctcacaggtgattgaagatagtactggagtccgccgggtggtggtcacaccccagtctcctgagtgttatcccccaagctacccctcagccatgtctccaacccatcatctccctccctatctgactcaccatccacattttattcataactcacacacggcttactacccacctgttaccggacctggagatatgccgcctcagttttttccccagcatcatcttccccacacaatatatggtgagcaagaaattataccattttatggaatgtcaacctacatcacccgagaagaccagtacagcaagcctccgcacaaaaaactgaaagaccgccagatcgatcgccagaaccgcctcaacagccctccttcttctatctacaaaagcagctgcacaacagtatacaatggctatgggaagggccatagtggtggaagtggcggaggcggcagcggtagtggtcccggaattaagaaaacagagcgacgagcaagaagcagcccaaagtcgaatgattcagacttgcaagaatatgagttggaagtaaagagggtgcaagacattctttcgggaatagagaaaccacaggtttctaatattcaggcaagagcagttgtgttgtcctgggctccccctgttggactttcctgtggaccccacagtggtctttccttcccctacagttacgaggtggccttatcagacaaaggacgagatggaaaatacaagataatttacagtggagaagaattagaatgtaacctgaaagatcttagaccagcaacagattatcatgtgagggtgtatgccatgtacaattccgtaaagggatcctgctccgagcctgttagcttcaccacccacagctgtgcacccgagtgtcctttcccccctaagctggcacataggagcaaaagttcactaaccctgcagtggaaggcaccaattgacaacggttcaaaaatcaccaactaccttttagagtgggatgagggaaaaagaaatagtggtttcagacagtgcttcttcgggagccagaagcactgcaagttgacaaagctttgtccggcaatggggtacacattcaggctggccgctcgaaacgacattggtaccagtggttatagccaagaggtggtgtgctacacattaggaaatatccctcagatgccttctgcaccaaggctggttcgagctggcatcacatgggtcacgttgcagtggagtaagccagaaggctgttcacccgaggaagtgatcacctacaccttggaaattcaggaggatgaaaatgataaccttttccacccaaaatacactggagaggatttaacctgtactgtgaaaaatctcaaaagaagcacacagtataaattcaggctgactgcttctaatacggaaggaaaaagctgtccaagcgaagttcttgtttgtacgacgagtcctgacaggcctggacctcctaccagaccgcttgtcaaaggcccagttacatctcatggctttagtgtcaaatgggatccccctaaggacaatggtggttcagaaatcctcaagtacttgctagagattactgatggaaattctgaagcgaatcagtgggaagtggcctacagtgggtcggctaccgaatacaccttcacccacttgaaaccaggcactttgtacaaactccgagcatgctgcatcagtaccggcggacacagccagtgttctgaaagtctccctgttcgcacactaagcattgcaccaggtcaatgtcgaccaccgagggttttgggtagaccaaagcacaaagaagtccacttagagtgggatgttcctgcatcggaaagtggctgtgaggtctcagagtacagcgtggagatgacggagcccgaagacgtagcctcggaagtgtaccatggcccagagctggagtgcaccgtcggcaacctgcttcctggaaccgtgtatcgcttccgggtgagggctctgaatgatggagggtatggtccctattctgatgtctcagaaattaccactgctgcagggcctcctggacaatgcaaagcaccttgtatttcttgtacacctgatggatgtgtcttagtgggttgggagagtcctgatagttctggtgctgacatctcagagtacaggttggaatggggagaagatgaagaatccttagaactcatttatcatgggacagacacccgttttgaaataagagacctgttgcctgctgcacagtattgctgtagactacaggccttcaatcaagcaggggcagggccgtacagtgaacttgtcctttgccagacgccagcgtctgcccctgaccccgtctccactctctgtgtcctggaggaggagccccttgatgcctaccctgattcaccttctgcgtgccttgtactgaactgggaagagccgtgcaataacggatctgaaatccttgcttacaccattgatctaggagacactagcattaccgtgggcaacaccaccatgcatgttatgaaagatctccttccagaaaccacctaccggatcagaattcaggctataaatgaaattggagctggaccatttagtcagttcattaaagcaaaaactcggccattaccacccttgcctcctaggctagaatgtgctgctgctggtcctcagagcctgaagctaaaatggggagacagtaactccaagacacatgctgctgaggacattgtgtacacactacagctggaggacagaaacaagaggtttatttcaatctacagaggacccagccacacctacaaggtccagagactgacggaattcacatgctactccttcagaatccaggcagcaagcgaggctggagaagggcccttctcagaaacctataccttcagcacaaccaaaagtgtcccccccaccatcaaagcacctcgagtaacacagttagaaggaaattcatgtgaaattttatgggagacggtaccatcaatgaaaggtgaccctgttaactacattctgcaggtattggttggaagagaatctgagtacaaacaggtgtacaagggagaagaagccacattccaaatctcaggcctccagaccaacacagactacaggttccgcgtatgtgcgtgtcgtcgctgtttagacacctctcaggagctaagcggagccttcagcccctctgcggcttttgtattacaacgaagtgaggtcatgcttacaggggacatggggagcttagatgatcccaaaatgaagagcatgatgcctactgatgaacagtttgcagccatcattgtgcttggctttgcaactttgtccattttatttgcctttatattacagtacttcttaatgaagtaaacccaacaaaactagaggtatgaattaatgctacacattttaatacacacatttattcagatactcccctttttaaagcccttttgttttttgatttatatactctgttttacagatttagctagaaaaaaaatgtcagtgttttggtgcacctttttgaaatgcaaaactaggaaaaggttaaactggatttttttttttaaaaaaaagaaaaaaaaagaagaaaagtataccagataccaaaagctagctttcttatgttttcctttaaattttcagatttaccttcattctgttttcactgatgtcttttgcaagcctttgatttttttttttttgttacagtttagtaatttatattcaccagtcacttcatatgtcttgaacatctgtatctgtaaacatgaatcaccgtgtgtgtacttacagggctaggatttcagtgttgtcagagtattaccacacagcaacagcaacatacagaagatatgttcactcagataagactgccctaaacaaccattttgtcactcagttatttaactgtgtttagctcatttaaatcaaaatgtgtactttaatctaaaatgttttaataatctgtatttcttataattttaacactatgagctgcctgtataagaaatcaagtaaccagaatgcacctataaattatggagcattgtagattttaccacatcaattcatagcagtaactttaagagggcattgtgcaatagttagttgttttcttgttcagctattttaaaggctgctttaacttgtttgtttgtctttgtatataactacttctaatctaatcactagagttattatattctgttatgtttgaccagaattatatgacaagaactggtgacagtttagtgcctctgcccattgtccatgatttacactaattgtgagcagtcttcttatgtgtcagctcattatttttgaaacatttgcctttaggctgttctttgaggtatcaatgaagtgattgaatttcaataccttaattcagtgcacataatactaatgtaacagcagatgaaaattgataaaacccaaaagagagtcatctaaatttgtagttcctatttctgtgggtttgcctggccatggttggagagggaatggtgtttgatggtaaacacagggtgtttggggatcaaggagcctagattctctccctggatctgtcactaacttgctgcgtgacctgaacacgtcactttacctctctgtgcctcagttttcccatgcatgaaaaataaaataaaataaaacggggattctaatgtttgtaagtgctttgagatctttgaccaacaggtgctattggagtgcaaagtgttactcttacgtgtttattttgagtcatgagataatcaattttaacccaaagtcattggattatttatatgaagtccataatgttcgagtacctcagggacatttaagagttggaggtgcaaatatattccaaaagggtgcaacagacacagtgtatccccctgcttctgtttttgtatatttttgctacttggtttttcttgatcatagctattttgtgcttgatctttattgtctaagatgcagtatcctgtactagcttataatattcccataccaaagtcatggggaaacaaacattattttgtttttggtttatttatactatattctgcatacagtactttaaatgccaattacagtgcaatctttatttattgtaaaattttttaagtgtacttatgtactaattttcccttgtagcatgttatatttttgtgttttatacttttgtaattttaggtcagtcttgttccttggcaacatctgtagtattattaatcttctgacattttcttatgtttttaaaaagataagagcatctagtgcattaaatgccaaaaaaaaaatacattatcagtgattgaaacgtttacatgtacccaaaaaccataatcatctcttggaagaaaatgctgagatcaatgaattattctgtgtgcctatattgacgtagtgagtactagagagttctgtattttattattgactataataattagtttaattagctttgcaaactgatggcatcaaggtaaatatatttttgccaaagttctggccttccaaaactcacccccttatttaaatgtgtgctatgacccactatgaccacagcatctgcattttctaaaaaattccatgcaggtgttttggggagaggtattttttaagcaatgaaaattcaactgagtacaaagccccctcttggggggttggggaagtctcttttttgaaacacttcagaactgctgctataaagaaattctctaattggttgaattttttttttaagtaaatagtactttaggccaaaatttatatgaatatttgatcttcttgagattttcatactatcatttaaccaccaggaagctgaagtgtgtgaagtacaaagctgacagcactttattttattgctctccattatttggtattcattatattccttcagtcagaaaattattactctctatggcactgttttttatcacaaatatgtatatgtgatattgatatataactatatatattgccatcacacacgaacaataaaataaagtgttctattaacctgatctctttgcccttttgctatgtgaggagtgaatgagtggccttctgatgctctgactcttctctgtatgtcaaactcatccctggcacaagaaattccagtcatgtgaagcaaactgccctttgtcctcaaagaaattgttgaaaaagaaaactttttaaagagattttttgcatattctctgccttgttcttatcaacttgaaatgttggcattttctaaccttgttttgttggctacaataattcagtattcatgtcaaaattgagaagtgccctaattgaatgtgtttgaatgttatccttgcacaattctttaaattgaaagataaaatgttttacctcactgttggacatacattccaagcttttcaactctaggagaaaaagaaaatcatgttttcctgtattgtaaattttagactatttcatatacattgtattaaaactgccatatcaattttaatgtatagattttgcaaatattatgctatatgtaatacctaactgtatctgtagtgtatatgtaatatatttatgcccaataaatgttttaattctttctgacttaaatagggtttttctgccatgactaggattgcttttgttgttgttgttgttgtttctttctttttttttttttttgagacggagtcttgctctgtcgccaggctggagtgcagtggcgcgatctcagctcactgcaacctccagctcccaggttcaagtgattcccctgcctcagcctcccaagtagctggggattacaggcactcgccaccatgcccggataattttttttttttttttgagttggagtcttgctctgtcgcccaggctggagtgcagtgacccaatctcggctcactgcaagctccacctcccgggttcatgccattctcctgcctcagcctcccaagtagctgggactacaggtgcccgccaccacgcccggctaatttttttaattttagtagagtcggggtttcaccatgttggccaagatggtctcgatctgacctcgtgatctgcccgcctcggcctcccaaagtgctgggattacaggtgtgagcccccgcacccagccttattcttcccttttaaatacttaaagcacattcagattagttgaaaattcacgtgtttttggaggccaggcaggtggccttctgcagagacagcagcagctcagctcttgctgaccaaggccttggaggactgtgagccacaatcacatatgtccatgtttcaaaagaagctaaatatccagatttcctccatgggccaactaaaaggtgattgtggactatacaggctgccagtttaatcctttatcagagtctctgtggataatgtaccttgttgcctaatactttatctgtctaccaaaactcagtccagatctccctctgttcacctggcacactgggtgcttcctctcccctgacgaactctatagagtgttcatgtcctttcctgcaggtctcattcaacaacaacaacaacaacagcaataaaacacagtgttcctgcta

SEQ ID NO: 134489 - DNA, 678 bp, Homo sapiens
  Payload ID: 6271
  Gene Symbol: FNDC3B
  Gene Name: fibronectin type III domain containing 3B
  ENST ID: ENST00000443501
  CDS Start-End: 55-678
agcagacactggaatgtgaatgcattgggaggtgagcccttaaggagagcccaaatgtttaccaaagagaaaatctggtcagaggttattctcgttcaagttaatccaggtgagactttcacaataagagcagaggatggaacacttcagtgcattcaaggacctgctgaagttcccatgatgtcacccaatggatccattcctcccattcatgtgcctccaggttatatctcacaggtgattgaagatagtactggagtccgccgggtggtggtcacaccccagtctcctgagtgttatcccccaagctacccctcagccatgtctccaacccatcatctccctccctatctgactcaccatccacattttattcataactcacacacggcttactacccacctgttaccggacctggagatatgccgcctcagttttttccccagcatcatcttccccacacaatatatggtgagcaagaaattataccattttatggaatgtcaacctacatcacccgagaagaccagtacagcaagcctccgcacaaaaaactgaaagaccgccagatcgatcgccagaaccgcctcaacagccctccttcttctatctacaaaagcagctgcacaacagtatacaatggctatgggaagggccatagtggtggaagtggcgga

SEQ ID NO: 134490 - DNA, 3684 bp, Homo sapiens
  Payload ID: 6271
  Gene Symbol: FNDC3B
  Gene Name: fibronectin type III domain containing 3B
  Uniprot ID: Q53EP0
  ENST ID: ENST00000416957
  CDS Start-End: 64-3678
agtgtctaccaccaaactcctaaggctggatggtggaagccagttgagggaagttctccatgaatgtacgtcacaatgatgatgaccgaccaaatccctctggaactgccaccattgctgaacggagaggtagccatgatgccccacttggtgaatggagatgcagctcagcaggttattctcgttcaagttaatccaggtgagactttcacaataagagcagaggatggaacacttcagtgcattcaaggacctgctgaagttcccatgatgtcacccaatggatccattcctcccattcatgtgcctccaggttatatctcacaggtgattgaagatagtactggagtccgccgggtggtggtcacaccccagtctcctgagtgttatcccccaagctacccctcagccatgtctccaacccatcatctccctccctatctgactcaccatccacattttattcataactcacacacggcttactacccacctgttaccggacctggagatatgccgcctcagttttttccccagcatcatcttccccacacaatatatggtgagcaagaaattataccattttatggaatgtcaacctacatcacccgagaagaccagtacagcaagcctccgcacaaaaaactgaaagaccgccagatcgatcgccagaaccgcctcaacagccctccttcttctatctacaaaagcagctgcacaacagtatacaatggctatgggaagggccatagtggtggaagtggcggaggcggcagcggtagtggtcccggaattaagaaaacagagcgacgagcaagaagcagcccaaagtcgaatgattcagacttgcaagaatatgagttggaagtaaagagggtgcaagacattctttcgggaatagagaaaccacaggtttctaatattcaggcaagagcagttgtgttgtcctgggctccccctgttggactttcctgtggaccccacagtggtctttccttcccctacagttacgaggtggccttatcagacaaaggacgagatggaaaatacaagataatttacagtggagaagaattagaatgtaacctgaaagatcttagaccagcaacagattatcatgtgagggtgtatgccatgtacaattccgtaaagggatcctgctccgagcctgttagcttcaccacccacagctgtgcacccgagtgtcctttcccccctaagctggcacataggagcaaaagttcactaaccctgcagtggaaggcaccaattgacaacggttcaaaaatcaccaactaccttttagagtgggatgagggaaaaagaaatagtggtttcagacagtgcttcttcgggagccagaagcactgcaagttgacaaagctttgtccggcaatggggtacacattcaggctggccgctcgaaacgacattggtaccagtggttatagccaagaggtggtgtgctacacattaggaaatatccctcagatgccttctgcaccaaggctggttcgagctggcatcacatgggtcacgttgcagtggagtaagccagaaggctgttcacccgaggaagtgatcacctacaccttggaaattcaggaggatgaaaatgataaccttttccacccaaaatacactggagaggatttaacctgtactgtgaaaaatctcaaaagaagcacacagtataaattcaggctgactgcttctaatacggaaggaaaaagctgtccaagcgaagttcttgtttgtacgacgagtcctgacaggcctggacctcctaccagaccgcttgtcaaaggcccagttacatctcatggctttagtgtcaaatgggatccccctaaggacaatggtggttcagaaatcctcaagtacttgctagagattactgatggaaattctgaagcgaatcagtgggaagtggcctacagtgggtcggctaccgaatacaccttcacccacttgaaaccaggcactttgtacaaactccgagcatgctgcatcagtaccggcggacacagccagtgttctgaaagtctccctgttcgcacactaagcattgcaccaggtcaatgtcgaccaccgagggttttgggtagaccaaagcacaaagaagtccacttagagtgggatgttcctgcatcggaaagtggctgtgaggtctcagagtacagcgtggagatgacggagcccgaagacgtagcctcggaagtgtaccatggcccagagctggagtgcaccgtcggcaacctgcttcctggaaccgtgtatcgcttccgggtgagggctctgaatgatggagggtatggtccctattctgatgtctcagaaattaccactgctgcagggcctcctggacaatgcaaagcaccttgtatttcttgtacacctgatggatgtgtcttagtgggttgggagagtcctgatagttctggtgctgacatctcagagtacaggttggaatggggagaagatgaagaatccttagaactcatttatcatgggacagacacccgttttgaaataagagacctgttgcctgctgcacagtattgctgtagactacaggccttcaatcaagcaggggcagggccgtacagtgaacttgtcctttgccagacgccagcgtctgcccctgaccccgtctccactctctgtgtcctggaggaggagccccttgatgcctaccctgattcaccttctgcgtgccttgtactgaactgggaagagccgtgcaataacggatctgaaatccttgcttacaccattgatctaggagacactagcattaccgtgggcaacaccaccatgcatgttatgaaagatctccttccagaaaccacctaccggatcagaattcaggctataaatgaaattggagctggaccatttagtcagttcattaaagcaaaaactcggccattaccacccttgcctcctaggctagaatgtgctgctgctggtcctcagagcctgaagctaaaatggggagacagtaactccaagacacatgctgctgaggacattgtgtacacactacagctggaggacagaaacaagaggtttatttcaatctacagaggacccagccacacctacaaggtccagagactgacggaattcacatgctactccttcagaatccaggcagcaagcgaggctggagaagggcccttctcagaaacctataccttcagcacaaccaaaagtgtcccccccaccatcaaagcacctcgagtaacacagttagaaggaaattcatgtgaaattttatgggagacggtaccatcaatgaaaggtgaccctgttaactacattctgcaggtattggttggaagagaatctgagtacaaacaggtgtacaagggagaagaagccacattccaaatctcaggcctccagaccaacacagactacaggttccgcgtatgtgcgtgtcgtcgctgtttagacacctctcaggagctaagcggagccttcagcccctctgcggcttttgtattacaacgaagtgaggtcatgcttacaggggacatggggagcttagatgatcccaaaatgaagagcatgatgcctactgatgaacagtttgcagccatcattgtgcttggctttgcaactttgtccattttatttgcctttatattacagtacttcttaatgaagtaaacccaa

SEQ ID NO: 134491 - DNA, 408 bp, Homo sapiens
  Payload ID: 6271
  Gene Symbol: FNDC3B
  Gene Name:: fibronectin type III domain containing 3B
  Uniprot ID: Q53EP0
  ENST ID: ENST00000423424
  CDS Start-End: 99-314
agctcgggcgggggagcggggcgcggcgggaaggagcgggcgacccggtgtgtgggccagcggagctccggaagccagttgagggaagttctccatgaatgtacgtcacaatgatgatgaccgaccaaatccctctggaactgccaccattgctgaacggagaggtagccatgatgccccacttggtgaatggagatgcagctcagcaggttattctcgttcaagttaatccaggtgagactttcacaataagagcagaggatggaacacttcagtgcattcaagatgaagtggtgaagagagcctgcgattgaagattttttcatctcagctttttcccccttaccttgttctctctcatgtttcatgatctgtgtcatagatatttcttcattacgagcacttcgc

SEQ ID NO: 134492 - DNA, 946 bp, Homo sapiens
  Payload ID: 6271
  Gene Symbol: FNDC3B
  Gene Name: fibronectin type III domain containing 3B
  Uniprot ID: Q53EP0
  ENST ID: ENST00000421757
  CDS Start-End: 173-388
gcggcggcggcggctggaggaggagagcggcggcggcgggagcagcgaagggggcggcagggatcctccaggctgccggctgggaaggcgtgggcgacccggtgtgtggcgcgcccagagccccgcgtttcagccctagggaaggaagccagttgagggaagttctccatgaatgtacgtcacaatgatgatgaccgaccaaatccctctggaactgccaccattgctgaacggagaggtagccatgatgccccacttggtgaatggagatgcagctcagcaggttattctcgttcaagttaatccaggtgagactttcacaataagagcagaggatggaacacttcagtgcattcaagatgaagtggtgaagagagcctgcgattgaagattttttcatctcagctttttcccccttaccttgttctctctcatgtttcatgatctgtgtcatagatatttcttcattacgagcacttcgcggtgtggcttttcaatgtctgaagtggattaagtggcccacagtcagttctgtgacttgagtttcaaaagtaaaattaccatcaacaatgtgattcaattttattttctatactagctaaaagcaaggaactatattattaacaatcttggctttactgtagtttaaggcaggtgatgatgatgcttattagtccacctgaaagagtccttccaggtttttggaagctttattcctgcttattaccttgcccttgagaagtccttcatggaaagtggaaacactgggttgacttcttttccccatatcctagttgaaagggacagcttatatgtatgttagactgtccaaaagtgtttgtagaacctcattttaaaaaatcaactgtattgtactttttaaaaaatgggatcttaaactctttattaaaaataataaatggaaatgtgttaagcaaaaacatta

SEQ ID NO: 134493 - DNA, 5083 bp, Homo sapiens
  Payload ID: 6271
  Gene Symbol: FNDC3B
  Gene Name: fibronectin type III domain containing 3B
  Uniprot ID: Q53EP0
  ENST ID: ENST00000415807
  CDS Start-End: 173-3787
gcggcggcggcggctggaggaggagagcggcggcggcgggagcagcgaagggggcggcagggatcctccaggctgccggctgggaaggcgtgggcgacccggtgtgtggcgcgcccagagccccgcgtttcagccctagggaaggaagccagttgagggaagttctccatgaatgtacgtcacaatgatgatgaccgaccaaatccctctggaactgccaccattgctgaacggagaggtagccatgatgccccacttggtgaatggagatgcagctcagcaggttattctcgttcaagttaatccaggtgagactttcacaataagagcagaggatggaacacttcagtgcattcaaggacctgctgaagttcccatgatgtcacccaatggatccattcctcccattcatgtgcctccaggttatatctcacaggtgattgaagatagtactggagtccgccgggtggtggtcacaccccagtctcctgagtgttatcccccaagctacccctcagccatgtctccaacccatcatctccctccctatctgactcaccatccacattttattcataactcacacacggcttactacccacctgttaccggacctggagatatgccgcctcagttttttccccagcatcatcttccccacacaatatatggtgagcaagaaattataccattttatggaatgtcaacctacatcacccgagaagaccagtacagcaagcctccgcacaaaaaactgaaagaccgccagatcgatcgccagaaccgcctcaacagccctccttcttctatctacaaaagcagctgcacaacagtatacaatggctatgggaagggccatagtggtggaagtggcggaggcggcagcggtagtggtcccggaattaagaaaacagagcgacgagcaagaagcagcccaaagtcgaatgattcagacttgcaagaatatgagttggaagtaaagagggtgcaagacattctttcgggaatagagaaaccacaggtttctaatattcaggcaagagcagttgtgttgtcctgggctccccctgttggactttcctgtggaccccacagtggtctttccttcccctacagttacgaggtggccttatcagacaaaggacgagatggaaaatacaagataatttacagtggagaagaattagaatgtaacctgaaagatcttagaccagcaacagattatcatgtgagggtgtatgccatgtacaattccgtaaagggatcctgctccgagcctgttagcttcaccacccacagctgtgcacccgagtgtcctttcccccctaagctggcacataggagcaaaagttcactaaccctgcagtggaaggcaccaattgacaacggttcaaaaatcaccaactaccttttagagtgggatgagggaaaaagaaatagtggtttcagacagtgcttcttcgggagccagaagcactgcaagttgacaaagctttgtccggcaatggggtacacattcaggctggccgctcgaaacgacattggtaccagtggttatagccaagaggtggtgtgctacacattaggaaatatccctcagatgccttctgcaccaaggctggttcgagctggcatcacatgggtcacgttgcagtggagtaagccagaaggctgttcacccgaggaagtgatcacctacaccttggaaattcaggaggatgaaaatgataaccttttccacccaaaatacactggagaggatttaacctgtactgtgaaaaatctcaaaagaagcacacagtataaattcaggctgactgcttctaatacggaaggaaaaagctgtccaagcgaagttcttgtttgtacgacgagtcctgacaggcctggacctcctaccagaccgcttgtcaaaggcccagttacatctcatggctttagtgtcaaatgggatccccctaaggacaatggtggttcagaaatcctcaagtacttgctagagattactgatggaaattctgaagcgaatcagtgggaagtggcctacagtgggtcggctaccgaatacaccttcacccacttgaaaccaggcactttgtacaaactccgagcatgctgcatcagtaccggcggacacagccagtgttctgaaagtctccctgttcgcacactaagcattgcaccaggtcaatgtcgaccaccgagggttttgggtagaccaaagcacaaagaagtccacttagagtgggatgttcctgcatcggaaagtggctgtgaggtctcagagtacagcgtggagatgacggagcccgaagacgtagcctcggaagtgtaccatggcccagagctggagtgcaccgtcggcaacctgcttcctggaaccgtgtatcgcttccgggtgagggctctgaatgatggagggtatggtccctattctgatgtctcagaaattaccactgctgcagggcctcctggacaatgcaaagcaccttgtatttcttgtacacctgatggatgtgtcttagtgggttgggagagtcctgatagttctggtgctgacatctcagagtacaggttggaatggggagaagatgaagaatccttagaactcatttatcatgggacagacacccgttttgaaataagagacctgttgcctgctgcacagtattgctgtagactacaggccttcaatcaagcaggggcagggccgtacagtgaacttgtcctttgccagacgccagcgtctgcccctgaccccgtctccactctctgtgtcctggaggaggagccccttgatgcctaccctgattcaccttctgcgtgccttgtactgaactgggaagagccgtgcaataacggatctgaaatccttgcttacaccattgatctaggagacactagcattaccgtgggcaacaccaccatgcatgttatgaaagatctccttccagaaaccacctaccggatcagaattcaggctataaatgaaattggagctggaccatttagtcagttcattaaagcaaaaactcggccattaccacccttgcctcctaggctagaatgtgctgctgctggtcctcagagcctgaagctaaaatggggagacagtaactccaagacacatgctgctgaggacattgtgtacacactacagctggaggacagaaacaagaggtttatttcaatctacagaggacccagccacacctacaaggtccagagactgacggaattcacatgctactccttcagaatccaggcagcaagcgaggctggagaagggcccttctcagaaacctataccttcagcacaaccaaaagtgtcccccccaccatcaaagcacctcgagtaacacagttagaaggaaattcatgtgaaattttatgggagacggtaccatcaatgaaaggtgaccctgttaactacattctgcaggtattggttggaagagaatctgagtacaaacaggtgtacaagggagaagaagccacattccaaatctcaggcctccagaccaacacagactacaggttccgcgtatgtgcgtgtcgtcgctgtttagacacctctcaggagctaagcggagccttcagcccctctgcggcttttgtattacaacgaagtgaggtcatgcttacaggggacatggggagcttagatgatcccaaaatgaagagcatgatgcctactgatgaacagtttgcagccatcattgtgcttggctttgcaactttgtccattttatttgcctttatattacagtacttcttaatgaagtaaacccaacaaaactagaggtatgaattaatgctacacattttaatacacacatttattcagatactcccctttttaaagcccttttgttttttgatttatatactctgttttacagatttagctagaaaaaaaatgtcagtgttttggtgcacctttttgaaatgcaaaactaggaaaaggttaaactggatttttttttttaaaaaaaagaaaaaaaaagaagaaaagtataccagataccaaaagctagctttcttatgttttcctttaaattttcagatttaccttcattctgttttcactgatgtcttttgcaagcctttgatttttttttttttgttacagtttagtaatttatattcaccagtcacttcatatgtcttgaacatctgtatctgtaaacatgaatcaccgtgtgtgtacttacagggctaggatttcagtgttgtcagagtattaccacacagcaacagcaacatacagaagatatgttcactcagataagactgccctaaacaaccattttgtcactcagttatttaactgtgtttagctcatttaaatcaaaatgtgtactttaatctaaaatgttttaataatctgtatttcttataattttaacactatgagctgcctgtataagaaatcaagtaaccagaatgcacctataaattatggagcattgtagattttaccacatcaattcatagcagtaactttaagagggcattgtgcaatagttagttgttttcttgttcagctattttaaaggctgctttaacttgtttgtttgtctttgtatataactacttctaatctaatcactagagttattatattctgttatgtttgaccagaattatatgacaagaactggtgacagtttagtgcctctgcccattgtccatgatttacactaattgtgagcagtcttcttatgtgtcagctcattatttttgaaacatttgcctttaggctgttctttgaggtatcaatgaagtgattgaatttcaataccttaattcagtgcacataatactaatgtaacagcagatgaaaattgataaaacccaaaagagagtcatctaaatttgtagttcctatttctgtgggtttgcctggccatggttggagagggaatggtgtttgatggtaaacacagggtgtttggggatcaaggagcctagattctctccctggatctgtcactaacttgctgcgtgacctgaacacgtcactttacctctctgtgcctcagttttcccatgcatgaaaaataaaataaaataaaacggg

SEQ ID NO: 134494 - DNA, 1657 bp, Homo sapiens
  Payload ID: 6272
  Gene Symbol: FNDC4
  Gene Name: fibronectin type III domain containing 4
  Uniprot ID: Q9H6D8
  ENST ID: ENST00000264703
  CDS Start-End: 393-1097
cgcgcgtcccggccgggctgcggcggagcgagcggggccagcgctgcagaaggcggcggctggctctccgggacggtcacatcccgctgcaggggcgggcggaggccgccgcactgcctcccgcaccggggacccaggccagcgtccgggcaacgccccctgctcccggacagactccgtggcccgctcgagccctgggggctccgcagacccgcgcccgctccgcccgcagctcggccccgcgctgcccgcgtcgccgggcccgcgccgggatggggtaggggcagcgccaccgagtcgggcgatgggccgccctctgggcaccgagcagccccccgaggcctgaccaaccgcgaggaccggcggaggagccccgcctggatgtcaagcggatgccaagcggatgccacagttccccccccagcggactccgtggggacatggcttcgctggtgcccctttccccatatctaagccccacggtcctcctgctggtcagctgtgacctgggcttcgtgcgagcagaccggcctccctctcctgtgaatgtgacggtcactcacctcagagccaactcggccactgtgtcctgggacgtcccagaaggcaacatcgtcattggctactccatttcccagcaacggcagaatggccccgggcagcgtgtgattcgggaggtgaacaccaccacccgggcctgtgccctctggggcctggctgaagacagtgactacacagtgcaggtcaggagcatcggccttcggggagagagtcccccagggccccgggtgcacttccgaactctcaagggttctgaccggctaccttcaaacagttcaagcccaggtgacatcacagtggaaggtctggatggagagcggccactgcagactggggaagtggtcatcattgtggtggtgttgctcatgtgggctgctgtaattgggctgttctgccgtcagtatgacatcatcaaggacaatgactccaacaacaatcccaaggagaagggaaaggggccggaacagagtcctcagggaaggccagtggggacaagacagaaaaagtcaccatctatcaacaccatcgacgtttgagtgaagaaacacacccagaagagagatgcactaacaactggggatagggatggggtcagggggagcccaagatggtgatctgcccgagactcccagagggtaatgccactcccacaatctcaggcctggtacccatcctctttccactgtgagcagagccagaaggtaggtctgttcagagtctgtgcccctggacctggggagtggatatcagatgggatatctccttccattccccggtccaggggagagtcactagttgtaccctactccattaggtcccaaatgggggccccatttcacctgtatcaggactctgagcatccccagctgccccacatcttgcctctggccctcagagaggggtgtttctgtgggtactcctcttaccccagcaaataaaaggaattgtctgaccctagaggcagatgctgcactgcactactccaatgtcttccatggagcctcaggtgctccccctctcacctggcagccccttcagctgctagtgatatcacttgttggacatttttccaataaaggttcttggacaaactgga

SEQ ID NO: 134495 - DNA, 2732 bp, Homo sapiens
  Payload ID: 6273
  Gene Symbol: FNDC5
  Gene Name: fibronectin type III domain containing 5
  ENST ID: ENST00000373471
  CDS Start-End: 68-706
gcggccgccgggcgccggagccgcgtccccctgcgccgccccgggcctgccggccggaggagccaccatacaccccgggtcgccgagcgcctggccgccccgcgcccgcgccgcgctccgcctgtggctgggctgcgtctgcttcgcgctggtgcaggcggacagtccctcagccccagtgaacgtcaccgtcaggcacctcaaggccaactctgcagtggtgagctgggatgttctggaggatgaggttgtcatcggatttgccatctcccagcagaagaaggatgtgcggatgctgcgcttcatccaggaggtgaacaccaccacccgctcatgtgccctctgggacctggaggaggatacggagtacatagtccacgtgcaggccatctccattcagggccagagcccagccagcgagcctgtgctcttcaagaccccgcgtgaggctgagaagatggcctccaagaacaaagatgaggtaaccatgaaagagatggggaggaaccaacagctgcggacaggcgaggtgctgatcatcgtcgtggtcctgttcatgtgggcaggtgtcattgccctcttctgccgccagtatgacatcatcaaggacaatgaacccaataacaacaaggaaaaaaccaagagtgcatcagaaaccagcacaccagagcaccagggcggggggcttctccgcagcaagatatgaaaaccttttcagtgcttgccctcagcagctaagaagacagacagtagagaatgtgagaggatctcatggttctgatgatgattatccaacaaacatctggccctctctacatctcttccctccatctccttgtaccctctggcttactgtcctctctctggcgcactttcctgaagcctcttattaactcccatctccagaagcacctcaacaatgtcagtggctgaggctgcactcagagggatgactgctgggggtagactgggtgccaggggccatgggcccaggacccagtcttggccattcagttgagtgaggctgaaggctgggtttgaaaaggcaaaaagacaagacatccaggcagggcttctcttttctttccacaagggacaagagcttggcttatttaggctacagccctgctgctgctcccttccttcttctgtcctgtttccagccttgcaagaaggctattcacaattaggcctggctgcttctctcatttttttcctcccagtttccaaacaagccctcagtgaacatcattgaagcgtgactgcctgtctgcagggagaaggattccatttttcttctcagctggtccccaggcccacgggcacagggagagggacaactgcagcagtggggaggaggcacagctagctgcacagttctctcttctccttgtcctagtcagatgaaggaggctgcactacaaacccaaattctgcaaaaaaataaaaataagccacaaaactaaaaggcctggccccattctggaaaaggcaaagctgcatgagacacagccttctgcctcctcgcctctcctggactggcttcctctttgagaaaatgcacaaagccctgggagatgacaagcacaaggactgactcaagctgtgtctttcagaccaaggaacatcagagaagctgtggggctgcctgccaggcaggatcatggctgccatcaagccttttctggatccagccatcaaggacatgtttgtggtgtgatgcacacttttgcaagcgtgtaagatgttacctggtttgtctcttttggaaaacaaaaatcagaaggctgcattctagagggcagagaaattcccccgaagactgagctggttgcctgcatcctctatcttctttgacccttatgactgaaagatcatcagtttggaaggtactggtccaatttatttaggaagtatctcttggagtttcagaaatgctagcttggacaactgaaaagtcacatcacagctggcattctgggggctaccaaaacaccccttctggagtagaagctgctggaaggcaggcctgagccattcaccacggacaggaagagcagctctggctatcaccactggcctctggggtcttcatatcttgccatctcatccagggttccatgaaagttacccagggtcctcatgtccttccttagagcctgagtggtgtgaggtgacaggtctctctctccactgcccctttctggtttaaaaaaatggtgcttgatgagggaaggtagactcttccctaggactgacgagttacggctgccagatgcctgcatgggaagaggtggacatctgcatcttccattggtggtcaaggatgggtgtgggagaaccacacctagtgcaagcctggtactcagtaaatatttgttgaaatgaatgataagagcattggtccccaagccagagagccagaagccatcacccaatgaccgccccttccttccggtctacaagagctctcaaggctgggtctgccaccactctgctttgcccaagtgtgacagcactggggaggagagacaggataaagggcagatgtcagcaatactaagggcttcctcatgggagggcatgaggctccactcattgtcttgtgacttccatccctgctgaatggggctgcaaggccaaggctccttaggggagaggtccttacctctgatccacttagagcaataaccactttttaaatgtaaaataaaaagacaaatgaaaaggca

SEQ ID NO: 134496 - DNA, 837 bp, Homo sapiens
  Payload ID: 6273
  Gene Symbol: FNDC5
  Gene Name: fibronectin type III domain containing 5
  Uniprot ID: Q8NAU1
  ENST ID: ENST00000496770
  CDS Start-End: 215-676
aagagaaaagagagagagaggtgctctggctccggggctcttctcccaaacgggtcgaggtcccagctgaggctctcccaggacaagtccctcagccccagtgaacgtcaccgtcaggcacctcaaggccaactctgcagtggtgagctgggatgttctggaggatgaggttgtcatcggatttgccatctcccagcagaagaaggatgtgcggatgctgcgcttcatccaggaggtgaacaccaccacccgctcatgtgccctctgggacctggaggaggatacggagtacatagtccacgtgcaggccatctccattcagggccagagcccagccagcgagcctgtgctcttcaagaccccgcgtgaggctgagaagatggcctccaagaacaaagatgaggtaaccatgaaagagatggggaggaaccaacagctgcggacaggcgaggtgctgatcatcgtcgtggtcctgttcatgtgggcaggtgtcattgccctcttctgccgccagtatgacatcatcaaggacaatgaacccaataacaacaaggaaaaaaccaagagtgcatcagaaaccagcacaccagagcaccagggcggggggcttctccgcagcaaggtgagggcaagacctgggcctgggtgggccaccctgtgcctcatgctctggtaatccctggactgcagagggggtcagctcggggactggcatggcgacagctgggcagagccagacttggctgctgcctgtgtgacacagggacactgcaagttgattttggatcctctccttttgcagggtgccaggggccagtggtgatttgaagaaaaaaa

SEQ ID NO: 134497 - DNA, 3332 bp, Homo sapiens
  Payload ID: 6274
  Gene Symbol: FNDC7
  Gene Name: fibronectin type III domain containing 7
  Uniprot ID: Q5VTL7
  ENST ID: ENST00000370017
  CDS Start-End: 278-2479
tgctttgaaaccaaggttacagtagctttttggcccgcttgccgtggctttctccaactctcttcttcttttcagtctttgcaatacctgtccctgccggtctccaagtgcccctggttacaggtcagctccacactgaaggggaggagctacttcctagggtctcttcccagcatcacagccctacatcccagcgaccaacggtgttatactcctgggggccaaagaggacccggattgctttgttttgtgccatgtgagtactatgtccaacaggatggctggtggacgagagacatgtttgcctttgattggattcattcttatctgtcttaaaatggttgcttcagcaaaatcagctcctgaaatacccactattgatcaggcatattcaaaactcagcaacagtatcactgtagaatgggctacagtgccgggtgccaccagttacctcctcacggctgaagacggggacacagtcattgaaaccacggtggccaattccccaggcactgtgacgggactaaaggctgcaacctggtatgaaatcaccatcagatccatcagcgctgctgggagaagccaggcgtcacctccaaagcaggcaaagacagtgttggctgcaccaattctagaagtaagctctccaagttcagactccattcttgtgcagtgggaagctgtatatatggcaattgcattctccgtgtccattatgcgagccaatggcttggggagtatatggaaagagaatactacaaacacctccttgacattcaccagtttagaagccggaactctctacaccataaaggcctatgcatggaatgccaacagaatccctggggatgactccacctgcaatcagagaacaagtcctcgggcccctgccaacattcaagtctctttcgatagtggagctctgaaggcatctttttcctgggcacgggcagaaggagctttcaattatactgtgatggctttgagcgactcttcagagctgacctgcagtacaactttcagttcctgcaccatctcttccctccagtgtggaactgaatacttgatttcagttttagcaagtaatgatgctggatctagcaaatcatcttcagcaatgaccctgaaaactgttgcttgtgcacccggaagagtgacgatccaagaagatccccctggccacctgtctgtggcttggtccagtgtagatctgggtgactactatgtggtctttgtgaagagtgatgatggcttggaagtacactgcaacacatctctcactcagtgcaacttcttatctgagtgtggcttcacttattttattagtgtttttgtctataacaaggcagggcaaagtcctttgggtgacatattcaattataccacagctccctgttgtcctagtgacattaaccccgtgttggtgtccagtgacagagttgagattgtctggtctcctgtccgtggtgccgaactgtatgaaaccaaggctgtagatgggtacaacatggttgagtgcaatgacactactcctgcgtgcaccctttcggctctagagtgtgacaccaagtacaacatcacagtgtattcattcaatgaagtccgaggcagcaatatgtcatgtactccccagttcataaccacagctccttgcagtcctgaaataaaaaatgtttcaagggatgcattctccatgattaatgtgcactggcgatccactaatgatgatgctacttacacggtgactgcccaaggggagaaaggactgtatcagtgcagcagcacaggagagtcctgcaccatgcggggcttgccctgtggctcagtgttctctgtcactgctgtggccgaaacacaggcaggacggagcctgcccagctacagtgtgcccctggaaacagtgccatgctgtccaaccggtctgacagtaactcaaatcacccagtcagtaatcaacgtgagctggactattgggagagtggctcaaacccatgttgcagttctggagtcacacactggacagtctaagtgtcacactcatcaaaaccactgcctcctaggatgcatcacatgtggcatcaattacacagtgacattaaaagcaattagtgccaccgggttgactgcagattgctcctaccaaagttatttctctggtgcctgctgccctttgggggtgaaattatataggctgggccctaatggcatccggatctactggcaagcctccaggggctctgccaattacagcactgacctctatggctccaaaggcattttcacgtgcaccccgagtgctggcctcagtttctgtgatgtcactgagataccctgtggggatgtatacactgtgatggtctcaccagttgctaaaacaggattgaagcttactttctgtccaaaaaaaatatattcagtaacttgctctggaagtacacttggaatggtgatttatagagggaagagaaatgaagaatgacaaagtgagccccagataaaaacaaaaacttgaccaaagttgtctcatttgttagtgattagagatggaaaagatctactagaatgtagaataaaaatgcctctaggataggaaaagctcctttggcctttagaagaacaactctgactctgcttcctgagggcaaggtcaggtgtgtcctcacctgcacagcagttggagatctgctatgtgaggactctggagagaaatgaatccagaaagtcccctggacggctgctagcctgagttggcacactgtgagaaccctggaaacaagaaagttctgcttagcagaaattctgagatttcacatccacacacaccacagacttcaacacatccacttcatgagtgttttacaacagcacttgtctgcagccccctcaggggctggaaatgttcactcccagaaagtcaagccacccacatgcagacagcacttatcccaagacaaacctccagcaggacttcagtataggttggaaagcagtagctgccagggcaacctgagataacaaacgccctcatcgcaagttaggagcaaagctgagctgcttgcagggttcgctgagccaaagcatcaggtggcgtgacatctatgggagcatctgggaaagcagagctgccagcctgttgctagaagggttgcagttatgctttctgcatgagagaagatgtcaaatggagagcctcaaactgtggccgactgacatgcgtgcatcttttgggggaggaccatccatcttattggccatatcccccactcatattgtaattacttttttcatctttggagggggaaggcaatgaaatataacataaatctctcata

SEQ ID NO: 134498 - DNA, 1667 bp, Homo sapiens
  Payload ID: 6274
  Gene Symbol: FNDC7
  Gene Name: fibronectin type III domain containing 7
  ENST ID: ENST00000445274
  CDS Start-End: 1-1498
agaaggagctttcaattatactgtgatggctttgagcgactcttcagagctgacctgcagtacaactttcagttcctgcaccatctcttccctccagtgtggaactgaatacttgatttcagttttagcaagtaatgatgctggatctagcaaatcatcttcagcaatgaccctgaaaactgttgcttgtgcacccggaagagtgacgatccaagaagatccccctggccacctgtctgtggcttggtccagtgtagatctgggtgactactatgtggtctttgtgaagagtgatgatggcttggaagtacactgcaacacatctctcactcagtgcaacttcttatctgagtgtggcttcacttattttattagtgtttttgtctataacaaggcagggcaaagtcctttgggtgacatattcaattataccacagctccctgttgtcctagtgacattaaccccgtgttggtgtccagtgacagagttgagattgtctggtctcctgtccgtggtgccgaactgtatgaaaccaaggctgtagatgggtacaacatggttgagtgcaatgacactactcctgcgtgcaccctttcggctctagagtgtgacaccaagtacaacatcacagtgtattcattcaatgaagtccgaggcagcaatatgtcatgtactccccagttcataaccacagctccttgcagtcctgaaataaaaaatgtttcaagggatgcattctccatgattaatgtgcactggcgatccactaatgatgatgctacttacacggtgactgcccaaggggagaaaggactgtatcagtgcagcagcacaggagagtcctgcaccatgcggggcttgccctgtggctcagtgttctctgtcactgctgtggccgaaacacaggcaggacggagcctgcccagctacagtgtgcccctggaaacagtgccatgctgtccaaccggtctgacagtaactcaaatcacccagtcagtaatcaacgtgagctggactattgggagagtggctcaaacccatgttgcagttctggagtcacacactggacagtctaagtgtcacactcatcaaaaccactgcctcctaggatgcatcacatgtggcatcaattacacagtgacattaaaagcaattagtgccaccgggttgactgcagattgctcctaccaaagttatttctctggtgcctgctgccctttgggggtgaaattatataggctgggccctaatggcatccggatctactggcaagcctccaggggctctgccaattacagcactgacctctatggctccaaaggcattttcacgtgcaccccgagtgctggcctcagtttctgtgatgtcactgagataccctgtggggatgtatacactgtgatggtctcaccagttgctaaaacaggattgaagcttactttctgtccaaaaaaaatatattcagtgatttatagagggaagagaaatgaagaatgacaaagtgagccccagataaaaacaaaaacttgaccaaagttgtctcatttgttagtgattagagatggaaaagatctactagaatgtagaataaaaatgcctctaggataggaaaagctcctttggcctttagaagaacaactctgactctgcttcctgagggcaaggt

SEQ ID NO: 134499 - DNA, 1388 bp, Homo sapiens
  Payload ID: 6275
  Gene Symbol: FNDC8
  Gene Name: fibronectin type III domain containing 8
  Uniprot ID: Q8TC99
  ENST ID: ENST00000158009
  CDS Start-End: 116-1090
attgcacctgcagactgtccaaactaaaggtgggccactgcccccacagtttctctctgcttctggtcagctgggttgtcctgcatggtgacgggtgtcatcccgaacaaatcagatggcatcagaggcactccatcaagtgggagatggggaggaggctgtactgaagaaagaaaacttcaacatgatgaatgcccttgaccaactgccaaaacccttttcaaaccccaagtctatgaaccggaccgtcactaccaaaggactcccactagcctcaaagggcaatttggtcaacttcttggaggatgataccatcaacctactgaagccgctgccagtagaggattcagactgcagctctgatgagaccagcatctctgccttctcatccaccttgctgaaccccatcaaattagctgtgacccagcccaacagcagcttctttgcagggatgctggagggggagctgaacaaactcagcttctccccaatggccaagaatgcagaaaatgaggacctggcgctcggcccctgcccatgcccatcgaagtcccagatggccacaaggggcctgctggaccttgacaaccctgagctggagacagaaacctcctcaacgcactcagaatcttctgtggttgtggacctgccggacacccccttcatctttgagcacaccgtcaacaattccacagctgtgatttcctggacctacgccttgggcaagcagccggtcagtttctaccagctcctgttacaggaggtggccaagacacaggagaatgagttgcccgaggcaaagaatcgtccatggatcttcaacaagattttgggcactactgtcaagctgatggagctaaagcctaacacgtgttactgcctcagtgtccgtgcagccaacacagctggggtggggaagtggtgcaagccctacaaatttgcaaccctggccactgacttcagcagctttcctgagaactaccccatccagatcaccgtgcggcgcaaggaaccccggcaaaagatcgtgtccatcgggccggaggagatgcggaggctggaggatctggaatacctatttccctgttaagggggagggccccaggacacccctcacctactttcagcttcaaccccaggccctcagaaaccagagccatgagacctaccataccaccagcaccctgcgggcccggggtctggcagagtggtatgggcaccccacccctgggctggggccaaggctacataggggccccattcacctggaggcatctcaggccaggccatgccaggctcagccactgcccacagctgctagactccctcctcctccaaatctgggctgggtctaggtccctcattaaagaactgcaggtcatccagca

SEQ ID NO: 134500 - DNA, 2125 bp, Homo sapiens
  Payload ID: 6276
  Gene Symbol: FNDC9
  Gene Name: fibronectin type III domain containing 9
  Uniprot ID: Q8TBE3
  ENST ID: ENST00000312349
  CDS Start-End: 189-863
aatgatgctgatctgaagaaatgaataatgtgagcattaggggcggcagtgggattactcagtgttgagagaaacaacacggaaagcccagagcagaggagggagaaggccccattctctcagctttaatctactgcacctcggagggcagagctctaaccagacacgctgcaagcatcagaatcgggatgaacatcgaggtggggaacatttcttatacaggagccatcatctcctggtcgtcctcggagccctgcctggaggactattaccatattatgtacaggcccaactggaacagcatcttctctggctatcttcgctacagcttccaccacgaggagaaggtgcctcgaacgatcagctccgtggtgctggaacatcttgccccttccactctctacttcctgtgcatcagctgtaagaaggctgccttcccttacaggcactactgcaccatgttccacaccctggataagagtccgctggctcctggaagctccctggtagacccccagatctccctttgggtgctgatggccattctgctggcctgcttcacagccgtcttggccttcatctgcctccagttctggtgtgtccgttgccatgagccgcgatggtcttacagggctggccacatggaggaggccaatgggttggtgagatggccagaggaggccccggatcttggtcagagggaggaagacctgcaggggctccccctggtggaaatgccacgcaagaactccagagatggagctgaactggatcccgaagccaaccaggatgcccctgatgcgggtgccttacagagggggggtggtgacccacccgctatactgcctcattgtggggaatgagagtggggaggagagcgcccgcatcatgtagcctaaagctttccacacagtaggtcgtttgtacaaatgtgtctatagactacccatttctctcccatcaaacgtcactgctattgtaggtcacctgggttggatgaatgccccatgacaaagcttctcaagctggaaaatgtatcccccagggtatgccaaggcacaaacgaggcatctcagcagcagcgtccactcggaggacacagttaagaattgaaagcattgttttaacattaaaacaaacatggatatgttataaagtagaaagcaaaaatttgcatgacaaataaaacacagcacttgaaggaaacacttgagttacaagtaggctctcagaggtacacttttgggcaaaggtagatgtccagtttcctctgcccttgaggggattatttggaaataatttgggattatttggaaataatttgtgagaacccttgctctggagtgttttccaacttttaggcaatcacataccaccgctctctattttttaaaaccatggattatcttcactattattaataatactttcctttaaattgactcattttttaagcgtaaacttattttcaaagacagccttatattactccataagtgaaaaaccagcaccctcctgctgcaaacagaagggaagagacataagaataaacatcatgaaaacaagataatattaaataatctgacttagcttctattgcctgccagtgattctgagcttaatgcctgcttgcttgtctttgataaaaagggagatccagtgttggagaggtaataaagacatattagcaccaatatttgtctttctccttgatatagcataaggtttgaaagagaatcgaaaagggaagtgctgtttttactttgcgagtcagtgttagttaaatgccatgtctgtgaaccacctcaaatgctgtcagtcagcttcccttgatttgagaaaattgtcttgaccagactaggcaggctgttctggagaagacgcctgtactctccaagcatcatccaagaccttcccagtaccctcttatatctatagagcacaaaatcccagaatcacaggacgacactgcagtgaatcaactaagaaacagcaggagctgagaagccaagacgagaagccccacatccctattcccttgcctacctcatgcattccctgctcggcacccagacttttgcccccattcctgctacttgtgaacaaataaagattcatatactca

SEQ ID NO: 134501 - DNA, 732 bp, Homo sapiens
  Payload ID: 6276
  Gene Symbol: FNDC9
  Gene Name: fibronectin type III domain containing 9
  ENST ID: ENST00000520782
  CDS Start-End: 192-732
aaccagacacgctgcaagcatcaggtaagacatatagatggctcttcttggaaatggaaatggcttcttttcacactctgcttggagaagggccgggcaaatgaatagttaaaaataggggagaatttagaaacggaaacagaggaagaaaaatcaataagggagacggacctggtcctaaaagaatcgggatgaacatcgaggtggggaacatttcttatacaggagccatcatctcctggtcgtcctcggagccctgcctggaggactattaccatattatgtacaggcccaactggaacagcatcttctctggctatcttcgctacagcttccaccacgaggagaaggtgcctcgaacgatcagctccgtggtgctggaacatcttgccccttccactctctacttcctgtgcatcagctgtaagaaggctgccttcccttacaggcactactgcaccatgttccacaccctggataagagtccgctggctcctggaagctccctggtagacccccagatctccctttgggtgctgatggccattctgctggcctgcttcacagccgtcttggccttcatctgcctccagttctggtgtgtccgttgccatgagccgcgatggtcttacagggctggccacatggaggaggccaatgggttggtgagatggccagaggaggccccggatcttggtcagagggaggaagacctgcaggggctccccctgg

SEQ ID NO: 134502 - DNA, 2811 bp, Homo sapiens
  Payload ID: 6277
  Gene Symbol: FBRS
  Gene Name: fibrosin
  Uniprot ID: Q9HAH7
  ENST ID: ENST00000287468
  CDS Start-End: 264-1646
ccccacccctgctgcaggtgccagggcaccctggggcctcagccgctaacgccctttctgagcaggacctgatcggccaggacctgaactctcgctacctgaatgcccagggtggccctgaggtggtgggggcagggggctcggcccggcccctggccttccagttccaccagcacaaccaccagcaccagcacacccaccagcacacccaccagcacttcaccccttatcccccgggcctgctgccaccccacggcccccacatgtttgagaaatatccaggaaagatggaaggccttttccgacataatccgtacacggccttccctcccgcagtgcccgggctgcctccgggcctcccgccggccgtctcctttggctccctgcagggggccttccagcccaagagcacgaaccctgagctgccaccacgactggggccggtgccgagcgggctctcccagaaggggacacagatccccgaccatttccggccacctttgaggaaaccagggaagtggtgtgccatgcacgtgcgtgtggcttacatgatcctgagacaccaggagaaaatgaagggtgactcccacaagcttgactttcggaatgacctcctgccctgccttccggggccctatggggccctgccccctgggcaggagctctcccacccggcctccctcttcactgcgactggtgccgtccacgctgcagccaaccctttcacggcagctcccggggcccacggacccttcctgagccccagcacccacattgatccctttgggcgtcccacaagcttcgcctctttggctgccctctccaacggggcctttggaggcctgggcagccccacattcaactccggcgccgtctttgcccagaaagaaagcccaggggccccaccagccttcgcctccccaccggacccatggggccgcctgcaccgcagtcctctgacctttcctgcctgggtccggccccctgaggccgcccggactccaggctcagacaaggagcggcctgtggagcggagggagccctccatcaccaaggaggagaaggacagggacctccccttctcacggccccagctccgagtttctcctgctactcccaaggcccgggctggtgaggaggggcctcggccaaccaaggaatctgtgcgggtaaaggaagagcggaaggaggaggctgccgccgccgctgccgctgctgctgccgccgccgctgccgccgccgcagcagccactgggccccagggccttcacctgctgtttgagaggccccggccgcccccgtttctgggccctagcccaccagatcgctgtgctggcttcctggagccaacctggttggcagcacccccacgcctggcaaggccaccccgcttctatgaggcgggtgaggagctaactggacccggggccgtggccgctgcccgcctctacggtctggaacctgctcaccccttgctctacagccgcttggctcctccaccaccacctgctgcggccccgggaacccctcaccttctcagcaagaccccaccgggagcccttttgggggcaccacctccgcttgtgcccgccccccggcccagttccccacctaggggccctggcccagctcgggctgacaggtgaggggaacgggggggggtcggggcaaagctccatctccccttcctttaaccaggtcctagggctgaggttttaagccagggctggagggcaaaggtcataacctcaccagccacctctgaggtcatggaacctgggaacagaagcctcaacccccacaagaccaagcatcacatggagtgtagggtcactgggagagcagaggtcacagcctctagagaagggagaggggcgtgtgcatgggagtgtggctcatctcgggggccatggggcctcctgaggtacacctttgcccctgtaagggcctctaggccctgggcctgcctccccaagggctcactaagccagaggccaaagtgccccctcccgttcacctaccacccaagtcctcatgccctccgagggctgggggaggaggggctcaaggaaggggggttccatgtacatatttatcacccctttcacatagccccaagaccttttgtacatttttacaggggtgcccctcccaacagttcccttcctggttaattaaaccctcagactggtgctgtgttcctagcctctggcctctctgtggggaaaggggactgcagggggaagagccgggaagggacagtcaggcttctccctgggaaggtggggccagcaggagatgaccaacagggggcaggacctggggacctgggctggagggaagggcagaagcttcctacttggctgacagccccggttcccccaacatgttcccgttcactctgcccccacccccaaaggctcagcctctaaatctcagactccaccacctcttaatggctcagtccccttcaccccatttccaagtgcccccaggactcctgggccctgcttccctgaaccctgttctccaaaaccctgccccaggctaagggtggccagagaaggtcaccatgtaccacacaccaaagaagggggtcggcccaggggtgggcgacacaggcagcttcttcggcagcctcacggcagcaaccccagccttcccaaagcagcaggcgcctccaggctggggcccaacctagaaggcaggggtcaatctaacaaaaccctaacgttgacttttttccctggtggggcttcttctgtaacatgacttgcgaatatttatataaaaacgagtgttacaatgaga

SEQ ID NO: 134503 - DNA, 5200 bp, Homo sapiens
  Payload ID: 6277
  Gene Symbol: FBRS
  Gene Name: fibrosin
  ENST ID: ENST00000356166
  CDS Start-End: 1089-4031
gagagaggaaggaggcgtaggctgaggaggaagagggaggaggggtagggaagtcctggcggagaagcgccctaagactccaaaggagacaacaggagtttgtgctggagctcccccgctgcccatcggccgttccggatcccctaaggcccaagtcggacagagacggaggaaaggaggaagagacttttatgtcggcggacaggggagctgtacccgtcaccgttgcctcacatccggggctttggagggctggcctcgctgccccgccccgcctcgcgcctttcatggcgaccggaggcggaggctggaggagctgggcccggaggaggcccctttaaatctccttaaaggggtggccactgaactcggcggactgcaacgccagccttaaaggggaagccgccgagcagacgctgacaaattgagaactgtgccgttgggagaactggggcgagtggggtttttctttacgtcctcctcccccacacacaagaagtcttttaaattcaacttaaaggggaagtggccgcttgtggaggactagaaactaactccgagcccttaaagggacggcctgctgttagaaggaccctggactccttaaaggggtggcctctttgagccggaggacttgagacacttttaaaggggaggtctgcgtttcggggcgagctttcggccccttttaaaggggtggcccttcctcttcctcggggagacttgcatcgacccctggcagggggtggccaccgcactaggccgccggacactgtcgggtcgtcttaaaggggccgggagctggacaacttggggcctcgccttaaagggacggccgccccgttttcgccgtcgcggccccgccgagcccgcagggggggccctcgggcttgtcgccccgggggcggcgccggctccccgggccgtggccttggggcaagctcggggccagcagatccggctttaaaggagaagccgtggccctctcgtcactgtgcagccgccagcgccgcgcctgcgaccccgggcctgcggacaggccgcttcgggccccgccgcctccggatgcggcgctgagggcggtcgccatggagacggcagcggccgcggccccgggtccgggctgggcagcagagggggagcgccgacggcggcgctgctcgcgccgagaccgagaccgggagcagcggcgccgccgaggtccaggcggcgacgcgccccgggccctgttggccgccccgcgcggctcctcgtcctcgtcgtcgccgccgccgcccgccaggccttggtcgtcagcttcgtctggagagcggcctgggggcccgagacgccggcggccccgtccgagacctcgacccccgcgaccccgagctcggaagcggcctgccggctcgggcagccgcggggaggaagaggaggaggaggaggaggaggggggcgcagacgacggcgaagccgaggaggagcctgaggaggaggaagaggaggaggaggacttgatcgatggcttcgccatcgccagcttcgccaccctcgaggccttgcagaaggatgcatctcttcagcccccagagcgactggaacatcggctgaagcattctgggaagcggaaaagggggggctccagtggggccaccggggagccaggggacagctctgatcgagagcctggccggccccctggggatcgggcccgaaaatggcccaataagcggagaagaaaagaggcgtcctcccgtcactctctggaagctggatacatatgtgacgcggaaagtgatctggacgagagggtctccgatgatgacctcgacccatcctttactgtctcaaccagcaaagcctcgggcccccacggcgccttcaatgggaactgtgaagcaaaactctccgtggtccctaaagtgtcgggcctggagcggagccaagaacagcccccggggcccgacccgctgctagtgcctttccccccaaaggaaccaccgcctccaccggtccctcggcctcctgtctcaccccctgcacccctgccggccactcccagtctgccacccccaccccagccccagctgcagcttcgggtctcacccttcggcctccgcacttctccatatggcagcagcctggacctcagcactggcagctcttcacggccgccccccaaggccccggcccctcccgtggctcagcctcccccctcatcatcctcttcgtcctcctcctcctcatctgcctcctcctcgtccgcgcagctcacccaccggcccccgacgccctcactgcccctgcctttgtccacccacagctttccccctcccgggctgcggccccccccaccaccccaccacccctccttgttctcccctggccccaccctgcccccacccccacccctgctgcaggtgccagggcaccctggggcctcagccgctaacgccctttctgagcaggacctgatcggccaggacctgaactctcgctacctgaatgcccagggtggccctgaggtggtgggggcagggggctcggcccggcccctggccttccagttccaccagcacaaccaccagcaccagcacacccaccagcacacccaccagcacttcaccccttatcccccgggcctgctgccaccccacggcccccacatgtttgagaaatatccaggaaagatggaaggccttttccgacataatccgtacacggccttccctcccgcagtgcccgggctgcctccgggcctcccgccggccgtctcctttggctccctgcagggggccttccagcccaagagcacgaaccctgagctgccaccacgactggggccggtgccgagcgggctctcccagaaggggacacagatccccgaccatttccggccacctttgaggaaaccagggaagtggtgtgccatgcacgtgcgtgtggcttacatgatcctgagacaccaggagaaaatgaagggtgactcccacaagcttgactttcggaatgacctcctgccctgccttccggggccctatggggccctgccccctgggcaggagctctcccacccggcctccctcttcactgcgactggtgccgtccacgctgcagccaaccctttcacggcagctcccggggcccacggacccttcctgagccccagcacccacattgatccctttgggcgtcccacaagcttcgcctctttggctgccctctccaacggggcctttggaggcctgggcagccccacattcaactccggcgccgtctttgcccagaaagaaagcccaggggccccaccagccttcgcctccccaccggacccatggggccgcctgcaccgcagtcctctgacctttcctgcctgggtccggccccctgaggccgcccggactccaggctcagacaaggagcggcctgtggagcggagggagccctccatcaccaaggaggagaaggacagggacctccccttctcacggccccagctccgagtttctcctgctactcccaaggcccgggctggtgaggaggggcctcggccaaccaaggaatctgtgcgggtaaaggaagagcggaaggaggaggctgccgccgccgctgccgctgctgctgccgccgccgctgccgccgccgcagcagccactgggccccagggccttcacctgctgtttgagaggccccggccgcccccgtttctgggccctagcccaccagatcgctgtgctggcttcctggagccaacctggttggcagcacccccacgcctggcaaggccaccccgcttctatgaggcgggtgaggagctaactggacccggggccgtggccgctgcccgcctctacggtctggaacctgctcaccccttgctctacagccgcttggctcctccaccaccacctgctgcggccccgggaacccctcaccttctcagcaagaccccaccgggagcccttttgggggcaccacctccgcttgtgcccgccccccggcccagttccccacctaggggccctggcccagctcgggctgacaggtgaggggaacgggggggggtcggggcaaagctccatctccccttcctttaaccaggtcctagggctgaggttttaagccagggctggagggcaaaggtcataacctcaccagccacctctgaggtcatggaacctgggaacagaagcctcaacccccacaagaccaagcatcacatggagtgtagggtcactgggagagcagaggtcacagcctctagagaagggagaggggcgtgtgcatgggagtgtggctcatctcgggggccatggggcctcctgaggtacacctttgcccctgtaagggcctctaggccctgggcctgcctccccaagggctcactaagccagaggccaaagtgccccctcccgttcacctaccacccaagtcctcatgccctccgagggctgggggaggaggggctcaaggaaggggggttccatgtacatatttatcacccctttcacatagccccaagaccttttgtacatttttacaggggtgcccctcccaacagttcccttcctggttaattaaaccctcagactggtgctgtgttcctagcctctggcctctctgtggggaaaggggactgcagggggaagagccgggaagggacagtcaggcttctccctgggaaggtggggccagcaggagatgaccaacagggggcaggacctggggacctgggctggagggaagggcagaagcttcctacttggctgacagccccggttcccccaacatgttcccgttcactctgcccccacccccaaaggctcagcctctaaatctcagactccaccacctcttaatggctcagtccccttcaccccatttccaagtgcccccaggactcctgggccctgcttccctgaaccctgttctccaaaaccctgccccaggctaagggtggccagagaaggtcaccatgtaccacacaccaaagaagggggtcggcccaggggtgggcgacacaggcagcttcttcggcagcctcacggcagcaaccccagccttcccaaagcagcaggcgcctccaggctggggcccaacctagaaggcaggggtcaatctaacaaaaccctaacgttgacttttttccctggtggggcttcttctgtaacatgacttgcgaatatttatataaaaacgagtgttacaatgagacccc

SEQ ID NO: 134504 - DNA, 2890 bp, Homo sapiens
  Payload ID: 6277
  Gene Symbol: FBRS
  Gene Name: fibrosin
  ENST ID: ENST00000543786
  CDS Start-End: 1-632
aggacttgatcgatggcttcgccatcgccagcttcgccaccctcgaggccttgcagaaggatgcatctcttcagcccccagagcgactggaacatcggctgaagcattctgggaagcggaaaagggggggctccagtggggccaccggggagccaggggacagctctgatcgagagcctggccggccccctggggatcgggcccgaaaatggcccaataagcggagaagaaaagaggtctccgatgatgacctcgacccatcctttactgtctcaaccagcaaagcctcgggcccccacggcgccttcaatgggaactgtgaagcaaaactctccgtggtccctaaagtgtcgggcctggagcggagccaagaacagcccccggggcccgacccgctgctagtgcctttccccccaaaggaaccaccgcctccaccggtccctcggcctcctgtctcaccccctgcacccctgccggccactcccagtctgccacccccaccccagccccagctgcagcttcgggtctcacccttcggcctccgcacttctccatatggcagcagcctggacctcagcactggcagaaaccagggaagtggtgtgccatgcacgtgcgtgtggcttacatgatcctgagacaccaggagaaaatgaagggtgactcccacaagcttgactttcggaatgacctcctgccctgccttccggggccctatggggccctgccccctgggcaggagctctcccacccggcctccctcttcactgcgactggtgccgtccacgctgcagccaaccctttcacggcagctcccggggcccacggacccttcctgagccccagcacccacattgatccctttgggcgtcccacaagcttcgcctctttggctgccctctccaacggggcctttggaggcctgggcagccccacattcaactccggcgccgtctttgcccagaaagaaagcccaggggccccaccagccttcgcctccccaccggacccatggggccgcctgcaccgcagtcctctgacctttcctgcctgggtccggccccctgaggccgcccggactccaggctcagacaaggagcggcctgtggagcggagggagccctccatcaccaaggaggagaaggacagggacctccccttctcacggccccagctccgagtttctcctgctactcccaaggcccgggctggtgaggaggggcctcggccaaccaaggaatctgtgcgggtaaaggaagagcggaaggaggaggctgccgccgccgctgccgctgctgctgccgccgccgctgccgccgccgcagcagccactgggccccagggccttcacctgctgtttgagaggccccggccgcccccgtttctgggccctagcccaccagatcgctgtgctggcttcctggagccaacctggttggcagcacccccacgcctggcaaggccaccccgcttctatgaggcgggtgaggagctaactggacccggggccgtggccgctgcccgcctctacggtctggaacctgctcaccccttgctctacagccgcttggctcctccaccaccacctgctgcggccccgggaacccctcaccttctcagcaagaccccaccgggagcccttttgggggcaccacctccgcttgtgcccgccccccggcccagttccccacctaggggccctggcccagctcgggctgacaggtgaggggaacgggggggggtcggggcaaagctccatctccccttcctttaaccaggtcctagggctgaggttttaagccagggctggagggcaaaggtcataacctcaccagccacctctgaggtcatggaacctgggaacagaagcctcaacccccacaagaccaagcatcacatggagtgtagggtcactgggagagcagaggtcacagcctctagagaagggagaggggcgtgtgcatgggagtgtggctcatctcgggggccatggggcctcctgaggtacacctttgcccctgtaagggcctctaggccctgggcctgcctccccaagggctcactaagccagaggccaaagtgccccctcccgttcacctaccacccaagtcctcatgccctccgagggctgggggaggaggggctcaaggaaggggggttccatgtacatatttatcacccctttcacatagccccaagaccttttgtacatttttacaggggtgcccctcccaacagttcccttcctggttaattaaaccctcagactggtgctgtgttcctagcctctggcctctctgtggggaaaggggactgcagggggaagagccgggaagggacagtcaggcttctccctgggaaggtggggccagcaggagatgaccaacagggggcaggacctggggacctgggctggagggaagggcagaagcttcctacttggctgacagccccggttcccccaacatgttcccgttcactctgcccccacccccaaaggctcagcctctaaatctcagactccaccacctcttaatggctcagtccccttcaccccatttccaagtgcccccaggactcctgggccctgcttccctgaaccctgttctccaaaaccctgccccaggctaagggtggccagagaaggtcaccatgtaccacacaccaaagaagggggtcggcccaggggtgggcgacacaggcagcttcttcggcagcctcacggcagcaaccccagccttcccaaagcagcaggcgcctccaggctggggcccaacctagaaggcaggggtcaatctaacaaaaccctaacgttgacttttttccctggtggggcttcttctgtaacatgacttgcgaatatttatataaaaacgagtgttacaatgag

SEQ ID NO: 134505 - DNA, 5568 bp, Homo sapiens
  Payload ID: 6278
  Gene Symbol: FBRSL1
  Gene Name: fibrosin-like 1
  Uniprot ID: Q9HCM7
  ENST ID: ENST00000434748
  CDS Start-End: 1021-4158
ctggccgaggaccctcccccggtcctccccgccccttccccgtcccttccacgctcgccgagggcaggacttcggttccgcgagaccggaggcccctcgtcctcctcggaagccgcccgcggccggggaccccagtcccgcagaggagggcggcgctgcccccgcctcccgcttggagagcgccgcccgcaggtgcccacggaggggccgcggcatcccagcgccctcccaggaaggagccgagcggatcaccgccggctgcagcggaggtcggggcgccggggaggggcgcggctagggggcgaggtcgaagggcgggcacctgcgggtggggcggggcctgaattagcgggagcgcccgggaggggcggggccggggcctgcgtgagcgggtcggggagggggcggagcctgcggggggcggggcctgcgtgaatggggcggggaggggccggagccttgtgagcggggcgggccgcgtgtgcggggtgggggcggagccttatgagcggggcggggcaggggcgtggtcggggcggggcgcgcgggcgcccgcggcggccctcacttcctctggcgagcgcagccgggcggaagtgcgtcagttgttatctgttcggggcgccgccgccgcctcacgagcccggtgcccaggagcccggccgcctcccgcctgccgcctgccgcgcccgcccggccccgcccgctcggcccgatcgccgcgccgcgcgcatggggcgcgcccccgggggggcggccgagggccgctgagcgccgggcccgcccccgccgatgcgcccagccgcccgcgccgggggtcccaggccgcgccgggcccggggctgagccgccccccgcgcccggcatgcccggcccggcccgccgcccgccgccgcccagggcccgagcccgcgcggcgcacactcagcccggcggcgccgcgtagccgagggagcccgcctgctgcgagccaggcgcggggcgtcaaggtcaccggcccgacggggcgcacgcgcggccatggaggccaaggtccgcccgagccggcgctcgcgcgcgcagcgggaccgtggccggcgccgggaggccgcccgcgacgcccgcgcccagagtccgtcgtcgggcgacgagcccgagcccagccccggcaaggagaacgcgggcctccgcggcgcgcccccccgaggcgccgcccccgcgccccgcaccgcgcgtcccccgcgccgccgccgccgcgagtccagctcgcaggaggaggaggtcatcgacggcttcgccatcgccagcttcagcaccctggaggccctggagaaggatatggccctgaagccacatgagcggaaggagaagtgggagcgtcgtctcatcaagaagccccgggagtcggaaacctgcccccctgcggagcccagtgagaacaggcggcccctggaggcaggcagccccgggcaggacctcgaacccgcctgcgatggggcgagaaaggtcccactgcagccctccaagcagatgaaggtcaccgtgtccaaagggggcgaccgggacagtgacgacgacagcgtcctcgaagccaccagctcccgggacccgctcagcgatagctctgcgcatgcggtctcggggagaggctactcttgtgacagcgagagcggcccggacgacaaggcatccgtgggctctgagaagctctttgcgccgggaaccgataaaggcccagcgcttgagaagtcggaggccaaggccgggccggtgcccaaggtgtcaggcctggagcgcagccgcgagctcagcgccgagagcttcctgcccactgccagccccgcgccccatgccgcgccctgcccggggcccccgcccggctcccgcgccaatcccttggtgaagaaggaaccccccgccccgcaccgccacaccccgcagccgccacccccgcagccccgcggcctgctcccgacacacgtgcctgcatccctgggcgccttcgcgggccacagccaggcggcagccaacggcctgcacggcctcagcaggagcagcagcgcccccctgggcctggggaagcacgtgtcgctgtcgccacacgggccgggcccccacctgtctacctcacacctggcgctccggtcccaggcgcagcaccagctccacgcggccatgtttgccgcacccccgacactgcccccgcccccggcgctgccggccagcagcctggtcctcccaggacacccggccgatcacgagctgctcaggcaagagctgaacacgcggtttctggtgcagagcgccgagcggcctggcgcctccctgggcccgggggctctgctgcgggcggagttccatcagcaccagcacacacaccagcacacgcaccaacacacacaccagcaccaacacacattcgcccccttccccgcagggctgcccccgacgccgcccgccgcacccccgccgtttgacaagtatgcgcccaagctggacagcccctacttccgacattccagcgtgagtttcttcccgtccttccctcctgccatcccgggactgcccaccctgctcccacaccccggccccttcgggtccctgcagggcgcttttcagcctaaggtgtctgacccgtaccgggcggtggtcaaggtgagcacgtgttgggaaggcccgtggcaagggaggactctggtgcccccggggcggcctcggggggcccgtgacagcaggagtctgcagaaaacatgggtgggggtggcaccagccccactgagcgcttccatcctgtcgcagaagccggggaggtggtgtgccgtgcacgtgcagatcgcctggcagatctaccgtcaccagcagaagataaaggagatgcagctggacccccacaagctggaggtgggtgcaaagctggacctgttcggcagaccccctgccccgggcgtgtttgcaggcttccactacccacaggacctggcccggcccctcttccccagcacaggtgccgcccatcctgcctccaacccatttggaccctcagcccatcctggcagcttcctgcccactggccccctgacagaccctttcagcagaccgagcacctttgggggcctgggcagcctgagcagccacgcctttgggggcctgggcagccatgcactggctcccggtggcagcatctttgcccccaaggagggctcctccgtgcacggcctgcccagcccccatgaggcctggaaccgactgcaccgggcaccgccctccttcccggctccgcccccgtggcccaagtccgtggacgcggagcgggtgtcagccctgaccaaccatgaccgagagccggacaatggcaaggaggagcaggaacgggacctcctggagaagacgcgcctgctgagccgggcctcgcccgccacccccgctggccaccccgtcagcggcctcctgctccgggcccagagcgagctgggccggtccggggcccccgcggagcgcgaggccgaacctcgggtcaaggagagccgctccccggccaaggaggaggccgccaagatgcccgcgcgcgcatccccgccccacagcaaggcggcccctggagacgtgaaggtcaaggaggagcgcggggaggacgaggcctccgagcccccggcgggcggcctgcaccccgcgcccctgcagctcggcctgggccgcgagcgcctgggcgcgccgggcttcgcgtgggagcctttccgcggcctggagctgccacgtcgcgccttccccgctgccgcccccgccccgggctccgccgccctcttggagcccccggagcgcccctaccgcgaccgcgagccccacggctacagccccgagcgcctgcgcggggagctggagcgcgcgcgggccccgcacctgccgcccgccgcccccgccttggacggcgcgctgctgccctcgctgggagccctgcacttcccgcgcctctcgcccgccgcgctgcacaatgggctcctggcgcggaccccgcccgccgccgccgccctcggcgcaccgccccccctggtgacggcggccgggccccccacgccccccgggccgccgcggagccggactactccgctggggggcctcgggccgggcgaggcgcgcgactactccccgtcccgaaatcccccggaggtggaggcgcggtagccccggggccgcagacgcctctccgagcggagcgcaccgctgtccgtctctccatcagttcctagaactcaagcacagctcccgccgatcctggggcggcgccgcctctccacccgcagcctgcggaggcggggacttgggtgtcggcttttctgagggtgatcttttgttttccgagtttgggattcggctgttgggaaaaaaaaatcgcgtttgtaccttttccccccacagatgagaagtgtttgtaatggatttgtatttttcttaattttatgctctttagacgtttaaaagaaccaaaaaagaaacttttgcttcttcgttttcggttgggatttgcagtttaatggcctcagatccttctccagatccccagggtttctttgtcttatttatggagaaaaaccggtcactttgtccagcgcactgtgaggcccccactcaggccagccctggcccccccttggtacttggaaccgaagttacagattatattaaaataataatgtacaaaactttgtttttttgccttattatgcagaagtgtaatttcttttttggtttgtttttttaaaagcaaacgaaacgtgtaaatagtctgttgatataaatatatgacgttactaaattcttaatctagatagactttataaaaaccgtttccagaaacccctctggttgtttgtctaacatggtcacaaaaacccaggcgctgctggctgtaaacattatcagaagtttaatggcagcaactttccttcaactatgcaagcgcttcccggcggctctgctggttgggggaggaaggttccgccagcgacctcccagcccctgggtccgtggaggggttgggtcccccagcagagcccctgggccagcagaacagcactcctgggcggctcctgtgggcttcaggactggccggctccagccgcaagggcgatgctgtggacgtttgtgtggatggtgcagtgttcttggaatctgtagaccagatcggtggaggtatagaagtgcaagagtctaaaggctgattttacacacacacacacacacacacacacacacacaaaatcactgctgtgtgttttcttccgcctgaggcatcagcgtcacctcggtgtggtcgtcgcctcccaggcccttggcctggcctcctctcagtttgggttttgccctcacccacatgagcccccccatgccctgccccccttgcggccttttgtgttccccgatgtctgggctgtgtccctgccgggattcccagccttcggggtcagccgtcgagccacttgctttgctcagttctgtgtttcagccacatttccacggtggaccctgtttgttttaaatattctgttcccatgtcaatcagtgacgataaatacagccttgatttggatgaaa

SEQ ID NO: 134506 - DNA, 2938 bp, Homo sapiens
  Payload ID: 6279
  Gene Symbol: FSCB
  Gene Name: fibrous sheath CABYR binding protein
  Uniprot ID: Q5H9T9
  ENST ID: ENST00000340446
  CDS Start-End: 293-2770
ataacagagactaaagaagaaagacgcttactgaataaggtgggatccaacaagagtgtagtatggaatgcaatagcttatgaattactttttttctgagggagctcaacagaatgacacctaagaaagggaaagtctttgacacttggtacgtttgtgatttttggtcattacttgaaaattaataagtttgaaatcactactcttagaaatggaagaaagtgatgactctaatcagcctatctcagcgtgtaggcaagaaattcgaaagagaagatgacccagcaaaccaatggtaggcaaatcccagcaaactgatgtaatagagaaaaagaaacacatggccataccaaaatcatctagccccaaagctacccatcgtattggtaatacttctggaagcaaaggcagctactctgccaaagcctatgagtctattagagtatcttctgagcttcagcaaacttggacaaagagaaagcatggacaggaaatgactagtaagtctctccagacagacaccattgtagaagagaaaaaagaagtcaagttagttgaggaaaccgtggtacctgaagaaaagtcagctgatgttagagaagctgctattgaattgccagagagtgttcaggatgtagaaattccaccaaacataccttcagttcaactaaaaatggacagatctcagcagaccagccgtacaggatactggaccatgatgaacatcccccctgtagaaaaagtggacaaggaacaacagacatactttagtgaatcagaaatagtggttatttccaggccagatagttcttctacaaagtcaaaggaagatgccctgaaacataaatcgtcgggaaagatttttgctagtgaacaccctgaatttcaaccagcaacaaacagcaatgaagaaattgggcagaaaaatatcagcagaacttcatttactcaggagactaaaaaaggtcccccggtacttttagaagatgagcttagggaagaagtaactgtacctgttgtacaagaaggttctgctgttaaaaaagtggcttctgctgaaatagagcctccatcaacagaaaaattcccagctaaaatacagcctccattagttgaagaggccactgctaaagcggagcccagacctgctgaagagacccatgtccaagtacagccatcaactgaagagactcctgatgctgaggcagccactgcagttgcggagaattctgttaaagttcagcctccacctgctgaagaggcccctttagtggagtttcctgctgaaattcagcctccatcagctgaagagtctccttctgtagagcttctggctgaaattctgcctccatcagctgaagagtccccttcagaagagcctcctgctgaaattctgcctccaccagctgaaaagtctccttcagtagagcttcttggtgaaattcggtctccctcagcacaaaaggctcccattgaagtacagcctttaccagctgagggcgcccttgaagaggccccagctaaagtagagcctcccactgttgaagagacccttgctgatgttcagcctctattacctgaagaggctcctagagaagaggctcgagaacttcagctttcaacagctatggagacccctgcagaagaggctcctactgaatttcagtctccattacctaaagagaccactgcagaagaggcctctgctgaaattcagcttctagcagctacggagcctcctgcagatgaaactcctgccgaagctcggtctccactatctgaggagacttctgcagaagaggctcatgctgaagttcaatctccattagctgaagagaccactgcagaagaggcctctgctgaaattcagcttctagcagctatagaggctcctgcagatgaaactcctgctgaagctcagtctccactatctgaggagacttctgcagaagaggctcctgctgaagttcagtctccatcagctaagggagtttctatagaagaggcccctcttgagcttcagcctccatcaggtgaagagaccactgcagaagaggcctctgctgcaattcagcttctagcagctacagaggcttctgcagaagaggctcctgctgaagttcagcctccaccagctgaggaggcccccgctgaagttcagcctccaccagctgaggaggcccccgctgaagttcagcctccaccagctgaggaggcccccgctgaagttcagcctccaccagctgaggaggcccccgctgaagttcagcctccaccagctgaggaggcccccgctgaagttcagcctccaccagctgaggaggcccctgctgaagttcagtctctaccagctgaggagactcctatagaagagacccttgctgcagtacactctcccccagctgatgatgtccctgcagaagaggcctccgttgacaaacattccccaccagctgatttgcttctgactgaggagtttcctataggagaggcctctgctgaagtttcacctccaccatctgaacaaacccctgaagatgaggctctggtagagaatgtgtctacagaatttcagtcaccgcaggtggcaggaattccagcagtaaaattaggatcggttgttttggaaggtgaagcaaaatttgaagaggtttcaaaaatcaattctgtccttaaagatttgtctaataccaatgatggacaggctcccactcttgaaatagaaagtgtttttcatatagaattaaaacaacgtcctcctgaactgtagtcaggttgtacctaagctagcaatcagaagctacatggttttggaagaacatactttagaaaagggtgggcagcgggaagtagctttgtcaataaggcaaattaaaggggaccccaagacttggaatacaggttggaaaatgaacaataaaaactgtagcagcataaa

SEQ ID NO: 134507 - DNA, 2805 bp, Homo sapiens
  Payload ID: 6280
  Gene Symbol: FSIP1
  Gene Name: fibrous sheath interacting protein 1
  Uniprot ID: Q8NA03
  ENST ID: ENST00000350221
  CDS Start-End: 211-1956
ggttgccagggaaacagcggtcccacaggcaggagggatctggaccggcggcttcttccactaccagagaggctgaggtggcgggagagacccctctcctctgggggtaagtggctggcgcggcgagtgtctgcggcgcgcttctgcggccatctgcgccctgactgacggcggccagttcctcgaggaggcccggcgggaaggatttcaatggatattataaagggaaacctagatggaatttcaaaaccagcttcaaattcaagaatacgccctgggagcagaagttcaaatgcttctttggaggtgctctcaacagaaccaggatccttcaaggtcgatactgcaagcaacttgaactctggtaaagaggaccactccgaaagcagtaatacagagaacagaagaactagtaatgatgataagcaggaaagctgctctgagaaaataaaattggctgaagagggatcagatgaagatctggatttggttcaacatcagataatctctgagtgttcagatgaacccaaattaaaagaattagattctcaacttcaagatgctattcagaagatgaaaaaacttgataaaatattggcaaagaaacaacgcagagaaaaagaaattaagaagcaaggtctagaaatgagaataaagctgtgggaagaaattaagtctgcaaaatatagtgaagcttggcaaagtaaagaggagatggaaaatacaaaaaaatttttatctttgactgctgtttctgaagaaactgttggtccttctcatgaggaggaagacaccttttcctcagtgtttcatactcaaatccctccagaagaatatgaaatgcagatgcagaaactcaataaagattttacctgtgatgtggaaagaaatgagtcattgatcaaatcaggaaagaaacctttctcgaatacagaaaagattgagctcaggggtaaacacaaccaggattttattaagagaaacattgagttggccaaggaatcaagaaacccagtggttatggttgacagagagaagaaaaggctggttgagcttttgaaggacttggatgagaaagattccgggctctccagttctgagggtgatcagtctggctgggtggtcccagtaaaaggatatgaacttgcagtcacccagcatcagcagcttgctgaaattgatataaaactccaagaactctctgcagcctcccctacaatttccagtttttctccaagacttgaaaatcggaataatcagaaacctgaccgtgatggtgaaagaaatatggaagtaactccaggagaaaagatacttaggaacaccaaagagcaacgcgatctgcataatcggctgagagagattgatgaaaagctgaaaatgatgaaggaaaatgtgttagagtccacatcatgtctctctgaagaacagttaaagtgtcttctggatgaatgcatacttaaacaaaaatccatcattaaactttcttcagaaagaaaaaaggaagacattgaggacgtaacacctgtgttcccccagctttccaggtccatcatctctaaattgctaaatgaatcagaaacaaaggtccagaaaactgaggtagaagatgcagatatgcttgagagtgaagaatgtgaagcttctaaaggctactatctcactaaagccttgactggacataacatgtcagaagctcttgtcactgaagcagagaatatgaaatgccttcaattttccaaggacgttattattagtgacacaaaagactattttatgtcgaagactcttggcattgggagactgaaaaggccctccttcttagatgatccactgtatggtatcagtgtgagcctttcatcagaagaccaacatctgaaactcagttctccagagaatacaatagcagatgagcaggagactaaagatgcagcagaagaatgtaaagaaccctaatcaaggacttgctgggtgtgcttttcagaaagttggtaatgaagttaaattaaatttcttattgaattatttgaattcaatgaatgcactgcagagactattctttattgattttgacatttggagtcgctctttgtggattatatttccttgatatttttgagacttggggtgtaattgttcagtggtttttgctcattaaaatttctgggaccattgtttataaatttattgctaatcttacagtattaggattcattataaaaaccaacattttaatgtatacgtgttagggtaaaactcgttgaagtgctgtgattgtcctgtattcaattttgtatgtttcacctctactgtgattcagacagatcatggtggtcactgggaatttttgctgtggccctgcttttccttcttcccacttgtctcatgtctgtgaaactggtacaacctgccataagatgaaatgaattgtctcaacaaagcaatattagaagagcctttactatcttattggtgatgacacgtttcttaagtaggagtttgagtgaattatttgatatattactttgttaataatagttaacaatagtttcttattttctttcagagtttgggccttttagattgcatcaaataaagatgagctactttaaaagacagtctgcggtactatttgaagagagatggtttagttacaagtcagtaacttagattcatgagaaaattttgtgttgacattccataagatgagttggcattagaattggaagtccagtttatttctgaatcaaaaaatgagcgggctattgtgctgcctttaataaaatttgagtgatgtatacataa

SEQ ID NO: 134508 - DNA, 103 bp, Homo sapiens
  Payload ID: 6280
  Gene Symbol: FSIP1
  Gene Name: fibrous sheath interacting protein 1
  ENST ID: ENST00000559547
  CDS Start-End: 1-47
atgagcaggagactaaagatgcagcagaagaatgtaaagaaccctaatcaaggacttgctgggtgtgcttttcagaaagttgagtttgggccttttagattgc

SEQ ID NO: 134509 - DNA, 21054 bp, Homo sapiens
  Payload ID: 6281
  Gene Symbol: FSIP2
  Gene Name: fibrous sheath interacting protein 2
  ENST ID: ENST00000343098
  CDS Start-End: 1-20991
atgaagtttcaactgtggtcctctcagatcaggcctctcggaccgattttcccagctctgcgggcgctctacgcgctggcgcgagccgcccctcaggaggccaccgcccttctggggccgctaccattggaagcctggaacgcggggggcggggctgaggtcgttgggctctggccattcctggtcaggtccggacagagggacaacggggtgctagagaaggagagcggggcgggtgaggaaggggctgagggggctgtgccggccatggagctgtacctcggcgcctgctccaagcctgccaaagtcgccgtcaccaagacggtcgccagcgtcctggccgcggacacccagcagtgcagagacggcgtgcacaaaacccactttgcaggggttggaccggctcagctactggacctacctctcggggtcaagctgcctgtgatcccaggaagcaatgctgtattctatactacgaatttcggtgaaaagctttttcgaccttcttatggttttaacctgactgatccctattgtcgacttttggaaaaccaatataaaagcctccatgatccacatttaaaagcatactataagcgcaaagatattttgaagagattaaagaaaggtggctacatcaccagcaataataaagttgtatgtaccttgagagaattgaataagtacaggcaatatcttaccagtttaaaattagactttgagagaaactatataaaagaacaaagaatacttgcaaaacaactacataacataccggaaaacaatcaaatccctcaacattgtgatgttgcacaagtccaaaactggttgttaaaggagggcactgaatctattaaggaccaggagcggctgatgaggcatagatatttggatatgataagtagaaaactagaacaacttgaacgcacagcagaagaacaacgcctattcctaatggatagagaagaaagacgacagcgggaacacacaagaagaaaacttactcttcgtagaaaaatagaagaggaatggaagacaaaagagatgttacttctgacaaggatggcagaagatgttaaaagagaagagaggatagaagaacaacagcatagaaacagagaagagagtgacaggaagaaacaagatcttctagagaaaaaaatggcttatcatttacaaaaaatgcaagatactggctttaacggagaagatataggaaaaaatacatttaaatacagaggtcaagatggaacacatgcttctccaaagaataaaaagaagacttctgaagatataatgttagtttatcctgctggagaccagaatacatataaagaaacacatggacatacagcaaatgctgctcatcagcgtcaaaatagttcaaataattttacgaaaaaaaactcagcttctgttgtttatcaggcagatgtacaggataatggtataaatcaaaagagagatgggatggtatctaaaaactcaagtattttcgatgatagaggaggtataaatatttcaggccaaggttcaattatttcagcgcaggtatcacccacgagaaatttttccagagtttcacaggcatttttggatccttcaaaagaagagaaggagacaaatgctgattgggatggaagaccaaccaagagatcaagctatctctgcgaatcaggacctcaggctcatgctacagacccgggtatattttcttctcctgtttacacaaatatgcaacagaacttgctgcaaaattgcttgcaagaaaaagtaacttctgaagaactgaatattataattcagaatgtaatgacctgggttgtggctacagtgaccagtatattgtacccagccatcacaaagtatgaaaaaagattgcaaaataatacatacccagtatctgatgactccatcctctcttcagatagttcaagtttctgtagcacgtgcagtgaagactttacatatagaagctacacatctgcaacaactaaaacatttcaggcagaaccctgtgcatttgtagttgacacgtcagtaaggagaccaaccacacctataaaacctcctcctgcacatgtggaaaaaacagttgtggggaaaacatgtcacataaaaggacaatctataatctctaaacataaatataataaaaccaacttgctatattcataccctaagctcagaagttgtaaatcagatagtcaccttttagcatcatttgaaacaggcacaaaaaaatctaaggatgctaccactgaaacagatagcttagggagttcattgcattgtgataaaacagcaaaagccatggatgaaatgaagaatttaaaaaatgtttttgttaactttaaatgttacttgaaaggggaaactgaagtgattttagaaagcattttgcgagaaataatgtctgatttaacccaggccattccctctctctcttctgttactgctgaagtttttgttgaacaatgtgaacgtgaaaaagaaatcttgctttccaatgctcatattccctcagttgcttctgagattgtggaaaatatgcttgagaagttagagtctgcagttgagaaaaaatgtgttgagatgttttcacaagatttgtcagtcgacattaaaccaagtttagcagccagtgatgaacttctcacatcatctaatggaaaacctttgaaaaattcaatgcctcatactttggacccaatgtgtgatattgcagaggacatggtgcatgccattttagaaaagctaatgactcttgtttcttttaagcaaaatgaatttcttcatcttaaagacacaaataagctttcctgccagcaacataagacagacccaatatgtatgttccttcaaagagctggcaaaaataaatctagtcttgaatctgatgaagctagtttaattgtcaatgaagaagtacaaaatttaatatcaaatattttttcccagtcttctttggttgcttatatagaggaagcaatcaatgctatactaggttatatacaaactgaactaaataatgagagaattattgcatctgaagaaaccgtagtactccttcagctacttgaggacatcctttttcagctccatcaggaaccagtaaatgaaagttttcaaaaaagtaggcaacctagaataagtagtccttctgacaccaaagaaaagtacagactcactggcactagattatcaaatagtcctaggtctggaagaccatttccacctataaatgttccaggcatggttctttattctgatgatgaaaatgaggaaatagacaatattgtaaaaaatgtgcttgattcaactttcaaagatgaaaaagtaaaatcacaagaacagattcctaatcattggtttacaaagggaaacacttgttttgaatgcaaaagaaatatcaaaccacctacaaagcctggttctagaagcaaagctgcatttcatgattgggaattaaagactgagccaccatctactaatcatgaagatattttaaagaaaaaactttcttcgaataaagacatttcaactttcagccaagatcaaaagcatcaaatagaaaaggcttcagaaaacatagtcacaagtattttaaaggaaatgctcaaggacatatcttccgttccttttggtcacttagacagcaaaactggcagtgaagcttcagttcttgtttcagaaaagcctcaaggactgtcacatcaagaatggatagaccagatgttttctgtttcagaaatcagtacagtggctcaagaaataacagattctgtgttaaacatacttcataaggcatcaaactacatttccaataccactaaaagttccatttcatcatcagttcatcagatttccttacataattctgacactgaacacatagtcaaagaagcaccaaataaatacccattaaaaacatggtttgacagtgaaaagaaaatgaaatatttatctttatttgacgttgatcctgaaaagcctccctggttaaaatctggaaaaagtgaacctaaacctgtagatgacattaatgataagatcattcgtacaatttttaaaagactgaagtcatttatttgtccaaaattgcatatgggcttcaaatcttcattacgatctcaacttagtaagtacacagctaaaatagtaaacattgttttatgtgctatccagaatgaactggaacttcacaaggaaaacctaaatcttagggagattgaccataccaaatcccttacagataaaggattttttgctaatactgataaaaaattagaatctcttgtcacgagtattgatgatgacattttggcgagtccattattaacctgtatttatgatatgttgttatcaagtgaaaatgcacatcaaagaagcatttcactctcttctcgtaagccaaagtctgcaactgacagtgttgatgtacaaagcattttgccaaataggcaagataaaaaatcttttcacaaatatttggctactccttgtactcaccacagtgtcaatggtggaaaccatattaaagagaatgcaaaattgcaagtgttagaaagaattggggaaacactacatgaaatgttaagcaagctcctggggacccatcttcattctcagctatcttgtagtcaacaaagcagagagatgaccaataagaatcagaaaatggctgctgcattgcagtctaatattcagttaatttctaaagcaattttggattatatccttgcaaaattatgtggtgttgacatggataccagttttgcaagttgtggattaaaagctatctcagagtctcttgacattgacaacccatcatttgcttcaattattgagaaaatggccaaatccaccaaaataatctccagcatagtttccagaagggttcaggaggacaataaagaagagactaaaagcaaggcaaaacctgttgctcctgtgtcttccaaaacaccaagcacaaaagaaatgcatccaaataaactaaaagctgtagcttcagatattcttaatatggtttttgctaaactggaagggtttgccaacggacatttagaaattttgggtgctattaatgatggaaataagaaaagcaataagataggctgggaatatgaaagcaccaatatttccagagacacacatgaagcatcatttctgtctgctttatatatgcatgcaaagaaggtatcaagtgctattttgaaggttattcaaacagaattaaatgtgacctcatcagatttgaagacaagtgtagaaaacccaccacctgagactcaaatacttaagtatgtagtcaagttaattttagatgcagtatcttccgatatgtttaatgaaatggaatctgaagggggaggcattgaaacttatcgatacaggccaacatatggaagtcttcctggaggagctgaatcagattcatttctagaagatgatgcatatacagcgaaaaaaattattgatgagagatccccacaaagagaagaagtgaaaacacgttctcttaaacaatgggctctcgaaaaaaccttaaacaaaattgaagtaaaactcaaagaaccacatatatctccaattgctcccattataagaaatattttgaatgaaatttttcaaagtactttaatcaatcaattaaatgtcctttctctctcccactctaattttaatggcatgcctcacaatgttgatgagccaactccccaaacatctgttcaatttatggataaaatgatggatcctttactttcggaagcagatataaccatagtaacagataatattgttaggactgtatttcacaaactttattcagctgccatgacagaaagaaatgtaagggaaaataggtataaaactatcactttttcagcaaatgtttcttctcatgaacacacctataaaggaaagtcctctgtcacggctttggatgaaaatccatgtacttttcagtctagattcagcgttgctgacaaggagacaaaggtaaatctagctgaagatattgtacaggcaatattaacaaatttagaaacttttgctacttccaaagtaaaatctctcttttattctcaagtcaactttacagttccagtggctttacctattcagcaagatcacagtacattgagcaaagcattatcagccaaagattcatattctgatgagcaattttcctgttgctcagtagatcataccaagtcaggaaagaccaacttgtgccaactgtctttgtctaaattaaatacttatgcactacaagtggctagaagaaatttacaaggaatcaaacaggaattagataaagaaagggaaaatccttttttaactcatgacattgggatttctgaaagtattgcaagtcaaattgttaacgcattgttagacattatatcacgtaaaggcaaatgtgacaaaaacagttctgacaaagagatcgatttagatcagcaaaaaggtgttattgaaaagctgctcaatgagaccaaatatcgaaaagtacttcaacttcaaatacaagataccattgaaggtatcctatgtgatatttatgaaaaaaccctgtttcagaataatctctcatttgccacacccactctgaaatgtagcatagctgataaacattcagaagaaaattctgaaatgttcatggagggtgcaaataagattattcctaagctttcagttcctaaatcagatgtcattttgatatccaatgatatagtgaatattgttcttcataatctcagttctgctgccacgcttgtcataaatgcaaagaatcctacttctgcaagattgcccctgacattttgtgatacgtttccaaaaatagactgtcaacagcctcttaaggggtcaaaaactgaaagaaaaacagagcgtttttcatattcaagaaatcagaaatcagcttatgctgatgataatcagataactgtagtagagaaagaagacactcagaaatctgctactgactcatgtgaggaaaatgctaacttcattactaaaactatttttaaacgtttggaatcttttgccacagaaagaatagattcattaattacccttgctttccaaagtaaagaaaagtcatttgttatcccagaattggaaaattgtaaacaaaatgacagcatcttttatgattcaagccaagtggaatcagatgtaaatgtcctgaaaatatcagcaactgaaaccattctcagccaagagcttacagatttcacttttgttggtcgcagagaaaaacttggatccacaattcacctatcgcaagctaggcttaagacatatgctgacgtcattgccagtgccattttgaagcttattaaaaatgacttagacttagaaattcaaaagatatatccatatcaaaacaatattttgttccaagaaaacatcattgtgagtgaaattgttgacagtatgttaaagatgttagatgataaaagatctgtaaaggaaatttgttttaattcaaaagaaaattctaacttttcacaattagctttatcaaatgaaatattgctgggtcacaaagagaaggaaagaagtaccaaacaatctctatttacaaagtatccattagagcaaaaccaaatgatattggaaaacaaaaggcagataattgttttggaagaaatatttatgagaaatggagaatcaaaaaacaaagaaaaaggtgaactgctcattgcagtggaagaacttttgaataagttgtatcaaagagtaagggaagtcacaggccatttgcctccacttaatgaaactgccaactttatatctaattctaagattaaaacatcagacacaacacagaaaaacagttttcaatcacatattaacagtgtagcaaatgacatagttgaaagtgttttggggaaaatgtacttggtagttgtgacatcattatatgaaaataataaaagtaggacagaagttgaaatatctgaccacaatgattccttactaatgaaaccattaaggtttagagaaactaaacaagcaggaaaaataagtaattcccctagatatgcgatatcacaggcttattcttatgtcgacagtcaaaatatctctgtgatggaaaacactcttttgccatatttaccattgcaagtgaagaaagacttaattcaaatggttctcaataagatcacaaattttgtctcacttcctttaaaggtgagccctaaggacaaccctaagccatgctttaaagcacatttaaaaacaagatcaaaaattaccactttgcctaaatttacaaaaaaaacacacttaggactgagtgctgctaaggccaaaagcaaaaccaagttaggtcctggagagaagaccctaaaagacagcagatccaagactgccattgggttgtcacacatcatgtcagctggagatgccaaaaatttactggacacaaaattgcccacttcagaactaaaaatatatgccaaggatataataattaacatcctagaaacaattgtgaaggaatttggaaaggtaaagcaaaccaaagctttaccatctgatcaaatcatagcagcaggtaaaatagttaatacagttttgcaagaattatatgttaccaataactgcaatttggcttacccgatgaaatcctcacatctcagactttcacaggggaatataggcacaggatcccttcctaaacaacaagcatgtttttacttggagaatgtttcttcacagctagagcacatttttcctagagaaggtatatttaaaaaattgtttgacaagtggcaaacagaatcaaatgacaaggaaaatgaaaaatgtaagctattgatgatagctgaaaatgttttgactgaaatttcaataaaagcaaaagaattagaatattctctttcacttttaaatttgccccctcttgagaattgtgaaagcaggttttataatcattttaaaggagcttctactagagccgaggatactaaagcacaaattaatatgtttggaagggaaattgttgaaatgctacttgaaaaactacagctatgctttctgtcccaaattcccactccagatagtgaagaaactctatcaaacagtaaagaacacattactgctaaaagtaaatatggttttccaaacaagcatagcctcagcagtttaccaatctataacacaaagacaaaagaccaaatttctgtgggctccagcaaccaaattgttcaagagattgtagaaacggttttaaacatgttagagtcatttgtggacttgcagtttaaacatatctccaaatatgagttttctgaaattgtgaaaatgcctatagaaaacctttcttctatccaacagaaactgttaaacaaaaaaatgttgccaaaattacaaccactgaaaatgttttctgataaatccgagtcaaatactattaatttcaaggaaaacatacagaatatccttctacgggttcattcattccattcacaattacttacatatgctgttaatatcatcagtgacatgcttgctgtaattaagaacaagctagacaacgaaataagccaaatggaaccatcttcaattagcatattgaaagagaacattgtagcaagtgagatcattggcacactaatggaccagtgtacttatttcaatgagtctttgatacaaaacctttcaagagaaagtttgttccaaggagctgaaaatgcctacactgttaatcaggttgaattagcaactaatatgaaaatgttcacatcaaagttaaaggaaggtagtttggggattaatccttcacaagtgagtaaaactgggtttgtgttttgttcagatgaagatatgaaagaaaagtacagggtttcatcagatttacccacctctgtcagatcctctgtagaagacacagttaaaaactcagagccaacgaaaaggcctgattcagaaactatgccatcgtgttctactagaaacaaagtacaagaccacagaccaagggaatctaactttggtagttttgatcagaccatgaaaggaaatagctacctccctgaaggcagtttcttacaaaagctgcttaggaaagcaagtgactccacagaagcagcattaaagcaagtcttgtcattcatagaaatgggaaaaggtgaaaatctaagagtgtttcattatgagaacctaaaaccagttgttgaaccaaaccaaattcagacaaccatttcccctctcaaaatatgtttagctgcagaaaatattgtcaatactgtgctatccagctgtggctttccaagtcaaccacacactaatgagaacagggaaataatgaaaccatttttcatatcaaaacaaagctctttatctgaagtatctggagggcaaaaggataacgaaaaaagtttgcttagaatgcaggataaaaaaatcaactatatacctgaggaagaaaatgaaaaccttgaagccagccgggaagattcttcttttttgcaaaaattgaaaaaaaaggagtacccaaagatagagactgtgaaggaagttgaagcctttacttttgctgatcatgaaatgggttccaatgaagttcatctgatagcaagacatgtcaccacatctgtggtcacatatttgaagaactttgaaactacagtttttagtgaggaaaagatgtctgtttctacatggtcaaggaaaaaatatgaatcaaaacagttcctaagaaacatatacgatgattcttcaatttatcaatgttgtgaacatctcactgagtcagtactttaccatttaacttcgagcatttctgatggcaccaaaaagggtagagaaaaagagaaagcatgggaaattcaagaagcaacatttagcaagattatttcaattcattctcaagtgtttgagagcaggtcaatttccattggagaacttgctttatgtatttctgaaatcattattaaaattctttttaataataaaattatacaggctgacattgcacagaaaatggttgccatacctacaaaatacacttactgtccaggaatagtttctggtggctttgatgacctctttcaggatctcttagtaggagtgattcatgtactgtccaaagaaatagaagtagattatcactttgaaagcaatgtaagaaacaaatcattttctatgcatagaaataatagtgtacccctttgcaacaaaatcaatagacaggcaagccccagagactggcaattttctactcaacaaattggtcaactttttcaaaaaaataagttaagttatcttgcatgtaagttaaacagcctggttggtaacctaaaaacaagtgaatccaaagaagtagtcaataaagtttttaatattgtttcagatttattttcaccagatgaatgcctagatacgggtatggattctggtaaaatacaaagaacatatttctactcctcgaataatgagcaacctaatagcatacttaccaataacctacagctctcctcaaaatcagtttttcttctcaatgttgtatgtgagaaacttatcagaatacttttggaagaatgcacaagcactgcttttcctgataaagggtctgtttcagaggaaacatcagcagaagaatgtcaacttttaaaaatgcttcaaagtgtagaagatggaaaatctgattatcgtaagggaggaatggactgtgaatgccttcaagtagattacatgtcagaccttttggagaatgtggcagaaattgatcaagacttattgacatcagactctatgcttactattatttcccacagcttggttaaatcattgatggacaaattatctcacagcatacaacaagctccggaaagtctaccttttgcaaataagcatttgaactacagaacaagagaaatacagtctagtttcataaaagcaagaaagtcagaattaatagaattaggacagagtaaaagttctttagaactcaggagctatgatagtaattctttgacagtatccctgaataatcccagtgtggttagctccaaaatacaagcaccatttaacaagcattgtgcagtaaaatcctcttctgtgtcaccttttgaaagacagagaacaaaggaaatggataaggtagccattcataataagctacatcaggaaggtatatatgctggtgtttattcagccacatttttggaaggaataatttcagaattgttttttaatctctctatgtcattgtggggcaaaaataaaaacatcactgtgtcctggctcaatgagatgaatacattatttgtcaacaatgtagtgaatgaatttaataatgctcaagtcactgttctacggaatgctgaagaaaggctgtgttttccaccagttcatacagaaactgttagcaaaattgttgactcagtttattatgatgttttacagcagtatgaattaaaagtggcctgtggtaataatccggtatacgacaatgcctcaatagcagaacaaataacaaatggcatattgttagagattttagactacaaactgccatcttgcttcaaggaacatctcataccccattcatattaccctctcaaacctgaaattatattgcaaaagcttcaaagtaacctaacagaatttacttctctacccaggtcttcatcagactatagtaccatgttatcacattcatttttagaagatgtcataagaaggcttttatctcagctaattcctccacccattacatgttcctctttaggaaaaaaatatttaatgagttctgattttaatgaaatgtccacttgtataataaataaggttatgtcagccatttcaaaacataaaatctggttcactatatatgataatcaatatctatatactggaaaaaacctccaaaagatggtggattctgtatattgtaatattttgcaaatgtctgactctcttgtttcaatacaaaaaagtatagtaagccgaagcccaattatgattgaccaaatagccagctttatcatccaagagattatcgaaaatcatcttcaaccatttttgagtggagaggttttatgtcatccaaggactccactggatccagtgtctactattgttacacaggttctgagtgaagtgatagagtcacacagacctcagaagcaatcacctttagatattcaccttgattcatttgtaagggagattgttgccagacttttgtcaaagattttcagcccaaagcataacactgaaattgagttgaaaaacatgacccaaagaatagtaaactccataaataggcatttcaataaagctaaaattcacattctctatgatgacaaagaacaggctttcttttctttcaatacagatattgtggatgaacttgccacctcagtttatagaaatgctttaaagcagcatgggctagaccttgctgttgataaagagtctgaagacagtggcatttttgtggaaaatattaccaatttaattgtagcagctatttcagattaccttcttcatccactgttttctggggatttttcagcttctacctattctaattcagtggctgagaatattgttcaggacatccttagtaacatcagtaaatctactgagccaagccagagtgtacctctatataacaccttgctgccatacacatttttagaagatatgatcagagtactattatctaaattattttcttctgcatctagcctggttctaaacagagacacccaaaaagatatatcaagagtgaatttcaatgacattgcttcaaacctagttagtgatattaggatgaaagtttcccaacatgaaattcgattttcaaaagaggaagaagaaaccaagtttatttattcagaagatgatattcagcaccttgttgattcagtatttgcaaatgttgtgcaaacctctggttctcaagaatcagctgtgcaaaatatcacaagcagtaatgacattcttatagatagaatagcaggtttcatcattaaacatatctgtcaaaaacatcttcagccatttgtgagtggaaaatcattatcttcatcagacacatattttgatgatgagagaaggcagttattttataccagtgtttactcttcaacattcttggaagatgtaatctctggggttttaagaaaaatattccacagggtagtaggcattgtacaaacaaaatccataagagattcagaagatgaactgtttgagaaagctgaagaactcatacatttgattacaggggaattctcaaaagcccaagttagcattatagataatactgaggaaagactgtgtttacctccagtggagagggatgtagtcaaaacaattgttgacatggtgtacagcaaagttttgcaagaatatgaaatggaagtcgtgcccaataaagattttctaaatgacacaaagacattggctgcaagaataactaatatcatcctggctgaaatttttgatttccaaattcatccagatcttatagcaaatctgccttttaaatcacattccaaactcagtgcaaatgttttaatacaaagagttcaatatgatataagtaaatcaagattccaaagacaagcttcaacaatgtataccactatgttatcacatagtcatttggaaaaaatagttactcagcttacatctcagataagtccattgaacaccagtgcagagcagtcagatactactaaatcagacttaagtaatacagtgataaaactgataaatgaaattatgtcaataatttcaaaacatgaaatatgtattattaaatatgggaataaaaaacagagtatgatttcagcaaaagatatccagtctatggttgattccatttatgctgatctttctcattcaaatatataccagtccattacaaaagataaaaagagcataagtgacatacctgtttcaaaaatagcgagttttataataaaagaaatctttaaccatcatattcaatcatttttatctgaagataaaactctccttttggcagcagttgatcaaacttataaattgaaagcaatagatcctaaacaaagagaattatcttttattgtgaactcatctgtctttttggaggaagtaatttctgagctcttatgcaaaattctttatgcattttcacataacatgttggttactgaaaatccagatagagtgaaactgaaacttaccaggattgttacaacattggtaaattcaattgttctggagttcaccacatcagagattttagttgcagataactttgataaaaatttgtgtttctcagaaagatacaaagaaatggttcaaaaaatagtcaactcagtatatggaaaagtattagatcaatataaatctctgattcaaatacatagggttatacaaagtgacacaatatgttttggtaggaaaatatattatttgctattggaagaaatatatgattatcaagtgcagtcattagtttcaggagaattagagtcttcttcttattcgtatccccaagctgataatatcatcagaaatgtgcttaacataatcacaaaggatagccatgccttgccaccatatattactgtgttgcctcattctcttttagaagatatggtttacaggcttctagggcatgtcttcccttcaactcacactgaaaatgaactaaaagagaaaaagtttccaccggatgatgaatttgtggaggcagcttcaaaattgactgatgaaattataaaagaaatttctgaacatgagattcgactttccatggcagaggataatgcagaaagtatgcagttagaacctattgaaaatttggtcgactccatatgtaataatattttgaaaacatctgaattccaagctgaagtacaaaaagatgcagacaaaaaaggatgctcattcctcagtaaattagctggttttattatgaaagaaatcatgtatcatcatttacagccatttttacatggtgaagaatcatctttcagtgacttatctgattatgaccatgtctctgaacttgctaaatctggtaaagaaaagacacagccttctctctattcagctacatttttggaagacataatcattgaccttgttcacaaattttgttctctcctcattattactgaagattctaagaaaaatgaaatggcagagctagatattatgggcttggctctaaaacttgcaaattctctgataagggaatttaagaaaagtgatattaaagttttaccaaatgctgaaaaaatgttttcttttccaccaattgataaagagacagttgataaaatatccaattttgtatatgaacagttcatagaaaaatgcacatctcatgatattcaaaaaggtgatgaaagtaacattgctatagggatgattgctgctctaacccagaaggcaatatctgcattcaggattcaaccacttttttcaggagactggtcttccaccttcttttcatttctaaatccagataatatcacccaaagggttcaacacctaccacaaaacacctttacacaaataagcagatgtgcaaaagagaaccaactttctttaccagatcaatcatataaagatacttcttccaccccagattgcaaaaacatgatgagcactttggaaataaatagaggtacaatgaatagaaagaaaagttttaaaaccaaggacacatcagtgaaaaaaggtgacatccaaaatccagtacttagctctataaatgcaattatgaaaagcggcatgattaacctaacatcagggttggctacaggtgtgacaaataaaaaggaagtggatgaaaataaagtgggaatttgtactcaaaaacatagtgagaatgtatcaaaagttacttcaactaccactgtgaaaagtaaagatactcaggagccaaatttgagtgaaacatttaataataatgaaattgagaagaaaagaaatttaattccaacagataaaaaagggaaagatgatgagatatacacacatttttcattaataattgatgatacagaatatgagaaggaagtacttggatcagattctgaaataggctataaaaagaagattgacaatgcaagggaaagctcatttaaaaaagatgacaagctctttcagttatcctccttgaagtccaagagaaatctagggactacaacagatactttggaaataagaattcgaacatcaagcaatgaggggagaagagactctccaacacaaacgtgtagggatgaggaacaccactcagattatgaacatgttcaaaatgtcattgaaaatatttttgaagatgttttagaactatcttcttctccagaaccagcatattattcgaaactcagttatgaccaaagccccccaggtgataatgtattaaatgtaattcaagagattagcagggattcggcacagtctgttacaacaaaaaaagtatcctcctcaactaacaaaaatatctctgccaaagaaaaagaagaggaagagagagaaaaagagaaagtaagagaggagattaaaagtgaacccagtaaaccagatgatcctcaaaaccaacgagaaagtaaacctggaatttttcccgctaagtttttagaagatgttattactgagatggttaaacaattgatcttttcttctataccagaaacacaaatacaagatagatgtcaaaatgttagtgataagcaaaatcaagccaaactctatgacactgctatgaaactcatcaattcactgttaaaggagttctcagatgctcaaattaaggttttcaggccagataagggaaatcagttccctgggggtaaagtgtcttcagttcctaaagtacctccaaggtataaagagccaactacagatgaagcaccatccagcattaagataaaatctgcagataaaatgccacctatgcataaaatgatgagaaaaccttcttcagataagataccatcaattgacaaaacattggtcaataaagttgttcactcctctgtttgtaatattttaaatgactatggatctcaagactctatttggaagaatataaacagtaatggagaaaatttagcaagaagactaactagtgcagtgataaatgaaattttccaacgtcaggttaacttgatattttgtgatgaggtttcagtttcagcatgtttgcctctggaatctaaggatgttgttaaaaaggtccaaaagttggcccaaacagccagcaaagaatgtcaaacttcatcaccatatacaataatattacctcataaatttttggagaatgtgatttctgctcttttctccaaaattttctcaacaatatccagcacaaaaacaaaagaacctgaggacaatttgtccacagaactgaatttccttcaaatgaagttagtaagtgcagttgcaacagagatctcccaagataaatatatgactatacagtatgtagaaaccttacaatctgatgatgatgaaattattcaattagtggttcagtctgtttataataatctcttgccacagtttggatcacaagagattatacaaaattgtgtaaccagtggatgcaaaatcctttcagaaaacatagttgacttggttctacgagaagtggctagcaatcagctgcagagctatttttgtggagagctaactccacatcagtgtgtggaagttgaaaacatcgttgaaaagatccttaaagatgttttccaaactactgatgtgcccctacctaaaccttcacatgctgataagctgtcttataacataatagaagaaattgctgtgaaatttttatcaaagcttttatctatatttccaaaagtacataaagaaagaacaaaatctctagagactgatatgcaaaaaataacttcaaaagtactaaattcagtccaagaatttatctccaaaagtaagattaaacttgtaccacccaccaaggaatcacctactgtgcctgtagctgataatgcaactattgaaaacatagttaattctatttataccagtgttttaaagcactctggctcttatacttctgtatttaaagatttaatgggtaaaagcaatgtcctctctgatacaataggctttttaatggtgaatgcaatttcgaattctgaatttcaacctcaagtagaggaagaagtatcaaattcagaattagttctggaagctgtcaaaattatggaaaaagtgatcaaaattattgatgaacttaagtctaaggaaaagtcttcatccagaaaaggtttgacattagatgccaaacttttagaagaggtgttggccttgttcttggctaaactaataaggttgccaagttcctcaagcaaagatgaaaaaaacttatcaaagactgagttaaataaaattgcatctcaactgtcaaaattggtaacagctgaaatttccagaagtagcattagtctaatagcttctgatcctgaagagcactgtttaaatccagaaaatacagaaaggatttatcaggttgtcgattccgtttatagtaacatactgcaacaatcaggaaccaacaaagaattttattatgatataaaagatacaaatacagcctttcctaaaaaagtggctagtttaattattgatggagtttcaagttttccattagatacaattaactcaacaatttcaaatgctgatctctctggagagctagacgttaatagaattgttcaaaaggcccaagaacatgcttttaatgtgattcctgaattagagcaagaaaagttagatcaaaatttatctgaagaggaatctccaattaaaatagttccacatgttggaaaaaaaccagtcaaaatagatccaaaaattatttcagaacacttagcagttatttctataaaaactcaacctcttgagaaacttaagcaggagtgtttgaaaagaactggacatagcatagcagaactgagaagagcatcaataagtgggagaaattactccttaggatcacctgatttagaaaagagaaagacagaaagacgtacctcattggataagactggaagactggatgtaaaacccctagaggccgttgctagaaattcatttcagaatataagaaagcctgatattacaaaggtggagctcttaaaagatgttcaaagtaaaaatgatcttattgttcgattagtagctcatgatattgatcaagtgtatttggaaaattacataaaagaggaacgagattctgatgaagatgaagttgttttaacacagacttttgcaaaagaagaaggcatcaaagtatttgaagatcaagtgaaagaagtcaagaagccaatacaaagcaaactttctcctaagtcaacactaagcacgagcagcctgaaaaaatttttgtcactaagtaaatgttgtcagaccacagccagtgcaaatattgaaagtactgaagcaatctcaaatcaggtaatagaatccaaggagacacatgttaaaagagctgttgctgagcttgacatggccacaccaaagacgatgcctgaaacagcctcttcatcttgggaggaaaagccccagtgtaagaaagaagaaaagaatcttgttactgaaccaacacattacttcatacacagaattatgagttcatcttcatacaaccaagaagatctcatttcatctactggtgaggctgaagattgtcactcagacccaagtgctaaaatattagaagaaagttctcaggaacaaaagccagagcatggaaacagtgttaagtttatcaccatctttgaaagatccaaggatgttcttggcagtgcaaatccctcaaaggaagtcatttcagaaactcccaagcccgatgtctccaaacaaggatctaaaatgctgacaaaaatgtcttcaactttgtcaaaggtgttttctcaatgtaacaccaatatttccagatcttcctcaccagctcaccaggatgaacactgaagcttttgtacctgatataagtatgcttacttcttttagaaaataaaatggtttttaaagcat

SEQ ID NO: 134510 - DNA, 3869 bp, Homo sapiens
  Payload ID: 6281
  Gene Symbol: FSIP2
  Gene Name: fibrous sheath interacting protein 2
  ENST ID: ENST00000415915
  CDS Start-End: 1-2920
gtatcaaagagtaagggaagtcacaggccatttgcctccacttaatgaaactgccaactttatatctaattctaagattaaaacatcagacacaacacagaaaaacagttttcaatcacatattaacagtgtagcaaatgacatagttgaaagtgttttggggaaaatgtacttggtagttgtgacatcattatatgaaaataataaaagtaggacagaagttgaaatatctgaccacaatgattccttactaatgaaaccattaaggtttagagaaactaaacaagcaggaaaaataagtaattcccctagatatgcgatatcacaggcttattcttatgtcgacagtcaaaatatctctgtgatggaaaacactcttttgccatatttaccattgcaagtgaagaaagacttaattcaaatggttctcaataagatcacaaattttgtctcacttcctttaaaggtgagccctaaggacaaccctaagccatgctttaaagcacatttaaaaacaagatcaaaaattaccactttgcctaaatttacaaaaaaaacacacttaggactgagtgctgctaaggccaaaagcaaaaccaagttaggtcctggagagaagaccctaaaagacagcagatccaagactgccattgggttgtcacacatcatgtcagctggagatgccaaaaatttactggacacaaaattgcccacttcagaactaaaaatatatgccaaggatataataattaacatcctagaaacaattgtgaaggaatttggaaaggtaaagcaaaccaaagctttaccatctgatcaaatcatagcagcaggtaaaatagttaatacagttttgcaagaattatatgttaccaataactgcaatttggcttacccgatgaaatcctcacatctcagactttcacaggggaatataggcacaggatcccttcctaaacaacaagcatgtttttacttggagaatgtttcttcacagctagagcacatttttcctagagaaggtatatttaaaaaattgtttgacaagtggcaaacagaatcaaatgacaaggaaaatgaaaaatgtaagctattgatgatagctgaaaatgttttgactgaaatttcaataaaagcaaaagaattagaatattctctttcacttttaaatttgccccctcttgagaattgtgaaagcaggttttataatcattttaaaggagcttctactagagccgaggatactaaagcacaaattaatatgtttggaagggaaattgttgaaatgctacttgaaaaactacagctatgctttctgtcccaaattcccactccagatagtgaagaaactctatcaaacagtaaagaacacattactgctaaaagtaaatatggttttccaaacaagcatagcctcagcagtttaccaatctataacacaaagacaaaagaccaaatttctgtgggctccagcaaccaaattgttcaagagattgtagaaacggttttaaacatgttagagtcatttgtggacttgcagtttaaacatatctccaaatatgagttttctgaaattgtgaaaatgcctatagaaaacctttcttctatccaacagaaactgttaaacaaaaaaatgttgccaaaattacaaccactgaaaatgttttctgataaatccgagtcaaatactattaatttcaaggaaaacatacagaatatccttctacgggttcattcattccattcacaattacttacatatgctgttaatatcatcagtgacatgcttgctgtaattaagaacaagctagacaacgaaataagccaaatggaaccatcttcaattagcatattgaaagagaacattgtagcaagtgagatcattggcacactaatggaccagtgtacttatttcaatgagtctttgatacaaaacctttcaagagaaagtttgttccaaggagctgaaaatgcctacactgttaatcaggttgaattagcaactaatatgaaaatgttcacatcaaagttaaaggaaggtagtttggggattaatccttcacaagtgagtaaaactgggtttgtgttttgttcagatgaagatatgaaagaaaagtacagggtttcatcagatttacccacctctgtcagatcctctgtagaagacacagttaaaaactcagagccaacgaaaaggcctgattcagaaactatgccatcgtgttctactagaaacaaagtacaagaccacagaccaagggaatctaactttggtagttttgatcagaccatgaaaggaaatagctacctccctgaaggcagtttcttacaaaagctgcttaggaaagcaagtgactccacagaagcagcattaaagcaagtcttgtcattcatagaaatgggaaaaggtgaaaatctaagagtgtttcattatgagaacctaaaaccagttgttgaaccaaaccaaattcagacaaccatttcccctctcaaaatatgtttagctgcagaaaatattgtcaatactgtgctatccagctgtggctttccaagtcaaccacacactaatgagaacagggaaataatgaaaccatttttcatatcaaaacaaagctctttatctgaagtatctggagggcaaaaggataacgaaaaaagtttgcttagaatgcaggataaaaaaatcaactatatacctgaggaagaaaatgaaaaccttgaagccagccgggaagattcttcttttttgcaaaaattgaaaaaaaaggagtacccaaagatagagactgtgaaggaagttgaagcctttacttttgctgatcatgaaatgggttccaatgaagttcatctgatagcaagacatgtcaccacatctgtggtcacatatttgaagaactttgaaactacaggccgttgctagaaattcatttcagaatataagaaagcctgatattacaaaggtggagctcttaaaagatgttcaaagtaaaaatgatcttattgttcgattagtagctcatgatattgatcaagtgtatttggaaaattacataaaagaggaacgagattctgatgaagatgaagttgttttaacacagacttttgcaaaagaagaaggcatcaaagtatttgaagatcaagtgaaagaagtcaagaagccaatacaaagcaaactttctcctaagtcaacactaagcacgagcagcctgaaaaaatttttgtcactaagtaaatgttgtcagaccacagccagtgcaaatattgaaagtactgaagcaatctcaaatcaggtaatagaatccaaggagacacatgttaaaagagctgttgctgagcttgacatggccacaccaaagacgatgcctgaaacagcctcttcatcttgggaggaaaagccccagtgtaagaaagaagaaaagaatcttgttactgaaccaacacattacttcatacacagaattatgagttcatcttcatacaaccaagaagatctcatttcatctactggtgaggctgaagattgtcactcagacccaagtgctaaaatattagaagaaagttctcaggaacaaaagccagagcatggaaacagtgttaagtttatcaccatctttgaaagatccaaggatgttcttggcagtgcaaatccctcaaaggaagtcatttcagaaactcccaagcccgatgtctccaaacaaggatctaaaatgctgacaaaaatgtcttcaactttgtcaaaggtgttttctcaatgtaacaccaatatttccagatcttcctcaccagctcaccaggatgaacactgaagcttttgtacctgatataagtatgcttacttcttttagaaaataaaatggtttttaaagcat

SEQ ID NO: 134511 - DNA, 2726 bp, Homo sapiens
  Payload ID: 6281
  Gene Symbol: FSIP2
  Gene Name: fibrous sheath interacting protein 2
  ENST ID: ENST00000429412
  CDS Start-End: 1-411
aaggaccaggagcggctgatgaggcatagatatttggatatgataagtagaaaactagaacaacttgaacgcacagcagaagaacaacgcctattcctaatggatagagaagaaagacgacagcgggaacacacaagaagaaaacttactcttcgtagaaaaatagaagaggaatggaagacaaaagagatgttacttctgacaaggatggcagaagatgttaaaagagaagagaggatagaagaacaacagcatagaaacagagaagagagtgacaggaagaaacaagatcttctagagaaaaaaatggcttatcatttacaaaaaatgcaagatactggctttaacggagaagatataggaaaaaatacatttaaatacagaggtcaagatggaacacatggtgaatgacatacagcaaatgctgctcatcagcgtcaaaatagttcaaataattttacgaaaaaaaactcagcttctgttgtttatcaggcagatgtacaggataatggtataaatcaaaagagagatgggatggtatctaaaaactcaagtattttcgatgatagaggaggtataaatatttcaggccaaggttcaattatttcagcgcaggtatcacccacgagaaatttttccagagtttcacaggcatttttggatccttcaaaagaagagaaggagacaaatgctgattgggatggaagaccaaccaagagatcaagctatctctgcgaatcaggtaaatatcagcagtaattattgagtaaatcttgcattctatttattctttcaactgacatttactgagtttttgcttcatgttagatatggtgctaagttttaatcattcaaggaaaaatggcacaatttttgctcagggttcttacagtatacttggaaagatagtcatggcccaatatgataagagcaataaaggaagtgggtatgtgtaaaagctgggaaagttatgggaaagagaatgcatagacctatctagggtcatcatagaagcctttataatttagaaagagactgcgttgagacatgaaggatcagaaggaatttcctattttctttttgttatttttattgtttgtactaatgttgacaaccaaaatttgcaaaaaaattaaagtttttgtactcatatccttatacttactgttttctgcttttacagcagcttctctcccacaccacaactttattaaggtatagtggataatttaaaactgtatatattgacggtacagatggtccccaacttgtaatgattcaatttagggtttttcaactttactgtcggtttattggggtattaaatgcattctcagcttacaatatttttgacttacaattggctaatcaagatgtaacaccatcataagacaaggagaatcatatacaacttgatatgtgtatatacagtaaagtgttcaccacaagcaagccaattaacatatcctcacttcatgtagttactatttgtgtgtggtggcagaagaacacttaagagctactctctttctacatatggctagccagttttcccagcaccatttattaaatagggaatcctttccccattgcttgtttttctcaggtttgtcaaagatcagatagttgtagatatgcggcgttatttctgagggctctgttctgttccattgatctatatctttgttttggtaccagtaccatgctgttttggttactgtagccttgtagtatagtttgaagtcaggtagtgtgatgcctccagctttgttcttttggcttaggattgaattggtgatgcgggctcttttttggttccatatgaactttaaagtagttttttccaattctgtgaagaaagtcatcggtagcttgatggggatggcattgaatctataaattaccttgggcagtatggccattttcacgatattgattcttcctacccatgagcatggaatgttcttctatttgtttgtatcctcttttatttccttgagcagcggtttgtagttctccttgaagaggtccttcacatcccttgtaagttggattcctaggtattttattctctttgaagcaattgtgaatgggagttcactcatgatttggctctctgtttgtctgttgttggtgtataagaatgcttgtgatttttgtacattgattttgtatcctgagactttgctgaagttgcttatcagcttaaggagattttgggctgagacaatggggttttctagatatacagtcatgtcgtctgcaaacagggacaatttgacttcctcttttcctaattgaataacctggatcccttccttacaccttatacaaaaatcaattcaagatggattaaagacttaaacgttagacctaaaaccataaaaaccctagaagaaaacctaggcattaccattcgggacataggcatgggcaaggacttcatgtctaaaacaccaaaagcaatggcaacaaaagccaaaattgacaaatgggatctaattaaactaaagagcttctgcacagcaaaagaaactaccatcagagtgaacaggcaacctacaaaatgggagaaaattttcgcaacctactcatctgacaaagggctaataaccagaatctacaatgaactcaaacaaatttacaagaaaaaaacaaacaaccccatcaaaaagtgggtgaaggacatgaacagacacttctcaaaagaagacatttatgcagcc

SEQ ID NO: 134512 - DNA, 20788 bp, Homo sapiens
  Payload ID: 6281
  Gene Symbol: FSIP2
  Gene Name: fibrous sheath interacting protein 2
  Uniprot ID: Q5CZC0
  ENST ID: ENST00000424728
  CDS Start-End: 1-20724
atggagctgtacctcggcgcctgctccaagcctgccaaagtcgccgtcaccaagacggtcgccagcgtcctggccgcggacacccagcagtgcagagacggcgtgcacaaaacccactttgcaggggttggaccggctcagctactggacctacctctcggggtcaagctgcctgtgatcccaggaagcaatgctgtattctatactacgaatttcggtgaaaagctttttcgaccttcttatggttttaacctgactgatccctattgtcgacttttggaaaaccaatataaaagcctccatgatccacatttaaaagcatactataagcgcaaagatattttgaagagattaaagaaaggtggctacatcaccagcaataataaagttgtatgtaccttgagagaattgaataagtacaggcaatatcttaccagtttaaaattagactttgagagaaactatataaaagaacaaagaatacttgcaaaacaactacataacataccggaaaacaatcaaatccctcaacattgtgatgttgcacaagtccaaaactggttgttaaaggagggcactgaatctattaaggaccaggagcggctgatgaggcatagatatttggatatgataagtagaaaactagaacaacttgaacgcacagcagaagaacaacgcctattcctaatggatagagaagaaagacgacagcgggaacacacaagaagaaaacttactcttcgtagaaaaatagaagaggaatggaagacaaaagagatgttacttctgacaaggatggcagaagatgttaaaagagaagagaggatagaagaacaacagcatagaaacagagaagagagtgacaggaagaaacaagatcttctagagaaaaaaatggcttatcatttacaaaaaatgcaagatactggctttaacggagaagatataggaaaaaatacatttaaatacagaggtcaagatggaacacatgcttctccaaagaataaaaagaagacttctgaagatataatgttagtttatcctgctggagaccagaatacatataaagaaacacatggacatacagcaaatgctgctcatcagcgtcaaaatagttcaaataattttacgaaaaaaaactcagcttctgttgtttatcaggcagatgtacaggataatggtataaatcaaaagagagatgggatggtatctaaaaactcaagtattttcgatgatagaggaggtataaatatttcaggccaaggttcaattatttcagcgcaggtatcacccacgagaaatttttccagagtttcacaggcatttttggatccttcaaaagaagagaaggagacaaatgctgattgggatggaagaccaaccaagagatcaagctatctctgcgaatcaggacctcaggctcatgctacagacccgggtatattttcttctcctgtttacacaaatatgcaacagaacttgctgcaaaattgcttgcaagaaaaagtaacttctgaagaactgaatattataattcagaatgtaatgacctgggttgtggctacagtgaccagtatattgtacccagccatcacaaagtatgaaaaaagattgcaaaataatacatacccagtatctgatgactccatcctctcttcagatagttcaagtttctgtagcacgtgcagtgaagactttacatatagaagctacacatctgcaacaactaaaacatttcaggcagaaccctgtgcatttgtagttgacacgtcagtaaggagaccaaccacacctataaaacctcctcctgcacatgtggaaaaaacagttgtggggaaaacatgtcacataaaaggacaatctataatctctaaacataaatataataaaaccaacttgctatattcataccctaagctcagaagttgtaaatcagatagtcaccttttagcatcatttgaaacaggcacaaaaaaatctaaggatgctaccactgaaacagatagcttagggagttcattgcattgtgataaaacagcaaaagccatggatgaaatgaagaatttaaaaaatgtttttgttaactttaaatgttacttgaaaggggaaactgaagtgattttagaaagcattttgcgagaaataatgtctgatttaacccaggccattccctctctctcttctgttactgctgaagtttttgttgaacaatgtgaacgtgaaaaagaaatcttgctttccaatgctcatattccctcagttgcttctgagattgtggaaaatatgcttgagaagttagagtctgcagttgagaaaaaatgtgttgagatgttttcacaagatttgtcagtcgacattaaaccaagtttagcagccagtgatgaacttctcacatcatctaatggaaaacctttgaaaaattcaatgcctcatactttggacccaatgtgtgatattgcagaggacatggtgcatgccattttagaaaagctaatgactcttgtttcttttaagcaaaatgaatttcttcatcttaaagacacaaataagctttcctgccagcaacataagacagacccaatatgtatgttccttcaaagagctggcaaaaataaatctagtcttgaatctgatgaagctagtttaattgtcaatgaagaagtacaaaatttaatatcaaatattttttcccagtcttctttggttgcttatatagaggaagcaatcaatgctatactaggttatatacaaactgaactaaataatgagagaattattgcatctgaagaaaccgtagtactccttcagctacttgaggacatcctttttcagctccatcaggaaccagtaaatgaaagttttcaaaaaagtaggcaacctagaataagtagtccttctgacaccaaagaaaagtacagactcactggcactagattatcaaatagtcctaggtctggaagaccatttccacctataaatgttccaggcatggttctttattctgatgatgaaaatgaggaaatagacaatattgtaaaaaatgtgcttgattcaactttcaaagatgaaaaagtaaaatcacaagaacagattcctaatcattggtttacaaagggaaacacttgttttgaatgcaaaagaaatatcaaaccacctacaaagcctggttctagaagcaaagctgcatttcatgattgggaattaaagactgagccaccatctactaatcatgaagatattttaaagaaaaaactttcttcgaataaagacatttcaactttcagccaagatcaaaagcatcaaatagaaaaggcttcagaaaacatagtcacaagtattttaaaggaaatgctcaaggacatatcttccgttccttttggtcacttagacagcaaaactggcagtgaagcttcagttcttgtttcagaaaagcctcaaggactgtcacatcaagaatggatagaccagatgttttctgtttcagaaatcagtacagtggctcaagaaataacagattctgtgttaaacatacttcataaggcatcaaactacatttccaataccactaaaagttccatttcatcatcagttcatcagatttccttacataattctgacactgaacacatagtcaaagaagcaccaaataaatacccattaaaaacatggtttgacagtgaaaagaaaatgaaatatttatctttatttgacgttgatcctgaaaagcctccctggttaaaatctggaaaaagtgaacctaaacctgtagatgacattaatgataagatcattcgtacaatttttaaaagactgaagtcatttatttgtccaaaattgcatatgggcttcaaatcttcattacgatctcaacttagtaagtacacagctaaaatagtaaacattgttttatgtgctatccagaatgaactggaacttcacaaggaaaacctaaatcttagggagattgaccataccaaatcccttacagataaaggattttttgctaatactgataaaaaattagaatctcttgtcacgagtattgatgatgacattttggcgagtccattattaacctgtatttatgatatgttgttatcaagtgaaaatgcacatcaaagaagcatttcactctcttctcgtaagccaaagtctgcaactgacagtgttgatgtacaaagcattttgccaaataggcaagataaaaaatcttttcacaaatatttggctactccttgtactcaccacagtgtcaatggtggaaaccatattaaagagaatgcaaaattgcaagtgttagaaagaattggggaaacactacatgaaatgttaagcaagctcctggggacccatcttcattctcagctatcttgtagtcaacaaagcagagagatgaccaataagaatcagaaaatggctgctgcattgcagtctaatattcagttaatttctaaagcaattttggattatatccttgcaaaattatgtggtgttgacatggataccagttttgcaagttgtggattaaaagctatctcagagtctcttgacattgacaacccatcatttgcttcaattattgagaaaatggccaaatccaccaaaataatctccagcatagtttccagaagggttcaggaggacaataaagaagagactaaaagcaaggcaaaacctgttgctcctgtgtcttccaaaacaccaagcacaaaagaaatgcatccaaataaactaaaagctgtagcttcagatattcttaatatggtttttgctaaactggaagggtttgccaacggacatttagaaattttgggtgctattaatgatggaaataagaaaagcaataagataggctgggaatatgaaagcaccaatatttccagagacacacatgaagcatcatttctgtctgctttatatatgcatgcaaagaaggtatcaagtgctattttgaaggttattcaaacagaattaaatgtgacctcatcagatttgaagacaagtgtagaaaacccaccacctgagactcaaatacttaagtatgtagtcaagttaattttagatgcagtatcttccgatatgtttaatgaaatggaatctgaagggggaggcattgaaacttatcgatacaggccaacatatggaagtcttcctggaggagctgaatcagattcatttctagaagatgatgcatatacagcgaaaaaaattattgatgagagatccccacaaagagaagaagtgaaaacacgttctcttaaacaatgggctctcgaaaaaaccttaaacaaaattgaagtaaaactcaaagaaccacatatatctccaattgctcccattataagaaatattttgaatgaaatttttcaaagtactttaatcaatcaattaaatgtcctttctctctcccactctaattttaatggcatgcctcacaatgttgatgagccaactccccaaacatctgttcaatttatggataaaatgatggatcctttactttcggaagcagatataaccatagtaacagataatattgttaggactgtatttcacaaactttattcagctgccatgacagaaagaaatgtaagggaaaataggtataaaactatcactttttcagcaaatgtttcttctcatgaacacacctataaaggaaagtcctctgtcacggctttggatgaaaatccatgtacttttcagtctagattcagcgttgctgacaaggagacaaaggtaaatctagctgaagatattgtacaggcaatattaacaaatttagaaacttttgctacttccaaagtaaaatctctcttttattctcaagtcaactttacagttccagtggctttacctattcagcaagatcacagtacattgagcaaagcattatcagccaaagattcatattctgatgagcaattttcctgttgctcagtagatcataccaagtcaggaaagaccaacttgtgccaactgtctttgtctaaattaaatacttatgcactacaagtggctagaagaaatttacaaggaatcaaacaggaattagataaagaaagggaaaatccttttttaactcatgacattgggatttctgaaagtattgcaagtcaaattgttaacgcattgttagacattatatcacgtaaaggcaaatgtgacaaaaacagttctgacaaagagatcgatttagatcagcaaaaaggtgttattgaaaagctgctcaatgagaccaaatatcgaaaagtacttcaacttcaaatacaagataccattgaaggtatcctatgtgatatttatgaaaaaaccctgtttcagaataatctctcatttgccacacccactctgaaatgtagcatagctgataaacattcagaagaaaattctgaaatgttcatggagggtgcaaataagattattcctaagctttcagttcctaaatcagatgtcattttgatatccaatgatatagtgaatattgttcttcataatctcagttctgctgccacgcttgtcataaatgcaaagaatcctacttctgcaagattgcccctgacattttgtgatacgtttccaaaaatagactgtcaacagcctcttaaggggtcaaaaactgaaagaaaaacagagcgtttttcatattcaagaaatcagaaatcagcttatgctgatgataatcagataactgtagtagagaaagaagacactcagaaatctgctactgactcatgtgaggaaaatgctaacttcattactaaaactatttttaaacgtttggaatcttttgccacagaaagaatagattcattaattacccttgctttccaaagtaaagaaaagtcatttgttatcccagaattggaaaattgtaaacaaaatgacagcatcttttatgattcaagccaagtggaatcagatgtaaatgtcctgaaaatatcagcaactgaaaccattctcagccaagagcttacagatttcacttttgttggtcgcagagaaaaacttggatccacaattcacctatcgcaagctaggcttaagacatatgctgacgtcattgccagtgccattttgaagcttattaaaaatgacttagacttagaaattcaaaagatatatccatatcaaaacaatattttgttccaagaaaacatcattgtgagtgaaattgttgacagtatgttaaagatgttagatgataaaagatctgtaaaggaaatttgttttaattcaaaagaaaattctaacttttcacaattagctttatcaaatgaaatattgctgggtcacaaagagaaggaaagaagtaccaaacaatctctatttacaaagtatccattagagcaaaaccaaatgatattggaaaacaaaaggcagataattgttttggaagaaatatttatgagaaatggagaatcaaaaaacaaagaaaaaggtgaactgctcattgcagtggaagaacttttgaataagttgtatcaaagagtaagggaagtcacaggccatttgcctccacttaatgaaactgccaactttatatctaattctaagattaaaacatcagacacaacacagaaaaacagttttcaatcacatattaacagtgtagcaaatgacatagttgaaagtgttttggggaaaatgtacttggtagttgtgacatcattatatgaaaataataaaagtaggacagaagttgaaatatctgaccacaatgattccttactaatgaaaccattaaggtttagagaaactaaacaagcaggaaaaataagtaattcccctagatatgcgatatcacaggcttattcttatgtcgacagtcaaaatatctctgtgatggaaaacactcttttgccatatttaccattgcaagtgaagaaagacttaattcaaatggttctcaataagatcacaaattttgtctcacttcctttaaaggtgagccctaaggacaaccctaagccatgctttaaagcacatttaaaaacaagatcaaaaattaccactttgcctaaatttacaaaaaaaacacacttaggactgagtgctgctaaggccaaaagcaaaaccaagttaggtcctggagagaagaccctaaaagacagcagatccaagactgccattgggttgtcacacatcatgtcagctggagatgccaaaaatttactggacacaaaattgcccacttcagaactaaaaatatatgccaaggatataataattaacatcctagaaacaattgtgaaggaatttggaaaggtaaagcaaaccaaagctttaccatctgatcaaatcatagcagcaggtaaaatagttaatacagttttgcaagaattatatgttaccaataactgcaatttggcttacccgatgaaatcctcacatctcagactttcacaggggaatataggcacaggatcccttcctaaacaacaagcatgtttttacttggagaatgtttcttcacagctagagcacatttttcctagagaaggtatatttaaaaaattgtttgacaagtggcaaacagaatcaaatgacaaggaaaatgaaaaatgtaagctattgatgatagctgaaaatgttttgactgaaatttcaataaaagcaaaagaattagaatattctctttcacttttaaatttgccccctcttgagaattgtgaaagcaggttttataatcattttaaaggagcttctactagagccgaggatactaaagcacaaattaatatgtttggaagggaaattgttgaaatgctacttgaaaaactacagctatgctttctgtcccaaattcccactccagatagtgaagaaactctatcaaacagtaaagaacacattactgctaaaagtaaatatggttttccaaacaagcatagcctcagcagtttaccaatctataacacaaagacaaaagaccaaatttctgtgggctccagcaaccaaattgttcaagagattgtagaaacggttttaaacatgttagagtcatttgtggacttgcagtttaaacatatctccaaatatgagttttctgaaattgtgaaaatgcctatagaaaacctttcttctatccaacagaaactgttaaacaaaaaaatgttgccaaaattacaaccactgaaaatgttttctgataaatccgagtcaaatactattaatttcaaggaaaacatacagaatatccttctacgggttcattcattccattcacaattacttacatatgctgttaatatcatcagtgacatgcttgctgtaattaagaacaagctagacaacgaaataagccaaatggaaccatcttcaattagcatattgaaagagaacattgtagcaagtgagatcattggcacactaatggaccagtgtacttatttcaatgagtctttgatacaaaacctttcaagagaaagtttgttccaaggagctgaaaatgcctacactgttaatcaggttgaattagcaactaatatgaaaatgttcacatcaaagttaaaggaaggtagtttggggattaatccttcacaagtgagtaaaactgggtttgtgttttgttcagatgaagatatgaaagaaaagtacagggtttcatcagatttacccacctctgtcagatcctctgtagaagacacagttaaaaactcagagccaacgaaaaggcctgattcagaaactatgccatcgtgttctactagaaacaaagtacaagaccacagaccaagggaatctaactttggtagttttgatcagaccatgaaaggaaatagctacctccctgaaggcagtttcttacaaaagctgcttaggaaagcaagtgactccacagaagcagcattaaagcaagtcttgtcattcatagaaatgggaaaaggtgaaaatctaagagtgtttcattatgagaacctaaaaccagttgttgaaccaaaccaaattcagacaaccatttcccctctcaaaatatgtttagctgcagaaaatattgtcaatactgtgctatccagctgtggctttccaagtcaaccacacactaatgagaacagggaaataatgaaaccatttttcatatcaaaacaaagctctttatctgaagtatctggagggcaaaaggataacgaaaaaagtttgcttagaatgcaggataaaaaaatcaactatatacctgaggaagaaaatgaaaaccttgaagccagccgggaagattcttcttttttgcaaaaattgaaaaaaaaggagtacccaaagatagagactgtgaaggaagttgaagcctttacttttgctgatcatgaaatgggttccaatgaagttcatctgatagcaagacatgtcaccacatctgtggtcacatatttgaagaactttgaaactacagtttttagtgaggaaaagatgtctgtttctacatggtcaaggaaaaaatatgaatcaaaacagttcctaagaaacatatacgatgattcttcaatttatcaatgttgtgaacatctcactgagtcagtactttaccatttaacttcgagcatttctgatggcaccaaaaagggtagagaaaaagagaaagcatgggaaattcaagaagcaacatttagcaagattatttcaattcattctcaagtgtttgagagcaggtcaatttccattggagaacttgctttatgtatttctgaaatcattattaaaattctttttaataataaaattatacaggctgacattgcacagaaaatggttgccatacctacaaaatacacttactgtccaggaatagtttctggtggctttgatgacctctttcaggatctcttagtaggagtgattcatgtactgtccaaagaaatagaagtagattatcactttgaaagcaatgtaagaaacaaatcattttctatgcatagaaataatagtgtacccctttgcaacaaaatcaatagacaggcaagccccagagactggcaattttctactcaacaaattggtcaactttttcaaaaaaataagttaagttatcttgcatgtaagttaaacagcctggttggtaacctaaaaacaagtgaatccaaagaagtagtcaataaagtttttaatattgtttcagatttattttcaccagatgaatgcctagatacgggtatggattctggtaaaatacaaagaacatatttctactcctcgaataatgagcaacctaatagcatacttaccaataacctacagctctcctcaaaatcagtttttcttctcaatgttgtatgtgagaaacttatcagaatacttttggaagaatgcacaagcactgcttttcctgataaagggtctgtttcagaggaaacatcagcagaagaatgtcaacttttaaaaatgcttcaaagtgtagaagatggaaaatctgattatcgtaagggaggaatggactgtgaatgccttcaagtagattacatgtcagaccttttggagaatgtggcagaaattgatcaagacttattgacatcagactctatgcttactattatttcccacagcttggttaaatcattgatggacaaattatctcacagcatacaacaagctccggaaagtctaccttttgcaaataagcatttgaactacagaacaagagaaatacagtctagtttcataaaagcaagaaagtcagaattaatagaattaggacagagtaaaagttctttagaactcaggagctatgatagtaattctttgacagtatccctgaataatcccagtgtggttagctccaaaatacaagcaccatttaacaagcattgtgcagtaaaatcctcttctgtgtcaccttttgaaagacagagaacaaaggaaatggataaggtagccattcataataagctacatcaggaaggtatatatgctggtgtttattcagccacatttttggaaggaataatttcagaattgttttttaatctctctatgtcattgtggggcaaaaataaaaacatcactgtgtcctggctcaatgagatgaatacattatttgtcaacaatgtagtgaatgaatttaataatgctcaagtcactgttctacggaatgctgaagaaaggctgtgttttccaccagttcatacagaaactgttagcaaaattgttgactcagtttattatgatgttttacagcagtatgaattaaaagtggcctgtggtaataatccggtatacgacaatgcctcaatagcagaacaaataacaaatggcatattgttagagattttagactacaaactgccatcttgcttcaaggaacatctcataccccattcatattaccctctcaaacctgaaattatattgcaaaagcttcaaagtaacctaacagaatttacttctctacccaggtcttcatcagactatagtaccatgttatcacattcatttttagaagatgtcataagaaggcttttatctcagctaattcctccacccattacatgttcctctttaggaaaaaaatatttaatgagttctgattttaatgaaatgtccacttgtataataaataaggttatgtcagccatttcaaaacataaaatctggttcactatatatgataatcaatatctatatactggaaaaaacctccaaaagatggtggattctgtatattgtaatattttgcaaatgtctgactctcttgtttcaatacaaaaaagtatagtaagccgaagcccaattatgattgaccaaatagccagctttatcatccaagagattatcgaaaatcatcttcaaccatttttgagtggagaggttttatgtcatccaaggactccactggatccagtgtctactattgttacacaggttctgagtgaagtgatagagtcacacagacctcagaagcaatcacctttagatattcaccttgattcatttgtaagggagattgttgccagacttttgtcaaagattttcagcccaaagcataacactgaaattgagttgaaaaacatgacccaaagaatagtaaactccataaataggcatttcaataaagctaaaattcacattctctatgatgacaaagaacaggctttcttttctttcaatacagatattgtggatgaacttgccacctcagtttatagaaatgctttaaagcagcatgggctagaccttgctgttgataaagagtctgaagacagtggcatttttgtggaaaatattaccaatttaattgtagcagctatttcagattaccttcttcatccactgttttctggggatttttcagcttctacctattctaattcagtggctgagaatattgttcaggacatccttagtaacatcagtaaatctactgagccaagccagagtgtacctctatataacaccttgctgccatacacatttttagaagatatgatcagagtactattatctaaattattttcttctgcatctagcctggttctaaacagagacacccaaaaagatatatcaagagtgaatttcaatgacattgcttcaaacctagttagtgatattaggatgaaagtttcccaacatgaaattcgattttcaaaagaggaagaagaaaccaagtttatttattcagaagatgatattcagcaccttgttgattcagtatttgcaaatgttgtgcaaacctctggttctcaagaatcagctgtgcaaaatatcacaagcagtaatgacattcttatagatagaatagcaggtttcatcattaaacatatctgtcaaaaacatcttcagccatttgtgagtggaaaatcattatcttcatcagacacatattttgatgatgagagaaggcagttattttataccagtgtttactcttcaacattcttggaagatgtaatctctggggttttaagaaaaatattccacagggtagtaggcattgtacaaacaaaatccataagagattcagaagatgaactgtttgagaaagctgaagaactcatacatttgattacaggggaattctcaaaagcccaagttagcattatagataatactgaggaaagactgtgtttacctccagtggagagggatgtagtcaaaacaattgttgacatggtgtacagcaaagttttgcaagaatatgaaatggaagtcgtgcccaataaagattttctaaatgacacaaagacattggctgcaagaataactaatatcatcctggctgaaatttttgatttccaaattcatccagatcttatagcaaatctgccttttaaatcacattccaaactcagtgcaaatgttttaatacaaagagttcaatatgatataagtaaatcaagattccaaagacaagcttcaacaatgtataccactatgttatcacatagtcatttggaaaaaatagttactcagcttacatctcagataagtccattgaacaccagtgcagagcagtcagatactactaaatcagacttaagtaatacagtgataaaactgataaatgaaattatgtcaataatttcaaaacatgaaatatgtattattaaatatgggaataaaaaacagagtatgatttcagcaaaagatatccagtctatggttgattccatttatgctgatctttctcattcaaatatataccagtccattacaaaagataaaaagagcataagtgacatacctgtttcaaaaatagcgagttttataataaaagaaatctttaaccatcatattcaatcatttttatctgaagataaaactctccttttggcagcagttgatcaaacttataaattgaaagcaatagatcctaaacaaagagaattatcttttattgtgaactcatctgtctttttggaggaagtaatttctgagctcttatgcaaaattctttatgcattttcacataacatgttggttactgaaaatccagatagagtgaaactgaaacttaccaggattgttacaacattggtaaattcaattgttctggagttcaccacatcagagattttagttgcagataactttgataaaaatttgtgtttctcagaaagatacaaagaaatggttcaaaaaatagtcaactcagtatatggaaaagtattagatcaatataaatctctgattcaaatacatagggttatacaaagtgacacaatatgttttggtaggaaaatatattatttgctattggaagaaatatatgattatcaagtgcagtcattagtttcaggagaattagagtcttcttcttattcgtatccccaagctgataatatcatcagaaatgtgcttaacataatcacaaaggatagccatgccttgccaccatatattactgtgttgcctcattctcttttagaagatatggtttacaggcttctagggcatgtcttcccttcaactcacactgaaaatgaactaaaagagaaaaagtttccaccggatgatgaatttgtggaggcagcttcaaaattgactgatgaaattataaaagaaatttctgaacatgagattcgactttccatggcagaggataatgcagaaagtatgcagttagaacctattgaaaatttggtcgactccatatgtaataatattttgaaaacatctgaattccaagctgaagtacaaaaagatgcagacaaaaaaggatgctcattcctcagtaaattagctggttttattatgaaagaaatcatgtatcatcatttacagccatttttacatggtgaagaatcatctttcagtgacttatctgattatgaccatgtctctgaacttgctaaatctggtaaagaaaagacacagccttctctctattcagctacatttttggaagacataatcattgaccttgttcacaaattttgttctctcctcattattactgaagattctaagaaaaatgaaatggcagagctagatattatgggcttggctctaaaacttgcaaattctctgataagggaatttaagaaaagtgatattaaagttttaccaaatgctgaaaaaatgttttcttttccaccaattgataaagagacagttgataaaatatccaattttgtatatgaacagttcatagaaaaatgcacatctcatgatattcaaaaaggtgatgaaagtaacattgctatagggatgattgctgctctaacccagaaggcaatatctgcattcaggattcaaccacttttttcaggagactggtcttccaccttcttttcatttctaaatccagataatatcacccaaagggttcaacacctaccacaaaacacctttacacaaataagcagatgtgcaaaagagaaccaactttctttaccagatcaatcatataaagatacttcttccaccccagattgcaaaaacatgatgagcactttggaaataaatagaggtacaatgaatagaaagaaaagttttaaaaccaaggacacatcagtgaaaaaaggtgacatccaaaatccagtacttagctctataaatgcaattatgaaaagcggcatgattaacctaacatcagggttggctacaggtgtgacaaataaaaaggaagtggatgaaaataaagtgggaatttgtactcaaaaacatagtgagaatgtatcaaaagttacttcaactaccactgtgaaaagtaaagatactcaggagccaaatttgagtgaaacatttaataataatgaaattgagaagaaaagaaatttaattccaacagataaaaaagggaaagatgatgagatatacacacatttttcattaataattgatgatacagaatatgagaaggaagtacttggatcagattctgaaataggctataaaaagaagattgacaatgcaagggaaagctcatttaaaaaagatgacaagctctttcagttatcctccttgaagtccaagagaaatctagggactacaacagatactttggaaataagaattcgaacatcaagcaatgaggggagaagagactctccaacacaaacgtgtagggatgaggaacaccactcagattatgaacatgttcaaaatgtcattgaaaatatttttgaagatgttttagaactatcttcttctccagaaccagcatattattcgaaactcagttatgaccaaagccccccaggtgataatgtattaaatgtaattcaagagattagcagggattcggcacagtctgttacaacaaaaaaagtatcctcctcaactaacaaaaatatctctgccaaagaaaaagaagaggaagagagagaaaaagagaaagtaagagaggagattaaaagtgaacccagtaaaccagatgatcctcaaaaccaacgagaaagtaaacctggaatttttcccgctaagtttttagaagatgttattactgagatggttaaacaattgatcttttcttctataccagaaacacaaatacaagatagatgtcaaaatgttagtgataagcaaaatcaagccaaactctatgacactgctatgaaactcatcaattcactgttaaaggagttctcagatgctcaaattaaggttttcaggccagataagggaaatcagttccctgggggtaaagtgtcttcagttcctaaagtacctccaaggtataaagagccaactacagatgaagcaccatccagcattaagataaaatctgcagataaaatgccacctatgcataaaatgatgagaaaaccttcttcagataagataccatcaattgacaaaacattggtcaataaagttgttcactcctctgtttgtaatattttaaatgactatggatctcaagactctatttggaagaatataaacagtaatggagaaaatttagcaagaagactaactagtgcagtgataaatgaaattttccaacgtcaggttaacttgatattttgtgatgaggtttcagtttcagcatgtttgcctctggaatctaaggatgttgttaaaaaggtccaaaagttggcccaaacagccagcaaagaatgtcaaacttcatcaccatatacaataatattacctcataaatttttggagaatgtgatttctgctcttttctccaaaattttctcaacaatatccagcacaaaaacaaaagaacctgaggacaatttgtccacagaactgaatttccttcaaatgaagttagtaagtgcagttgcaacagagatctcccaagataaatatatgactatacagtatgtagaaaccttacaatctgatgatgatgaaattattcaattagtggttcagtctgtttataataatctcttgccacagtttggatcacaagagattatacaaaattgtgtaaccagtggatgcaaaatcctttcagaaaacatagttgacttggttctacgagaagtggctagcaatcagctgcagagctatttttgtggagagctaactccacatcagtgtgtggaagttgaaaacatcgttgaaaagatccttaaagatgttttccaaactactgatgtgcccctacctaaaccttcacatgctgataagctgtcttataacataatagaagaaattgctgtgaaatttttatcaaagcttttatctatatttccaaaagtacataaagaaagaacaaaatctctagagactgatatgcaaaaaataacttcaaaagtactaaattcagtccaagaatttatctccaaaagtaagattaaacttgtaccacccaccaaggaatcacctactgtgcctgtagctgataatgcaactattgaaaacatagttaattctatttataccagtgttttaaagcactctggctcttatacttctgtatttaaagatttaatgggtaaaagcaatgtcctctctgatacaataggctttttaatggtgaatgcaatttcgaattctgaatttcaacctcaagtagaggaagaagtatcaaattcagaattagttctggaagctgtcaaaattatggaaaaagtgatcaaaattattgatgaacttaagtctaaggaaaagtcttcatccagaaaaggtttgacattagatgccaaacttttagaagaggtgttggccttgttcttggctaaactaataaggttgccaagttcctcaagcaaagatgaaaaaaacttatcaaagactgagttaaataaaattgcatctcaactgtcaaaattggtaacagctgaaatttccagaagtagcattagtctaatagcttctgatcctgaagagcactgtttaaatccagaaaatacagaaaggatttatcaggttgtcgattccgtttatagtaacatactgcaacaatcaggaaccaacaaagaattttattatgatataaaagatacaaatacagcctttcctaaaaaagtggctagtttaattattgatggagtttcaagttttccattagatacaattaactcaacaatttcaaatgctgatctctctggagagctagacgttaatagaattgttcaaaaggcccaagaacatgcttttaatgtgattcctgaattagagcaagaaaagttagatcaaaatttatctgaagaggaatctccaattaaaatagttccacatgttggaaaaaaaccagtcaaaatagatccaaaaattatttcagaacacttagcagttatttctataaaaactcaacctcttgagaaacttaagcaggagtgtttgaaaagaactggacatagcatagcagaactgagaagagcatcaataagtgggagaaattactccttaggatcacctgatttagaaaagagaaagacagaaagacgtacctcattggataagactggaagactggatgtaaaacccctagaggccgttgctagaaattcatttcagaatataagaaagcctgatattacaaaggtggagctcttaaaagatgttcaaagtaaaaatgatcttattgttcgattagtagctcatgatattgatcaagtgtatttggaaaattacataaaagaggaacgagattctgatgaagatgaagttgttttaacacagacttttgcaaaagaagaaggcatcaaagtatttgaagatcaagtgaaagaagtcaagaagccaatacaaagcaaactttctcctaagtcaacactaagcacgagcagcctgaaaaaatttttgtcactaagtaaatgttgtcagaccacagccagtgcaaatattgaaagtactgaagcaatctcaaatcaggtaatagaatccaaggagacacatgttaaaagagctgttgctgagcttgacatggccacaccaaagacgatgcctgaaacagcctcttcatcttgggaggaaaagccccagtgtaagaaagaagaaaagaatcttgttactgaaccaacacattacttcatacacagaattatgagttcatcttcatacaaccaagaagatctcatttcatctactggtgaggctgaagattgtcactcagacccaagtgctaaaatattagaagaaagttctcaggaacaaaagccagagcatggaaacagtgttaagtttatcaccatctttgaaagatccaaggatgttcttggcagtgcaaatccctcaaaggaagtcatttcagaaactcccaagcccgatgtctccaaacaaggatctaaaatgctgacaaaaatgtcttcaactttgtcaaaggtgttttctcaatgtaacaccaatatttccagatcttcctcaccagctcaccaggatgaacactgaagcttttgtacctgatataagtatgcttacttcttttagaaaataaaatggtttttaaagcata

SEQ ID NO: 134513 - DNA, 3882 bp, Homo sapiens
  Payload ID: 6281
  Gene Symbol: FSIP2
  Gene Name: fibrous sheath interacting protein 2
  ENST ID: ENST00000611759
  CDS Start-End: 605-2545
tacagaatatgagaaggaagtacttggatcagattctgaaataggctataaaaagaagattgacaatgcaagggaaagctcatttaaaaaagatgacaagctctttcagttatcctccttgaagtccaagagaaatctagggactacaacagatactttggaaataagaattcgaacatcaagcaatgaggggagaagagactctccaacacaaacgtgtagggatgaggaacaccactcagattatgaacatgttcaaaatgtcattgaaaatatttttgaagatgttttagaactatcttcttctccagaaccagcatattattcgaaactcagttatgaccaaagccccccaggtgataatgtattaaatgtaattcaagagattagcagggattcggcacagtctgttacaacaaaaaaagtatcctcctcaactaacaaaaatatctctgccaaagaaaaagaagaggaagagagagaaaaagagaaagtaagagaggagattaaaagtgaacccagtaaaccagatgatcctcaaaaccaacgagaaagtaaacctggaatttttcccgctaagtttttagaagatgttattactgagatggttaaacaattgatcttttcttctataccagaaacacaaatacaagatagatgtcaaaatgttagtgataagcaaaatcaagccaaactctatgacactgctatgaaactcatcaattcactgttaaaggagttctcagatgctcaaattaaggttttcaggccagataagggaaatcagttccctgggggtaaagtgtcttcagttcctaaagtacctccaaggtataaagagccaactacagatgaagcaccatccagcattaagataaaatctgcagataaaatgccacctatgcataaaatgatgagaaaaccttcttcagataagataccatcaattgacaaaacattggtcaataaagttgttcactcctctgtttgtaatattttaaatgactatggatctcaagactctatttggaagaatataaacagtaatggagaaaatttagcaagaagactaactagtgcagtgataaatgaaattttccaacgtcaggttaacttgatattttgtgatgaggtttcagtttcagcatgtttgcctctggaatctaaggatgttgttaaaaaggtccaaaagttggcccaaacagccagcaaagaatgtcaaacttcatcaccatatacaataatattacctcataaatttttggagaatgtgatttctgctcttttctccaaaattttctcaacaatatccagcacaaaaacaaaagaacctgaggacaatttgtccacagaactgaatttccttcaaatgaagttagtaagtgcagttgcaacagagatctcccaagataaatatatgactatacagtatgtagaaaccttacaatctgatgatgatgaaattattcaattagtggttcagtctgtttataataatctcttgccacagtttggatcacaagagattatacaaaattgtgtaaccagtggatgcaaaatcctttcagaaaacatagttgacttggttctacctaaaccttcacatgctgataagctgtcttataacataatagaagaaattgctgtgaaatttttatcaaagcttttatctatatttccaaaagtacataaagaaagaacaaaatctctagagactgatatgcaaaaaataacttcaaaagtactaaattcagtccaagaatttatctccaaaagtaagattaaacttgtaccacccaccaaggaatcacctactgtgcctgtagctgataatgcaactattgaaaacatagttaattctatttataccagtgttttaaagcactctggctcttatacttctgtatttaaagatttaatgggtaaaagcaatgtcctctctgatacaataggctttttaatggtgaatgcaatttcgaattctgaatttcaacctcaagtagaggaagaagtatcaaattcagaattagttctggaagctgtcaaaattatggaaaaagtgatcaaaattattgatgaacttaagtctaaggaaaagtcttcatccagaaaaggtttgacattagatgccaaacttttagaagaggtgttggccttgttcttggctaaactaataaggttgccaagttcctcaagcaaagatgaaaaaaacttatcaaagactgagttaaataaaattgcatctcaactgtcaaaattggtaacagctgaaatttccagaagtagcattagtctaatagcttctgatcctgaagagcactgtttaaatccagaaaatacagaaaggatttatcaggttgtcgattccgtttatagtaacatactgcaacaatcaggaaccaacaaagaattttattatgatataaaagatacaaatacagcctttcctaaaaaagtggctagtttaattattgatggagtttcaagttttccattaatacaattaactcaacaatttcaaatgctgatctctctggagagctagacgttaatagaattgttcaaaaggcccaagaacatgcttttaatgtgattcctgaattagagcaagaaaagttagatcaaaatttatctgaagaggaatctccaattaaaatagttccacatgttggaaaaaaaccagtcaaaatagatccaaaaattatttcagaacacttagcagttatttctataaaaactcaacctcttgagaaacttaagcaggagtgtttgaaaagaactggacatagcatagcagaactgagaagagcatcaataagtgggagaaattactccttaggatcacctgatttagaaaagagaaagacagaaagacgtacctcattggataagactggaagactggatgtaaaacccctagaggccgttgctagaaattcatttcagaatataagaaagcctgatattacaaaggtggagctcttaaaagatgttcaaagtaaaaatgatcttattgttcgattagtagctcatgatattgatcaagtgtatttggaaaattacataaaagaggaacgagattctgatgaagatgaagttgttttaacacagacttttgcaaaagaagaaggcatcaaagtatttgaagatcaagtgaaagaagtcaagaagccaatacaaagcaaactttctcctaagtcaacactaagcacgagcagcctgaaaaaatttttgtcactaagtaaatgttgtcagaccacagccagtgcaaatattgaaagtactgaagcaatctcaaatcaggtaatagaatccaaggagacacatgttaaaagagctgttgctgagcttgacatggccacaccaaagacgatgcctgaaacagcctcttcatcttgggaggaaaagccccagtgtaagaaagaagaaaagaatcttgttactgaaccaacacattacttcatacacagaattatgagttcatcttcatacaaccaagaagatctcatttcatctactggtgaggctgaagattgtcactcagacccaagtgctaaaatattagaagaaagttctcaggaacaaaagccagagcatggaaacagtgttaagtttatcaccatctttgaaagatccaaggatgttcttggcagtgcaaatccctcaaaggaagtcatttcagaaactcccaagcccgatgtctccaaacaaggatctaaaatgctgacaaaaatgtcttcaactttgtcaaaggtgttttctcaatgtaacaccaatatttccagatcttcctcaccagctcaccaggatgaacactgaagcttttgtacctgatataagtatgcttacttcttttagaaaataaaatggtttttaaagcat

SEQ ID NO: 134514 - DNA, 2251 bp, Homo sapiens
  Payload ID: 6282
  Gene Symbol: FBLN1
  Gene Name: fibulin 1
  Uniprot ID: P23142
  ENST ID: ENST00000262722
  CDS Start-End: 104-2155
gttggctgccgaggctcggccggagcgtggagcccgcgccgctgccccaggaccgcgcccgcgcctttgtccgccgccgcccaccgcccgtcgcccgccgcccatggagcgcgccgcgccgtcgcgccgggtcccgcttccgctgctgctgctcggcggccttgcgctgctggcggccggagtggacgcggatgtcctcctggaggcctgctgtgcggacggacaccggatggccactcatcagaaggactgctcgctgccatatgctacggaatccaaagaatgcaggatggtgcaggagcagtgctgccacagccagctggaggagctgcactgtgccacgggcatcagcctggccaacgagcaggaccgctgtgccacgccccacggtgacaacgccagcctggaggccacatttgtgaagaggtgctgccattgctgtctgctggggagggcggcccaggcccagggccagagctgcgagtacagcctcatggttggctaccagtgtggacaggtcttccaggcatgctgtgtcaagagccaggagaccggagatttggatgtcgggggcctccaagaaacggataagatcattgaggttgaggaggaacaagaggacccatatctgaatgaccgctgccgaggaggcgggccctgcaagcagcagtgccgagacacgggtgacgaggtggtctgctcctgcttcgtgggctaccagctgctgtctgatggtgtctcctgtgaagatgtcaatgaatgcatcacgggcagccacagctgccggcttggagaatcctgcatcaacacagtgggctctttccgctgccagcgggacagcagctgcgggactggctatgagctcacagaggacaatagctgcaaagatattgacgagtgtgagagtggtattcataactgcctccccgattttatctgtcagaatactctgggatccttccgctgccgacccaagctacagtgcaagagtggctttatacaagatgctctaggcaactgtattgatatcaatgagtgtttgagtatcagtgccccgtgccctatcgggcatacatgcatcaacacagagggctcctacacgtgccagaagaacgtgcccaactgtggccgtggctaccatctcaacgaggagggaacgcgctgtgttgatgtggacgagtgcgcgccacctgctgagccctgtgggaagggacatcgctgcgtgaactctcccggcagtttccgctgcgaatgcaagacgggttactattttgacggcatcagcaggatgtgtgtcgatgtcaacgagtgccagcgctaccccgggcgcctgtgtggccacaagtgcgagaacacgctgggctcctacctctgcagctgttccgtgggcttccggctctctgtggatggcaggtcatgtgaagacatcaatgagtgcagcagcagcccctgtagccaggagtgtgccaacgtctacggctcctaccagtgttactgccggcgaggctaccagctcagcgatgtggatggagtcacctgtgaagacatcgacgagtgcgccctgcccaccgggggccacatctgctcctaccgctgcatcaacatccctggaagcttccagtgcagctgcccctcgtctggctacaggctggcccccaatggccgcaactgccaagacattgatgagtgtgtgactggcatccacaactgctccatcaacgagacctgcttcaacatccagggcggcttccgctgcctggccttcgagtgccctgagaactaccgccgctccgcagccacccgctgtgagcgcttgccttgccatgagaatcgggagtgctccaagctgcctctgagaataacctactaccacctctctttccccaccaacatccaagcgcccgcggtggttttccgcatgggcccctccagtgctgtccccggggacagcatgcagctggccatcaccggcggcaatgaggagggctttttcaccacccggaaggtgagcccccacagtggggtggtggccctcaccaagcctgtccccgagcccagggacttgctcctgaccgtcaagatggatctctctcgccacggcaccgtcagctcctttgtggccaagcttttcatctttgtgtctgcagagctctgagcactcgcttcgcgtcgcggggtctccctcctgttgctttcctaaccctgccctccggggcgttaataaagtcttagcaagcgtcccacacagtga

SEQ ID NO: 134515 - DNA, 2896 bp, Homo sapiens
  Payload ID: 6282
  Gene Symbol: FBLN1
  Gene Name: fibulin 1
  Uniprot ID: P23142
  ENST ID: ENST00000327858
  CDS Start-End: 96-2207
ccgaggctcggccggagcgtggagcccgcgccgctgccccaggaccgcgcccgcgcctttgtccgccgccgcccaccgcccgtcgcccgccgcccatggagcgcgccgcgccgtcgcgccgggtcccgcttccgctgctgctgctcggcggccttgcgctgctggcggccggagtggacgcggatgtcctcctggaggcctgctgtgcggacggacaccggatggccactcatcagaaggactgctcgctgccatatgctacggaatccaaagaatgcaggatggtgcaggagcagtgctgccacagccagctggaggagctgcactgtgccacgggcatcagcctggccaacgagcaggaccgctgtgccacgccccacggtgacaacgccagcctggaggccacatttgtgaagaggtgctgccattgctgtctgctggggagggcggcccaggcccagggccagagctgcgagtacagcctcatggttggctaccagtgtggacaggtcttccaggcatgctgtgtcaagagccaggagaccggagatttggatgtcgggggcctccaagaaacggataagatcattgaggttgaggaggaacaagaggacccatatctgaatgaccgctgccgaggaggcgggccctgcaagcagcagtgccgagacacgggtgacgaggtggtctgctcctgcttcgtgggctaccagctgctgtctgatggtgtctcctgtgaagatgtcaatgaatgcatcacgggcagccacagctgccggcttggagaatcctgcatcaacacagtgggctctttccgctgccagcgggacagcagctgcgggactggctatgagctcacagaggacaatagctgcaaagatattgacgagtgtgagagtggtattcataactgcctccccgattttatctgtcagaatactctgggatccttccgctgccgacccaagctacagtgcaagagtggctttatacaagatgctctaggcaactgtattgatatcaatgagtgtttgagtatcagtgccccgtgccctatcgggcatacatgcatcaacacagagggctcctacacgtgccagaagaacgtgcccaactgtggccgtggctaccatctcaacgaggagggaacgcgctgtgttgatgtggacgagtgcgcgccacctgctgagccctgtgggaagggacatcgctgcgtgaactctcccggcagtttccgctgcgaatgcaagacgggttactattttgacggcatcagcaggatgtgtgtcgatgtcaacgagtgccagcgctaccccgggcgcctgtgtggccacaagtgcgagaacacgctgggctcctacctctgcagctgttccgtgggcttccggctctctgtggatggcaggtcatgtgaagacatcaatgagtgcagcagcagcccctgtagccaggagtgtgccaacgtctacggctcctaccagtgttactgccggcgaggctaccagctcagcgatgtggatggagtcacctgtgaagacatcgacgagtgcgccctgcccaccgggggccacatctgctcctaccgctgcatcaacatccctggaagcttccagtgcagctgcccctcgtctggctacaggctggcccccaatggccgcaactgccaagacattgatgagtgtgtgactggcatccacaactgctccatcaacgagacctgcttcaacatccagggcggcttccgctgcctggccttcgagtgccctgagaactaccgccgctccgcagccacgctccagcaggagaagacagacacggtccgctgcatcaagtcctgccgccccaacgatgtcacatgcgtgttcgaccccgtgcacaccatctcccacaccgtcatctcgctgcctaccttccgcgagttcacccgccctgaagagatcatcttcctccgggccatcacgccaccgcatcctgccagccaggctaacatcatcttcgacatcacggaagggaacctgcgggactcttttgacatcatcaagcgttacatggacggcatgaccgtgggtgtcgtgcgccaggtgcggcccatcgtgggcccatttcatgccgtcctgaagctggagatgaactatgtggtcgggggcgtggtctcccaccgaaatgttgtcaacgtccacatcttcgtctctgagtactggttctgagggctggtctgccgcacagccgcaggtgcacctccaggccaaatcattgctgccagtgactgtggtctgtacttgtttataccctcagacttttttaatgttaggtatttgtagcattaggccaacatgtattaagctgagccagatgaataagtccatctgatgtattttcggtgtttaaaaaatgagcccagttgctcaactgtttggttgaaaaccttgctcattttttaatgcgaaggctaagtgtcaccccctttctctgcctctggctgggccttgctaagggccaaggaaagaaagacattttttagggggcagccagtccaaatgccaaaagaagaccagttcttgccctgattgtatgaaatttgacattttggcactttttttttttttttggccaatcagattttctatgttctaaggacatggctgctgtagaatagcacagacgtggatgataaattatccccagaagcagcatgacagaatgcctcggggagcacttggaagggaaattgcagttctgttgaaatagaggaaaatcccttggtaaagacacagcctgttaggctcgtgtgggcctccagtatgttcaccaggggaatggctgggatttctcggcactctgcatcatccatcttttcttataggtgggaaaataaacaactttgtgatcctcctga

SEQ ID NO: 134516 - DNA, 2348 bp, Homo sapiens
  Payload ID: 6282
  Gene Symbol: FBLN1
  Gene Name: fibulin 1
  Uniprot ID: P23142
  ENST ID: ENST00000340923
  CDS Start-End: 11-1711
cccgccgcccatggagcgcgccgcgccgtcgcgccgggtcccgcttccgctgctgctgctcggcggccttgcgctgctggcggccggagtggacgcggatgtcctcctggaggcctgctgtgcggacggacaccggatggccactcatcagaaggactgctcgctgccatatgctacggaatccaaagaatgcaggatggtgcaggagcagtgctgccacagccagctggaggagctgcactgtgccacgggcatcagcctggccaacgagcaggaccgctgtgccacgccccacggtgacaacgccagcctggaggccacatttgtgaagaggtgctgccattgctgtctgctggggagggcggcccaggcccagggccagagctgcgagtacagcctcatggttggctaccagtgtggacaggtcttccaggcatgctgtgtcaagagccaggagaccggagatttggatgtcgggggcctccaagaaacggataagatcattgaggttgaggaggaacaagaggacccatatctgaatgaccgctgccgaggaggcgggccctgcaagcagcagtgccgagacacgggtgacgaggtggtctgctcctgcttcgtgggctaccagctgctgtctgatggtgtctcctgtgaagatgtcaatgaatgcatcacgggcagccacagctgccggcttggagaatcctgcatcaacacagtgggctctttccgctgccagcgggacagcagctgcgggactggctatgagctcacagaggacaatagctgcaaagatattgacgagtgtgagagtggtattcataactgcctccccgattttatctgtcagaatactctgggatccttccgctgccgacccaagctacagtgcaagagtggctttatacaagatgctctaggcaactgtattgatatcaatgagtgtttgagtatcagtgccccgtgccctatcgggcatacatgcatcaacacagagggctcctacacgtgccagaagaacgtgcccaactgtggccgtggctaccatctcaacgaggagggaacgcgctgtgttgatgtggacgagtgcgcgccacctgctgagccctgtgggaagggacatcgctgcgtgaactctcccggcagtttccgctgcgaatgcaagacgggttactattttgacggcatcagcaggatgtgtgtcgatgtcaacgagtgccagcgctaccccgggcgcctgtgtggccacaagtgcgagaacacgctgggctcctacctctgcagctgttccgtgggcttccggctctctgtggatggcaggtcatgtgaagacatcaatgagtgcagcagcagcccctgtagccaggagtgtgccaacgtctacggctcctaccagtgttactgccggcgaggctaccagctcagcgatgtggatggagtcacctgtgaagacatcgacgagtgcgccctgcccaccgggggccacatctgctcctaccgctgcatcaacatccctggaagcttccagtgcagctgcccctcgtctggctacaggctggcccccaatggccgcaactgccaagacattgatgagtgtgtgactggcatccacaactgctccatcaacgagacctgcttcaacatccagggcggcttccgctgcctggccttcgagtgccctgagaactaccgccgctccgcagccacatgatcgtagggaactctgcatgaggccatcggtgcaggctggagaagagaaggcaagttggcaggagtggagaccacgggcatttgagccacttcctcatgtaacttaacttgtgccttcaggacctgctcaagcccgatcacgtatataccacttccatttgatgatggaatgctgctgttcatgaccaactttatggctagatgggtcagaaagcacccagttcatgataggcagttcaggtcatatggtgacttgatgacccagagtcaaacattcagtttccaccaaagcccagtaacaggccaagagctgtctctcaaaaggagagtagttatctgcagaagatggcagggccttgctccgaaagcctagagaccgccactgtgattcacctatgggggcctgccaaaggctgcagccagcatccttatctgccactgacacctcaagcaacattggatctgctgggtcatatggcccaagtggcagagcaacttgcacaacagcctggacctgtcatagagctttctcctgttctggaccccactcaaaactggcagcctttcaggtcactcgataaatgtgctggagtaacactcaaacgaggaatgtgttgcctccaaaatccaataggccc

SEQ ID NO: 134517 - DNA, 2355 bp, Homo sapiens
  Payload ID: 6282
  Gene Symbol: FBLN1
  Gene Name: fibulin 1
  ENST ID: ENST00000402984
  CDS Start-End: 104-2269
gttggctgccgaggctcggccggagcgtggagcccgcgccgctgccccaggaccgcgcccgcgcctttgtccgccgccgcccaccgcccgtcgcccgccgcccatggagcgcgccgcgccgtcgcgccgggtcccgcttccgctgctgctgctcggcggccttgcgctgctggcggccggagtggacgcggatgtcctcctggaggcctgctgtgcggacggacaccggatggccactcatcagaaggactgctcgctgccatatgctacggaatccaaagaatgcagagccgtggggttggcctcactgtgccaggacctgaatggggcgtgggcagtatggaaagtgggaagagcatcccaggccgagggaacagccagcgcaagagcccagaggagagggatggtgcaggagcagtgctgccacagccagctggaggagctgcactgtgccacgggcatcagcctggccaacgagcaggaccgctgtgccacgccccacggtgacaacgccagcctggaggccacatttgtgaagaggtgctgccattgctgtctgctggggagggcggcccaggcccagggccagagctgcgagtacagcctcatggttggctaccagtgtggacaggtcttccaggcatgctgtgtcaagagccaggagaccggagatttggatgtcgggggcctccaagaaacggataagatcattgaggttgaggaggaacaagaggacccatatctgaatgaccgctgccgaggaggcgggccctgcaagcagcagtgccgagacacgggtgacgaggtggtctgctcctgcttcgtgggctaccagctgctgtctgatggtgtctcctgtgaagatgtcaatgaatgcatcacgggcagccacagctgccggcttggagaatcctgcatcaacacagtgggctctttccgctgccagcgggacagcagctgcgggactggctatgagctcacagaggacaatagctgcaaagatattgacgagtgtgagagtggtattcataactgcctccccgattttatctgtcagaatactctgggatccttccgctgccgacccaagctacagtgcaagagtggctttatacaagatgctctaggcaactgtattgatatcaatgagtgtttgagtatcagtgccccgtgccctatcgggcatacatgcatcaacacagagggctcctacacgtgccagaagaacgtgcccaactgtggccgtggctaccatctcaacgaggagggaacgcgctgtgttgatgtggacgagtgcgcgccacctgctgagccctgtgggaagggacatcgctgcgtgaactctcccggcagtttccgctgcgaatgcaagacgggttactattttgacggcatcagcaggatgtgtgtcgatgtcaacgagtgccagcgctaccccgggcgcctgtgtggccacaagtgcgagaacacgctgggctcctacctctgcagctgttccgtgggcttccggctctctgtggatggcaggtcatgtgaagacatcaatgagtgcagcagcagcccctgtagccaggagtgtgccaacgtctacggctcctaccagtgttactgccggcgaggctaccagctcagcgatgtggatggagtcacctgtgaagacatcgacgagtgcgccctgcccaccgggggccacatctgctcctaccgctgcatcaacatccctggaagcttccagtgcagctgcccctcgtctggctacaggctggcccccaatggccgcaactgccaagacattgatgagtgtgtgactggcatccacaactgctccatcaacgagacctgcttcaacatccagggcggcttccgctgcctggccttcgagtgccctgagaactaccgccgctccgcagccacccgctgtgagcgcttgccttgccatgagaatcgggagtgctccaagctgcctctgagaataacctactaccacctctctttccccaccaacatccaagcgcccgcggtggttttccgcatgggcccctccagtgctgtccccggggacagcatgcagctggccatcaccggcggcaatgaggagggctttttcaccacccggaaggtgagcccccacagtggggtggtggccctcaccaagcctgtccccgagcccagggacttgctcctgaccgtcaagatggatctctctcgccacggcaccgtcagctcctttgtggccaagcttttcatctttgtgtctgcagagctctgagcactcgcttcgcgtcgcggggtctccctcctgttgctttcctaaccctgccctccggggcgttaataaagtcttagcaagcgtcc

SEQ ID NO: 134518 - DNA, 2531 bp, Homo sapiens
  Payload ID: 6282
  Gene Symbol: FBLN1
  Gene Name: fibulin 1
  Uniprot ID: P23142
  ENST ID: ENST00000442170
  CDS Start-End: 17-1822
ccgtcgcccgccgcccatggagcgcgccgcgccgtcgcgccgggtcccgcttccgctgctgctgctcggcggccttgcgctgctggcggccggagtggacgcggatgtcctcctggaggcctgctgtgcggacggacaccggatggccactcatcagaaggactgctcgctgccatatgctacggaatccaaagaatgcaggatggtgcaggagcagtgctgccacagccagctggaggagctgcactgtgccacgggcatcagcctggccaacgagcaggaccgctgtgccacgccccacggtgacaacgccagcctggaggccacatttgtgaagaggtgctgccattgctgtctgctggggagggcggcccaggcccagggccagagctgcgagtacagcctcatggttggctaccagtgtggacaggtcttccaggcatgctgtgtcaagagccaggagaccggagatttggatgtcgggggcctccaagaaacggataagatcattgaggttgaggaggaacaagaggacccatatctgaatgaccgctgccgaggaggcgggccctgcaagcagcagtgccgagacacgggtgacgaggtggtctgctcctgcttcgtgggctaccagctgctgtctgatggtgtctcctgtgaagatgtcaatgaatgcatcacgggcagccacagctgccggcttggagaatcctgcatcaacacagtgggctctttccgctgccagcgggacagcagctgcgggactggctatgagctcacagaggacaatagctgcaaagatattgacgagtgtgagagtggtattcataactgcctccccgattttatctgtcagaatactctgggatccttccgctgccgacccaagctacagtgcaagagtggctttatacaagatgctctaggcaactgtattgatatcaatgagtgtttgagtatcagtgccccgtgccctatcgggcatacatgcatcaacacagagggctcctacacgtgccagaagaacgtgcccaactgtggccgtggctaccatctcaacgaggagggaacgcgctgtgttgatgtggacgagtgcgcgccacctgctgagccctgtgggaagggacatcgctgcgtgaactctcccggcagtttccgctgcgaatgcaagacgggttactattttgacggcatcagcaggatgtgtgtcgatgtcaacgagtgccagcgctaccccgggcgcctgtgtggccacaagtgcgagaacacgctgggctcctacctctgcagctgttccgtgggcttccggctctctgtggatggcaggtcatgtgaagacatcaatgagtgcagcagcagcccctgtagccaggagtgtgccaacgtctacggctcctaccagtgttactgccggcgaggctaccagctcagcgatgtggatggagtcacctgtgaagacatcgacgagtgcgccctgcccaccgggggccacatctgctcctaccgctgcatcaacatccctggaagcttccagtgcagctgcccctcgtctggctacaggctggcccccaatggccgcaactgccaagacattgatgagtgtgtgactggcatccacaactgctccatcaacgagacctgcttcaacatccagggcggcttccgctgcctggccttcgagtgccctgagaactaccgccgctccgcagccacgcagaaatccaagaagggaaggcagaacaccccagcgggatcaagtaaagaggactgcagggttcttccatggaagcaggggttggaggatacccaccttgatgcctagtgaggaagatggacctggacagacagtcagctccacaccttgcgctgagcagctgtgattgtgccacgggagcatgagcccttttccccacggcccttgccactgtctcctggccctctctctgatcatgccaggtttgcaccagcctcgagtctcccatgttgtagtacattctccaagatgcagcccaggagcctctctgaaggaccagtctggttacgatggtctgagcttccttagaaccttccatggttgtcttttcccagcagatgaagcatagcctccttggaatggcatgggaggcctggcctgatctggcctctgcccaccctttgagctgcacctgccccaccccagctcatccatgtgcttgtaccctggccccacggggaggcttgcccttccctgaatctgccttcttgtggctttagcatgtgccatgctgtccccctgcagactgccattctccttgcagacttggctcagaagtcacctcctcagtgcagttagcctgagctcccctggccccaggtgcctccatcagagcatttaccccattgtgttgtggctgttccttaacgtccccactagccaggctctttgagggcagggattgtgtctggttaatttctgtattctctgcaactttgcaatgtttggcttgaagaaggagctcagtaaacatctgaataaacatgcaggttgatgg

SEQ ID NO: 134519 - DNA, 572 bp, Homo sapiens
  Payload ID: 6282
  Gene Symbol: FBLN1
  Gene Name: fibulin 1
  ENST ID: ENST00000439835
  CDS Start-End: 1-279
gcgctgctggcggccggaggtaggggcgtcccgggtccgccgccccagcttagggtcccgaccccctcggcctcgcgctccctgcgagtttcggaaccacggggactcggagtccgtgcgttgccctgcgcggcgcccccggactgtcagcgccgaggcctcggcgacgcccccctcccccacggccagctccggtcctcatctcctccccggcctggggacttgtttcaaaaccggattcccccacccctcaaacacaccgtcctaccccagtcctagcaaatccagccggctccgggggccgcatcccgggccctgggggttcaggggcgctagctgggctgggggacgctggctgggggttaccgagcccagggcgccttgcacttgacgctggaagcgccctcggctatctttcctcaccgcttcccgcctccacccccagtggacgcggatgtcctcctggaggcctgctgtgcggacggacaccggatggccactcatcagaaggactgctcgctgccatatgctacggaatccaaagaatgcaggatggtgcaggagcagtgctg

SEQ ID NO: 134520 - DNA, 753 bp, Homo sapiens
  Payload ID: 6282
  Gene Symbol: FBLN1
  Gene Name: fibulin 1
  ENST ID: ENST00000437711
  CDS Start-End: 1-550
gaagaggtgctgccattgctgtctgctggggagggcggcccaggcccagggccagagctgcgagtacagcctcatggttggctaccagtgtggacaggtcttccaggcatgctgtgtcaagagccaggagaccggagatttggatgtcgggggcctccaagaaacggataagatcattgaggttgaggaggaacaagaggacccatatctgaatgaccgctgccgaggaggcgggccctgcaagcagcagtgccgagacacgggtgacgaggtggtctgctcctgcttcgtgggctaccagctgctgtctgatggtgtctcctgtgaagatgtcaatgaatgcatcacgggcagccacagctgccggcttggagaatcctgcatcaacacagtgggctctttccgctgccagcgggacagcagctgcgggactggctatgagctcacagaggacaatagctgcaaagaatactctgggatccttccgctgccgacccaagctacagtgcaagagtggctttatacaagatgctctaggcaactgtattgatatcaatgagtgtttgagtatcagtgccccgtgccctatcgggcatacatgcatcaacacagagggctcctacacgtgccagaagaacgtgcccaactgtggccgtggctaccatctcaacgaggagggaacgcgctgtgttgatgtggacgagtgcgcgccacctgctgagccctgtgggaagggacatcgctgcgtgaact

SEQ ID NO: 134521 - DNA, 671 bp, Homo sapiens
  Payload ID: 6282
  Gene Symbol: FBLN1
  Gene Name: fibulin 1
  ENST ID: ENST00000455233
  CDS Start-End: 155-671
ccgcgccctcctcccgggcgggataattgaacggcgcggccctggcccagcgttggctgccgaggctcggccggagcgtggagcccgcgccgctgccccaggaccgcgcccgcgcctttgtccgccgccgcccaccgcccgtcgcccgccgcccatggagcgcgccgcgccgtcgcgccgggtcccgcttccgctgctgctgctcggcggccttgcgctgctggcggccggagtggacgcggatgtcctcctggaggcctgctgtgcggacggacaccggatggccactcatcagaaggactgctcgctgccatatgctacggaatccaaagaatgcaggatggtgcaggagcagtgctgccacagccagctggaggagctgcactgtgccacgggcatcagcctggccaacgagcaggaccgctgtgccacgccccacggtgacaacgccagcctggaggccacatttgtgaagaggtgctgccattgctgtctgctggggagggcggcccaggcccagggccagagctgcgagtacagcctcatggttggctaccagtgtggacaggtcttccaggcatgctgtgtcaagagccaggagaccggagatttggatgtcgggggcctccaagaaacgggaggcgggccctgcaagcagcagtgccgagaca

SEQ ID NO: 134522 - DNA, 512 bp, Homo sapiens
  Payload ID: 6282
  Gene Symbol: FBLN1
  Gene Name: fibulin 1
  ENST ID: ENST00000445110
  CDS Start-End: 318-512
aaagctgcctcccctgcagcctcggtgacttcccgggtctctccctccggccctggtgtcccgggtgagcccagcacacgttgggattttggttgtttgttggcctggcccgactgtccctgtctctgagggcagagtcgggtcccatcccgggacacgcctggggttagccaccgacctgcagcctcccggccgagggtgcggggttggcgtcctgtcctcaccagacttctcacaggtccccgtttctgtggaagaggggatcttgtgtggacgcggatgtcctcctggaggcctgctgtgcggacggacaccggatggccactcatcagaaggactgctcgctgccatatgctacggaatccaaagaatgcaggatggtgcaggagcagtgctgccacagccagctggaggagctgcactgtgccacgggcatcagcctggccaacgagcaggaccgctgtgccacgccccacggtgacaacgccagcctggaggccacatttgtgaag

SEQ ID NO: 134523 - DNA, 565 bp, Homo sapiens
  Payload ID: 6282
  Gene Symbol: FBLN1
  Gene Name: fibulin 1
  ENST ID: ENST00000454279
  CDS Start-End: 148-565
tcaagacagaaggacgtgcgtgtcctggtggtgcatctgggagggccctccacccgctgagtggtgagccacctctcagcttgttctcttccctgcacagtggacgcggatgtcctcctggaggcctgctgtgcggacggacaccggatggccactcatcagaaggactgctcgctgccatatgctacggaatccaaagaatgcaggatggtgcaggagcagtgctgccacagccagctggaggagctgcactgtgccacgggcatcagcctggccaacgagcaggaccgctgtgccacgccccacggtgacaacgccagcctggaggccacatttgtgaagaggtgctgccattgctgtctgctggggagggcggcccaggcccagggccagagctgcgagtacagcctcatggttggctaccagtgtggacaggtcttccaggcatgctgtgtcaagagccaggagaccggagatttggatgtcgggggcctccaagaaacggataagatcattgaggttgaggaggaacaagaggacccatatctgaatgaccgctgccgag

SEQ ID NO: 134524 - DNA, 544 bp, Homo sapiens
  Payload ID: 6282
  Gene Symbol: FBLN1
  Gene Name: fibulin 1
  ENST ID: ENST00000451475
  CDS Start-End: 1-544
tgcaggatggtgcaggagcagtgctgccacagccagctggaggagctgcactgtgccacgggcatcagcctggccaacgagcaggaccgctgtgccacgccccacggtgacaacgccagcctggaggccacatttgtgaagaggtgctgccattgctgtctgctggggagggcggcccaggcccagggccagagctgcgagtacagcctcatggttggctaccagtgtggacaggtcttccaggcatgctgtgtcaagagccaggagaccggagatttggatgtcgggggcctccaagaaacgggaggcgggccctgcaagcagcagtgccgagacacgggtgacgaggtggtctgctcctgcttcgtgggctaccagctgctgtctgatggtgtctcctgtgaagatgtcaatgaatgcatcacgggcagccacagctgccggcttggagaatcctgcatcaacacagtgggctctttccgctgccagcgggacagcagctgcgggactggctatgagctcacagaggacaatagctgcaaag

SEQ ID NO: 134525 - DNA, 568 bp, Homo sapiens
  Payload ID: 6282
  Gene Symbol: FBLN1
  Gene Name: fibulin 1
  ENST ID: ENST00000411478
  CDS Start-End: 1-568
atgaattcctatacaagaggctcccgcaggcccagcgccaaagctgcctcccctgcagcctcggtgacttcccgggtctctccctccggccctggtgtcccggtggacgcggatgtcctcctggaggcctgctgtgcggacggacaccggatggccactcatcagaaggactgctcgctgccatatgctacggaatccaaagaatgcaggatggtgcaggagcagtgctgccacagccagctggaggagctgcactgtgccacgggcatcagcctggccaacgagcaggaccgctgtgccacgccccacggtgacaacgccagcctggaggccacatttgtgaagaggtgctgccattgctgtctgctggggagggcggcccaggcccagggccagagctgcgagtacagcctcatggttggctaccagtgtggacaggtcttccaggcatgctgtgtcaagagccaggagaccggagatttggatgtcgggggcctccaagaaacggataagatcattgaggttgaggaggaacaagaggacccatatctgaatgaccgctgccgag

SEQ ID NO: 134526 - DNA, 599 bp, Homo sapiens
  Payload ID: 6282
  Gene Symbol: FBLN1
  Gene Name: fibulin 1
  ENST ID: ENST00000460300
  CDS Start-End: 1-183
gacatcacggaagggaacctgcgggactcttttgacatcatcaagcgttacatggacggcatgaccgtggcccctctcctgaactgtcacattttaaaagatttacagtcatgggaaatgaaaacggtggcatctgccattttggactcggatttatactctgaacactttcaaagcagctgagcaacggacggacagtccctgacctcccctgggcctcagtttccccattgtgaactgggaggagtgggcttcctagtcccttaggcgctggagtccgggaggtcctaaccagaacccacgagcgtgcagtgcgcacagagcagagcgttttggagcctggcctccaggtggcgctgttggaccttggacgctcagtctttgcgcctcaaacccgacggttgttaaaactggcagctggagaaagggaatcgttattcccgtcttgccaaagagccatttatagcacctttacaagcttttaaatgggtttgcatgttgtaaacatgactgagtcactggggggctccccaccccagcctcctcctgcgctagctggcagcaggaataattagttaattacaattaatggtgcatta

SEQ ID NO: 134527 - DNA, 4127 bp, Homo sapiens
  Payload ID: 6283
  Gene Symbol: FBLN2
  Gene Name: fibulin 2
  Uniprot ID: P98095
  ENST ID: ENST00000295760
  CDS Start-End: 70-3624
ggacggacgccgagcgcagtgccccgcgggtcttacaggagaggggaccgtcctgggctggcctggaccatggtgctgctctgggagcctgcaggagcctggcttgctctgggcctggccctggccctgggccccagcgtggccgcagctgcccctcggcaggactgcacgggcgtggagtgcccgccgctggagaactgcattgaggaggcgctggagccgggtgcctgctgtgccacgtgtgtgcagcagggctgcgcctgcgagggctaccagtactatgactgcctacagggtggcttcgtgcgcggccgcgtgcccgccggtcagtcctattttgtggacttcgggagcactgagtgctcctgcccaccaggcggcggcaagatcagctgccagttcatgctgtgcccggagctgccgcccaactgcatcgaggctgtagtggtggctgacagctgcccacagtgcggccaggtgggctgcgtccacgcgggccacaagtacgccgctggccacactgttcacctgccgccctgccgggcctgccactgccctgacgccggtggagagctcatctgctaccagctccccggttgccacgggaacttctcagatgccgaggagggtgaccccgagcgacactacgaagacccctacagctatgaccaggaggtggccgaggtggaagcagcaacagccctggggggtgaggtccaggcgggtgcagtccaggcaggcgcagggggccccccagctgctctgggaggtgggagtcagccactgtccaccatccaggcacccccctggccagctgtcctccccaggcccacagcggctgctgccctgggtcccccagccccagtgcaggccaaagctaggagagtgaccgaggacagtgaggaggaagaagaggaggaggaggagagagaggaaatggctgtcactgagcagctggcagcaggtggccacagggggctggatgggctgcccactacagccccagctggacccagtcttcctatccaggaggagagggcagaagctggggcaagggcagaagctggggcaaggcctgaagagaacctcatcctggatgcccaagccacgtcccgcagcactgggccggagggcgtgacgcatgcaccgagcctgggcaaggctgctctcgtcccaactcaggccgtgcctggctctcccagggacccagtcaagcccagcccccacaacatcctgtccacatcactgcctgatgcagcctggatcccacccacccgagaagtgcccaggaagccgcaagttctgccccattcccacgtggaggaggacacagaccccaactctgtccattctatccccagaagtagccctgaaggctccaccaaggacctgatcgagacttgctgcgcagccggacagcagtgggccattgacaatgacgagtgcctggagatccctgagagtggcactgaggacaacgtctgcaggacagcccagaggcactgctgtgtctcctacttgcaggagaagagctgcatggccggcgtcctgggagccaaggagggtgagacctgtggggctgaggacaacgacagctgcggcatctccctgtacaagcaatgctgtgactgctgtggcctgggcctccgcgtgcgggccgagggccagtcgtgtgagtccaatcctaacctgggctatccctgcaatcatgtcatgctctcctgctgtgagggtgaagagcctctcatagtacctgaggttcgccgacctccagagcccgcagctgcaccacggagagtttcagaggcagagatggcgggccgagaggccctgtcactgggcacagaggccgagctgccgaacagcctgccgggcgatgaccaggatgagtgccttctcctcccgggagagctgtgccagcacctttgcatcaatactgtgggttcttaccactgtgcctgctttcctggcttctcactgcaggacgatggccgcacttgccgcccagagggtcaccctccacagccggaagccccacaggagcctgcactgaagtcagaattttcccaggtggcctctaacaccatcccgctgccactgccgcagcccaatacctgcaaagacaatggaccctgcaagcaggtgtgcagcactgttgggggctcagccatatgctcctgttttcccggctatgccatcatggcggatggcgtgtcctgtgaagacatcaacgagtgtgtgacggacctgcacacgtgcagccggggcgagcactgtgtgaacacactgggctccttccactgctacaaggcactcacctgtgagccaggctatgccctcaaggatggcgagtgcgaagacgtggatgagtgtgcgatgggcacgcacacctgccagccgggcttcttgtgccagaacaccaagggctccttctactgccaggccaggcagcgctgcatggatggcttcctgcaggatcctgaaggcaactgtgtggacatcaacgagtgcacgtcactgtccgagccatgtcggccaggcttcagctgcatcaacacggtgggctcctacacatgccagaggaacccgctgatctgcgcgcgcggctaccacgccagcgatgatgggaccaagtgtgtggacgtgaatgagtgtgagacaggtgtgcaccgctgcggtgagggccaagtgtgccacaacctccctggctcctaccgctgtgactgcaaagccggctttcagcgggatgcctttggccggggctgcatcgacgtgaatgagtgctgggcctcgccaggccgcctgtgccagcacacgtgtgagaacacactcggctcctaccgctgttcctgcgcctccgggttcctgctagcagcggacggcaagcgctgtgaagacgtgaatgagtgtgaggcccagcgctgcagccaggagtgtgccaacatctatggctcctaccagtgctactgccgccagggctaccagctggctgaggatgggcacacctgcacagacatcgacgagtgtgctcaaggcgccggcatcctctgcaccttccgctgtctcaacgtgccagggagctaccagtgtgcatgccctgagcagggctacaccatgacggccaacgggaggtcctgcaaggacgtggatgagtgtgcactgggtacccacaactgttccgaggctgagacctgccacaacatccagggtagcttccgctgcctgcgcttcgagtgtcctcccaactatgtccaagtctccaaaacgaagtgcgagcgcaccacgtgccatgacttcctggagtgccagaactcgccagcgcgcatcacgcactaccagctcaacttccagacgggcctcctggtgcctgcgcatatcttccgcattggccccgcgccagccttcacgggggacaccatcgccctgaacatcatcaagggcaatgaggagggctactttggcacgcgcaggctcaatgcctacacgggtgtggtctacctgcagcgggccgtgctggagccccgggactttgccctggacgtggagatgaagctctggaggcagggctccgtcaccaccttcctggccaagatgcacatcttcttcaccacctttgccctgtgaggtgccagcacgggccacctgcgggtgtggcgcagcccagggctcacactgcgtgggagggactgggtcactattgtggtttttactataactttgtaaattaacttaattttgctgacttgactcctgtggcttctggacccctcctctgccccgcaggaggaagttccacggcaggtggtgcgttcccacgcaggcaccaagtggaagcttgcacggtgggccacggccgtggcgggtgccctgtgggtgaggctgggtgatgacctgaggaccagagacacgcgaccatgttggggctcttggactcctctggatgacccgtccccaaagttgacattccatttcatgttccactgtgattaattcttttcttttttaaaaaatcattttaaagttttttgtttaactataaagtagtacatgtacattatataaaaaaaagttcaactagtatgaaagggttataaagtaacagaggaaaacgcctcttggtcccttta

SEQ ID NO: 134528 - DNA, 537 bp, Homo sapiens
  Payload ID: 6283
  Gene Symbol: FBLN2
  Gene Name: fibulin 2
  ENST ID: ENST00000295761
  CDS Start-End: 1-329
acatcgacgagtgtgctcaaggcgccggcatcctctgcaccttccgctgtctcaacgtgccagggagctaccagtgtgcatgccctgagcagggctacaccatgacggccaacgggaggtcctgcaaggacgtggatgagtgtgcactgggtacccacaactgttccgaggctgagacctgccacaacatccagggtagcttccgctgcctgcgcttcgagtgtcctcccaactatgtccaagtctccaaaacgtggtgcgttcccacgcaggcaccaagtggaagcttgcacggtgggccacggccgtggcgggtgccctgtgggtgaggctgggtgatgacctgaggaccagagacacgcgaccatgttggggctcttggactcctctggatgacccgtccccaaagttgacattccatttcatgttccactgtgattaattcttttcttttttaaaaaatcattttaaagttttttgtttaactataaagtagtacatgtacattatataaaaaaaagttcaactagtatgaaa

SEQ ID NO: 134529 - DNA, 4318 bp, Homo sapiens
  Payload ID: 6283
  Gene Symbol: FBLN2
  Gene Name: fibulin 2
  Uniprot ID: P98095
  ENST ID: ENST00000404922
  CDS Start-End: 120-3815
agccaggggccgcccgggctctcgacgcgccgacggccgggcggacggacggacggacgccgagcgcagtgccccgcgggtcttacaggagaggggaccgtcctgggctggcctggaccatggtgctgctctgggagcctgcaggagcctggcttgctctgggcctggccctggccctgggccccagcgtggccgcagctgcccctcggcaggactgcacgggcgtggagtgcccgccgctggagaactgcattgaggaggcgctggagccgggtgcctgctgtgccacgtgtgtgcagcagggctgcgcctgcgagggctaccagtactatgactgcctacagggtggcttcgtgcgcggccgcgtgcccgccggtcagtcctattttgtggacttcgggagcactgagtgctcctgcccaccaggcggcggcaagatcagctgccagttcatgctgtgcccggagctgccgcccaactgcatcgaggctgtagtggtggctgacagctgcccacagtgcggccaggtgggctgcgtccacgcgggccacaagtacgccgctggccacactgttcacctgccgccctgccgggcctgccactgccctgacgccggtggagagctcatctgctaccagctccccggttgccacgggaacttctcagatgccgaggagggtgaccccgagcgacactacgaagacccctacagctatgaccaggaggtggccgaggtggaagcagcaacagccctggggggtgaggtccaggcgggtgcagtccaggcaggcgcagggggccccccagctgctctgggaggtgggagtcagccactgtccaccatccaggcacccccctggccagctgtcctccccaggcccacagcggctgctgccctgggtcccccagccccagtgcaggccaaagctaggagagtgaccgaggacagtgaggaggaagaagaggaggaggaggagagagaggaaatggctgtcactgagcagctggcagcaggtggccacagggggctggatgggctgcccactacagccccagctggacccagtcttcctatccaggaggagagggcagaagctggggcaagggcagaagctggggcaaggcctgaagagaacctcatcctggatgcccaagccacgtcccgcagcactgggccggagggcgtgacgcatgcaccgagcctgggcaaggctgctctcgtcccaactcaggccgtgcctggctctcccagggacccagtcaagcccagcccccacaacatcctgtccacatcactgcctgatgcagcctggatcccacccacccgagaagtgcccaggaagccgcaagttctgccccattcccacgtggaggaggacacagaccccaactctgtccattctatccccagaagtagccctgaaggctccaccaaggacctgatcgagacttgctgcgcagccggacagcagtgggccattgacaatgacgagtgcctggagatccctgagagtggcactgaggacaacgtctgcaggacagcccagaggcactgctgtgtctcctacttgcaggagaagagctgcatggccggcgtcctgggagccaaggagggtgagacctgtggggctgaggacaacgacagctgcggcatctccctgtacaagcaatgctgtgactgctgtggcctgggcctccgcgtgcgggccgagggccagtcgtgtgagtccaatcctaacctgggctatccctgcaatcatgtcatgctctcctgctgtgagggtgaagagcctctcatagtacctgaggttcgccgacctccagagcccgcagctgcaccacggagagtttcagaggcagagatggcgggccgagaggccctgtcactgggcacagaggccgagctgccgaacagcctgccgggcgatgaccaggatgagtgccttctcctcccgggagagctgtgccagcacctttgcatcaatactgtgggttcttaccactgtgcctgctttcctggcttctcactgcaggacgatggccgcacttgccgcccagagggtcaccctccacagccggaagccccacaggagcctgcactgaagtcagaattttcccaggtggcctctaacaccatcccgctgccactgccgcagcccaatacctgcaaagacaatggaccctgcaagcaggtgtgcagcactgttgggggctcagccatatgctcctgttttcccggctatgccatcatggcggatggcgtgtcctgtgaagaccaagacgagtgcctgatgggtgctcacgattgtagccggcgacagttctgtgtgaacaccctgggatccttctactgtgtcaaccacacagtgctctgtgccgatggctatatcctcaatgcgcacaggaagtgcgtggacatcaacgagtgtgtgacggacctgcacacgtgcagccggggcgagcactgtgtgaacacactgggctccttccactgctacaaggcactcacctgtgagccaggctatgccctcaaggatggcgagtgcgaagacgtggatgagtgtgcgatgggcacgcacacctgccagccgggcttcttgtgccagaacaccaagggctccttctactgccaggccaggcagcgctgcatggatggcttcctgcaggatcctgaaggcaactgtgtggacatcaacgagtgcacgtcactgtccgagccatgtcggccaggcttcagctgcatcaacacggtgggctcctacacatgccagaggaacccgctgatctgcgcgcgcggctaccacgccagcgatgatgggaccaagtgtgtggacgtgaatgagtgtgagacaggtgtgcaccgctgcggtgagggccaagtgtgccacaacctccctggctcctaccgctgtgactgcaaagccggctttcagcgggatgcctttggccggggctgcatcgacgtgaatgagtgctgggcctcgccaggccgcctgtgccagcacacgtgtgagaacacactcggctcctaccgctgttcctgcgcctccgggttcctgctagcagcggacggcaagcgctgtgaagacgtgaatgagtgtgaggcccagcgctgcagccaggagtgtgccaacatctatggctcctaccagtgctactgccgccagggctaccagctggctgaggatgggcacacctgcacagacatcgacgagtgtgctcaaggcgccggcatcctctgcaccttccgctgtctcaacgtgccagggagctaccagtgtgcatgccctgagcagggctacaccatgacggccaacgggaggtcctgcaaggacgtggatgagtgtgcactgggtacccacaactgttccgaggctgagacctgccacaacatccagggtagcttccgctgcctgcgcttcgagtgtcctcccaactatgtccaagtctccaaaacgaagtgcgagcgcaccacgtgccatgacttcctggagtgccagaactcgccagcgcgcatcacgcactaccagctcaacttccagacgggcctcctggtgcctgcgcatatcttccgcattggccccgcgccagccttcacgggggacaccatcgccctgaacatcatcaagggcaatgaggagggctactttggcacgcgcaggctcaatgcctacacgggtgtggtctacctgcagcgggccgtgctggagccccgggactttgccctggacgtggagatgaagctctggaggcagggctccgtcaccaccttcctggccaagatgcacatcttcttcaccacctttgccctgtgaggtgccagcacgggccacctgcgggtgtggcgcagcccagggctcacactgcgtgggagggactgggtcactattgtggtttttactataactttgtaaattaacttaattttgctgacttgactcctgtggcttctggacccctcctctgccccgcaggaggaagttccacggcaggtggtgcgttcccacgcaggcaccaagtggaagcttgcacggtgggccacggccgtggcgggtgccctgtgggtgaggctgggtgatgacctgaggaccagagacacgcgaccatgttggggctcttggactcctctggatgacccgtccccaaagttgacattccatttcatgttccactgtgattaattcttttcttttttaaaaaatcattttaaagttttttgtttaactataaagtagtacatgtacattatataaaaaaaagttcaactagtatgaaagggttataaagtaacagaggaaaacgcctcttggtcccttta

SEQ ID NO: 134530 - DNA, 427 bp, Homo sapiens
  Payload ID: 6283
  Gene Symbol: FBLN2
  Gene Name: fibulin 2
  ENST ID: ENST00000421373
  CDS Start-End: 1-305
acgtggatgagtgtgcactgggtacccacaactgttccgaggctgagacctgccacaacatccagggtagcttccgctgcctgcgcttcgagtgtcctcccaactatgtccaagtctccaaaacgaagtgcgagcgcaccaagtggaagcttgcacggtgggccacggccgtggcgggtgccctgtgggtgaggctgggtgatgacctgaggaccagagacacgcgaccatgttggggctcttggactcctctggatgacccgtccccaaagttgacattccatttcatgttccactgtgattaattcttttcttttttaaaaaatcattttaaagttttttgtttaactataaagtagtacatgtacattatataaaaaaaagttcaactagtatgaaagggttataaagtaacagaggaaaacgc

SEQ ID NO: 134531 - DNA, 4193 bp, Homo sapiens
  Payload ID: 6283
  Gene Symbol: FBLN2
  Gene Name: fibulin 2
  Uniprot ID: P98095
  ENST ID: ENST00000492059
  CDS Start-End: 383-4078
gattcccttcatttatttcatcatggggctcatgcctgcctggcgttcagttctctacagatttgctcttgggtttattatctgcccctccacccctgagggtgtcagtgctgtgaggacgctgggaacctgtcttgctggctgataaacccctggttcctagaggggctgggtgcagaggaggcgttcctttagaaatggggcaggcttggggaccactgctgtggtaacgagtcctgctgtccctctgtcactgccctatggggctgcgctttaggctgggagtcggagaaggagctcttgcctgtgactttggggagcacgctgtctataagagtcagggtcttacaggagaggggaccgtcctgggctggcctggaccatggtgctgctctgggagcctgcaggagcctggcttgctctgggcctggccctggccctgggccccagcgtggccgcagctgcccctcggcaggactgcacgggcgtggagtgcccgccgctggagaactgcattgaggaggcgctggagccgggtgcctgctgtgccacgtgtgtgcagcagggctgcgcctgcgagggctaccagtactatgactgcctacagggtggcttcgtgcgcggccgcgtgcccgccggtcagtcctattttgtggacttcgggagcactgagtgctcctgcccaccaggcggcggcaagatcagctgccagttcatgctgtgcccggagctgccgcccaactgcatcgaggctgtagtggtggctgacagctgcccacagtgcggccaggtgggctgcgtccacgcgggccacaagtacgccgctggccacactgttcacctgccgccctgccgggcctgccactgccctgacgccggtggagagctcatctgctaccagctccccggttgccacgggaacttctcagatgccgaggagggtgaccccgagcgacactacgaagacccctacagctatgaccaggaggtggccgaggtggaagcagcaacagccctggggggtgaggtccaggcgggtgcagtccaggcaggcgcagggggccccccagctgctctgggaggtgggagtcagccactgtccaccatccaggcacccccctggccagctgtcctccccaggcccacagcggctgctgccctgggtcccccagccccagtgcaggccaaagctaggagagtgaccgaggacagtgaggaggaagaagaggaggaggaggagagagaggaaatggctgtcactgagcagctggcagcaggtggccacagggggctggatgggctgcccactacagccccagctggacccagtcttcctatccaggaggagagggcagaagctggggcaagggcagaagctggggcaaggcctgaagagaacctcatcctggatgcccaagccacgtcccgcagcactgggccggagggcgtgacgcatgcaccgagcctgggcaaggctgctctcgtcccaactcaggccgtgcctggctctcccagggacccagtcaagcccagcccccacaacatcctgtccacatcactgcctgatgcagcctggatcccacccacccgagaagtgcccaggaagccgcaagttctgccccattcccacgtggaggaggacacagaccccaactctgtccattctatccccagaagtagccctgaaggctccaccaaggacctgatcgagacttgctgcgcagccggacagcagtgggccattgacaatgacgagtgcctggagatccctgagagtggcactgaggacaacgtctgcaggacagcccagaggcactgctgtgtctcctacttgcaggagaagagctgcatggccggcgtcctgggagccaaggagggtgagacctgtggggctgaggacaacgacagctgcggcatctccctgtacaagcaatgctgtgactgctgtggcctgggcctccgcgtgcgggccgagggccagtcgtgtgagtccaatcctaacctgggctatccctgcaatcatgtcatgctctcctgctgtgagggtgaagagcctctcatagtacctgaggttcgccgacctccagagcccgcagctgcaccacggagagtttcagaggcagagatggcgggccgagaggccctgtcactgggcacagaggccgagctgccgaacagcctgccgggcgatgaccaggatgagtgccttctcctcccgggagagctgtgccagcacctttgcatcaatactgtgggttcttaccactgtgcctgctttcctggcttctcactgcaggacgatggccgcacttgccgcccagagggtcaccctccacagccggaagccccacaggagcctgcactgaagtcagaattttcccaggtggcctctaacaccatcccgctgccactgccgcagcccaatacctgcaaagacaatggaccctgcaagcaggtgtgcagcactgttgggggctcagccatatgctcctgttttcccggctatgccatcatggcggatggcgtgtcctgtgaagaccaagacgagtgcctgatgggtgctcacgattgtagccggcgacagttctgtgtgaacaccctgggatccttctactgtgtcaaccacacagtgctctgtgccgatggctatatcctcaatgcgcacaggaagtgcgtggacatcaacgagtgtgtgacggacctgcacacgtgcagccggggcgagcactgtgtgaacacactgggctccttccactgctacaaggcactcacctgtgagccaggctatgccctcaaggatggcgagtgcgaagacgtggatgagtgtgcgatgggcacgcacacctgccagccgggcttcttgtgccagaacaccaagggctccttctactgccaggccaggcagcgctgcatggatggcttcctgcaggatcctgaaggcaactgtgtggacatcaacgagtgcacgtcactgtccgagccatgtcggccaggcttcagctgcatcaacacggtgggctcctacacatgccagaggaacccgctgatctgcgcgcgcggctaccacgccagcgatgatgggaccaagtgtgtggacgtgaatgagtgtgagacaggtgtgcaccgctgcggtgagggccaagtgtgccacaacctccctggctcctaccgctgtgactgcaaagccggctttcagcgggatgcctttggccggggctgcatcgacgtgaatgagtgctgggcctcgccaggccgcctgtgccagcacacgtgtgagaacacactcggctcctaccgctgttcctgcgcctccgggttcctgctagcagcggacggcaagcgctgtgaagacgtgaatgagtgtgaggcccagcgctgcagccaggagtgtgccaacatctatggctcctaccagtgctactgccgccagggctaccagctggctgaggatgggcacacctgcacagacatcgacgagtgtgctcaaggcgccggcatcctctgcaccttccgctgtctcaacgtgccagggagctaccagtgtgcatgccctgagcagggctacaccatgacggccaacgggaggtcctgcaaggacgtggatgagtgtgcactgggtacccacaactgttccgaggctgagacctgccacaacatccagggtagcttccgctgcctgcgcttcgagtgtcctcccaactatgtccaagtctccaaaacgaagtgcgagcgcaccacgtgccatgacttcctggagtgccagaactcgccagcgcgcatcacgcactaccagctcaacttccagacgggcctcctggtgcctgcgcatatcttccgcattggccccgcgccagccttcacgggggacaccatcgccctgaacatcatcaagggcaatgaggagggctactttggcacgcgcaggctcaatgcctacacgggtgtggtctacctgcagcgggccgtgctggagccccgggactttgccctggacgtggagatgaagctctggaggcagggctccgtcaccaccttcctggccaagatgcacatcttcttcaccacctttgccctgtgaggtgccagcacgggccacctgcgggtgtggcgcagcccagggctcacactgcgtgggagggactgggtcactattgtggtttttactataactttgtaaattaacttaattttgc

SEQ ID NO: 134532 - DNA, 584 bp, Homo sapiens
  Payload ID: 6283
  Gene Symbol: FBLN2
  Gene Name: fibulin 2
  ENST ID: ENST00000465610
  CDS Start-End: 109-584
acacatacacgccccattgggagcagctgtggagatgtgaggacagtgaggtctgctattctcccagggtcttacaggagaggggaccgtcctgggctggcctggaccatggtgctgctctgggagcctgcaggagcctggcttgctctgggcctggccctggccctgggccccagcgtggccgcagctgcccctcggcaggactgcacgggcgtggagtgcccgccgctggagaactgcattgaggaggcgctggagccgggtgcctgctgtgccacgtgtgtgcagcagggctgcgcctgcgagggctaccagtactatgactgcctacagggtggcttcgtgcgcggccgcgtgcccgccggtcagtcctattttgtggacttcgggagcactgagtgctcctgcccaccaggcggcggcaagatcagctgccagttcatgctgtgcccggagctgccgcccaactgcatcgaggctgtagtggtggctgacagctgcccacagtgcggccaggtgggctgcgtccacgcgggccacaagtacgccgctggccacactgttcacctgccgccctgccgggc

SEQ ID NO: 134533 - DNA, 2423 bp, Homo sapiens
  Payload ID: 6284
  Gene Symbol: FBLN5
  Gene Name: fibulin 5
  ENST ID: ENST00000267620
  CDS Start-End: 171-1640
ggaccccggcgctctccccgtgtcctctccacgactcgctcggcccctctggaataaaacacccgcgagccccgagggcccagaggaggccgacgtgcccgagctcctccgggggtcccgcccgcgagctttcttctcgccttcgcatctcctcctcgcgcgtcttggacatgccaggaataaaaaggatactcactgttaccattctggctctctgtcttccaagccctgggaatgcacaggcacagtgcacgaatggctttgacctggatcgccagtcaggacagtgtttagatggagtttccctctcgtcgcctaggctggagtgcaatggcgcaatctcagctcactgcaacctctgcctcccgggttcaagcgattcttctgcctcagcctcccaagtagctggaattacagatattgatgaatgccgaaccatccccgaggcctgccgaggagacatgatgtgtgttaaccaaaatggcgggtatttatgcattccccggacaaaccctgtgtatcgagggccctactcgaacccctactcgaccccctactcaggtccgtacccagcagctgccccaccactctcagctccaaactatcccacgatctccaggcctcttatatgccgctttggataccagatggatgaaagcaaccaatgtgtggatgtggacgagtgtgcaacagattcccaccagtgcaaccccacccagatctgcatcaatactgaaggcgggtacacctgctcctgcaccgacggatattggcttctggaaggccagtgcttagacattgatgaatgtcgctatggttactgccagcagctctgtgcgaatgttcctggatcctattcttgtacatgcaaccctggttttaccctcaatgaggatggaaggtcttgccaagatgtgaacgagtgtgccaccgagaacccctgcgtgcaaacctgcgtcaacacctacggctctttcatctgccgctgtgacccaggatatgaacttgaggaagatggcgttcattgcagtgatatggacgagtgcagcttctctgagttcctctgccaacatgagtgtgtgaaccagcccggcacatacttctgctcctgccctccaggctacatcctgctggatgacaaccgaagctgccaagacatcaacgaatgtgagcacaggaaccacacgtgcaacctgcagcagacgtgctacaatttacaagggggcttcaaatgcattgaccccatccgctgtgaggagccttatctgaggatcagtgataaccgctgtatgtgtcctgctgagaaccctggctgcagagaccagccctttaccatcttgtaccgggacatggacgtggtgtcaggacgctccgttcccgctgacatcttccaaatgcaagccacgacccgctaccctggggcctattacattttccagatcaaatctgggaatgagggcagagaattttacatgcggcaaacgggccccatcagtgccaccctggtgatgacacgccccatcaaagggccccgggaaatccagctggacttggaaatgatcactgtcaacactgtcatcaacttcagaggcagctccgtgatccgactgcggatatatgtgtcgcagtacccattctgagcctcgggctggagcctccgacgctgcctctcattggcaccaagggacaggagaagagaggaaataacagagagaatgagagcgacacagacgttaggcatttcctgctgaacgtttccccgaagagtcagccccgacttcctgactctcacctgtactattgcagacctgtcaccctgcaggacttgccacccccagttcctatgacacagttatcaaaaagtattatcattgctcccctgatagaagattgttggtgaattttcaaggccttcagtttatttccactattttcaaagaaaatagattaggtttgcgggggtctgagtctatgttcaaagactgtgaacagcttgctgtcacttcttcacctcttccactccttctctcactgtgttactgctttgcaaagacccgggagctggcggggaaccctgggagtagctagtttgctttttgcgtacacagagaaggctatgtaaacaaaccacagcaggatcgaagggtttttagagaatgtgtttcaaaaccatgcctggtattttcaaccataaaagaagtttcagttgtccttaaatttgtataacggtttaattctgtcttgttcattttgagtatttttaaaaaatatgtcgtagaattccttcgaaaggccttcagacacatgctatgttctgtcttcccaaacccagtctcctctccattttagcccagtgttttctttgaggaccccttaatcttgctttctttagaatttttacccaattggattggaatgcagag

SEQ ID NO: 134534 - DNA, 2123 bp, Homo sapiens
  Payload ID: 6284
  Gene Symbol: FBLN5
  Gene Name: fibulin 5
  Uniprot ID: Q9UBX5
  ENST ID: ENST00000342058
  CDS Start-End: 595-1941
gccacgcagcgcgggcgtgcacgcccctccccgccgggccgcgctgccagccccgccccgcccctgggtgggaaggtcaaggggcccgggccctcccagcccccgcacccctgcgcgcgcccgcccctcgccttctgcccgggcgctcgcagccgagcgcggccggggaagggctctcctcccagcgccgagcactgggccctggcagacgccccaagattgttgtgaggagtctagccagttggtgagcgctgtaatctgaaccagctgtgtccagactgaggccccatttgcattgtttaacatacttagaaaatgaagtgttcatttttaacattcctcctccaattggtttaatgctgaattactgaagagggctaagcaaaaccaggtgcttgcgctgagggctctgcagtggctgggaggaccccggcgctctccccgtgtcctctccacgactcgctcggcccctctggaataaaacacccgcgagccccgagggcccagaggaggccgacgtgcccgagctcctccgggggtcccgcccgcgagctttcttctcgccttcgcatctcctcctcgcgcgtcttggacatgccaggaataaaaaggatactcactgttaccattctggctctctgtcttccaagccctgggaatgcacaggcacagtgcacgaatggctttgacctggatcgccagtcaggacagtgtttagatattgatgaatgccgaaccatccccgaggcctgccgaggagacatgatgtgtgttaaccaaaatggcgggtatttatgcattccccggacaaaccctgtgtatcgagggccctactcgaacccctactcgaccccctactcaggtccgtacccagcagctgccccaccactctcagctccaaactatcccacgatctccaggcctcttatatgccgctttggataccagatggatgaaagcaaccaatgtgtggatgtggacgagtgtgcaacagattcccaccagtgcaaccccacccagatctgcatcaatactgaaggcgggtacacctgctcctgcaccgacggatattggcttctggaaggccagtgcttagacattgatgaatgtcgctatggttactgccagcagctctgtgcgaatgttcctggatcctattcttgtacatgcaaccctggttttaccctcaatgaggatggaaggtcttgccaagatgtgaacgagtgtgccaccgagaacccctgcgtgcaaacctgcgtcaacacctacggctctttcatctgccgctgtgacccaggatatgaacttgaggaagatggcgttcattgcagtgatatggacgagtgcagcttctctgagttcctctgccaacatgagtgtgtgaaccagcccggcacatacttctgctcctgccctccaggctacatcctgctggatgacaaccgaagctgccaagacatcaacgaatgtgagcacaggaaccacacgtgcaacctgcagcagacgtgctacaatttacaagggggcttcaaatgcattgaccccatccgctgtgaggagccttatctgaggatcagtgataaccgctgtatgtgtcctgctgagaaccctggctgcagagaccagccctttaccatcttgtaccgggacatggacgtggtgtcaggacgctccgttcccgctgacatcttccaaatgcaagccacgacccgctaccctggggcctattacattttccagatcaaatctgggaatgagggcagagaattttacatgcggcaaacgggccccatcagtgccaccctggtgatgacacgccccatcaaagggccccgggaaatccagctggacttggaaatgatcactgtcaacactgtcatcaacttcagaggcagctccgtgatccgactgcggatatatgtgtcgcagtacccattctgagcctcgggctggagcctccgacgctgcctctcattggcaccaagggacaggagaagagaggaaataacagagagaatgagagcgacacagacgttaggcatttcctgctgaacgtttccccgaagagtcagccccgacttcctgactctcacctgtactattgcagacctgtcaccctgcag

SEQ ID NO: 134535 - DNA, 730 bp, Homo sapiens
  Payload ID: 6284
  Gene Symbol: FBLN5
  Gene Name: fibulin 5
  ENST ID: ENST00000557570
  CDS Start-End: 463-570
ttctgcccgggcgctcgcagccgagcgcggccggggaagggctctcctcccagcgccgagcactgggccctggcagacgccccaagattgttgtgaggagtctagccagttggtgagcgctgtaatctgaaccagctgtgtccagactgaggccccatttgcattgtttaacatacttagaaaatgaagtgttcatttttaacattcctcctccaattggtttaatgctgaattactgaagagggctaagcaaaaccaggtgcttgcgctgagggctctgcagtggctgggaggaccccggcgctctccccgtgtcctctccacgactcgctcggcccctctggaataaaacacccgcgagccccgagggcccagaggaggccgacgtgcccgagctcctccgggggtcccgcccgcgagctttcttctcgccttcgcatctcctcctcgcgcgtcttggacatgccaggaataaaaaggatactcactgttaccattctggctctctgtcttccaagccctgggaatgcacagcaacaggagagatggacccctgtgtgtcagccctgaaatgtgggcagatccctcctgaaaactccgagtggcctctctgtgtctctggctcaggaaagaagtgagagaagccctatctctgagcaggctgagggctgcaggcaggcacagtgcacgaatggctttgacctggatcgccagtcaggacagtgtttag

SEQ ID NO: 134536 - DNA, 900 bp, Homo sapiens
  Payload ID: 6284
  Gene Symbol: FBLN5
  Gene Name: fibulin 5
  ENST ID: ENST00000557088
  CDS Start-End: 356-490
agttggtgagcgctgtaatctgaaccagctgtgtccagactgaggccccatttgcattgtttaacatacttagaaaatgaagtgttcatttttaacattcctcctccaattggtttaatgctgaattactgaagagggctaagcaaaaccaggtgcttgcgctgagggctctgcagtggctgggaggaccccggcgctctccccgtgtcctctccacgactcgctcggcccctctggaataaaacacccgcgagccccgagggcccagaggaggccgacgtgcccgagctcctccgggggtcccgcccgcgagctttcttctcgccttcgcatctcctcctcgcgcgtcttggacatgccaggaataaaaaggatactcactgttaccattctggctctctgtcttccaagccctgggaatgcacaggcacagtgcacgaatggctttgacctggatcgccagtcaggacagtgtttagcatctctctgaccaatcagcctcttcttcttctacttttaagaactcctgtgaatatatcgggcccacccagaaaatccaggataacctccccatctcaagatattgatgaatgccgaaccatccccgaggcctgccgaggagacatgatgtgtgttaaccaaaatggcgggtatttatgcattccccggacaaaccctgtgtatcgagggccctactcgaacccctactcgaccccctactcaggtccgtacccagcagctgccccaccactctcagctccaaactatcccacgatctccaggcctcttatatgccgctttggataccagatggatgaaagcaaccaatgtgtggatgtggacgagtgtgcaacagattcccaccagtgcaaccccacccagatctgcatcaatactgaa

SEQ ID NO: 134537 - DNA, 547 bp, Homo sapiens
  Payload ID: 6284
  Gene Symbol: FBLN5
  Gene Name: fibulin 5
  ENST ID: ENST00000554468
  CDS Start-End: 275-547
ccttcttcgggaagatcgcgactctcccgtcgctcgccccaagcctctgcttcagggctaagcaaaaccaggtgcttgcgctgagggctctgcagtggctgggaggaccccggcgctctccccgtgtcctctccacgactcgctcggcccctctggaataaaacacccgcgagccccgagggcccagaggaggccgacgtgcccgagctcctccgggggtcccgcccgcgagctttcttctcgccttcgcatctcctcctcgcgcgtcttggacatgccaggaataaaaaggatactcactgttaccattctggctctctgtcttccaagccctgggaatgcacaggcacagtgcacgaatggctttgacctggatcgccagtcaggacagtgtttagatattgatgaatgccgaaccatccccgaggcctgccgaggagacatgatgtgtgttaaccaaaatggcgggtatttatgcattccccggacaaaccctgtgtatcgagggccctactcgaacccctactcgaccccctactcaggtccg

SEQ ID NO: 134538 - DNA, 1875 bp, Homo sapiens
  Payload ID: 6284
  Gene Symbol: FBLN5
  Gene Name: fibulin 5
  ENST ID: ENST00000556154
  CDS Start-End: 333-1694
attgttaattataaaaagctgcgcctctgtaatttccatcttgaagcgttcttttgggagtgggtattttctaatacagtttcaaaagccagcatcagagagggctgcgaaattctcagcgcttcattcctctttcttttctggaaagggcagcaactttgtcgttttaagggatttttgtatgtattttttaaatttcgggaggccaattactagttcactagcaattactgcgccgcatcggctgatagacaagcagacaggctagctgaacaccgcggggctggatttgctctatgtttgtgtgggattctcacagaagtttcaagccaatgagaagtgggaactgcagacagagatacatgatactcactgttaccattctggctctctgtcttccaagccctgggaatgcacaggcacagtgcacgaatggctttgacctggatcgccagtcaggacagtgtttagatattgatgaatgccgaaccatccccgaggcctgccgaggagacatgatgtgtgttaaccaaaatggcgggtatttatgcattccccggacaaaccctgtgtatcgagggccctactcgaacccctactcgaccccctactcaggtccgtacccagcagctgccccaccactctcagctccaaactatcccacgatctccaggcctcttatatgccgctttggataccagatggatgaaagcaaccaatgtgtggatgtggacgagtgtgcaacagattcccaccagtgcaaccccacccagatctgcatcaatactgaaggcgggtacacctgctcctgcaccgacggatattggcttctggaaggccagtgcttagacattgatgaatgtcgctatggttactgccagcagctctgtgcgaatgttcctggatcctattcttgtacatgcaaccctggttttaccctcaatgaggatggaaggtcttgccaagatgtgaacgagtgtgccaccgagaacccctgcgtgcaaacctgcgtcaacacctacggctctttcatctgccgctgtgacccaggatatgaacttgaggaagatggcgttcattgcagtgatatggacgagtgcagcttctctgagttcctctgccaacatgagtgtgtgaaccagcccggcacatacttctgctcctgccctccaggctacatcctgctggatgacaaccgaagctgccaagacatcaacgaatgtgagcacaggaaccacacgtgcaacctgcagcagacgtgctacaatttacaagggggcttcaaatgcattgaccccatccgctgtgaggagccttatctgaggatcagtgataaccgctgtatgtgtcctgctgagaaccctggctgcagagaccagccctttaccatcttgtaccgggacatggacgtggtgtcaggacgctccgttcccgctgacatcttccaaatgcaagccacgacccgctaccctggggcctattacattttccagatcaaatctgggaatgagggcagagaattttacatgcggcaaacgggccccatcagtgccaccctggtgatgacacgccccatcaaagggccccgggaaatccagctggacttggaaatgatcactgtcaacactgtcatcaacttcagaggcagctccgtgatccgactgcggatatatgtgtcgcagtacccattctgagcctcgggctggagcctccgacgctgcctctcattggcaccaagggacaggagaagagaggaaataacagagagaatgagagcgacacagacgttaggcatttcctgctgaacgtttccccgaagagtcagccccgacttcctgactctcacctgtactattgcagacctgtcaccctgca

SEQ ID NO: 134539 - DNA, 1479 bp, Homo sapiens
  Payload ID: 6285
  Gene Symbol: FBLN7
  Gene Name: fibulin 7
  ENST ID: ENST00000272559
  CDS Start-End: 1-786
gcgggctccgccaggacactggggacagcacggggaggacatggggcggggaaggggctctcacccaccgccctcctgccggcacgggtggcttcctgcgcgcggtctcagaaggcctggccactttgcattatagacgtgaacgagtgtgagctctacgggcaggaggggcgcccccggctctgcatgcacgcctgcgtgaacaccccgggctcttaccgttgcacctgccccggtggataccgaactctggctgacgggaagagctgtgaggatgtggatgaatgtgtgggcctgcagccggtgtgcccccaggggaccacatgcatcaacaccggtggaagcttccagtgtgtcagccctgagtgccccgagggcagcggcaatgtgagctacgtgaagacgtctccattccagtgtgagcggaacccctgccccatggacagcaggccctgccgccatctgcccaagaccatctccttccattacctctctctgccttccaacctgaagacgcccatcacgctcttccgcatggccacagcctctgcccccggccgagctgggcccaacagcctgcggtttgggatcgtgggtgggaacagccgcggccactttgtgatgcagcgttcagaccggcagactggggatctgatccttgtgcagaacctggaggggcctcagacgctggaggtggacgtcgacatgtcggaatacctggaccgctccttccaggccaaccacgtgtccaaggtcaccatctttgtatccccctatgacttctgagggtacacaggggcactggggtgtggagagctgacctcatttctcttccccgaaggctcagcttcgggcaccgactgcgtggagcctcccgcctgttcccgccctctcaccagtgcacccaggcttctagggcagcgttgcacggcgccccatggaatagcacggaagagcagccacaaaactcaactgctgccatcactctttttttttttctgctttgaggcccttcccttagattatgcactaactttcttaaaactttttcatccaggggatgggtggctttccaaaatgctgtgcaaatggccttgtgagtttgaactagctggggagagaaaaggtggcaatgtgtgtcaggtgactatcagcccttctgcctttttgtagccaggcttgctatgaatgaaacggttctagtcgtgcggggggccctagtcatgcctctgcgcatgtggcataggaagtggagtctcctcccatgacccagcacgttgttcttatctgccttttcctctgtgacatgcctgcctgcctgccttctcatcagagagtcacaggagggccttaaaccccacgcagatccttctagaccaaggacccattgttaaaagcatggattctgcctgagttacttcccttttgagaaatcatatctcaaatacataacctggtaatataactgaaaaaataaaa

SEQ ID NO: 134540 - DNA, 2301 bp, Homo sapiens
  Payload ID: 6285
  Gene Symbol: FBLN7
  Gene Name: fibulin 7
  Uniprot ID: Q53RD9
  ENST ID: ENST00000331203
  CDS Start-End: 272-1591
cttagcccaggggccggcgcctccccgcctcgcgcggactgtctcgtgcgggcagctgcgggcgcacctggaccctcgcaaggcccgggcggcgccgatccccgcgggacgcgctgcgctcggggcctcccgcctccccccctgccccagccgccccccggccgcgcggcgccccgcaccctgcagggacggctgccgcatcgctgggacaaactcggcagcggaggcaaagttatttcccctcccaggcagcgggattccgactggcaagatggtgcccagctctccgcgcgcgctcttccttctgctcctgatcctcgcctgccccgagccgcgggcttcccagaactgtctcagcaaacagcagctcctctcggccatccgccagctgcagcagctgctgaagggccaggagacacgcttcgccgagggcatccgccacatgaagagccggctggccgcgctgcagaactctgtgggcagggtgggcccagatgcccttccagtttcctgcccggctctgaacacccccgcagacggcagaaagtttggaagcaagtacttagtggatcacgaagtccattttacctgcaaccctgggttccggctggtcgggcccagcagcgtggtgtgtcttcccaatggcacctggacaggggagcagccccactgtagaggtatcagtgaatgctccagccagccttgtcaaaatggtggtacatgtgtagaaggagtcaaccagtacagatgcatttgtcctccaggaaggactgggaaccgctgtcagcatcaggcccagactgccgcccccgagggcagcgtggccggcgactccgccttcagccgcgcgccgcgctgtgcgcaggtggagcgggctcagcactgcagctgcgaggccggattccacctgagcggcgccgccggcgacagcgtctgccaggacgtgaacgagtgtgagctctacgggcaggaggggcgcccccggctctgcatgcacgcctgcgtgaacaccccgggctcttaccgttgcacctgccccggtggataccgaactctggctgacgggaagagctgtgaggatgtggatgaatgtgtgggcctgcagccggtgtgcccccaggggaccacatgcatcaacaccggtggaagcttccagtgtgtcagccctgagtgccccgagggcagcggcaatgtgagctacgtgaagacgtctccattccagtgtgagcggaacccctgccccatggacagcaggccctgccgccatctgcccaagaccatctccttccattacctctctctgccttccaacctgaagacgcccatcacgctcttccgcatggccacagcctctgcccccggccgagctgggcccaacagcctgcggtttgggatcgtgggtgggaacagccgcggccactttgtgatgcagcgttcagaccggcagactggggatctgatccttgtgcagaacctggaggggcctcagacgctggaggtggacgtcgacatgtcggaatacctggaccgctccttccaggccaaccacgtgtccaaggtcaccatctttgtatccccctatgacttctgagggtacacaggggcactggggtgtggagagctgacctcatttctcttccccgaaggctcagcttcgggcaccgactgcgtggagcctcccgcctgttcccgccctctcaccagtgcacccaggcttctagggcagcgttgcacggcgccccatggaatagcacggaagagcagccacaaaactcaactgctgccatcactctttttttttttctgctttgaggcccttcccttagattatgcactaactttcttaaaactttttcatccaggggatgggtggctttccaaaatgctgtgcaaatggccttgtgagtttgaactagctggggagagaaaaggtggcaatgtgtgtcaggtgactatcagcccttctgcctttttgtagccaggcttgctatgaatgaaacggttctagtcgtgcggggggccctagtcatgcctctgcgcatgtggcataggaagtggagtctcctcccatgacccagcacgttgttcttatctgccttttcctctgtgacatgcctgcctgcctgccttctcatcagagagtcacaggagggccttaaaccccacgcagatccttctagaccaaggacccattgttaaaagcatggattctgcctgagttacttcccttttgagaaatcatatctcaaatacataacctggtaatataactgaaaaaataaaagtgattgctccttcctg

SEQ ID NO: 134541 - DNA, 1989 bp, Homo sapiens
  Payload ID: 6285
  Gene Symbol: FBLN7
  Gene Name: fibulin 7
  ENST ID: ENST00000409903
  CDS Start-End: 231-1331
tctcgtgcgggcagctgcgggcgcacctggaccctcgcaaggcccgggcggcgccgatccccgcgggacgcgctgcgctcggggcctcccgcctccccccctgccccagccgccccccggccgcgcggcgccccgcaccctgcagggacggctgccgcatcgctgggacaaactcggcagcggaggcaaagttatttcccctcccaggcagcgggattccgactggcaagatggtgcccagctctccgcgcgcgctcttccttctgctcctgatcctcgcctgccccgagccgcgggcttcccagaactgtctcagcaaacagcagctcctctcggccatccgccagctgcagcagctgctgaagggccaggagacacgcttcgccgagggcatccgccacatgaagagccggctggccgcgctgcagaactctgtgggcagggtgggcccagatgcccttccagtttcctgcccggctctgaacacccccgcagacggcagaaagtttggaagcaagtacttagtggatcacgaagtccattttacctgcaaccctgggttccggctggtcgggcccagcagcgtggtgtgtcttcccaatggcacctggacaggggagcagccccactgtagaggtatcagtgaatgctccagccagccttgtcaaaatggtggtacatgtgtagaaggagtcaaccagtacagatgcatttgtcctccaggaaggactgggaaccgctgtcagcatcaggcccagactgccgcccccgagggcagcgtggccggcgactccgccttcagccgcgcgccgcgctgtgcgcaggtggagcgggctcagcactgcagctgcgaggccggattccacctgagcggcgccgccggcgacagcgtctgccaggacgtgaacgagtgtgagctctacgggcaggaggggcgcccccggctctgcatgcacgcctgcgtgaacaccccgggctcttaccgttgcacctgccccggtggataccgaactctggctgacgggaagagctgtgaggatgtggatgaatgtgtgggcctgcagccggtgtgcccccaggggaccacatgcatcaacaccggtggaagcttccagtgtgtcagccctgagtgccccgagggcagcggcaatgtgagctacgtgaagacgtctccattaacctggaggggcctcagacgctggaggtggacgtcgacatgtcggaatacctggaccgctccttccaggccaaccacgtgtccaaggtcaccatctttgtatccccctatgacttctgagggtacacaggggcactggggtgtggagagctgacctcatttctcttccccgaaggctcagcttcgggcaccgactgcgtggagcctcccgcctgttcccgccctctcaccagtgcacccaggcttctagggcagcgttgcacggcgccccatggaatagcacggaagagcagccacaaaactcaactgctgccatcactctttttttttttctgctttgaggcccttcccttagattatgcactaactttcttaaaactttttcatccaggggatgggtggctttccaaaatgctgtgcaaatggccttgtgagtttgaactagctggggagagaaaaggtggcaatgtgtgtcaggtgactatcagcccttctgcctttttgtagccaggcttgctatgaatgaaacggttctagtcgtgcggggggccctagtcatgcctctgcgcatgtggcataggaagtggagtctcctcccatgacccagcacgttgttcttatctgccttttcctctgtgacatgcctgcctgcctgccttctcatcagagagtcacaggagggccttaaaccccacgcagatccttctagaccaaggacccattgttaaaagcatggattctgcctgagttacttcccttttgagaaatcatatctcaaatacataacctggtaatataactgaaaaaataaa

SEQ ID NO: 134542 - DNA, 1124 bp, Homo sapiens
  Payload ID: 6285
  Gene Symbol: FBLN7
  Gene Name: fibulin 7
  Uniprot ID: Q53RD9
  ENST ID: ENST00000409667
  CDS Start-End: 74-991
catcgctgggacaaactcggcagcggaggcaaagttatttcccctcccaggcagcgggattccgactggcaagatggtgcccagctctccgcgcgcgctcttccttctgctcctgatcctcgcctgccccgagccgcgggcttcccagaactgtctcagcaaacagcagctcctctcggccatccgccagctgcagcagctgctgaagggccaggagacacgcttcgccgagggcatccgccacatgaagagccggctggccgcgctgcagaactctgtgggcagggtgggcccagatgcccttccagtttcctgcccggctctgaacacccccgcagacggcagaaagtttggaagcaagtacttagtggatcacgaagtccattttacctgcaaccctgggttccggctggtcgggcccagcagcgtggtgtgtcttcccaatggcacctggacaggggagcagccccactgtagagatgtggatgaatgtgtgggcctgcagccggtgtgcccccaggggaccacatgcatcaacaccggtggaagcttccagtgtgtcagccctgagtgccccgagggcagcggcaatgtgagctacgtgaagacgtctccattccagtgtgagcggaacccctgccccatggacagcaggccctgccgccatctgcccaagaccatctccttccattacctctctctgccttccaacctgaagacgcccatcacgctcttccgcatggccacagcctctgcccccggccgagctgggcccaacagcctgcggtttgggatcgtgggtgggaacagccgcggccactttgtgatgcagcgttcagaccggcagactggggatctgatccttgtgcagaacctggaggggcctcagacgctggaggtggacgtcgacatgtcggaatacctggaccgctccttccaggccaaccacgtgtccaaggtcaccatctttgtatccccctatgacttctgagggtacacaggggcactggggtgtggagagctgacctcatttctcttccccgaaggctcagcttcgggcaccgactgcgtggagcctcccgcctgttcccgccctctcaccagtgcacccaggcttctagggc

SEQ ID NO: 134543 - DNA, 1394 bp, Homo sapiens
  Payload ID: 6285
  Gene Symbol: FBLN7
  Gene Name: fibulin 7
  Uniprot ID: Q53RD9
  ENST ID: ENST00000409450
  CDS Start-End: 74-1255
catcgctgggacaaactcggcagcggaggcaaagttatttcccctcccaggcagcgggattccgactggcaagatggtgcccagctctccgcgcgcgctcttccttctgctcctgatcctcgcctgccccgagccgcgggcttcccagaactgtctcagcaaacagcagctcctctcggccatccgccagctgcagcagctgctgaagggccaggagacacgcttcgccgagggcatccgccacatgaagagccggctggccgcgctgcagaactctgtgggcagggtgggcccagatgcccttccagtttcctgcccggctctgaacacccccgcagacggcagaaagtttggaagcaagtacttagtggatcacgaagtccattttacctgcaaccctgggttccggctggtcgggcccagcagcgtggtgtgtcttcccaatggcacctggacaggggagcagccccactgtagaggtatcagtgaatgctccagccagccttgtcaaaatggtggtacatgtgtagaaggagtcaaccagtacagatgcatttgtcctccaggaaggactgggaaccgctgtcagcatcaggcccagactgacgtgaacgagtgtgagctctacgggcaggaggggcgcccccggctctgcatgcacgcctgcgtgaacaccccgggctcttaccgttgcacctgccccggtggataccgaactctggctgacgggaagagctgtgaggatgtggatgaatgtgtgggcctgcagccggtgtgcccccaggggaccacatgcatcaacaccggtggaagcttccagtgtgtcagccctgagtgccccgagggcagcggcaatgtgagctacgtgaagacgtctccattccagtgtgagcggaacccctgccccatggacagcaggccctgccgccatctgcccaagaccatctccttccattacctctctctgccttccaacctgaagacgcccatcacgctcttccgcatggccacagcctctgcccccggccgagctgggcccaacagcctgcggtttgggatcgtgggtgggaacagccgcggccactttgtgatgcagcgttcagaccggcagactggggatctgatccttgtgcagaacctggaggggcctcagacgctggaggtggacgtcgacatgtcggaatacctggaccgctccttccaggccaaccacgtgtccaaggtcaccatctttgtatccccctatgacttctgagggtacacaggggcactggggtgtggagagctgacctcatttctcttccccgaaggctcagcttcgggcaccgactgcgtggagcctcccgcctgttcccgccctctcaccagtgcacccaggcttctagggcagcgtt

SEQ ID NO: 134544 - DNA, 819 bp, Homo sapiens
  Payload ID: 6285
  Gene Symbol: FBLN7
  Gene Name: fibulin 7
  ENST ID: ENST00000441565
  CDS Start-End: 1-819
cgcttcgccgagggcatccgccacatgaagagccggctggccgcgctgcagaactctgtgggcagggtgggcccagatgcccttccaggtatcagtgaatgctccagccagccttgtcaaaatggtggtacatgtgtagaaggagtcaaccagtacagatgcatttgtcctccaggaaggactgggaaccgctgtcagcatcaggcccagactgccgcccccgagggcagcgtggccggcgactccgccttcagccgcgcgccgcgctgtgcgcaggtggagcgggctcagcactgcagctgcgaggccggattccacctgagcggcgccgccggcgacagcgtctgccaggacgtgaacgagtgtgagctctacgggcaggaggggcgcccccggctctgcatgcacgcctgcgtgaacaccccgggctcttaccgttgcacctgccccggtggataccgaactctggctgacgggaagagctgtgaggatgtggatgaatgtgtgggcctgcagccggtgtgcccccaggggaccacatgcatcaacaccggtggaagcttccagtgtgtcagccctgagtgccccgagggcagcggcaatgtgagctacgtgaagacgtctccattccagtgtgagcggaacccctgccccatggacagcaggccctgccgccatctgcccaagaccatctccttccattacctctctctgccttccaacctgaagacgcccatcacgctcttccgcatggccacagcctctgcccccggccgagctgggcccaacagcctgcggtttgggatcgtgggtgggaac

SEQ ID NO: 134545 - DNA, 1816 bp, Homo sapiens
  Payload ID: 6286
  Gene Symbol: FICD
  Gene Name: FIC domain containing
  ENST ID: ENST00000361549
  CDS Start-End: 105-647
gctgggagcgcggggaaggcggttggggttctgacagctgcgcgcgatcctgctctctctcagccgcctgtggacatgcgcaaagggccctctcctgagtccagatgatgctcataccaatggcttcagtgatggcggtgactgaaccgaaatgggtctcggtctggagccgcttcctctgggtgacgctgctgagcatggtgctggggtccctgctggccctgctgctgccgctgggggctgtggaggagcagtgcttggctgtgctcaaaggcctctacctgctcaggagcaaaccggacagggcgcagcatgccgccaccaagtgcaccagcccgtccacggagctcagcatcacctccaggggcgcgacgctgctggtggccaagaccaaggcctctccagaaagcaggaggctaggaagccaaggaggtgcctcccagaatacaagagagtggctctggggacacacggatagtgactgcataccaccacacggctggggcaacagagtggtaccgggcatgttgagtacacacgatgcggctgcaacaagctcctcaaggccagggacacaggctggtcatcatggtttcctgcggagaccagcacaggggacagccccccgaatgtcctctgccccctagcctccctccctcacagcgcttctttggctctcttccagcgggtaagttggaagccagagctgccctgaaccaggccctggagatgaagcgccagggcaagcgggaaaaagcccaaaagctcttcatgcacgccctcaagatggacccggacttcgtggacgcgctcaccgagtttggcatcttctcggaagaagacaaggacatcatccaggcggactacttgtacaccagagcattgaccatctcaccctaccatgagaaagcactggtcaaccgcgatcggacactgcctcttgtggaagagatcgaccagaggtatttcagcatcatcgacagcaaagtgaagaaggtcatgtccatccccaaggggaactcagctctgcgcagggtcatggaggagacctactaccatcacatctaccacacagtggccatcgagggcaacaccctcaccctctcggaaatcaggcacatcctggagacccgctacgccgtgcccgggaagagcctggaggagcagaacgaggtcataggcatgcatgcagccatgaagtacatcaacacgactctggtttcgcgcatcggctccgtcaccatcagcgacgtgctggagatccacaggcgggtgctgggctacgtggaccccgtggaagccggcaggtttcggacaacacaggtcctggtcggacaccacatccctccccatccgcaggatgtggaaaagcagatgcaggagtttgtacagtggctcaactccgaggaagccatgaacctgcacccagtggagtttgcagccttagcccattataaactcgtttacatccaccctttcattgatggcaacgggaggacctcccgtctgctcatgaacctcatcctcatgcaggcgggctacccgcccatcaccatccgcaaggagcagcggtccgactactaccacgtgttggaagctgccaacgagggcgacgtgaggcctttcattcgcttcatcgccaagtgtactgagaccaccctggacaccctgctttttgccacaactgagtactcggtggcactgccagaagcccaacccaaccactctgggttcaaggagacgcttcctgtgaagccctaaccctagaaatcctcagtgacaaaggctgtcctgaggtaggaaaaaaaaaaagaaa

SEQ ID NO: 134546 - DNA, 3347 bp, Homo sapiens
  Payload ID: 6286
  Gene Symbol: FICD
  Gene Name: FIC domain containing
  Uniprot ID: Q9BVA6
  ENST ID: ENST00000552695
  CDS Start-End: 236-1612
aaatgcgagggaaggacaagtggggaaagccaatccgccgcgacgagggctgcgggcggttcaatggcaagtcgccgggggcggggccagaggccggcggagaaggaggacccgggagccggcggcccggagctgggagcgcggggaaggcggttggggttctgacagctgcgcgcgatcctgctctctctcagccgcctgtggacatgcgcaaagggccctctcctgagtccagatgatgctcataccaatggcttcagtgatggcggtgactgaaccgaaatgggtctcggtctggagccgcttcctctgggtgacgctgctgagcatggtgctggggtccctgctggccctgctgctgccgctgggggctgtggaggagcagtgcttggctgtgctcaaaggcctctacctgctcaggagcaaaccggacagggcgcagcatgccgccaccaagtgcaccagcccgtccacggagctcagcatcacctccaggggcgcgacgctgctggtggccaagaccaaggcctctccagcgggtaagttggaagccagagctgccctgaaccaggccctggagatgaagcgccagggcaagcgggaaaaagcccaaaagctcttcatgcacgccctcaagatggacccggacttcgtggacgcgctcaccgagtttggcatcttctcggaagaagacaaggacatcatccaggcggactacttgtacaccagagcattgaccatctcaccctaccatgagaaagcactggtcaaccgcgatcggacactgcctcttgtggaagagatcgaccagaggtatttcagcatcatcgacagcaaagtgaagaaggtcatgtccatccccaaggggaactcagctctgcgcagggtcatggaggagacctactaccatcacatctaccacacagtggccatcgagggcaacaccctcaccctctcggaaatcaggcacatcctggagacccgctacgccgtgcccgggaagagcctggaggagcagaacgaggtcataggcatgcatgcagccatgaagtacatcaacacgactctggtttcgcgcatcggctccgtcaccatcagcgacgtgctggagatccacaggcgggtgctgggctacgtggaccccgtggaagccggcaggtttcggacaacacaggtcctggtcggacaccacatccctccccatccgcaggatgtggaaaagcagatgcaggagtttgtacagtggctcaactccgaggaagccatgaacctgcacccagtggagtttgcagccttagcccattataaactcgtttacatccaccctttcattgatggcaacgggaggacctcccgtctgctcatgaacctcatcctcatgcaggcgggctacccgcccatcaccatccgcaaggagcagcggtccgactactaccacgtgttggaagctgccaacgagggcgacgtgaggcctttcattcgcttcatcgccaagtgtactgagaccaccctggacaccctgctttttgccacaactgagtactcggtggcactgccagaagcccaacccaaccactctgggttcaaggagacgcttcctgtgaagccctaaccctagaaatcctcagtgacaaaggctgtcctgaggtaggaaaaaaaaaaagaaacagcatttctagaaacctagtcacttcctaaagcaaaaggagaaacattctttacctccaaatgttttagttttaaaaaaaaaaaaaaactaagttatgaagccttgtctctaaaataacttataattcaaccaagctatttattttcttctttggagcaagctagtcagtattgtatggtgtctgctgtgtcttgctggtggccgtgctttaggggcaacagtgccaccatgtgaccagaacaaaggttctggagcagaatttgcactaaggtggaggagcggccaagaggtgtgggacggggcccagagccactgacataactcctccaagtgcttctctgaaacaggctgagaggttctgtgactgcaactgggaagtcagacccaagtcgcagctgagagaaatggttgaaagctcactttctcaaggtttagattagtggtgactaacttccaagcaaacttcatagaagagaaaatgaatgccgacattccttacttacctgcaggaagactttttgagccatagtttgcaaactttagtgccagcagctgtttttttttttttttttttcatattgagactatttttctaattaagaatagggggtagccataaagagctgtatgttggagggggaaacatggtgggcgggcagtttggttttctttgtgtatccgcgtttctctcacacttcatttgtagcaactcaggccagatgttttcgtctgaaattctctgggcttgtcattccacctgtatcgtgctgcaaaccaggtgttatgctagtaggcatctgccctcacccctctgcctgagttttctgtaggcagatgttaacctgagaaaacaagtgccatgtggacaccaagtaagcatttttgataatgaattagagcaccagtttctactgaatggagcaaaaaccttcagccatggccaggctgcatccctttggtcctggagtttcatctacttactgccatcttccacggtctttgcactgtcccgtgtcccatccccctgggaggcagaagagattgcctcggagtggccttatttttctcgcaacttgtgaaatgatgtagtgctctatgtaatatggccgggtttccaagctgtcatccaatggaagtagaatcttctctttgaatcatatggtacaggtgccaatatgactgctgctatttagagtcagagaggtggaagtcactgggtccctttcccagtgacagagcccatgatgtctaacactactgcactttgtcagtgtgtgagtgatggcgaatacgcagtgttgtctctttgatttggtaattccgttcctgacagtaatgaggccactgctctaaagtagtttatacagttcttcagttgtataaatagcacagagtagtttttgaaaggttaagaaaaataagtgaaaagacatacacgatatatgaaatggctccaaatgataattgttcaaacctttataaaatgtgttttcgtactcttatgctgccagaggtacttcttaaaactcttctcgtcttggttttataagcacaccacggaggtctgacagatgtgcttgcttctactacagagcaagagaatttgcactttagctatatgtgaaggatattattttaacaaattcctgattctaataaagttattttattacatgaa

SEQ ID NO: 134547 - DNA, 603 bp, Homo sapiens
  Payload ID: 6286
  Gene Symbol: FICD
  Gene Name: FIC domain containing
  ENST ID: ENST00000552758
  CDS Start-End: 121-540
gagccggcggcccggagctgggagcgcggggaaggcggttggggttctgacagctgcgcgcgatcctgctctctctcagccgcctgtggacatgcgcaaagggccctctcctgagtccagatgatgctcataccaatggcttcagtgatggcggtgactgaaccgaaatgggtctcggtctggagccgcttcctctgggtgacgctgctgagcatggtgctggggtccctgctggccctgctgctgccgctgggggctgtggaggagcagtgcttggctgtgctcaaaggcctctacctgctcaggagcaaaccggacagggcgcagcatgccgccaccaagtgcaccagcccgtccacggagctcagcatcacctccaggggcgcgacgctgctggtggccaagaccaaggcctctccaggtaagacagactggccgtcttcctcaatgcttgttaactggatagacagacatagaatgtgtcatgtcctgtatgtggggcatcggggtattgtgaacaagtcagccctgagctcctagtatagacaaggtgatgtgactgagacagtgtcacaagtgtggtgatggggaagcataaagggc

SEQ ID NO: 134548 - DNA, 397 bp, Homo sapiens
  Payload ID: 6286
  Gene Symbol: FICD
  Gene Name: FIC domain containing
  ENST ID: ENST00000549641
  CDS Start-End: 1-170
agtgcttggctgtgctcaaaggcctctacctgctcaggagcaaaccggacagggcgcagcatgccgccaccaagtgcaccagcccgtccacggagctcagcatcacctccaggggcgcgacgctgctggtggccaagaccaaggcctctccagggaagtgctgtacctgaacacctataggaagaaggaagacagagaaaaaccatgattcgaggcatgacccagctcacctgactcctctgacaccagccttgtccccatgagcagcccagccaggcagactagagccaagccatgctctgaaacttgttaatggggccaccggagcgagtcacttaacctctccaggcctccatgtcttcctctgtaaaacggcaagaataaaagtaaccattca

SEQ ID NO: 134549 - DNA, 943 bp, Homo sapiens
  Payload ID: 6287
  Gene Symbol: FCN2
  Gene Name: ficolin (collagen/fibrinogen domain containing lectin) 2
  Uniprot ID: Q15485
  ENST ID: ENST00000350339
  CDS Start-End: 11-838
accagaagagatggagctggacagagctgtgggggtcctgggcgctgccaccctgctgctctctttcctgggcatggcctgggctctccaggcggcagacacctgtccaggagaacgtggcccccctggacctcctgggaaggcaggaccacctgggcccaacggagcacctggggagccccagccgtgcctgacaggcccgcgtacctgcaaggacctgctagaccgagggcacttcctgagcggctggcacaccatctacctgcccgactgccggcccctgactgtgctctgtgacatggacacggacggagggggctggaccgttttccagcggagggtggatggctctgtggacttctaccgggactgggccacgtacaagcagggcttcggcagtcggctgggggagttctggctggggaatgacaacatccacgccctgaccgcccagggaaccagcgagctccgtgtagacctggtggactttgaggacaactaccagtttgctaagtacagatcattcaaggtggccgacgaggcggagaagtacaatctggtcctgggggccttcgtggagggcagtgcgggagattccctgacgttccacaacaaccagtccttctccaccaaagaccaggacaatgatcttaacaccggaaattgtgctgtgatgtttcagggagcttggtggtacaaaaactgccatgtgtcaaacctgaatggtcgctacctcagggggactcatggcagctttgcaaatggcatcaactggaagtcggggaaaggatacaattatagctacaaggtgtcagagatgaaggtgcgacctgcctagcccaggccggcctcagggtcaggacgcctccacacatagttggttggggggtagggttgggagcttggccctacggtttgtaaaagaaacacatgtcgtgattct

SEQ ID NO: 134550 - DNA, 1057 bp, Homo sapiens
  Payload ID: 6287
  Gene Symbol: FCN2
  Gene Name: ficolin (collagen/fibrinogen domain containing lectin) 2
  Uniprot ID: Q15485
  ENST ID: ENST00000291744
  CDS Start-End: 11-952
accagaagagatggagctggacagagctgtgggggtcctgggcgctgccaccctgctgctctctttcctgggcatggcctgggctctccaggcggcagacacctgtccagaggtgaagatggtgggcctggagggctctgacaagctcaccattctccgaggctgtccggggctgcctggggcccctgggcccaagggagaggcaggcaccaatggaaagagaggagaacgtggcccccctggacctcctgggaaggcaggaccacctgggcccaacggagcacctggggagccccagccgtgcctgacaggcccgcgtacctgcaaggacctgctagaccgagggcacttcctgagcggctggcacaccatctacctgcccgactgccggcccctgactgtgctctgtgacatggacacggacggagggggctggaccgttttccagcggagggtggatggctctgtggacttctaccgggactgggccacgtacaagcagggcttcggcagtcggctgggggagttctggctggggaatgacaacatccacgccctgaccgcccagggaaccagcgagctccgtgtagacctggtggactttgaggacaactaccagtttgctaagtacagatcattcaaggtggccgacgaggcggagaagtacaatctggtcctgggggccttcgtggagggcagtgcgggagattccctgacgttccacaacaaccagtccttctccaccaaagaccaggacaatgatcttaacaccggaaattgtgctgtgatgtttcagggagcttggtggtacaaaaactgccatgtgtcaaacctgaatggtcgctacctcagggggactcatggcagctttgcaaatggcatcaactggaagtcggggaaaggatacaattatagctacaaggtgtcagagatgaaggtgcgacctgcctagcccaggccggcctcagggtcaggacgcctccacacatagttggttggggggtagggttgggagcttggccctacggtttgtaaaagaaacacatgtcgtgattct

SEQ ID NO: 134551 - DNA, 1286 bp, Homo sapiens
  Payload ID: 6288
  Gene Symbol: FCN1
  Gene Name: ficolin (collagen/fibrinogen domain containing) 1
  Uniprot ID: O00602
  ENST ID: ENST00000371806
  CDS Start-End: 93-1073
cagggagttgagaaactgtggcacaaggcgagagctggtttcctctgccctgttagagctgggggactcttcagagtcaaaggccagagagcatggagctgagtggagccaccatggcccgggggctcgctgtcctgctagtcttgttcctgcatatcaagaacctgcctgcccaggctgcggacacatgtccagaggtgaaggtggtgggcctggagggctctgacaagctcaccattctccgaggctgcccggggctgcccggggccccagggccaaagggagaggcaggtgtcattggagagagaggagaacgcggtctccctggagcccctggaaaggcaggaccagtggggcccaaaggagaccgaggagagaaggggatgcgtggagagaaaggagacgctgggcagtctcagtcgtgtgcgacaggcccacgcaactgcaaggacctgctagaccgggggtatttcctgagcggctggcacaccatctacctgcccgactgccggcccctgactgtgctctgtgacatggacacggacggagggggctggaccgttttccagcggaggatggatggctctgtggacttctatcgggactgggccgcatacaagcagggcttcggcagtcagctgggggagttctggctggggaatgacaacatccacgccctgactgcccagggaagcagcgagctccgtgtagacctggtggactttgagggcaaccaccagtttgctaagtacaaatcattcaaggtggctgacgaggcagagaagtacaagctggtactgggagcctttgtcgggggcagtgcgggtaattctctaacgggccacaacaacaacttcttctccaccaaagaccaagacaatgatgtgagttcttcgaattgtgctgagaagttccaaggagcctggtggtacgccgactgtcatgcttcaaacctcaatggtctctacctcatgggaccccatgagagctatgccaatggtatcaactggagtgcggcgaaggggtacaaatatagctacaaggtgtcagagatgaaggtgcggcccgcctagacgggccaggacccctccacatgcacctgctagtggggaggccacacccacaagcgctgcgtcgtggaagtcaccccatttccccagccagacacactcccatgacgcccacagctgcccctttgcccccagctcagtcaagccgccacatgcccacaacctcaccagagggagaattatgtttctaaatatgtttactttgggacagaaaag

SEQ ID NO: 134552 - DNA, 4369 bp, Homo sapiens
  Payload ID: 6288
  Gene Symbol: FCN1
  Gene Name: ficolin (collagen/fibrinogen domain containing) 1
  ENST ID: ENST00000616356
  CDS Start-End: 7-1089
gagagcatggagctgagtggagccaccatggcccgggggctcgctgtcctgctagtcttgttcctgcatatcaagaacctgcctgcccaggctgcggacacatgtccagaggtgaaggtggtgggcctggagggctctgacaagctcaccattctccgaggctgcccggggctgcccggggccccagggccaaagggagaggcaggtgtcattggagagagaggagaacgcggtctccctggagcccctggaaaggcaggaccagtggggcccaaaggagaccgaggagagaaggggatgcgtggagagaaaggagacgctgggcagtctcagtcgtgtgcgacaggcccacgcaactgcaaggacctgctagaccgggggtatttcctgagcggctggcacaccatctacctgcccgactgccggcccctgactgtgctctgtgacatggacacggacggagggggctggaccgttttccagcggaggatggatggctctgtggacttctatcgggactgggccgcatacaagcagggcttcggcagccagacacactcccatgacgcccacagctgcccctttgcccccagctcagtcaagccgccacatgcccacaacctcaccagagggagaattatgtttctaaatatgtttactttgggacagaaaagttttaccagtttcaatgtgtgtttcttgaacaccagtggttttgatcactttcctgtgtctgttgcacggcaggtctttccctggaatttggtaagtcgggaagagtcaggacccttatttagcagatggcactaccgatgttcagggaggttgagtgacttttgcgaggattttccacctccagtaattgacacagggcgatcctcacctccacccccaagcctcccccatccccccatgcctcactcacaacacttcacacttcttgaaaaaggtcactttggggtccagaaaacacttactaaaaagggggaaagtttagtaggaacttttctgcttcccaccacggcagagttcatgctttgggctggctggctgctgggaagagataaacacttagcactcactaagtgagcgcctggtcagccacctgcacagagaagattccgaagaggccttcctcccacacacagacctcagctagaggggaccgcggacctcagtgggaaaagctgcacaaggcttctaggagatgatggagaaggggcttctccagctcccaggccaggggagatttctcaaccacgacctaagaagcatcaaagggaatgtggcaagtgtgactccattcaaatcaagagctcccacttaccgaaggacactaagggaaccaaaggaaggccagaggggcagaatcaacgtgcggcacacaaatctttagttttctactattgccgcaaccagtcaccacaaatggagtggcttgaaacaacaagaactcgccacctcctggctcagtagatctggagtccctgggccttactgggccagcaggcaggactcagcagtggtggctccttccagggttctaggggagaacctgcttccttgccttttccagccccaggggtcactggcattcattggcccggactccttcccccaaccccaaagccagcagcaccacatctctctgacccttcatccgttgtcccctctccccccaagccccatgggacagggtctccactcctgagactcatgggattagactaggcctacctggatgatctgggatcctctcccatgtccaggtctctatccctaaccacatcagcaaagtctcttttgccatggaaggtatttgcaggctctgactttgtgtgtattagggcaggacatttttggcggggcagtggtgggggcagggaattattctgcctaccatgccttatacaaaaataaataaatcacaggcttatacctgaaagaattcctgcaaataataaaagaattagagcagctcagttaaataaaaaaaggtatgagatgtgaacagacacttcacagaagatgacatgcaggggagcaaggtatttatcaaaaagtgctccacttttcacttaccagagaaatgcaaatcagcacccaaaggagtcactgcggcaccctcatctgagcctcagaagttagaaagatggatagcaccagtgtcaaaggtgactgtgggagggagatttgcatacactgctagtaacaatgcgaattgatggaaccaacctggaaaatggcttggcatcaactgttggagaagaagacacacagtcctctaacctgccagtcccacatcagggcctggatatggccgtcatgtgtaccagggagcatggccaggaatctttacagccaaatactcaccatagcaccaaactggaatcagccgacatacccatcaggaagagaatggatgttaaaaaatgcaaggatagccattgggtagaacgccatacagccatgacaattacacagtgacacctacacacaaggagcatgagtctcacaaacatggcagcaaaaggagcctgttcaagagggtatgtgctatggattccattgtagataaagtttttcaaaagcaaaagtagccaatggtattttggatgcatatttaggtggtaaatgtatacaggaaaaataagaaagtgattgtatttgagggtgggaccacatggtgactgggaagggacagggacaagcctctggggttctggcaatgctctgtttcttgacccaggtggtgattgtaaggatgtttgttaactagtgatgaaaataattaagctgtacttttgctttatacacttttgagtacatgttatgttccacaatttaaaaactacttataaagaaactgcacatgcttggatccaggaacatgagctacaggcacatcctccactgatgcccagtgttcttgactcaatacctgtaaggagaggtccttgtagcccattgggggctgaccagaccctactacgcccctgccacaatctctagtccatcacaaaatccactattgggatagtactttcgtccctcagtaggtaagcatttttacaacctaggaagacttagctttaagtctagaaatgattagtataaatataaaatataaatatgattaatataaatataaaatagccatagaaatatgccttttagtttgttttttgagacagagttttactctgccacccaggctggagtgcagtggcgtgatctcagctcactgcaatctccacctcccaggttcaagagattctcatgcttcagcctcccaagtagctgggatcacaggcacacacaaccatgcccagcaatttttttgtatttttagtagagatggggtttcgccgtgttggccaggctggtcttgaactcccgacctcaagtgatccacccgcctctgcctcccaaattgctgagattacaggcgtgagacactgtgcctggccaaaatatgccttttgtattaaggaatctggacaggtttgatttttcacagtcttgtaatgtttaaataatttggcctattatgaagaatctcacaaatccaatataaaatgtggaactaactaatcaaaatcatcttgtaatattacatggaaatcttagtgcgtttatacacggtattggcatatttaagagactttgagctcattgcatttctaagttaaattattagatttcttaagatttaagttaaattattagatttttaaagattaattagtgctaaggagggttttctcattagacagctgaaatgccgcaggagaaatttgagtgtattccacttcttattgcaattttaaatgtttgaagttatttaaagaactaaatttatggtatccaaaagctctaaaaaggtgactcttaagatttgcaggtcttataaatagaaaaacaagaactgtaagccaaacttaaaatattcaggatgaattgagtttttgaatttgtagctttcagaaactgaacattaattttaagaagcaaagcaggctgggcacagtggctcacgcctgtaatcctagcactttaggaggctgaagtgggtggatcacttgagatcaggagttcaagaccagcctggccaacatgatgaaacctcctctctactaaaaatacaaaactccgccagaaatcgcttgatcccgggaggtggaggttgcagtgagctgagatcgtgccactgcactccagcctggggaacagagcgagattccgcctcaaaaaaaaaataaaaataaaaagaagaagaagaagaaggagaaagagggagagggagagggagagggagagggagagggagagggagaagaagaagaagaagaagaagaagaagaagaag

SEQ ID NO: 134553 - DNA, 1030 bp, Homo sapiens
  Payload ID: 6289
  Gene Symbol: FCN3
  Gene Name: ficolin (collagen/fibrinogen domain containing) 3
  Uniprot ID: O75636
  ENST ID: ENST00000270879
  CDS Start-End: 7-906
agcaagatggatctactgtggatcctgccctccctgtggcttctcctgcttggggggcctgcctgcctgaagacccaggaacaccccagctgcccaggacccagggaactggaagccagcaaagttgtcctcctgcccagttgtcccggagctccaggaagtcctggggagaagggagccccaggtcctcaagggccacctggaccaccaggcaagatgggccccaagggtgagccaggagatccagtgaacctgctccggtgccaggaaggccccagaaactgccgggagctgttgagccagggcgccaccttgagcggctggtaccatctgtgcctacctgagggcagggccctcccagtcttttgtgacatggacaccgaggggggcggctggctggtgtttcagaggcgccaggatggttctgtggatttcttccgctcttggtcctcctacagagcaggttttgggaaccaagagtctgaattctggctgggaaatgagaatttgcaccagcttactctccagggtaactgggagctgcgggtagagctggaagactttaatggtaaccgtactttcgcccactatgcgaccttccgcctcctcggtgaggtagaccactaccagctggcactgggcaagttctcagagggcactgcaggggattccctgagcctccacagtgggaggccctttaccacctatgacgctgaccacgattcaagcaacagcaactgtgcagtgattgtccacggtgcctggtggtatgcatcctgttaccgatcaaatctcaatggtcgctatgcagtgtctgaggctgccgcccacaaatatggcattgactgggcctcaggccgtggtgtgggccacccctaccgcagggttcggatgatgcttcgatagggcactctggcagccagtgcccttatctctcctgtacagcttccggatcgtcagccaccttgcctttgccaaccacctctgcttgcctgtccacatttaaaaataaaatcattttagccctttc

SEQ ID NO: 134554 - DNA, 997 bp, Homo sapiens
  Payload ID: 6289
  Gene Symbol: FCN3
  Gene Name: ficolin (collagen/fibrinogen domain containing) 3
  Uniprot ID: O75636
  ENST ID: ENST00000354982
  CDS Start-End: 7-873
agcaagatggatctactgtggatcctgccctccctgtggcttctcctgcttggggggcctgcctgcctgaagacccaggaacaccccagctgcccaggacccagggaactggaagccagcaaagttgtcctcctgcccagttgtcccggagctccaggaagtcctggggagaagggagccccaggtcctcaagggccacctggaccaccaggcaagatgggccccaagggtgagccaggccccagaaactgccgggagctgttgagccagggcgccaccttgagcggctggtaccatctgtgcctacctgagggcagggccctcccagtcttttgtgacatggacaccgaggggggcggctggctggtgtttcagaggcgccaggatggttctgtggatttcttccgctcttggtcctcctacagagcaggttttgggaaccaagagtctgaattctggctgggaaatgagaatttgcaccagcttactctccagggtaactgggagctgcgggtagagctggaagactttaatggtaaccgtactttcgcccactatgcgaccttccgcctcctcggtgaggtagaccactaccagctggcactgggcaagttctcagagggcactgcaggggattccctgagcctccacagtgggaggccctttaccacctatgacgctgaccacgattcaagcaacagcaactgtgcagtgattgtccacggtgcctggtggtatgcatcctgttaccgatcaaatctcaatggtcgctatgcagtgtctgaggctgccgcccacaaatatggcattgactgggcctcaggccgtggtgtgggccacccctaccgcagggttcggatgatgcttcgatagggcactctggcagccagtgcccttatctctcctgtacagcttccggatcgtcagccaccttgcctttgccaaccacctctgcttgcctgtccacatttaaaaataaaatcattttagccctttc

SEQ ID NO: 134555 - DNA, 9536 bp, Homo sapiens
  Payload ID: 6290
  Gene Symbol: FIGN
  Gene Name: fidgetin
  Uniprot ID: Q5HY92
  ENST ID: ENST00000333129
  CDS Start-End: 316-2595
ttttgggtttgaaattccaacatggcagaggctgcagtccgtcttcccttcaaaaacttggaatgatttcaaatcataggcaccttcacttaaccctagcttccattcatcagcaaacacatcggatcgatgctacgctaacctatcgggttctctctccgcgcgttcaggttaaatgaatacctgacgaaagggcccacgtttcaaggcagtgacatttgatagctgagaggaaaagtggctttaatgaaaagcaacctttggaattcctgcttgtgagaaatccaattcagctttttgtgctgccagcaagaaatgatcagtagcaccagtgtttatggcttgaagatgcagtggacgccagagcatgcccagtggccagaacagcactttgacatcacctcaaccactcggtctcctgcccacaaagttgaagcctacagaggtcatctgcagcgcacctatcagtacgcctgggcgaatgatgacatatctgctctgactgcatccaacctactaaaaaaatatgcagagaagtattccggcattttggaaggtcctgtggaccgacccgtactcagcaactattcggacacaccatcaggactagtgaacggtcggaaaaatgaaagtgaaccctggcagccttccttgaattcagaagctgtttatcccatgaactgtgttccggatgttatcactgccagcaaagctggagtcagttcagccctccctccagcagatgtctctgcgagtataggaagctctcctggggtagccagcaacctgacagaacctagttattcaagtagtacctgtggaagccacactgtacccagtcttcatgcagggctcccatctcaggaatatgccccaggatacaacggatcatatttgcattctacttatagtagccagccagcacctgcacttccttcacctcatccgtctcctttgcatagctctgggctactacagcccccaccaccacctcctccgccaccagccttggtcccaggctacaatgggacttctaacctctccagttacagctatccgtctgctagctatcctcctcagactgctgtggggtctgggtacagccctgggggggcaccgcctccgccttcagcgtacctgccttcaggaattcctgctcccacccccctaccccccaccactgttcctggctacacctaccagggccatggtttgacacctattgcaccgtcggctctgacaaacagttcagcaagttctctcaaaaggaaagctttctacatggcagggcaaggagatatggactccagttatggaaattacagctatggccaacagagatctacacagagtcctatgtacagaatgcccgacaacagcatttcaaacacaaatcgggggaatggctttgacagaagtgctgaaacatcatccttagcatttaagccaacgaagcagctaatgtcctctgaacagcaaaggaaattcagcagccagtccagtagggctctgacccctccttcctacagtactgctaaaaattcattgggatcaagatccagtgaatcctttgggaagtacacatcgccagtaatgagtgagcatggggacgagcacaggcagctcctctctcacccaatgcaaggccctggactccgtgcagctacctcatccaaccactctgtggacgagcaactgaagaatactgacacgcacctcatcgacctggtaaccaatgagattatcacccaaggacctccagtggactggaatgacattgctggtctcgacctggtgaaggctgtcattaaagaggaggttttatggccagtgttgaggtcagacgcgttcagtggactgacggccttacctcggagcatccttttatttggacctcgggggacaggcaaaacattattgggcagatgcatcgctagtcagctgggggccacatttttcaaaattgccggttctggactagtcgccaagtggttaggagaagcagagaaaattatccatgcctcttttcttgtggccaggtgtcgccagccctcggtgatttttgttagtgacattgacatgcttctctcctctcaagtgaatgaggaacatagtccagtcagtcggatgagaaccgaatttctgatgcaactggacactgtactaacttcggctgaggaccaaatcgtagtaatttgtgccaccagtaaaccagaagaaatagatgaatcccttcggaggtacttcatgaaacgacttttaatcccacttcctgacagcacagcgaggcaccagataatagtacaactgctctcacagcacaattactgtctcaatgacaaggagtttgcactgctcgtccagcgcacagaaggcttttctggactagatgtggctcatttgtgtcaggaagcagtggtgggccccctccatgccatgccagccacagacctttcagccattatgcccagccagttgaggcccgttacatatcaagactttgaaaatgctttctgcaagattcagcctagcatatctcaaaaggagcttgatatgtatgttgaatggaacaaaatgtttggttgcagtcagtgataacttctttagaaaaaaaaaatgtaatgaatgttggcacacacacataaaacctgctacatagggaatagagcccctttccagtagagtttaaattgcaaagggtactggggaagatgacgattaagttgcatctttagagtcagggtagatttggaggaaaagtgcatcaaatgagagcttctgatttgaaagccccagatgacagaaagcatatgtggatgctcagttctgttcaagctagacaacactcaccaaggagcaaggtgcaagtgtgttgatttcagaaggacatgaacctcgtgtgttgattccattctgctgttctcgagatttagttgctgtcaagtgcctggagtggtgctttattttttgtttgcctcacaattacattggtggcatgtgctaatataaagagctttaacttcaaacattattggactaaagagatgaacagttgtgttatgacagaaaaccagatttttgccattttaagagcaacagtattcctcaatcctgtctgttctgcagtattaagctaagaacaggtaaaacagggtaacggtaatctggaccttaatttctgcagttcatttcttttaatgttcttgtctgcaaaaactcaggaaagtgattgtgatttgtacagtacctcaaaggaatgtgttgaaagcactatgtactgctgagagtaataggataggcttcaatgttactttatattaaaatgtatgtttacctcaacaattggaaaatagcaaggaaaattactttgaatgtatccagaaaaatactgaagtgtgatacaactgaatatttacagtttaaagtagaaatggaaggatttttttaagttcttttactaattatggggaattaaccagagcagaataattctttatgtcaataactgcaagagttcttagtacattgctccttgataattaagtgaaaatgttcttaaaaggtacactggttaattgaaagctacttattcagtttgtgttagtgtctagacctgtcagccacaagacctgtttaggaccctgaaagtcacagtacctaaaaactatgactgcctttttattgcataggtggtagtggtggtgatggtggtggtagtttgcaagttatctcttaaaactgctgggaatggtgtcattctattcactaatctagcttatagacttgccgtgctgtttgatagaatgcagaggatagcaaccaaaacaaatacacaaataaataaaaacaaaaaccaaccaacaaaccaacttacatacacatatatatatccacaaagaacctctccatctcctccccttctttttgactccactcttgtcagtgcaattttgcttctcattttgaaatctgggctgtagtgctcctgctttatttctacctcagttttgttacatttctcttggaaagtaaagtagaaaattggaagtggacacacacactgcaatgtagcttgccaaacatgttactttgttttcttccatctttcaccgtaaatctagtttccaaagacatcagcatttgtgcttacttccacctcagtctaccagccccacccctacccatggcataagtggcatttttcttaatttcctatttttctcctgctctctgtcaagttgttctttgtatcctttaatgctttatgtgcaacctttcattgatagtgggctgatgtttggcaatgcttctgaactgtcacagagcaggctgtagctttccacagccactgcccatgcataagcagaacagcctggccttttgaatgtattttcctgggttttttccccttttctttttttagtttagagatgcagtaacaaaactgttgcaaagcactggcattttatgtattcaataaataagtgatgtacatttttaaaaaaatttaaataaatgcaatgagaagccccaagaaaggcctttctgttttttttttcttacaaaaatttttaccgatcttatccacaatatccaattctctgaaacacttaacatagagaaagctcatgagggatttcttatctctgaaattttatgatgcttgatctttactcccctttttttattttttatgttgctaaaaactgagcaattgaaccagaatttaatttactgtgacattctgtcaattaaagctgtgcttaaatataaatattccatattaaaaagcagtgcctttcattaaggatacaaaaaataatacttaaatacgccctctgcttttcgcaagtgaataaatgctacaatcgtgttctgggtctaccctgtgcatcccttgtaaggaaattctaatatccacattaacttgtaggttcatattgatctcactgacaagtttacttttgcacagtgctgacctattttctgacttttagacattatatttcatttccgccaacatgctgtgttcacttgaaagcgtctggcaagttttgacaaacccagtcttatttagacaactttggaaaatccaatattgacccacatttttttgtggctagtaagatttaatgccaaatatatgactgcactattgtgttttacactcatttataaaactgaaaataaattgaagtcatacatcttggcttttagctttaagtgacttaaaaattagaactctgagtgacttaaaaattaatttgagatgcaagtggtcaaaaatccatgtatttagacagaagctgaagtcgtatgtgattttcatttagcctcacaaaatccaagatttgatctcttaggaaattgggcatgttgaagaaatgaagatctgttggaggagatatggctgacctttgagtagatagtgctctcctgtgattctttgattctgcatggcagcattatgagctcttctataaactagcttaataatgagctctattctgaccatctattctggaacttggagtgggggtggggtaccacatcctcagaagtgaatgtgtacagtcggtgatagtacaactgagtaatggggcttcatacccttggcctctttttgactgctaagaatttggagaaggctattaatgaaggtaaggtaatgagccagtccaaatccctcactgtctggctaagagattgagccattccactttacagcccctaattcccttcttcccaactgcagcaacatttccaacagggacaaaaaggaagtgaaggaaaccacttcagtattgggatcaatagaaattcaagaggtagttcataatgaccttatatgtgacacaaatggaaatactctacacttctggcatgcttctctcccaaatatttagaacattagtgacaatatgaaaaactttgctgactgagctgatcaatggaatgtgaaggcagtatactttaaggctatttactttcacacagaatgtttatctattagtcagtttgtattctactcaaatgcagatagacgggtataatgttttcttgtgcatttgaaacctatcaaggagaaaataaaccattccactaaaatacataggccaaacaccatctgggaaagtgataaaagctatccagaggctatgctatgtaaaatagcaaggtcaatttacatgggttgcatagtacttggctatgcagttttcaaaagaacacatccaaaaaaaaaaaaaatccaaattagttcctataataggtctttgtaaatttaaatatatttgtgggttggaaaatacgtttttagagacatttagaatttctttctctaaaaatgtatccaactccaagcagaaagagacttctgtactcacattctcatgtttcttagaattgggtagcatgatcattgaatctgtattttgcaaagtgaaagggacgcagcttgttgaactattgaggccactaaagtaaagttctaatatatatatataaatataaaattagtgtgtgtgtttgtatgtgtgtatgtgtgtgtgttctttcatcaccacctagttgaactttaaaacagacgtctacttttcattattcagaagcaacttgttacttcctttcttcatatgtgcagagatacacatgatcatgttacaatttgaagtgttttaatgtgtttttttttcttttgaaacgtaaagccttcagttgttgaatcatctgccgatttttatatgaagcacattagcaaacctggagctattagtatttcagaattcacaaccagctgtacttgtgactaaccaacacatgaactgaagctcacactttgctaagacctttggttgacattcgattttgaacctgccagatgcatttgtgtgaaccagggatactgcatctttaatgaacaagtctctcctctttcccctgtttttaaatacaacacaagcagtgtagcactaggcactgcaattgtcaaagacaattagactggaagcaggaaaatttcacctccctgtctcagtgatatgtagaatgtcggcagcatgggtcagccttgccacagagttgtgtgagaatatatgaatcagtcctatagaatgttaaatatttataaaatggttctgtagtacaccaaggttgggagcacattcattccttcttgttgtcttatgatacaaaaaaaaaaaaaaaaaaagcaaaagtttatttctgggcttaaaactctccctctaatatctctctctcttttacccccattccccaaccattcttctctccatccctctcctctcctcttcctctctcttctctctctctctctctctctctgtctctaactctcgctctctcttgtatgtgggtgtgtgtgtgtatgagtttccactgtggattatatacacttgctagagaatattcatttcttttttttcttttttcatctgatgtatattcaaacattgttctttataaccatttctacctcattgctacatattgtacatgtagtatttatttgttgtctttttttgaatgtcatgcatttcgtaagaaaaagacttgtccttgaacttgaacagtctacctcagaaagactgtctttacactgaacagtattagcaacctaaatgataagacgcattagtgaagtgtggcagggtagataatgcacgagtacttgggatactgatggacttttaattgtattcataacacaagactgcttaaaagaacttaaaagaaattatgcactgtgtaggtcttcatcgaggtcccatttgggacattatatacagaatagagctttattcctatgtgcccatctctgagaaatgtgttagcattcccaagtattttacactggcaatctggctacttaagacaaacaaattcaaacaacatttttatattttgactgacaccctcagctcctaaatttaagagaaataatggtacttaactattttcaactatagtcttcagtgattgaaaatgccttcattttaattctgtgactcctgatataaattaagaaaaacaatgcagttgcaagggcctgcacaacactgaaaataaaccaaaaattaaaaatggcacttcccaaaggaattaacaaacgtggagtcatggtgcttgcaagttccataactgaaagcattttgtttctgatttccctttataacatgtatttgtttattgaagcaattgtacaactaatggcacattgaattactttgtatgaagtgttttatattatactatttattttagcattcgttctttttcttcaccagctctatattacagtagcaaaagaacacttagttttaaaaaatgctgaaaggggttcaccacccacccaatcgatgaatggacttttgaagttgcttgtcagcaaattgtggatattttacaaaagcaaatgaactgtgacaatccacaactcccacagatgtgaattcagaaatgcatctgaaactccggtatgcctgacaatctattctttaagtttcattaacaaagtggcatccaatcctttcacttacaattccttgcaggaatgtattgtctagaggctgtctagtagtgattaagagagggtttttgttttgttttatttgtttactgtattaggtgaggaatgccatatttcttgtcagccaacagtacttgtctgagacagaaatttaaaaaaagaaaaagaaacctaactaattaaaatttctgtgcactttgcttccctgaccatattgattttatttgcttaaattgaaacaatacgctggatttgaccagattttgaccccttgaaagaagaaaagccctatatagtacatgtttctttgggttattctagtactgtttccttatttgttctgcaaatttcaaatcatttttttgtgtgcattattttacatctgctgaaactaaatgtgttattattgcactcattaaaaatgaaacaatccatttctcttggaaaaaaatgacaagctttagatgatgaaagcttaaattatccatcacttgcaaaatgaattcatataatttgtgaacattattaatgtaaatgagacatttctgcttagattttttttattttgatgggatcattatatggttgatcatatgtgtgtaggaagctgctgtacaattaacttggagatctgaaaatgctttttgtcctcattgttgcagtttcaattgtaatccattgcatctcattttcttgggtgttggcactgtaatatattaaaaaaaaattcagtgctcagtattgtaacaactgtccctactgaatattccttttcataaatacttgctaccacagggaaattaagttttcatatagaataactagtttcagtagtaaccattgaagaattaaaaatgtggttcaaggcagatatttttatgaaaagttttctctattgtaaaatttgttgtatatggctatgctactatcatggaataagaaaagaacaagcatacctcaaataaaaaaaaattctgagttaaaaaaa

SEQ ID NO: 134556 - DNA, 746 bp, Homo sapiens
  Payload ID: 6290
  Gene Symbol: FIGN
  Gene Name: fidgetin
  ENST ID: ENST00000409634
  CDS Start-End: 321-410
agctgttttgggtttgaaattccaacatggcagaggctgcagtccgtcttcccttcaaaaacttggaatgatttcaaatcataggcaccttcacttaaccctagcttccattcatcagcaaacacatcggatcgatgctacgctaacctatcgggttctctctccgcgcgttcaggttaaatgaatacctgacgaaagggcccacgtttcaaggcagtgacatttgatagctgagaggaaaagtggctttaatgaaaagcaacctttggaattcctgcttgtgagaaatccaattcagctttttgtgctgccagcaagaaatgatcagtagcaccagtgtttatgcaacatggagacaatgttttcctgcattcttcattccagaagctgatggaggaaaggccctatgagctgtgggctggctctataggccccactgtactttagggaattccagtagcaaaggaataaaatcattttagtcactatgcactaatgtttccgttggtaaaacctctagccttcagttctatttgtacagtctttaatagtcaacctcatttttcttattttgaaaaaaatgttcttccctctaccttgtctttaaacccagtctatttcctgggacaggtctacatcattaaactgcagatggttctttttctattaagcagcaggtatcattcttgtcctgacaggaggaggctccacctgctgccggcccaccaatacttccagctgactgc

SEQ ID NO: 134557 - DNA, 3471 bp, Homo sapiens
  Payload ID: 6291
  Gene Symbol: FIGNL1
  Gene Name: fidgetin-like 1
  Uniprot ID: Q6PIW4
  ENST ID: ENST00000356889
  CDS Start-End: 312-2336
gccagcgtcccacaccagccgcaggtgaaaaccggcagaaagacattaagagattttcctgcagtcactgctggcagatgatagagccaggatttgaaagcaggcagcctggctccagaccctgtgctcttaactcccgttttgcatcaagaacagaatcctatgaaaggcttgcacagtgcttggtactgagatagcagcatcaaggagcattgtgtacatgcagaagtgcacagtacctggagtgaaactgcttgtgttcgatttctgataccattcataactggctgtgtgatctcaaaacctctaaaatgcagacctccagctctagatctgtgcacctgagtgaatggcagaagaattacttcgcaattacatctggcatatgtaccggaccgaaggcagatgcataccgtgcacagatattacgcattcagtatgcatgggcaaactctgagatttcccaggtctgtgctaccaaactgttcaaaaaatatgcagagaaatattctgcaattattgattctgacaatgttgaatctgggttgaataattatgcagaaaacattttaactttggcaggatctcaacaaacagatagtgacaagtggcagtctggattgtcaataaataatgttttcaaaatgagtagtgtacagaagatgatgcaagctggcaaaaaattcaaagactctctgttggaacctgctcttgcatcagtggtaatccataaggaggccactgtctttgatcttcctaaatttagtgtttgtggtagttctcaagagagtgactcattacctaactcagctcatgatcgagaccggacccaagacttcccggagagcaatcgtttgaaactccttcagaatgcccagccacctatggtgactaacactgctaggacttgtcctacattctcagcacctgtaggtgagtcagctactgcaaaattccatgtcacaccattgtttggaaatgtcaaaaaggaaaatcacagctctgcaaaagaaaacataggacttaatgtgttcttatctaaccagtcttgttttcctgctgcctgtgaaaatccacagaggaagtctttttatggttctggcaccattgatgcactttccaatccaatactgaataaggcttgtagtaaaacagaagataatggcccaaaggaggatagcagcctgcctacatttaaaactgcaaaagaacaattatgggtagatcagcaaaaaaagtaccaccaacctcagcgtgcatcagggtcttcatatggtggtgtaaaaaagtctctaggagctagtagatcccgagggatacttggaaagtttgttcctcctatacccaagcaagatgggggagagcagaatggaggaatgcaatgtaagccttatggggcaggacctacagaaccagcacatccagttgatgagcgtctgaagaacttggagccaaagatgattgaacttattatgaatgagattatggatcatggacctccagtaaattgggaagatattgcaggagtagaatttgctaaagccaccataaaggaaatagttgtgtggcccatgttgaggccagacatctttactggtttaaggggaccccctaaaggaattttgctctttggtcctcctgggactggtaaaactctaattggcaagtgcattgctagtcagtctggggcaacattctttagcatctctgcttcatccttaacttctaaatgggtaggtgagggggagaaaatggtccgtgcattgtttgctgttgcaaggtgtcagcaaccagctgtgatatttattgacgaaattgattccttgttatctcaacggggagatggtgagcatgaatcttctagaaggataaaaacagaatttttagttcaattagatggagcaacaacatcttctgaagatcgtatcctagtggtgggagcaacaaatcggccacaagaaattgatgaggctgcccggagaagattggtgaaaaggctttatattcccctcccagaagcttcagccaggaaacagatagtaattaatctaatgtccaaagagcagtgttgcctcagtgaagaagaaattgaacagattgtacagcagtctgatgcgttttcaggagcagacatgacacagctttgcagggaggcttctcttggtcctattcgcagtttacaaactgctgacattgctaccataacaccggatcaagttcgacccatagcttacattgattttgaaaatgcttttagaactgtgcgacctagtgtttctccaaaagatttagagctttatgaaaactggaacaaaacttttggttgtggaaagtaagtgggatacttggaatcaaggcatctctgtagtacagtcttctttattttttagcatagaaagttggggatgtgttaattgtatttttaagaatatattctaagttctgtacttcaaataatagcacagattttacatctgattgacatagtgtatgttaatgtaagttttgctttccagtgattacctgatacgtaagcctatttgaacaaagtgagaatgaacttttgtttctaagaagtctttatcttgaagctatataacatgaaaagtgagctcaaattttttttagttgaagattacatataaagttgtgtctgattaatattcatcttttattgaagaaagtgccttctgatggccacataattcttaatgtcagctagtataatggtttacatttggacaaagtattgcttagtgttatttaagtagatttaagatctcaaagctaaagtgccaatttttactttcttcagccaatttgttacctcttttatggtttttaatttttatcaggactaacattttcagaaatagcaaggtgtgatctagtattagattcacagaactgaaaggttaattaagaatgttggttattttcacgggagcgtgtgatatttaacattaatattttatttgacactacagcctgtaatactgctctctttcaaaaacaagttttcagatttttataacagacccattttgttttatgaaacatgttcattacagaaacatgagaaaatagagataagtaaaaagaataaaagtcactattatcctaccactttgcgggacacactattaatatttaagcatagattcttccagatgttttgttttatacagcagtaggattgtgtaatgtattctctcttgtagcctattcttcaaagcgtatcttcactttccatgttaacataaatgtccttttatgattgtctaggattccatggatggatggaatataattgagtcatctggtagagcgcatataggacaggacgctaggttgtttatcttttgtttattgtaaaggaactatgtgggatgcatttggtgatctttttaaaaaatgtataaatttcttgagtaattcctggattaaagaatatgcactttttaaagcttt

SEQ ID NO: 134558 - DNA, 3485 bp, Homo sapiens
  Payload ID: 6291
  Gene Symbol: FIGNL1
  Gene Name: fidgetin-like 1
  Uniprot ID: Q6PIW4
  ENST ID: ENST00000395556
  CDS Start-End: 331-2355
gtcagtccccgcgcttttcggaggctgccagcgtcccacaccagccgcaggtgaaaaccggcagaaagacattaagagattttcctgcagtcactgctggcagatgatagagccaggatttgaaagcaggcagcctggctccagaccctgtgctcttaactcccgttttgcatcaagaacagaatcctatgaaaggcttgcacagtgcttggatagcagcatcaaggagcattgtgtacatgcagaagtgcacagtacctggagtgaaactgcttgtgttcgatttctgataccattcataactggctgtgtgatctcaaaacctctaaaatgcagacctccagctctagatctgtgcacctgagtgaatggcagaagaattacttcgcaattacatctggcatatgtaccggaccgaaggcagatgcataccgtgcacagatattacgcattcagtatgcatgggcaaactctgagatttcccaggtctgtgctaccaaactgttcaaaaaatatgcagagaaatattctgcaattattgattctgacaatgttgaatctgggttgaataattatgcagaaaacattttaactttggcaggatctcaacaaacagatagtgacaagtggcagtctggattgtcaataaataatgttttcaaaatgagtagtgtacagaagatgatgcaagctggcaaaaaattcaaagactctctgttggaacctgctcttgcatcagtggtaatccataaggaggccactgtctttgatcttcctaaatttagtgtttgtggtagttctcaagagagtgactcattacctaactcagctcatgatcgagaccggacccaagacttcccggagagcaatcgtttgaaactccttcagaatgcccagccacctatggtgactaacactgctaggacttgtcctacattctcagcacctgtaggtgagtcagctactgcaaaattccatgtcacaccattgtttggaaatgtcaaaaaggaaaatcacagctctgcaaaagaaaacataggacttaatgtgttcttatctaaccagtcttgttttcctgctgcctgtgaaaatccacagaggaagtctttttatggttctggcaccattgatgcactttccaatccaatactgaataaggcttgtagtaaaacagaagataatggcccaaaggaggatagcagcctgcctacatttaaaactgcaaaagaacaattatgggtagatcagcaaaaaaagtaccaccaacctcagcgtgcatcagggtcttcatatggtggtgtaaaaaagtctctaggagctagtagatcccgagggatacttggaaagtttgttcctcctatacccaagcaagatgggggagagcagaatggaggaatgcaatgtaagccttatggggcaggacctacagaaccagcacatccagttgatgagcgtctgaagaacttggagccaaagatgattgaacttattatgaatgagattatggatcatggacctccagtaaattgggaagatattgcaggagtagaatttgctaaagccaccataaaggaaatagttgtgtggcccatgttgaggccagacatctttactggtttaaggggaccccctaaaggaattttgctctttggtcctcctgggactggtaaaactctaattggcaagtgcattgctagtcagtctggggcaacattctttagcatctctgcttcatccttaacttctaaatgggtaggtgagggggagaaaatggtccgtgcattgtttgctgttgcaaggtgtcagcaaccagctgtgatatttattgacgaaattgattccttgttatctcaacggggagatggtgagcatgaatcttctagaaggataaaaacagaatttttagttcaattagatggagcaacaacatcttctgaagatcgtatcctagtggtgggagcaacaaatcggccacaagaaattgatgaggctgcccggagaagattggtgaaaaggctttatattcccctcccagaagcttcagccaggaaacagatagtaattaatctaatgtccaaagagcagtgttgcctcagtgaagaagaaattgaacagattgtacagcagtctgatgcgttttcaggagcagacatgacacagctttgcagggaggcttctcttggtcctattcgcagtttacaaactgctgacattgctaccataacaccggatcaagttcgacccatagcttacattgattttgaaaatgcttttagaactgtgcgacctagtgtttctccaaaagatttagagctttatgaaaactggaacaaaacttttggttgtggaaagtaagtgggatacttggaatcaaggcatctctgtagtacagtcttctttattttttagcatagaaagttggggatgtgttaattgtatttttaagaatatattctaagttctgtacttcaaataatagcacagattttacatctgattgacatagtgtatgttaatgtaagttttgctttccagtgattacctgatacgtaagcctatttgaacaaagtgagaatgaacttttgtttctaagaagtctttatcttgaagctatataacatgaaaagtgagctcaaattttttttagttgaagattacatataaagttgtgtctgattaatattcatcttttattgaagaaagtgccttctgatggccacataattcttaatgtcagctagtataatggtttacatttggacaaagtattgcttagtgttatttaagtagatttaagatctcaaagctaaagtgccaatttttactttcttcagccaatttgttacctcttttatggtttttaatttttatcaggactaacattttcagaaatagcaaggtgtgatctagtattagattcacagaactgaaaggttaattaagaatgttggttattttcacgggagcgtgtgatatttaacattaatattttatttgacactacagcctgtaatactgctctctttcaaaaacaagttttcagatttttataacagacccattttgttttatgaaacatgttcattacagaaacatgagaaaatagagataagtaaaaagaataaaagtcactattatcctaccactttgcgggacacactattaatatttaagcatagattcttccagatgttttgttttatacagcagtaggattgtgtaatgtattctctcttgtagcctattcttcaaagcgtatcttcactttccatgttaacataaatgtccttttatgattgtctaggattccatggatggatggaatataattgagtcatctggtagagcgcatataggacaggacgctaggttgtttatcttttgtttattgtaaaggaactatgtgggatgcatttggtgatctttttaaaaaatgtataaatttcttgagtaattcctggattaaagaatatgcactttttaaa

SEQ ID NO: 134559 - DNA, 617 bp, Homo sapiens
  Payload ID: 6291
  Gene Symbol: FIGNL1
  Gene Name: fidgetin-like 1
  ENST ID: ENST00000440350
  CDS Start-End: 325-617
attttcctgcagtcactgctggcagatgatagagccaggatttgaaagcaggcagcctggctccagaccctgtgctcttaactcccgttttgcatcaagaacagaatcctatgaaaggatagcagcatcaaggagcattgtgtacatgcagaagtgcacagtacctggagtgaaactgcttgtgttcgatttctgataccattcataactggctgtgtgatctcaaataagaaaactgaagaaccagctgggcgcggtagctcacgcctgtaatcccagcactttgggaggctgaggcgggtggattacctgagaacctctaaaatgcagacctccagctctagatctgtgcacctgagtgaatggcagaagaattacttcgcaattacatctggcatatgtaccggaccgaaggcagatgcataccgtgcacagatattacgcattcagtatgcatgggcaaactctgagatttcccaggtctgtgctaccaaactgttcaaaaaatatgcagagaaatattctgcaattattgattctgacaatgttgaatctgggttgaataattatgcagaaaacattttaactttggcaggatctcaacaaacagatagtga

SEQ ID NO: 134560 - DNA, 559 bp, Homo sapiens
  Payload ID: 6291
  Gene Symbol: FIGNL1
  Gene Name: fidgetin-like 1
  ENST ID: ENST00000436590
  CDS Start-End: 184-559
cagaaccagactcatccaggattaggaagctggggcccggcgtggacggcaggctcggggccaggatagcagcatcaaggagcattgtgtacatgcagaagtgcacagtacctggagtgaaactgcttgtgttcgatttctgataccattcataactggctgtgtgatctcaaaacctctaaaatgcagacctccagctctagatctgtgcacctgagtgaatggcagaagaattacttcgcaattacatctggcatatgtaccggaccgaaggcagatgcataccgtgcacagatattacgcattcagtatgcatgggcaaactctgagatttcccaggtctgtgctaccaaactgttcaaaaaatatgcagagaaatattctgcaattattgattctgacaatgttgaatctgggttgaataattatgcagaaaacattttaactttggcaggatctcaacaaacagatagtgacaagtggcagtctggattgtcaataaataatgttttcaaaatgagtagtgtacagaagatgatgcaagctggcaaaaaattca

SEQ ID NO: 134561 - DNA, 3626 bp, Homo sapiens
  Payload ID: 6291
  Gene Symbol: FIGNL1
  Gene Name: fidgetin-like 1
  Uniprot ID: Q6PIW4
  ENST ID: ENST00000433017
  CDS Start-End: 816-2840
acggcgcgagtccgagggcgacagcagcgcgcaggcgcacgtcagtccccgcgcttttcggaggctgccagcgtcccacaccagccgcaggtgaaaaccggcagaaagacattaagagattttcctgcagtcactgctggcagatgatagagccaggatttgaaagcaggcagcctggctccagaccctgtgctcttaactcccgttttgcatcaagaacagaatcctatgaaaggcttgcacagtgcttggtactgagtaggcactccgtcagtattttagtagctattattccaaaggacactgtattctaggtactaagacaatgtgaatggaatggaaaacaattcctccctgcagaagccaactgtctaggaagacagataatgacattattaaaataatcagaacattggcaaaataaagaagattgaaatgcagttcatatgacagtgctaattaatcatactttttagatctaggaaaggccataaaggttaaattgacttggaaatggtaaacaagacaatggttgtgtcactgatcggtgatggccagtttttggttatccttatttgccatttaaatgattgaattgaaaggaagaagtaagacttggaagatgaatattgaaggaaaggtgaagatggaaaagagaagggggtttattctgagaacagtgactagaactctgaggatagcagcatcaaggagcattgtgtacatgcagaagtgcacagtacctggagtgaaactgcttgtgttcgatttctgataccattcataactggctgtgtgatctcaaaacctctaaaatgcagacctccagctctagatctgtgcacctgagtgaatggcagaagaattacttcgcaattacatctggcatatgtaccggaccgaaggcagatgcataccgtgcacagatattacgcattcagtatgcatgggcaaactctgagatttcccaggtctgtgctaccaaactgttcaaaaaatatgcagagaaatattctgcaattattgattctgacaatgttgaatctgggttgaataattatgcagaaaacattttaactttggcaggatctcaacaaacagatagtgacaagtggcagtctggattgtcaataaataatgttttcaaaatgagtagtgtacagaagatgatgcaagctggcaaaaaattcaaagactctctgttggaacctgctcttgcatcagtggtaatccataaggaggccactgtctttgatcttcctaaatttagtgtttgtggtagttctcaagagagtgactcattacctaactcagctcatgatcgagaccggacccaagacttcccggagagcaatcgtttgaaactccttcagaatgcccagccacctatggtgactaacactgctaggacttgtcctacattctcagcacctgtaggtgagtcagctactgcaaaattccatgtcacaccattgtttggaaatgtcaaaaaggaaaatcacagctctgcaaaagaaaacataggacttaatgtgttcttatctaaccagtcttgttttcctgctgcctgtgaaaatccacagaggaagtctttttatggttctggcaccattgatgcactttccaatccaatactgaataaggcttgtagtaaaacagaagataatggcccaaaggaggatagcagcctgcctacatttaaaactgcaaaagaacaattatgggtagatcagcaaaaaaagtaccaccaacctcagcgtgcatcagggtcttcatatggtggtgtaaaaaagtctctaggagctagtagatcccgagggatacttggaaagtttgttcctcctatacccaagcaagatgggggagagcagaatggaggaatgcaatgtaagccttatggggcaggacctacagaaccagcacatccagttgatgagcgtctgaagaacttggagccaaagatgattgaacttattatgaatgagattatggatcatggacctccagtaaattgggaagatattgcaggagtagaatttgctaaagccaccataaaggaaatagttgtgtggcccatgttgaggccagacatctttactggtttaaggggaccccctaaaggaattttgctctttggtcctcctgggactggtaaaactctaattggcaagtgcattgctagtcagtctggggcaacattctttagcatctctgcttcatccttaacttctaaatgggtaggtgagggggagaaaatggtccgtgcattgtttgctgttgcaaggtgtcagcaaccagctgtgatatttattgacgaaattgattccttgttatctcaacggggagatggtgagcatgaatcttctagaaggataaaaacagaatttttagttcaattagatggagcaacaacatcttctgaagatcgtatcctagtggtgggagcaacaaatcggccacaagaaattgatgaggctgcccggagaagattggtgaaaaggctttatattcccctcccagaagcttcagccaggaaacagatagtaattaatctaatgtccaaagagcagtgttgcctcagtgaagaagaaattgaacagattgtacagcagtctgatgcgttttcaggagcagacatgacacagctttgcagggaggcttctcttggtcctattcgcagtttacaaactgctgacattgctaccataacaccggatcaagttcgacccatagcttacattgattttgaaaatgcttttagaactgtgcgacctagtgtttctccaaaagatttagagctttatgaaaactggaacaaaacttttggttgtggaaagtaagtgggatacttggaatcaaggcatctctgtagtacagtcttctttattttttagcatagaaagttggggatgtgttaattgtatttttaagaatatattctaagttctgtacttcaaataatagcacagattttacatctgattgacatagtgtatgttaatgtaagttttgctttccagtgattacctgatacgtaagcctatttgaacaaagtgagaatgaacttttgtttctaagaagtctttatcttgaagctatataacatgaaaagtgagctcaaattttttttagttgaagattacatataaagttgtgtctgattaatattcatcttttattgaagaaagtgccttctgatggccacataattcttaatgtcagctagtataatggtttacatttggacaaagtattgcttagtgttatttaagtagatttaagatctcaaagctaaagtgccaatttttactttcttcagccaatttgttacctcttttatggtttttaatttttatcaggactaacattttcagaaatagcaaggtgtgatctagtattagattcacagaactgaaaggttaattaagaatgttggttattttcacgggagcgtgtgatatttaacattaatattttatttgacactacagcctgtaatactgctctctttcaaaaacaagttttcagatttttataacagacccattttgttttatgaaacatgttcattacagaaacatgagaaaatagagataagtaaaaagaataaaagtcactattatcct

SEQ ID NO: 134562 - DNA, 572 bp, Homo sapiens
  Payload ID: 6291
  Gene Symbol: FIGNL1
  Gene Name: fidgetin-like 1
  ENST ID: ENST00000448788
  CDS Start-End: 468-572
ttttcggaggctgccagcgtcccacaccagccgcaggtgaaaaccggcagaaagacattaagagattttcctgcagtcactgctggcagatgatagagccaggatttgaaagcaggcagcctggctccagaccctgtgctcttaactcccgttttgcatcaagaacagaatcctatgaaaggcttgcacagtgcttggtactgagtaggcactccgtcagtattttagtagctattattccaaaggacactgtattctaggatagcagcatcaaggagcattgtgtacatgcagaagtgcacagtacctggagtgaaactgcttgtgttcgatttctgataccattcataactggctgtgtgatctcaaataagaaaactgaagaaccagctgggcgcggtagctcacgcctgtaatcccagcactttgggaggctgaggcgggtggattacctgagaacctctaaaatgcagacctccagctctagatctgtgcacctgagtgaatggcagaagaattacttcgcaattacatctggcatatgtaccggaccgaaggcagatgcataccgt

SEQ ID NO: 134563 - DNA, 582 bp, Homo sapiens
  Payload ID: 6291
  Gene Symbol: FIGNL1
  Gene Name: fidgetin-like 1
  ENST ID: ENST00000422854
  CDS Start-End: 276-582
agcagcgcgcaggcgcacgtcagtccccgcgcttttcggaggctgccagcgtcccacaccagccgcaggatagcagcatcaaggagcattgtgtacatgcagaagtgcacagtacctggagtgaaactgcttgtgttcgatttctgataccattcataactggctgtgtgatctcaaataagaaaactgaagaaccagctgggcgcggtagctcacgcctgtaatcccagcactttgggaggctgaggcgggtggattacctgagaacctctaaaatgcagacctccagctctagatctgtgcacctgagtgaatggcagaagaattacttcgcaattacatctggcatatgtaccggaccgaaggcagatgcataccgtgcacagatattacgcattcagtatgcatgggcaaactctgagatttcccaggtctgtgctaccaaactgttcaaaaaatatgcagagaaatattctgcaattattgattctgacaatgttgaatctgggttgaataattatgcagaaaacattttaactttggcaggatctcaacaaacagatagtgacaagtggcagtctg

SEQ ID NO: 134564 - DNA, 582 bp, Homo sapiens
  Payload ID: 6291
  Gene Symbol: FIGNL1
  Gene Name: fidgetin-like 1
  ENST ID: ENST00000420829
  CDS Start-End: 423-582
ttttcggaggctgccagcgtcccacaccagccgcaggtgaaaaccggcagaaagacattaagagattttcctgcagtcactgctggcagatgatagagccaggatttgaaagcaggcagcctggctccagaccctgtgctcttaactcccgttttgcatcaagaacagaatcctatgaaaggcttgcacagtgcttggtactgagtaggcactccgatagcagcatcaaggagcattgtgtacatgcagaagtgcacagtacctggagtgaaactgcttgtgttcgatttctgataccattcataactggctgtgtgatctcaaataagaaaactgaagaaccagctgggcgcggtagctcacgcctgtaatcccagcactttgggaggctgaggcgggtggattacctgagaacctctaaaatgcagacctccagctctagatctgtgcacctgagtgaatggcagaagaattacttcgcaattacatctggcatatgtaccggaccgaaggcagatgcataccgtgcacagatattacgcattcagtatgcatgggcaaactctgagatttcccaggtct

SEQ ID NO: 134565 - DNA, 593 bp, Homo sapiens
  Payload ID: 6291
  Gene Symbol: FIGNL1
  Gene Name: fidgetin-like 1
  ENST ID: ENST00000435566
  CDS Start-End: 208-411
ggcgcgagtccgagggcgacagcagcgcgcaggcgcacgtcagtccccgcgcttttcggaggctgccagcgtcccacaccagccgcaggatagcagcatcaaggagcattgtgtacatgcagaagtgcacagtacctggagtgaaactgcttgtgttcgatttctgataccattcataactggctgtgtgatctcaaaacctctaaaatgcagacctccagctctagatctgtgcacctgagtgaatggcagaagaattacttcgcaattacatctggcatatgtaccggaccgaaggcagatgcataccgtgcacagatattacgcattcagtatgcatgggcaaactctgagatttcccaggatctcaacaaacagatagtgacaagtggcagtctggattgtcaataaataatgttttcaaaatgagtagtgtacagaagatgatgcaagctggcaaaaaattcaaagactctctgttggaacctgctcttgcatcagtggtaatccataaggaggccactgtctttgatcttcctaaatttagtgtttgtggtagttctcaagagagtgactcattacctaactcagct

SEQ ID NO: 134566 - DNA, 3700 bp, Homo sapiens
  Payload ID: 6291
  Gene Symbol: FIGNL1
  Gene Name: fidgetin-like 1
  Uniprot ID: Q6PIW4
  ENST ID: ENST00000419119
  CDS Start-End: 1555-3579
ggtgaaaaccggcagaaagacattaagagattttcctgcagtcactgctggcagatgatagagccaggatttgaaagcaggcagcctggctccagaccctgtgctcttaactcccgttttgcatcaagaacagaatcctatgaaaggcttgcacagtgcttggtactgagtaggcactccgtcagtattttagtagctattattccaaaggacactgtattctaggtactaagacaatgtgaatggaatggaaaacaattcctccctgcagaagccaactgtctaggaagacagataatgacattattaaaataatcagaacattggcaaaataaagaagattgaaatgcagttcatatgacagtgctaattaatcatactttttagatctaggaaaggccataaaggttaaattgacttggaaatggtaaacaagacaatggttgtgtcactgatcggtgatggccagtttttggttatccttatttgccatttaaatgattgaattgaaaggaagaagtaagacttggaagatgaatattgaaggaaaggtgaagatggaaaagagaagggggtttattctgagaacagtgactagaactctgaggtatggtagaaatttcaggataacagatgataaaggggaatgaagccatggagaggaagagaatgataatattaattgtgaaagtttgtgtcaagtgttttctgagtcacctttctttcagtttctcatttctagtattgtataaatgagtttaacatcaaaatggtatagtgaaaaaaaggatgaactgcttgacagaagaggtcagatctagttttgactctagcttatttagctttacagctttaaataaattacagtgtctttaaagctctggatcttaagttttctaattgttttttaaacaaagatttgtgaacacctacttacaatgtgacaaatgtctttgtaaggcattatgggagataaaagctgcattaaacctggctgttgtacttacaagtaatttggaaggcaaaatttcaaatacttgaacctaaagtagggtttcttggttttcatttaattgaaatactgttaggaaacaaaaatttttcataaatttttcttgtggatatgtaagtaaattctatatatctagcaatatgatacatctatagttctgtttaaaggtaacaatgtgaggaagcttatgcgaataacttgacagaagaaatctaaagtaaaagcattttcctagtaggctagcttgttctcttatttcatttattgtaacagtttcactttttaataattatgtgaaattaggaaacagatattctagggcattctgtttagggtgatgaacttattcatgaatgttattaaaaccatttaaatatgccatagtttaaatttgtgatccatgctgttcaatctgtgacctaggatagcagcatcaaggagcattgtgtacatgcagaagtgcacagtacctggagtgaaactgcttgtgttcgatttctgataccattcataactggctgtgtgatctcaaaacctctaaaatgcagacctccagctctagatctgtgcacctgagtgaatggcagaagaattacttcgcaattacatctggcatatgtaccggaccgaaggcagatgcataccgtgcacagatattacgcattcagtatgcatgggcaaactctgagatttcccaggtctgtgctaccaaactgttcaaaaaatatgcagagaaatattctgcaattattgattctgacaatgttgaatctgggttgaataattatgcagaaaacattttaactttggcaggatctcaacaaacagatagtgacaagtggcagtctggattgtcaataaataatgttttcaaaatgagtagtgtacagaagatgatgcaagctggcaaaaaattcaaagactctctgttggaacctgctcttgcatcagtggtaatccataaggaggccactgtctttgatcttcctaaatttagtgtttgtggtagttctcaagagagtgactcattacctaactcagctcatgatcgagaccggacccaagacttcccggagagcaatcgtttgaaactccttcagaatgcccagccacctatggtgactaacactgctaggacttgtcctacattctcagcacctgtaggtgagtcagctactgcaaaattccatgtcacaccattgtttggaaatgtcaaaaaggaaaatcacagctctgcaaaagaaaacataggacttaatgtgttcttatctaaccagtcttgttttcctgctgcctgtgaaaatccacagaggaagtctttttatggttctggcaccattgatgcactttccaatccaatactgaataaggcttgtagtaaaacagaagataatggcccaaaggaggatagcagcctgcctacatttaaaactgcaaaagaacaattatgggtagatcagcaaaaaaagtaccaccaacctcagcgtgcatcagggtcttcatatggtggtgtaaaaaagtctctaggagctagtagatcccgagggatacttggaaagtttgttcctcctatacccaagcaagatgggggagagcagaatggaggaatgcaatgtaagccttatggggcaggacctacagaaccagcacatccagttgatgagcgtctgaagaacttggagccaaagatgattgaacttattatgaatgagattatggatcatggacctccagtaaattgggaagatattgcaggagtagaatttgctaaagccaccataaaggaaatagttgtgtggcccatgttgaggccagacatctttactggtttaaggggaccccctaaaggaattttgctctttggtcctcctgggactggtaaaactctaattggcaagtgcattgctagtcagtctggggcaacattctttagcatctctgcttcatccttaacttctaaatgggtaggtgagggggagaaaatggtccgtgcattgtttgctgttgcaaggtgtcagcaaccagctgtgatatttattgacgaaattgattccttgttatctcaacggggagatggtgagcatgaatcttctagaaggataaaaacagaatttttagttcaattagatggagcaacaacatcttctgaagatcgtatcctagtggtgggagcaacaaatcggccacaagaaattgatgaggctgcccggagaagattggtgaaaaggctttatattcccctcccagaagcttcagccaggaaacagatagtaattaatctaatgtccaaagagcagtgttgcctcagtgaagaagaaattgaacagattgtacagcagtctgatgcgttttcaggagcagacatgacacagctttgcagggaggcttctcttggtcctattcgcagtttacaaactgctgacattgctaccataacaccggatcaagttcgacccatagcttacattgattttgaaaatgcttttagaactgtgcgacctagtgtttctccaaaagatttagagctttatgaaaactggaacaaaacttttggttgtggaaagtaagtgggatacttggaatcaaggcatctctgtagtacagtcttctttattttttagcatagaaagttggggatgtgttaattgtatttttaagaatatattctaagttctgtacttcaaataa

SEQ ID NO: 134567 - DNA, 3187 bp, Homo sapiens
  Payload ID: 6291
  Gene Symbol: FIGNL1
  Gene Name: fidgetin-like 1
  Uniprot ID: Q6PIW4
  ENST ID: ENST00000613602
  CDS Start-End: 29-2053
ctggctgtgtgatcgcagaacctctaaaatgcagacctccagctctagatctgtgcacctgagtgaatggcagaagaattacttcgcaattacatctggcatatgtaccggaccgaaggcagatgcataccgtgcacagatattacgcattcagtatgcatgggcaaactctgagatttcccaggtctgtgctaccaaactgttcaaaaaatatgcagagaaatattctgcaattattgattctgacaatgttgaatctgggttgaataattatgcagaaaacattttaactttggcaggatctcaacaaacagatagtgacaagtggcagtctggattgtcaataaataatgttttcaaaatgagtagtgtacagaagatgatgcaagctggcaaaaaattcaaagactctctgttggaacctgctcttgcatcagtggtaatccataaggaggccactgtctttgatcttcctaaatttagtgtttgtggtagttctcaagagagtgactcattacctaactcagctcatgatcgagaccggacccaagacttcccggagagcaatcgtttgaaactccttcagaatgcccagccacctatggtgactaacactgctaggacttgtcctacattctcagcacctgtaggtgagtcagctactgcaaaattccatgtcacaccattgtttggaaatgtcaaaaaggaaaatcacagctctgcaaaagaaaacataggacttaatgtgttcttatctaaccagtcttgttttcctgctgcctgtgaaaatccacagaggaagtctttttatggttctggcaccattgatgcactttccaatccaatactgaataaggcttgtagtaaaacagaagataatggcccaaaggaggatagcagcctgcctacatttaaaactgcaaaagaacaattatgggtagatcagcaaaaaaagtaccaccaacctcagcgtgcatcagggtcttcatatggtggtgtaaaaaagtctctaggagctagtagatcccgagggatacttggaaagtttgttcctcctatacccaagcaagatgggggagagcagaatggaggaatgcaatgtaagccttatggggcaggacctacagaaccagcacatccagttgatgagcgtctgaagaacttggagccaaagatgattgaacttattatgaatgagattatggatcatggacctccagtaaattgggaagatattgcaggagtagaatttgctaaagccaccataaaggaaatagttgtgtggcccatgttgaggccagacatctttactggtttaaggggaccccctaaaggaattttgctctttggtcctcctgggactggtaaaactctaattggcaagtgcattgctagtcagtctggggcaacattctttagcatctctgcttcatccttaacttctaaatgggtaggtgagggggagaaaatggtccgtgcattgtttgctgttgcaaggtgtcagcaaccagctgtgatatttattgacgaaattgattccttgttatctcaacggggagatggtgagcatgaatcttctagaaggataaaaacagaatttttagttcaattagatggagcaacaacatcttctgaagatcgtatcctagtggtgggagcaacaaatcggccacaagaaattgatgaggctgcccggagaagattggtgaaaaggctttatattcccctcccagaagcttcagccaggaaacagatagtaattaatctaatgtccaaagagcagtgttgcctcagtgaagaagaaattgaacagattgtacagcagtctgatgcgttttcaggagcagacatgacacagctttgcagggaggcttctcttggtcctattcgcagtttacaaactgctgacattgctaccataacaccggatcaagttcgacccatagcttacattgattttgaaaatgcttttagaactgtgcgacctagtgtttctccaaaagatttagagctttatgaaaactggaacaaaacttttggttgtggaaagtaagtgggatacttggaatcaaggcatctctgtagtacagtcttctttattttttagcatagaaagttggggatgtgttaattgtatttttaagaatatattctaagttctgtacttcaaataatagcacagattttacatctgattgacatagtgtatgttaatgtaagttttgctttccagtgattacctgatacgtaagcctatttgaacaaagtgagaatgaacttttgtttctaagaagtctttatcttgaagctatataacatgaaaagtgagctcaaattttttttagttgaagattacatataaagttgtgtctgattaatattcatcttttattgaagaaagtgccttctgatggccacataattcttaatgtcagctagtataatggtttacatttggacaaagtattgcttagtgttatttaagtagatttaagatctcaaagctaaagtgccaatttttactttcttcagccaatttgttacctcttttatggtttttaatttttatcaggactaacattttcagaaatagcaaggtgtgatctagtattagattcacagaactgaaaggttaattaagaatgttggttattttcacgggagcgtgtgatatttaacattaatattttatttgacactacagcctgtaatactgctctctttcaaaaacaagttttcagatttttataacagacccattttgttttatgaaacatgttcattacagaaacatgagaaaatagagataagtaaaaagaataaaagtcactattatcctaccactttgcgggacacactattaatatttaagcatagattcttccagatgttttgttttatacagcagtaggattgtgtaatgtattctctcttgtagcctattcttcaaagcgtatcttcactttccatgttaacataaatgtccttttatgattgtctaggattccatggatggatggaatataattgagtcatctggtagagcgcatataggacaggacgctaggttgtttatcttttgtttattgtaaaggaactatgtgggatgcatttggtgatctttttaaaaaatgtataaatttcttgagtaattcctggattaaagaatatgcactttttaaagctt

SEQ ID NO: 134568 - DNA, 3259 bp, Homo sapiens
  Payload ID: 6291
  Gene Symbol: FIGNL1
  Gene Name: fidgetin-like 1
  Uniprot ID: Q6PIW4
  ENST ID: ENST00000617389
  CDS Start-End: 101-2125
acggcgcgagtccgagggcgacagcagcgcgcaggcgcacgtcagtccccgcgcttttcggaggctgccagcgtcccacaccagccgcagaacctctaaaatgcagacctccagctctagatctgtgcacctgagtgaatggcagaagaattacttcgcaattacatctggcatatgtaccggaccgaaggcagatgcataccgtgcacagatattacgcattcagtatgcatgggcaaactctgagatttcccaggtctgtgctaccaaactgttcaaaaaatatgcagagaaatattctgcaattattgattctgacaatgttgaatctgggttgaataattatgcagaaaacattttaactttggcaggatctcaacaaacagatagtgacaagtggcagtctggattgtcaataaataatgttttcaaaatgagtagtgtacagaagatgatgcaagctggcaaaaaattcaaagactctctgttggaacctgctcttgcatcagtggtaatccataaggaggccactgtctttgatcttcctaaatttagtgtttgtggtagttctcaagagagtgactcattacctaactcagctcatgatcgagaccggacccaagacttcccggagagcaatcgtttgaaactccttcagaatgcccagccacctatggtgactaacactgctaggacttgtcctacattctcagcacctgtaggtgagtcagctactgcaaaattccatgtcacaccattgtttggaaatgtcaaaaaggaaaatcacagctctgcaaaagaaaacataggacttaatgtgttcttatctaaccagtcttgttttcctgctgcctgtgaaaatccacagaggaagtctttttatggttctggcaccattgatgcactttccaatccaatactgaataaggcttgtagtaaaacagaagataatggcccaaaggaggatagcagcctgcctacatttaaaactgcaaaagaacaattatgggtagatcagcaaaaaaagtaccaccaacctcagcgtgcatcagggtcttcatatggtggtgtaaaaaagtctctaggagctagtagatcccgagggatacttggaaagtttgttcctcctatacccaagcaagatgggggagagcagaatggaggaatgcaatgtaagccttatggggcaggacctacagaaccagcacatccagttgatgagcgtctgaagaacttggagccaaagatgattgaacttattatgaatgagattatggatcatggacctccagtaaattgggaagatattgcaggagtagaatttgctaaagccaccataaaggaaatagttgtgtggcccatgttgaggccagacatctttactggtttaaggggaccccctaaaggaattttgctctttggtcctcctgggactggtaaaactctaattggcaagtgcattgctagtcagtctggggcaacattctttagcatctctgcttcatccttaacttctaaatgggtaggtgagggggagaaaatggtccgtgcattgtttgctgttgcaaggtgtcagcaaccagctgtgatatttattgacgaaattgattccttgttatctcaacggggagatggtgagcatgaatcttctagaaggataaaaacagaatttttagttcaattagatggagcaacaacatcttctgaagatcgtatcctagtggtgggagcaacaaatcggccacaagaaattgatgaggctgcccggagaagattggtgaaaaggctttatattcccctcccagaagcttcagccaggaaacagatagtaattaatctaatgtccaaagagcagtgttgcctcagtgaagaagaaattgaacagattgtacagcagtctgatgcgttttcaggagcagacatgacacagctttgcagggaggcttctcttggtcctattcgcagtttacaaactgctgacattgctaccataacaccggatcaagttcgacccatagcttacattgattttgaaaatgcttttagaactgtgcgacctagtgtttctccaaaagatttagagctttatgaaaactggaacaaaacttttggttgtggaaagtaagtgggatacttggaatcaaggcatctctgtagtacagtcttctttattttttagcatagaaagttggggatgtgttaattgtatttttaagaatatattctaagttctgtacttcaaataatagcacagattttacatctgattgacatagtgtatgttaatgtaagttttgctttccagtgattacctgatacgtaagcctatttgaacaaagtgagaatgaacttttgtttctaagaagtctttatcttgaagctatataacatgaaaagtgagctcaaattttttttagttgaagattacatataaagttgtgtctgattaatattcatcttttattgaagaaagtgccttctgatggccacataattcttaatgtcagctagtataatggtttacatttggacaaagtattgcttagtgttatttaagtagatttaagatctcaaagctaaagtgccaatttttactttcttcagccaatttgttacctcttttatggtttttaatttttatcaggactaacattttcagaaatagcaaggtgtgatctagtattagattcacagaactgaaaggttaattaagaatgttggttattttcacgggagcgtgtgatatttaacattaatattttatttgacactacagcctgtaatactgctctctttcaaaaacaagttttcagatttttataacagacccattttgttttatgaaacatgttcattacagaaacatgagaaaatagagataagtaaaaagaataaaagtcactattatcctaccactttgcgggacacactattaatatttaagcatagattcttccagatgttttgttttatacagcagtaggattgtgtaatgtattctctcttgtagcctattcttcaaagcgtatcttcactttccatgttaacataaatgtccttttatgattgtctaggattccatggatggatggaatataattgagtcatctggtagagcgcatataggacaggacgctaggttgtttatcttttgtttattgtaaaggaactatgtgggatgcatttggtgatctttttaaaaaatgtataaatttcttgagtaattcctggattaaagaatatgcactttttaaagctt

SEQ ID NO: 134569 - DNA, 3368 bp, Homo sapiens
  Payload ID: 6291
  Gene Symbol: FIGNL1
  Gene Name: fidgetin-like 1
  Uniprot ID: Q6PIW4
  ENST ID: ENST00000615084
  CDS Start-End: 210-2234
acggcgcgagtccgagggcgacagcagcgcgcaggcgcacgtcagtccccgcgcttttcggaggctgccagcgtcccacaccagccgcaggatagcagcatcaaggagcattgtgtacatgcagaagtgcacagtacctggagtgaaactgcttgtgttcgatttctgataccattcataactggctgtgtgatctcaaaacctctaaaatgcagacctccagctctagatctgtgcacctgagtgaatggcagaagaattacttcgcaattacatctggcatatgtaccggaccgaaggcagatgcataccgtgcacagatattacgcattcagtatgcatgggcaaactctgagatttcccaggtctgtgctaccaaactgttcaaaaaatatgcagagaaatattctgcaattattgattctgacaatgttgaatctgggttgaataattatgcagaaaacattttaactttggcaggatctcaacaaacagatagtgacaagtggcagtctggattgtcaataaataatgttttcaaaatgagtagtgtacagaagatgatgcaagctggcaaaaaattcaaagactctctgttggaacctgctcttgcatcagtggtaatccataaggaggccactgtctttgatcttcctaaatttagtgtttgtggtagttctcaagagagtgactcattacctaactcagctcatgatcgagaccggacccaagacttcccggagagcaatcgtttgaaactccttcagaatgcccagccacctatggtgactaacactgctaggacttgtcctacattctcagcacctgtaggtgagtcagctactgcaaaattccatgtcacaccattgtttggaaatgtcaaaaaggaaaatcacagctctgcaaaagaaaacataggacttaatgtgttcttatctaaccagtcttgttttcctgctgcctgtgaaaatccacagaggaagtctttttatggttctggcaccattgatgcactttccaatccaatactgaataaggcttgtagtaaaacagaagataatggcccaaaggaggatagcagcctgcctacatttaaaactgcaaaagaacaattatgggtagatcagcaaaaaaagtaccaccaacctcagcgtgcatcagggtcttcatatggtggtgtaaaaaagtctctaggagctagtagatcccgagggatacttggaaagtttgttcctcctatacccaagcaagatgggggagagcagaatggaggaatgcaatgtaagccttatggggcaggacctacagaaccagcacatccagttgatgagcgtctgaagaacttggagccaaagatgattgaacttattatgaatgagattatggatcatggacctccagtaaattgggaagatattgcaggagtagaatttgctaaagccaccataaaggaaatagttgtgtggcccatgttgaggccagacatctttactggtttaaggggaccccctaaaggaattttgctctttggtcctcctgggactggtaaaactctaattggcaagtgcattgctagtcagtctggggcaacattctttagcatctctgcttcatccttaacttctaaatgggtaggtgagggggagaaaatggtccgtgcattgtttgctgttgcaaggtgtcagcaaccagctgtgatatttattgacgaaattgattccttgttatctcaacggggagatggtgagcatgaatcttctagaaggataaaaacagaatttttagttcaattagatggagcaacaacatcttctgaagatcgtatcctagtggtgggagcaacaaatcggccacaagaaattgatgaggctgcccggagaagattggtgaaaaggctttatattcccctcccagaagcttcagccaggaaacagatagtaattaatctaatgtccaaagagcagtgttgcctcagtgaagaagaaattgaacagattgtacagcagtctgatgcgttttcaggagcagacatgacacagctttgcagggaggcttctcttggtcctattcgcagtttacaaactgctgacattgctaccataacaccggatcaagttcgacccatagcttacattgattttgaaaatgcttttagaactgtgcgacctagtgtttctccaaaagatttagagctttatgaaaactggaacaaaacttttggttgtggaaagtaagtgggatacttggaatcaaggcatctctgtagtacagtcttctttattttttagcatagaaagttggggatgtgttaattgtatttttaagaatatattctaagttctgtacttcaaataatagcacagattttacatctgattgacatagtgtatgttaatgtaagttttgctttccagtgattacctgatacgtaagcctatttgaacaaagtgagaatgaacttttgtttctaagaagtctttatcttgaagctatataacatgaaaagtgagctcaaattttttttagttgaagattacatataaagttgtgtctgattaatattcatcttttattgaagaaagtgccttctgatggccacataattcttaatgtcagctagtataatggtttacatttggacaaagtattgcttagtgttatttaagtagatttaagatctcaaagctaaagtgccaatttttactttcttcagccaatttgttacctcttttatggtttttaatttttatcaggactaacattttcagaaatagcaaggtgtgatctagtattagattcacagaactgaaaggttaattaagaatgttggttattttcacgggagcgtgtgatatttaacattaatattttatttgacactacagcctgtaatactgctctctttcaaaaacaagttttcagatttttataacagacccattttgttttatgaaacatgttcattacagaaacatgagaaaatagagataagtaaaaagaataaaagtcactattatcctaccactttgcgggacacactattaatatttaagcatagattcttccagatgttttgttttatacagcagtaggattgtgtaatgtattctctcttgtagcctattcttcaaagcgtatcttcactttccatgttaacataaatgtccttttatgattgtctaggattccatggatggatggaatataattgagtcatctggtagagcgcatataggacaggacgctaggttgtttatcttttgtttattgtaaaggaactatgtgggatgcatttggtgatctttttaaaaaatgtataaatttcttgagtaattcctggattaaagaatatgcactttttaaagctt

SEQ ID NO: 134570 - DNA, 3543 bp, Homo sapiens
  Payload ID: 6291
  Gene Symbol: FIGNL1
  Gene Name: fidgetin-like 1
  Uniprot ID: Q6PIW4
  ENST ID: ENST00000611938
  CDS Start-End: 385-2409
acggcgcgagtccgagggcgacagcagcgcgcaggcgcacgtcagtccccgcgcttttcggaggctgccagcgtcccacaccagccgcaggtgaaaaccggcagaaagacattaagagattttcctgcagtcactgctggcagatgatagagccaggatttgaaagcaggcagcctggctccagaccctgtgctcttaactcccgttttgcatcaagaacagaatcctatgaaaggcttgcacagtgcttggtactgagtaggcactccgtcagtattttagtagctattattccaaaggacactgtattctagatttaaagtattttctttgttttccttcatactgattttcatttttattgtttgttatagaacctctaaaatgcagacctccagctctagatctgtgcacctgagtgaatggcagaagaattacttcgcaattacatctggcatatgtaccggaccgaaggcagatgcataccgtgcacagatattacgcattcagtatgcatgggcaaactctgagatttcccaggtctgtgctaccaaactgttcaaaaaatatgcagagaaatattctgcaattattgattctgacaatgttgaatctgggttgaataattatgcagaaaacattttaactttggcaggatctcaacaaacagatagtgacaagtggcagtctggattgtcaataaataatgttttcaaaatgagtagtgtacagaagatgatgcaagctggcaaaaaattcaaagactctctgttggaacctgctcttgcatcagtggtaatccataaggaggccactgtctttgatcttcctaaatttagtgtttgtggtagttctcaagagagtgactcattacctaactcagctcatgatcgagaccggacccaagacttcccggagagcaatcgtttgaaactccttcagaatgcccagccacctatggtgactaacactgctaggacttgtcctacattctcagcacctgtaggtgagtcagctactgcaaaattccatgtcacaccattgtttggaaatgtcaaaaaggaaaatcacagctctgcaaaagaaaacataggacttaatgtgttcttatctaaccagtcttgttttcctgctgcctgtgaaaatccacagaggaagtctttttatggttctggcaccattgatgcactttccaatccaatactgaataaggcttgtagtaaaacagaagataatggcccaaaggaggatagcagcctgcctacatttaaaactgcaaaagaacaattatgggtagatcagcaaaaaaagtaccaccaacctcagcgtgcatcagggtcttcatatggtggtgtaaaaaagtctctaggagctagtagatcccgagggatacttggaaagtttgttcctcctatacccaagcaagatgggggagagcagaatggaggaatgcaatgtaagccttatggggcaggacctacagaaccagcacatccagttgatgagcgtctgaagaacttggagccaaagatgattgaacttattatgaatgagattatggatcatggacctccagtaaattgggaagatattgcaggagtagaatttgctaaagccaccataaaggaaatagttgtgtggcccatgttgaggccagacatctttactggtttaaggggaccccctaaaggaattttgctctttggtcctcctgggactggtaaaactctaattggcaagtgcattgctagtcagtctggggcaacattctttagcatctctgcttcatccttaacttctaaatgggtaggtgagggggagaaaatggtccgtgcattgtttgctgttgcaaggtgtcagcaaccagctgtgatatttattgacgaaattgattccttgttatctcaacggggagatggtgagcatgaatcttctagaaggataaaaacagaatttttagttcaattagatggagcaacaacatcttctgaagatcgtatcctagtggtgggagcaacaaatcggccacaagaaattgatgaggctgcccggagaagattggtgaaaaggctttatattcccctcccagaagcttcagccaggaaacagatagtaattaatctaatgtccaaagagcagtgttgcctcagtgaagaagaaattgaacagattgtacagcagtctgatgcgttttcaggagcagacatgacacagctttgcagggaggcttctcttggtcctattcgcagtttacaaactgctgacattgctaccataacaccggatcaagttcgacccatagcttacattgattttgaaaatgcttttagaactgtgcgacctagtgtttctccaaaagatttagagctttatgaaaactggaacaaaacttttggttgtggaaagtaagtgggatacttggaatcaaggcatctctgtagtacagtcttctttattttttagcatagaaagttggggatgtgttaattgtatttttaagaatatattctaagttctgtacttcaaataatagcacagattttacatctgattgacatagtgtatgttaatgtaagttttgctttccagtgattacctgatacgtaagcctatttgaacaaagtgagaatgaacttttgtttctaagaagtctttatcttgaagctatataacatgaaaagtgagctcaaattttttttagttgaagattacatataaagttgtgtctgattaatattcatcttttattgaagaaagtgccttctgatggccacataattcttaatgtcagctagtataatggtttacatttggacaaagtattgcttagtgttatttaagtagatttaagatctcaaagctaaagtgccaatttttactttcttcagccaatttgttacctcttttatggtttttaatttttatcaggactaacattttcagaaatagcaaggtgtgatctagtattagattcacagaactgaaaggttaattaagaatgttggttattttcacgggagcgtgtgatatttaacattaatattttatttgacactacagcctgtaatactgctctctttcaaaaacaagttttcagatttttataacagacccattttgttttatgaaacatgttcattacagaaacatgagaaaatagagataagtaaaaagaataaaagtcactattatcctaccactttgcgggacacactattaatatttaagcatagattcttccagatgttttgttttatacagcagtaggattgtgtaatgtattctctcttgtagcctattcttcaaagcgtatcttcactttccatgttaacataaatgtccttttatgattgtctaggattccatggatggatggaatataattgagtcatctggtagagcgcatataggacaggacgctaggttgtttatcttttgtttattgtaaaggaactatgtgggatgcatttggtgatctttttaaaaaatgtataaatttcttgagtaattcctggattaaagaatatgcactttttaaagctt

SEQ ID NO: 134571 - DNA, 3011 bp, Homo sapiens
  Payload ID: 6292
  Gene Symbol: FIG4
  Gene Name: FIG4 phosphoinositide 5-phosphatase
  Uniprot ID: Q92562
  ENST ID: ENST00000230124
  CDS Start-End: 125-2848
agtgcctaatgggtgttgttcctggctggacttgatgtccagggcctgaggggttttctcgccgagtctcctggggcggtccggaggctcgtgccctgttgtggggcccccatttgccgccgccatgcccacggccgccgcccccatcatcagctcggtccagaagctggttctgtatgagactagagctagatactttctagttgggagcaataatgcagaaacgaaatatcgtgtcttgaagattgatagaacagaaccaaaagatttggtcataattgatgacaggcatgtctatactcaacaagaagtaagggaacttcttggccgcttggatcttggaaatagaacaaagatgggacagaaaggatcctcgggcttatttcgagcggtttcagcttttggtgttgtgggttttgtcaggttcttagaaggctattatattgtgttaataactaaaaggaggaagatggcggatattggaggtcatgcaatctataaggtcgaagatacaaatatgatctatatacccaatgattctgtacgggttactcatcctgatgaagctaggtatctacgaatatttcaaaatgtggacctatctagcaatttttactttagttacagctatgatttgtcccactcacttcaatataatctcactgtcttgcgaatgcccctggagatgttaaagtcagaaatgacccagaatcgccaagagagctttgacatctttgaagatgaaggattaattacacaaggtggaagcggggtatttgggatctgtagtgagccttatatgaaatatgtatggaatggtgaacttctggatataattaaaagtactgtgcatcgtgactggcttttgtatattattcatgggttctgtgggcagtcaaagctgttgatctatggacgaccagtgtatgtcactctaatagctagaagatccagtaaatttgctggcacccgttttcttaaaagaggtgcaaactgtgagggtgatgttgcaaatgaagtggagactgaacaaatactctgcgatgcttctgtgatgtctttcactgcaggaagttattcttcatatgtacaagttagaggatctgtgcccttatactggtctcaggacatttcaactatgatgcctaaaccacctattacattggatcaggcagatccatttgcacatgtggctgcccttcactttgaccagatgttccagaggtttggctctcccatcatcatcttgaatttagtgaaggaacgagagaaaagaaagcatgaaagaattctgagtgaagaacttgttgctgctgtgacctatctcaaccaatttttgcctcctgagcacactattgtttatattccctgggacatggccaagtataccaaaagcaagctgtgtaatgttcttgatcgactaaatgtgattgcagaaagtgtggtgaagaaaacaggtttctttgtaaaccgccctgattcttactgtagcattttgcggccagatgaaaagtggaatgaactaggaggatgtgtgattcccactggtcgcctgcagactggcatccttcgaaccaactgtgtggactgtttagatcgcaccaacacagcacagtttatggtgggaaaatgtgctctggcctatcagctgtattcactgggactgattgacaaacctaatctacagtttgatacagatgcagttaggttatttgaggaactctatgaagatcatggtgataccctatcccttcagtatggtggttctcaacttgttcatcgtgtgaaaacctacagaaagatagcaccatggacccagcactccaaagacatcatgcaaaccctgtctagatattacagcaatgctttttcagatgccgatagacaagattccattaatctcttcctgggagttttccatcccactgaagggaaacctcatctctgggagctcccaacagatttttatttgcatcacaaaaataccatgagacttttgccaacaagaagaagttatacttactggtggacaccagaggtgataaagcatttaccattgccctatgatgaagttatctgtgctgtgaacttaaagaagttgatagtgaagaaattccacaaatatgaagaagagattgatatccacaatgagttctttcggccatatgagttgagcagctttgatgataccttttgcttggctatgacaagctcagcacgtgactttatgcctaagaccgttggaattgatccaagtccatttactgtgcgtaaaccagatgaaactggaaaatcagtattgggaaacaaaagcaatagagaagaagctgtattacagcggaaaacggcagccagcgccccgccgccccccagcgaggaggctgtgtccagcagctctgaggatgactctgggactgatcgggaagaagagggctctgtgtctcagcgctccactcccgtgaagatgactgatgcaggagacagtgccaaagtgaccgagaatgtggtccaacccatgaaggagctatatggaattaacctctcagatggcctctcagaagaagatttctccatttattcaagatttgttcagctggggcagagtcaacataaacaagacaagaatagccagcagccctgttctaggtgctcagatggagttataaaactaacacccatctcggctttctcgcaagataacatctatgaagttcagcccccaagagtagacagaaaatctacagagatcttccaagcccacatccaggccagccaaggtatcatgcagcccctaggaaaagaggactcctccatgtaccgagagtacatcaggaaccgctacctgtgaaaagagcgcaggtccacctggtggacacgtctgattagcttagaacctgtcttgtctcatcttcaaaaggtaacttattaaaagtcctttgcgtctgaagcctttctccttttctgtcacttgcaaattccaaattatagctaataaagatgactagataatt

SEQ ID NO: 134572 - DNA, 791 bp, Homo sapiens
  Payload ID: 6292
  Gene Symbol: FIG4
  Gene Name: FIG4 phosphoinositide 5-phosphatase
  ENST ID: ENST00000368941
  CDS Start-End: 6-425
caaagatgggacagaaaggatcctcgggcttatttcgagcggtttcagcttttggtgttgtgggttttgtcaggttcttagaaggctattatattgtgttaataactaaaaggaggaagatggcggatattggaggtcatgcaatctataaggtcgaagatacaaatatgatctatatacccaatgattctgtacgggttactcatcctgatgaagctaggtatctacgaatatttcaaaatgtggacctatctagcaatttttactttagttacagctatgatttgtcccactcacttcaatataatctcactgtcttgcgaatgcccctggagatgttaaagtcagaaatgacccagaatcgccaagagagctttgacatctttgaagatgaaggattaattacacaaggtggaagcgggtgatgttgcaaatgaagtggagactgaacaaatactctgcgatgcttctgtgatgtctttcactgcaggaagttattcttcatatgtacaagttagaggatctgtgcccttatactggtctcaggacatttcaactatgatgcctaaaccacctattacatgtgtgtggagccatgtttttaataataactcctgtcctcacatttagagataatgaactgttgtcacagaaatctcataaatgcttaggttttcaggaggttttagtcctggaaggtagataatttagaagaggaatttccgttattcttatgtaataaatttatgtttaattttgactgttaaataaattatttttattttgcttca

SEQ ID NO: 134573 - DNA, 724 bp, Homo sapiens
  Payload ID: 6292
  Gene Symbol: FIG4
  Gene Name: FIG4 phosphoinositide 5-phosphatase
  ENST ID: ENST00000419951
  CDS Start-End: 428-724
gagcaaaaaggaatttaaagaacctcctctaaataactgcctgctcccattggacttcctgaggccctcctggctccttagagcttgttgaactcagctttgcattgtattttctatgcatctatctcatctcctttctaactgtgtaagtgttggaggcaggagcttaccctcggtcagggctgtatcccccacagagcttatcacagtgctgtctgtgaacacagttaatattatggaaatgtttgcttgctataatctcagacttttagagtaacatgcagtatctctcttagttatctgtgctgtgaacttaaagaagttgatagtgaagaaattccacaaatatgaagaagagattgatatccacaatgagttctttcggccatatgagttgagcagctttgatgataccttttgcttggctatgacaagctcagcacgtgactttatgcctaagaccgttggaattgatccaagtccatttactgtgcgtaaaccagatgaaactggaaaatcagtattgggaaacaaaagcaatagagaagaagctgtattacagcggaaaacggcagccagcgccccgccgccccccagcgaggaggctgtgtccagcagctctgaggatgactctgggactgatcgggaagaagagggctctgtgtctcagcgctccactcccgtgaagatgactgatgcaggagacagtgccaaagtgaccgag

SEQ ID NO: 134574 - DNA, 439 bp, Homo sapiens
  Payload ID: 6292
  Gene Symbol: FIG4
  Gene Name: FIG4 phosphoinositide 5-phosphatase
  ENST ID: ENST00000415980
  CDS Start-End: 1-409
gttatttgaggaactctatgaagatcatggtgataccctatcccttcagtatggtggttctcaacttgttcatcgtgtgaaaacctacagaaagatagcaccatggacccagcactccaaagacatcatgcaaaccctgtctagatattacagcaatgctttttcagatgccgatagacaagattccattaatctcttcctgggagttttccatcccactgaagggaaacctcatctctgggagctcccaacagatttttatttgcatcacaaaaataccatgagacttttgccaacaagaagaagttatacttactggtggacaccagaggtgataaagcatttaccattgccctatgatgaagggttcctagcaagatctcctgcgaatctggaatgctccaattgaggactccatctagtcatgcttcagcatccc

SEQ ID NO: 134575 - DNA, 712 bp, Homo sapiens
  Payload ID: 6292
  Gene Symbol: FIG4
  Gene Name: FIG4 phosphoinositide 5-phosphatase
  ENST ID: ENST00000454215
  CDS Start-End: 1-712
atgagatactttctagttgggagcaataatgcagaaacgaaatatcgtgtcttgaagattgatagaacagaaccaaaagatttggtcataattgatgacaggcatgtctatactcaacaagaagtaagggaacttcttggccgcttggatcttggaaatagaacaaagatgggacagaaaggatcctcgggcttatttcgagcggtttcagcttttggtgttgtgggttttgtcaggttcttagaaggctattatattgtgttaataactaaaaggaggaagatggcggatattggaggtcatgcaatctataaggtcgaagatacaaatatgatctatatacccaatgattctgtacgggttactcatcctgatgaagctaggtatctacgaatatttcaaaatgtggacctatctagcaatttttactttagttacagctatgatttgtcccactcacttcaatataatctcactgtcttgcgaatgcccctggagatgttaaagtcagaaatgacccagaatcgccaagagagctttgacatctttgaagatgaaggattaattacacaaggtggaagcggggtatttgggatctgtagtgagccttatatgaaatatgtatggaatggtgaacttctggatataattaaaagtactgtgcatcgtgactggcttttgtatattattcatgggttctgtgggcagtcaa

SEQ ID NO: 134576 - DNA, 12747 bp, Homo sapiens
  Payload ID: 6293
  Gene Symbol: FLG
  Gene Name: filaggrin
  Uniprot ID: P20930
  ENST ID: ENST00000368799
  CDS Start-End: 37-12222
cttttggtgaacaaggttcacatttattgccaaaagatgtctactctcctggaaaacatctttgccataattaatcttttcaagcaatattcaaaaaaagataaaaacactgacacattgagtaaaaaagagctgaaggaacttctggaaaaggaatttcggcaaatcctgaagaatccagatgacccagatatggttgatgtcttcatggatcacttggatatagaccacaacaagaaaattgacttcactgagtttcttctgatggtattcaagttggctcaagcatattatgagtctaccagaaaagagaatttaccgatatcaggacacaagcacagaaagcacagtcatcatgataaacatgaagataataaacaggaagaaaacaaagaaaacagaaaaagaccctcaagtctggaaagaagaaacaatagaaaagggaataagggaagatccaagagcccaagagaaacaggggggaaaaggcatgaatctagttctgaaaaaaaagaaagaaaaggatattcacctactcatagagaagaagaatatggaaaaaaccatcataactcaagtaaaaaagagaaaaacaagactgaaaatactagattaggagacaataggaagaggctaagtgaaagacttgaagagaaagaagacaatgaagaaggagtatatgattatgaaaatacaggaagaatgactcaaaaatggatacaatcaggccatattgccacatattacacaatccaggatgaagcctatgacaccactgatagtctattagaagaaaacaaaatatatgaaagatcaaggtcatctgatggcaaatcatcatctcaagtgaacaggtcaagacatgaaaatacaagccaggtaccattgcaggagtccaggacaagaaagcgtaggggatccagagttagccaggacagggacagtgagggacactcagaagactctgagaggcactctgggtcggcttccagaaaccatcatggatctgcgtgggagcagtcaagagatggctccagacaccccaggtcccatgatgaagacagagccagtcatgggcactctgcagacagctccagacaatcaggcactcgtcacgcagagacttcctctcgtggacagactgcatcatcccatgaacaggcaagatcaagtccaggagaaagacatggatccggccaccagcagtcagcagacagctccagacactcagccactgggcgcgggcaagcttcatctgcagtcagcgatcgtggacaccgggggtctagcggtagtcaggccagtgacagtgagggacattcagaaaactcagacacacaatcagtgtcaggccacggaaaggctgggctgagacagcagagccaccaagagtccacacgtggccggtcaggggaacggtctggacgttcagggtcttccctctaccaggtgagcactcatgaacagcctgactctgcccatggacggaccgggaccagcactggaggaagacaaggatcgcaccacgagcaggcacgagacagctccaggcattcagcgtcccaagagggtcaggacaccattcgtggacacccggggtcaagcagaggaggaaggcagggatcccaccacgagcaatcggtaaataggtctggacactcaggttcccatcacagccacaccacatcccagggaaggtctgatgcctcccatgggcagtcaggatccagaagtgcaagcagacaaacacgaaatgaggaacaatcaggagacggcaccaggcactcagggtcacgtcatcatgaagcttcctctcaggctgacagctctagacactcacaggtgggccagggacaatcatcggggcccaggacaagtaggaaccagggatccagtgttagccaggacagtgacagtcagggacactcagaagactctgagaggtggtctgggtctgcttccagaaaccatcatggatctgctcaggagcagtcaagagatggctccagacaccccaggtcccatcacgaagacagagctggtcatgggcactctgcagacagctccagaaaatcaggcactcgtcacacacagaattcctctagtggacaggctgcgtcatcccatgaacaggcaagatcaagtgcaggagaaagacatggatcccgccaccagctccagtcagcagacagctccagacactcaggcactgggcacggacaagcttcatctgcagtcagagacagtggacaccgagggtccagtggtagtcaggccactgacagtgagggacattcagaagactcagacacacagtcagtgtcaggccatggacaggctggtcaccatcagcagagccaccaagagtccgcacgtgaccggtcaggggaaaggtctcgacgttcagggtctttcctctaccaggtgagcactcataaacagtctgagtcctcccatggatggacagggcccagcactggagtaagacaaggatcccaccatgagcaggcacgagacaactccaggcactcagcatcccaagatggtcaggacaccattcgtggacacccggggtcaagcagaagaggaaggcaggggtcccaccacgagcaatcggtagataggtctggacactcagggtcccatcacagccacaccacatcccagggaaggtctgatgcctcccgtgggcagtcaggatccagaagtgcaagcagaacaacacgtaatgaggaacaatcaagagacggctccaggcactcagggtcacgtcaccatgaagcttcctctcatgccgacatctctagacactcacaggcaggccagggacaatcagaggggtccaggacaagcaggcgccagggatccagtgttagccaggacagtgacagtgagggacattcagaagactctgagaggtggtctgggtctgcttccagaaaccatcgtggatctgctcaggagcagtcaagacatggctccagacaccccaggtcccatcacgaagacagagccggtcacgggcactctgcagacagctccagacaatcaggaactcctcacgcagagacttcctctggtggacaggctgcgtcatcccatgaacaggcaagatcaagtccaggagaaagacacggatcccgccaccagcagtcagcagacagctccagacactcaggcattccgcgcagacaagcttcatctgcagtcagagacagtggacactgggggtccagtggtagtcaggccagtgatagtgagggacattcagaggagtcagacacacagtcagtgtcaggccatggacaggatgggccccatcagcagagccaccaagagtccgcacgtgactggtcagggggaaggtctggacgttcagggtctttcatctaccaggtgagcactcatgaacagtctgagtctgcccatgggcggaccaggaccagcactggacgaagacaaggatcccaccacgagcaggcacgagacagctccaggcactcagcgtcccaagagggtcaggacaccattcgtgcacacccggggtcaaggagaggaggaaggcagggatcccaccatgagcaatcggtagatagatctggacactcagggtcccatcacagccacaccacatcccagggaaggtctgatgcctcccatgggcagtcaggatccagaagtgcaagcagacaaactcgtaaggacaaacaatcaggagacggctccaggcactcagggtcacgtcaccatgaagctgcctcttgggctgacagctctagacactcacaggtgggacaggaacaatcatcggggtccaggacaagcaggcaccagggatccagtgttagccaggacagtgacagtgagagacactcagacgactccgagaggttgtctgggtctgcttccagaaaccatcatggatcttctcgggagcagtcaagagatggctccagacaccctgggttccatcaagaagacagagccagtcacgggcactctgcagacagctccagacaatcaggcactcatcacacagagtcttcctctcatggacaggctgtgtcatcccatgaacaggcaagatcaagtccaggagaaagacatggatcccgccaccagcagtcagcagacagctccagacactcaggcattgggcacagacaagcttcatctgcagtcagagacagtggacaccgagggtccagtggtagtcaggtcactaacagtgagggacattcagaagactcagacacacagtcagtgtcagcccacggacaagctgggccccatcagcagagccacaaagagtccgcacgtggccagtcaggggaaagctctggacgttcaaggtctttcctctaccaggtgagctctcatgaacagtctgagtccacacacggacagactgcacccagcactggaggaagacaaggatcccgccatgagcaggcacgaaacagctctaggcactcagcatcccaagacggtcaggacaccattcgtggacacccggggtcaagcagaggaggaaggcagggatcctaccacgagcaatcagtagataggtctggacactcagggtaccatcacagccacaccacaccccagggaaggtctgatgcctcccatgggcagtcaggacccagaagtgcaagcaggcaaacaagaaatgaggaacaatcaggagacggctccaggcactcagggtcacgtcaccatgaaccttccactcgggccggcagctctagacactcacaggtgggccagggagaatcagcggggtccaagacaagcaggcgccagggatccagtgttagtcaggacagggacagtgagggacactcagaagactctgagaggcggtctgagtcggcttccagaaaccattatggatctgctcgggagcagtcaagacatggctccaggaaccccaggtcccatcaagaagatagagccagtcatgggcactctgcagagagctccagacaatcaggcactcgtcatgcagagacttcctctggtggacaggctgcatcatcccaggaacaggcaaggtcaagtccaggagaaagacatggatcccgccaccagcagtcagcagacagctccacagactcaggcactgggcgcagacaagattcatctgtagtcggagacagtggaaaccgagggtccagtggtagccaggccagtgacagcgagggacactcagaagagtcagacacacagtcagtgtcagcccacggacaggctgggccccatcagcagagccaccaagagtccacacgtggccagtcaggggaaaggtctggacgttcagggtctttcctctaccaggtgagcactcatgaacagtctgagtccgcccatggacgcacagggcccagcactggaggaagacaaagatcccgccacgagcaggcacgagacagctccaggcactcagcgtcccaagagggtcaggacaccattcgtggacacccagggtcaagcagaggaggaaggcagggatcccactatgagcaatcggtagatagttctggacactcagggtctcatcacagccacaccacgtcccaggaaaggtctgatgtctcccgtgggcagtcaggatccagaagtgtcagcagacaaacacgtaatgagaaacaatcaggagacggctccaggcactcagggtcgcgtcaccatgaagcttcctctcgggccgacagctctagacactcgcaggtgggccagggacaatcatcagggcccaggacaagcaggaaccagggatccagtgttagccaggacagtgacagtcagggacactcagaagactctgagaggtggtctgggtctgcttccagaaaccatcttggatctgcttgggagcagtcaagagatggctccagacaccctgggtcccatcacgaagacagagccggtcacgggcactctgcagacagctccagacaatcaggcactcgtcacacagagtcttcctctcgtggacaggctgcgtcatcccatgaacaggcaagatcaagtgcaggagaaagacatggatcccaccaccagctccagtcagcagacagctccagacactcaggcattgggcatggacaagcttcatctgcagtcagagacagtggacaccgagggtacagtggtagtcaggccagtgacagtgagggacattcagaagactcagacacacagtcagtgtcagcacagggaaaagctgggccccatcagcagagccacaaagagtccgcacgtggccagtcaggggaaagctctggacgttcagggtctttcctctaccaggtgagcactcatgaacagtctgagtccacccatggacagtctgcgcccagcactggaggaagacaaggatcccattatgatcaggcacaagacagctccaggcactcagcatcccaagagggtcaggacaccattcgtggacacccggggccaagcagaggaggaagacaggggtcccaccaagagcaatcggtagataggtctggacactcagggtctcatcacagccacaccacatcccagggaaggtctgatgcctcccgtgggcagtcaggatccagaagtgcaagcagaaaaacatatgacaaggaacaatcaggagatggctctaggcactcagggtcgcatcatcatgaagcttcctcttgggccgacagctctagacactcactggtgggccagggacaatcatcagggcccaggacaagcaggccccggggatccagtgttagccaggacagtgacagtgagggacactcagaagattctgagaggcggtctgggtctgcgtccagaaaccatcatggatctgctcaggagcagtcaagagatggctccagacaccccaggtcccatcacgaagacagagccggtcatgggcactctgcagagagctccagacaatcaggcactcatcatgcagagaattcctctggtggacaggctgcatcatcccatgaacaggcaagatcaagtgcaggagagagacacggatcccaccaccagcagtcagcagacagctccagacactcaggcattgggcacggacaagcttcatctgcagtcagagacagtggacaccgagggtccagtggtagtcaggccagtgacagtgagggacattcagaagactcagacacacagtcagtgtcagcccacggacaggctgggccccatcagcagagccaccaagagtccacacgtggccggtcagcaggaaggtctggacgttcagggtctttcctctaccaggtgagcactcatgaacagtctgagtccgcccatggacggaccgggaccagcactggaggaagacaaggatcccaccacaagcaggcacgagacagctccaggcactcaacgtcccaagagggtcaggacaccattcatggacacccggggtcaagcagtggaggaaggcagggatcccactacgagcaattggtagatagatctggacactcagggtctcatcacagccacaccacatcccagggaaggtctgatgcctcccatgggcactcaggatccagaagtgcaagcagacaaactcgtaacgatgaacaatcaggagacggctccaggcactcagggtcgcgtcaccatgaagcttcctctcgggccgacagctctggacactcgcaggtgggccagggacaatcagaggggcccaggacaagcaggaactggggatccagttttagccaggacagtgacagtcagggacactcagaagactctgagaggtggtctgggtctgcttccagaaaccatcatggatctgctcaggagcagctaagagatggctccagacaccccaggtcccatcaagaagacagagctggtcatgggcactctgcagacagctccagacaatcaggcactcgtcacacacagacttcctctggtggacaggctgcatcatcccatgaacaggcaagatcaagtgcaggagaaagacatggatcccaccaccagcagtcagcagacagctccagacactcaggcattgggcacggacaagcttcatctgcagtcagagacagtggacaccgagggtacagtggtagtcaggccagtgacaatgagggacattcagaagactcagacacacagtcagtgtcagcccacggacaggctgggtcccatcagcagagccaccaagagtccgcacgtggccggtcaggggaaacgtctggacattcaggatctttcctctaccaggtgagcactcatgaacagtctgagtcctcccatggatggacggggcccagcactagaggaagacaaggatcccgccatgagcaggcacaagacagctccaggcactcagcatcccaagacggtcaggacaccattcgtggacacccggggtcaagcagaggaggaaggcaggggtaccaccacgagcattcggtagatagctctggacactcagggtcccatcacagccacaccacatcccagggaaggtctgatgcctcccgtgggcagtcaggatccagaagtgcaagcagaacaacacgtaatgaggaacaatcaggagacggctccaggcactcagggtcgcgtcaccatgaagcttccactcatgccgacatctctagacactcacaggcagtccagggacaatcagaggggtccaggagaagcaggcgccagggatccagtgtgagccaggacagtgacagtgagggacattcagaagactctgagaggtggtctgggtctgcttccagaaaccatcatggatctgctcaggagcagctaagagatggctccagacaccccaggtcccatcaagaagacagagctggtcatgggcactctgcagacagctccagacaatcaggcactcgtcacacacagacttcctctggtggacaggctgcatcatcccatgaacaggcaagatcaagtgcaggagaaagacatggatcccaccaccagcagtcagcagacagctccagacactcaggcattgggcacggacaagcttcatctgcagtcagagacagtggacaccgagggtacagtggtagtcaggccagtgacaatgagggacattcagaagactcagacacacagtcagtgtcagcccacggacaggctgggtcccatcagcagagccaccaagagtccgcacgtggccggtcaggggaaacgtctggacattcaggatctttcctctaccaggtgagcactcatgaacagtctgagtcctcccatggatggacggggcccagcactagaggaagacaaggatcccgccatgagcaggcacaagacagctccaggcactcagcatcccaatacggtcaggacaccattcgtggacacccggggtcaagcagaggaggaaggcaggggtaccaccacgagcattcggtagatagctctggacactcagggtcccatcacagccacaccacatcccagggaaggtctgatgcctcccgtgggcagtcaggatccagaagtgcaagcagaacaacacgtaatgaggaacaatcaggagacagctccaggcactcagtgtcacgtcaccatgaagcttccactcatgccgacatctctagacactcacaggcagtccagggacaatcagaggggtccaggagaagcaggcgccagggatccagtgtgagccaggacagtgacagtgagggacattcagaagactctgagaggtggtctgggtctgcttccagaaaccatcgtggatctgttcaggagcagtcaaggcacggctccagacaccccaggtcccatcacgaagacagagccggtcacgggcactctgcagaccgctccagacaatcaggcactcgtcacgcagagacttcctctggtggacaggctgcatcatcccatgaacaggcaagatcaagtccaggagagagacacggatcccgccaccagcagtcagcagacagctccagacactcaggcattccgcgtggacaagcttcatctgcagtcagagacagtagacactgggggtccagtggtagtcaggccagtgatagtgagggacattcagaagagtcagacacacagtcagtgtcaggccatggacaggctgggccccatcagcagagccaccaagagtccgcacgtgaccggtcagggggaaggtctggacgttcagggtctttcctctaccaggtgagcactcatgaacagtctgagtctgcccatgggcggaccaggaccagcactggacgaagacaaggatcccaccacgagcaggcacgagacagctccaggcactcagcgtcccaagagggtcaggacaccattcgtggacacccggggtcaagcagaagaggaaggcagggatcccactacgagcaatcggtagataggtctggacactcagggtcccatcacagccacaccacatcccagggaaggtctgatgcctcccgtgggcagtcaggatccagaagtgccagcagacaaactcgtaatgacgaacaatcaggagatggctccaggcactcatggtcgcatcaccatgaagcttccactcaggcggacagctctagacactcacagtccggccagggacaatcagcggggcccaggacaagcaggaaccagggatccagtgttagccaggacagtgacagtcagggacactcagaagactctgagaggtggtctgggtctgcttccagaaaccatcgtggatctgctcaggagcagtcaagagatggctccagacaccccacgtcccatcacgaagacagagccggtcacgggcactctgcagagagctccagacaatcaggcactcatcatgcagagaattcctctggtggacaggctgcatcatcccatgaacaggcaagatcaagtgcaggagagagacatggatcccaccaccagcagtcagcagacagctccagacactcaggcattgggcacggacaagcttcatctgcagtcagagacagtggacaccgagggtccagtggtagtcaggccagtgacagtgagggacattcagaagactcagacacacagtcagtgtcagcccacggacaggctgggccccatcagcagagccaccaagagtccacacgtggccggtcagcaggaaggtctggacgttcagggtctttcctctaccaggtgagcactcatgaacagtctgagtctgcccatggacgggctgggcccagtactggaggaagacaaggatcccgccacgagcaggcacgagacagctccaggcactcagcgtcccaagagggtcaggacaccattcgtggacacccggggtcaaggagaggaggaagacagggatcctaccacgagcaatcggtagataggtctggacactcagggtcccatcacagccacaccacatcccagggaaggtctgatgcctcccatgggcagtcaggatccagaagtgcaagcagagaaacacgtaatgaggaacagtcaggagacggctccaggcactcagggtcgcgtcaccatgaagcttccactcaggctgacagctctagacactcacagtccggccagggtgaatcagcggggtccaggagaagcaggcgccagggatccagtgttagccaggacagtgacagtgaggcatacccagaggactctgagaggcgatctgagtctgcttccagaaaccatcatggatcttctcgggagcagtcaagagatggctccagacaccccggatcctctcaccgcgatacagccagtcatgtacagtcttcacctgtacagtcagactctagtaccgctaaggaacatggtcactttagtagtctttcacaagattctgcgtatcactcaggaatacagtcacgtggcagtcctcacagttctagttcttatcattatcaatctgagggcactgaaaggcaaaaaggtcaatcaggtttagtttggagacatggcagctatggtagtgcagattatgattatggtgaatccgggtttagacactctcagcacggaagtgttagttacaattccaatcctgttgttttcaaggaaagatctgatatctgtaaagcaagtgcgtttggtaaagatcatccaaggtattatgcaacgtatattaataaggacccaggtttatgtggccattctagtgatatatcgaaacaactgggatttagtcagtcacagagatactattactatgagtaagaaattaatggcaaaggaattaatccaagaatagaagaatgaagcaagttcactttcaatcaagaaacttcataatactttcagggaagttatcttttcctgtcaatctgtttaaaatatgctatagtatttcattagtttggtggtagcttatttttattgtgtaatgatctttaaacgctatatttcagaaatattaaatggaagaaatcaatatcatggagagctaactttagaaaactagctggagtattttaggagattctgggtcaagtaatgttttatgtttttgaaagtttaagttttagacactccccaaatttctaaattaatctttttcagaaatatcgaaggagccaaaaatataaaacagttctgtataccaaagtggctatatcaacatcagggctagcacatctttctctattatccttctattggaattctagtattctgtattcaaaaaatcatcttggacataattaatattatagtaagctgcatctaaattaaaaataaactatt

SEQ ID NO: 134577 - DNA, 9124 bp, Homo sapiens
  Payload ID: 6294
  Gene Symbol: FLG2
  Gene Name: filaggrin family member 2
  Uniprot ID: Q5D862
  ENST ID: ENST00000388718
  CDS Start-End: 74-7249
accctgcaagctgcatcaggctttatcctacttgttcctttggtgaaccaggttcacttaaacttgcaaaaagatgaccgacctcttgagaagtgttgtcaccgtaattgatgttttctacaaatacaccaagcaagatggggagtgtggcacactgagcaagggtgaactaaaggaacttctggagaaagagcttcatccagttctgaagaacccagatgatccagacacagtggatgtcatcatgcatatgctggatcgagatcatgacagaagattggactttactgagtttcttttgatgatattcaagctgactatggcctgcaacaaggtcctcagcaaagaatactgcaaagcttcagggtcaaagaagcataggcgtggtcaccgacaccaagaagaagaaagtgaaacagaagaggatgaagaggatacaccaggacataaatcaggttacagacattcaagttggagtgagggagaggagcatggatatagttctgggcactcaaggggaactgtgaaatgtagacatgggtccaactccaggaggctaggaagacaaggtaatttatccagctctgggaaccaagagggatctcagaaaagataccacaggtccagctgtggtcattcatggagtggtggcaaagacagacatggttccagctctgtagaactgagagaaagaataaacaagtcacacattagcccttctagggaatctggggaggagtatgaatctggatctggatcaaacagttgggaaaggaaaggtcatggtggtctgtcatgtggattggagactagtgggcatgaatcaaactctactcagtcaagaattagagaacaaaagcttgggtctagctgttcaggttcaggagacagtgggaggcgaagtcatgcatgtggttatagcaattcaagtgggtgtggaaggccacaaaatgcttcaagttcttgtcagtcacatagatttggagggcaaggaaatcaatttagctatattcagtcaggctgtcagtcaggaattaagggaggacaaggccatggctgtgtctcaggaggtcagccctctggatgtggtcaacctgagtctaacccctgtagtcagtcctatagtcagagaggatatggagctagagaaaatggtcaaccacagaactgtggaggacaatggagaacaggctcaagtcagtcctcttgctgtggacaatatgggtctggaggtagccagtcttgtagtaatggtcaacatgaatatggttcctgtggccgcttttcaaactcttctagttcaaatgaattttccaaatgtgatcaatatgggtctggttcaagtcagtctactagctttgaacaacatggaacaggcttgagtcagtcctctgggttcgaacaacatgtatgtggctcaggtcaaacttgtggccagcatgagtctacatcaagtcaatccttgggctatgaccagcatgggtctagctcaggtaagacatctggctttggacaacatgggtctggctcaggtcagtcctctggctttggacaatgtgggtcaggctcaggtcagtcctctggctttggacagcatgggtctgtctcaggacaatcctctggttttggacagcatgggtctgtctcaggacaatcctctggttttggacaacatgagtctagatcacgtcagtctagctatggccaacatggttctggctcaagtcaatcatctggctatggccaatatgggtctagagagacatctggctttggacaacatgggttgggctcaggtcaatccactggctttggccaatatggatcgggctcaggtcagtcctctggctttggacaacatgggtctggctcaggacaatcctctggctttggacaacatgagtctagatcaggtcagtctagttatggccaacacagttctggctcaagtcagtcatctggctatggccaacatgggtctagacagacatctggctttggacaacatgggtcaggctcaagtcaatccactggctttggccaatatggatcaggctcaggtcagtcctctggctttggacaacatgtttctggctcaggacaatcctctggttttggacaacatgagtctagatcaggtcattctagctatggccaacatggttttggctcaagtcaatcatctggctatggtcaacatgggtcaagttcaggacagacatctggatttggacaacacgagttaagctcaggtcagtcttccagctttggccaacatggatcaggctcaggtcagtcctctggctttggacaacatgggtctggctcaggacaatcctctggctttggacaacatgagtctagatcaggtcagtctagctatggccaacacagttctggctcaagtcagtcatctggctatggccaacatgggtctagacagacatctggctttggacaacatgggtcaggctcaagtcaatccactggctttggccaatatggatcaggctcaggtcagtccgctggctttggacaacatgggtctggctcaggacaatcctctggctttggacagcatgagtctagatcacatcagtccagctatggccaacatggttctggctcaagtcaatcatctggctatggtcaacatgggtcaagttcgggacagacatctggctttggacaacacaggtcaagctcaggtcaatactctggctttggacaacatggatcaggctcaggtcagtccagtggctttggacaacatgggactggctcaggacaatactctggttttggacaacatgagtctagatcacatcagtctagctatggccaacatggttctggctcaagtcagtcatctggctatggtcaacatgggtcaagttcaggacagacttttggatttggacaacacaggtcaggctcaggtcaatcctctggctttggccaacatggatcaggctcaggtcagtcctctggctttggacaacatgagtcaggctcaggaaaatcctctggctttggacagcatgagtctagatcaagtcagtctaattatggccaacatggttctggctcaagtcagtcatctggctatggtcaacatgggtctagttcaggacagacaactggctttggacaacacaggtcaagctcaggccaatactcaggctttggacaacatggatcaggctcagatcagtcctctggctttggacaacatgggactggttcaggacaatcctctggttttggacaatatgagtctagatcacgtcagtctagctatggccaacatggttctggctcaagtcaatcatctggctatggtcaacatgggtcaaattcaggacagacatctggatttggacaacacaggccaggctcaggtcagtcctctggctttggccaatatggatcgggctcaggtcagtcttctggctttggacaacatgggtcaggcacaggtaaatcctctggctttgcacagcatgagtacagatcaggtcagtctagctatggccaacatggtactggctccagtcaatcatctggctgtggccaacatgagtctggctcaggtccaaccacaagttttggacagcatgtgtctggctcagacaatttctctagttctggacaacatatatctgactcaggtcagtccactggatttggccaatatggttcaggctcaggtcaatcaactggcttgggccagggtgaatctcaacaagtagagtcaggatccacagttcatgggagacaggaaactactcatggtcagacaataaataccactagacatagccagtctggtcaaggacaatccacacagacagggtccagggtaactagaagacgaagatctagccaaagtgagaacagtgacagtgaagtgcactcaaaggtctcacacagacattcagaacacattcacacacaagctggatctcactacccaaagtcaggatccacagttcgcagaagacaaggaactactcatggacagagaggagataccactagacatggccattctggtcatggacagtctacacagacaggttccagaacatctggaagacagagatttagccacagtgatgccactgacagtgaagtgcactcaggggtctcacatagaccacactcacaagaacaaactcacagccaagctggatctcaacatggagagtcagaatccacagttcatgagagacatgaaactacttatggacagacaggagaggccactggacatggccactctggtcatggacagtccacacagagagggtccaggacaactggaagaaggggatctggccatagtgagtccagtgacagtgaagtgcactcagggggctcacacagaccacaatcacaagaacaaactcatggccaagccggatctcaacatggagagtcaggatccacagttcatgggagacacggaactactcatggacagacaggagataccactagacatgcccactatcatcatggaaaatccacacagagagggtccagtacaactggaagaaggggatctggccacagtgagtccagtgacagtgaagtgcactcagggggctcgcacacacattcaggacacactcacggccaaagtggatctcaacatggagagtcagaatccataattcatgacagacacagaattactcatggacagacaggagataccactagacattcctactctggtcatgaacaaaccacacagacagggtccaggacaactggaagacagagaactagccacagtgagtccactgacagtgaagtgcactcagggggctcacacagaccacactcacgagaacacacttacggccaagccggatctcaacatgaagagccagaattcacagttcatgagagacacggaactactcatggacagataggagataccactggacattcccactctggtcatggacagtccacacagagagggtccaggacaactggaagacagagatctagccacagtgagtccagtgacagtgaagtgcactcaggggtctcacacacacatacaggacacactcatggtcaagctggatctcaacatggacagtcagaatccatagttcctgagagacatggaactactcatggacagacaggagataccactagacatgcccactatcatcatggattaaccacacagacagggtccaggactactggaagaaggggatctggccacagtgagtacagtgacagtgaagggtactcaggagtctcacatacacattcaggacacactcatggccaagccagatctcaacatggagagtcagaatccatagttcatgagagacatggaactatacatggacagacaggcgataccaccagacatgcccactctggtcatggacagtccacacagacagggtccaggaccactggaagaaggtcatctggccacagtgagtacagtgacagtgaagggcactcagggttctcacaaagaccacactcacgaggacacactcacggccaggctggatctcaacatggagagtcagaatccatagttgacgagagacatggaactactcatggacagacaggagataccagtggacattctcaatctggtcatggacagtccacacagtcaggatccagtacaactggaagaaggagatctggccacagtgagtccagtgacagtgaagtgcactcagggggctcacatacacattcaggacacacacacagccaagccaggtctcaacatggagagtcagaatccacagttcacaagagacaccaaactactcatggacagacaggagataccactgaacatggccaccctagtcatggacaaaccatacagacagggtccaggacaactggaagaaggggatctggccacagtgagtacagtgacagtgaagggccctcaggggtctcacacacacattcaggacacactcacggtcaagctggatctcactatccagagtcaggatcctcagttcatgagagacacggaactactcatggacaaacagcagataccactagacatggccactctggtcatggacagtccacacagagagggtccaggacaactggaagaagggcatctggccacagtgagtacagtgacagtgaagggcactcaggggtctcacacacacattcaggacacgctcatggccaagccggatctcaacatggagagtcaggatcctcagttcatgagagacacggaactactcatggacagacaggagataccactagacatgctcactctggtcatggacagtccacacagagagggtcaaggacagctggaagaaggggatctggccacagtgagtccagtgacagtgaagtgcactcaggggtctcacacacacattcaggacacacttatggccaagccagatctcaacatggagagtcaggatctgccattcacgggagacagggaactatacatggacagacaggagataccactagacatggccagtctggtcatggacagtccacacagacaggttccaggacaactggaagacaaagatctagtcacagtgagtccagtgatagtgaagtgcactcagaggcctcacccacacattcaggacacactcacagccaagccggatctcgacatggacagtcaggatcctcaggtcatgggagacagggaactactcatggacagacaggagataccactagacatgcccactatggttatggacaatccacacagagagggtccaggacaactggaagaaggggatctggccacagtgagtccagtgacagtgaagtgcactcatggggctcacacacacattcaggacacattcagggccaagctggatctcaacaaagacagccaggatccacagttcatgggagactggaaactactcatggacagacaggagataccactagacatggccattctggttatggacaatccacacagacaggttccagatctagtagagcaagtcattttcagtcacatagtagtgaaaggcaaaggcatggatcaagtcaggtttggaaacatggcagctatggacctgcagaatatgactatgggcacactgggtatgggccttctggtggcagcagaaaaagcatcagtaattctcacctttcatggtcaacagacagcactgcaaacaagcaactgtctagacattgacagttattttctagttctgaccttatagtatccaaagcaactaaaagaacaggaagacacagtttaaatcatgaacagtcaatggtaagttatgaacattcagttgattctcagtatcagtctcgacctattattataagaagtcaggaatctagtcatggacattctatagtaactcataaacagtcaaacaacacctatgttcaacctggatataacacagccagaagggagggatgtacacatagccagtcaaatgaccaccttggatttggccatggacaatccatatcagttcatggccattcaaaatctagttcaatcagaaaacaggaatcccatactgataacaaaaagcattcagaagattgggagaaagacactcatgagcaattaggatctaggcatgggaagttagagttcaatacaataggtatacatggatctagccagcaacatttcggagatacaacttttcatgggcaggtaagatccagcacaggttttgccagataggtattaagtcatgggccatcaagagatgcctagggtcagtctggattcagtaccaatgaaagacaagtatacagccatggccaatcaaatgatagttatgagtagtcaaatgacagcaaaagtcaaagatacattttcagtcactttcttgacagccaagaccctgcaggaattgaagagtataggtatagatattcatcaagcagtgcaaccatatgcagtgggggagacaaaggcaagagtcagagtcaagtctgtcaggaggtatcagaatatacggtgaggatgtgggcaaaaaacaaagaggctctgaggccagcggttaccatacaaaggaaagaacaggctctggttccttctgcttagatagcaacaccccactctatgaatatgtccaagaacaaaggagttattactttgaataagaagccaacataaactagcccaagataagaactaacccagagaagaaatgagacacatacatgaaattaaggtatttaacatgatctcctcttttggtagtaagggtatatgtctgttctttcattttaactatagttctgtactatattacttttgtttggtgccaggtgtttttgtaaggctccacattcattgaactccttggttagaaaatagtgaatgaggccgggcgcggtggctcacgcctgtaatcccagcactttgggaggccaagatgggtggatcacgaagtcaggagttcgagaccagcctggccaacatagtgaaatcccgtctctactaaaaatacaaaaattagctgggtgcagtagcgggcacctgtaatcctagctactcaggaggctgaggcaggagaattggttgaacccgggaggcagaggttgcagtgagccgagatcgcaccactgcactccagcctgggtgactgagcaagactccaccttgaaaaaaagaaagaaagaaaatagtgaatggaagaaaaagataaacaccatttggggctatattcagaactatataataaagagagatttgtgtggttgggaataaaattaggttttaaaaaaatttccgaatttcaaaatttggattttccagattttgttttaattaattattgacaaacctatccaaggagctaaatgacgtggtttaggagccaaaacgtctctagaaacattataacacatcccatcctgaacaaagaatgttgtcatagtttcccacatgaatattcagaatatttgcatctttttgtgtcactactggaattctgtacaattatatttaaatttattgtcatggccttctggatataggatccagaaaattgtacttcataaaaattggcaataaacatttcatcaagttata

SEQ ID NO: 134578 - DNA, 4580 bp, Homo sapiens
  Payload ID: 6295
  Gene Symbol: FILIP1
  Gene Name: filamin A interacting protein 1
  Uniprot ID: Q7Z7B0
  ENST ID: ENST00000237172
  CDS Start-End: 332-3973
acccaacaacacctagcaacagtagaaaaaacttttaaacaaaagtctgggtgggagatatacaacaacttccaatttctgctgatcgggatttcagggagaagaagctgctttccctcctctctactctgtttcctgcatgacttcagctattggctggtcctgggaaagaaagtgggaaaagctttttcctctgtattcttttgggctggatagtttttgagaactcgaatctgtcttgggctgtgagacaagccactgggttcttcaaaggataaactacctacatagaggacatacctttggttaaaggagctgccgtcaggtgggaatgagatctcgaaaccaaggtggtgaaagtgcatctgatgggcatatctcctgtcccaagccctccatcatcggcaatgctggtgaaaaaagtctctcagaagatgcaaaaaagaagaagaaatcaaataggaaggaggatgatgtcatggcctcaggaactgtcaaacgacacctaaaaacatctggagaatgtgaacgaaaaactaagaaatccctggagttatccaaagaagacctcatccaactactcagtataatggaaggggagttgcaggccagagaagatgtgatccacatgctgaagacagagaaaaccaagcctgaggttctggaggctcattacgggtctgcggagccagagaaagtgctgcgggtcctgcaccgagatgccattcttgcccaggagaaatccataggagaagatgtctatgagaaaccgatttcagagctggacagacttgaggaaaaacagaaagaaacctaccggcgcatgctagagcagctgttgctggccgagaagtgtcataggcgcaccgtatacgagttagagaacgagaagcataaacacactgactacatgaacaagagcgacgacttcaccaacctgctggagcaggagcgggagaggttaaaaaagctccttgaacaagaaaaggcttatcaagcccgcaaagaaaaggaaaatgctaaacgactcaataaactaagagatgagcttgttaaactcaaatcctttgcactcatgctggtggatgaaagacaaatgcacattgaacaacttggcctgcaaagccagaaagtacaggatcttactcagaagctgagggaagaagaagagaagctcaaagccattacttccaaatccaaagaagacagacagaaattgctcaagttagaagtggactttgaacacaaggcttcgaggttttctcaagagcatgaagagatgaacgctaaactggctaatcaagagtctcacaataggcaacttagactcaagctggttggcttaacccaaagaatcgaggagctagaagagaccaacaaaaatctgcagaaggcagaggaagaacttcaagaattaagagataaaattgccaaaggagaatgtggaaactctagcctcatggcagaagtggaaaatcttcgaaagcgtgtgcttgaaatggaaggtaaagatgaggagatcactaaaactgaatcccagtgtagggaattgaggaagaagctgcaagaggaagaacaccatagtaaggagctcagacttgaagttgagaagctacagaagagaatgtctgaactagagaaattggaagaagcatttagcaagagtaaatctgagtgcacccagctacatttaaatctggagaaagaaaagaacttaaccaaagacctgctaaatgaattggaggtggtcaagagtcgagttaaagaattggaatgttctgaaagtagattggaaaaggctgaattaagcctaaaagatgatcttaccaagttgaagtcatttaccgtgatgctggttgatgaaaggaaaaatatgatggaaaaaataaaacaagaagagagaaaagtggatggactcaataaaaattttaaggtggaacaaggaaaagttatggatgtaactgaaaaactaattgaagaaagtaagaaacttttaaaactaaaatctgaaatggaggaaaaagtatacaacttgacaagagaaagagatgagttgataggcaaattgaaaagtgaagaagaaaaatcctctgaattaagctgcagtgttgacttactaaagaagagacttgatggtatagaggaagtggaaagagaaataacaagaggaaggtcacgaaaagggtctgagctcacctgcccggaagataataagattaaggaactaacacttgaaattgagagactgaagaaacgtctccaacaattggaagtggtcgaaggggatttgatgaagacagaagatgagtatgatcagctggaacagaaatttagaactgagcaggataaggctaacttcctctctcaacaactagaggagatcaagcaccaaattgccaagaataaagcaatagagaagggtgaggttgtgagccaggaagctgaactgagacacagatttcggttggaagaagctaaaagtcgagacttaaaagccgaagtacaagctcttaaagagaagattcacgaattaatgaacaaagaagatcagctttctcagctccaggtagattattctgtacttcaacaaagatttatggaagaagaaaataagaacaaaaacatggggcaggaggttctcaatctgaccaaagagttggagctttccaagcgctacagcagagctcttaggcccagtgtgaatggaagaagaatggtggatgttcctgtgacgtcaactggagtccaaactgatgcagtcagcggtgaagcagcagaggaagaaacgccagctgtattcatacggaaatccttccaggaagaaaatcatattatgagtaatcttcggcaggtgggattgaagaaacccgtggaaagatcttctgttctagacaggtatcctccagcagcaaatgagctcactatgagaaagtcttggattccatggatgagaaagagggaaaacggcccctccatcactcaggagaaagggccccgaacaaattccagtccagggcacccaggagaggtagtcctttcaccaaagcagggccagcccctgcatattcgagtgacaccagaccacgagaacagcactgcgactttggagataacaagcccgacatctgaagaatttttttctagtaccactgtcattcctaccttagggaatcagaaaccaagaataaccattattccatcaccaaacgttatgcctcaaaaacaaaaaagtggagatactactcttggcccagaacgagccatgtccccagtcacaattactacattttccagagagaagactccagaaagtggaagaggcgcatttgcagacaggcccacatcccctattcagataatgacggtgtctacatcagcagcaccagctgagattgcagtttctcccgaatcccaggaaatgcccatgggacggacaatcctcaaagtcaccccagaaaaacagactgttccaactccagtacggaaatacaactccaatgccaatatcataaccacagaggacaataaaattcacattcacttagggtctcagtttaaacggtcccctgggacttcaggtgaaggagtcagtccagttattactgtccgaccagtaaacgtgacagccgaaaaggaggtttccaccggcactgtccttcgctctcccaggaatcacctctcctcacggcctggtgcaagcaaagtgacgagcactatcaccataacaccggtcacaacgtcatctgctcgaggaacccagtcagtgtcaggacaagacgggtcatcccagcggcctacacccacccgcattcctatgtcaaaaggtatgaaagcaggaaagccagtagtggcagccccaggagcaggaaatctgaccaaattcgagcctcgagctgagactcagtctatgaaaatagagctgaagaaatctgcagccagcagcaccacctctctcggaggggggaagggctgagggcagtggctaagggggtatgttgtgcagatgctactgctgccgtgaaagtgaaccttcatctgtttgtgccagttctttacatgtactaatttaagttttaaatattgtgtttataaaataaccaactaataaccatttgtctttcccattttgtgcatttgttttgatgctggggaacaaaattagcaaaactattgcttgctgcctagaagccagggcgtggtttctagttccagttttgcttctagcaagtggacccatcaatagacccatctgagcctgtttcctcatcagttagatgtggggactcaatcacacgctcttcaagtccggctcccatatttcctaattgcaagccaaatttaatgtaccttgttccacaataattttttattaaaaaaatcctattacaaaataagacatactttaactattgtcatttgcctctttcacatcatgaatttgctttatgtgctggaaaaaacatcacatagctatcacagggcctggacctctaaaattttgcaaaaacaaaaggttctaagatgatttcaggaaataatgtgaacatgtaataaaatggaaatgaaatatggaatcctaa

SEQ ID NO: 134579 - DNA, 4051 bp, Homo sapiens
  Payload ID: 6295
  Gene Symbol: FILIP1
  Gene Name: filamin A interacting protein 1
  ENST ID: ENST00000370020
  CDS Start-End: 108-3452
attcaataagctctctgttgattttttgagcccagtatgcgatttacattgtcagtcgtctgatcttgctgcactttctattacaggccagagaagatgtgatccacatgctgaagacagagaaaaccaagcctgaggttctggaggctcattacgggtctgcggagccagagaaagtgctgcgggtcctgcaccgagatgccattcttgcccaggagaaatccataggagaagatgtctatgagaaaccgatttcagagctggacagacttgaggaaaaacagaaagaaacctaccggcgcatgctagagcagctgttgctggccgagaagtgtcataggcgcaccgtatacgagttagagaacgagaagcataaacacactgactacatgaacaagagcgacgacttcaccaacctgctggagcaggagcgggagaggttaaaaaagctccttgaacaagaaaaggcttatcaagcccgcaaagaaaaggaaaatgctaaacgactcaataaactaagagatgagcttgttaaactcaaatcctttgcactcatgctggtggatgaaagacaaatgcacattgaacaacttggcctgcaaagccagaaagtacaggatcttactcagaagctgagggaagaagaagagaagctcaaagccattacttccaaatccaaagaagacagacagaaattgctcaagttagaagtggactttgaacacaaggcttcgaggttttctcaagagcatgaagagatgaacgctaaactggctaatcaagagtctcacaataggcaacttagactcaagctggttggcttaacccaaagaatcgaggagctagaagagaccaacaaaaatctgcagaaggcagaggaagaacttcaagaattaagagataaaattgccaaaggagaatgtggaaactctagcctcatggcagaagtggaaaatcttcgaaagcgtgtgcttgaaatggaaggtaaagatgaggagatcactaaaactgaatcccagtgtagggaattgaggaagaagctgcaagaggaagaacaccatagtaaggagctcagacttgaagttgagaagctacagaagagaatgtctgaactagagaaattggaagaagcatttagcaagagtaaatctgagtgcacccagctacatttaaatctggagaaagaaaagaacttaaccaaagacctgctaaatgaattggaggtggtcaagagtcgagttaaagaattggaatgttctgaaagtagattggaaaaggctgaattaagcctaaaagatgatcttaccaagttgaagtcatttaccgtgatgctggttgatgaaaggaaaaatatgatggaaaaaataaaacaagaagagagaaaagtggatggactcaataaaaattttaaggtggaacaaggaaaagttatggatgtaactgaaaaactaattgaagaaagtaagaaacttttaaaactaaaatctgaaatggaggaaaaagtatacaacttgacaagagaaagagatgagttgataggcaaattgaaaagtgaagaagaaaaatcctctgaattaagctgcagtgttgacttactaaagaagagacttgatggtatagaggaagtggaaagagaaataacaagaggaaggtcacgaaaagggtctgagctcacctgcccggaagataataagattaaggaactaacacttgaaattgagagactgaagaaacgtctccaacaattggaagtggtcgaaggggatttgatgaagacagaagatgagtatgatcagctggaacagaaatttagaactgagcaggataaggctaacttcctctctcaacaactagaggagatcaagcaccaaattgccaagaataaagcaatagagaagggtgaggttgtgagccaggaagctgaactgagacacagatttcggttggaagaagctaaaagtcgagacttaaaagccgaagtacaagctcttaaagagaagattcacgaattaatgaacaaagaagatcagctttctcagctccaggtagattattctgtacttcaacaaagatttatggaagaagaaaataagaacaaaaacatggggcaggaggttctcaatctgaccaaagagttggagctttccaagcgctacagcagagctcttaggcccagtgtgaatggaagaagaatggtggatgttcctgtgacgtcaactggagtccaaactgatgcagtcagcggtgaagcagcagaggaagaaacgccagctgtattcatacggaaatccttccaggaagaaaatcatattatgagtaatcttcggcaggtgggattgaagaaacccgtggaaagatcttctgttctagacaggtatcctccagcagcaaatgagctcactatgagaaagtcttggattccatggatgagaaagagggaaaacggcccctccatcactcaggagaaagggccccgaacaaattccagtccagggcacccaggagaggtagtcctttcaccaaagcagggccagcccctgcatattcgagtgacaccagaccacgagaacagcactgcgactttggagataacaagcccgacatctgaagaatttttttctagtaccactgtcattcctaccttagggaatcagaaaccaagaataaccattattccatcaccaaacgttatgcctcaaaaacaaaaaagtggagatactactcttggcccagaacgagccatgtccccagtcacaattactacattttccagagagaagactccagaaagtggaagaggcgcatttgcagacaggcccacatcccctattcagataatgacggtgtctacatcagcagcaccagctgagattgcagtttctcccgaatcccaggaaatgcccatgggacggacaatcctcaaagtcaccccagaaaaacagactgttccaactccagtacggaaatacaactccaatgccaatatcataaccacagaggacaataaaattcacattcacttagggtctcagtttaaacggtcccctgggacttcaggtgaaggagtcagtccagttattactgtccgaccagtaaacgtgacagccgaaaaggaggtttccaccggcactgtccttcgctctcccaggaatcacctctcctcacggcctggtgcaagcaaagtgacgagcactatcaccataacaccggtcacaacgtcatctgctcgaggaacccagtcagtgtcaggacaagacgggtcatcccagcggcctacacccacccgcattcctatgtcaaaaggtatgaaagcaggaaagccagtagtggcagccccaggagcaggaaatctgaccaaattcgagcctcgagctgagactcagtctatgaaaatagagctgaagaaatctgcagccagcagcaccacctctctcggaggggggaagggctgagggcagtggctaagggggtatgttgtgcagatgctactgctgccgtgaaagtgaaccttcatctgtttgtgccagttctttacatgtactaatttaagttttaaatattgtgtttataaaataaccaactaataaccatttgtctttcccattttgtgcatttgttttgatgctggggaacaaaattagcaaaactattgcttgctgcctagaagccagggcgtggtttctagttccagttttgcttctagcaagtggacccatcaatagacccatctgagcctgtttcctcatcagttagatgtggggactcaatcacacgctcttcaagtccggctcccatatttcctaattgcaagccaaatttaatgtaccttgttccacaataattttttattaaaaaaatcctattacaaaataagacatactttaactattgtcatttgcctctttcacatcatgaatttgctttatgtgctggaaaaaacatcacatagctatcacagggcctggacctctaaaattttgcaaaaacaaaaggttctaagatgatttcaggaaataatgtgaacatgtaataaaatggaaatgaaatatgg

SEQ ID NO: 134580 - DNA, 7807 bp, Homo sapiens
  Payload ID: 6295
  Gene Symbol: FILIP1
  Gene Name: filamin A interacting protein 1
  Uniprot ID: Q7Z7B0
  ENST ID: ENST00000393004
  CDS Start-End: 223-3756
gctttccctcctctctactctgtttcctgcatgacttcagctattggctggtcctgggaaagaaagtgggaaaagctttttcctctgtattcttttgggctggatagtttttgagaactcgaatctgtcttgggctgtgagacaagccactgggttcttcaaaggataaactacctacatagaggacatacctttggttaaaggagctgccgtcaggtgggaatgagatctcgaaaccaaggtggtgaaagtgcatctgatgggcatatctcctgtcccaagccctccatcatcggcaatgctggtgaaaaaagtctctcagaagatgcaaaaaagaagaagaaatcaaataggaaggaggatgatgtcatggcctcaggaactgtcaaacgacacctaaaaacatctggagaatgtgaacgaaaaactaagaaatccctggagttatccaaagaagacctcatccaactactcagtataatggaaggggagttgcaggccagagaagatgtgatccacatgctgaagacagagaaaaccaagcctgaggttctggaggctcattacgggtctgcggagccagagaaagtgctgcgggtcctgcaccgagatgccattcttgcccaggagaaatccataggagaagatgtctatgagaaaccgatttcagagctggacagacttgaggaaaaacagaaagaaacctaccggcgcatgctagagcagctgttgctggccgagaagtgtcataggcgcaccgtatacgagttagagaacgagaagcataaacacactgactacatgaacaagagcgacgacttcaccaacctgctggagcaggagcgggagaggttaaaaaagctccttgaacaagaaaaggcttatcaagcccgcaaagaaaaggaaaatgctaaacgactcaataaactaagagatgagcttgttaaactcaaatcctttgcactcatgctggtggatgaaagacaaatgcacattgaacaacttggcctgcaaagccagaaagtacaggatcttactcagaagctgagggaagaagaagagaagctcaaagccattacttccaaatccaaagaagacagacagaaattgctcaagttagaagtggactttgaacacaaggcttcgaggttttctcaagagcatgaagagatgaacgctaaactggctaatcaagagtctcacaataggcaacttagactcaagctggttggcttaacccaaagaatcgaggagctagaagagaccaacaaaaatctgcagaaggcagaggaagaacttcaagaattaagagataaaattgccaaaggagaatgtggaaactctagcctcatggcagaagtggaaaatcttcgaaagcgtgtgcttgaaatggaaggtaaagatgaggagatcactaaaactgaatcccagtgtagggaattgaggaagaagctgcaagaggaagaacaccatagtaaggagctcagacttgaagttgagaagctacagaagagaatgtctgaactagagaaattggaagaagcatttagcaagagtaaatctgagtgcacccagctacatttaaatctggagaaagaaaagaacttaaccaaagacctgctaaatgaattggaggtggtcaagagtcgagttaaagaattggaatgttctgaaagtagattggaaaaggctgaattaagcctaaaagatgatcttaccaagttgaagtcatttaccgtgatgctggttgatgaaaggaaaaatatgatggaaaaaataaaacaagaagagagaaaagtggatggactcaataaaaattttaaggtggaacaaggaaaagttatggatgtaactgaaaaactaattgaagaaagtaagaaacttttaaaactaaaatctgaaatggaggaaaaagtatacaacttgacaagagaaagagatgagttgataggcaaattgaaaagtgaagaagaaaaatcctctgaattaagctgcagtgttgacttactaaagaagagacttgatggtatagaggaagtggaaagagaaataacaagaggaaggtcacgaaaagggtctgagctcacctgcccggaagataataagattaaggaactaacacttgaaattgagagactgaagaaacgtctccaacaattggaagtggtcgaaggggatttgatgaagacagaagatgagtatgatcagctggaacagaaatttagaactgagcaggataaggctaacttcctctctcaacaactagaggagatcaagcaccaaattgccaagaataaagcaatagagaagggtgaggttgtgagccaggaagctgaactgagacacagatttcggttggaagaagctaaaagtcgagacttaaaagccgaagtacaagctcttaaagagaagattcacgaattaatgaacaaagaagatcagctttctcagctccaggtagattattctgtacttcaacaaagatttatggaagaagaaaataagaacaaaaacatggggcaggaggttctcaatctgaccaaagagttggagctttccaagcgctacagcagagctcttaggcccagtgtgaatggaagaagaatggtggatgttcctgtgacgtcaactggagtccaaactgatgcagtcagcggtgaagcagcagaggaagaaacgccagctgtattcatacggaaatccttccaggaagaaaatcatattatgagtaatcttcggcaggtgggattgaagaaacccgtggaaagatcttctgttctagacaggtatcctccagcagcaaatgagctcactatgagaaagtcttggattccatggatgagaaagagggaaaacggcccctccatcactcaggagaaagggccccgaacaaattccagtccagggcacccaggagaggtagtcctttcaccaaagcagggccagcccctgcatattcgagtgacaccagaccacgagaacagcactgcgactttggagataacaagcccgacatctgaagaatttttttctagtaccactgtcattcctaccttagggaatcagaaaccaagaataaccattattccatcaccaaacgttatgcctcaaaaacaaaaaagtggagatactactcttggcccagaacgagccatgtccccagtcacaattactacattttccagagagaagactccagaaagtggaagaggcgcatttgcagacaggcccacatcccctattcagataatgacggtgtctacatcagcagcaccagctgagattgcagtttctcccgaatcccaggaaatgcccatgggacggacaatcctcaaagtcaccccagaaaaacagactgttccaactccagtacggaaatacaactccaatgccaatatcataaccacagaggacaataaaattcacattcacttagggtctcagtttaaacggtcccctgggacttcaggtgaaggagtcagtccagttattactgtccgaccagtaaacgtgacagccgaaaaggaggtttccaccggcactgtccttcgctctcccaggaatcacctctcctcacggcctggtgcaagcaaagtgacgagcactatcaccataacaccggtcacaacgtcatctgctcgaggaacccagtcagtgtcaggacaagacgggtcatcccagcggcctacacccacccgcattcctatgtcaaaagaaagcatcatcattcaccagttacgaatgaactccagatgaaatggtaaaccaagcacatactgggtgtgtgtacgacctctgaatccctattgaatggacagccctcaatcatgactaaggtcctccatgctactgatcactactggaaatattttactacttccagtgatttttttttaaggatataatgtaaaaagctgaaaatggccttgctgataatatgaaaatatgtagcaagagcaattcaatctatgtgccaaaagaaatttctttttgcaaagctttcaggtctatgggcacatgctgtataacttatattttataatacattttgtaatgtgattttttttgctaaagtgtttccctttttcatagtctctggcacatatatctatggaatacgctgtcagttcttcaaagtactggtattgttgcattcaaaatggtaatctataattattttctttttatcaatttgttaattctgaaaaaaagaaagtacaactatatttcctgaggtaaattcaagaggtaaaacttagaagcaggagactctggaagaggttttactattgcttgtacaatgctatggttctgatcatggttcaatgctaacaaataatgctctgacttaaaagcttaattttaaatactaaaaatcagtttctaaagttgctctttctggtgttctgggccaaaaaccttggatgaaatgatttttatatagaacaaattcataaaaggagatgtaccagtttaaccagtaagggcaataagaacagcttcgactgacagttcaattatacttctgattgcattatttacttgtatgtataagacttataataaggactgtgaaataaagatagttctcacaatctaatccaatcaaaacttgaatataaaaacagacctaaaatgtcaggatcttttttaaaaaataagactgggcatggtgggtcgtgcctgtaatcccagcactttgggaggccaaggcgggagaatcgcttaagcccaggagttcaggatcagcctgggcaacacagtgagagtcttaaaaaaaaaaaaaaaaaaaaaaaaaaaaagaagttagctgggcctgattgcacgtgcctgtagtcctagctacttgggagtctgaggtgggaggatcacttgagcccaggagatggaggctgcagggagccatgattgtgtcactgtactccagcctgggtgacagagtgagactctgtctcaaaacaaagacaaacccacacacacacaaaaacccccaaaacccagaaggaaaaagtagtacaagaaatctcaggatcgataacttttttccccttgattttgaaagattttcgtaactacaggtaggtcagagaatatattctttgaagataaaaagcacaacgtgcattactcaaatctcaacgtcagagctactgttgaatttaggtttatgtgaaaatgtgcatctaaagtctacttgaaaccctggtaatatacttttttttttaaagactgttaatatggacatgtttttagtaaggtctttaaagataactttaaagataaattaagagttgacacatcagtttctgaatgtggaagtcatttatcatgtaactttactgaaattaaagagagaatgcttctgagtgtcacaaggataactaaaagccacacaaggaggactgctggcccatttctctagttcacaggttgtgctcagctttagaagcccacacacgggcatccaaactgagtctctggaatagaaaaattaatgatggacttcctcccctatgtaaccttggaaggttttaagttacaccttggggaattggcaaatcattttcaacatgtattataaattatatgatgttaaaattatttttaattttttaaagtaaaagaaatgttacagtaggcttgccatagcttgaatgattgtgaaaacatcacataaacttccagaattttggttactaagaaaactggagtgtgtatgtgtgattttttagaattgttactgggttttgttttctgaaaatgttgactgtaatgacattttcaattagaaaagtgttttagttagtactgttatattttttgactcacagttaagtatcctatttgccaatgtttgtacctctgatggcaaaattatttgatatattagattagtatttgaagcaaataactttctcaacttgtgggaattttattatactaatagtgaaaatgttagaggataagattttaaatacttcttgatttaaattaaaatactataagaaatgtatgtatatttggatttgaagattttttttccccagatttataatgaatttggaacttacaagaacaatgaggatgatggtgcaatcagagtcatttagatagatggtgagccttttctgtccatgctatgattaagtcctctgtttaaacccaaatgcaatctgagtgacacatgaataaaattaattagattaattttgaaataagagaatatgcaaaattaaccaaaaaacccccagaaaacactggtcatctccttctctaatgaataaggaaataagatcataaatagtcccatctcaacatgcatatgcaattgaaaaaactgccctcacaggcaatcctggcacaatcctaggctcataaaatttctctatcttttcttgtaaataagtctccagtcatcattctaaatgggaatcatttttaatgaaataattataactgttttctgaaatataatcataatcagtgtttctagttcaaggtacaattgaactaatccataattttacccttttctttttgataagagagtgtttcatgagggtatctttggtagagatcttttctcaagtattttataaaatattcgagtttgatgaagatggtagataaatacaccagctgtcagatgcctataattttcacaaaatgtgaagaattcattgtatcttaggatgaccataaaaaaattcatggtgtggaatctctaagcattaatagagacaacagcgctactgcagtaatacacagctactacaaatcagtggcagagcaagaataagtggtgtatcaggcaatgtgaagtttttgccttttctcctaatgctgtggttgagttttcctggaaatgaaggaaaaaaacatagcaaaagtagggtgtgttaatgaatctgatgagcaacaagtctaaaaatagcaaaagtgcaaaatggaagttaaaaaacgcaactggcacctgaagcatatttccccttctttatctccagtgctatgcctctgctaaaaatatgaatcacaaagcaaaggaaaaagagaaaaaaagtgttgtaatacagtaaaaatcactataataaaagtttataagaattgagttttttggaattgactttggcctagtaaccattagtatttcttaatttttcagcatttattccatactaatgtgataacaactgtgtgtgttacctagagaaaatgctgtagatccacacatttgaacagaaatgtttatcgatgccataacgtgatacatttgctttccggtgttgttttttgtttatattatttagggaaattttaccttaccatcacagattttgttactttaataatgcagaactatatttatttaatctagattttgttttaaaattatcaagtgttagcttttacaaataagaggcttataatgtggccagatattcttagaattcttttaggtctaagtgttttcaaaactttaagaaatacattctatttttgcaccatttaaaattttgtttccttttaagttttattaagtacacgagaagtttattatttttcattgaatccaagtgaatttatggatatgtacttatcttttatatgaatgtaatagcttgctttcagttcctcacaggtcattgaaattatttaaccaatgaaaacattctctgttacttccaaagtcaactatgtttatcaaaatctcactagtgtgagaaaaataacaagtgtaatattaaagcattgtgcaatatcttgagttggaacataatattcagaaaattaaaatcatttaaaatga

SEQ ID NO: 134581 - DNA, 4219 bp, Homo sapiens
  Payload ID: 6296
  Gene Symbol: FILIP1L
  Gene Name: filamin A interacting protein 1-like
  Uniprot ID: Q4L180
  ENST ID: ENST00000331335
  CDS Start-End: 472-3873
acacacacacacacacacagacgtgctcacggagcctgtgcctgcctctacttgtctgctctgcgcagatggttcctggcttttgggtcacctcatcctgcagcccagtccagttagaacctttcttccacagagactggcaagctgtggggtaagagttttggtaaggctgcctgtcttcagagcatgaaggacactgcccggagagggaagagggcaatatttagtgtttgggcctacttgttgttgggctccccactgcctctcctttgcagagctatcactggcccctggttgcaaactctcggtggctttcaagcctacaaaacaaaaactgagagggtgtccaaaaagagaagaagaaaacgttgttgttggtcctggattccactgttggattttggtggggatgagaagaaggaattaccaggtgtgatcaacacctgcacggtacctgcacggctttaaagaatgcgttccagaggcagtgataccgagggctcagcccaaaagaaatttccaagacatactaaaggccacagtttccaagggcctaaaaacatgaagcatagacagcaagacaaagactcccccagtgagtcggatgtaatacttccgtgtcccaaggcagagaagccacacagtggtaatggccaccaagcagaagacctctcaagagatgacctgttatttctcctcagcattctggagggagaactgcaggctcgagatgaggtcataggcattttaaaggctgaaaaaatggacctggctttgctggaagctcagtatgggtttgtcactccaaaaaaggtgttagaggctctccagagagatgcttttcaagcgaaatctaccccttggcaggaggacatctatgagaaaccaatgaatgagttggacaaagttgtggaaaaacataaagaatcttacagacgaatcctgggacagcttttagtggcagaaaaatcccgtaggcaaaccatattggagttggaggaagaaaagagaaaacataaagaatacatggagaagagtgatgaattcatatgcctactagaacaggaatgtgaaagattaaagaagctaattgatcaagaaatcaagtctcaggaggagaaggagcaagaaaaggagaaaagggtcaccaccctgaaagaggagctgaccaagctgaagtcttttgctttgatggtggtggatgaacagcaaaggctgacggcacagctcacccttcaaagacagaaaatccaagagctgaccacaaatgcaaaggaaacacataccaaactagcccttgctgaagccagagttcaggaggaagagcagaaggcaaccagactagagaaggaactgcaaacgcagaccacaaagtttcaccaagaccaagacacaattatggcgaagctcaccaatgaggacagtcaaaatcgccagcttcaacaaaagctggcagcactcagccggcagattgatgagttagaagagacaaacaggtctttacgaaaagcagaagaggagctgcaagatataaaagaaaaaatcagtaagggagaatatggaaacgctggtatcatggctgaagtggaagagctcaggaaacgtgtgctagatatggaagggaaagatgaagagctcataaaaatggaggagcagtgcagagatctcaataagaggcttgaaagggagacgttacagagtaaagactttaaactagaggttgaaaaactcagtaaaagaattatggctctggaaaagttagaagacgctttcaacaaaagcaaacaagaatgctactctctgaaatgcaatttagaaaaagaaaggatgaccacaaagcagttgtctcaagaactggagagtttaaaagtaaggatcaaagagctagaagccattgaaagtcggctagaaaagacagaattcactctaaaagaggatttaactaaactgaaaacattaactgtgatgtttgtagatgaacggaaaacaatgagtgaaaaattaaagaaaactgaagataaattacaagctgcttcttctcagcttcaagtggagcaaaataaagtaacaacagttactgagaagttaattgaggaaactaaaagggcgctcaagtccaaaaccgatgtagaagaaaagatgtacagcgtaaccaaggagagagatgatttaaaaaacaaattgaaagcggaagaagagaaaggaaatgatctcctgtcaagagttaatatgttgaaaaataggcttcaatcattggaagcaattgagaaagatttcctaaaaaacaaattaaatcaagactctgggaaatccacaacagcattacaccaagaaaacaataagattaaggagctctctcaagaagtggaaagactgaaactgaagctaaaggacatgaaagccattgaggatgacctcatgaaaacagaagatgaatatgagactctagaacgaaggtatgctaatgaacgagacaaagctcaatttttatctaaagagctagaacatgttaaaatggaacttgctaagtacaagttagcagaaaagacagagaccagccatgaacaatggcttttcaaaaggcttcaagaagaagaagctaagtcagggcacctctcaagagaagtggatgcattaaaagagaaaattcatgaatacatggcaactgaagacctaatatgtcacctccagggagatcactcagtcctgcaaaaaaaactaaatcaacaagaaaacaggaacagagatttaggaagagagattgaaaacctcactaaggagttagagaggtaccggcatttcagtaagagcctcaggcctagtctcaatggaagaagaatttccgatcctcaagtattttctaaagaagttcagacagaagcagtagacaatgaaccacctgattacaagagcctcattcctctggaacgtgcagtcatcaatggtcagttatatgaggagagtgagaatcaagacgaggaccctaatgatgagggatctgtgctgtccttcaaatgcagccagtctactccatgtcctgttaacagaaagctatggattccctggatgaaatccaaggagggccatcttcagaatggaaaaatgcaaactaaacccaatgccaactttgtgcaacctggagatctagtcctaagccacacacctgggcagccacttcatataaaggttactccagaccatgtacaaaacacagccactcttgaaatcacaagtccaaccacagagagtcctcactcttacacgagtactgcagtgataccgaactgtggcacgccaaagcaaaggataaccatcctccaaaacgcctccataacaccagtaaagtccaaaacctctaccgaagacctcatgaatttagaacaaggcatgtccccaattaccatggcaacctttgccagagcacagaccccagagtcttgtggttctctaactccagaaaggacaatgtcccctattcaggttttggctgtgactggttcagctagctctcctgagcagggacgctccccagaaccaacagaaatcagtgccaagcatgcgatattcagagtctccccagaccggcagtcatcatggcagtttcagcgttcaaacagcaatagctcaagtgtgataactactgaggataataaaatccacattcacttaggaagtccttacatgcaagctgtagccagccctgtgagacctgccagcccttcagcaccactgcaggataaccgaactcaaggcttaattaacggggcactaaacaaaacaaccaataaagtcaccagcagtattactatcacaccaacagccacacctcttcctcgacaatcacaaattacagtaagtaatatatataactgaccacgctcaccctcatccagtccatactgatatttttgcaaggaactcaatccttttttaatcatccctccatatcccccaagactgactgaactcgtactttgggaaggtttgtgcatgaactatacaagagtatctgaaactaactgttgcctgcatagtcatatcgagtgtgcacttactgtatatcttttcatttacatacttgtatggaaaatatttagtctgcacttgtataaatacatctttatgtatttcattttccataactcactttaatttgactgcaacttgtcttggtgaaatactttaacattataaaacagtaaataatttgttattttta

SEQ ID NO: 134582 - DNA, 3970 bp, Homo sapiens
  Payload ID: 6296
  Gene Symbol: FILIP1L
  Gene Name: filamin A interacting protein 1-like
  Uniprot ID: Q4L180
  ENST ID: ENST00000354552
  CDS Start-End: 472-3879
acacacacacacacacacagacgtgctcacggagcctgtgcctgcctctacttgtctgctctgcgcagatggttcctggcttttgggtcacctcatcctgcagcccagtccagttagaacctttcttccacagagactggcaagctgtggggtaagagttttggtaaggctgcctgtcttcagagcatgaaggacactgcccggagagggaagagggcaatatttagtgtttgggcctacttgttgttgggctccccactgcctctcctttgcagagctatcactggcccctggttgcaaactctcggtggctttcaagcctacaaaacaaaaactgagagggtgtccaaaaagagaagaagaaaacgttgttgttggtcctggattccactgttggattttggtggggatgagaagaaggaattaccaggtgtgatcaacacctgcacggtacctgcacggctttaaagaatgcgttccagaggcagtgataccgagggctcagcccaaaagaaatttccaagacatactaaaggccacagtttccaagggcctaaaaacatgaagcatagacagcaagacaaagactcccccagtgagtcggatgtaatacttccgtgtcccaaggcagagaagccacacagtggtaatggccaccaagcagaagacctctcaagagatgacctgttatttctcctcagcattctggagggagaactgcaggctcgagatgaggtcataggcattttaaaggctgaaaaaatggacctggctttgctggaagctcagtatgggtttgtcactccaaaaaaggtgttagaggctctccagagagatgcttttcaagcgaaatctaccccttggcaggaggacatctatgagaaaccaatgaatgagttggacaaagttgtggaaaaacataaagaatcttacagacgaatcctgggacagcttttagtggcagaaaaatcccgtaggcaaaccatattggagttggaggaagaaaagagaaaacataaagaatacatggagaagagtgatgaattcatatgcctactagaacaggaatgtgaaagattaaagaagctaattgatcaagaaatcaagtctcaggaggagaaggagcaagaaaaggagaaaagggtcaccaccctgaaagaggagctgaccaagctgaagtcttttgctttgatggtggtggatgaacagcaaaggctgacggcacagctcacccttcaaagacagaaaatccaagagctgaccacaaatgcaaaggaaacacataccaaactagcccttgctgaagccagagttcaggaggaagagcagaaggcaaccagactagagaaggaactgcaaacgcagaccacaaagtttcaccaagaccaagacacaattatggcgaagctcaccaatgaggacagtcaaaatcgccagcttcaacaaaagctggcagcactcagccggcagattgatgagttagaagagacaaacaggtctttacgaaaagcagaagaggagctgcaagatataaaagaaaaaatcagtaagggagaatatggaaacgctggtatcatggctgaagtggaagagctcaggaaacgtgtgctagatatggaagggaaagatgaagagctcataaaaatggaggagcagtgcagagatctcaataagaggcttgaaagggagacgttacagagtaaagactttaaactagaggttgaaaaactcagtaaaagaattatggctctggaaaagttagaagacgctttcaacaaaagcaaacaagaatgctactctctgaaatgcaatttagaaaaagaaaggatgaccacaaagcagttgtctcaagaactggagagtttaaaagtaaggatcaaagagctagaagccattgaaagtcggctagaaaagacagaattcactctaaaagaggatttaactaaactgaaaacattaactgtgatgtttgtagatgaacggaaaacaatgagtgaaaaattaaagaaaactgaagataaattacaagctgcttcttctcagcttcaagtggagcaaaataaagtaacaacagttactgagaagttaattgaggaaactaaaagggcgctcaagtccaaaaccgatgtagaagaaaagatgtacagcgtaaccaaggagagagatgatttaaaaaacaaattgaaagcggaagaagagaaaggaaatgatctcctgtcaagagttaatatgttgaaaaataggcttcaatcattggaagcaattgagaaagatttcctaaaaaacaaattaaatcaagactctgggaaatccacaacagcattacaccaagaaaacaataagattaaggagctctctcaagaagtggaaagactgaaactgaagctaaaggacatgaaagccattgaggatgacctcatgaaaacagaagatgaatatgagactctagaacgaaggtatgctaatgaacgagacaaagctcaatttttatctaaagagctagaacatgttaaaatggaacttgctaagtacaagttagcagaaaagacagagaccagccatgaacaatggcttttcaaaaggcttcaagaagaagaagctaagtcagggcacctctcaagagaagtggatgcattaaaagagaaaattcatgaatacatggcaactgaagacctaatatgtcacctccagggagatcactcagtcctgcaaaaaaaactaaatcaacaagaaaacaggaacagagatttaggaagagagattgaaaacctcactaaggagttagagaggtaccggcatttcagtaagagcctcaggcctagtctcaatggaagaagaatttccgatcctcaagtattttctaaagaagttcagacagaagcagtagacaatgaaccacctgattacaagagcctcattcctctggaacgtgcagtcatcaatggtcagttatatgaggagagtgagaatcaagacgaggaccctaatgatgagggatctgtgctgtccttcaaatgcagccagtctactccatgtcctgttaacagaaagctatggattccctggatgaaatccaaggagggccatcttcagaatggaaaaatgcaaactaaacccaatgccaactttgtgcaacctggagatctagtcctaagccacacacctgggcagccacttcatataaaggttactccagaccatgtacaaaacacagccactcttgaaatcacaagtccaaccacagagagtcctcactcttacacgagtactgcagtgataccgaactgtggcacgccaaagcaaaggataaccatcctccaaaacgcctccataacaccagtaaagtccaaaacctctaccgaagacctcatgaatttagaacaaggcatgtccccaattaccatggcaacctttgccagagcacagaccccagagtcttgtggttctctaactccagaaaggacaatgtcccctattcaggttttggctgtgactggttcagctagctctcctgagcagggacgctccccagaaccaacagaaatcagtgccaagcatgcgatattcagagtctccccagaccggcagtcatcatggcagtttcagcgttcaaacagcaatagctcaagtgtgataactactgaggataataaaatccacattcacttaggaagtccttacatgcaagctgtagccagccctgtgagacctgccagcccttcagcaccactgcaggataaccgaactcaaggcttaattaacggggcactaaacaaaacaaccaataaagtcaccagcagtattactatcacaccaacagccacacctcttcctcgacaatcacaaattacagtggaaccacttcttctgcctcattgaactcaacatccttcagacttttaaggcattccaaatcccagtcttcatgttgaactgggttaagcatttattaaaaaatcgttttcttcta

SEQ ID NO: 134583 - DNA, 3280 bp, Homo sapiens
  Payload ID: 6296
  Gene Symbol: FILIP1L
  Gene Name: filamin A interacting protein 1-like
  Uniprot ID: Q4L180
  ENST ID: ENST00000383694
  CDS Start-End: 248-2929
cataggccgggcgcgctcagcgccccgctcgcattgttcgggcgactctcggagcgcgcacagtcggctcgcagcgcggcactacagcggccccggcccggcccccgcccggccccggcgcaggcagttcagattaaagaagctaattgatcaagaaatcaagtctcaggaggagaaggagcaagaaaaggagaaaagggtcaccaccctgaaagaggagctgaccaagctgaagtcttttgctttgatggtggtggatgaacagcaaaggctgacggcacagctcacccttcaaagacagaaaatccaagagctgaccacaaatgcaaaggaaacacataccaaactagcccttgctgaagccagagttcaggaggaagagcagaaggcaaccagactagagaaggaactgcaaacgcagaccacaaagtttcaccaagaccaagacacaattatggcgaagctcaccaatgaggacagtcaaaatcgccagcttcaacaaaagctggcagcactcagccggcagattgatgagttagaagagacaaacaggtctttacgaaaagcagaagaggagctgcaagatataaaagaaaaaatcagtaagggagaatatggaaacgctggtatcatggctgaagtggaagagctcaggaaacgtgtgctagatatggaagggaaagatgaagagctcataaaaatggaggagcagtgcagagatctcaataagaggcttgaaagggagacgttacagagtaaagactttaaactagaggttgaaaaactcagtaaaagaattatggctctggaaaagttagaagacgctttcaacaaaagcaaacaagaatgctactctctgaaatgcaatttagaaaaagaaaggatgaccacaaagcagttgtctcaagaactggagagtttaaaagtaaggatcaaagagctagaagccattgaaagtcggctagaaaagacagaattcactctaaaagaggatttaactaaactgaaaacattaactgtgatgtttgtagatgaacggaaaacaatgagtgaaaaattaaagaaaactgaagataaattacaagctgcttcttctcagcttcaagtggagcaaaataaagtaacaacagttactgagaagttaattgaggaaactaaaagggcgctcaagtccaaaaccgatgtagaagaaaagatgtacagcgtaaccaaggagagagatgatttaaaaaacaaattgaaagcggaagaagagaaaggaaatgatctcctgtcaagagttaatatgttgaaaaataggcttcaatcattggaagcaattgagaaagatttcctaaaaaacaaattaaatcaagactctgggaaatccacaacagcattacaccaagaaaacaataagattaaggagctctctcaagaagtggaaagactgaaactgaagctaaaggacatgaaagccattgaggatgacctcatgaaaacagaagatgaatatgagactctagaacgaaggtatgctaatgaacgagacaaagctcaatttttatctaaagagctagaacatgttaaaatggaacttgctaagtacaagttagcagaaaagacagagaccagccatgaacaatggcttttcaaaaggcttcaagaagaagaagctaagtcagggcacctctcaagagaagtggatgcattaaaagagaaaattcatgaatacatggcaactgaagacctaatatgtcacctccagggagatcactcagtcctgcaaaaaaaactaaatcaacaagaaaacaggaacagagatttaggaagagagattgaaaacctcactaaggagttagagaggtaccggcatttcagtaagagcctcaggcctagtctcaatggaagaagaatttccgatcctcaagtattttctaaagaagttcagacagaagcagtagacaatgaaccacctgattacaagagcctcattcctctggaacgtgcagtcatcaatggtcagttatatgaggagagtgagaatcaagacgaggaccctaatgatgagggatctgtgctgtccttcaaatgcagccagtctactccatgtcctgttaacagaaagctatggattccctggatgaaatccaaggagggccatcttcagaatggaaaaatgcaaactaaacccaatgccaactttgtgcaacctggagatctagtcctaagccacacacctgggcagccacttcatataaaggttactccagaccatgtacaaaacacagccactcttgaaatcacaagtccaaccacagagagtcctcactcttacacgagtactgcagtgataccgaactgtggcacgccaaagcaaaggataaccatcctccaaaacgcctccataacaccagtaaagtccaaaacctctaccgaagacctcatgaatttagaacaaggcatgtccccaattaccatggcaacctttgccagagcacagaccccagagtcttgtggttctctaactccagaaaggacaatgtcccctattcaggttttggctgtgactggttcagctagctctcctgagcagggacgctccccagaaccaacagaaatcagtgccaagcatgcgatattcagagtctccccagaccggcagtcatcatggcagtttcagcgttcaaacagcaatagctcaagtgtgataactactgaggataataaaatccacattcacttaggaagtccttacatgcaagctgtagccagccctgtgagacctgccagcccttcagcaccactgcaggataaccgaactcaaggcttaattaacggggcactaaacaaaacaaccaataaagtcaccagcagtattactatcacaccaacagccacacctcttcctcgacaatcacaaattacagtaagtaatatatataactgaccacgctcaccctcatccagtccatactgatatttttgcaaggaactcaatccttttttaatcatccctccatatcccccaagactgactgaactcgtactttgggaaggtttgtgcatgaactatacaagagtatctgaaactaactgttgcctgcatagtcatatcgagtgtgcacttactgtatatcttttcatttacatacttgtatggaaaatatttagtctgcacttgtataaatacatctttatgtatttcattttccataactcactttaatttgactgcaacttgtcttggtgaaatactttaacattataaaacagtaaataatttgttatttttaccatt

SEQ ID NO: 134584 - DNA, 1712 bp, Homo sapiens
  Payload ID: 6296
  Gene Symbol: FILIP1L
  Gene Name: filamin A interacting protein 1-like
  Uniprot ID: Q4L180
  ENST ID: ENST00000398326
  CDS Start-End: 472-1239
acacacacacacacacacagacgtgctcacggagcctgtgcctgcctctacttgtctgctctgcgcagatggttcctggcttttgggtcacctcatcctgcagcccagtccagttagaacctttcttccacagagactggcaagctgtggggtaagagttttggtaaggctgcctgtcttcagagcatgaaggacactgcccggagagggaagagggcaatatttagtgtttgggcctacttgttgttgggctccccactgcctctcctttgcagagctatcactggcccctggttgcaaactctcggtggctttcaagcctacaaaacaaaaactgagagggtgtccaaaaagagaagaagaaaacgttgttgttggtcctggattccactgttggattttggtggggatgagaagaaggaattaccaggtgtgatcaacacctgcacggtacctgcacggctttaaagaatgcgttccagaggcagtgataccgagggctcagcccaaaagaaatttccaagacatactaaaggccacagtttccaagggcctaaaaacatgaagcatagacagcaagacaaagactcccccagtgagtcggatgtaatacttccgtgtcccaaggcagagaagccacacagtggtaatggccaccaagcagaagacctctcaagagatgacctgttatttctcctcagcattctggagggagaactgcaggctcgagatgaggtcataggcattttaaaggctgaaaaaatggacctggctttgctggaagctcagtatgggtttgtcactccaaaaaaggtgttagaggctctccagagagatgcttttcaagcgaaatctaccccttggcaggaggacatctatgagaaaccaatgaatgagttggacaaagttgtggaaaaacataaagaatcttacagacgaatcctgggacagcttttagtggcagaaaaatcccgtaggcaaaccatattggagttggaggaagaaaagagaaaacataaagaatacatggagaagagtgatgaattcatatgcctactagaacaggaatgtgaaagatggagtctagctctgctgccgaggctggagtgcaatggcatgatcttggctcactgcaatctctgcctcctgggttcaagtgattctcctgcctcagcattccaagtagctgggattacaggcacccgccatcatgcccagctagtttttgtatttttgtagagacagagtttcaccatgttggccaggctagtcttgaacccctgacctcaggtgatccacccacctcggcctcccaaagtgctgggataacaggcatgagccaacgcgcttgacttgcacatatatttttaatgtgtgagtgggtgcatgtcataattccagatggaaatttgtcaccacaaaacataatttttatttagctgatctttccaggtttctatttataatggaatgaaaagatgaagttgggcttatgaatcaagacaaacacaggccctggtcattgtgtaattccatatagtataatttgtttgcaatctttcattccatacacctacaatacagctctaaaaataatgctacctacaatataaagatatactttttttccaaataaccttcaaaaatgtcaaaatatgcaacaaaaatattgtatcatatctaaaccctcaaataagctacatttaaaccaa

SEQ ID NO: 134585 - DNA, 445 bp, Homo sapiens
  Payload ID: 6296
  Gene Symbol: FILIP1L
  Gene Name: filamin A interacting protein 1-like
  ENST ID: ENST00000477258
  CDS Start-End: 1-445
ccaacagaaatcagtgccaagcatgcgatattcagagtctccccagaccggcagtcatcatggcagtttcagcgttcaaacagcaatagctcaagtgtgataactactgaggataataaaatccacattcacttaggaagtccttacatgcaagctgtagccagccctgtgagacctgccagcccttcagcaccactgcaggataaccgaactcaaggcttaattaacggggcactaaacaaaacaaccaataaagtcaccagcagtattactatcacaccaacagccacacctcttcctcgacaatcacaaattacaatcaaggaggtatgcaagcagagaatcccagcacggatccctaaaccgaaatctacaggcatcaccaagatttccactaaagcccccacagtgcctatggataagcctatttaccaaaatggctgtg

SEQ ID NO: 134586 - DNA, 2321 bp, Homo sapiens
  Payload ID: 6296
  Gene Symbol: FILIP1L
  Gene Name: filamin A interacting protein 1-like
  Uniprot ID: Q4L180
  ENST ID: ENST00000487087
  CDS Start-End: 168-2303
ttcagattaaagaagctaattgatcaagaaatcaagtctcaggaggagaaggagcaagaaaaggagaaaagggtcaccaccctgaaagaggagctgaccaagctgaagtcttttgctttgatggtggtggatgaacagcaaaggttgaaaaactcagtaaaagaattatggctctggaaaagttagaagacgctttcaacaaaagcaaacaagaatgctactctctgaaatgcaatttagaaaaagaaaggatgaccacaaagcagttgtctcaagaactggagagtttaaaagtaaggatcaaagagctagaagccattgaaagtcggctagaaaagacagaattcactctaaaagaggatttaactaaactgaaaacattaactgtgatgtttgtagatgaacggaaaacaatgagtgaaaaattaaagaaaactgaagataaattacaagctgcttcttctcagcttcaagtggagcaaaataaagtaacaacagttactgagaagttaattgaggaaactaaaagggcgctcaagtccaaaaccgatgtagaagaaaagatgtacagcgtaaccaaggagagagatgatttaaaaaacaaattgaaagcggaagaagagaaaggaaatgatctcctgtcaagagttaatatgttgaaaaataggcttcaatcattggaagcaattgagaaagatttcctaaaaaacaaattaaatcaagactctgggaaatccacaacagcattacaccaagaaaacaataagattaaggagctctctcaagaagtggaaagactgaaactgaagctaaaggacatgaaagccattgaggatgacctcatgaaaacagaagatgaatatgagactctagaacgaaggtatgctaatgaacgagacaaagctcaatttttatctaaagagctagaacatgttaaaatggaacttgctaagtacaagttagcagaaaagacagagaccagccatgaacaatggcttttcaaaaggcttcaagaagaagaagctaagtcagggcacctctcaagagaagtggatgcattaaaagagaaaattcatgaatacatggcaactgaagacctaatatgtcacctccagggagatcactcagtcctgcaaaaaaaactaaatcaacaagaaaacaggaacagagatttaggaagagagattgaaaacctcactaaggagttagagaggtaccggcatttcagtaagagcctcaggcctagtctcaatggaagaagaatttccgatcctcaagtattttctaaagaagttcagacagaagcagtagacaatgaaccacctgattacaagagcctcattcctctggaacgtgcagtcatcaatggtcagttatatgaggagagtgagaatcaagacgaggaccctaatgatgagggatctgtgctgtccttcaaatgcagccagtctactccatgtcctgttaacagaaagctatggattccctggatgaaatccaaggagggccatcttcagaatggaaaaatgcaaactaaacccaatgccaactttgtgcaacctggagatctagtcctaagccacacacctgggcagccacttcatataaaggttactccagaccatgtacaaaacacagccactcttgaaatcacaagtccaaccacagagagtcctcactcttacacgagtactgcagtgataccgaactgtggcacgccaaagcaaaggataaccatcctccaaaacgcctccataacaccagtaaagtccaaaacctctaccgaagacctcatgaatttagaacaaggcatgtccccaattaccatggcaacctttgccagagcacagaccccagagtcttgtggttctctaactccagaaaggacaatgtcccctattcaggttttggctgtgactggttcagctagctctcctgagcagggacgctccccagaaccaacagaaatcagtgccaagcatgcgatattcagagtctccccagaccggcagtcatcatggcagtttcagcgttcaaacagcaatagctcaagtgtgataactactgaggataataaaatccacattcacttaggaagtccttacatgcaagctgtagccagccctgtgagacctgccagcccttcagcaccactgcaggataaccgaactcaaggcttaattaacggggcactaaacaaaacaaccaataaagtcaccagcagtattactatcacaccaacagccacacctcttcctcgacaatcacaaattacagtggaaccacttcttctgcctcattgaactcaacatccttcagac

SEQ ID NO: 134587 - DNA, 2854 bp, Homo sapiens
  Payload ID: 6296
  Gene Symbol: FILIP1L
  Gene Name: filamin A interacting protein 1-like
  Uniprot ID: Q4L180
  ENST ID: ENST00000471562
  CDS Start-End: 149-2836
ggcccccgcccggccccggcgcaggcagttcagattaaagaagctaattgatcaagaaatcaagtctcaggaggagaaggagcaagaaaaggagaaaagggtcaccaccctgaaagaggagctgaccaagctgaagtcttttgctttgatggtggtggatgaacagcaaaggctgacggcacagctcacccttcaaagacagaaaatccaagagctgaccacaaatgcaaaggaaacacataccaaactagcccttgctgaagccagagttcaggaggaagagcagaaggcaaccagactagagaaggaactgcaaacgcagaccacaaagtttcaccaagaccaagacacaattatggcgaagctcaccaatgaggacagtcaaaatcgccagcttcaacaaaagctggcagcactcagccggcagattgatgagttagaagagacaaacaggtctttacgaaaagcagaagaggagctgcaagatataaaagaaaaaatcagtaagggagaatatggaaacgctggtatcatggctgaagtggaagagctcaggaaacgtgtgctagatatggaagggaaagatgaagagctcataaaaatggaggagcagtgcagagatctcaataagaggcttgaaagggagacgttacagagtaaagactttaaactagaggttgaaaaactcagtaaaagaattatggctctggaaaagttagaagacgctttcaacaaaagcaaacaagaatgctactctctgaaatgcaatttagaaaaagaaaggatgaccacaaagcagttgtctcaagaactggagagtttaaaagtaaggatcaaagagctagaagccattgaaagtcggctagaaaagacagaattcactctaaaagaggatttaactaaactgaaaacattaactgtgatgtttgtagatgaacggaaaacaatgagtgaaaaattaaagaaaactgaagataaattacaagctgcttcttctcagcttcaagtggagcaaaataaagtaacaacagttactgagaagttaattgaggaaactaaaagggcgctcaagtccaaaaccgatgtagaagaaaagatgtacagcgtaaccaaggagagagatgatttaaaaaacaaattgaaagcggaagaagagaaaggaaatgatctcctgtcaagagttaatatgttgaaaaataggcttcaatcattggaagcaattgagaaagatttcctaaaaaacaaattaaatcaagactctgggaaatccacaacagcattacaccaagaaaacaataagattaaggagctctctcaagaagtggaaagactgaaactgaagctaaaggacatgaaagccattgaggatgacctcatgaaaacagaagatgaatatgagactctagaacgaaggtatgctaatgaacgagacaaagctcaatttttatctaaagagctagaacatgttaaaatggaacttgctaagtacaagttagcagaaaagacagagaccagccatgaacaatggcttttcaaaaggcttcaagaagaagaagctaagtcagggcacctctcaagagaagtggatgcattaaaagagaaaattcatgaatacatggcaactgaagacctaatatgtcacctccagggagatcactcagtcctgcaaaaaaaactaaatcaacaagaaaacaggaacagagatttaggaagagagattgaaaacctcactaaggagttagagaggtaccggcatttcagtaagagcctcaggcctagtctcaatggaagaagaatttccgatcctcaagtattttctaaagaagttcagacagaagcagtagacaatgaaccacctgattacaagagcctcattcctctggaacgtgcagtcatcaatggtcagttatatgaggagagtgagaatcaagacgaggaccctaatgatgagggatctgtgctgtccttcaaatgcagccagtctactccatgtcctgttaacagaaagctatggattccctggatgaaatccaaggagggccatcttcagaatggaaaaatgcaaactaaacccaatgccaactttgtgcaacctggagatctagtcctaagccacacacctgggcagccacttcatataaaggttactccagaccatgtacaaaacacagccactcttgaaatcacaagtccaaccacagagagtcctcactcttacacgagtactgcagtgataccgaactgtggcacgccaaagcaaaggataaccatcctccaaaacgcctccataacaccagtaaagtccaaaacctctaccgaagacctcatgaatttagaacaaggcatgtccccaattaccatggcaacctttgccagagcacagaccccagagtcttgtggttctctaactccagaaaggacaatgtcccctattcaggttttggctgtgactggttcagctagctctcctgagcagggacgctccccagaaccaacagaaatcagtgccaagcatgcgatattcagagtctccccagaccggcagtcatcatggcagtttcagcgttcaaacagcaatagctcaagtgtgataactactgaggataataaaatccacattcacttaggaagtccttacatgcaagctgtagccagccctgtgagacctgccagcccttcagcaccactgcaggataaccgaactcaaggcttaattaacggggcactaaacaaaacaaccaataaagtcaccagcagtattactatcacaccaacagccacacctcttcctcgacaatcacaaattacagtggaaccacttcttctgcctcattgaactcaacatccttcagac

SEQ ID NO: 134588 - DNA, 2898 bp, Homo sapiens
  Payload ID: 6296
  Gene Symbol: FILIP1L
  Gene Name: filamin A interacting protein 1-like
  ENST ID: ENST00000495625
  CDS Start-End: 388-2898
acagtcggctcgcagcgcggcactacagcggccccggcccggcccccgcccggccccggcgcaggcagttcagggaagcccaccataatgagaagagcggggccaacacccatgtcactgtggagaagtacagaatatgcaatggaagagttgtttatctgatataagcggtaattggaaactgaaaaattcctgctctggaaaaaagatattctgctcttctgaatctaacagaggaagagacaaacagaaaccatcaattattgtttcagattaaagaagctaattgatcaagaaatcaagtctcaggaggagaaggagcaagaaaaggagaaaagggtcaccaccctgaaagaggagctgaccaagctgaagtcttttgctttgatggtggtggatgaacagcaaaggctgacggcacagctcacccttcaaagacagaaaatccaagagctgaccacaaatgcaaaggaaacacataccaaactagcccttgctgaagccagagttcaggaggaagagcagaaggcaaccagactagagaaggaactgcaaacgcagaccacaaagtttcaccaagaccaagacacaattatggcgaagctcaccaatgaggacagtcaaaatcgccagcttcaacaaaagctggcagcactcagccggcagattgatgagttagaagagacaaacaggtctttacgaaaagcagaagaggagctgcaagatataaaagaaaaaatcagtaagggagaatatggaaacgctggtatcatggctgaagtggaagagctcaggaaacgtgtgctagatatggaagggaaagatgaagagctcataaaaatggaggagcagtgcagagatctcaataagaggcttgaaagggagacgttacagagtaaagactttaaactagaggttgaaaaactcagtaaaagaattatggctctggaaaagttagaagacgctttcaacaaaagcaaacaagaatgctactctctgaaatgcaatttagaaaaagaaaggatgaccacaaagcagttgtctcaagaactggagagtttaaaagtaaggatcaaagagctagaagccattgaaagtcggctagaaaagacagaattcactctaaaagaggatttaactaaactgaaaacattaactgtgatgtttgtagatgaacggaaaacaatgagtgaaaaattaaagaaaactgaagataaattacaagctgcttcttctcagcttcaagtggagcaaaataaagtaacaacagttactgagaagttaattgaggaaactaaaagggcgctcaagtccaaaaccgatgtagaagaaaagatgtacagcgtaaccaaggagagagatgatttaaaaaacaaattgaaagcggaagaagagaaaggaaatgatctcctgtcaagagttaatatgttgaaaaataggcttcaatcattggaagcaattgagaaagatttcctaaaaaacaaattaaatcaagactctgggaaatccacaacagcattacaccaagaaaacaataagattaaggagctctctcaagaagtggaaagactgaaactgaagctaaaggacatgaaagccattgaggatgacctcatgaaaacagaagatgaatatgagactctagaacgaaggtatgctaatgaacgagacaaagctcaatttttatctaaagagctagaacatgttaaaatggaacttgctaagtacaagttagcagaaaagacagagaccagccatgaacaatggcttttcaaaaggcttcaagaagaagaagctaagtcagggcacctctcaagagaagtggatgcattaaaagagaaaattcatgaatacatggcaactgaagacctaatatgtcacctccagggagatcactcagtcctgcaaaaaaaactaaatcaacaagaaaacaggaacagagatttaggaagagagattgaaaacctcactaaggagttagagaggtaccggcatttcagtaagagcctcaggcctagtctcaatggaagaagaatttccgatcctcaagtattttctaaagaagttcagacagaagcagtagacaatgaaccacctgattacaagagcctcattcctctggaacgtgcagtcatcaatggtcagttatatgaggagagtgagaatcaagacgaggaccctaatgatgagggatctgtgctgtccttcaaatgcagccagtctactccatgtcctgttaacagaaagctatggattccctggatgaaatccaaggagggccatcttcagaatggaaaaatgcaaactaaacccaatgccaactttgtgcaacctggagatctagtcctaagccacacacctgggcagccacttcatataaaggttactccagaccatgtacaaaacacagccactcttgaaatcacaagtccaaccacagagagtcctcactcttacacgagtactgcagtgataccgaactgtggcacgccaaagcaaaggataaccatcctccaaaacgcctccataacaccagtaaagtccaaaacctctaccgaagacctcatgaatttagaacaaggcatgtccccaattaccatggcaacctttgccagagcacagaccccagagtcttgtggttctctaactccagaaaggacaatgtcccctattcaggttttggctgtgactggttcagctagctctcctgagcagggacgctccccagaaccaacagaaatcagtgccaagcatgcgatattcagagtctccccagaccggcagtcatcatggcagtttcagcgttcaaacagcaatagctcaagtgtgataactactgaggataataaaatccacattcacttaggaagtccttacatgcaagctgtagccagccct

SEQ ID NO: 134589 - DNA, 8281 bp, Homo sapiens
  Payload ID: 6297
  Gene Symbol: FLNA
  Gene Name: filamin A, alpha
  Uniprot ID: P21333
  ENST ID: ENST00000360319
  CDS Start-End: 39-7958
ggctgcagcaccgcccccccggcttctcgcgcctcaaaatgagtagctcccactctcgggcgggccagagcgcagcaggcgcggctccgggcggcggcgtcgacacgcgggacgccgagatgccggccaccgagaaggacctggcggaggacgcgccgtggaagaagatccagcagaacactttcacgcgctggtgcaacgagcacctgaagtgcgtgagcaagcgcatcgccaacctgcagacggacctgagcgacgggctgcggcttatcgcgctgttggaggtgctcagccagaagaagatgcaccgcaagcacaaccagcggcccactttccgccaaatgcagcttgagaacgtgtcggtggcgctcgagttcctggaccgcgagagcatcaaactggtgtccatcgacagcaaggccatcgtggacgggaacctgaagctgatcctgggcctcatctggaccctgatcctgcactactccatctccatgcccatgtgggacgaggaggaggatgaggaggccaagaagcagacccccaagcagaggctcctgggctggatccagaacaagctgccgcagctgcccatcaccaacttcagccgggactggcagagcggccgggccctgggcgccctggtggacagctgtgccccgggcctgtgtcctgactgggactcttgggacgccagcaagcccgttaccaatgcgcgagaggccatgcagcaggcggatgactggctgggcatcccccaggtgatcacccccgaggagattgtggaccccaacgtggacgagcactctgtcatgacctacctgtcccagttccccaaggccaagctgaagccaggggctcccttgcggcccaaactgaacccgaagaaagcccgtgcctacgggccaggcatcgagcccacaggcaacatggtgaagaagcgggcagagttcactgtggagaccagaagtgctggccagggagaggtgctggtgtacgtggaggacccggccggacaccaggaggaggcaaaagtgaccgccaataacgacaagaaccgcaccttctccgtctggtacgtccccgaggtgacggggactcataaggttactgtgctctttgctggccagcacatcgccaagagccccttcgaggtgtacgtggataagtcacagggtgacgccagcaaagtgacagcccaaggtcccggcctggagcccagtggcaacatcgccaacaagaccacctactttgagatctttacggcaggagctggcacgggcgaggtcgaggttgtgatccaggaccccatgggacagaagggcacggtagagcctcagctggaggcccggggcgacagcacataccgctgcagctaccagcccaccatggagggcgtccacaccgtgcacgtcacgtttgccggcgtgcccatccctcgcagcccctacactgtcactgttggccaagcctgtaacccgagtgcctgccgggcggttggccggggcctccagcccaagggtgtgcgggtgaaggagacagctgacttcaaggtgtacacaaagggcgctggcagtggggagctgaaggtcaccgtgaagggccccaagggagaggagcgcgtgaagcagaaggacctgggggatggcgtgtatggcttcgagtattaccccatggtccctggaacctatatcgtcaccatcacgtggggtggtcagaacatcgggcgcagtcccttcgaagtgaaggtgggcaccgagtgtggcaatcagaaggtacgggcctggggccctgggctggagggcggcgtcgttggcaagtcagcagactttgtggtggaggctatcggggacgacgtgggcacgctgggcttctcggtggaagggccatcgcaggctaagatcgaatgtgacgacaagggcgacggctcctgtgatgtgcgctactggccgcaggaggctggcgagtatgccgttcacgtgctgtgcaacagcgaagacatccgcctcagccccttcatggctgacatccgtgacgcgccccaggacttccacccagacagggtgaaggcacgtgggcctggattggagaagacaggtgtggccgtcaacaagccagcagagttcacagtggatgccaagcacggtggcaaggccccacttcgggtccaagtccaggacaatgaaggctgccctgtggaggcgttggtcaaggacaacggcaatggcacttacagctgctcctacgtgcccaggaagccggtgaagcacacagccatggtgtcctggggaggcgtcagcatccccaacagccccttcagggtgaatgtgggagctggcagccaccccaacaaggtcaaagtatacggccccggagtagccaagacagggctcaaggcccacgagcccacctacttcactgtggactgcgccgaggctggccagggggacgtcagcatcggcatcaagtgtgcccctggagtggtaggccccgccgaagctgacatcgacttcgacatcatccgcaatgacaatgacaccttcacggtcaagtacacgccccggggggctggcagctacaccattatggtcctctttgctgaccaggccacgcccaccagccccatccgagtcaaggtggagccctctcatgacgccagtaaggtgaaggccgagggccctggcctcagtcgcactggtgtcgagcttggcaagcccacccacttcacagtaaatgccaaagctgctggcaaaggcaagctggacgtccagttctcaggactcaccaagggggatgcagtgcgagatgtggacatcatcgaccaccatgacaacacctacacagtcaagtacacgcctgtccagcagggtccagtaggcgtcaatgtcacttatggaggggatcccatccctaagagccctttctcagtggcagtatctccaagcctggacctcagcaagatcaaggtgtctggcctgggagagaaggtggacgttggcaaagaccaggagttcacagtcaaatcaaagggtgctggtggtcaaggcaaagtggcatccaagattgtgggcccctcgggtgcagcggtgccctgcaaggtggagccaggcctgggggctgacaacagtgtggtgcgcttcctgccccgtgaggaagggccctatgaggtggaggtgacctatgacggcgtgcccgtgcctggcagcccctttcctctggaagctgtggcccccaccaagcctagcaaggtgaaggcgtttgggccggggctgcagggaggcagtgcgggctcccccgcccgcttcaccatcgacaccaagggcgccggcacaggtggcctgggcctgacggtggagggcccctgtgaggcgcagctcgagtgcttggacaatggggatggcacatgttccgtgtcctacgtgcccaccgagcccggggactacaacatcaacatcctcttcgctgacacccacatccctggctccccattcaaggcccacgtggttccctgctttgacgcatccaaagtcaagtgctcaggccccgggctggagcgggccaccgctggggaggtgggccaattccaagtggactgctcgagcgcgggcagcgcggagctgaccattgagatctgctcggaggcggggcttccggccgaggtgtacatccaggaccacggtgatggcacgcacaccattacctacattcccctctgccccggggcctacaccgtcaccatcaagtacggcggccagcccgtgcccaacttccccagcaagctgcaggtggaacctgcggtggacacttccggtgtccagtgctatgggcctggtattgagggccagggtgtcttccgtgaggccaccactgagttcagtgtggacgcccgggctctgacacagaccggagggccgcacgtcaaggcccgtgtggccaacccctcaggcaacctgacggagacctacgttcaggaccgtggcgatggcatgtacaaagtggagtacacgccttacgaggagggactgcactccgtggacgtgacctatgacggcagtcccgtgcccagcagccccttccaggtgcccgtgaccgagggctgcgacccctcccgggtgcgtgtccacgggccaggcatccaaagtggcaccaccaacaagcccaacaagttcactgtggagaccaggggagctggcacgggcggcctgggcctggctgtagagggcccctccgaggccaagatgtcctgcatggataacaaggacggcagctgctcggtcgagtacatcccttatgaggctggcacctacagcctcaacgtcacctatggtggccatcaagtgccaggcagtcctttcaaggtccctgtgcatgatgtgacagatgcgtccaaggtcaagtgctctgggcccggcctgagcccaggcatggttcgtgccaacctccctcagtccttccaggtggacacaagcaaggctggtgtggccccattgcaggtcaaagtgcaagggcccaaaggcctggtggagccagtggacgtggtagacaacgctgatggcacccagaccgtcaattatgtgcccagccgagaagggccctacagcatctcagtactgtatggagatgaagaggtaccccggagccccttcaaggtcaaggtgctgcctactcatgatgccagcaaggtgaaggccagtggccccgggctcaacaccactggcgtgcctgccagcctgcccgtggagttcaccatcgatgcaaaggacgccggggagggcctgctggctgtccagatcacggatcccgaaggcaagccgaagaagacacacatccaagacaaccatgacggcacgtatacagtggcctacgtgccagacgtgacaggtcgctacaccatcctcatcaagtacggtggtgacgagatccccttctccccgtaccgcgtgcgtgccgtgcccaccggggacgccagcaagtgcactgtcacaggtgctggcatcggccccaccattcagattggggaggagacggtgatcactgtggacactaaggcggcaggcaaaggcaaagtgacgtgcaccgtgtgcacgcctgatggctcagaggtggatgtggacgtggtggagaatgaggacggcactttcgacatcttctacacggccccccagccgggcaaatacgtcatctgtgtgcgctttggtggcgagcacgtgcccaacagccccttccaagtgacggctctggctggggaccagccctcggtgcagccccctctacggtctcagcagctggccccacagtacacctacgcccagggcggccagcagacttgggccccggagaggcccctggtgggtgtcaatgggctggatgtgaccagcctgaggccctttgaccttgtcatccccttcaccatcaagaagggcgagatcacaggggaggttcggatgccctcaggcaaggtggcgcagcccaccatcactgacaacaaagacggcaccgtgaccgtgcggtatgcacccagcgaggctggcctgcacgagatggacatccgctatgacaacatgcacatcccaggaagccccttgcagttctatgtggattacgtcaactgtggccatgtcactgcctatgggcctggcctcacccatggagtagtgaacaagcctgccaccttcaccgtcaacaccaaggatgcaggagaggggggcctgtctctggccattgagggcccgtccaaagcagaaatcagctgcactgacaaccaggatgggacatgcagcgtgtcctacctgcctgtgctgccgggggactacagcattctagtcaagtacaatgaacagcacgtcccaggcagccccttcactgctcgggtcacaggtgacgactccatgcgtatgtcccacctaaaggtcggctctgctgccgacatccccatcaacatctcagagacggatctcagcctgctgacggccactgtggtcccgccctcgggccgggaggagccctgtttgctgaagcggctgcgtaatggccacgtggggatttcattcgtgcccaaggagacgggggagcacctggtgcatgtgaagaaaaatggccagcacgtggccagcagccccatcccggtggtgatcagccagtcggaaattggggatgccagtcgtgttcgggtctctggtcagggccttcacgaaggccacacctttgagcctgcagagtttatcattgatacccgcgatgcaggctatggtgggctcagcctgtccattgagggccccagcaaggtggacatcaacacagaggacctggaggacgggacgtgcagggtcacctactgccccacagagccaggcaactacatcatcaacatcaagtttgccgaccagcacgtgcctggcagccccttctctgtgaaggtgacaggcgagggccgggtgaaagagagcatcacccgcaggcgtcgggctccttcagtggccaacgttggtagtcattgtgacctcagcctgaaaatccctgaaattagcatccaggatatgacagcccaggtgaccagcccatcgggcaagacccatgaggccgagatcgtggaaggggagaaccacacctactgcatccgctttgttcccgctgagatgggcacacacacagtcagcgtgaagtacaagggccagcacgtgcctgggagccccttccagttcaccgtggggcccctaggggaagggggagcccacaaggtccgagctgggggccctggcctggagagagctgaagctggagtgccagccgaattcagtatctggacccgggaagctggtgctggaggcctggccattgctgtcgagggccccagcaaggctgagatctcttttgaggaccgcaaggacggctcctgtggtgtggcttatgtggtccaggagccaggtgactacgaagtctcagtcaagttcaacgaggaacacattcccgacagccccttcgtggtgcctgtggcttctccgtctggcgacgcccgccgcctcactgtttctagccttcaggagtcagggctaaaggtcaaccagccagcctcttttgcagtcagcctgaacggggccaagggggcgatcgatgccaaggtgcacagcccctcaggagccctggaggagtgctatgtcacagaaattgaccaagataagtatgctgtgcgcttcatccctcgggagaatggcgtttacctgattgacgtcaagttcaacggcacccacatccctggaagccccttcaagatccgagttggggagcctgggcatggaggggacccaggcttggtgtctgcttacggagcaggtctggaaggcggtgtcacagggaacccagctgagttcgtcgtgaacacgagcaatgcgggagctggtgccctgtcggtgaccattgacggcccctccaaggtgaagatggattgccaggagtgccctgagggctaccgcgtcacctatacccccatggcacctggcagctacctcatctccatcaagtacggcggcccctaccacattgggggcagccccttcaaggccaaagtcacaggcccccgtctcgtcagcaaccacagcctccacgagacatcatcagtgtttgtagactctctgaccaaggccacctgtgccccccagcatggggccccgggtcctgggcctgctgacgccagcaaggtggtggccaagggcctggggctgagcaaggcctacgtaggccagaagagcagcttcacagtagactgcagcaaagcaggcaacaacatgctgctggtgggggttcatggcccaaggaccccctgcgaggagatcctggtgaagcacgtgggcagccggctctacagcgtgtcctacctgctcaaggacaagggggagtacacactggtggtcaaatggggggacgagcacatcccaggcagcccctaccgcgttgtggtgccctgagtctggggcccgtgccagccggcagcccccaagcctgccccgctacccaagcagccccgccctcttcccctcaaccccggcccaggccgccctggccgcccgcctgtcactgcagccgcccctgccctgtgccgtgctgcgctcacctgcctccccagccagccgctgacctctcggctttcacttgggcagagggagccatttggtggcgctgcttgtcttctttggttctgggaggggtgagggatgggggtcctgtacacaaccacccactagttctcttctccagccaagaggaataaagttttgcttccattctcctt

SEQ ID NO: 134590 - DNA, 7932 bp, Homo sapiens
  Payload ID: 6297
  Gene Symbol: FLNA
  Gene Name: filamin A, alpha
  ENST ID: ENST00000344736
  CDS Start-End: 44-7867
gccgaggctgcagcaccgcccccccggcttctcgcgcctcaaaatgagtagctcccactctcgggcgggccagagcgcagcaggcgcggctccgggcggcggcgtcgacacgcgggacgccgagatgccggccaccgagaaggacctggcggaggacgcgccgtggaagaagatccagcagaacactttcacgcgctggtgcaacgagcacctgaagtgcgtgagcaagcgcatcgccaacctgcagacggacctgagcgacgggctgcggcttatcgcgctgttggaggtgctcagccagaagaagatgcaccgcaagcacaaccagcggcccactttccgccaaatgcagcttgagaacgtgtcggtggcgctcgagttcctggaccgcgagagcatcaaactggtgtccatcgacagcaaggccatcgtggacgggaacctgaagctgatcctgggcctcatctggaccctgatcctgcactactccatctccatgcccatgtgggacgaggaggaggatgaggaggccaagaagcagacccccaagcagaggctcctgggctggatccagaacaagctgccgcagctgcccatcaccaacttcagccgggactggcagagcggccgggccctgggcgccctggtggacagctgtgccccgggcctgtgtcctgactgggactcttgggacgccagcaagcccgttaccaatgcgcgagaggccatgcagcaggcggatgactggctgggcatcccccaggtgatcacccccgaggagattgtggaccccaacgtggacgagcactctgtcatgacctacctgtcccagttccccaaggccaagctgaagccaggggctcccttgcggcccaaactgaacccgaagaaagcccgtgcctacgggccaggcatcgagcccacaggcaacatggtgaagaagcgggcagagttcactgtggagaccagaagtgctggccagggagaggtgctggtgtacgtggaggacccggccggacaccaggaggaggcaaaagtgaccgccaataacgacaagaaccgcaccttctccgtctggtacgtccccgaggtgacggggactcataaggttactgtgctctttgctggccagcacatcgccaagagccccttcgaggtgtacgtggataagtcacagggtgacgccagcaaagtgacagcccaaggtcccggcctggagcccagtggcaacatcgccaacaagaccacctactttgagatctttacggcaggagctggcacgggcgaggtcgaggttgtgatccaggaccccatgggacagaagggcacggtagagcctcagctggaggcccggggcgacagcacataccgctgcagctaccagcccaccatggagggcgtccacaccgtgcacgtcacgtttgccggcgtgcccatccctcgcagcccctacactgtcactgttggccaagcctgtaacccgagtgcctgccgggcggttggccggggcctccagcccaagggtgtgcgggtgaaggagacagctgacttcaaggtgtacacaaagggcgctggcagtggggagctgaaggtcaccgtgaagggccccaagggagaggagcgcgtgaagcagaaggacctgggggatggcgtgtatggcttcgagtattaccccatggtccctggaacctatatcgtcaccatcacgtggggtggtcagaacatcgggcgcagtcccttcgaagtgaaggtgggcaccgagtgtggcaatcagaaggtacgggcctggggccctgggctggagggcggcgtcgttggcaagtcagcagactttgtggtggaggctatcggggacgacgtgggcacgctgggcttctcggtggaagggccatcgcaggctaagatcgaatgtgacgacaagggcgacggctcctgtgatgtgcgctactggccgcaggaggctggcgagtatgccgttcacgtgctgtgcaacagcgaagacatccgcctcagccccttcatggctgacatccgtgacgcgccccaggacttccacccagacagggtgaaggcacgtgggcctggattggagaagacaggtgtggccgtcaacaagccagcagagttcacagtggatgccaagcacggtggcaaggccccacttcgggtccaagtccaggacaatgaaggctgccctgtggaggcgttggtcaaggacaacggcaatggcacttacagctgctcctacgtgcccaggaagccggtgaagcacacagccatggtgtcctggggaggcgtcagcatccccaacagccccttcagggtgaatgtgggagctggcagccaccccaacaaggtcaaagtatacggccccggagtagccaagacagggctcaaggcccacgagcccacctacttcactgtggactgcgccgaggctggccagggggacgtcagcatcggcatcaagtgtgcccctggagtggtaggccccgccgaagctgacatcgacttcgacatcatccgcaatgacaatgacaccttcacggtcaagtacacgccccggggggctggcagctacaccattatggtcctctttgctgaccaggccacgcccaccagccccatccgagtcaaggtggagccctctcatgacgccagtaaggtgaaggccgagggccctggcctcagtcgcactggtgtcgagcttggcaagcccacccacttcacagtaaatgccaaagctgctggcaaaggcaagctggacgtccagttctcaggactcaccaagggggatgcagtgcgagatgtggacatcatcgaccaccatgacaacacctacacagtcaagtacacgcctgtccagcagggtccagtaggcgtcaatgtcacttatggaggggatcccatccctaagagccctttctcagtggcagtatctccaagcctggacctcagcaagatcaaggtgtctggcctgggagagaaggtggacgttggcaaagaccaggagttcacagtcaaatcaaagggtgctggtggtcaaggcaaagtggcatccaagattgtgggcccctcgggtgcagcggtgccctgcaaggtggagccaggcctgggggctgacaacagtgtggtgcgcttcctgccccgtgaggaagggccctatgaggtggaggtgacctatgacggcgtgcccgtgcctggcagcccctttcctctggaagctgtggcccccaccaagcctagcaaggtgaaggcgtttgggccggggctgcagggaggcagtgcgggctcccccgcccgcttcaccatcgacaccaagggcgccggcacaggtggcctgggcctgacggtggagggcccctgtgaggcgcagctcgagtgcttggacaatggggatggcacatgttccgtgtcctacgtgcccaccgagcccggggactacaacatcaacatcctcttcgctgacacccacatccctggctccccattcaaggcccacgtggttccctgctttgacgcatccaaagtcaagtgctcaggccccgggctggagcgggccaccgctggggaggtgggccaattccaagtggactgctcgagcgcgggcagcgcggagctgaccattgagatctgctcggaggcggggcttccggccgaggtgtacatccaggaccacggtgatggcacgcacaccattacctacattcccctctgccccggggcctacaccgtcaccatcaagtacggcggccagcccgtgcccaacttccccagcaagctgcaggtggaacctgcggtggacacttccggtgtccagtgctatgggcctggtattgagggccagggtgtcttccgtgaggccaccactgagttcagtgtggacgcccgggctctgacacagaccggagggccgcacgtcaaggcccgtgtggccaacccctcaggcaacctgacggagacctacgttcaggaccgtggcgatggcatgtacaaagtggagtacacgccttacgaggagggactgcactccgtggacgtgacctatgacggcagtcccgtgcccagcagccccttccaggtgcccgtgaccgagggctgcgacccctcccgggtgcgtgtccacgggccaggcatccaaagtggcaccaccaacaagcccaacaagttcactgtggagaccaggggagctggcacgggcggcctgggcctggctgtagagggcccctccgaggccaagatgtcctgcatggataacaaggacggcagctgctcggtcgagtacatcccttatgaggctggcacctacagcctcaacgtcacctatggtggccatcaagtgccaggcagtcctttcaaggtccctgtgcatgatgtgacagatgcgtccaaggtcaagtgctctgggcccggcctgagcccaggcatggttcgtgccaacctccctcagtccttccaggtggacacaagcaaggctggtgtggccccattgcaggtcaaagtgcaagggcccaaaggcctggtggagccagtggacgtggtagacaacgctgatggcacccagaccgtcaattatgtgcccagccgagaagggccctacagcatctcagtactgtatggagatgaagaggtaccccggagccccttcaaggtcaaggtgctgcctactcatgatgccagcaaggtgaaggccagtggccccgggctcaacaccactggcgtgcctgccagcctgcccgtggagttcaccatcgatgcaaaggacgccggggagggcctgctggctgtccagatcacggatcccgaaggcaagccgaagaagacacacatccaagacaaccatgacggcacgtatacagtggcctacgtgccagacgtgacaggtcgctacaccatcctcatcaagtacggtggtgacgagatccccttctccccgtaccgcgtgcgtgccgtgcccaccggggacgccagcaagtgcactgtcacaggtgctggcatcggccccaccattcagattggggaggagacggtgatcactgtggacactaaggcggcaggcaaaggcaaagtgacgtgcaccgtgtgcacgcctgatggctcagaggtggatgtggacgtggtggagaatgaggacggcactttcgacatcttctacacggccccccagccgggcaaatacgtcatctgtgtgcgctttggtggcgagcacgtgcccaacagccccttccaagtgacggccccggagaggcccctggtgggtgtcaatgggctggatgtgaccagcctgaggccctttgaccttgtcatccccttcaccatcaagaagggcgagatcacaggggaggttcggatgccctcaggcaaggtggcgcagcccaccatcactgacaacaaagacggcaccgtgaccgtgcggtatgcacccagcgaggctggcctgcacgagatggacatccgctatgacaacatgcacatcccaggaagccccttgcagttctatgtggattacgtcaactgtggccatgtcactgcctatgggcctggcctcacccatggagtagtgaacaagcctgccaccttcaccgtcaacaccaaggatgcaggagaggggggcctgtctctggccattgagggcccgtccaaagcagaaatcagctgcactgacaaccaggatgggacatgcagcgtgtcctacctgcctgtgctgccgggggactacagcattctagtcaagtacaatgaacagcacgtcccaggcagccccttcactgctcgggtcacaggtgacgactccatgcgtatgtcccacctaaaggtcggctctgctgccgacatccccatcaacatctcagagacggatctcagcctgctgacggccactgtggtcccgccctcgggccgggaggagccctgtttgctgaagcggctgcgtaatggccacgtggggatttcattcgtgcccaaggagacgggggagcacctggtgcatgtgaagaaaaatggccagcacgtggccagcagccccatcccggtggtgatcagccagtcggaaattggggatgccagtcgtgttcgggtctctggtcagggccttcacgaaggccacacctttgagcctgcagagtttatcattgatacccgcgatgcaggctatggtgggctcagcctgtccattgagggccccagcaaggtggacatcaacacagaggacctggaggacgggacgtgcagggtcacctactgccccacagagccaggcaactacatcatcaacatcaagtttgccgaccagcacgtgcctggcagccccttctctgtgaaggtgacaggcgagggccgggtgaaagagagcatcacccgcaggcgtcgggctccttcagtggccaacgttggtagtcattgtgacctcagcctgaaaatccctgaaattagcatccaggatatgacagcccaggtgaccagcccatcgggcaagacccatgaggccgagatcgtggaaggggagaaccacacctactgcatccgctttgttcccgctgagatgggcacacacacagtcagcgtgaagtacaagggccagcacgtgcctgggagccccttccagttcaccgtggggcccctaggggaagggggagcccacaaggtccgagctgggggccctggcctggagagagctgaagctggagtgccagccgaattcagtatctggacccgggaagctggtgctggaggcctggccattgctgtcgagggccccagcaaggctgagatctcttttgaggaccgcaaggacggctcctgtggtgtggcttatgtggtccaggagccaggtgactacgaagtctcagtcaagttcaacgaggaacacattcccgacagccccttcgtggtgcctgtggcttctccgtctggcgacgcccgccgcctcactgtttctagccttcaggagtcagggctaaaggtcaaccagccagcctcttttgcagtcagcctgaacggggccaagggggcgatcgatgccaaggtgcacagcccctcaggagccctggaggagtgctatgtcacagaaattgaccaagataagtatgctgtgcgcttcatccctcgggagaatggcgtttacctgattgacgtcaagttcaacggcacccacatccctggaagccccttcaagatccgagttggggagcctgggcatggaggggacccaggcttggtgtctgcttacggagcaggtctggaaggcggtgtcacagggaacccagctgagttcgtcgtgaacacgagcaatgcgggagctggtgccctgtcggtgaccattgacggcccctccaaggtgaagatggattgccaggagtgccctgagggctaccgcgtcacctatacccccatggcacctggcagctacctcatctccatcaagtacggcggcccctaccacattgggggcagccccttcaaggccaaagtcacaggcccccgtctcgtcagcaaccacagcctccacgagacatcatcagtgtttgtagactctctgaccaaggccacctgtgccccccagcatggggccccgggtcctgggcctgctgacgccagcaaggtggtggccaagggcctggggctgagcaaggcctacgtaggccagaagagcagcttcacagtagactgcagcaaagcaggcaacaacatgctgctggtgggggttcatggcccaaggaccccctgcgaggagatcctggtgaagcacgtgggcagccggctctacagcgtgtcctacctgctcaaggacaagggggagtacacactggtggtcaaatggggggacgagcacatcccaggcagcccctaccgcgttgtggtgccctgagtctggggcccgtgccagccggcagcccccaagcctgccccgctacccaagcagccccgccctct

SEQ ID NO: 134591 - DNA, 8382 bp, Homo sapiens
  Payload ID: 6297
  Gene Symbol: FLNA
  Gene Name: filamin A, alpha
  Uniprot ID: P21333
  ENST ID: ENST00000369850
  CDS Start-End: 238-8181
gcgcgtcgcgcgcagcggacgccgacagaatccccgaggcgcctggcgcgggcgcgggcgcgaaggcgatccgggcgccaccccgcggtcatcggtcaccggtcgctctcaggaacagcagcgcaacctctgctccctgcctcgcctcccgcgcgcctaggtgcctgcgactttaattaaagggccgtcccctcgccgaggctgcagcaccgcccccccggcttctcgcgcctcaaaatgagtagctcccactctcgggcgggccagagcgcagcaggcgcggctccgggcggcggcgtcgacacgcgggacgccgagatgccggccaccgagaaggacctggcggaggacgcgccgtggaagaagatccagcagaacactttcacgcgctggtgcaacgagcacctgaagtgcgtgagcaagcgcatcgccaacctgcagacggacctgagcgacgggctgcggcttatcgcgctgttggaggtgctcagccagaagaagatgcaccgcaagcacaaccagcggcccactttccgccaaatgcagcttgagaacgtgtcggtggcgctcgagttcctggaccgcgagagcatcaaactggtgtccatcgacagcaaggccatcgtggacgggaacctgaagctgatcctgggcctcatctggaccctgatcctgcactactccatctccatgcccatgtgggacgaggaggaggatgaggaggccaagaagcagacccccaagcagaggctcctgggctggatccagaacaagctgccgcagctgcccatcaccaacttcagccgggactggcagagcggccgggccctgggcgccctggtggacagctgtgccccgggcctgtgtcctgactgggactcttgggacgccagcaagcccgttaccaatgcgcgagaggccatgcagcaggcggatgactggctgggcatcccccaggtgatcacccccgaggagattgtggaccccaacgtggacgagcactctgtcatgacctacctgtcccagttccccaaggccaagctgaagccaggggctcccttgcggcccaaactgaacccgaagaaagcccgtgcctacgggccaggcatcgagcccacaggcaacatggtgaagaagcgggcagagttcactgtggagaccagaagtgctggccagggagaggtgctggtgtacgtggaggacccggccggacaccaggaggaggcaaaagtgaccgccaataacgacaagaaccgcaccttctccgtctggtacgtccccgaggtgacggggactcataaggttactgtgctctttgctggccagcacatcgccaagagccccttcgaggtgtacgtggataagtcacagggtgacgccagcaaagtgacagcccaaggtcccggcctggagcccagtggcaacatcgccaacaagaccacctactttgagatctttacggcaggagctggcacgggcgaggtcgaggttgtgatccaggaccccatgggacagaagggcacggtagagcctcagctggaggcccggggcgacagcacataccgctgcagctaccagcccaccatggagggcgtccacaccgtgcacgtcacgtttgccggcgtgcccatccctcgcagcccctacactgtcactgttggccaagcctgtaacccgagtgcctgccgggcggttggccggggcctccagcccaagggtgtgcgggtgaaggagacagctgacttcaaggtgtacacaaagggcgctggcagtggggagctgaaggtcaccgtgaagggccccaagggagaggagcgcgtgaagcagaaggacctgggggatggcgtgtatggcttcgagtattaccccatggtccctggaacctatatcgtcaccatcacgtggggtggtcagaacatcgggcgcagtcccttcgaagtgaaggtgggcaccgagtgtggcaatcagaaggtacgggcctggggccctgggctggagggcggcgtcgttggcaagtcagcagactttgtggtggaggctatcggggacgacgtgggcacgctgggcttctcggtggaagggccatcgcaggctaagatcgaatgtgacgacaagggcgacggctcctgtgatgtgcgctactggccgcaggaggctggcgagtatgccgttcacgtgctgtgcaacagcgaagacatccgcctcagccccttcatggctgacatccgtgacgcgccccaggacttccacccagacagggtgaaggcacgtgggcctggattggagaagacaggtgtggccgtcaacaagccagcagagttcacagtggatgccaagcacggtggcaaggccccacttcgggtccaagtccaggacaatgaaggctgccctgtggaggcgttggtcaaggacaacggcaatggcacttacagctgctcctacgtgcccaggaagccggtgaagcacacagccatggtgtcctggggaggcgtcagcatccccaacagccccttcagggtgaatgtgggagctggcagccaccccaacaaggtcaaagtatacggccccggagtagccaagacagggctcaaggcccacgagcccacctacttcactgtggactgcgccgaggctggccagggggacgtcagcatcggcatcaagtgtgcccctggagtggtaggccccgccgaagctgacatcgacttcgacatcatccgcaatgacaatgacaccttcacggtcaagtacacgccccggggggctggcagctacaccattatggtcctctttgctgaccaggccacgcccaccagccccatccgagtcaaggtggagccctctcatgacgccagtaaggtgaaggccgagggccctggcctcagtcgcactggtgtcgagcttggcaagcccacccacttcacagtaaatgccaaagctgctggcaaaggcaagctggacgtccagttctcaggactcaccaagggggatgcagtgcgagatgtggacatcatcgaccaccatgacaacacctacacagtcaagtacacgcctgtccagcagggtccagtaggcgtcaatgtcacttatggaggggatcccatccctaagagccctttctcagtggcagtatctccaagcctggacctcagcaagatcaaggtgtctggcctgggagagaaggtggacgttggcaaagaccaggagttcacagtcaaatcaaagggtgctggtggtcaaggcaaagtggcatccaagattgtgggcccctcgggtgcagcggtgccctgcaaggtggagccaggcctgggggctgacaacagtgtggtgcgcttcctgccccgtgaggaagggccctatgaggtggaggtgacctatgacggcgtgcccgtgcctggcagcccctttcctctggaagctgtggcccccaccaagcctagcaaggtgaaggcgtttgggccggggctgcagggaggcagtgcgggctcccccgcccgcttcaccatcgacaccaagggcgccggcacaggtggcctgggcctgacggtggagggcccctgtgaggcgcagctcgagtgcttggacaatggggatggcacatgttccgtgtcctacgtgcccaccgagcccggggactacaacatcaacatcctcttcgctgacacccacatccctggctccccattcaaggcccacgtggttccctgctttgacgcatccaaagtcaagtgctcaggccccgggctggagcgggccaccgctggggaggtgggccaattccaagtggactgctcgagcgcgggcagcgcggagctgaccattgagatctgctcggaggcggggcttccggccgaggtgtacatccaggaccacggtgatggcacgcacaccattacctacattcccctctgccccggggcctacaccgtcaccatcaagtacggcggccagcccgtgcccaacttccccagcaagctgcaggtggaacctgcggtggacacttccggtgtccagtgctatgggcctggtattgagggccagggtgtcttccgtgaggccaccactgagttcagtgtggacgcccgggctctgacacagaccggagggccgcacgtcaaggcccgtgtggccaacccctcaggcaacctgacggagacctacgttcaggaccgtggcgatggcatgtacaaagtggagtacacgccttacgaggagggactgcactccgtggacgtgacctatgacggcagtcccgtgcccagcagccccttccaggtgcccgtgaccgagggctgcgacccctcccgggtgcgtgtccacgggccaggcatccaaagtggcaccaccaacaagcccaacaagttcactgtggagaccaggggagctggcacgggcggcctgggcctggctgtagagggcccctccgaggccaagatgtcctgcatggataacaaggacggcagctgctcggtcgagtacatcccttatgaggctggcacctacagcctcaacgtcacctatggtggccatcaagtgccaggcagtcctttcaaggtccctgtgcatgatgtgacagatgcgtccaaggtcaagtgctctgggcccggcctgagcccaggcatggttcgtgccaacctccctcagtccttccaggtggacacaagcaaggctggtgtggccccattgcaggtcaaagtgcaagggcccaaaggcctggtggagccagtggacgtggtagacaacgctgatggcacccagaccgtcaattatgtgcccagccgagaagggccctacagcatctcagtactgtatggagatgaagaggtaccccggagccccttcaaggtcaaggtgctgcctactcatgatgccagcaaggtgaaggccagtggccccgggctcaacaccactggcgtgcctgccagcctgcccgtggagttcaccatcgatgcaaaggacgccggggagggcctgctggctgtccagatcacggatcccgaaggcaagccgaagaagacacacatccaagacaaccatgacggcacgtatacagtggcctacgtgccagacgtgacaggtcgctacaccatcctcatcaagtacggtggtgacgagatccccttctccccgtaccgcgtgcgtgccgtgcccaccggggacgccagcaagtgcactgtcacagtgtcaatcggaggtcacgggctaggtgctggcatcggccccaccattcagattggggaggagacggtgatcactgtggacactaaggcggcaggcaaaggcaaagtgacgtgcaccgtgtgcacgcctgatggctcagaggtggatgtggacgtggtggagaatgaggacggcactttcgacatcttctacacggccccccagccgggcaaatacgtcatctgtgtgcgctttggtggcgagcacgtgcccaacagccccttccaagtgacggctctggctggggaccagccctcggtgcagccccctctacggtctcagcagctggccccacagtacacctacgcccagggcggccagcagacttgggccccggagaggcccctggtgggtgtcaatgggctggatgtgaccagcctgaggccctttgaccttgtcatccccttcaccatcaagaagggcgagatcacaggggaggttcggatgccctcaggcaaggtggcgcagcccaccatcactgacaacaaagacggcaccgtgaccgtgcggtatgcacccagcgaggctggcctgcacgagatggacatccgctatgacaacatgcacatcccaggaagccccttgcagttctatgtggattacgtcaactgtggccatgtcactgcctatgggcctggcctcacccatggagtagtgaacaagcctgccaccttcaccgtcaacaccaaggatgcaggagaggggggcctgtctctggccattgagggcccgtccaaagcagaaatcagctgcactgacaaccaggatgggacatgcagcgtgtcctacctgcctgtgctgccgggggactacagcattctagtcaagtacaatgaacagcacgtcccaggcagccccttcactgctcgggtcacaggtgacgactccatgcgtatgtcccacctaaaggtcggctctgctgccgacatccccatcaacatctcagagacggatctcagcctgctgacggccactgtggtcccgccctcgggccgggaggagccctgtttgctgaagcggctgcgtaatggccacgtggggatttcattcgtgcccaaggagacgggggagcacctggtgcatgtgaagaaaaatggccagcacgtggccagcagccccatcccggtggtgatcagccagtcggaaattggggatgccagtcgtgttcgggtctctggtcagggccttcacgaaggccacacctttgagcctgcagagtttatcattgatacccgcgatgcaggctatggtgggctcagcctgtccattgagggccccagcaaggtggacatcaacacagaggacctggaggacgggacgtgcagggtcacctactgccccacagagccaggcaactacatcatcaacatcaagtttgccgaccagcacgtgcctggcagccccttctctgtgaaggtgacaggcgagggccgggtgaaagagagcatcacccgcaggcgtcgggctccttcagtggccaacgttggtagtcattgtgacctcagcctgaaaatccctgaaattagcatccaggatatgacagcccaggtgaccagcccatcgggcaagacccatgaggccgagatcgtggaaggggagaaccacacctactgcatccgctttgttcccgctgagatgggcacacacacagtcagcgtgaagtacaagggccagcacgtgcctgggagccccttccagttcaccgtggggcccctaggggaagggggagcccacaaggtccgagctgggggccctggcctggagagagctgaagctggagtgccagccgaattcagtatctggacccgggaagctggtgctggaggcctggccattgctgtcgagggccccagcaaggctgagatctcttttgaggaccgcaaggacggctcctgtggtgtggcttatgtggtccaggagccaggtgactacgaagtctcagtcaagttcaacgaggaacacattcccgacagccccttcgtggtgcctgtggcttctccgtctggcgacgcccgccgcctcactgtttctagccttcaggagtcagggctaaaggtcaaccagccagcctcttttgcagtcagcctgaacggggccaagggggcgatcgatgccaaggtgcacagcccctcaggagccctggaggagtgctatgtcacagaaattgaccaagataagtatgctgtgcgcttcatccctcgggagaatggcgtttacctgattgacgtcaagttcaacggcacccacatccctggaagccccttcaagatccgagttggggagcctgggcatggaggggacccaggcttggtgtctgcttacggagcaggtctggaaggcggtgtcacagggaacccagctgagttcgtcgtgaacacgagcaatgcgggagctggtgccctgtcggtgaccattgacggcccctccaaggtgaagatggattgccaggagtgccctgagggctaccgcgtcacctatacccccatggcacctggcagctacctcatctccatcaagtacggcggcccctaccacattgggggcagccccttcaaggccaaagtcacaggcccccgtctcgtcagcaaccacagcctccacgagacatcatcagtgtttgtagactctctgaccaaggccacctgtgccccccagcatggggccccgggtcctgggcctgctgacgccagcaaggtggtggccaagggcctggggctgagcaaggcctacgtaggccagaagagcagcttcacagtagactgcagcaaagcaggcaacaacatgctgctggtgggggttcatggcccaaggaccccctgcgaggagatcctggtgaagcacgtgggcagccggctctacagcgtgtcctacctgctcaaggacaagggggagtacacactggtggtcaaatggggggacgagcacatcccaggcagcccctaccgcgttgtggtgccctgagtctggggcccgtgccagccggcagcccccaagcctgccccgctacccaagcagccccgccctcttcccctcaaccccggcccaggccgccctggccgcccgcctgtcactgcagccgcccctgccctgtgccgtgctgcgctcacctgcctccccagccagccgctgacctctcggctttcacttgggcagagggagcca

SEQ ID NO: 134592 - DNA, 8241 bp, Homo sapiens
  Payload ID: 6297
  Gene Symbol: FLNA
  Gene Name: filamin A, alpha
  ENST ID: ENST00000369856
  CDS Start-End: 59-7921
gggccagagcgcagcaggcgcggctccgggcggcggcgtcgacacgcgggacgccgagatgccggccaccgagaaggacctggcggaggacgcgccgtggaagaagatccagcagaacactttcacgcgctggtgcaacgagcacctgaagtgcgtgagcaagcgcatcgccaacctgcagacggacctgagcgacgggctgcggcttatcgcgctgttggaggtgctcagccagaagaagatgcaccgcaagcacaaccagcggcccactttccgccaaatgcagcttgagaacgtgtcggtggcgctcgagttcctggaccgcgagagcatcaaactggtgtccatcgacagcaaggccatcgtggacgggaacctgaagctgatcctgggcctcatctggaccctgatcctgcactactccatctccatgcccatgtgggacgaggaggaggatgaggaggccaagaagcagacccccaagcagaggctcctgggctggatccagaacaagctgccgcagctgcccatcaccaacttcagccgggactggcagagcggccgggccctgggcgccctggtggacagctgtgccccgggcctgtgtcctgactgggactcttgggacgccagcaagcccgttaccaatgcgcgagaggccatgcagcaggcggatgactggctgggcatcccccaggtgatcacccccgaggagattgtggaccccaacgtggacgagcactctgtcatgacctacctgtcccagttccccaaggccaagctgaagccaggggctcccttgcggcccaaactgaacccgaagaaagcccgtgcctacgggccaggcatcgagcccacaggcaacatggtgaagaagcgggcagagttcactgtggagaccagaagtgctggccagggagaggtgctggtgtacgtggaggacccggccggacaccaggaggaggcaaaagtgaccgccaataacgacaagaaccgcaccttctccgtctggtacgtccccgaggtgacggggactcataaggttactgtgctctttgctggccagcacatcgccaagagccccttcgaggtgtacgtggataagtcacagggtgacgccagcaaagtgacagcccaaggtcccggcctggagcccagtggcaacatcgccaacaagaccacctactttgagatctttacggcaggagctggcacgggcgaggtcgaggttgtgatccaggaccccatgggacagaagggcacggtagagcctcagctggaggcccggggcgacagcacataccgctgcagctaccagcccaccatggagggcgtccacaccgtgcacgtcacgtttgccggcgtgcccatccctcgcagcccctacactgtcactgttggccaagcctgtaacccgagtgcctgccgggcggttggccggggcctccagcccaagggtgtgcgggtgaaggagacagctgacttcaaggtgtacacaaagggcgctggcagtggggagctgaaggtcaccgtgaagggccccaagggagaggagcgcgtgaagcagaaggacctgggggatggcgtgtatggcttcgagtattaccccatggtccctggaacctatatcgtcaccatcacgtggggtggtcagaacatcgggcgcagtcccttcgaagtgaaggtgggcaccgagtgtggcaatcagaaggtacgggcctggggccctgggctggagggcggcgtcgttggcaagtcagcagactttgtggtggaggctatcggggacgacgtgggcacgctgggcttctcggtggaagggccatcgcaggctaagatcgaatgtgacgacaagggcgacggctcctgtgatgtgcgctactggccgcaggaggctggcgagtatgccgttcacgtgctgtgcaacagcgaagacatccgcctcagccccttcatggctgacatccgtgacgcgccccaggacttccacccagacagggtgaaggcacgtgggcctggattggagaagacaggtgtggccgtcaacaagccagcagagttcacagtggatgccaagcacggtggcaaggccccacttcgggtccaagtccaggacaatgaaggctgccctgtggaggcgttggtcaaggacaacggcaatggcacttacagctgctcctacgtgcccaggaagccggtgaagcacacagccatggtgtcctggggaggcgtcagcatccccaacagccccttcagggtgaatgtgggagctggcagccaccccaacaaggtcaaagtatacggccccggagtagccaagacagggctcaaggcccacgagcccacctacttcactgtggactgcgccgaggctggccagggggacgtcagcatcggcatcaagtgtgcccctggagtggtaggccccgccgaagctgacatcgacttcgacatcatccgcaatgacaatgacaccttcacggtcaagtacacgccccggggggctggcagctacaccattatggtcctctttgctgaccaggccacgcccaccagccccatccgagtcaaggtggagccctctcatgacgccagtaaggtgaaggccgagggccctggcctcagtcgcactggtgtcgagcttggcaagcccacccacttcacagtaaatgccaaagctgctggcaaaggcaagctggacgtccagttctcaggactcaccaagggggatgcagtgcgagatgtggacatcatcgaccaccatgacaacacctacacagtcaagtacacgcctgtccagcagggtccagtaggcgtcaatgtcacttatggaggggatcccatccctaagagccctttctcagtggcagtatctccaagcctggacctcagcaagatcaaggtgtctggcctgggagagaaggtggacgttggcaaagaccaggagttcacagtcaaatcaaagggtgctggtggtcaaggcaaagtggcatccaagattgtgggcccctcgggtgcagcggtgccctgcaaggtggagccaggcctgggggctgacaacagtgtggtgcgcttcctgccccgtgaggaagggccctatgaggtggaggtgacctatgacggcgtgcccgtgcctggcagcccctttcctctggaagctgtggcccccaccaagcctagcaaggtgaaggcgtttgggccggggctgcagggaggcagtgcgggctcccccgcccgcttcaccatcgacaccaagggcgccggcacaggtggcctgggcctgacggtggagggcccctgtgaggcgcagctcgagtgcttggacaatggggatggcacatgttccgtgtcctacgtgcccaccgagcccggggactacaacatcaacatcctcttcgctgacacccacatccctggctccccattcaaggcccacgtggttccctgctttgacgcatccaaagtcaagtgctcaggccccgggctggagcgggccaccgctggggaggtgggccaattccaagtggactgctcgagcgcgggcagcgcggagctgaccattgagatctgctcggaggcggggcttccggccgaggtgtacatccaggaccacggtgatggcacgcacaccattacctacattcccctctgccccggggcctacaccgtcaccatcaagtacggcggccagcccgtgcccaacttccccagcaagctgcaggtggaacctgcggtggacacttccggtgtccagtgctatgggcctggtattgagggccagggtgtcttccgtgaggccaccactgagttcagtgtggacgcccgggctctgacacagaccggagggccgcacgtcaaggcccgtgtggccaacccctcaggcaacctgacggagacctacgttcaggaccgtggcgatggcatgtacaaagtggagtacacgccttacgaggagggactgcactccgtggacgtgacctatgacggcagtcccgtgcccagcagccccttccaggtgcccgtgaccgagggctgcgacccctcccgggtgcgtgtccacgggccaggcatccaaagtggcaccaccaacaagcccaacaagttcactgtggagaccaggggagctggcacgggcggcctgggcctggctgtagagggcccctccgaggccaagatgtcctgcatggataacaaggacggcagctgctcggtcgagtacatcccttatgaggctggcacctacagcctcaacgtcacctatggtggccatcaagtgccaggcagtcctttcaaggtccctgtgcatgatgtgacagatgcgtccaaggtcaagtgctctgggcccggcctgagcccaggcatggttcgtgccaacctccctcagtccttccaggtggacacaagcaaggctggtgtggccccattgcaggtcaaagtgcaagggcccaaaggcctggtggagccagtggacgtggtagacaacgctgatggcacccagaccgtcaattatgtgcccagccgagaagggccctacagcatctcagtactgtatggagatgaagaggtaccccggagccccttcaaggtcaaggtgctgcctactcatgatgccagcaaggtgaaggccagtggccccgggctcaacaccactggcgtgcctgccagcctgcccgtggagttcaccatcgatgcaaaggacgccggggagggcctgctggctgtccagatcacggatcccgaaggcaagccgaagaagacacacatccaagacaaccatgacggcacgtatacagtggcctacgtgccagacgtgacaggtcgctacaccatcctcatcaagtacggtggtgacgagatccccttctccccgtaccgcgtgcgtgccgtgcccaccggggacgccagcaagtgcactgtcacagtgtcaatcggaggtcacgggctaggtgctggcatcggccccaccattcagattggggaggagacggtgatcactgtggacactaaggcggcaggcaaaggcaaagtgacgtgcaccgtgtgcacgcctgatggctcagaggtggatgtggacgtggtggagaatgaggacggcactttcgacatcttctacacggccccccagccgggcaaatacgtcatctgtgtgcgctttggtggcgagcacgtgcccaacagccccttccaagtgacggctctggctggggaccagccctcggtgcagccccctctacggtctcagcagctggccccacagtacacctacgcccagggcggccagcagacttgggccccggagaggcccctggtgggtgtcaatgggctggatgtgaccagcctgaggccctttgaccttgtcatccccttcaccatcaagaagggcgagatcacaggggaggttcggatgccctcaggcaaggtggcgcagcccaccatcactgacaacaaagacggcaccgtgaccgtgcggtatgcacccagcgaggctggcctgcacgagatggacatccgctatgacaacatgcacatcccaggaagccccttgcagttctatgtggattacgtcaactgtggccatgtcactgcctatgggcctggcctcacccatggagtagtgaacaagcctgccaccttcaccgtcaacaccaaggatgcaggagaggggggcctgtctctggccattgagggcccgtccaaagcagaaatcagctgcactgacaaccaggatgggacatgcagcgtgtcctacctgcctgtgctgccgggggactacagcattctagtcaagtacaatgaacagcacgtcccaggcagccccttcactgctcgggtcacaggtgacgactccatgcgtatgtcccacctaaaggtcggctctgctgccgacatccccatcaacatctcagagacggatctcagcctgctgacggccactgtggtcccgccctcgggccgggaggagccctgtttgctgaagcggctgcgtaatggccacgtggggatttcattcgtgcccaaggagacgggggagcacctggtgcatgtgaagaaaaatggccagcacgtggccagcagccccatcccggtggtgatcagccagtcggaaattggggatgccagtcgtgttcgggtctctggtcagggccttcacgaaggccacacctttgagcctgcagagtttatcattgatacccgcgatgcaggctatggtgggctcagcctgtccattgagggccccagcaaggtggacatcaacacagaggacctggaggacgggacgtgcagggtcacctactgccccacagagccaggcaactacatcatcaacatcaagtttgccgaccagcacgtgcctggcagccccttctctgtgaaggtgacaggcgagggccgggtgaaagagagcatcacccgcaggcgtcgggctccttcagtggccaacgttggtagtcattgtgacctcagcctgaaaatccctgaaattagcatccaggatatgacagcccaggtgaccagcccatcgggcaagacccatgaggccgagatcgtggaaggggagaaccacacctactgcatccgctttgttcccgctgagatgggcacacacacagtcagcgtgaagtacaagggccagcacgtgcctgggagccccttccagttcaccgtggggcccctaggggaagggggagcccacaaggtccgagctgggggccctggcctggagagagctgaagctggagtgccagccgaattcagtatctggacccgggaagctggtgctggaggcctggccattgctgtcgagggccccagcaaggctgagatctcttttgaggaccgcaaggacggctcctgtggtgtggcttatgtggtccaggagccaggtgactacgaagtctcagtcaagttcaacgaggaacacattcccgacagccccttcgtggtgcctgtggcttctccgtctggcgacgcccgccgcctcactgtttctagccttcaggagtcagggctaaaggtcaaccagccagcctcttttgcagtcagcctgaacggggccaagggggcgatcgatgccaaggtgcacagcccctcaggagccctggaggagtgctatgtcacagaaattgaccaagataagtatgctgtgcgcttcatccctcgggagaatggcgtttacctgattgacgtcaagttcaacggcacccacatccctggaagccccttcaagatccgagttggggagcctgggcatggaggggacccaggcttggtgtctgcttacggagcaggtctggaaggcggtgtcacagggaacccagctgagttcgtcgtgaacacgagcaatgcgggagctggtgccctgtcggtgaccattgacggcccctccaaggtgaagatggattgccaggagtgccctgagggctaccgcgtcacctatacccccatggcacctggcagctacctcatctccatcaagtacggcggcccctaccacattgggggcagccccttcaaggccaaagtcacaggcccccgtctcgtcagcaaccacagcctccacgagacatcatcagtgtttgtagactctctgaccaaggccacctgtgccccccagcatggggccccgggtcctgggcctgctgacgccagcaaggtggtggccaagggcctggggctgagcaaggcctacgtaggccagaagagcagcttcacagtagactgcagcaaagcaggcaacaacatgctgctggtgggggttcatggcccaaggaccccctgcgaggagatcctggtgaagcacgtgggcagccggctctacagcgtgtcctacctgctcaaggacaagggggagtacacactggtggtcaaatggggggacgagcacatcccaggcagcccctaccgcgttgtggtgccctgagtctggggcccgtgccagccggcagcccccaagcctgccccgctacccaagcagccccgccctcttcccctcaaccccggcccaggccgccctggccgcccgcctgtcactgcagccgcccctgccctgtgccgtgctgcgctcacctgcctccccagccagccgctgacctctcggctttcacttgggcagagggagccatttggtggcgctgcttgtcttctttggttctgggaggggtgagggatgggggtcctgtacacaaccacccactagttctcttctccagccaagaggaataaagttttgcttccattctc

SEQ ID NO: 134593 - DNA, 843 bp, Homo sapiens
  Payload ID: 6297
  Gene Symbol: FLNA
  Gene Name: filamin A, alpha
  ENST ID: ENST00000444578
  CDS Start-End: 1-843
ctggtgcatgtgaagaaaaatggccagcacgtggccagcagccccatcccggtggtgatcagccagtcggaaattggggatgccagtcgtgttcgggtctctggtcagggccttcacgaaggccacacctttgagcctgcagagtttatcattgatacccgcgatgcaggctatggtgggctcagcctgtccattgagggccccagcaaggtggacatcaacacagaggacctggaggacgggacgtgcagggtcacctactgccccacagagccaggcaactacatcatcaacatcaagtttgccgaccagcacgtgcctgaaattagcatccaggatatgacagcccaggtgaccagcccatcgggcaagacccatgaggccgagatcgtggaaggggagaaccacacctactgcatccgctttgttcccgctgagatgggcacacacacagtcagcgtgaagtacaagggccagcacgtgcctgggagccccttccagttcaccgtggggcccctaggggaagggggagcccacaaggtccgagctgggggccctggcctggagagagctgaagctggagtgccagccgaattcagtatctggacccgggaagctggtgctggaggcctggccattgctgtcgagggccccagcaaggctgagatctcttttgaggaccgcaaggacggctcctgtggtgtggcttatgtggtccaggagccaggtgactacgaagtctcagtcaagttcaacgaggaacacattcccgacagccccttcgtggtgcctgtggcttctccgtctggcgacgcccgccgcctcactgtttctagccttcag

SEQ ID NO: 134594 - DNA, 696 bp, Homo sapiens
  Payload ID: 6297
  Gene Symbol: FLNA
  Gene Name: filamin A, alpha
  ENST ID: ENST00000438732
  CDS Start-End: 1-696
gcaaatacgtcatctgtgtgcgctttggtggcgagcacgtgcccaacagccccttccaagtgacggctctggctggggaccagccctcggtgcagccccctctacggtctcagcagctggccccacagtacacctacgcccagggcggccagcagacttgggccccggagaggcccctggtgggtgtcaatgggctggatgtgaccagcctgaggccctttgaccttgtcatccccttcaccatcaagaagggcgagatcacaggggaggttcggatgccctcaggcaaggtggcgcagcccaccatcactgacaacaaagacggcaccgtgaccgtgcggtatgcacccagcgaggctggcctgcacgagatggacatccgctatgacaacatgcacatcccaggaagccccttgcagttctatgtggattacgtcaactgtggccatgtcactgcctatgggcctggcctcacccatggagtagtgaacaagcctgccaccttcaccgtcaacaccaaggatgcaggagagggtgacgactccatgcgtatgtcccacctaaaggtcggctctgctgccgacatccccatcaacatctcagagacggatctcagcctgctgacggccactgtggtcccgccctcgggccgggaggagccctgtttgctgaagcggctgcgtaatggccacgtgg

SEQ ID NO: 134595 - DNA, 704 bp, Homo sapiens
  Payload ID: 6297
  Gene Symbol: FLNA
  Gene Name: filamin A, alpha
  ENST ID: ENST00000415241
  CDS Start-End: 1-272
atgaacagcacgtcccaggcagccccttcactgctcgggtcacaggtgacgactccatgcgtatgtcccacctaaaggtcggctctgctgccgacatccccatcaacatctcagagacggatctcagcctgctgacggccactgtggtcccgccctcgggccgggaggagccctgtttgctgaagcggctgcgtaatggccacgtggccatgccctgtgtccagggatttcattcgtgcccaaggagacgggggagcacctggtgcatgtgaagaaaaatggccagcacgtggccagcagccccatcccggtggtgatcagccagtcggaaattggggatgccagtcgtgttcgggtctctggtcagggccttcacgaaggccacacctttgagcctgcagagtttatcattgatacccgcgatgcaggctatggtgggctcagcctgtccattgagggccccagcaaggtggacatcaacacagaggacctggaggacgggacgtgcagggtcacctactgccccacagagccaggcaactacatcatcaacatcaagtttgccgaccagcacgtgcctggcagccccttctctgtgaaggtgacaggcgagggccgggtgaaagagagcatcacccgcaggcgtcgggctccttcagtggccaacgttggtagtcattgtgacctcagcctgaaaatccctg

SEQ ID NO: 134596 - DNA, 8225 bp, Homo sapiens
  Payload ID: 6297
  Gene Symbol: FLNA
  Gene Name: filamin A, alpha
  ENST ID: ENST00000420627
  CDS Start-End: 1-1815
gcggctccgggcggcggcgtcgacacgcgggacgccgagatgccggccaccgagaaggacctggcggaggacgcgccgtggaagaagatccagcagaacactttcacgcgctggtgcaacgagcacctgaagtgcgtgagcaagcgcatcgccaacctgcagacggacctgagcgacgggctgcggcttatcgcgctgttggaggtgctcagccagaagaagatgcaccgcaagcacaaccagcggcccactttccgccaaatgcagcttgagaacgtgtcggtggcgctcgagttcctggaccgcgagagcatcaaactggtgtccatcgacagcaaggccatcgtggacgggaacctgaagctgatcctgggcctcatctggaccctgatcctgcactactccatctccatgcccatgtgggacgaggaggaggatgaggaggccaagaagcagacccccaagcagaggctcctgggctggatccagaacaagctgccgcagctgcccatcaccaacttcagccgggactggcagagcggccgggccctgggcgccctggtggacagctgtgccccgggcctgtgtcctgactgggactcttgggacgccagcaagcccgttaccaatgcgcgagaggccatgcagcaggcggatgactggctgggcatcccccaggtgatcacccccgaggagattgtggaccccaacgtggacgagcactctgtcatgacctacctgtcccagttccccaaggccaagctgaagccaggggctcccttgcggcccaaactgaacccgaagaaagcccgtgcctacgggccaggcatcgagcccacaggcaacatggtgaagaagcgggcagagttcactgtggagaccagaagtgctggccagggagaggtgctggtgtacgtggaggacccggccggacaccaggaggaggcaaaagtgaccgccaataacgacaagaaccgcaccttctccgtctggtacgtccccgaggtgacggggactcataaggttactgtgctctttgctggccagcacatcgccaagagccccttcgaggtgtacgtggataagtcacagggtgacgccagcaaagtgacagcccaaggtcccggcctggagcccagtggcaacatcgccaacaagaccacctactttgagatctttacggcaggagctggcacgggcgaggtcgaggttgtgatccaggaccccatgggacagaagggcacggtagagcctcagctggaggcccggggcgacagcacataccgctgcagctaccagcccaccatggagggcgtccacaccgtgcacgtcacgtttgccggcgtgcccatccctcgcagcccctacactgtcactgttggccaagcctgtaacccgagtgcctgccgggcggttggccggggcctccagcccaagggtgtgcgggtgaaggagacagctgacttcaaggtgtacacaaagggcgctggcagtggggagctgaaggtcaccgtgaagggccccaggagaggagcgcgtgaagcagaaggacctgggggatggcgtgtatggcttcgagtattaccccatggtccctggaacctatatcgtcaccatcacgtggggtggtcagaacatcgggcgcagtcccttcgaagtgaaggtgggcaccgagtgtggcaatcagaaggtacgggcctggggccctgggctggagggcggcgtcgttggcaagtcagcagactttgtggtggaggctatcggggacgacgtgggcacgctgggcttctcggtggaagggccatcgcaggctaagatcgaatgtgacgacaagggcgacggctcctgtgatgtgcgctactggccgcaggaggctggcgagtatgccgttcacgtgctgtgcaacagcgaagacatccgcctcagccccttcatggctgacatccgtgacgcgccccaggacttccacccagacagggtgaaggcacgtgggcctggattggagaagacaggtgtggccgtcaacaagccagcagagttcacagtggatgccaagcacggtggcaaggccccacttcgggtccaagtccaggacaatgaaggctgccctgtggaggcgttggtcaaggacaacggcaatggcacttacagctgctcctacgtgcccaggaagccggtgaagcacacagccatggtgtcctggggaggcgtcagcatccccaacagccccttcagggtgaatgtgggagctggcagccaccccaacaaggtcaaagtatacggccccggagtagccaagacagggctcaaggcccacgagcccacctacttcactgtggactgcgccgaggctggccagggggacgtcagcatcggcatcaagtgtgcccctggagtggtaggccccgccgaagctgacatcgacttcgacatcatccgcaatgacaatgacaccttcacggtcaagtacacgccccggggggctggcagctacaccattatggtcctctttgctgaccaggccacgcccaccagccccatccgagtcaaggtggagccctctcatgacgccagtaaggtgaaggccgagggccctggcctcagtcgcactggtgtcgagcttggcaagcccacccacttcacagtaaatgccaaagctgctggcaaaggcaagctggacgtccagttctcaggactcaccaagggggatgcagtgcgagatgtggacatcatcgaccaccatgacaacacctacacagtcaagtacacgcctgtccagcagggtccagtaggcgtcaatgtcacttatggaggggatcccatccctaagagccctttctcagtggcagtatctccaagcctggacctcagcaagatcaaggtgtctggcctgggagagaaggtggacgttggcaaagaccaggagttcacagtcaaatcaaagggtgctggtggtcaaggcaaagtggcatccaagattgtgggcccctcgggtgcagcggtgccctgcaaggtggagccaggcctgggggctgacaacagtgtggtgcgcttcctgccccgtgaggaagggccctatgaggtggaggtgacctatgacggcgtgcccgtgcctggcagcccctttcctctggaagctgtggcccccaccaagcctagcaaggtgaaggcgtttgggccggggctgcagggaggcagtgcgggctcccccgcccgcttcaccatcgacaccaagggcgccggcacaggtggcctgggcctgacggtggagggcccctgtgaggcgcagctcgagtgcttggacaatggggatggcacatgttccgtgtcctacgtgcccaccgagcccggggactacaacatcaacatcctcttcgctgacacccacatccctggctccccattcaaggcccacgtggttccctgctttgacgcatccaaagtcaagtgctcaggccccgggctggagcgggccaccgctggggaggtgggccaattccaagtggactgctcgagcgcgggcagcgcggagctgaccattgagatctgctcggaggcggggcttccggccgaggtgtacatccaggaccacggtgatggcacgcacaccattacctacattcccctctgccccggggcctacaccgtcaccatcaagtacggcggccagcccgtgcccaacttccccagcaagctgcaggtggaacctgcggtggacacttccggtgtccagtgctatgggcctggtattgagggccagggtgtcttccgtgaggccaccactgagttcagtgtggacgcccgggctctgacacagaccggagggccgcacgtcaaggcccgtgtggccaacccctcaggcaacctgacggagacctacgttcaggaccgtggcgatggcatgtacaaagtggagtacacgccttacgaggagggactgcactccgtggacgtgacctatgacggcagtcccgtgcccagcagccccttccaggtgcccgtgaccgagggctgcgacccctcccgggtgcgtgtccacgggccaggcatccaaagtggcaccaccaacaagcccaacaagttcactgtggagaccaggggagctggcacgggcggcctgggcctggctgtagagggcccctccgaggccaagatgtcctgcatggataacaaggacggcagctgctcggtcgagtacatcccttatgaggctggcacctacagcctcaacgtcacctatggtggccatcaagtgccaggcagtcctttcaaggtccctgtgcatgatgtgacagatgcgtccaaggtcaagtgctctgggcccggcctgagcccaggcatggttcgtgccaacctccctcagtccttccaggtggacacaagcaaggctggtgtggccccattgcaggtcaaagtgcaagggcccaaaggcctggtggagccagtggacgtggtagacaacgctgatggcacccagaccgtcaattatgtgcccagccgagaagggccctacagcatctcagtactgtatggagatgaagaggtaccccggagccccttcaaggtcaaggtgctgcctactcatgatgccagcaaggtgaaggccagtggccccgggctcaacaccactggcgtgcctgccagcctgcccgtggagttcaccatcgatgcaaaggacgccggggagggcctgctggctgtccagatcacggatcccgaaggcaagccgaagaagacacacatccaagacaaccatgacggcacgtatacagtggcctacgtgccagacgtgacaggtcgctacaccatcctcatcaagtacggtggtgacgagatccccttctccccgtaccgcgtgcgtgccgtgcccaccggggacgccagcaagtgcactgtcacagtgtcaatcggaggtcacgggctaggtgctggcatcggccccaccattcagattggggaggagacggtgatcactgtggacactaaggcggcaggcaaaggcaaagtgacgtgcaccgtgtgcacgcctgatggctcagaggtggatgtggacgtggtggagaatgaggacggcactttcgacatcttctacacggccccccagccgggcaaatacgtcatctgtgtgcgctttggtggcgagcacgtgcccaacagccccttccaagtgacggctctggctggggaccagccctcggtgcagccccctctacggtctcagcagctggccccacagtacacctacgcccagggcggccagcagacttgggccccggagaggcccctggtgggtgtcaatgggctggatgtgaccagcctgaggccctttgaccttgtcatccccttcaccatcaagaagggcgagatcacaggggaggttcggatgccctcaggcaaggtggcgcagcccaccatcactgacaacaaagacggcaccgtgaccgtgcggtatgcacccagcgaggctggcctgcacgagatggacatccgctatgacaacatgcacatcccaggaagccccttgcagttctatgtggattacgtcaactgtggccatgtcactgcctatgggcctggcctcacccatggagtagtgaacaagcctgccaccttcaccgtcaacaccaaggatgcaggagaggggggcctgtctctggccattgagggcccgtccaaagcagaaatcagctgcactgacaaccaggatgggacatgcagcgtgtcctacctgcctgtgctgccgggggactacagcattctagtcaagtacaatgaacagcacgtcccaggcagccccttcactgctcgggtcacaggtgacgactccatgcgtatgtcccacctaaaggtcggctctgctgccgacatccccatcaacatctcagagacggatctcagcctgctgacggccactgtggtcccgccctcgggccgggaggagccctgtttgctgaagcggctgcgtaatggccacgtggggatttcattcgtgcccaaggagacgggggagcacctggtgcatgtgaagaaaaatggccagcacgtggccagcagccccatcccggtggtgatcagccagtcggaaattggggatgccagtcgtgttcgggtctctggtcagggccttcacgaaggccacacctttgagcctgcagagtttatcattgatacccgcgatgcaggctatggtgggctcagcctgtccattgagggccccagcaaggtggacatcaacacagaggacctggaggacgggacgtgcagggtcacctactgccccacagagccaggcaactacatcatcaacatcaagtttgccgaccagcacgtgcctggcagccccttctctgtgaaggtgacaggcgagggccgggtgaaagagagcatcacccgcaggcgtcgggctccttcagtggccaacgttggtagtcattgtgacctcagcctgaaaatccctgaaattagcatccaggatatgacagcccaggtgaccagcccatcgggcaagacccatgaggccgagatcgtggaaggggagaaccacacctactgcatccgctttgttcccgctgagatgggcacacacacagtcagcgtgaagtacaagggccagcacgtgcctgggagccccttccagttcaccgtggggcccctaggggaagggggagcccacaaggtccgagctgggggccctggcctggagagagctgaagctggagtgccagccgaattcagtatctggacccgggaagctggtgctggaggcctggccattgctgtcgagggccccagcaaggctgagatctcttttgaggaccgcaaggacggctcctgtggtgtggcttatgtggtccaggagccaggtgactacgaagtctcagtcaagttcaacgaggaacacattcccgacagccccttcgtggtgcctgtggcttctccgtctggcgacgcccgccgcctcactgtttctagccttcaggagtcagggctaaaggtcaaccagccagcctcttttgcagtcagcctgaacggggccaagggggcgatcgatgccaaggtgcacagcccctcaggagccctggaggagtgctatgtcacagaaattgaccaagataagtatgctgtgcgcttcatccctcgggagaatggcgtttacctgattgacgtcaagttcaacggcacccacatccctggaagccccttcaagatccgagttggggagcctgggcatggaggggacccaggcttggtgtctgcttacggagcaggtctggaaggcggtgtcacagggaacccagctgagttcgtcgtgaacacgagcaatgcgggagctggtgccctgtcggtgaccattgacggcccctccaaggtgaagatggattgccaggagtgccctgagggctaccgcgtcacctatacccccatggcacctggcagctacctcatctccatcaagtacggcggcccctaccacattgggggcagccccttcaaggccaaagtcacaggcccccgtctcgtcagcaaccacagcctccacgagacatcatcagtgtttgtagactctctgaccaaggccacctgtgccccccagcatggggccccgggtcctgggcctgctgacgccagcaaggtggtggccaagggcctggggctgagcaaggcctacgtaggccagaagagcagcttcacagtagactgcagcaaagcaggcaacaacatgctgctggtgggggttcatggcccaaggaccccctgcgaggagatcctggtgaagcacgtgggcagccggctctacagcgtgtcctacctgctcaaggacaagggggagtacacactggtggtcaaatggggggacgagcacatcccaggcagcccctaccgcgttgtggtgccctgagtctggggcccgtgccagccggcagcccccaagcctgccccgctacccaagcagccccgccctcttcccctcaaccccggcccaggccgccctggccgcccgcctgtcactgcagccgcccctgccctgtgccgtgctgcgctcacctgcctccccagccagccgctgacctctcggctttcacttgggcagagggagccatttggtggcgctgcttgtcttctttggttctgggaggggtgagggatgggggtcctgtacacaaccacccactagttctcttctccagccaagaggaataaagttttgcttccattctcctttg

SEQ ID NO: 134597 - DNA, 8486 bp, Homo sapiens
  Payload ID: 6297
  Gene Symbol: FLNA
  Gene Name: filamin A, alpha
  Uniprot ID: P21333
  ENST ID: ENST00000422373
  CDS Start-End: 250-8169
attcgcgtggaggcgcgtcgcgcgcagcggacgccgacagaatccccgaggcgcctggcgcgggcgcgggcgcgaaggcgatccgggcgccaccccgcggtcatcggtcaccggtcgctctcaggaacagcagcgcaacctctgctccctgcctcgcctcccgcgcgcctaggtgcctgcgactttaattaaagggccgtcccctcgccgaggctgcagcaccgcccccccggcttctcgcgcctcaaaatgagtagctcccactctcgggcgggccagagcgcagcaggcgcggctccgggcggcggcgtcgacacgcgggacgccgagatgccggccaccgagaaggacctggcggaggacgcgccgtggaagaagatccagcagaacactttcacgcgctggtgcaacgagcacctgaagtgcgtgagcaagcgcatcgccaacctgcagacggacctgagcgacgggctgcggcttatcgcgctgttggaggtgctcagccagaagaagatgcaccgcaagcacaaccagcggcccactttccgccaaatgcagcttgagaacgtgtcggtggcgctcgagttcctggaccgcgagagcatcaaactggtgtccatcgacagcaaggccatcgtggacgggaacctgaagctgatcctgggcctcatctggaccctgatcctgcactactccatctccatgcccatgtgggacgaggaggaggatgaggaggccaagaagcagacccccaagcagaggctcctgggctggatccagaacaagctgccgcagctgcccatcaccaacttcagccgggactggcagagcggccgggccctgggcgccctggtggacagctgtgccccgggcctgtgtcctgactgggactcttgggacgccagcaagcccgttaccaatgcgcgagaggccatgcagcaggcggatgactggctgggcatcccccaggtgatcacccccgaggagattgtggaccccaacgtggacgagcactctgtcatgacctacctgtcccagttccccaaggccaagctgaagccaggggctcccttgcggcccaaactgaacccgaagaaagcccgtgcctacgggccaggcatcgagcccacaggcaacatggtgaagaagcgggcagagttcactgtggagaccagaagtgctggccagggagaggtgctggtgtacgtggaggacccggccggacaccaggaggaggcaaaagtgaccgccaataacgacaagaaccgcaccttctccgtctggtacgtccccgaggtgacggggactcataaggttactgtgctctttgctggccagcacatcgccaagagccccttcgaggtgtacgtggataagtcacagggtgacgccagcaaagtgacagcccaaggtcccggcctggagcccagtggcaacatcgccaacaagaccacctactttgagatctttacggcaggagctggcacgggcgaggtcgaggttgtgatccaggaccccatgggacagaagggcacggtagagcctcagctggaggcccggggcgacagcacataccgctgcagctaccagcccaccatggagggcgtccacaccgtgcacgtcacgtttgccggcgtgcccatccctcgcagcccctacactgtcactgttggccaagcctgtaacccgagtgcctgccgggcggttggccggggcctccagcccaagggtgtgcgggtgaaggagacagctgacttcaaggtgtacacaaagggcgctggcagtggggagctgaaggtcaccgtgaagggccccaagggagaggagcgcgtgaagcagaaggacctgggggatggcgtgtatggcttcgagtattaccccatggtccctggaacctatatcgtcaccatcacgtggggtggtcagaacatcgggcgcagtcccttcgaagtgaaggtgggcaccgagtgtggcaatcagaaggtacgggcctggggccctgggctggagggcggcgtcgttggcaagtcagcagactttgtggtggaggctatcggggacgacgtgggcacgctgggcttctcggtggaagggccatcgcaggctaagatcgaatgtgacgacaagggcgacggctcctgtgatgtgcgctactggccgcaggaggctggcgagtatgccgttcacgtgctgtgcaacagcgaagacatccgcctcagccccttcatggctgacatccgtgacgcgccccaggacttccacccagacagggtgaaggcacgtgggcctggattggagaagacaggtgtggccgtcaacaagccagcagagttcacagtggatgccaagcacggtggcaaggccccacttcgggtccaagtccaggacaatgaaggctgccctgtggaggcgttggtcaaggacaacggcaatggcacttacagctgctcctacgtgcccaggaagccggtgaagcacacagccatggtgtcctggggaggcgtcagcatccccaacagccccttcagggtgaatgtgggagctggcagccaccccaacaaggtcaaagtatacggccccggagtagccaagacagggctcaaggcccacgagcccacctacttcactgtggactgcgccgaggctggccagggggacgtcagcatcggcatcaagtgtgcccctggagtggtaggccccgccgaagctgacatcgacttcgacatcatccgcaatgacaatgacaccttcacggtcaagtacacgccccggggggctggcagctacaccattatggtcctctttgctgaccaggccacgcccaccagccccatccgagtcaaggtggagccctctcatgacgccagtaaggtgaaggccgagggccctggcctcagtcgcactggtgtcgagcttggcaagcccacccacttcacagtaaatgccaaagctgctggcaaaggcaagctggacgtccagttctcaggactcaccaagggggatgcagtgcgagatgtggacatcatcgaccaccatgacaacacctacacagtcaagtacacgcctgtccagcagggtccagtaggcgtcaatgtcacttatggaggggatcccatccctaagagccctttctcagtggcagtatctccaagcctggacctcagcaagatcaaggtgtctggcctgggagagaaggtggacgttggcaaagaccaggagttcacagtcaaatcaaagggtgctggtggtcaaggcaaagtggcatccaagattgtgggcccctcgggtgcagcggtgccctgcaaggtggagccaggcctgggggctgacaacagtgtggtgcgcttcctgccccgtgaggaagggccctatgaggtggaggtgacctatgacggcgtgcccgtgcctggcagcccctttcctctggaagctgtggcccccaccaagcctagcaaggtgaaggcgtttgggccggggctgcagggaggcagtgcgggctcccccgcccgcttcaccatcgacaccaagggcgccggcacaggtggcctgggcctgacggtggagggcccctgtgaggcgcagctcgagtgcttggacaatggggatggcacatgttccgtgtcctacgtgcccaccgagcccggggactacaacatcaacatcctcttcgctgacacccacatccctggctccccattcaaggcccacgtggttccctgctttgacgcatccaaagtcaagtgctcaggccccgggctggagcgggccaccgctggggaggtgggccaattccaagtggactgctcgagcgcgggcagcgcggagctgaccattgagatctgctcggaggcggggcttccggccgaggtgtacatccaggaccacggtgatggcacgcacaccattacctacattcccctctgccccggggcctacaccgtcaccatcaagtacggcggccagcccgtgcccaacttccccagcaagctgcaggtggaacctgcggtggacacttccggtgtccagtgctatgggcctggtattgagggccagggtgtcttccgtgaggccaccactgagttcagtgtggacgcccgggctctgacacagaccggagggccgcacgtcaaggcccgtgtggccaacccctcaggcaacctgacggagacctacgttcaggaccgtggcgatggcatgtacaaagtggagtacacgccttacgaggagggactgcactccgtggacgtgacctatgacggcagtcccgtgcccagcagccccttccaggtgcccgtgaccgagggctgcgacccctcccgggtgcgtgtccacgggccaggcatccaaagtggcaccaccaacaagcccaacaagttcactgtggagaccaggggagctggcacgggcggcctgggcctggctgtagagggcccctccgaggccaagatgtcctgcatggataacaaggacggcagctgctcggtcgagtacatcccttatgaggctggcacctacagcctcaacgtcacctatggtggccatcaagtgccaggcagtcctttcaaggtccctgtgcatgatgtgacagatgcgtccaaggtcaagtgctctgggcccggcctgagcccaggcatggttcgtgccaacctccctcagtccttccaggtggacacaagcaaggctggtgtggccccattgcaggtcaaagtgcaagggcccaaaggcctggtggagccagtggacgtggtagacaacgctgatggcacccagaccgtcaattatgtgcccagccgagaagggccctacagcatctcagtactgtatggagatgaagaggtaccccggagccccttcaaggtcaaggtgctgcctactcatgatgccagcaaggtgaaggccagtggccccgggctcaacaccactggcgtgcctgccagcctgcccgtggagttcaccatcgatgcaaaggacgccggggagggcctgctggctgtccagatcacggatcccgaaggcaagccgaagaagacacacatccaagacaaccatgacggcacgtatacagtggcctacgtgccagacgtgacaggtcgctacaccatcctcatcaagtacggtggtgacgagatccccttctccccgtaccgcgtgcgtgccgtgcccaccggggacgccagcaagtgcactgtcacaggtgctggcatcggccccaccattcagattggggaggagacggtgatcactgtggacactaaggcggcaggcaaaggcaaagtgacgtgcaccgtgtgcacgcctgatggctcagaggtggatgtggacgtggtggagaatgaggacggcactttcgacatcttctacacggccccccagccgggcaaatacgtcatctgtgtgcgctttggtggcgagcacgtgcccaacagccccttccaagtgacggctctggctggggaccagccctcggtgcagccccctctacggtctcagcagctggccccacagtacacctacgcccagggcggccagcagacttgggccccggagaggcccctggtgggtgtcaatgggctggatgtgaccagcctgaggccctttgaccttgtcatccccttcaccatcaagaagggcgagatcacaggggaggttcggatgccctcaggcaaggtggcgcagcccaccatcactgacaacaaagacggcaccgtgaccgtgcggtatgcacccagcgaggctggcctgcacgagatggacatccgctatgacaacatgcacatcccaggaagccccttgcagttctatgtggattacgtcaactgtggccatgtcactgcctatgggcctggcctcacccatggagtagtgaacaagcctgccaccttcaccgtcaacaccaaggatgcaggagaggggggcctgtctctggccattgagggcccgtccaaagcagaaatcagctgcactgacaaccaggatgggacatgcagcgtgtcctacctgcctgtgctgccgggggactacagcattctagtcaagtacaatgaacagcacgtcccaggcagccccttcactgctcgggtcacaggtgacgactccatgcgtatgtcccacctaaaggtcggctctgctgccgacatccccatcaacatctcagagacggatctcagcctgctgacggccactgtggtcccgccctcgggccgggaggagccctgtttgctgaagcggctgcgtaatggccacgtggggatttcattcgtgcccaaggagacgggggagcacctggtgcatgtgaagaaaaatggccagcacgtggccagcagccccatcccggtggtgatcagccagtcggaaattggggatgccagtcgtgttcgggtctctggtcagggccttcacgaaggccacacctttgagcctgcagagtttatcattgatacccgcgatgcaggctatggtgggctcagcctgtccattgagggccccagcaaggtggacatcaacacagaggacctggaggacgggacgtgcagggtcacctactgccccacagagccaggcaactacatcatcaacatcaagtttgccgaccagcacgtgcctggcagccccttctctgtgaaggtgacaggcgagggccgggtgaaagagagcatcacccgcaggcgtcgggctccttcagtggccaacgttggtagtcattgtgacctcagcctgaaaatccctgaaattagcatccaggatatgacagcccaggtgaccagcccatcgggcaagacccatgaggccgagatcgtggaaggggagaaccacacctactgcatccgctttgttcccgctgagatgggcacacacacagtcagcgtgaagtacaagggccagcacgtgcctgggagccccttccagttcaccgtggggcccctaggggaagggggagcccacaaggtccgagctgggggccctggcctggagagagctgaagctggagtgccagccgaattcagtatctggacccgggaagctggtgctggaggcctggccattgctgtcgagggccccagcaaggctgagatctcttttgaggaccgcaaggacggctcctgtggtgtggcttatgtggtccaggagccaggtgactacgaagtctcagtcaagttcaacgaggaacacattcccgacagccccttcgtggtgcctgtggcttctccgtctggcgacgcccgccgcctcactgtttctagccttcaggagtcagggctaaaggtcaaccagccagcctcttttgcagtcagcctgaacggggccaagggggcgatcgatgccaaggtgcacagcccctcaggagccctggaggagtgctatgtcacagaaattgaccaagataagtatgctgtgcgcttcatccctcgggagaatggcgtttacctgattgacgtcaagttcaacggcacccacatccctggaagccccttcaagatccgagttggggagcctgggcatggaggggacccaggcttggtgtctgcttacggagcaggtctggaaggcggtgtcacagggaacccagctgagttcgtcgtgaacacgagcaatgcgggagctggtgccctgtcggtgaccattgacggcccctccaaggtgaagatggattgccaggagtgccctgagggctaccgcgtcacctatacccccatggcacctggcagctacctcatctccatcaagtacggcggcccctaccacattgggggcagccccttcaaggccaaagtcacaggcccccgtctcgtcagcaaccacagcctccacgagacatcatcagtgtttgtagactctctgaccaaggccacctgtgccccccagcatggggccccgggtcctgggcctgctgacgccagcaaggtggtggccaagggcctggggctgagcaaggcctacgtaggccagaagagcagcttcacagtagactgcagcaaagcaggcaacaacatgctgctggtgggggttcatggcccaaggaccccctgcgaggagatcctggtgaagcacgtgggcagccggctctacagcgtgtcctacctgctcaaggacaagggggagtacacactggtggtcaaatggggggacgagcacatcccaggcagcccctaccgcgttgtggtgccctgagtctggggcccgtgccagccggcagcccccaagcctgccccgctacccaagcagccccgccctcttcccctcaaccccggcccaggccgccctggccgcccgcctgtcactgcagccgcccctgccctgtgccgtgctgcgctcacctgcctccccagccagccgctgacctctcggctttcacttgggcagagggagccatttggtggcgctgcttgtcttctttggttctgggaggggtgagggatgggggtcctgtacacaaccacccactagttctcttctccagccaagaggaataaagttttgcttccatt

SEQ ID NO: 134598 - DNA, 7595 bp, Homo sapiens
  Payload ID: 6297
  Gene Symbol: FLNA
  Gene Name: filamin A, alpha
  ENST ID: ENST00000610817
  CDS Start-End: 331-7278
attcgcgtggaggcgcgtcgcgcgcagcggacgccgacagaatccccgaggcgcctggcgcgggcgcgggcgcgaaggcgatccgggcgccaccccgcggtcatcggtcaccggtcgctctcaggaacagcagcgcaacctctgctccctgcctcgcctcccgcgcgcctaggtgcctgcgactttaattaaagggccgtcccctcgccgaggctgcagcaccgcccccccggcttctcgcgcctcaaaatgagtagctcccactctcgggcgggccagagcgcagcaggcgcggctccgggcggcggcgtcgacacgcgggacgccgagatgccggccaccgagaaggacctggcggaggacgcgccgtggaagaagatccagcagaacactttcacgcgctggtgcaacgagcacctgaagtgcgtgagcaagcgcatcgccaacctgcagacggacctgagcgacgggctgcggcttatcgcgctgttggaggtgctcagccagaagaagatgcaccgcaagcacaaccagcggcccactttccgccaaatgcagcttgagaacgtgtcggtggcgctcgagttcctggaccgcgagagcatcaaactggtgtccatcgacagcaaggccatcgtggacgggaacctgaagctgatcctgggcctcatctggaccctgatcctgcactactccatctccatgcccatgtgggacgaggaggaggatgaggaggccaagaagcagacccccaagcagaggctcctgggctggatccagaacaagctgccgcagctgcccatcaccaacttcagccgggactggcagagcggccgggccctgggcgccctggtggacagctgtgccccgggcctgtgtcctgactgggactcttgggacgccagcaagcccgttaccaatgcgcgagaggccatgcagcaggcggatgactggctgggcatcccccaggtgatcacccccgaggagattgtggaccccaacgtggacgagcactctgtcatgacctacctgtcccagttccccaaggccaagctgaagccaggggctcccttgcggcccaaactgaacccgaagaaagcccgtgcctacgggccaggcatcgagcccacaggcaacatggtgaagaagcgggcagagttcactgtggagaccagaagtgctggccagggagaggtgctggtgtacgtggaggacccggccggacaccaggaggaggcaaaagtgaccgccaataacgacaagaaccgcaccttctccgtctggtacgtccccgaggtgacggggactcataaggttactgtgctctttgctggccagcacatcgccaagagccccttcgaggtgtacgtggataagtcacagggtgacgccagcaaagtgacagcccaaggtcccggcctggagcccagtggcaacatcgccaacaagaccacctactttgagatctttacggcaggagctggcacgggcgaggtcgaggttgtgatccaggaccccatgggacagaagggcacggtagagcctcagctggaggcccggggcgacagcacataccgctgcagctaccagcccaccatggagggcgtccacaccgtgcacgtcacgtttgccggcgtgcccatccctcgcagcccctacactgtcactgttggccaagcctgtaacccgagtgcctgccgggcggttggccggggcctccagcccaagggtgtgcgggtgaaggagacagctgacttcaaggtgtacacaaagggcgctggcagtggggagctgaaggtcaccgtgaagggccccaagggagaggagcgcgtgaagcagaaggacctgggggatggcgtgtatggcttcgagtattaccccatggtccctggaacctatatcgtcaccatcacgtggggtggtcagaacatcgggcgcagtcccttcgaagtgaaggtgggcaccgagtgtggcaatcagaaggtacgggcctggggccctgggctggagggcggcgtcgttggcaagtcagcagactttgtggtggaggctatcggggacgacgtgggcacgctgggcttctcggtggaagggccatcgcaggctaagatcgaatgtgacgacaagggcgacggctcctgtgatgtgcgctactggccgcaggaggctggcgagtatgccgttcacgtgctgtgcaacagcgaagacatccgcctcagccccttcatggctgacatccgtgacgcgccccaggacttccacccagacagggtgaaggcacgtgggcctggattggagaagacaggtgtggccgtcaacaagccagcagagttcacagtggatgccaagcacggtggcaaggccccacttcgggtccaagtccaggacaatgaaggctgccctgtggaggcgttggtcaaggacaacggcaatggcacttacagctgctcctacgtgcccaggaagccggtgaagcacacagccatggtgtcctggggaggcgtcagcatccccaacagccccttcagggtgaatgtgggagctggcagccaccccaacaaggtcaaagtatacggccccggagtagccaagacagggctcaaggcccacgagcccacctacttcactgtggactgcgccgaggctggccagggggacgtcagcatcggcatcaagtgtgcccctggagtggtaggccccgccgaagctgacatcgacttcgacatcatccgcaatgacaatgacaccttcacggtcaagtacacgccccggggggctggcagctacaccattatggtcctctttgctgaccaggccacgcccaccagccccatccgagtcaaggtggagccctctcatgacgccagtaaggtgaaggccgagggccctggcctcagtcgcactggtgtcgagcttggcaagcccacccacttcacagtaaatgccaaagctgctggcaaaggcaagctggacgtccagttctcaggactcaccaagggggatgcagtgcgagatgtggacatcatcgaccaccatgacaacacctacacagtcaagtacacgcctgtccagcagggtccagtaggcgtcaatgtcacttatggaggggatcccatccctaagagccctttctcagtggcagtatctccaagcctggacctcagcaagatcaaggtgtctggcctgggagagaaggtggacgttggcaaagaccaggagttcacagtcaaatcaaagggtgctggtggtcaaggcaaagtggcatccaagattgtgggcccctcgggtgcagcggtgccctgcaaggtggagccaggcctgggggctgacaacagtgtggtgcgcttcctgccccgtgaggaagggccctatgaggtggaggtgacctatgacggcgtgcccgtgcctggcagcccctttcctctggaagctgtggcccccaccaagcctagcaaggtgaaggcgtttgggccggggctgcagggaggcagtgcgggctcccccgcccgcttcaccatcgacaccaagggcgccggcacaggtggcctgggcctgacggtggagggcccctgtgaggcgcagctcgagtgcttggacaatggggatggcacatgttccgtgtcctacgtgcccaccgagcccggggactacaacatcaacatcctcttcgctgacacccacatccctggctccccattcaaggcccacgtggttccctgctttgacgcatccaaagtcaagtgctcaggccccgggctggagcgggccaccgctggggaggtgggccaattccaagtggactgctcgagcgcgggcagcgcggagctgaccattgagatctgctcggaggcggggcttccggccgaggtgtacatccaggaccacggtgatggcacgcacaccattacctacattcccctctgccccggggcctacaccgtcaccatcaagtacggcggccagcccgtgcccaacttccccagcaagctgcaggtggaacctgcggtggacacttccggtgtccagtgctatgggcctggtattgagggccagggtgtcttccgtgaggccaccactgagttcagtgtggacgcccgggctctgacacagaccggagggccgcacgtcaaggcccgtgtggccaacccctcaggcaacctgacggagacctacgttcaggaccgtggcgatggcatgtacaaagtggagtacacgccttacgaggagggactgcactccgtggacgtgacctatgacggcagtcccgtgcccagcagccccttccaggtgcccgtgaccgagggctgcgacccctcccgggtgcgtgtccacgggccaggcatccaaagtggcaccaccaacaagcccaacaagttcactgtggagaccaggggagctggcacgggcggcctgggcctggctgtagagggcccctccgaggccaagatgtcctgcatggataacaaggacggcagctgctcggtcgagtacatcccttatgaggctggcacctacagcctcaacgtcacctatggtggccatcaagtgccaggcagtcctttcaaggtccctgtgcatgatgtgacagatgcgtccaaggtcaagtgctctgggcccggcctgagcccaggcatggttcgtgccaacctccctcagtccttccaggtggacacaagcaaggctggtgtggccccattgcaggtcaaagtgcaagggcccaaaggcctggtggagccagtggacgtggtagacaacgctgatggcacccagaccgtcaattatgtgcccagccgagaagggccctacagcatctcagtactgtatggagatgaagaggtaccccggagccccttcaaggtcaaggtgctgcctactcatgatgccagcaaggtgaaggccagtggccccgggctcaacaccactggcgtgcctgccagcctgcccgtggagttcaccatcgatgcaaaggacgccggggagggcctgctggctgtccagatcacggatcccgaaggcaagccgaagaagacacacatccaagacaaccatgacggcacgtatacagtggcctacgtgccagacgtgacaggtcgctacaccatcctcatcaagtacggtggtgacgagatccccttctccccgtaccgcgtgcgtgccgtgcccaccggggacgccagcaagtgcactgtcacagtgtcaatcggaggtcacgggctaggtgctggcatcggccccaccattcagattggggaggagacggtgatcactgtggacactaaggcggcaggcaaaggcaaagtgacgtgcaccgtgtgcacgcctgatggctcagaggtggatgtggacgtggtggagaatgaggacggcactttcgacatcttctacacggccccccagccgggcaaatacgtcatctgtgtgcgctttggtggcgagcacgtgcccaacagccccttccaagtgacggctctggctggggaccagccctcggtgcagccccctctacggtctcagcagctggccccacagtacacctacgcccagggcggccagcagacttgggccccggagaggcccctggtgggtgtcaatgggctggatgtgaccagcctgaggccctttgaccttgtcatccccttcaccatcaagaagggcgagatcacaggggaggttcggatgccctcaggcaaggtggcgcagcccaccatcactgacaacaaagacggcaccgtgaccgtgcggtatgcacccagcgaggctggcctgcacgagatggacatccgctatgacaacatgcacatcccaggaagccccttgcagttctatgtggattacgtcaactgtggccatgtcactgcctatgggcctggcctcacccatggagtagtgaacaagcctgccaccttcaccgtcaacaccaaggatgcaggagaggggggcctgtctctggccattgagggcccgtccaaagcagaaatcagctgcactgacaaccaggatgggacatgcagcgtgtcctacctgcctgtgctgccgggggactacagcattctagtcaagtacaatgaacagcacgtcccaggcagccccttcactgctcgggtcacaggtgacgactccatgcgtatgtcccacctaaaggtcggctctgctgccgacatccccatcaacatcgctgagatctcttttgaggaccgcaaggacggctcctgtggtgtggcttatgtggtccaggagccaggtgactacgaagtctcagtcaagttcaacgaggaacacattcccgacagccccttcgtggtgcctgtggcttctccgtctggcgacgcccgccgcctcactgtttctagccttcaggagtcagggctaaaggtcaaccagccagcctcttttgcagtcagcctgaacggggccaagggggcgatcgatgccaaggtgcacagcccctcaggagccctggaggagtgctatgtcacagaaattgaccaagataagtatgctgtgcgcttcatccctcgggagaatggcgtttacctgattgacgtcaagttcaacggcacccacatccctggaagccccttcaagatccgagttggggagcctgggcatggaggggacccaggcttggtgtctgcttacggagcaggtctggaaggcggtgtcacagggaacccagctgagttcgtcgtgaacacgagcaatgcgggagctggtgccctgtcggtgaccattgacggcccctccaaggtgaagatggattgccaggagtgccctgagggctaccgcgtcacctatacccccatggcacctggcagctacctcatctccatcaagtacggcggcccctaccacattgggggcagccccttcaaggccaaagtcacaggcccccgtctcgtcagcaaccacagcctccacgagacatcatcagtgtttgtagactctctgaccaaggccacctgtgccccccagcatggggccccgggtcctgggcctgctgacgccagcaaggtggtggccaagggcctggggctgagcaaggcctacgtaggccagaagagcagcttcacagtagactgcagcaaagcaggcaacaacatgctgctggtgggggttcatggcccaaggaccccctgcgaggagatcctggtgaagcacgtgggcagccggctctacagcgtgtcctacctgctcaaggacaagggggagtacacactggtggtcaaatggggggacgagcacatcccaggcagcccctaccgcgttgtggtgccctgagtctggggcccgtgccagccggcagcccccaagcctgccccgctacccaagcagccccgccctcttcccctcaaccccggcccaggccgccctggccgcccgcctgtcactgcagccgcccctgccctgtgccgtgctgcgctcacctgcctccccagccagccgctgacctctcggctttcacttgggcagagggagccatttggtggcgctgcttgtcttctttggttctgggaggggtgagggatgggggtcctgtacacaaccacccactagttctcttctccagccaagaggaataaagttttgcttccatt

SEQ ID NO: 134599 - DNA, 9463 bp, Homo sapiens
  Payload ID: 6298
  Gene Symbol: FLNB
  Gene Name: filamin B, beta
  Uniprot ID: O75369
  ENST ID: ENST00000295956
  CDS Start-End: 166-7974
gcggccaggggcgggcggccgcagagcagcaccggccgtggctccggtagcagcaagttcgaaccccgctcccgctccgcttcggttctcgctccttcggcccttgggcctccaaacaccagtccccggcagctcgttgcgcattgcgctctccccgccaccaggatgccggtaaccgagaaggatctagctgaggacgcgccttggaagaagatccagcagaacacgttcacacgctggtgcaacgagcacctcaagtgcgtgaacaaacgcatcggcaacctgcagaccgacctgagcgacgggctgcggctcatcgcgctgctcgaggtgctcagccagaagcgcatgtaccgcaagtaccatcagcggcccacctttcgccagatgcagctcgagaatgtgtccgtggcgctcgagttcctggaccgtgagagcatcaagctcgtgtccatcgatagcaaagccattgtggatgggaacctgaagctcatcttgggtctggtgtggacgctgatcctccactactccatctccatgcccgtgtgggaggatgaaggggatgatgatgccaagaagcagacgccaaagcagaggctgctggggtggattcagaacaagatcccctacttgcccatcaccaactttaaccagaactggcaagacggcaaagccctgggagccctggtagacagctgtgctccaggtctgtgcccagactgggaatcctgggacccgcagaagcctgtggataatgcacgagaagccatgcagcaggcagatgactggctgggtgtcccacaggtcatcactcctgaagaaatcattcacccggatgtggacgagcactcagttatgacttacctgtcccagttccccaaagccaagctcaagccgggggctcctctcaaacccaaactcaacccgaagaaagccagggcctatggcagaggaatcgagcccactggaaacatggtgaagcagccagccaagttcactgtggacaccatcagcgccgggcaaggagacgtgatggtgtttgttgaggacccagaagggaacaaagaggaggcacaagtgacccctgacagtgacaagaacaagacatactctgtggagtatctgcccaaggtcaccgggctacacaaagtcacagtcctctttgcaggacagcacatctccaagagcccatttgaagtgagtgttgacaaggcccagggagatgccagtaaagtcactgcaaaaggtccagggttggaagctgtagggaacatcgccaataagcccacctactttgacatctatacggcaggagctggtgtgggtgacattggtgtggaggtggaagatccccaggggaagaacaccgtggagttgctcgtggaagacaaaggaaaccaggtgtatcgatgtgtgtacaaacccatgcagcctggccctcacgtggtcaagatcttctttgctggggacactattcctaagagtcccttcgttgtgcaggttggggaagcctgcaatccaaatgcctgccgggccagtggccgaggcctacaacccaaaggcgtccgtatccgggagaccacagatttcaaggttgacaccaaagctgcaggaagtggggagctcggtgtaaccatgaagggtcctaagggtctggaggagctggtgaagcagaaagactttctggatggggtctacgcattcgagtattaccccagcaccccggggagatacagcattgccatcacatgggggggacaccacattccaaagagcccctttgaagttcaagttggccctgaagcgggtatgcagaaagtccgtgcttggggccctgggctccatggtgggattgtcgggcggtcagcggacttcgtggtagaatccattggctctgaagtggggtctctggggtttgccattgaaggcccctctcaggcaaagattgagtacaacgaccagaatgatggatcgtgtgatgtcaaatactggcccaaggagcctggcgaatatgctgttcacatcatgtgtgacgacgaagacatcaaggacagcccgtacatggccttcatccacccagccacgggaggctacaaccctgatctggttcgagcatacgggccaggtttggagaaatctggatgcattgtcaacaacctggccgagttcactgtggatcctaaggatgctggaaaagctcccttaaagatatttgctcaggatggggaaggccaacgcattgacatccagatgaagaaccggatggacggcacatatgcatgctcatacaccccggtgaaggccatcaagcacaccattgctgtggtctggggaggcgtgaacatcccgcacagcccctacagggtcaacatcgggcaaggtagccatcctcagaaggtcaaagtgtttgggccaggtgtggagagaagtggtctgaaggcaaatgaacctacacacttcacggtggactgtactgaggctggggaaggtgatgtcagtgttggcattaagtgtgatgcccgggtgttaagtgaagatgaggaagacgtggattttgacattattcacaatgccaatgatacgttcacagtcaaatatgtgcctcctgctgctgggcgatacactatcaaagttctctttgcatctcaggaaatccccgccagccctttcagagtcaaagttgacccttcccacgatgccagcaaagtgaaggcagaaggcccagggctcagcaaagcaggtgtggaaaatgggaaaccgacccacttcactgtctacaccaagggggctgggaaagccccgctcaacgtgcagttcaacagccctcttcctggcgatgcagtgaaggatttggatatcatcgataattatgactactctcacacggttaaatatacacccacccaacagggcaacatgcaggttctggtgacttacggtggcgatcccatccctaaaagccctttcactgtgggtgttgctgcaccgctggatctgagcaagataaaactcaatgggctggaaaacagggtggaagttgggaaggatcaggagttcaccgttgataccaggggggcaggaggccaggggaagctggacgtgacaatcctcagcccctctcggaaggtcgtgccatgcctagtgacacctgtgacaggccgggagaacagcacggccaagttcatccctcgggaggaggggctgtatgctgtagacgtgacctacgatggacaccctgtgcccgggagcccctacacagtggaggcctcgctgccaccagatcccagcaaggtgaaggcccacggtcccggcctcgaaggtggtctcgtgggcaagcctgccgagttcaccatcgataccaaaggagctggtactggaggtctgggcttaacggtggaaggtccgtgcgaggccaaaatcgagtgctccgacaatggtgatgggacctgctccgtctcttaccttcccacaaaacccggggagtacttcgtcaacatcctctttgaagaagtccacatacctgggtctcccttcaaagctgacattgaaatgccctttgacccctctaaagtcgtggcatcggggccaggtctcgagcacgggaaggtgggtgaagctggcctccttagcgtcgactgctcggaagcgggaccgggggccctgggcctggaagctgtctcggactcgggaacaaaagccgaagtcagtattcagaacaacaaagatggcacctacgcggtgacctacgtgcccctgacggccggcatgtacacgttgaccatgaagtatggtggcgaactcgtgccacacttccccgcccgggtcaaggtggagcccgccgtggacaccagcaggatcaaagtctttggaccaggaatagaagggaaagatgtgttccgggaagctaccaccgactttacagttgactctcggccgctgacccaggttgggggtgaccacatcaaggcccacattgccaacccctcaggggcctccaccgagtgctttgtcacagacaatgcggatgggacctaccaggtggaatacacaccctttgagaaaggtctccatgtagtggaggtgacatatgatgacgtgcctatcccaaacagtcccttcaaggtggctgtcactgaaggctgccagccatctagggtgcaagcccaaggacctggattgaaagaggcctttaccaacaagcccaatgtcttcaccgtggttaccagaggcgcaggaattggtgggcttggcataactgttgagggaccatcagagtcgaagataaattgcagagacaacaaggatggcagctgcagtgctgagtacattcctttcgcaccgggggattacgatgttaatatcacatatggaggagcccacatccccggcagccccttcagggttcctgtgaaggatgttgtggaccccagcaaggtcaagattgccggccccgggctgggctcaggcgtccgagcccgtgtcctgcagtccttcacggtggacagcagcaaggctggcctggctccgctggaagtgagggttctgggcccacgaggcttggtggagccagtgaacgtggtggacaatggagatggcacacacacagtaacctacaccccatctcaggagggaccttacatggtctcagttaaatatgctgatgaagagattcctcgcagtcccttcaaggtcaaggtccttcccacatatgatgccagcaaagtgactgccagtggccccggccttagttcctatggtgtgcctgccagtctacctgtggactttgcaattgatgcccgagatgccggggaaggcctgcttgctgttcaaataacggaccaagaaggaaaacccaaaagagccattgtccatgacaataaagatggcacgtatgctgtcacctacatccccgacaagactgggcgctatatgattggagtcacctacgggggtgacgacatcccactttctccttatcgcatccgagccacacagacgggtgatgccagcaagtgcctggccacgggtcctggaatcgcctccactgtgaaaactggcgaagaagtaggctttgtggttgatgccaagactgccgggaagggtaaagtgacctgcacggttctgaccccagatggcactgaggccgaggccgatgtcattgagaatgaagatggaacctatgacatcttctacacagctgccaagccgggcacatatgtgatctatgtgcgcttcggtggtgttgatattcctaacagccccttcactgtcatggccacagatggggaagtcacagccgtggaggaggcaccggtaaatgcatgtccccctggattcaggccctgggtgaccgaagaggcctatgtcccagtgagtgacatgaacggcctgggatttaagccttttgacctggtcattccgtttgctgtcaggaaaggagaaatcactggagaggtccacatgccttctgggaagacagccacacctgagattgtggacaacaaggacggcacggtcactgttagatatgcccccactgaggtcgggctccatgagatgcacatcaaatacatgggcagccacatccctgagagcccactccagttctacgtgaactaccccaacagtggaagtgtttctgcatacggtccaggcctcgtgtatggagtggccaacaaaactgccaccttcaccatcgtcacagaggatgcaggagaaggtggtctggacttggctattgagggcccctcaaaagcagaaatcagctgcattgacaataaagatgggacatgcacagtgacctacctgccgactctgccaggcgactacagcattctggtcaagtacaatgacaagcacatccctggcagccccttcacagccaagatcacagatgacagcaggcggtgctcccaggtgaagttgggctcagccgctgacttcctgctcgacatcagtgagactgacctcagcagcctgacggccagcattaaggccccatctggccgagacgagccctgtctcctgaagaggctgcccaacaaccacattggcatctccttcatcccccgggaagtgggcgaacatctggtcagcatcaagaaaaatggcaaccatgtggccaacagccccgtgtctatcatggtggtccagtcggagattggtgacgcccgccgagccaaagtctatggccgcggcctgtcagaaggccggactttcgagatgtctgacttcatcgtggacacaagggatgcaggttatggtggcatatccttggcggtggaaggccccagcaaagtggacatccagacggaggacctggaagatggcacctgcaaagtctcctacttccctaccgtgcctggggtttatatcgtctccaccaaattcgctgacgagcacgtgcctgggagcccatttaccgtgaagatcagtggggagggaagagtcaaagagagcatcacccgcaccagtcgggccccgtccgtggccactgtcgggagcatttgtgacctgaacctgaaaatcccagaaatcaacagcagtgatatgtcggcccacgtcaccagcccctctggccgtgtgactgaggcagagattgtgcccatggggaagaactcacactgcgtccggtttgtgccccaggagatgggcgtgcacacggtcagcgtcaagtaccgtgggcagcacgtcaccggcagccccttccagttcaccgtggggccacttggtgaaggaggcgcccacaaggtgcgggcaggaggccctggcctggagagaggagaagcgggagtcccagctgagttcagcatttggacccgggaagcaggcgctggaggcctctccatcgctgttgagggccccagtaaggccgagattacattcgatgaccataaaaatgggtcgtgcggtgtatcttatattgcccaagagcctggtaactacgaggtgtccatcaagttcaatgatgagcacatcccggaaagcccctacctggtgccggtcatcgcaccctccgacgacgcccgccgcctcactgttatgagccttcaggaatcgggattaaaagttaaccagccagcatcctttgctataaggttgaatggcgcaaaaggcaagattgatgcaaaggtgcacagcccctctggagccgtggaggagtgccacgtgtctgagctggagccagataagtatgctgttcgcttcatccctcatgagaatggtgtccacaccatcgatgtcaagttcaatgggagccacgtggttggaagccccttcaaagtgcgcgttggggagcctggacaagcggggaaccctgccctggtgtccgcctatggcacgggactcgaagggggcaccacaggtatccagtcggaattctttattaacaccacccgagcaggtccagggacattatccgtcaccatcgaaggcccatccaaggttaaaatggattgccaggaaacacctgaagggtacaaagtcatgtacacccccatggctcctggtaactacctgatcagcgtcaaatacggtgggcccaaccacatcgtgggcagtcccttcaaggccaaggtgacaggccagcgtctagttagccctggctcagccaacgagacctcatccatcctggtggagtcagtgaccaggtcgtctacagagacctgctatagcgccattcccaaggcatcctcggacgccagcaaggtgacctctaagggggcagggctctcaaaggcctttgtgggccagaagagttccttcctggtggactgcagcaaagctggctccaacatgctgctgatcggggtccatgggcccaccaccccctgcgaggaggtctccatgaagcatgtaggcaaccagcaatacaacgtcacatacgtcgtcaaggagaggggcgattatgtgctggctgtgaagtggggggaggaacacatccctggcagcccttttcatgtcacagtgccttaaaacagttttctcaaatcctggagagagttcttgtggttgcttttgttgcttgtttgtaattcattttatacaaagccctccagcctgtttgtggggctgaaaccccatccctaaaatattgctgttgtaaaatgccttcagaaataagtcctagactggactcttgagggacatattggagaatcttaagaaatgcaagcttgttcagggggctgagaagatcctgagtacactaggtgcaaaccagaactcttggtggaacagaccagccactgcagcagacagaccaggaacacaatgagactgacatttcaaaaaaacaaaactggctagcctgagctgctggttcactcttcagcatttatgaaacaaggctaggggaagatgggcagagaaaaaggggacacctagtttggttgtcatttggcaaaggagatgacttaaaatccgcttaatctcttccagtgtccgtgttaatgtatttggctattagatcactagcactgctttaccgctcctcatcgccaacacccccatgctctgtggccttcttacacttctcagagggcagagtggcagccgggcaccctacagaaactcagagggcagagtggcagccaggcccacatgtctctcaagtacctgtcccctcgctctggtgattatttcttgcagaatcaccacacgagaccatcccggcagtcatggttttgctttagttttccaagtccgtttcagtcccttccttggtctgaagaaattctgcagtggcgagcagtttcccacttgccaaagatcccttttaaccaacactagcccttgtttttaacacacgctccagcccttcatcagcctgggcagtcttaccaaaatgtttaaagtgatctcagaggggcccatggattaacgccctcatcccaaggtccgtcccatgacataacactccacacccgccccagccaacttcatgggtcactttttctggaaaataatgatctgtacagacaggacagaatgaaactcctgcgggtctttggcctgaaagttgggaatggttgggggagagaagggcagcagcttattggtggtcttttcaccattggcagaaacagtgagagctgtgtggtgcagaaatccagaaatgaggtgtagggaattttgcctgccttcctgcagacctgagctggctttggaatgaggttaaagtgtcagggacgttgcctgagcccaaatgtgtagtgtggtctgggcaggcagacctttaggttttgctgcttagtcctgaggaagtggccactcttgtggcaggtgtagtatctggggcgagtgttgggggtaaaagcccaccctacagaaagtggaacagcccggagcctgatgtgaaaggaccacgggtgttgtaagctgggacacggaagccaaactggaatcaaacgccgactgtaaattgtatcttataacttattaaataaaacatttgctccgtaaa

SEQ ID NO: 134600 - DNA, 9391 bp, Homo sapiens
  Payload ID: 6298
  Gene Symbol: FLNB
  Gene Name: filamin B, beta
  Uniprot ID: O75369
  ENST ID: ENST00000358537
  CDS Start-End: 166-7902
gcggccaggggcgggcggccgcagagcagcaccggccgtggctccggtagcagcaagttcgaaccccgctcccgctccgcttcggttctcgctccttcggcccttgggcctccaaacaccagtccccggcagctcgttgcgcattgcgctctccccgccaccaggatgccggtaaccgagaaggatctagctgaggacgcgccttggaagaagatccagcagaacacgttcacacgctggtgcaacgagcacctcaagtgcgtgaacaaacgcatcggcaacctgcagaccgacctgagcgacgggctgcggctcatcgcgctgctcgaggtgctcagccagaagcgcatgtaccgcaagtaccatcagcggcccacctttcgccagatgcagctcgagaatgtgtccgtggcgctcgagttcctggaccgtgagagcatcaagctcgtgtccatcgatagcaaagccattgtggatgggaacctgaagctcatcttgggtctggtgtggacgctgatcctccactactccatctccatgcccgtgtgggaggatgaaggggatgatgatgccaagaagcagacgccaaagcagaggctgctggggtggattcagaacaagatcccctacttgcccatcaccaactttaaccagaactggcaagacggcaaagccctgggagccctggtagacagctgtgctccaggtctgtgcccagactgggaatcctgggacccgcagaagcctgtggataatgcacgagaagccatgcagcaggcagatgactggctgggtgtcccacaggtcatcactcctgaagaaatcattcacccggatgtggacgagcactcagttatgacttacctgtcccagttccccaaagccaagctcaagccgggggctcctctcaaacccaaactcaacccgaagaaagccagggcctatggcagaggaatcgagcccactggaaacatggtgaagcagccagccaagttcactgtggacaccatcagcgccgggcaaggagacgtgatggtgtttgttgaggacccagaagggaacaaagaggaggcacaagtgacccctgacagtgacaagaacaagacatactctgtggagtatctgcccaaggtcaccgggctacacaaagtcacagtcctctttgcaggacagcacatctccaagagcccatttgaagtgagtgttgacaaggcccagggagatgccagtaaagtcactgcaaaaggtccagggttggaagctgtagggaacatcgccaataagcccacctactttgacatctatacggcaggagctggtgtgggtgacattggtgtggaggtggaagatccccaggggaagaacaccgtggagttgctcgtggaagacaaaggaaaccaggtgtatcgatgtgtgtacaaacccatgcagcctggccctcacgtggtcaagatcttctttgctggggacactattcctaagagtcccttcgttgtgcaggttggggaagcctgcaatccaaatgcctgccgggccagtggccgaggcctacaacccaaaggcgtccgtatccgggagaccacagatttcaaggttgacaccaaagctgcaggaagtggggagctcggtgtaaccatgaagggtcctaagggtctggaggagctggtgaagcagaaagactttctggatggggtctacgcattcgagtattaccccagcaccccggggagatacagcattgccatcacatgggggggacaccacattccaaagagcccctttgaagttcaagttggccctgaagcgggtatgcagaaagtccgtgcttggggccctgggctccatggtgggattgtcgggcggtcagcggacttcgtggtagaatccattggctctgaagtggggtctctggggtttgccattgaaggcccctctcaggcaaagattgagtacaacgaccagaatgatggatcgtgtgatgtcaaatactggcccaaggagcctggcgaatatgctgttcacatcatgtgtgacgacgaagacatcaaggacagcccgtacatggccttcatccacccagccacgggaggctacaaccctgatctggttcgagcatacgggccaggtttggagaaatctggatgcattgtcaacaacctggccgagttcactgtggatcctaaggatgctggaaaagctcccttaaagatatttgctcaggatggggaaggccaacgcattgacatccagatgaagaaccggatggacggcacatatgcatgctcatacaccccggtgaaggccatcaagcacaccattgctgtggtctggggaggcgtgaacatcccgcacagcccctacagggtcaacatcgggcaaggtagccatcctcagaaggtcaaagtgtttgggccaggtgtggagagaagtggtctgaaggcaaatgaacctacacacttcacggtggactgtactgaggctggggaaggtgatgtcagtgttggcattaagtgtgatgcccgggtgttaagtgaagatgaggaagacgtggattttgacattattcacaatgccaatgatacgttcacagtcaaatatgtgcctcctgctgctgggcgatacactatcaaagttctctttgcatctcaggaaatccccgccagccctttcagagtcaaagttgacccttcccacgatgccagcaaagtgaaggcagaaggcccagggctcagcaaagcaggtgtggaaaatgggaaaccgacccacttcactgtctacaccaagggggctgggaaagccccgctcaacgtgcagttcaacagccctcttcctggcgatgcagtgaaggatttggatatcatcgataattatgactactctcacacggttaaatatacacccacccaacagggcaacatgcaggttctggtgacttacggtggcgatcccatccctaaaagccctttcactgtgggtgttgctgcaccgctggatctgagcaagataaaactcaatgggctggaaaacagggtggaagttgggaaggatcaggagttcaccgttgataccaggggggcaggaggccaggggaagctggacgtgacaatcctcagcccctctcggaaggtcgtgccatgcctagtgacacctgtgacaggccgggagaacagcacggccaagttcatccctcgggaggaggggctgtatgctgtagacgtgacctacgatggacaccctgtgcccgggagcccctacacagtggaggcctcgctgccaccagatcccagcaaggtgaaggcccacggtcccggcctcgaaggtggtctcgtgggcaagcctgccgagttcaccatcgataccaaaggagctggtactggaggtctgggcttaacggtggaaggtccgtgcgaggccaaaatcgagtgctccgacaatggtgatgggacctgctccgtctcttaccttcccacaaaacccggggagtacttcgtcaacatcctctttgaagaagtccacatacctgggtctcccttcaaagctgacattgaaatgccctttgacccctctaaagtcgtggcatcggggccaggtctcgagcacgggaaggtgggtgaagctggcctccttagcgtcgactgctcggaagcgggaccgggggccctgggcctggaagctgtctcggactcgggaacaaaagccgaagtcagtattcagaacaacaaagatggcacctacgcggtgacctacgtgcccctgacggccggcatgtacacgttgaccatgaagtatggtggcgaactcgtgccacacttccccgcccgggtcaaggtggagcccgccgtggacaccagcaggatcaaagtctttggaccaggaatagaagggaaagatgtgttccgggaagctaccaccgactttacagttgactctcggccgctgacccaggttgggggtgaccacatcaaggcccacattgccaacccctcaggggcctccaccgagtgctttgtcacagacaatgcggatgggacctaccaggtggaatacacaccctttgagaaaggtctccatgtagtggaggtgacatatgatgacgtgcctatcccaaacagtcccttcaaggtggctgtcactgaaggctgccagccatctagggtgcaagcccaaggacctggattgaaagaggcctttaccaacaagcccaatgtcttcaccgtggttaccagaggcgcaggaattggtgggcttggcataactgttgagggaccatcagagtcgaagataaattgcagagacaacaaggatggcagctgcagtgctgagtacattcctttcgcaccgggggattacgatgttaatatcacatatggaggagcccacatccccggcagccccttcagggttcctgtgaaggatgttgtggaccccagcaaggtcaagattgccggccccgggctgggctcaggcgtccgagcccgtgtcctgcagtccttcacggtggacagcagcaaggctggcctggctccgctggaagtgagggttctgggcccacgaggcttggtggagccagtgaacgtggtggacaatggagatggcacacacacagtaacctacaccccatctcaggagggaccttacatggtctcagttaaatatgctgatgaagagattcctcgcagtcccttcaaggtcaaggtccttcccacatatgatgccagcaaagtgactgccagtggccccggccttagttcctatggtgtgcctgccagtctacctgtggactttgcaattgatgcccgagatgccggggaaggcctgcttgctgttcaaataacggaccaagaaggaaaacccaaaagagccattgtccatgacaataaagatggcacgtatgctgtcacctacatccccgacaagactgggcgctatatgattggagtcacctacgggggtgacgacatcccactttctccttatcgcatccgagccacacagacgggtgatgccagcaagtgcctggccacgggtcctggaatcgcctccactgtgaaaactggcgaagaagtaggctttgtggttgatgccaagactgccgggaagggtaaagtgacctgcacggttctgaccccagatggcactgaggccgaggccgatgtcattgagaatgaagatggaacctatgacatcttctacacagctgccaagccgggcacatatgtgatctatgtgcgcttcggtggtgttgatattcctaacagccccttcactgtcatggtgaccgaagaggcctatgtcccagtgagtgacatgaacggcctgggatttaagccttttgacctggtcattccgtttgctgtcaggaaaggagaaatcactggagaggtccacatgccttctgggaagacagccacacctgagattgtggacaacaaggacggcacggtcactgttagatatgcccccactgaggtcgggctccatgagatgcacatcaaatacatgggcagccacatccctgagagcccactccagttctacgtgaactaccccaacagtggaagtgtttctgcatacggtccaggcctcgtgtatggagtggccaacaaaactgccaccttcaccatcgtcacagaggatgcaggagaaggtggtctggacttggctattgagggcccctcaaaagcagaaatcagctgcattgacaataaagatgggacatgcacagtgacctacctgccgactctgccaggcgactacagcattctggtcaagtacaatgacaagcacatccctggcagccccttcacagccaagatcacagatgacagcaggcggtgctcccaggtgaagttgggctcagccgctgacttcctgctcgacatcagtgagactgacctcagcagcctgacggccagcattaaggccccatctggccgagacgagccctgtctcctgaagaggctgcccaacaaccacattggcatctccttcatcccccgggaagtgggcgaacatctggtcagcatcaagaaaaatggcaaccatgtggccaacagccccgtgtctatcatggtggtccagtcggagattggtgacgcccgccgagccaaagtctatggccgcggcctgtcagaaggccggactttcgagatgtctgacttcatcgtggacacaagggatgcaggttatggtggcatatccttggcggtggaaggccccagcaaagtggacatccagacggaggacctggaagatggcacctgcaaagtctcctacttccctaccgtgcctggggtttatatcgtctccaccaaattcgctgacgagcacgtgcctgggagcccatttaccgtgaagatcagtggggagggaagagtcaaagagagcatcacccgcaccagtcgggccccgtccgtggccactgtcgggagcatttgtgacctgaacctgaaaatcccagaaatcaacagcagtgatatgtcggcccacgtcaccagcccctctggccgtgtgactgaggcagagattgtgcccatggggaagaactcacactgcgtccggtttgtgccccaggagatgggcgtgcacacggtcagcgtcaagtaccgtgggcagcacgtcaccggcagccccttccagttcaccgtggggccacttggtgaaggaggcgcccacaaggtgcgggcaggaggccctggcctggagagaggagaagcgggagtcccagctgagttcagcatttggacccgggaagcaggcgctggaggcctctccatcgctgttgagggccccagtaaggccgagattacattcgatgaccataaaaatgggtcgtgcggtgtatcttatattgcccaagagcctggtaactacgaggtgtccatcaagttcaatgatgagcacatcccggaaagcccctacctggtgccggtcatcgcaccctccgacgacgcccgccgcctcactgttatgagccttcaggaatcgggattaaaagttaaccagccagcatcctttgctataaggttgaatggcgcaaaaggcaagattgatgcaaaggtgcacagcccctctggagccgtggaggagtgccacgtgtctgagctggagccagataagtatgctgttcgcttcatccctcatgagaatggtgtccacaccatcgatgtcaagttcaatgggagccacgtggttggaagccccttcaaagtgcgcgttggggagcctggacaagcggggaaccctgccctggtgtccgcctatggcacgggactcgaagggggcaccacaggtatccagtcggaattctttattaacaccacccgagcaggtccagggacattatccgtcaccatcgaaggcccatccaaggttaaaatggattgccaggaaacacctgaagggtacaaagtcatgtacacccccatggctcctggtaactacctgatcagcgtcaaatacggtgggcccaaccacatcgtgggcagtcccttcaaggccaaggtgacaggccagcgtctagttagccctggctcagccaacgagacctcatccatcctggtggagtcagtgaccaggtcgtctacagagacctgctatagcgccattcccaaggcatcctcggacgccagcaaggtgacctctaagggggcagggctctcaaaggcctttgtgggccagaagagttccttcctggtggactgcagcaaagctggctccaacatgctgctgatcggggtccatgggcccaccaccccctgcgaggaggtctccatgaagcatgtaggcaaccagcaatacaacgtcacatacgtcgtcaaggagaggggcgattatgtgctggctgtgaagtggggggaggaacacatccctggcagcccttttcatgtcacagtgccttaaaacagttttctcaaatcctggagagagttcttgtggttgcttttgttgcttgtttgtaattcattttatacaaagccctccagcctgtttgtggggctgaaaccccatccctaaaatattgctgttgtaaaatgccttcagaaataagtcctagactggactcttgagggacatattggagaatcttaagaaatgcaagcttgttcagggggctgagaagatcctgagtacactaggtgcaaaccagaactcttggtggaacagaccagccactgcagcagacagaccaggaacacaatgagactgacatttcaaaaaaacaaaactggctagcctgagctgctggttcactcttcagcatttatgaaacaaggctaggggaagatgggcagagaaaaaggggacacctagtttggttgtcatttggcaaaggagatgacttaaaatccgcttaatctcttccagtgtccgtgttaatgtatttggctattagatcactagcactgctttaccgctcctcatcgccaacacccccatgctctgtggccttcttacacttctcagagggcagagtggcagccgggcaccctacagaaactcagagggcagagtggcagccaggcccacatgtctctcaagtacctgtcccctcgctctggtgattatttcttgcagaatcaccacacgagaccatcccggcagtcatggttttgctttagttttccaagtccgtttcagtcccttccttggtctgaagaaattctgcagtggcgagcagtttcccacttgccaaagatcccttttaaccaacactagcccttgtttttaacacacgctccagcccttcatcagcctgggcagtcttaccaaaatgtttaaagtgatctcagaggggcccatggattaacgccctcatcccaaggtccgtcccatgacataacactccacacccgccccagccaacttcatgggtcactttttctggaaaataatgatctgtacagacaggacagaatgaaactcctgcgggtctttggcctgaaagttgggaatggttgggggagagaagggcagcagcttattggtggtcttttcaccattggcagaaacagtgagagctgtgtggtgcagaaatccagaaatgaggtgtagggaattttgcctgccttcctgcagacctgagctggctttggaatgaggttaaagtgtcagggacgttgcctgagcccaaatgtgtagtgtggtctgggcaggcagacctttaggttttgctgcttagtcctgaggaagtggccactcttgtggcaggtgtagtatctggggcgagtgttgggggtaaaagcccaccctacagaaagtggaacagcccggagcctgatgtgaaaggaccacgggtgttgtaagctgggacacggaagccaaactggaatcaaacgccgactgtaaattgtatcttataacttattaaataaaacatttgctccgtaaa

SEQ ID NO: 134601 - DNA, 2002 bp, Homo sapiens
  Payload ID: 6298
  Gene Symbol: FLNB
  Gene Name: filamin B, beta
  ENST ID: ENST00000419752
  CDS Start-End: 107-694
ctttattaacaccacccgagcaggtccagggacattatccgtcaccatcgaaggcccatccaaggttaaaatggattgccaggaaacacctgaagggtacaaagtcatgtacacccccatggctcctggtaactacctgatcagcgtcaaatacggtgggcccaaccacatcgtgggcagtcccttcaaggccaaggtgacaggccagcgtctagttagccctggctcagccaacgagacctcatccatcctggtggagtcagtgaccaggtcgtctacagagacctgctatagcgccattcccaaggcatcctcggacgccagcaaggtgacctctaagggggcagggctctcaaaggcctttgtgggccagaagagttccttcctggtggactgcagcaaagctggctccaacatgctgctgatcggggtccatgggcccaccaccccctgcgaggaggtctccatgaagcatgtaggcaaccagcaatacaacgtcacatacgtcgtcaaggagaggggcgattatgtgctggctgtgaagtgggggaggaacacatccctggcagcccttttcatgtcacagtgccttaaaacagttttctcaaatcctggagagagttcttgtggttgcttttgttgcttgtttgtaattcattttatacaaagccctccagcctgtttgtggggctgaaaccccatccctaaaatattgctgttgtaaaatgccttcagaaataagtcctagactggactcttgagggacatattggagaatcttaagaaatgcaagcttgttcagggggctgagaagatcctgagtacactaggtgcaaaccagaactcttggtggaacagaccagccactgcagcagacagaccaggaacacaatgagactgacatttcaaaaaaacaaaactggctagcctgagctgctggttcactcttcagcatttatgaaacaaggctaggggaagatgggcagagaaaaaggggacacctagtttggttgtcatttggcaaaggagatgacttaaaatccgcttaatctcttccagtgtccgtgttaatgtatttggctattagatcactagcactgctttaccgctcctcatcgccaacacccccatgctctgtggccttcttacacttctcagagggcagagtggcagccgggcaccctacagaaactcagagggcagagtggcagccaggcccacatgtctctcaagtacctgtcccctcgctctggtgattatttcttgcagaatcaccacacgagaccatcccggcagtcatggttttgctttagttttccaagtccgtttcagtcccttccttggtctgaagaaattctgcagtggcgagcagtttcccacttgccaaagatcccttttaaccaacactagcccttgtttttaacacacgctccagcccttcatcagcctgggcagtcttaccaaaatgtttaaagtgatctcagaggggcccatggattaacgccctcatcccaaggtccgtcccatgacataacactccacacccgccccagccaacttcatgggtcactttttctggaaaataatgatctgtacagacaggacagaatgaaactcctgcgggtctttggcctgaaagttgggaatggttgggggagagaagggcagcagcttattggtggtcttttcaccattggcagaaacagtgagagctgtgtggtgcagaaatccagaaatgaggtgtagggaattttgcctgccttcctgcagacctgagctggctttggaatgaggttaaagtgtcagggacgttgcctgagcccaaatgtgtagtgtggtctgggcaggcagacctttaggttttgctgcttagtcctgaggaagtggccactcttgtggcaggtgtagtatctggggcgagtgttgggggtaaaagcccaccctacagaaagtggaacagcccggagcctgatgtgaaaggaccacgggtgttgtaagctgg

SEQ ID NO: 134602 - DNA, 9430 bp, Homo sapiens
  Payload ID: 6298
  Gene Symbol: FLNB
  Gene Name: filamin B, beta
  Uniprot ID: O75369
  ENST ID: ENST00000429972
  CDS Start-End: 166-7941
gcggccaggggcgggcggccgcagagcagcaccggccgtggctccggtagcagcaagttcgaaccccgctcccgctccgcttcggttctcgctccttcggcccttgggcctccaaacaccagtccccggcagctcgttgcgcattgcgctctccccgccaccaggatgccggtaaccgagaaggatctagctgaggacgcgccttggaagaagatccagcagaacacgttcacacgctggtgcaacgagcacctcaagtgcgtgaacaaacgcatcggcaacctgcagaccgacctgagcgacgggctgcggctcatcgcgctgctcgaggtgctcagccagaagcgcatgtaccgcaagtaccatcagcggcccacctttcgccagatgcagctcgagaatgtgtccgtggcgctcgagttcctggaccgtgagagcatcaagctcgtgtccatcgatagcaaagccattgtggatgggaacctgaagctcatcttgggtctggtgtggacgctgatcctccactactccatctccatgcccgtgtgggaggatgaaggggatgatgatgccaagaagcagacgccaaagcagaggctgctggggtggattcagaacaagatcccctacttgcccatcaccaactttaaccagaactggcaagacggcaaagccctgggagccctggtagacagctgtgctccaggtctgtgcccagactgggaatcctgggacccgcagaagcctgtggataatgcacgagaagccatgcagcaggcagatgactggctgggtgtcccacaggtcatcactcctgaagaaatcattcacccggatgtggacgagcactcagttatgacttacctgtcccagttccccaaagccaagctcaagccgggggctcctctcaaacccaaactcaacccgaagaaagccagggcctatggcagaggaatcgagcccactggaaacatggtgaagcagccagccaagttcactgtggacaccatcagcgccgggcaaggagacgtgatggtgtttgttgaggacccagaagggaacaaagaggaggcacaagtgacccctgacagtgacaagaacaagacatactctgtggagtatctgcccaaggtcaccgggctacacaaagtcacagtcctctttgcaggacagcacatctccaagagcccatttgaagtgagtgttgacaaggcccagggagatgccagtaaagtcactgcaaaaggtccagggttggaagctgtagggaacatcgccaataagcccacctactttgacatctatacggcaggagctggtgtgggtgacattggtgtggaggtggaagatccccaggggaagaacaccgtggagttgctcgtggaagacaaaggaaaccaggtgtatcgatgtgtgtacaaacccatgcagcctggccctcacgtggtcaagatcttctttgctggggacactattcctaagagtcccttcgttgtgcaggttggggaagcctgcaatccaaatgcctgccgggccagtggccgaggcctacaacccaaaggcgtccgtatccgggagaccacagatttcaaggttgacaccaaagctgcaggaagtggggagctcggtgtaaccatgaagggtcctaagggtctggaggagctggtgaagcagaaagactttctggatggggtctacgcattcgagtattaccccagcaccccggggagatacagcattgccatcacatgggggggacaccacattccaaagagcccctttgaagttcaagttggccctgaagcgggtatgcagaaagtccgtgcttggggccctgggctccatggtgggattgtcgggcggtcagcggacttcgtggtagaatccattggctctgaagtggggtctctggggtttgccattgaaggcccctctcaggcaaagattgagtacaacgaccagaatgatggatcgtgtgatgtcaaatactggcccaaggagcctggcgaatatgctgttcacatcatgtgtgacgacgaagacatcaaggacagcccgtacatggccttcatccacccagccacgggaggctacaaccctgatctggttcgagcatacgggccaggtttggagaaatctggatgcattgtcaacaacctggccgagttcactgtggatcctaaggatgctggaaaagctcccttaaagatatttgctcaggatggggaaggccaacgcattgacatccagatgaagaaccggatggacggcacatatgcatgctcatacaccccggtgaaggccatcaagcacaccattgctgtggtctggggaggcgtgaacatcccgcacagcccctacagggtcaacatcgggcaaggtagccatcctcagaaggtcaaagtgtttgggccaggtgtggagagaagtggtctgaaggcaaatgaacctacacacttcacggtggactgtactgaggctggggaaggtgatgtcagtgttggcattaagtgtgatgcccgggtgttaagtgaagatgaggaagacgtggattttgacattattcacaatgccaatgatacgttcacagtcaaatatgtgcctcctgctgctgggcgatacactatcaaagttctctttgcatctcaggaaatccccgccagccctttcagagtcaaagttgacccttcccacgatgccagcaaagtgaaggcagaaggcccagggctcagcaaagcaggtgtggaaaatgggaaaccgacccacttcactgtctacaccaagggggctgggaaagccccgctcaacgtgcagttcaacagccctcttcctggcgatgcagtgaaggatttggatatcatcgataattatgactactctcacacggttaaatatacacccacccaacagggcaacatgcaggttctggtgacttacggtggcgatcccatccctaaaagccctttcactgtgggtgttgctgcaccgctggatctgagcaagataaaactcaatgggctggaaaacagggtggaagttgggaaggatcaggagttcaccgttgataccaggggggcaggaggccaggggaagctggacgtgacaatcctcagcccctctcggaaggtcgtgccatgcctagtgacacctgtgacaggccgggagaacagcacggccaagttcatccctcgggaggaggggctgtatgctgtagacgtgacctacgatggacaccctgtgcccgggagcccctacacagtggaggcctcgctgccaccagatcccagcaaggtgaaggcccacggtcccggcctcgaaggtggtctcgtgggcaagcctgccgagttcaccatcgataccaaaggagctggtactggaggtctgggcttaacggtggaaggtccgtgcgaggccaaaatcgagtgctccgacaatggtgatgggacctgctccgtctcttaccttcccacaaaacccggggagtacttcgtcaacatcctctttgaagaagtccacatacctgggtctcccttcaaagctgacattgaaatgccctttgacccctctaaagtcgtggcatcggggccaggtctcgagcacgggaaggtgggtgaagctggcctccttagcgtcgactgctcggaagcgggaccgggggccctgggcctggaagctgtctcggactcgggaacaaaagccgaagtcagtattcagaacaacaaagatggcacctacgcggtgacctacgtgcccctgacggccggcatgtacacgttgaccatgaagtatggtggcgaactcgtgccacacttccccgcccgggtcaaggtggagcccgccgtggacaccagcaggatcaaagtctttggaccaggaatagaagggaaagatgtgttccgggaagctaccaccgactttacagttgactctcggccgctgacccaggttgggggtgaccacatcaaggcccacattgccaacccctcaggggcctccaccgagtgctttgtcacagacaatgcggatgggacctaccaggtggaatacacaccctttgagaaaggtctccatgtagtggaggtgacatatgatgacgtgcctatcccaaacagtcccttcaaggtggctgtcactgaaggctgccagccatctagggtgcaagcccaaggacctggattgaaagaggcctttaccaacaagcccaatgtcttcaccgtggttaccagaggcgcaggaattggtgggcttggcataactgttgagggaccatcagagtcgaagataaattgcagagacaacaaggatggcagctgcagtgctgagtacattcctttcgcaccgggggattacgatgttaatatcacatatggaggagcccacatccccggcagccccttcagggttcctgtgaaggatgttgtggaccccagcaaggtcaagattgccggccccgggctgggctcaggcgtccgagcccgtgtcctgcagtccttcacggtggacagcagcaaggctggcctggctccgctggaagtgagggttctgggcccacgaggcttggtggagccagtgaacgtggtggacaatggagatggcacacacacagtaacctacaccccatctcaggagggaccttacatggtctcagttaaatatgctgatgaagagattcctcgcagtcccttcaaggtcaaggtccttcccacatatgatgccagcaaagtgactgccagtggccccggccttagttcctatggtgtgcctgccagtctacctgtggactttgcaattgatgcccgagatgccggggaaggcctgcttgctgttcaaataacggaccaagaaggaaaacccaaaagagccattgtccatgacaataaagatggcacgtatgctgtcacctacatccccgacaagactgggcgctatatgattggagtcacctacgggggtgacgacatcccactttctccttatcgcatccgagccacacagacgggtgatgccagcaagtgcctggccacgggtcctggaatcgcctccactgtgaaaactggcgaagaagtaggctttgtggttgatgccaagactgccgggaagggtaaagtgacctgcacggttctgaccccagatggcactgaggccgaggccgatgtcattgagaatgaagatggaacctatgacatcttctacacagctgccaagccgggcacatatgtgatctatgtgcgcttcggtggtgttgatattcctaacagccccttcactgtcatggccacagatggggaagtcacagccgtggaggaggcaccggtgaccgaagaggcctatgtcccagtgagtgacatgaacggcctgggatttaagccttttgacctggtcattccgtttgctgtcaggaaaggagaaatcactggagaggtccacatgccttctgggaagacagccacacctgagattgtggacaacaaggacggcacggtcactgttagatatgcccccactgaggtcgggctccatgagatgcacatcaaatacatgggcagccacatccctgagagcccactccagttctacgtgaactaccccaacagtggaagtgtttctgcatacggtccaggcctcgtgtatggagtggccaacaaaactgccaccttcaccatcgtcacagaggatgcaggagaaggtggtctggacttggctattgagggcccctcaaaagcagaaatcagctgcattgacaataaagatgggacatgcacagtgacctacctgccgactctgccaggcgactacagcattctggtcaagtacaatgacaagcacatccctggcagccccttcacagccaagatcacagatgacagcaggcggtgctcccaggtgaagttgggctcagccgctgacttcctgctcgacatcagtgagactgacctcagcagcctgacggccagcattaaggccccatctggccgagacgagccctgtctcctgaagaggctgcccaacaaccacattggcatctccttcatcccccgggaagtgggcgaacatctggtcagcatcaagaaaaatggcaaccatgtggccaacagccccgtgtctatcatggtggtccagtcggagattggtgacgcccgccgagccaaagtctatggccgcggcctgtcagaaggccggactttcgagatgtctgacttcatcgtggacacaagggatgcaggttatggtggcatatccttggcggtggaaggccccagcaaagtggacatccagacggaggacctggaagatggcacctgcaaagtctcctacttccctaccgtgcctggggtttatatcgtctccaccaaattcgctgacgagcacgtgcctgggagcccatttaccgtgaagatcagtggggagggaagagtcaaagagagcatcacccgcaccagtcgggccccgtccgtggccactgtcgggagcatttgtgacctgaacctgaaaatcccagaaatcaacagcagtgatatgtcggcccacgtcaccagcccctctggccgtgtgactgaggcagagattgtgcccatggggaagaactcacactgcgtccggtttgtgccccaggagatgggcgtgcacacggtcagcgtcaagtaccgtgggcagcacgtcaccggcagccccttccagttcaccgtggggccacttggtgaaggaggcgcccacaaggtgcgggcaggaggccctggcctggagagaggagaagcgggagtcccagctgagttcagcatttggacccgggaagcaggcgctggaggcctctccatcgctgttgagggccccagtaaggccgagattacattcgatgaccataaaaatgggtcgtgcggtgtatcttatattgcccaagagcctggtaactacgaggtgtccatcaagttcaatgatgagcacatcccggaaagcccctacctggtgccggtcatcgcaccctccgacgacgcccgccgcctcactgttatgagccttcaggaatcgggattaaaagttaaccagccagcatcctttgctataaggttgaatggcgcaaaaggcaagattgatgcaaaggtgcacagcccctctggagccgtggaggagtgccacgtgtctgagctggagccagataagtatgctgttcgcttcatccctcatgagaatggtgtccacaccatcgatgtcaagttcaatgggagccacgtggttggaagccccttcaaagtgcgcgttggggagcctggacaagcggggaaccctgccctggtgtccgcctatggcacgggactcgaagggggcaccacaggtatccagtcggaattctttattaacaccacccgagcaggtccagggacattatccgtcaccatcgaaggcccatccaaggttaaaatggattgccaggaaacacctgaagggtacaaagtcatgtacacccccatggctcctggtaactacctgatcagcgtcaaatacggtgggcccaaccacatcgtgggcagtcccttcaaggccaaggtgacaggccagcgtctagttagccctggctcagccaacgagacctcatccatcctggtggagtcagtgaccaggtcgtctacagagacctgctatagcgccattcccaaggcatcctcggacgccagcaaggtgacctctaagggggcagggctctcaaaggcctttgtgggccagaagagttccttcctggtggactgcagcaaagctggctccaacatgctgctgatcggggtccatgggcccaccaccccctgcgaggaggtctccatgaagcatgtaggcaaccagcaatacaacgtcacatacgtcgtcaaggagaggggcgattatgtgctggctgtgaagtggggggaggaacacatccctggcagcccttttcatgtcacagtgccttaaaacagttttctcaaatcctggagagagttcttgtggttgcttttgttgcttgtttgtaattcattttatacaaagccctccagcctgtttgtggggctgaaaccccatccctaaaatattgctgttgtaaaatgccttcagaaataagtcctagactggactcttgagggacatattggagaatcttaagaaatgcaagcttgttcagggggctgagaagatcctgagtacactaggtgcaaaccagaactcttggtggaacagaccagccactgcagcagacagaccaggaacacaatgagactgacatttcaaaaaaacaaaactggctagcctgagctgctggttcactcttcagcatttatgaaacaaggctaggggaagatgggcagagaaaaaggggacacctagtttggttgtcatttggcaaaggagatgacttaaaatccgcttaatctcttccagtgtccgtgttaatgtatttggctattagatcactagcactgctttaccgctcctcatcgccaacacccccatgctctgtggccttcttacacttctcagagggcagagtggcagccgggcaccctacagaaactcagagggcagagtggcagccaggcccacatgtctctcaagtacctgtcccctcgctctggtgattatttcttgcagaatcaccacacgagaccatcccggcagtcatggttttgctttagttttccaagtccgtttcagtcccttccttggtctgaagaaattctgcagtggcgagcagtttcccacttgccaaagatcccttttaaccaacactagcccttgtttttaacacacgctccagcccttcatcagcctgggcagtcttaccaaaatgtttaaagtgatctcagaggggcccatggattaacgccctcatcccaaggtccgtcccatgacataacactccacacccgccccagccaacttcatgggtcactttttctggaaaataatgatctgtacagacaggacagaatgaaactcctgcgggtctttggcctgaaagttgggaatggttgggggagagaagggcagcagcttattggtggtcttttcaccattggcagaaacagtgagagctgtgtggtgcagaaatccagaaatgaggtgtagggaattttgcctgccttcctgcagacctgagctggctttggaatgaggttaaagtgtcagggacgttgcctgagcccaaatgtgtagtgtggtctgggcaggcagacctttaggttttgctgcttagtcctgaggaagtggccactcttgtggcaggtgtagtatctggggcgagtgttgggggtaaaagcccaccctacagaaagtggaacagcccggagcctgatgtgaaaggaccacgggtgttgtaagctgggacacggaagccaaactggaatcaaacgccgactgtaaattgtatcttataacttattaaataaaacatttgctccgtaaa

SEQ ID NO: 134603 - DNA, 7402 bp, Homo sapiens
  Payload ID: 6298
  Gene Symbol: FLNB
  Gene Name: filamin B, beta
  ENST ID: ENST00000493452
  CDS Start-End: 158-7387
atttttgaatcacacaggatgctattctagactttttagatatatccaggaatagagtaaaaaataaaatccctcctgcataaaggcaccaggctttttccaagctttgtttattttttaacaccacttcttcaaggaatggataatccccatcttcatgcaagaacatagcacccggaggagaagtctcagtctgtgcccagactgggaatcctgggacccgcagaagcctgtggataatgcacgagaagccatgcagcaggcagatgactggctgggtgtcccacaggtcatcactcctgaagaaatcattcacccggatgtggacgagcactcagttatgacttacctgtcccagttccccaaagccaagctcaagccgggggctcctctcaaacccaaactcaacccgaagaaagccagggcctatggcagaggaatcgagcccactggaaacatggtgaagcagccagccaagttcactgtggacaccatcagcgccgggcaaggagacgtgatggtgtttgttgaggacccagaagggaacaaagaggaggcacaagtgacccctgacagtgacaagaacaagacatactctgtggagtatctgcccaaggtcaccgggctacacaaagtcacagtcctctttgcaggacagcacatctccaagagcccatttgaagtgagtgttgacaaggcccagggagatgccagtaaagtcactgcaaaaggtccagggttggaagctgtagggaacatcgccaataagcccacctactttgacatctatacggcaggagctggtgtgggtgacattggtgtggaggtggaagatccccaggggaagaacaccgtggagttgctcgtggaagacaaaggaaaccaggtgtatcgatgtgtgtacaaacccatgcagcctggccctcacgtggtcaagatcttctttgctggggacactattcctaagagtcccttcgttgtgcaggttggggaagcctgcaatccaaatgcctgccgggccagtggccgaggcctacaacccaaaggcgtccgtatccgggagaccacagatttcaaggttgacaccaaagctgcaggaagtggggagctcggtgtaaccatgaagggtcctaagggtctggaggagctggtgaagcagaaagactttctggatggggtctacgcattcgagtattaccccagcaccccggggagatacagcattgccatcacatgggggggacaccacattccaaagagcccctttgaagttcaagttggccctgaagcgggtatgcagaaagtccgtgcttggggccctgggctccatggtgggattgtcgggcggtcagcggacttcgtggtagaatccattggctctgaagtggggtctctggggtttgccattgaaggcccctctcaggcaaagattgagtacaacgaccagaatgatggatcgtgtgatgtcaaatactggcccaaggagcctggcgaatatgctgttcacatcatgtgtgacgacgaagacatcaaggacagcccgtacatggccttcatccacccagccacgggaggctacaaccctgatctggttcgagcatacgggccaggtttggagaaatctggatgcattgtcaacaacctggccgagttcactgtggatcctaaggatgctggaaaagctcccttaaagatatttgctcaggatggggaaggccaacgcattgacatccagatgaagaaccggatggacggcacatatgcatgctcatacaccccggtgaaggccatcaagcacaccattgctgtggtctggggaggcgtgaacatcccgcacagcccctacagggtcaacatcgggcaaggtagccatcctcagaaggtcaaagtgtttgggccaggtgtggagagaagtggtctgaaggcaaatgaacctacacacttcacggtggactgtactgaggctggggaaggtgatgtcagtgttggcattaagtgtgatgcccgggtgttaagtgaagatgaggaagacgtggattttgacattattcacaatgccaatgatacgttcacagtcaaatatgtgcctcctgctgctgggcgatacactatcaaagttctctttgcatctcaggaaatccccgccagccctttcagagtcaaagttgacccttcccacgatgccagcaaagtgaaggcagaaggcccagggctcagcaaagcaggtgtggaaaatgggaaaccgacccacttcactgtctacaccaagggggctgggaaagccccgctcaacgtgcagttcaacagccctcttcctggcgatgcagtgaaggatttggatatcatcgataattatgactactctcacacggttaaatatacacccacccaacagggcaacatgcaggttctggtgacttacggtggcgatcccatccctaaaagccctttcactgtgggtgttgctgcaccgctggatctgagcaagataaaactcaatgggctggaaaacagggtggaagttgggaaggatcaggagttcaccgttgataccaggggggcaggaggccaggggaagctggacgtgacaatcctcagcccctctcggaaggtcgtgccatgcctagtgacacctgtgacaggccgggagaacagcacggccaagttcatccctcgggaggaggggctgtatgctgtagacgtgacctacgatggacaccctgtgcccgggagcccctacacagtggaggcctcgctgccaccagatcccagcaaggtgaaggcccacggtcccggcctcgaaggtggtctcgtgggcaagcctgccgagttcaccatcgataccaaaggagctggtactggaggtctgggcttaacggtggaaggtccgtgcgaggccaaaatcgagtgctccgacaatggtgatgggacctgctccgtctcttaccttcccacaaaacccggggagtacttcgtcaacatcctctttgaagaagtccacatacctgggtctcccttcaaagctgacattgaaatgccctttgacccctctaaagtcgtggcatcggggccaggtctcgagcacgggaaggtgggtgaagctggcctccttagcgtcgactgctcggaagcgggaccgggggccctgggcctggaagctgtctcggactcgggaacaaaagccgaagtcagtattcagaacaacaaagatggcacctacgcggtgacctacgtgcccctgacggccggcatgtacacgttgaccatgaagtatggtggcgaactcgtgccacacttccccgcccgggtcaaggtggagcccgccgtggacaccagcaggatcaaagtctttggaccaggaatagaagggaaagatgtgttccgggaagctaccaccgactttacagttgactctcggccgctgacccaggttgggggtgaccacatcaaggcccacattgccaacccctcaggggcctccaccgagtgctttgtcacagacaatgcggatgggacctaccaggtggaatacacaccctttgagaaaggtctccatgtagtggaggtgacatatgatgacgtgcctatcccaaacagtcccttcaaggtggctgtcactgaaggctgccagccatctagggtgcaagcccaaggacctggattgaaagaggcctttaccaacaagcccaatgtcttcaccgtggttaccagaggcgcaggaattggtgggcttggcataactgttgagggaccatcagagtcgaagataaattgcagagacaacaaggatggcagctgcagtgctgagtacattcctttcgcaccgggggattacgatgttaatatcacatatggaggagcccacatccccggcagccccttcagggttcctgtgaaggatgttgtggaccccagcaaggtcaagattgccggccccgggctgggctcaggcgtccgagcccgtgtcctgcagtccttcacggtggacagcagcaaggctggcctggctccgctggaagtgagggttctgggcccacgaggcttggtggagccagtgaacgtggtggacaatggagatggcacacacacagtaacctacaccccatctcaggagggaccttacatggtctcagttaaatatgctgatgaagagattcctcgcagtcccttcaaggtcaaggtccttcccacatatgatgccagcaaagtgactgccagtggccccggccttagttcctatggtgtgcctgccagtctacctgtggactttgcaattgatgcccgagatgccggggaaggcctgcttgctgttcaaataacggaccaagaaggaaaacccaaaagagccattgtccatgacaataaagatggcacgtatgctgtcacctacatccccgacaagactgggcgctatatgattggagtcacctacgggggtgacgacatcccactttctccttatcgcatccgagccacacagacgggtgatgccagcaagtgcctggccacgggtcctggaatcgcctccactgtgaaaactggcgaagaagtaggctttgtggttgatgccaagactgccgggaagggtaaagtgacctgcacggttctgaccccagatggcactgaggccgaggccgatgtcattgagaatgaagatggaacctatgacatcttctacacagctgccaagccgggcacatatgtgatctatgtgcgcttcggtggtgttgatattcctaacagccccttcactgtcatggtgaccgaagaggcctatgtcccagtgagtgacatgaacggcctgggatttaagccttttgacctggtcattccgtttgctgtcaggaaaggagaaatcactggagaggtccacatgccttctgggaagacagccacacctgagattgtggacaacaaggacggcacggtcactgttagatatgcccccactgaggtcgggctccatgagatgcacatcaaatacatgggcagccacatccctgagagcccactccagttctacgtgaactaccccaacagtggaagtgtttctgcatacggtccaggcctcgtgtatggagtggccaacaaaactgccaccttcaccatcgtcacagaggatgcaggagaaggtggtctggacttggctattgagggcccctcaaaagcagaaatcagctgcattgacaataaagatgggacatgcacagtgacctacctgccgactctgccaggcgactacagcattctggtcaagtacaatgacaagcacatccctggcagccccttcacagccaagatcacagatgacagcaggcggtgctcccaggtgaagttgggctcagccgctgacttcctgctcgacatcagtgagactgacctcagcagcctgacggccagcattaaggccccatctggccgagacgagccctgtctcctgaagaggctgcccaacaaccacattggcatctccttcatcccccgggaagtgggcgaacatctggtcagcatcaagaaaaatggcaaccatgtggccaacagccccgtgtctatcatggtggtccagtcggagattggtgacgcccgccgagccaaagtctatggccgcggcctgtcagaaggccggactttcgagatgtctgacttcatcgtggacacaagggatgcaggttatggtggcatatccttggcggtggaaggccccagcaaagtggacatccagacggaggacctggaagatggcacctgcaaagtctcctacttccctaccgtgcctggggtttatatcgtctccaccaaattcgctgacgagcacgtgcctgggagcccatttaccgtgaagatcagtggggagggaagagtcaaagagagcatcacccgcaccagtcgggccccgtccgtggccactgtcgggagcatttgtgacctgaacctgaaaatcccagaaatcaacagcagtgatatgtcggcccacgtcaccagcccctctggccgtgtgactgaggcagagattgtgcccatggggaagaactcacactgcgtccggtttgtgccccaggagatgggcgtgcacacggtcagcgtcaagtaccgtgggcagcacgtcaccggcagccccttccagttcaccgtggggccacttggtgaaggaggcgcccacaaggtgcgggcaggaggccctggcctggagagaggagaagcgggagtcccagctgagttcagcatttggacccgggaagcaggcgctggaggcctctccatcgctgttgagggccccagtaaggccgagattacattcgatgaccataaaaatgggtcgtgcggtgtatcttatattgcccaagagcctggtaactacgaggtgtccatcaagttcaatgatgagcacatcccggaaagcccctacctggtgccggtcatcgcaccctccgacgacgcccgccgcctcactgttatgagccttcaggaatcgggattaaaagttaaccagccagcatcctttgctataaggttgaatggcgcaaaaggcaagattgatgcaaaggtgcacagcccctctggagccgtggaggagtgccacgtgtctgagctggagccagataagtatgctgttcgcttcatccctcatgagaatggtgtccacaccatcgatgtcaagttcaatgggagccacgtggttggaagccccttcaaagtgcgcgttggggagcctggacaagcggggaaccctgccctggtgtccgcctatggcacgggactcgaagggggcaccacaggtatccagtcggaattctttattaacaccacccgagcaggtccagggacattatccgtcaccatcgaaggcccatccaaggttaaaatggattgccaggaaacacctgaagggtacaaagtcatgtacacccccatggctcctggtaactacctgatcagcgtcaaatacggtgggcccaaccacatcgtgggcagtcccttcaaggccaaggtgacaggccagcgtctagttagccctggctcagccaacgagacctcatccatcctggtggagtcagtgaccaggtcgtctacagagacctgctatagcgccattcccaaggcatcctcggacgccagcaaggtgacctctaagggggcagggctctcaaaggcctttgtgggccagaagagttccttcctggtggactgcagcaaagctggctccaacatgctgctgatcggggtccatgggcccaccaccccctgcgaggaggtctccatgaagcatgtaggcaaccagcaatacaacgtcacatacgtcgtcaaggagaggggcgattatgtgctggctgtgaagtggggggaggaacacatccctggcagcccttttcatgtcacagtgccttaaaacagttttctcaaa

SEQ ID NO: 134604 - DNA, 315 bp, Homo sapiens
  Payload ID: 6298
  Gene Symbol: FLNB
  Gene Name: filamin B, beta
  ENST ID: ENST00000470231
  CDS Start-End: 1-219
ttcgctgacgagcacgtgcctgggagcccatttaccgtgaagatcagtggggagggaagagtcaaagagagcatcacccgcaccagtcgggccccgtccgtggccactgtcgggagcatttgtgacctgaacctgaaaatcccaggggtcagagtcatgaactgctctgcccagatcctgtggggctggagggtgcagtttcatactggctctaggtgatggcagtgctccgtgccccgcatgcggccgcctggcctcaccacggcagtgcaggcacagtcgttggcatgacaaatcaacagcagtgatatgtcg

SEQ ID NO: 134605 - DNA, 404 bp, Homo sapiens
  Payload ID: 6298
  Gene Symbol: FLNB
  Gene Name: filamin B, beta
  ENST ID: ENST00000466455
  CDS Start-End: 1-404
cttggcggtggaaggccccagcaaagtggacatccagacggaggacctggaagatggcacctgcaaagtctcctacttccctaccgtgcctggggtttatatcgtctccaccaaattcgctgacgagcacgtgcctgaaatcaacagcagtgatatgtcggcccacgtcaccagcccctctggccgtgtgactgaggcagagattgtgcccatggggaagaactcacactgcgtccggtttgtgccccaggagatgggcgtgcacacggtcagcgtcaagtaccgtgggcagcacgtcaccggcagccccttccagttcaccgtggggccacttggtgaaggaggcgcccacaaggtgcgggcaggaggccctggcctggagagaggagaagcgggagtcccag

SEQ ID NO: 134606 - DNA, 8079 bp, Homo sapiens
  Payload ID: 6298
  Gene Symbol: FLNB
  Gene Name: filamin B, beta
  Uniprot ID: O75369
  ENST ID: ENST00000490882
  CDS Start-End: 166-8067
gcggccaggggcgggcggccgcagagcagcaccggccgtggctccggtagcagcaagttcgaaccccgctcccgctccgcttcggttctcgctccttcggcccttgggcctccaaacaccagtccccggcagctcgttgcgcattgcgctctccccgccaccaggatgccggtaaccgagaaggatctagctgaggacgcgccttggaagaagatccagcagaacacgttcacacgctggtgcaacgagcacctcaagtgcgtgaacaaacgcatcggcaacctgcagaccgacctgagcgacgggctgcggctcatcgcgctgctcgaggtgctcagccagaagcgcatgtaccgcaagtaccatcagcggcccacctttcgccagatgcagctcgagaatgtgtccgtggcgctcgagttcctggaccgtgagagcatcaagctcgtgtccatcgatagcaaagccattgtggatgggaacctgaagctcatcttgggtctggtgtggacgctgatcctccactactccatctccatgcccgtgtgggaggatgaaggggatgatgatgccaagaagcagacgccaaagcagaggctgctggggtggattcagaacaagatcccctacttgcccatcaccaactttaaccagaactggcaagacggcaaagccctgggagccctggtagacagctgtgctccaggtctgtgcccagactgggaatcctgggacccgcagaagcctgtggataatgcacgagaagccatgcagcaggcagatgactggctgggtgtcccacaggtcatcactcctgaagaaatcattcacccggatgtggacgagcactcagttatgacttacctgtcccagttccccaaagccaagctcaagccgggggctcctctcaaacccaaactcaacccgaagaaagccagggcctatggcagaggaatcgagcccactggaaacatggtgaagcagccagccaagttcactgtggacaccatcagcgccgggcaaggagacgtgatggtgtttgttgaggacccagaagggaacaaagaggaggcacaagtgacccctgacagtgacaagaacaagacatactctgtggagtatctgcccaaggtcaccgggctacacaaagtcacagtcctctttgcaggacagcacatctccaagagcccatttgaagtgagtgttgacaaggcccagggagatgccagtaaagtcactgcaaaaggtccagggttggaagctgtagggaacatcgccaataagcccacctactttgacatctatacggcaggagctggtgtgggtgacattggtgtggaggtggaagatccccaggggaagaacaccgtggagttgctcgtggaagacaaaggaaaccaggtgtatcgatgtgtgtacaaacccatgcagcctggccctcacgtggtcaagatcttctttgctggggacactattcctaagagtcccttcgttgtgcaggttggggaagcctgcaatccaaatgcctgccgggccagtggccgaggcctacaacccaaaggcgtccgtatccgggagaccacagatttcaaggttgacaccaaagctgcaggaagtggggagctcggtgtaaccatgaagggtcctaagggtctggaggagctggtgaagcagaaagactttctggatggggtctacgcattcgagtattaccccagcaccccggggagatacagcattgccatcacatgggggggacaccacattccaaagagcccctttgaagttcaagttggccctgaagcgggtatgcagaaagtccgtgcttggggccctgggctccatggtgggattgtcgggcggtcagcggacttcgtggtagaatccattggctctgaagtggggtctctggggtttgccattgaaggcccctctcaggcaaagattgagtacaacgaccagaatgatggatcgtgtgatgtcaaatactggcccaaggagcctggcgaatatgctgttcacatcatgtgtgacgacgaagacatcaaggacagcccgtacatggccttcatccacccagccacgggaggctacaaccctgatctggttcgagcatacgggccaggtttggagaaatctggatgcattgtcaacaacctggccgagttcactgtggatcctaaggatgctggaaaagctcccttaaagatatttgctcaggatggggaaggccaacgcattgacatccagatgaagaaccggatggacggcacatatgcatgctcatacaccccggtgaaggccatcaagcacaccattgctgtggtctggggaggcgtgaacatcccgcacagcccctacagggtcaacatcgggcaaggtagccatcctcagaaggtcaaagtgtttgggccaggtgtggagagaagtggtctgaaggcaaatgaacctacacacttcacggtggactgtactgaggctggggaaggtgatgtcagtgttggcattaagtgtgatgcccgggtgttaagtgaagatgaggaagacgtggattttgacattattcacaatgccaatgatacgttcacagtcaaatatgtgcctcctgctgctgggcgatacactatcaaagttctctttgcatctcaggaaatccccgccagccctttcagagtcaaagttgacccttcccacgatgccagcaaagtgaaggcagaaggcccagggctcagcaaagcaggtgtggaaaatgggaaaccgacccacttcactgtctacaccaagggggctgggaaagccccgctcaacgtgcagttcaacagccctcttcctggcgatgcagtgaaggatttggatatcatcgataattatgactactctcacacggttaaatatacacccacccaacagggcaacatgcaggttctggtgacttacggtggcgatcccatccctaaaagccctttcactgtgggtgttgctgcaccgctggatctgagcaagataaaactcaatgggctggaaaacagggtggaagttgggaaggatcaggagttcaccgttgataccaggggggcaggaggccaggggaagctggacgtgacaatcctcagcccctctcggaaggtcgtgccatgcctagtgacacctgtgacaggccgggagaacagcacggccaagttcatccctcgggaggaggggctgtatgctgtagacgtgacctacgatggacaccctgtgcccgggagcccctacacagtggaggcctcgctgccaccagatcccagcaaggtgaaggcccacggtcccggcctcgaaggtggtctcgtgggcaagcctgccgagttcaccatcgataccaaaggagctggtactggaggtctgggcttaacggtggaaggtccgtgcgaggccaaaatcgagtgctccgacaatggtgatgggacctgctccgtctcttaccttcccacaaaacccggggagtacttcgtcaacatcctctttgaagaagtccacatacctgggtctcccttcaaagctgacattgaaatgccctttgacccctctaaagtcgtggcatcggggccaggtctcgagcacgggaaggtgggtgaagctggcctccttagcgtcgactgctcggaagcgggaccgggggccctgggcctggaagctgtctcggactcgggaacaaaagccgaagtcagtattcagaacaacaaagatggcacctacgcggtgacctacgtgcccctgacggccggcatgtacacgttgaccatgaagtatggtggcgaactcgtgccacacttccccgcccgggtcaaggtggagcccgccgtggacaccagcaggatcaaagtctttggaccaggaatagaagggaaagatgtgttccgggaagctaccaccgactttacagttgactctcggccgctgacccaggttgggggtgaccacatcaaggcccacattgccaacccctcaggggcctccaccgagtgctttgtcacagacaatgcggatgggacctaccaggtggaatacacaccctttgagaaaggtctccatgtagtggaggtgacatatgatgacgtgcctatcccaaacagtcccttcaaggtggctgtcactgaaggctgccagccatctagggtgcaagcccaaggacctggattgaaagaggcctttaccaacaagcccaatgtcttcaccgtggttaccagaggcgcaggaattggtgggcttggcataactgttgagggaccatcagagtcgaagataaattgcagagacaacaaggatggcagctgcagtgctgagtacattcctttcgcaccgggggattacgatgttaatatcacatatggaggagcccacatccccggcagccccttcagggttcctgtgaaggatgttgtggaccccagcaaggtcaagattgccggccccgggctgggctcaggcgtccgagcccgtgtcctgcagtccttcacggtggacagcagcaaggctggcctggctccgctggaagtgagggttctgggcccacgagctgacgacacggattcccagtcatggcgcagccccttgaaagccctttcagagttctttaaaggtgacccgaagggtgactttaataagacaggcttggtggagccagtgaacgtggtggacaatggagatggcacacacacagtaacctacaccccatctcaggagggaccttacatggtctcagttaaatatgctgatgaagagattcctcgcagtcccttcaaggtcaaggtccttcccacatatgatgccagcaaagtgactgccagtggccccggccttagttcctatggtgtgcctgccagtctacctgtggactttgcaattgatgcccgagatgccggggaaggcctgcttgctgttcaaataacggaccaagaaggaaaacccaaaagagccattgtccatgacaataaagatggcacgtatgctgtcacctacatccccgacaagactgggcgctatatgattggagtcacctacgggggtgacgacatcccactttctccttatcgcatccgagccacacagacgggtgatgccagcaagtgcctggccacgggtcctggaatcgcctccactgtgaaaactggcgaagaagtaggctttgtggttgatgccaagactgccgggaagggtaaagtgacctgcacggttctgaccccagatggcactgaggccgaggccgatgtcattgagaatgaagatggaacctatgacatcttctacacagctgccaagccgggcacatatgtgatctatgtgcgcttcggtggtgttgatattcctaacagccccttcactgtcatggccacagatggggaagtcacagccgtggaggaggcaccggtaaatgcatgtccccctggattcaggccctgggtgaccgaagaggcctatgtcccagtgagtgacatgaacggcctgggatttaagccttttgacctggtcattccgtttgctgtcaggaaaggagaaatcactggagaggtccacatgccttctgggaagacagccacacctgagattgtggacaacaaggacggcacggtcactgttagatatgcccccactgaggtcgggctccatgagatgcacatcaaatacatgggcagccacatccctgagagcccactccagttctacgtgaactaccccaacagtggaagtgtttctgcatacggtccaggcctcgtgtatggagtggccaacaaaactgccaccttcaccatcgtcacagaggatgcaggagaaggtggtctggacttggctattgagggcccctcaaaagcagaaatcagctgcattgacaataaagatgggacatgcacagtgacctacctgccgactctgccaggcgactacagcattctggtcaagtacaatgacaagcacatccctggcagccccttcacagccaagatcacagatgacagcaggcggtgctcccaggtgaagttgggctcagccgctgacttcctgctcgacatcagtgagactgacctcagcagcctgacggccagcattaaggccccatctggccgagacgagccctgtctcctgaagaggctgcccaacaaccacattggcatctccttcatcccccgggaagtgggcgaacatctggtcagcatcaagaaaaatggcaaccatgtggccaacagccccgtgtctatcatggtggtccagtcggagattggtgacgcccgccgagccaaagtctatggccgcggcctgtcagaaggccggactttcgagatgtctgacttcatcgtggacacaagggatgcaggttatggtggcatatccttggcggtggaaggccccagcaaagtggacatccagacggaggacctggaagatggcacctgcaaagtctcctacttccctaccgtgcctggggtttatatcgtctccaccaaattcgctgacgagcacgtgcctgggagcccatttaccgtgaagatcagtggggagggaagagtcaaagagagcatcacccgcaccagtcgggccccgtccgtggccactgtcgggagcatttgtgacctgaacctgaaaatcccagaaatcaacagcagtgatatgtcggcccacgtcaccagcccctctggccgtgtgactgaggcagagattgtgcccatggggaagaactcacactgcgtccggtttgtgccccaggagatgggcgtgcacacggtcagcgtcaagtaccgtgggcagcacgtcaccggcagccccttccagttcaccgtggggccacttggtgaaggaggcgcccacaaggtgcgggcaggaggccctggcctggagagaggagaagcgggagtcccagctgagttcagcatttggacccgggaagcaggcgctggaggcctctccatcgctgttgagggccccagtaaggccgagattacattcgatgaccataaaaatgggtcgtgcggtgtatcttatattgcccaagagcctggtaactacgaggtgtccatcaagttcaatgatgagcacatcccggaaagcccctacctggtgccggtcatcgcaccctccgacgacgcccgccgcctcactgttatgagccttcaggaatcgggattaaaagttaaccagccagcatcctttgctataaggttgaatggcgcaaaaggcaagattgatgcaaaggtgcacagcccctctggagccgtggaggagtgccacgtgtctgagctggagccagataagtatgctgttcgcttcatccctcatgagaatggtgtccacaccatcgatgtcaagttcaatgggagccacgtggttggaagccccttcaaagtgcgcgttggggagcctggacaagcggggaaccctgccctggtgtccgcctatggcacgggactcgaagggggcaccacaggtatccagtcggaattctttattaacaccacccgagcaggtccagggacattatccgtcaccatcgaaggcccatccaaggttaaaatggattgccaggaaacacctgaagggtacaaagtcatgtacacccccatggctcctggtaactacctgatcagcgtcaaatacggtgggcccaaccacatcgtgggcagtcccttcaaggccaaggtgacaggccagcgtctagttagccctggctcagccaacgagacctcatccatcctggtggagtcagtgaccaggtcgtctacagagacctgctatagcgccattcccaaggcatcctcggacgccagcaaggtgacctctaagggggcagggctctcaaaggcctttgtgggccagaagagttccttcctggtggactgcagcaaagctggctccaacatgctgctgatcggggtccatgggcccaccaccccctgcgaggaggtctccatgaagcatgtaggcaaccagcaatacaacgtcacatacgtcgtcaaggagaggggcgattatgtgctggctgtgaagtggggggaggaacacatccctggcagcccttttcatgtcacagtgccttaaaacagttttctc

SEQ ID NO: 134607 - DNA, 1530 bp, Homo sapiens
  Payload ID: 6299
  Gene Symbol: FBLIM1
  Gene Name: filamin binding LIM protein 1
  Uniprot ID: Q8WUP2
  ENST ID: ENST00000332305
  CDS Start-End: 32-862
tctgtccctagccacaccaggagctgaagccatggcctcaaagcctgagaagagggtggcatcgtctgtctttatcaccctggcacccccgcgccgcgatgtggccgtggcggaggaagtgaggcaggcagtttgtgaggcccggcgtggccgcccctgggaggctcctgcccccatgaagacacccgaggctggcttggcggggaggcccagcccctggacaacccctggcagagctgcagccacagtgccggctgcacctatgcagctcttcaatggagacatctgtgccttctgccacaagaccgtgtccccccgagagctggctgtggaggccatgaagaggcagtaccatgcccagtgcttcacgtgccgcacctgccgccgccagctggctgggcagagcttctaccagaaggatgggcgacccctctgcgaaccctgctaccaggacacactggagaggtgcggcaagtgtggcgaggtggtccgggaccacatcatcagggccctgggccaggccttccacccctcctgcttcacgtgtgtgacctgcgcccggtgcattggggatgagagctttgccctgggcagccagaacgaggtgtactgcctggacgacttctacaggaaattcgcccccgtctgcagcatctgtgaaaatcccatcatccctcgggatgggaaagatgccttcaaaatcgaatgcatgggaagaaacttccatgaaaattgctacaggtgtgaggactgcaggatcctcctgtctgtcgagcccacggaccaaggctgctaccccctgaacaaccatctcttctgcaagccatgccatgtgaagcggagtgctgcggggtgctgctgagagtgcccgctgggcagtgaacagaccactagccccggctggggcccttccctgacttggtttcccttcctaacctgctcttgcacactttccttctgagcctccatggagaccagcctgcaagccggcccagcctgtccaggatacagtggggctgagcacccccaggccttccactcctctaccctctgggcaccagaaggctcctggaccatgagcttcacccccagaattccctgctgaccctgccccacttccagggaaaagctgggggaggttggacccctctcactgactagctgtctggtaggggtgctaggaccagcctcgcctgtggggttgagctgtttgaggacaaactccaaggtcccttaaaaagtgccttttagaggctgggcatggtggctcacgcttgtaatcccagcactttgggaggccaaggtgggtggatcacctgaggtcaggagttcaagaccagcctggccaacatggtgaaaccctgtctctactaaaaatacaaaaattagccaggcatggtagcaggtgcctgtaatcccagctactggggaaagctgaggcaggagaattgcttcaatctggaaggcagaggttgcagtgagattgcaccattgcattccagcctgggcaacaagagggaaactccgtct

SEQ ID NO: 134608 - DNA, 3695 bp, Homo sapiens
  Payload ID: 6299
  Gene Symbol: FBLIM1
  Gene Name: filamin binding LIM protein 1
  Uniprot ID: Q8WUP2
  ENST ID: ENST00000375766
  CDS Start-End: 641-1762
atgaagaacgcgaggggatgggcagcggggagggaaggaaacccaccccgactccccattctcctacccccactccccatccctcccattcccccatcgcccccatccccattcccccccattcccaccccctggcctgtgccaagggggaggggaggcgtcgtccagggaacaaagggagggggaaggggcggcgcggggcgcggccgggcaggttggggggcaggtaggggccgcttccgcggggcgggaatcccgcgccccctccccccgagcctcaccttttatggtaaagcggcgcggggcggcggggcggagggagccgagggggcggggagggcggacgggcggaggggacgggaggcccagcggctccgggctccgctggctcgggcgtcggatcggagccgccggggcgcgggcggcccagagctggcctgaacctccaggacttcagcccttctaggagaatctgatcccaggtgagggaggtcacttggggtgtggcccagcaggcaggcgggactccagactgggaacggaagtcagccctgctggggctgggagctgaagcatctgttccttcctcgcgggtgtgagacaaggaagagtgatcattgccacaccaggagctgaagccatggcctcaaagcctgagaagagggtggcatcgtctgtctttatcaccctggcacccccgcgccgcgatgtggccgtggcggaggaagtgaggcaggcagtttgtgaggcccggcgtggccgcccctgggaggctcctgcccccatgaagacacccgaggctggcttggcggggaggcccagcccctggacaacccctggcagagctgcagccacagtgccggctgcacctatgcagctcttcaatggaggatgcccaccccctcctcctgtcctggatggtgaggacgtgcttcctgacctggacctcctcccaccccctccaccgccccctccagtgcttctgccttctgaagaggaggctcctgctccaatgggggcctcactcattgcagacttagagcagctgcacctgtccccgcccccgcccccaccacaggccccagcggagggaccttcagtccagcccggtcccctcaggcccatggaggaagagctgccacctcccccggcagaacctgttgagaaaggggcatccacagacatctgtgccttctgccacaagaccgtgtccccccgagagctggctgtggaggccatgaagaggcagtaccatgcccagtgcttcacgtgccgcacctgccgccgccagctggctgggcagagcttctaccagaaggatgggcgacccctctgcgaaccctgctaccaggacacactggagaggtgcggcaagtgtggcgaggtggtccgggaccacatcatcagggccctgggccaggccttccacccctcctgcttcacgtgtgtgacctgcgcccggtgcattggggatgagagctttgccctgggcagccagaacgaggtgtactgcctggacgacttctacaggaaattcgcccccgtctgcagcatctgtgaaaatcccatcatccctcgggatgggaaagatgccttcaaaatcgaatgcatgggaagaaacttccatgaaaattgctacaggtgtgaggactgcaggatcctcctgtctgtcgagcccacggaccaaggctgctaccccctgaacaaccatctcttctgcaagccatgccatgtgaagcggagtgctgcggggtgctgctgagagtgcccgctgggcagtgaacagaccactagccccggctggggcccttccctgacttggtttcccttcctaacctgctcttgcacactttccttctgagcctccatggagaccagcctgcaagccggcccagcctgtccaggatacagtggggctgagcacccccaggccttccactcctctaccctctgggcaccagaaggctcctggaccatgagcttcacccccagaattccctgctgaccctgccccacttccagggaaaagctgggggaggttggacccctctcactgactagctgtctggtaggggtgctaggaccagcctcgcctgtggggttgagctgtttgaggacaaactccaaggtcccttaaaaagtgccttttagaggctgggcatggtggctcacgcttgtaatcccagcactttgggaggccaaggtgggtggatcacctgaggtcaggagttcaagaccagcctggccaacatggtgaaaccctgtctctactaaaaatacaaaaattagccaggcatggtagcaggtgcctgtaatcccagctactggggaaagctgaggcaggagaattgcttcaatctggaaggcagaggttgcagtgagattgcaccattgcattccagcctgggcaacaagagggaaactccgtctcaaaaaaaaaaaagtgccttttaggccggatgtggtggctcatgcctgtaatcccagcactttgggaggccaaggcaggcagatcacttgaggtcaggagtttgagaccagcctggccaacacggcaaaaccccgtttctactaaaaatacaaaaattagctgggtgtggtggcgtgcgcctgtaatcccagctactcaggaggctgaggcaggagcattgcttgaacccgggaggcagaggttgcagtgagctgagatggcaccactgcactccagcctgggagacacagcgagactctgtctccaaaaaaaaaagtgctttttgaaaatgttgaggttgaaatgatgggaaccaacattctttggatttagtggggagcataatagcaaacacccccttggttcgcacatgtacaggaatgggacccagttggggcacagccatggacttccccgccctggaatgtgtggtgcaaagtggggccagggcccagacccaagaggagagggtggtccgcagacaccccgggatgtcagcatcccccgacctgccttctggcggcacctcccgggtgctgtgttgagtcagcaggcatggggtgagagcctggtatatgctgggaacagggtgcaggggccaagcgttcctccttcagccttgacttgggccatgcaccccctctcccccaaacacaaacaagcacttctccagtatggtgccaggacaggtgtcccttcagtcctctggttatgacctcaagtcctacttgggccctgcagcccagcctgtgttgtaacctctgcgtcctcaagaccacacctggaagattcttcttccctttgaaggagaatcatcattgttgctttatcacttctaagacattttgtacggcacggacaagttaaacagaatgtgcttccctccctggggtctcacacgctcccacgagaatgccacaggggccgtgcactgggcaggcttctctgtagaaccccaggggcttcggcccagaccacagcgtcttgccctgagcctagagcagggagtcccgaacttctgcattcacagaccacctccacaattgttataaccaaaggcctcctgttctgttatttcacttaaatcaacatgctattttgttttcactcacttctgactttagcctcgtgctgagccgtgtatccatgcagtcatgttcacgtgctagttacgtttttcttcttacacatgaaaataaatgcataagtgttagaagctcttcca

SEQ ID NO: 134609 - DNA, 3498 bp, Homo sapiens
  Payload ID: 6299
  Gene Symbol: FBLIM1
  Gene Name: filamin binding LIM protein 1
  Uniprot ID: Q8WUP2
  ENST ID: ENST00000375771
  CDS Start-End: 444-1565
gcgggccaggacgaatccctccatccgggagcagtggtggcggtggaacaggtggcctggggtgctggaggcaggccaacctggagaggtaggcagtggctacctccactttacagatgaagacactgaggctcaggaggtggcgtgactgctccgggtctcacgcttagtaaacggccgcagaaccctggtcggtttgacgcaagaccctggcggatcccagagccaaacagagctggcctgaacctccaggacttcagcccttctaggagaatctgatcccaggtgagggaggtcacttggggtgtggcccagcaggcaggcgggactccagactgggaacggaagtcagccctgctggggctgggagctgaagcatctgttccttcctcgcgggtgtgagacaaggaagagtgatcattgccacaccaggagctgaagccatggcctcaaagcctgagaagagggtggcatcgtctgtctttatcaccctggcacccccgcgccgcgatgtggccgtggcggaggaagtgaggcaggcagtttgtgaggcccggcgtggccgcccctgggaggctcctgcccccatgaagacacccgaggctggcttggcggggaggcccagcccctggacaacccctggcagagctgcagccacagtgccggctgcacctatgcagctcttcaatggaggatgcccaccccctcctcctgtcctggatggtgaggacgtgcttcctgacctggacctcctcccaccccctccaccgccccctccagtgcttctgccttctgaagaggaggctcctgctccaatgggggcctcactcattgcagacttagagcagctgcacctgtccccgcccccgcccccaccacaggccccagcggagggaccttcagtccagcccggtcccctcaggcccatggaggaagagctgccacctcccccggcagaacctgttgagaaaggggcatccacagacatctgtgccttctgccacaagaccgtgtccccccgagagctggctgtggaggccatgaagaggcagtaccatgcccagtgcttcacgtgccgcacctgccgccgccagctggctgggcagagcttctaccagaaggatgggcgacccctctgcgaaccctgctaccaggacacactggagaggtgcggcaagtgtggcgaggtggtccgggaccacatcatcagggccctgggccaggccttccacccctcctgcttcacgtgtgtgacctgcgcccggtgcattggggatgagagctttgccctgggcagccagaacgaggtgtactgcctggacgacttctacaggaaattcgcccccgtctgcagcatctgtgaaaatcccatcatccctcgggatgggaaagatgccttcaaaatcgaatgcatgggaagaaacttccatgaaaattgctacaggtgtgaggactgcaggatcctcctgtctgtcgagcccacggaccaaggctgctaccccctgaacaaccatctcttctgcaagccatgccatgtgaagcggagtgctgcggggtgctgctgagagtgcccgctgggcagtgaacagaccactagccccggctggggcccttccctgacttggtttcccttcctaacctgctcttgcacactttccttctgagcctccatggagaccagcctgcaagccggcccagcctgtccaggatacagtggggctgagcacccccaggccttccactcctctaccctctgggcaccagaaggctcctggaccatgagcttcacccccagaattccctgctgaccctgccccacttccagggaaaagctgggggaggttggacccctctcactgactagctgtctggtaggggtgctaggaccagcctcgcctgtggggttgagctgtttgaggacaaactccaaggtcccttaaaaagtgccttttagaggctgggcatggtggctcacgcttgtaatcccagcactttgggaggccaaggtgggtggatcacctgaggtcaggagttcaagaccagcctggccaacatggtgaaaccctgtctctactaaaaatacaaaaattagccaggcatggtagcaggtgcctgtaatcccagctactggggaaagctgaggcaggagaattgcttcaatctggaaggcagaggttgcagtgagattgcaccattgcattccagcctgggcaacaagagggaaactccgtctcaaaaaaaaaaaagtgccttttaggccggatgtggtggctcatgcctgtaatcccagcactttgggaggccaaggcaggcagatcacttgaggtcaggagtttgagaccagcctggccaacacggcaaaaccccgtttctactaaaaatacaaaaattagctgggtgtggtggcgtgcgcctgtaatcccagctactcaggaggctgaggcaggagcattgcttgaacccgggaggcagaggttgcagtgagctgagatggcaccactgcactccagcctgggagacacagcgagactctgtctccaaaaaaaaaagtgctttttgaaaatgttgaggttgaaatgatgggaaccaacattctttggatttagtggggagcataatagcaaacacccccttggttcgcacatgtacaggaatgggacccagttggggcacagccatggacttccccgccctggaatgtgtggtgcaaagtggggccagggcccagacccaagaggagagggtggtccgcagacaccccgggatgtcagcatcccccgacctgccttctggcggcacctcccgggtgctgtgttgagtcagcaggcatggggtgagagcctggtatatgctgggaacagggtgcaggggccaagcgttcctccttcagccttgacttgggccatgcaccccctctcccccaaacacaaacaagcacttctccagtatggtgccaggacaggtgtcccttcagtcctctggttatgacctcaagtcctacttgggccctgcagcccagcctgtgttgtaacctctgcgtcctcaagaccacacctggaagattcttcttccctttgaaggagaatcatcattgttgctttatcacttctaagacattttgtacggcacggacaagttaaacagaatgtgcttccctccctggggtctcacacgctcccacgagaatgccacaggggccgtgcactgggcaggcttctctgtagaaccccaggggcttcggcccagaccacagcgtcttgccctgagcctagagcagggagtcccgaacttctgcattcacagaccacctccacaattgttataaccaaaggcctcctgttctgttatttcacttaaatcaacatgctattttgttttcactcacttctgactttagcctcgtgctgagccgtgtatccatgcagtcatgttcacgtgctagttacgtttttcttcttacacatgaaaataaatgcataagtgttagaagctcttcca

SEQ ID NO: 134610 - DNA, 507 bp, Homo sapiens
  Payload ID: 6299
  Gene Symbol: FBLIM1
  Gene Name: filamin binding LIM protein 1
  ENST ID: ENST00000430076
  CDS Start-End: 456-507
gacacccgagctgctgcgggccaggacgaatccctccatccgggagcagtggtggcggtggaacaggtggcctggggtgctggaggcaggccaacctggagaggtaggcagtggctacctccactttacagatgaagacactgaggctcaggaggtggcgtgactgctccgggtctcacgcttagtaaacggccgcagaaccctggtcggtttgacgcaagaccctggcggatcccagagccaaaagctggcctgaacctccaggacttcagcccttctaggagaatctgatcccaggtgagggaggtcacttggggtgtggcccagcaggcaggcgggactccagactgggaacggaagtcagccctgctggggctgggagctgaagcatctgttccttcctcgcgggtgtgagacaaggaagagtgatcattgccacaccaggagctgaagccatggcctcaaagcctgagaagagggtggcatcgtctgtctttatcaccctgg

SEQ ID NO: 134611 - DNA, 577 bp, Homo sapiens
  Payload ID: 6299
  Gene Symbol: FBLIM1
  Gene Name: filamin binding LIM protein 1
  ENST ID: ENST00000431771
  CDS Start-End: 266-577
gctccgctggctcgggcgtcggatcggagccgccggggcgcgggcggcccagcagagctggcctgaacctccaggacttcagcccttctaggagaatctgatcccaggtgagggaggtcacttggggtgtggcccagcaggcaggcgggactccagactgggaacggaagtcagccctgctggggctgggagctgaagcatctgttccttcctcgcgggtgtgagacaaggaagagtgatcattgccacaccaggagctgaagccatggcctcaaagcctgagaagagggtggcatcgtctgtctttatcaccctggcacccccgcgccgcgatgtggccgtggcggaggaagtgaggcaggcagtttgtgaggcccggcgtggccgcccctgggaggctcctgcccccatgaagacacccgaggctggcttggcggggaggcccagcccctggacaacccctggcagagctgcagccacagtgccggctgcacctatgcagctcttcaatggaggatgcccaccccctcctcctgtcctggatggtgaggacgtgcttcctgacctggacctcctc

SEQ ID NO: 134612 - DNA, 1543 bp, Homo sapiens
  Payload ID: 6299
  Gene Symbol: FBLIM1
  Gene Name: filamin binding LIM protein 1
  Uniprot ID: Q8WUP2
  ENST ID: ENST00000441801
  CDS Start-End: 208-1332
tggcctgaacctccaggacttcagcccttctaggagaatctgatcccaggtgagggaggtcacttggggtgtggcccagcaggcaggcgggactccagactgggaacggaagtcagccctgctggggctgggagctgaagcatctgttccttcctcgcgggtgtgagacaaggaagagtgatcattgccacaccaggagctgaagccatggcctcaaagcctgagaagagggtggcatcgtctgtctttatcaccctggcacccccgcgccgcgatgtggccgtggcggaggaagtgaggcaggcagtttgtgaggcccggcgtggccgcccctgggaggctcctgcccccatgaagacacccgaggctggcttggcggggaggcccagcccctggacaacccctggcagagctgcagccacagtgccggctgcacctatgcagctcttcaatggaggatgcccaccccctcctcctgtcctggatggtgaggacgtgcttcctgacctggacctcctcccaccccctccaccgccccctccagtgcttctgccttctgaagaggaggctcctgctccaatgggggcctcactcattgcagacttagagcagctgcacctgtccccgcccccgcccccaccacaggccccagcggagggaccttcagtccagcccggtcccctcaggcccatggaggaagagctgccacctcccccggcagaacctgttgagaaaggggcatccacagacatctgtgccttctgccacaagaccgtgtccccccgagagctggctgtggaggccatgaagaggcagtaccatgcccagtgcttcacgtgccgcacctgccgccgccagctggctgggcagagcttctaccagaaggatgggcgacccctctgcgaaccctgctaccaggacacactggagaggtgcggcaagtgtggcgaggtggtccgggaccacatcatcagggccctgggccaggccttccacccctcctgcttcacgtgtgtgacctgcgcccggtgcattggggatgagagctttgccctgggcagccagaacgaggtgtactgcctggacgacttctacaggtacgagaagggtttgtgcactgggtggggtgcagggacagggcgagacccaagcagggtgaaggagctgagcttgagtcctgggtgctgggccagagtttcctgtctactggtttattataaagaatattacagggctgggctgggcgcggtggctcacgcctgtaatcccagcactttgggaggccgaggcgggtggatcacgaggtcaggagatcgagatcatcctggctaacatggtgaaaccccgtctctactaaaaatacaaaaaaaattagccaggcatggtggcgggcgcctgtagtcccagctactcgggaggctgaggcaggagaatggcgtgaacctgggaggcagagcttgcagtgagccgagatcacgccactgcactccagcctgggcaacagagtgtgagactccgtctcaaaaaaaaaaaaaaaaaaaaa

SEQ ID NO: 134613 - DNA, 511 bp, Homo sapiens
  Payload ID: 6299
  Gene Symbol: FBLIM1
  Gene Name: filamin binding LIM protein 1
  ENST ID: ENST00000510929
  CDS Start-End: 468-511
cagccgggccctgccttccagagctcctggagcggcctgtcccccgggacaccgggacccacctgcagagggcttaccgctcaggagagcagaacaaggccaacctggagaggtaggcagtggctacctccactttacagatgaagacactgaggctcaggaggtggcgtgactgctccgggtctcacgcttagtaaacggccgcagaaccctggtcggtttgacgcaagaccctggcggatcccagagccaaacagagctggcctgaacctccaggacttcagcccttctaggagaatctgatcccaggtgagggaggtcacttggggtgtggcccagcaggcaggcgggactccagactgggaacggaagtcagccctgctggggctgggagctgaagcatctgttccttcctcgcgggtgtgagacaaggaagagtgatcattgccacaccaggagctgaagccatggcctcaaagcctgagaagagggtggcatcgtctgtctttat

SEQ ID NO: 134614 - DNA, 576 bp, Homo sapiens
  Payload ID: 6299
  Gene Symbol: FBLIM1
  Gene Name: filamin binding LIM protein 1
  ENST ID: ENST00000510393
  CDS Start-End: 343-576
atcgacacccgagctgctgcgggccaggacgaatccctccatccgggagcagtggtggcggtggaacaggtggcctggggtgctggaggccaacctggagaggtaggcagtggctacctccactttacagatgaagacactgaggctcaggaggtggcgtgactgctccgggtctcacgcttagtaaacggccgcagaaccctggtcggtttgacgcaagaccctggcggatcccagagccaaagtaagcgctcacctccgccggacaggagctggcctgaacctccaggacttcagcccttctaggagaatctgatcccagccacaccaggagctgaagccatggcctcaaagcctgagaagagggtggcatcgtctgtctttatcaccctggcacccccgcgccgcgatgtggccgtggcggaggaagtgaggcaggcagtttgtgaggcccggcgtggccgcccctgggaggctcctgcccccatgaagacacccgaggctggcttggcggggaggcccagcccctggacaacccctggcagagctgcagccacagtgccggctgcacctatg

SEQ ID NO: 134615 - DNA, 582 bp, Homo sapiens
  Payload ID: 6299
  Gene Symbol: FBLIM1
  Gene Name: filamin binding LIM protein 1
  ENST ID: ENST00000502638
  CDS Start-End: 490-582
agccgggccctgccttccagagctcctggagcggcctgtcccccgggacaccgggacccacctgcagagggcttaccgctcaggagagcagaacaaggccaacctggagaggtaggcagtggctacctccactttacagatgaagacactgaggctcaggaggtggcgtgactgctccgggtctcacgcttagtaaacggccgcagaaccctggtcggtttgacgcaagaccctggcggatcccagagccaaagtaagcgctcacctccgccggacaggagctggcctgaacctccaggacttcagcccttctaggagaatctgatcccaggtgagggaggtcacttggggtgtggcccagcaggcaggcgggactccagactgggaacggaagtcagccctgctggggctgggagctgaagcatctgttccttcctcgcgggtgtgagacaaggaagagtgatcattgccacaccaggagctgaagccatggcctcaaagcctgagaagagggtggcatcgtctgtctttatcaccctggcacccccgcgccgcgatgtggccgtggcggaggaagtgagg

SEQ ID NO: 134616 - DNA, 611 bp, Homo sapiens
  Payload ID: 6299
  Gene Symbol: FBLIM1
  Gene Name: filamin binding LIM protein 1
  ENST ID: ENST00000496928
  CDS Start-End: 522-611
gttgcaggaagtttggcacctgccgatcggtgacatcgacacccgagctgctgcgggccaggacgaatccctccatccgggagcagtggtggcggtggaacaggtggcctggggtgctggaggcaggccaacctggagaggtaggcagtggctacctccactttacagatgaagacactgaggctcaggaggtggcgtgactgctccgggtctcacgcttagtaaacggccgcagaaccctggtcggtttgacgcaagaccctggcggatcccagagccaaagtaagcgctcacctccgccggacaggcagagctggcctgaacctccaggacttcagcccttctaggagaatctgatcccaggtgagggaggtcacttggggtgtggcccagcaggcaggcgggactccagactgggaacggaagtcagccctgctggggctgggagctgaagcatctgttccttcctcgcgggtgtgagacaaggaagagtgatcattgccacaccaggagctgaagccatggcctcaaagcctgagaagagggtggcatcgtctgtctttatcaccctggcacccccgcgccgcgatgtggccgtggcggaggaagtg

SEQ ID NO: 134617 - DNA, 611 bp, Homo sapiens
  Payload ID: 6299
  Gene Symbol: FBLIM1
  Gene Name: filamin binding LIM protein 1
  ENST ID: ENST00000508310
  CDS Start-End: 509-611
gtttggcacctgccgatcggtgacatcgacacccgagctgctgcgggccaggacgaatccctccatccgggagcagtggtggcggtggaacaggtggcctggggtgctggaggcaggccaacctggagaggtaggcagtggctacctccactttacagatgaagacactgaggctcaggaggtggcgtgactgctccgggtctcacgcttagtaaacggccgcagaaccctggtcggtttgacgcaagaccctggcggatcccagagccaaagtaagcgctcacctccgccggacaggagctggcctgaacctccaggacttcagcccttctaggagaatctgatcccaggtgagggaggtcacttggggtgtggcccagcaggcaggcgggactccagactgggaacggaagtcagccctgctggggctgggagctgaagcatctgttccttcctcgcgggtgtgagacaaggaagagtgatcattgccacaccaggagctgaagccatggcctcaaagcctgagaagagggtggcatcgtctgtctttatcaccctggcacccccgcgccgcgatgtggccgtggcggaggaagtgaggcaggcagttt

SEQ ID NO: 134618 - DNA, 562 bp, Homo sapiens
  Payload ID: 6299
  Gene Symbol: FBLIM1
  Gene Name: filamin binding LIM protein 1
  ENST ID: ENST00000502739
  CDS Start-End: 129-562
ccgggctccgctggctcgggcgtcggatcggagccgccggggcgcgggcggcccagagctggcctgaacctccaggacttcagcccttctaggagaatctgatcccagccacaccaggagctgaagccatggcctcaaagcctgagaagagggtggcatcgtctgtctttatcaccctggcacccccgcgccgcgatgtggccgtggcggaggaagtgaggcaggcagtttgtgaggcccggcgtggccgcccctgggaggctcctgcccccatgaagacacccgaggctggcttggcggggaggcccagcccctggacaacccctggcagagctgcagccacagtgccggctgcacctatgcagctcttcaatggagacatctgtgccttctgccacaagaccgtgtccccccgagagctggctgtggaggccatgaagaggcagtaccatgcccagtgcttcacgtgccgcacctgccgccgccagctggctgggcagagcttctaccagaaggatgggcgacccctctgcgaaccctgctaccaggacacactggagag

SEQ ID NO: 134619 - DNA, 571 bp, Homo sapiens
  Payload ID: 6299
  Gene Symbol: FBLIM1
  Gene Name: filamin binding LIM protein 1
  ENST ID: ENST00000483633
  CDS Start-End: 138-571
ccagcggctccgggctccgctggctcgggcgtcggatcggagccgccggggcgcgggcggcccagagctggcctgaacctccaggacttcagcccttctaggagaatctgatcccagccacaccaggagctgaagccatggcctcaaagcctgagaagagggtggcatcgtctgtctttatcaccctggcacccccgcgccgcgatgtggccgtggcggaggaagtgaggcaggcagtttgtgaggcccggcgtggccgcccctgggaggctcctgcccccatgaagacacccgaggctggcttggcggggaggcccagcccctggacaacccctggcagagctgcagccacagtgccggctgcacctatgcagctcttcaatggaggatgcccaccccctcctcctgtcctggatggtgaggacgtgcttcctgacctggacctcctcccaccccctccaccgccccctccagtgcttctgccttctgaagaggaggctcctgctccaatgggggcctcactcattgcagacttagagcagctgcacctgtccccgcccccgcccccacc

SEQ ID NO: 134620 - DNA, 9188 bp, Homo sapiens
  Payload ID: 6300
  Gene Symbol: FLNC
  Gene Name: filamin C, gamma
  Uniprot ID: Q14315
  ENST ID: ENST00000325888
  CDS Start-End: 262-8439
ttcttaaaccccccgccccggcccagcccgcccttcccgagcaccgctccggccctggagggagagagagccagagagcggccgagcgcctaggaggcccgccgagcctcgccgagccccgccagccccggcgcgagagaagttggagaggagagcagcgcagcgcagcgagtcccgtggtcgcgccccaacagcgcccgacagcccccgatagcccaaaccgcggccctagccccggccgcacccccagcccgcgccagcatgatgaacaacagcggctactcagacgccggcctcggcctgggcgatgagacagacgagatgccgtccacggagaaggacctggcggaggacgcgccgtggaagaagatccagcagaacacattcacgcgctggtgcaatgagcacctcaagtgcgtgggcaagcgcctgaccgacctgcagcgcgacctcagcgacgggctccggctcatcgcgctgctcgaggtgctcagccagaagcgcatgtaccgcaagttccatccgcgccccaacttccgccaaatgaagctggagaacgtgtccgtggccctcgagttcctcgagcgcgagcacatcaagctcgtgtccatagacagcaaggccatcgtggatgggaacctgaagctgatcctgggcctgatctggacgctgatcctgcactactccatctccatgcccatgtgggaggatgaagatgatgaggatgcccgcaaacagacgcccaagcagcggctgcttggctggatccagaacaaggtgccccagctgcccatcaccaacttcaaccgtgactggcaggacggcaaagctctgggcgccctggtggacaactgcgcccccggtctctgccccgactgggaggcctgggaccccaaccagcccgtggagaacgcccgggaggccatgcagcaggccgacgactggcttggggtgccccaggtcattgcccctgaggagattgtggaccccaacgtggatgagcattctgttatgacctacctgtcccagttccccaaggccaagctcaaacctggtgcccctgttcgatccaagcagctgaaccccaagaaagccatcgcctatgggcctggcatcgagccacagggcaacaccgtgctgcagcctgcccacttcaccgtgcagacggtggacgcgggcgtgggcgaggtgctggtctacatcgaggaccctgaaggccacaccgaggaggctaaggtggttcccaacaatgacaaggatcgcacctatgctgtctcctatgtgcccaaggtcgctgggttacacaaggtgaccgtgctctttgctggccagaacattgaacgcagtccctttgaggtgaacgtgggcatggccctgggagatgccaacaaggtgtcagcccgtggccctggcctggaacctgtgggcaatgtggccaacaaacccacctactttgacatctacactgcgggggccggcactggcgatgttgctgtggtgatcgtggacccacagggccggcgggacacagtggaggtggccctggaggacaagggtgacagcacgttccgctgcacatacagacctgccatggaggggccacataccgtgcatgtggcctttgcgggtgcccccatcacccgcagtcccttccctgtccatgtgtcggaagcctgtaaccccaacgcctgccgcgcctctgggcgaggcctgcagcccaagggtgttcgcgtgaaagaggtggctgacttcaaggtgtttaccaagggtgccggcagcggggagctcaaggtcacggtcaaggggccaaagggcacagaggagccagtgaaggtgcgggaggctggggatggtgtgttcgagtgcgagtactacccggtggtgcctgggaagtatgtggtgaccatcacgtggggcggctacgccatccctcgcagcccctttgaggtacaggtgagcccagaggcaggagtgcaaaaggtccgggcctggggtcctggtttggagactggccaggtgggcaagtcagccgattttgtggtggaagccattggcaccgaggtggggacactgggcttctccatcgaggggccctcacaagccaagatcgaatgtgacgacaagggggatggctcctgcgatgtgcggtactggcccacggagcctggggagtacgctgtgcacgtcatctgtgacgatgaggacatccgagactcacccttcattgcccacatcctgcccgccccacctgactgcttcccagataaggtgaaggcctttgggcctggcctggagcctaccggctgcatcgtggacaagcccgctgagttcaccattgatgctcgtgcagctggcaagggagacctgaagctctatgcccaggacgccgacggctgtcccatcgacatcaaggtgatccccaacggcgacggcaccttccgctgctcctacgtgcccaccaagcccattaagcacaccatcatcatctcctggggaggcgtaaacgtgcccaagagccccttccgggtgaacgtgggcgagggcagccaccccgagcgggtaaaggtgtacggccccggagtggagaagacaggcctcaaggccaatgagcccacctacttcacggtggactgcagcgaggcggggcaaggcgacgtgagcatcggcatcaagtgcgccccaggcgtggtgggccctgcagaggctgacattgacttcgacatcatcaagaatgacaacgacaccttcaccgtcaagtacacgccaccaggggcgggccgctacaccatcatggtgctgtttgccaaccaggagatccccgccagccccttccacatcaaggtggacccatcccacgatgccagcaaagtcaaggccgagggccctgggctgaatcgcacaggtgtggaagtcgggaagcccacccacttcacggtgctgaccaagggagccggcaaggccaagctggatgtgcagtttgcagggacagccaagggcgaggttgtgcgggactttgagatcatagacaaccatgactactcctacactgtcaagtacaccgctgtccagcagggcaacatggcagtgacagtgacttatggcggggaccctgtccccaagagcccctttgtggtgaatgtggcacccccgctggacctcagcaaaatcaaagttcagggccttaatagcaaggtggctgtgggacaggaacaagcattctctgtgaacacacgaggggctggcggtcagggccaactggatgtgcggatgacttcgccctctcgccggcccatcccctgcaagctggagccaggcggtggagcggaagcccaggctgtgcgctacatgcccccggaggaggggccctacaaggtggatatcacctacgatggtcacccggtgcctggcagcccgtttgctgtggagggtgtcctgccccctgatccctccaaggtctgtgcttatggcccgggtctcaagggtggactggtaggcacccccgcgccattctccatcgacaccaagggggctggcacaggtggcctggggctgaccgtagagggcccctgcgaggccaagatcgagtgccaggacaatggtgatggctcatgtgctgtcagctacctgcccacggagcctggcgagtacaccatcaacatcctgtttgctgaggcccacatccctggctcgcccttcaaagccaccattcggcctgtgtttgacccgagcaaggtgcgggccagtggaccgggcctggagcgcggcaaggtcggtgaggcagccaccttcactgtggactgctcagaggcaggcgaggcggagctgaccattgagatcctgtcggatgccggggtcaaggccgaggtgctgatccacaacaacgcggatggcacctaccacatcacctacagccctgccttccctggcacctacaccattaccatcaagtatggcgggcatcccgtgcccaaattccccacccgtgtccatgtgcagcctgcggtcgataccagtggcgtcaaggtctcagggcctggtgttgagccacacggtgtcctgcgggaggtgaccactgagttcactgtggatgcaagatccctaacagccacaggcggcaaccacgtgacggctcgtgtgctcaacccctcgggggccaagacagacacctatgtgacagacaatggggacggcacctaccgagtgcagtacaccgcctacgaggagggcgtgcatctggtggaggtcctgtatgatgaggtcgctgtgcccaagagccccttccgagtgggcgtgaccgagggctgtgatcccacccgcgtccgagccttcgggccaggcctggagggtggcttggtcaacaaggccaaccgattcactgtggagaccaggggagcgggcaccgggggccttggcctagccatcgagggtccctcggaagccaagatgtcctgcaaggacaacaaggatggtagctgcaccgtggagtacatccccttcactcctggagactatgacgtcaacatcaccttcggggggcggcccatcccagggagcccgttccgcgtgccagtgaaggatgtggtggaccctgggaaggtgaagtgctcagggccagggctgggggctggtgtcagggcccgggttcctcagaccttcacagtggattgcagtcaagctggccgggcgcccctgcaggtggctgtgctgggccccacaggtgtggccgagcctgtggaggtgcgggacaatggagatggcacccacactgtccactacaccccagccactgacgggccctacacggtagccgtcaagtatgctgaccaggaggtgccacgcagccccttcaagatcaaggtcctcccagctcatgatgccagcaaggtgcgggccagcggcccaggcctcaacgcctctggcatccctgccagcctgcctgtggagttcaccatcgacgcacgggacgcgggcgaggggttgctcactgtccagatcttggaccccgagggtaagcccaagaaggccaacatccgggacaatggggatggcacgtacactgtgtcctacctgccggacatgagtggccggtacaccatcaccatcaagtatggcggtgatgagatcccctactcgcccttccgcatccatgctctgcccactggggatgccagcaagtgcctcgtcacagtgtccattggaggccatggcctgggtgcctgcctgggccctcgaatccagattgggcaggagacggtgatcacggtggatgccaaggcagccggtgaggggaaggtgacatgcacggtgtccacgccggatggggcagagctcgatgtggatgtggttgagaaccatgacggtacctttgacatctactacacagcgcccgagccgggcaagtacgtcatcaccatccgcttcgggggtgagcacatccccaacagccccttccacgtgctggcgtgtgaccccctgccgcacgaggaggagccctctgaagtgccacagctgcgccagccctacgctcctccccggcccggcgcccgccccacacactgggccacagaggagccagtggtgcctgtggagccaatggagtccatgctgaggcccttcaacctggtcatccccttcgcggtgcagaaaggggagctcacaggagaggtgcggatgccctcggggaagacggcacggcccaacatcaccgacaacaaggacggcaccatcacggtgaggtatgcacccactgagaaaggcctgcaccagatggggatcaagtatgacggcaaccacatccctgggagccccttacagttctatgtggatgccatcaacagccgccatgtcagtgcctatgggccaggcctgagccatggcatggtcaacaagccagccaccttcactattgtcaccaaagatgctggagaagggggtctgtcactggccgtggagggcccatccaaggcagagatcacctgtaaggacaacaaggatggcacctgcaccgtgtcctatctgccgactgcgcctggagactacagcatcatcgtgcgcttcgatgacaagcacatcccggggagccccttcacagccaagatcacaggtgatgactccatgaggacctcacagctgaatgtgggcacctccacggacgtgtcactgaagatcaccgagagtgatctgagccagctgaccgccagcatccgtgccccctcgggcaacgaggagccctgcctgctgaagcgcctgcccaaccggcacattgggatctccttcacccccaaggaggtcggggagcacgtggtgagcgtgcgcaagagtggcaagcatgtcaccaacagccccttcaagatcctggtggggccatctgagatcggggacgccagcaaggtgcgggtctggggcaaggggctttccgagggacacacattccaggtggcagagttcatcgtggacactcgcaatgcaggttatgggggcttggggctgagtattgaaggcccaagcaaggtggacatcaactgtgaggacatggaggacgggacatgcaaagtcacctactgccccaccgagcccggcacctacatcatcaacatcaagtttgctgacaagcacgtgcctggaagccccttcactgtgaaggtgaccggcgagggccgcatgaaggagagcatcacccggcggagacaggcaccttccatcgccaccatcggcagcacctgtgacctcaacctcaagatcccaggaaactggttccagatggtgtctgcccaggagcgcctgacacgcaccttcacacgcagcagccacacctacacccgcacggagcgcacggagatcagcaagacgcggggcggggagacaaagcgcgaggtgcgggtggaggagtccacccaggtcggcggggaccccttccctgctgtgtttggggacttcctgggccgggagcgcctgggatccttcggcagcatcacccggcagcaggagggtgaggccagctctcaggacatgactgcacaggtgaccagcccatcgggcaaggtggaagccgcagagatcgtcgagggcgaggacagcgcctacagcgtgcgctttgtgccccaggaaatggggccccatacggtcgctgtcaagtaccgtggccagcacgtgcccggcagcccctttcagttcactgtggggccgctgggtgaaggtggtgcccacaaggtgcgggccggaggcacagggctggagcgaggtgtggccggcgtgccagccgagttcagcatctggacccgggaggctggcgctgggggcctgtccattgctgtggagggtcctagcaaagcggagattgcatttgaggatcgcaaagatggctcctgcggcgtctcctatgtcgtccaggaaccaggtgactatgaggtctccatcaagttcaatgatgagcacatcccagacagcccctttgtggtgcctgtggcctccctctcggatgacgctcgccgtctcactgtcaccagcctccaggagacggggctcaaggtgaaccagccagcgtcctttgccgtgcagctgaacggtgcccggggcgtgattgatgcccgggtgcacacaccctcgggggctgtggaggagtgctacgtctctgagctggacagtgacaagcacaccatccgcttcatcccccacgagaatggcgtccactccatcgatgtcaagttcaacggtgcccacatccctggaagtcccttcaagatccgcgttggggagcagagccaggctggggacccaggcttggtgtcagcctacggtcctgggctcgagggaggcactaccggtgtgtcatcagagttcatcgtgaacaccctgaatgccggctcgggggccttgtctgtcaccattgatggcccctccaaggtgcagctggactgtcgggagtgtcctgagggccatgtggtcacttatactcccatggcccctggcaactacctcattgccatcaagtacggtggcccccagcacatcgtgggcagccccttcaaggccaaggtcactggtccgaggctgtccggaggccacagccttcacgaaacatccacggttctggtggagactgtgaccaagtcctcctcaagccggggctccagctacagctccatccccaagttctcctcagatgccagcaaggtggtgactcggggccctgggctgtcccaggccttcgtgggccagaagaactccttcaccgtggactgcagcaaagcaggcaccaacatgatgatggtgggcgtgcacggccccaagaccccctgtgaggaggtgtacgtgaagcacatggggaaccgggtgtacaatgtcacctacactgtcaaggagaaaggggactacatcctcattgtcaagtggggtgacgaaagtgtccctggaagccccttcaaagtcaaggtcccttgaatcccaaaagtgcctccccagcctcagcccccacctccagccacacacacattacacacacacacacacacacacaaatgtgccacacccagacacgcacagaatcagacactacaaacacctgccttgggggtgaagtgaaggcccagcctccccaccccaccgcgccccaggggttggaggaccttgtctgtgtcaggacagtgtccctccctgggaatgtgacatgagggccgactggggccaggctcaggggcagaggctgggacacaaggggctggcgagggctgcgaggccagggaagccctgagtttctggcggggctgagcagtgggggagcattgtgttgtgggtgtctgtgtgtgaggtcaccctcaaactgcaccgccggccagataccctcctgaccccgaggacttggtctggtctctctggtggctacaaccccagagttttaaggacttggaaaggaaagcacaatcagagaagaaaacagcccccgaaccagcaggagtggcctggcacatggaccggcctgagcgatgtgcactccacccaagccaggctcccagggggcctgatttctctctcactgtctctttttttaaaatggttgcacggctctgccccatggggggccttttttacacactgcgaggcccagctttctaggggacttttgcacatgtcatgcagctcagctgggagctgcttaggtggaaaactccaaataaagtgcggctgtcgca

SEQ ID NO: 134621 - DNA, 9042 bp, Homo sapiens
  Payload ID: 6300
  Gene Symbol: FLNC
  Gene Name: filamin C, gamma
  Uniprot ID: Q14315
  ENST ID: ENST00000346177
  CDS Start-End: 213-8291
cggccctggagggagagagagccagagagcggccgagcgcctaggaggcccgccgagcctcgccgagccccgccagccccggcgcgagagaagttggagaggagagcagcgcagcgcagcgagtcccgtggtcgcgccccaacagcgcccgacagcccccgatagcccaaaccgcggccctagccccggccgcacccccagcccgcgccagcatgatgaacaacagcggctactcagacgccggcctcggcctgggcgatgagacagacgagatgccgtccacggagaaggacctggcggaggacgcgccgtggaagaagatccagcagaacacattcacgcgctggtgcaatgagcacctcaagtgcgtgggcaagcgcctgaccgacctgcagcgcgacctcagcgacgggctccggctcatcgcgctgctcgaggtgctcagccagaagcgcatgtaccgcaagttccatccgcgccccaacttccgccaaatgaagctggagaacgtgtccgtggccctcgagttcctcgagcgcgagcacatcaagctcgtgtccatagacagcaaggccatcgtggatgggaacctgaagctgatcctgggcctgatctggacgctgatcctgcactactccatctccatgcccatgtgggaggatgaagatgatgaggatgcccgcaaacagacgcccaagcagcggctgcttggctggatccagaacaaggtgccccagctgcccatcaccaacttcaaccgtgactggcaggacggcaaagctctgggcgccctggtggacaactgcgcccccggtctctgccccgactgggaggcctgggaccccaaccagcccgtggagaacgcccgggaggccatgcagcaggccgacgactggcttggggtgccccaggtcattgcccctgaggagattgtggaccccaacgtggatgagcattctgttatgacctacctgtcccagttccccaaggccaagctcaaacctggtgcccctgttcgatccaagcagctgaaccccaagaaagccatcgcctatgggcctggcatcgagccacagggcaacaccgtgctgcagcctgcccacttcaccgtgcagacggtggacgcgggcgtgggcgaggtgctggtctacatcgaggaccctgaaggccacaccgaggaggctaaggtggttcccaacaatgacaaggatcgcacctatgctgtctcctatgtgcccaaggtcgctgggttacacaaggtgaccgtgctctttgctggccagaacattgaacgcagtccctttgaggtgaacgtgggcatggccctgggagatgccaacaaggtgtcagcccgtggccctggcctggaacctgtgggcaatgtggccaacaaacccacctactttgacatctacactgcgggggccggcactggcgatgttgctgtggtgatcgtggacccacagggccggcgggacacagtggaggtggccctggaggacaagggtgacagcacgttccgctgcacatacagacctgccatggaggggccacataccgtgcatgtggcctttgcgggtgcccccatcacccgcagtcccttccctgtccatgtgtcggaagcctgtaaccccaacgcctgccgcgcctctgggcgaggcctgcagcccaagggtgttcgcgtgaaagaggtggctgacttcaaggtgtttaccaagggtgccggcagcggggagctcaaggtcacggtcaaggggccaaagggcacagaggagccagtgaaggtgcgggaggctggggatggtgtgttcgagtgcgagtactacccggtggtgcctgggaagtatgtggtgaccatcacgtggggcggctacgccatccctcgcagcccctttgaggtacaggtgagcccagaggcaggagtgcaaaaggtccgggcctggggtcctggtttggagactggccaggtgggcaagtcagccgattttgtggtggaagccattggcaccgaggtggggacactgggcttctccatcgaggggccctcacaagccaagatcgaatgtgacgacaagggggatggctcctgcgatgtgcggtactggcccacggagcctggggagtacgctgtgcacgtcatctgtgacgatgaggacatccgagactcacccttcattgcccacatcctgcccgccccacctgactgcttcccagataaggtgaaggcctttgggcctggcctggagcctaccggctgcatcgtggacaagcccgctgagttcaccattgatgctcgtgcagctggcaagggagacctgaagctctatgcccaggacgccgacggctgtcccatcgacatcaaggtgatccccaacggcgacggcaccttccgctgctcctacgtgcccaccaagcccattaagcacaccatcatcatctcctggggaggcgtaaacgtgcccaagagccccttccgggtgaacgtgggcgagggcagccaccccgagcgggtaaaggtgtacggccccggagtggagaagacaggcctcaaggccaatgagcccacctacttcacggtggactgcagcgaggcggggcaaggcgacgtgagcatcggcatcaagtgcgccccaggcgtggtgggccctgcagaggctgacattgacttcgacatcatcaagaatgacaacgacaccttcaccgtcaagtacacgccaccaggggcgggccgctacaccatcatggtgctgtttgccaaccaggagatccccgccagccccttccacatcaaggtggacccatcccacgatgccagcaaagtcaaggccgagggccctgggctgaatcgcacaggtgtggaagtcgggaagcccacccacttcacggtgctgaccaagggagccggcaaggccaagctggatgtgcagtttgcagggacagccaagggcgaggttgtgcgggactttgagatcatagacaaccatgactactcctacactgtcaagtacaccgctgtccagcagggcaacatggcagtgacagtgacttatggcggggaccctgtccccaagagcccctttgtggtgaatgtggcacccccgctggacctcagcaaaatcaaagttcagggccttaatagcaaggtggctgtgggacaggaacaagcattctctgtgaacacacgaggggctggcggtcagggccaactggatgtgcggatgacttcgccctctcgccggcccatcccctgcaagctggagccaggcggtggagcggaagcccaggctgtgcgctacatgcccccggaggaggggccctacaaggtggatatcacctacgatggtcacccggtgcctggcagcccgtttgctgtggagggtgtcctgccccctgatccctccaaggtctgtgcttatggcccgggtctcaagggtggactggtaggcacccccgcgccattctccatcgacaccaagggggctggcacaggtggcctggggctgaccgtagagggcccctgcgaggccaagatcgagtgccaggacaatggtgatggctcatgtgctgtcagctacctgcccacggagcctggcgagtacaccatcaacatcctgtttgctgaggcccacatccctggctcgcccttcaaagccaccattcggcctgtgtttgacccgagcaaggtgcgggccagtggaccgggcctggagcgcggcaaggtcggtgaggcagccaccttcactgtggactgctcagaggcaggcgaggcggagctgaccattgagatcctgtcggatgccggggtcaaggccgaggtgctgatccacaacaacgcggatggcacctaccacatcacctacagccctgccttccctggcacctacaccattaccatcaagtatggcgggcatcccgtgcccaaattccccacccgtgtccatgtgcagcctgcggtcgataccagtggcgtcaaggtctcagggcctggtgttgagccacacggtgtcctgcgggaggtgaccactgagttcactgtggatgcaagatccctaacagccacaggcggcaaccacgtgacggctcgtgtgctcaacccctcgggggccaagacagacacctatgtgacagacaatggggacggcacctaccgagtgcagtacaccgcctacgaggagggcgtgcatctggtggaggtcctgtatgatgaggtcgctgtgcccaagagccccttccgagtgggcgtgaccgagggctgtgatcccacccgcgtccgagccttcgggccaggcctggagggtggcttggtcaacaaggccaaccgattcactgtggagaccaggggagcgggcaccgggggccttggcctagccatcgagggtccctcggaagccaagatgtcctgcaaggacaacaaggatggtagctgcaccgtggagtacatccccttcactcctggagactatgacgtcaacatcaccttcggggggcggcccatcccagggagcccgttccgcgtgccagtgaaggatgtggtggaccctgggaaggtgaagtgctcagggccagggctgggggctggtgtcagggcccgggttcctcagaccttcacagtggattgcagtcaagctggccgggcgcccctgcaggtggctgtgctgggccccacaggtgtggccgagcctgtggaggtgcgggacaatggagatggcacccacactgtccactacaccccagccactgacgggccctacacggtagccgtcaagtatgctgaccaggaggtgccacgcagccccttcaagatcaaggtcctcccagctcatgatgccagcaaggtgcgggccagcggcccaggcctcaacgcctctggcatccctgccagcctgcctgtggagttcaccatcgacgcacgggacgcgggcgaggggttgctcactgtccagatcttggaccccgagggtaagcccaagaaggccaacatccgggacaatggggatggcacgtacactgtgtcctacctgccggacatgagtggccggtacaccatcaccatcaagtatggcggtgatgagatcccctactcgcccttccgcatccatgctctgcccactggggatgccagcaagtgcctcgtcacagtgtccattggaggccatggcctgggtgcctgcctgggccctcgaatccagattgggcaggagacggtgatcacggtggatgccaaggcagccggtgaggggaaggtgacatgcacggtgtccacgccggatggggcagagctcgatgtggatgtggttgagaaccatgacggtacctttgacatctactacacagcgcccgagccgggcaagtacgtcatcaccatccgcttcgggggtgagcacatccccaacagccccttccacgtgctggccacagaggagccagtggtgcctgtggagccaatggagtccatgctgaggcccttcaacctggtcatccccttcgcggtgcagaaaggggagctcacaggagaggtgcggatgccctcggggaagacggcacggcccaacatcaccgacaacaaggacggcaccatcacggtgaggtatgcacccactgagaaaggcctgcaccagatggggatcaagtatgacggcaaccacatccctgggagccccttacagttctatgtggatgccatcaacagccgccatgtcagtgcctatgggccaggcctgagccatggcatggtcaacaagccagccaccttcactattgtcaccaaagatgctggagaagggggtctgtcactggccgtggagggcccatccaaggcagagatcacctgtaaggacaacaaggatggcacctgcaccgtgtcctatctgccgactgcgcctggagactacagcatcatcgtgcgcttcgatgacaagcacatcccggggagccccttcacagccaagatcacaggtgatgactccatgaggacctcacagctgaatgtgggcacctccacggacgtgtcactgaagatcaccgagagtgatctgagccagctgaccgccagcatccgtgccccctcgggcaacgaggagccctgcctgctgaagcgcctgcccaaccggcacattgggatctccttcacccccaaggaggtcggggagcacgtggtgagcgtgcgcaagagtggcaagcatgtcaccaacagccccttcaagatcctggtggggccatctgagatcggggacgccagcaaggtgcgggtctggggcaaggggctttccgagggacacacattccaggtggcagagttcatcgtggacactcgcaatgcaggttatgggggcttggggctgagtattgaaggcccaagcaaggtggacatcaactgtgaggacatggaggacgggacatgcaaagtcacctactgccccaccgagcccggcacctacatcatcaacatcaagtttgctgacaagcacgtgcctggaagccccttcactgtgaaggtgaccggcgagggccgcatgaaggagagcatcacccggcggagacaggcaccttccatcgccaccatcggcagcacctgtgacctcaacctcaagatcccaggaaactggttccagatggtgtctgcccaggagcgcctgacacgcaccttcacacgcagcagccacacctacacccgcacggagcgcacggagatcagcaagacgcggggcggggagacaaagcgcgaggtgcgggtggaggagtccacccaggtcggcggggaccccttccctgctgtgtttggggacttcctgggccgggagcgcctgggatccttcggcagcatcacccggcagcaggagggtgaggccagctctcaggacatgactgcacaggtgaccagcccatcgggcaaggtggaagccgcagagatcgtcgagggcgaggacagcgcctacagcgtgcgctttgtgccccaggaaatggggccccatacggtcgctgtcaagtaccgtggccagcacgtgcccggcagcccctttcagttcactgtggggccgctgggtgaaggtggtgcccacaaggtgcgggccggaggcacagggctggagcgaggtgtggccggcgtgccagccgagttcagcatctggacccgggaggctggcgctgggggcctgtccattgctgtggagggtcctagcaaagcggagattgcatttgaggatcgcaaagatggctcctgcggcgtctcctatgtcgtccaggaaccaggtgactatgaggtctccatcaagttcaatgatgagcacatcccagacagcccctttgtggtgcctgtggcctccctctcggatgacgctcgccgtctcactgtcaccagcctccaggagacggggctcaaggtgaaccagccagcgtcctttgccgtgcagctgaacggtgcccggggcgtgattgatgcccgggtgcacacaccctcgggggctgtggaggagtgctacgtctctgagctggacagtgacaagcacaccatccgcttcatcccccacgagaatggcgtccactccatcgatgtcaagttcaacggtgcccacatccctggaagtcccttcaagatccgcgttggggagcagagccaggctggggacccaggcttggtgtcagcctacggtcctgggctcgagggaggcactaccggtgtgtcatcagagttcatcgtgaacaccctgaatgccggctcgggggccttgtctgtcaccattgatggcccctccaaggtgcagctggactgtcgggagtgtcctgagggccatgtggtcacttatactcccatggcccctggcaactacctcattgccatcaagtacggtggcccccagcacatcgtgggcagccccttcaaggccaaggtcactggtccgaggctgtccggaggccacagccttcacgaaacatccacggttctggtggagactgtgaccaagtcctcctcaagccggggctccagctacagctccatccccaagttctcctcagatgccagcaaggtggtgactcggggccctgggctgtcccaggccttcgtgggccagaagaactccttcaccgtggactgcagcaaagcaggcaccaacatgatgatggtgggcgtgcacggccccaagaccccctgtgaggaggtgtacgtgaagcacatggggaaccgggtgtacaatgtcacctacactgtcaaggagaaaggggactacatcctcattgtcaagtggggtgacgaaagtgtccctggaagccccttcaaagtcaaggtcccttgaatcccaaaagtgcctccccagcctcagcccccacctccagccacacacacattacacacacacacacacacacacaaatgtgccacacccagacacgcacagaatcagacactacaaacacctgccttgggggtgaagtgaaggcccagcctccccaccccaccgcgccccaggggttggaggaccttgtctgtgtcaggacagtgtccctccctgggaatgtgacatgagggccgactggggccaggctcaggggcagaggctgggacacaaggggctggcgagggctgcgaggccagggaagccctgagtttctggcggggctgagcagtgggggagcattgtgttgtgggtgtctgtgtgtgaggtcaccctcaaactgcaccgccggccagataccctcctgaccccgaggacttggtctggtctctctggtggctacaaccccagagttttaaggacttggaaaggaaagcacaatcagagaagaaaacagcccccgaaccagcaggagtggcctggcacatggaccggcctgagcgatgtgcactccacccaagccaggctcccagggggcctgatttctctctcactgtctctttttttaaaatggttgcacggctctgccccatggggggccttttttacacactgcgaggcccagctttctaggggacttttgcacatgtcatgcagctcagctgggagctgcttaggtggaaaactccaaataaagtgcggctgtcgcaga

SEQ ID NO: 134622 - DNA, 1938 bp, Homo sapiens
  Payload ID: 6301
  Gene Symbol: FIBIN
  Gene Name: fin bud initiation factor homolog (zebrafish)
  Uniprot ID: Q8TAL6
  ENST ID: ENST00000318627
  CDS Start-End: 344-979
tcccgggagcaaggggaaactccgagaggagggcaacagagccagcatcttgccagggccccggaggaggggttccccgctacgcctgtgccggaggagttccagtcaccgagcgaggggcgcaagggtgggtgcatcctgcgctgcggcgggcgcgctacccagacgctggtgtgcagagccacatgaagcctgctggggactgggggccagggagcagcaagccagctgggactgaggcggacgctgtctcagggagacgctgactcgcaaagacactcccttccttgtgcctgggtaaaaagtctcctcctggggtccctggccatcctgaatatccagaatggtgtttctgaagttcttctgcatgagtttcttctgccacctgtgtcaaggctacttcgatggccccctctacccagagatgtccaatgggactctgcaccactacttcgtgcccgatggggactatgaggagaacgatgaccccgagaagtgccagctgctcttcagggtgagtgaccacaggcgctgctcccagggggaggggagccaggttggcagcctgctgagcctcaccctgcgggaggagttcaccgtgctgggccgccaggtggaggatgctgggcgcgtgctggagggcatcagcaaaagcatctcctacgacctagacggggaagagagctatggcaagtacctgcggcgggagtcccaccagatcggggatgcctactccaactcggacaaatccctcactgagctggagagcaagttcaagcagggccaggaacaggacagccggcaggagagcaggctcaacgaggactttctgggaatgctggtccacaccaggtccctgctgaaggagacactggacatctctgtggggctcagggacaaatacgagctgctggccctcaccattaggagccatgggacccgactaggtcggctgaaaaatgattatcttaaagtataggtggaaggatacaaatgctagaaagagggaatcaaatcagccccgttttggagggtgggggacagaagatggggctacatttcccccatacctactatttttttatatcccgatttgcactttgagaatacatctaaggtcatctttcaaaagagaaaaattggacacttgagtgactttgtttttagttttgtttttgtacattatttatgtgattgttatggaattgtcacctggaaagaacaattttaagcaatgtcatttctagatgggtttctaattctgcagagacacccgtttcagccacatctaaaagagcacagtttatgtggtgcggaattaaacttccccatcctgcagattatgtggaaatacccaaagataatagtgcatagctcctttcagcctctagccttcactcctgggctccaaaagctatcccagttgcctgtttttcaaatgaggttcaaggtgctgctttgcatgcctgccaacccatggaagttgtttcttacttcttttctctcttatttattaaccatggtctgagagttgtttttgttctatgtaacagtattgccacaaaactataggcaaatcgtgtttgcagggagatttctgatgcctctgtgggtgtgtgtaagttaaagtggccacatttaagaaggccaagctttgtagtggttgcacagtcacactgatatgctgatttgctctttctcattgtatgtctatgctttgtcatcagtgctatagtaaattacaaagaaataggtagattgtatgaacatacccacaaatgcctatgatttaggttaccaatgtattctttctcatttggggttttgcttctgtctgtctgtttattggaaacttgtacttcaagtagggggaatcctaattctaataactccttagctaagttttattattcaggcaataaacatgttttcatgtaa

SEQ ID NO: 134623 - DNA, 461 bp, Homo sapiens
  Payload ID: 6302
  Gene Symbol: FAU
  Gene Name: Finkel-Biskis-Reilly murine sarcoma virus (FBR-MuSV) ubiquitously expressed
  ENST ID: ENST00000279259
  CDS Start-End: 73-336
gacgcgccctcgcttcttcctctttctcgactccatcttcgcggtagctgggaccgccgttcagtcgccaatatgcagctctttgtccgcgcccaggagctacacaccttcgaggtgaccggccaggaaacggtcgcccagatcaaggctcatgtagcctcactggagggcattgccccggaagatcaagtcgtgctcctggcaggcgcgcccctggaggatgaggccactctgggccagtgcggggtggaggccctgactaccctggaagtagcaggccgcatgcttggaggtggccaaacaggagaagaagaagaagaagacaggtcgggctaagcggcggatgcagtacaaccggcgctttgtcaacgttgtgcccacctttggcaagaagaagggccccaatgccaactcttaagtcttttgtaattctggctttctctaataaaaaagccacttag

SEQ ID NO: 134624 - DNA, 533 bp, Homo sapiens
  Payload ID: 6302
  Gene Symbol: FAU
  Gene Name: Finkel-Biskis-Reilly murine sarcoma virus (FBR-MuSV) ubiquitously expressed
  ENST ID: ENST00000434372
  CDS Start-End: 97-324
gacacgcagcccacggtctgtactgacgcgccctcgcttcttcctctttctcgactccatcttcgcggtagctgggaccgccgttcagtcgccaatatgcagctctttgtccgcgcccaggagctacacaccttcgaggtgaccggccaggaaacggtcgcccagatcaaggctcatgtagcctcactggagggcattgccccggaagatcaagtcgtgctcctggcaggcgcgcccctggaggatgaggccactctgggccagtgcggggtggaggccctgactaccctggaagtagcaggccgcatgcttggaggtgagtgagagaggaatgttctttgaagtaccggtaagcgtctagtgagtgtggggtgcatagtcctgacagctgagtgtcacacctatggtaatagagtacttctcactgtcttcagttcagagtgattcttcctgtttacatccctcatgttgaacacagacgtccatgggagactgagccagagtgtagttgtatttcagtcacatcacgagat

SEQ ID NO: 134625 - DNA, 697 bp, Homo sapiens
  Payload ID: 6302
  Gene Symbol: FAU
  Gene Name: Finkel-Biskis-Reilly murine sarcoma virus (FBR-MuSV) ubiquitously expressed
  Uniprot ID: P62861
  ENST ID: ENST00000531743
  CDS Start-End: 245-646
cttgtagcaggttggctgcggggtcagaaggcgcggggggaaccgaagaacggggcctgctccgtggccctgctccagtccctatccgaactccttgggaggcctggccttccccacgtgagccgccgcgaccaccatcccgtcgcgatcgtttctggaccgctttccactcccaaatctcctttatcccagagcatttcttggcttctcttacaagccgtcttttctttactcagtcgccaatatgcagctctttgtccgcgcccaggagctacacaccttcgaggtgaccggccaggaaacggtcgcccagatcaaggctcatgtagcctcactggagggcattgccccggaagatcaagtcgtgctcctggcaggcgcgcccctggaggatgaggccactctgggccagtgcggggtggaggccctgactaccctggaagtagcaggccgcatgcttggaggtaaagtccatggttccctggcccgtgctggaaaagtgagaggtcagactcctaaggtggccaaacaggagaagaagaagaagaagacaggtcgggctaagcggcggatgcagtacaaccggcgctttgtcaacgttgtgcccacctttggcaagaagaagggccccaatgccaactcttaagtcttttgtaattctggctttctctaataaaaaagccacttagttcagtca

SEQ ID NO: 134626 - DNA, 507 bp, Homo sapiens
  Payload ID: 6302
  Gene Symbol: FAU
  Gene Name: Finkel-Biskis-Reilly murine sarcoma virus (FBR-MuSV) ubiquitously expressed
  ENST ID: ENST00000526555
  CDS Start-End: 182-507
gcggtagctgggaccgccgttcaggtaagaatggggccttggctggatccgaagggcttgtagcaggttggctgcggggtcagaaggcgcggggggaaccgaagaacggggcctgctccgtggccctgctccagtccctatccgaactccttgggaggcctggccttccccactcgccaatatgcagctctttgtccgcgcccaggagctacacaccttcgaggtgaccggccaggaaacggtcgcccagatcaaggctcatgtagcctcactggagggcattgccccggaagatcaagtcgtgctcctggcaggcgcgcccctggaggatgaggccactctgggccagtgcggggtggaggccctgactaccctggaagtagcaggccgcatgcttggaggtaaagtccatggttccctggcccgtgctggaaaagtgagaggtcagactcctaaggtggccaaacaggagaagaagaagaagaagacaggtcgggctaagcggcg

SEQ ID NO: 134627 - DNA, 538 bp, Homo sapiens
  Payload ID: 6302
  Gene Symbol: FAU
  Gene Name: Finkel-Biskis-Reilly murine sarcoma virus (FBR-MuSV) ubiquitously expressed
  Uniprot ID: P62861
  ENST ID: ENST00000527548
  CDS Start-End: 87-488
gcggtagctgggaccgccgttcaggtaagaatggggccttggctggatccgaagggcttgtagcaggttggctgcgggtcgccaatatgcagctctttgtccgcgcccaggagctacacaccttcgaggtgaccggccaggaaacggtcgcccagatcaaggctcatgtagcctcactggagggcattgccccggaagatcaagtcgtgctcctggcaggcgcgcccctggaggatgaggccactctgggccagtgcggggtggaggccctgactaccctggaagtagcaggccgcatgcttggaggtaaagtccatggttccctggcccgtgctggaaaagtgagaggtcagactcctaaggtggccaaacaggagaagaagaagaagaagacaggtcgggctaagcggcggatgcagtacaaccggcgctttgtcaacgttgtgcccacctttggcaagaagaagggccccaatgccaactcttaagtcttttgtaattctggctttctctaataaaaaagccacttagttcagtc

SEQ ID NO: 134628 - DNA, 1125 bp, Homo sapiens
  Payload ID: 6302
  Gene Symbol: FAU
  Gene Name: Finkel-Biskis-Reilly murine sarcoma virus (FBR-MuSV) ubiquitously expressed
  ENST ID: ENST00000529259
  CDS Start-End: 103-330
tcgcgatcgtttctggaccgctttccactcccaaatctcctttatcccagagcatttcttggcttctcttacaagccgtcttttctttactcagtcgccaatatgcagctctttgtccgcgcccaggagctacacaccttcgaggtgaccggccaggaaacggtcgcccagatcaaggctcatgtagcctcactggagggcattgccccggaagatcaagtcgtgctcctggcaggcgcgcccctggaggatgaggccactctgggccagtgcggggtggaggccctgactaccctggaagtagcaggccgcatgcttggaggtgagtgagagaggaatgttctttgaagtaccggtaagcgtctagtgagtgtggggtgcatagtcctgacagctgagtgtcacacctatggtaatagagtacttctcactgtcttcagttcagagtgattcttcctgtttacatccctcatgttgaacacagacgtccatgggagactgagccagagtgtagttgtatttcagtcacatcacgagatcctagtctggttatcagcttccacactaaaattaggtcagaccagggcccccaaagtgctctataaaattagaagctggaagatcctgaaatgaaacttaagatttcaaggtcaaatatctgcaactttgttctcattacctattgggcgcagcttctctttaaaggcttgaattgagaaaagaggggttctgctgggtggcaccttcttgctcttacctgctggtgccttcctttcccactacaggtaaagtccatggttccctggcccgtgctggaaaagtgagaggtcagactcctaaggtgagtgagagtattagtggtcatggtgttaggactttttttcctttcacagctaaaccaagtccctgggctcttactcggtttgccttctccctccctggagatgagcctgagggaagggatgctaggtgtggaagacaggaaccagggcctgattaaccttcccttctccaggtggccaaacaggagaagaagaagaagaagacaggtcgggctaagcggcggatgcagtacaaccggcgctttgtcaacgttgtgcccacctttggcaagaagaagggccc

SEQ ID NO: 134629 - DNA, 847 bp, Homo sapiens
  Payload ID: 6302
  Gene Symbol: FAU
  Gene Name: Finkel-Biskis-Reilly murine sarcoma virus (FBR-MuSV) ubiquitously expressed
  Uniprot ID: P62861
  ENST ID: ENST00000529639
  CDS Start-End: 393-794
gagcctcacacccacgcgatgccctcagctcctcgctcagcgctctcaccaacagccgtagcccgcagccccgctggacaccggttctccatccccgcagcgtagcccggaacatggtagctgccatctttacctgctacgccagccttctgtgcgcgcaactgtctggtcccgccccgtcctgcgcgagctgcctgcccaggcaggttcgccggtgcgagcgtaaaggggcggagctaggactgccttgggcggtacaaatagcagggaaccgcgcggtcgctcagcagtgacgtgacacgcagcccacggtctgtactgacgcgccctcgcttcttcctctttctcgactccatcttcgcggtagctgggaccgccgttcagtcgccaatatgcagctctttgtccgcgcccaggagctacacaccttcgaggtgaccggccaggaaacggtcgcccagatcaaggctcatgtagcctcactggagggcattgccccggaagatcaagtcgtgctcctggcaggcgcgcccctggaggatgaggccactctgggccagtgcggggtggaggccctgactaccctggaagtagcaggccgcatgcttggaggtaaagtccatggttccctggcccgtgctggaaaagtgagaggtcagactcctaaggtggccaaacaggagaagaagaagaagaagacaggtcgggctaagcggcggatgcagtacaaccggcgctttgtcaacgttgtgcccacctttggcaagaagaagggccccaatgccaactcttaagtcttttgtaattctggctttctctaataaaaaagccacttagttcagtcatc

SEQ ID NO: 134630 - DNA, 355 bp, Homo sapiens
  Payload ID: 6302
  Gene Symbol: FAU
  Gene Name: Finkel-Biskis-Reilly murine sarcoma virus (FBR-MuSV) ubiquitously expressed
  ENST ID: ENST00000525297
  CDS Start-End: 9-305
tcgccaatatgcagctctttgtccgcgcccaggagctacacaccttcgaggtgaccggccaggaaacggtcgcccagatcaaggccctgactaccctggaagtagcaggccgcatgcttggaggtaaagtccatggttccctggcccgtgctggaaaagtgagaggtcagactcctaaggtggccaaacaggagaagaagaagaagaagacaggtcgggctaagcggcggatgcagtacaaccggcgctttgtcaacgttgtgcccacctttggcaagaagaagggccccaatgccaactcttaagtcttttgtaattctggctttctctaataaaaaagccacttagttcagtc

SEQ ID NO: 134631 - DNA, 734 bp, Homo sapiens
  Payload ID: 6303
  Gene Symbol: FIS1
  Gene Name: fission, mitochondrial 1
  Uniprot ID: Q9Y3D6
  ENST ID: ENST00000223136
  CDS Start-End: 82-540
agtggttctccgcccctgccactgggccatggagactgtggcacagtagactgtagtgtgaggctcgcgggggcagtggccatggaggccgtgctgaacgagctggtgtctgtggaggacctgctgaagtttgaaaagaaatttcagtctgagaaggcagcaggctcggtgtccaagagcacgcagtttgagtacgcctggtgcctggtgcggagcaagtacaatgatgacatccgtaaaggcatcgtgctgctcgaggagctgctgcccaaagggagcaaggaggaacagcgggattacgtcttctacctggccgtggggaactaccggctcaaggaatacgagaaggccttaaagtacgtccgcgggttgctgcagacagagccccagaacaaccaggccaaggaactggagcggctcattgacaaggccatgaagaaagatggactcgtgggcatggccatcgtgggaggcatggccctgggtgtggcgggactggccggactcatcggacttgctgtgtccaagtccaaatcctgaaggagacgcgggagcccacggagaacgctccaggagggcctgtccatcctcgctgtcctttccctgttctccccctgccccccgtctctatcctctgtggccttcagctaatttctgctcccctgagattcgtccttcagccccatcatgtgctttgggatgagtgtaaataaaacggggctgtggcttgggaa

SEQ ID NO: 134632 - DNA, 631 bp, Homo sapiens
  Payload ID: 6303
  Gene Symbol: FIS1
  Gene Name: fission, mitochondrial 1
  ENST ID: ENST00000442303
  CDS Start-End: 45-317
gtggcacagtagactgtagtgtgaggctcgcgggggcagtggccatggaggccgtgctgaacgagctggtgtctgtggaggacctgctggtgaggcctggcccggacagagggaaagggaaggtcggagggcgggtcctgaggagagtcagagctgctgcccaaagggagcaaggaggaacagcgggattacgtcttctacctggccgtggggaactaccggctcaaggaatacgagaaggccttaaagtacgtccgcgggttgctgcagacagagccccagaacaaccaggccaaggaactggagcggctcattgacaaggccatgaagaaagatggactcgtgggcatggccatcgtgggaggcatggccctgggtgtggcgggactggccggactcatcggacttgctgtgtccaagtccaaatcctgaaggagacgcgggagcccacggagaacgctccaggagggcctgtccatcctcgctgtcctttccctgttctccccctgccccccgtctctatcctctgtggccttcagctaatttctgctcccctgagattcgtccttcagccccatcatgtgctttgggatgagtgtaaataaaacggggctgtggcttgggaaccccc

SEQ ID NO: 134633 - DNA, 745 bp, Homo sapiens
  Payload ID: 6303
  Gene Symbol: FIS1
  Gene Name: fission, mitochondrial 1
  ENST ID: ENST00000449367
  CDS Start-End: 72-212
cgcccctgccactgggccatggagactgtggcacagtagactgtagtgtgaggctcgcgggggcagtggccatggaggccgtgctgaacgagctggtgtctgtggaggacctgctgagctgctgcccaaagggagcaaggaggaacagcgggattacgtcttctacctggccgtggggaactaccggctcaaggaatacgagaaggccttaaagtacgtccgcgggttgctgcagacagagccccagaacaaccaggccaaggaactggagcggctcattgacaaggccatgaagaaagatggactcgtgggcatggccatcgtgggaggcatggccctgggtgtggcgggactggccggactcatcggacttgctgtgtccaagtccaaatcctgaaggagacgcgggagcccacggagaacgctccaggagggcctgtccatcctcgctgtcctttccctgttctccccctgccccccgtctctatcctctgtggccttcagctaatttctgctcccctgagattcgtccttcagccccatcatgtgctttgggatgagtgtaaataaaacggggctgtggcttgggaacccccgtgtctgcgttgaggggaggggtgggttctgaacgctgggcacagggggcggagacgtcactcctggtcctctcctgcccctgccctccaggttggcacggggttctttgtccaccccgcagcccagagcccacacccttccttcctcc

SEQ ID NO: 134634 - DNA, 692 bp, Homo sapiens
  Payload ID: 6303
  Gene Symbol: FIS1
  Gene Name: fission, mitochondrial 1
  ENST ID: ENST00000435848
  CDS Start-End: 226-692
tccaaggtacaggatgccgcgcctcctaggagccgaagggacgggaggccgcgtagaggaggggaccgtccccgagcctcgccgagcctgcggtgtagacacctctggtgtctagtggttgaggatctgttgaccgggcatggtgggtagaaggaacgctccgagcagaagaaaagtggctgtcgtgaagacatctgcgtgtgcggggtgcgtgggtgcctggagatgaagctggaaagaagtttgaaaagaaatttcagtctgagaaggcagcaggctcggtgtccaagagcacgcagtttgagtacgcctggtgcctggtgcggagcaagtacaatgatgacatccgtaaaggcatcgtgctgctcgaggagctgctgcccaaagggagcaaggaggaacagcgggattacgtcttctacctggccgtggggaactaccggctcaagatggactcgtgggcatggccatcgtgggaggcatggccctgggtgtggcgggactggccggactcatcggacttgctgtgtccaagtccaaatcctgaaggagacgcgggagcccacggagaacgctccaggagggcctgtccatcctcgctgtcctttccctgttctccccctgccccccgtctctatcctctgtggccttcagctaatttctgctcccctgagattcgtccttcagcccca

SEQ ID NO: 134635 - DNA, 915 bp, Homo sapiens
  Payload ID: 6303
  Gene Symbol: FIS1
  Gene Name: fission, mitochondrial 1
  ENST ID: ENST00000474120
  CDS Start-End: 409-588
aacgaaaccgacacccggaagcctagtcgcccggaggttctgagcgttctgttcggacctcctaccgttactctttcattcactcaagaaatgatttcttgagttcccggcctttgtcagagagatgaacgaggcacggtccgtgtccagctaaaggacagtaggactggaagagcgttgttttccaaggtacaggatgccgcgcctcctaggagccgaagggacgggaggccgcgtagaggaggggaccgtccccgagcctcgccgagcctgcggtgtagacacctctggtgtctagtggttgaggatctgttgaccgggcatggtgggtagaaggaacgctccgagcagaagaaaagtggctgtcgtgaagacatctgcgtgtgcggggtgcgtgggtgcctggagatgaagctggaaagagctgctgcccaaagggagcaaggaggaacagcgggattacgtcttctacctggccgtggggaactaccggctcaaggaatacgagaaggccttaaagtacgtccgcgggttgctgcagacagagccccagaacaaccaggccaaggaactggagcggctcattgacaaggccatgaagaaagatggactcgtgggcatggccatcgtgggaggcatggccctgggtgtggcgggactggccggactcatcggacttgctgtgtccaagtccaaatcctgaaggagacgcgggagcccacggagaacgctccaggagggcctgtccatcctcgctgtcctttccctgttctccccctgccccccgtctctatcctctgtggccttcagctaatttctgctcccctgagattcgtccttcagccccatcatgtgctttgggatgagtgtaaataaaacggggctgtggcttgggaacccccgtgtctgcgttga

SEQ ID NO: 134636 - DNA, 1005 bp, Homo sapiens
  Payload ID: 6303
  Gene Symbol: FIS1
  Gene Name: fission, mitochondrial 1
  ENST ID: ENST00000473527
  CDS Start-End: 384-626
gtcgcccggaggttctgagcgttctgttcggacctcctaccgttactctttcattcactcaagaaatgatttcttgagttcccggcctttgtcagagagatgaacgaggcacggtccgtgtccagctaaaggacagtaggactggaagagcgttgttttccaaggtacaggatgccgcgcctcctaggagccgaagggacgggaggccgcgtagaggaggggaccgtccccgagcctcgccgagcctgcggtgtagacacctctggtgtctagtggttgaggatctgttgaccgggcatggtgggtagaaggaacgctccgagcagaagaaaagtggctgtcgtgaagacatctgcgtgtgcggggtgcgtgggtgcctggagatgaagctggaaagaagtttgaaaagaaatttcagtctgagaaggcagcaggctcggtgtccaagagcacgcagtttgagtacgcctggtgcctggtgcggagcaagtacaatgatgacatccgtaaaggcatcgtgctgctcgaggagctgctgcccaaagggagcaaggaggaacagcgggattacgtcttctacctggccgtggggaactaccggctcaaggaatacgagaaggccttaaagtacgtccgcgggttgctgcagacagagccccagaacaaccaggccaaggaactggagcggctcattgacaaggccatgaagaaagatggactcgtgggcatggccatcgtgggaggcatggccctgggtgtggcgggactggccggactcatcggacttgctgtgtccaagtccaaatcctgaaggagacgcgggagcccacggagaacgctccaggagggcctgtccatcctcgctgtcctttccctgttctccccctgccccccgtctctatcctctgtggccttcagctaatttctgctcccctgagattcgtccttcagccccatcatgtgctttgggatgagtgtaaataaaacggggctgtggcttgggaa

SEQ ID NO: 134637 - DNA, 1215 bp, Homo sapiens
  Payload ID: 6304
  Gene Symbol: FZR1
  Gene Name: fizzy/cell division cycle 20 related 1
  Uniprot ID: Q9UM11
  ENST ID: ENST00000313639
  CDS Start-End: 1-1215
atggaccaggactatgagcggcgcctgcttcgccagatcgtcatccagaatgagaacacgatgccacgcgtcacagagatgcggcggaccctgacgcctgccagctccccagtgtcctcgcccagcaagcacggagaccgcttcatcccctccagagccggagccaactggagcgtgaacttccacaggattaacgagaatgagaagtctcccagtcagaaccggaaagccaaggacgccacctcagacaacggcaaagacggcctggcctactctgccctgctcaagaatgagctgctgggtgccggcatcgagaaggtgcaggacccgcagactgaggaccgcaggctgcagccctccacgcctgagaagaagggtctgttcacggtgacgcggctctgtgacctctcagtggaaggggactcagtgacctccgtgggctggtctgagcgggggaacctggtggcggtgggcacacacaagggcttcgtgcagatctgggacgcagccgcagggaagaagctgtccatgttggagggccacacggcacgcgtcggggcgctggcctggaatgctgagcagctgtcgtccgggagccgcgaccgcatgatcctgcagagggacatccgcaccccgccactgcagtcggagcggcggctgcagggccaccggcaggaggtgtgcgggctcaagtggtccacagaccaccagctcctcgcctcggggggcaacgacaacaagctgctggtctggaatcactcgagcctgagccccgtgcagcagtacacggagcacctggcggccgtgaaggccatcgcctggtccccacatcagcacgggctgctggcctcggggggcggcacagctgaccgctgtatccgcttctggaacacgctgacaggacaaccactgcagtgtatcgacacgggctcccaagtgtgcaatctggcctggtccaagcacgccaacgagctggtgagcacgcacggctactcacagaaccagatccttgtctggaagtacccctccctgacccaggtggccaagctgaccgggcactcctaccgcgtgctgtacctggcaatgtcccctgatggggaggccatcgtcactggtgctggagacgagaccctgaggttctggaacgtctttagcaaaacccgttcgacaaaggagtctgtgtctgtgctcaacctcttcaccaggatccggtaa

SEQ ID NO: 134638 - DNA, 1491 bp, Homo sapiens
  Payload ID: 6304
  Gene Symbol: FZR1
  Gene Name: fizzy/cell division cycle 20 related 1
  Uniprot ID: Q9UM11
  ENST ID: ENST00000395095
  CDS Start-End: 1-1491
atggaccaggactatgagcggcgcctgcttcgccagatcgtcatccagaatgagaacacgatgccacgcgtcacagagatgcggcggaccctgacgcctgccagctccccagtgtcctcgcccagcaagcacggagaccgcttcatcccctccagagccggagccaactggagcgtgaacttccacaggattaacgagaatgagaagtctcccagtcagaaccggaaagccaaggacgccacctcagacaacggcaaagacggcctggcctactctgccctgctcaagaatgagctgctgggtgccggcatcgagaaggtgcaggacccgcagactgaggaccgcaggctgcagccctccacgcctgagaagaagggtctgttcacgtattcccttagcaccaagcgctccagccccgatgacggcaacgatgtgtctccctactccctgtctcccgtcagcaacaagagccagaagctgctccggtccccccggaaacccacccgcaagatctccaagatccccttcaaggtgctggacgcgcccgagctgcaggacgacttctacctcaatctggtggactggtcgtccctcaatgtgctcagcgtggggctaggcacctgcgtgtacctgtggagtgcctgtaccagccaggtgacgcggctctgtgacctctcagtggaaggggactcagtgacctccgtgggctggtctgagcgggggaacctggtggcggtgggcacacacaagggcttcgtgcagatctgggacgcagccgcagggaagaagctgtccatgttggagggccacacggcacgcgtcggggcgctggcctggaatgctgagcagctgtcgtccgggagccgcgaccgcatgatcctgcagagggacatccgcaccccgccactgcagtcggagcggcggctgcagggccaccggcaggaggtgtgcgggctcaagtggtccacagaccaccagctcctcgcctcggggggcaacgacaacaagctgctggtctggaatcactcgagcctgagccccgtgcagcagtacacggagcacctggcggccgtgaaggccatcgcctggtccccacatcagcacgggctgctggcctcggggggcggcacagctgaccgctgtatccgcttctggaacacgctgacaggacaaccactgcagtgtatcgacacgggctcccaagtgtgcaatctggcctggtccaagcacgccaacgagctggtgagcacgcacggctactcacagaaccagatccttgtctggaagtacccctccctgacccaggtggccaagctgaccgggcactcctaccgcgtgctgtacctggcaatgtcccctgatggggaggccatcgtcactggtgctggagacgagaccctgaggttctggaacgtctttagcaaaacccgttcgacaaaggtaaagtgggagtctgtgtctgtgctcaacctcttcaccaggatccggtaa

SEQ ID NO: 134639 - DNA, 5212 bp, Homo sapiens
  Payload ID: 6304
  Gene Symbol: FZR1
  Gene Name: fizzy/cell division cycle 20 related 1
  Uniprot ID: Q9UM11
  ENST ID: ENST00000441788
  CDS Start-End: 237-1718
ggccgggcgcgcgcggcggagggagggagccgggaggcagcggaggagcgaccgccgccatattagggaccgcggagcccgggatcccgtcagcggcggccgcggccgggcctgcgggagctgcggaggccggaggcgggcgctgtgcggtgccaggagaggcggggtcggcgggagccagcgagccacgggagcgagccaggctaaccttgccgcgggccgagccctgcctcgccatggaccaggactatgagcggcgcctgcttcgccagatcgtcatccagaatgagaacacgatgccacgcgtcacagagatgcggcggaccctgacgcctgccagctccccagtgtcctcgcccagcaagcacggagaccgcttcatcccctccagagccggagccaactggagcgtgaacttccacaggattaacgagaatgagaagtctcccagtcagaaccggaaagccaaggacgccacctcagacaacggcaaagacggcctggcctactctgccctgctcaagaatgagctgctgggtgccggcatcgagaaggtgcaggacccgcagactgaggaccgcaggctgcagccctccacgcctgagaagaagggtctgttcacgtattcccttagcaccaagcgctccagccccgatgacggcaacgatgtgtctccctactccctgtctcccgtcagcaacaagagccagaagctgctccggtccccccggaaacccacccgcaagatctccaagatccccttcaaggtgctggacgcgcccgagctgcaggacgacttctacctcaatctggtggactggtcgtccctcaatgtgctcagcgtggggctaggcacctgcgtgtacctgtggagtgcctgtaccagccaggtgacgcggctctgtgacctctcagtggaaggggactcagtgacctccgtgggctggtctgagcgggggaacctggtggcggtgggcacacacaagggcttcgtgcagatctgggacgcagccgcagggaagaagctgtccatgttggagggccacacggcacgcgtcggggcgctggcctggaatgctgagcagctgtcgtccgggagccgcgaccgcatgatcctgcagagggacatccgcaccccgccactgcagtcggagcggcggctgcagggccaccggcaggaggtgtgcgggctcaagtggtccacagaccaccagctcctcgcctcggggggcaacgacaacaagctgctggtctggaatcactcgagcctgagccccgtgcagcagtacacggagcacctggcggccgtgaaggccatcgcctggtccccacatcagcacgggctgctggcctcggggggcggcacagctgaccgctgtatccgcttctggaacacgctgacaggacaaccactgcagtgtatcgacacgggctcccaagtgtgcaatctggcctggtccaagcacgccaacgagctggtgagcacgcacggctactcacagaaccagatccttgtctggaagtacccctccctgacccaggtggccaagctgaccgggcactcctaccgcgtgctgtacctggcaatgtcccctgatggggaggccatcgtcactggtgctggagacgagaccctgaggttctggaacgtctttagcaaaacccgttcgacaaaggagtctgtgtctgtgctcaacctcttcaccaggatccggtaaacctgccgggcaggaccgtgccacaccagctgtccagagtcggaggaccccagctcctcagcttgcatggactctgccttcccagcgcttgtcccccgaggaaggcggctgggcgggcggggagctgggcctggaggatcctggagtctcattaaatgcctgattgtgaaccatgtccaccagtatctggggtgggcacgtggtcggggaccctcagcagcaggggctctgtctcccttcccaaagggcgagaaccacattggacggtcccggctcagaccgtctgtactcagagcgacggatgccccctgggaccctcactgcctccgtctgttcatcacctgcccaccggagccgcatgctcttcctggaactgcccacgtctgcacagaacagaccaccagacgccagggctgattggtgggggcctgagaccccggttgcccattcatggctgcaccccaccatgtcaaacccaagaccagccccaaggccagaccaaggcatgtaggcctgggcaggtggctcggggccactggcggagccagcctgtggatccaagagacagtccccacctgggcttcacggcatccttgcagccacctctgctgtcactgctcgaagcagcagtctctctggaagcatctgtgtcatggccatcgcccggcggtcagtgggcttcagatgggcctgtgcatcctggccaagcgtcaccctcacactggaggaggatgtctgctctggacttatcaccccaggagaactgaacccggacctgctcactgccctggctggagaggagcacaacagatgccacgtcttcgtgcattcgccaacacgtgccctcacagggccagcgtcctccttccctgcgcaagacttgcgtcccccatgcctgctgggtggctgggtcctgtggaggccagcagcggtgtggcccccgcccccaggctgcctgtgtcttcacctgtcctgtccaccagcgccaacagccgtggggaagccaaggagacccaaggggtccaggaggtgggcgccctccatccttcgagaagcttcccaggctcctctgcttctctgtctcatgctcccaggctgcacagcaggcagggagggaggcaaggcaggggagtggggcctgagctgagcactgccccctcacccccccaccaccccttcccatttcatcggtggggacgtggagagggtggggcgggctggggttggagggtcccacccaccaccctgctgtgcttgggaacccccactccccactccccacatcccaacatcctggtgtctgtccccagtggggttggcgtgcatgtgtacatatgtatttgtgacttttctttggatttgttttgtgtttttgttgactagtcctggaaatgtttgaggctagacggggaggggccaggacccacccactgctcctgggggatgaggtcctggttttaaagccccgtcatttcaagcgggtcgatcttccacattcactggagagactctccccacctctgtctgggtggggcgcggacccctcactgtgcgcctgtgcagggggtgctggtgcacgtggcagtgtggatttccagtggtcacggtcttactgtttcaaggtttttaaataagaaaaccaaccctgccttcgcccatgcccgcccctgcccgcagttgccaaagagccgccttgtcgctgtgggcgtcagggcttggctggctcagtgcacaacccacagtggccttcagaggctcctcctgggactgggaaccgccgcagggccaggcggacggcgtgaggtttgtgttggggctggttctgcccatgctagggggtgggggagctcccaggacagaccagccttgtttctcatgtaatgcagtgacgctgtcattaaacacgtggattcatgtgtggccgggactggctggctctaggtccccggctcgggtggggtcacacggtcctgccctagagtccccatctggccctggagctgcagaagcagcttctgaggggcttcccaggcctgcatttcacagatggggagctcagccctcgaaggccgcagagacgcctcccaggcccgtctgccagggcgccggccacaatcctgcagggccaaggactggactccaggcaagtccctgcgctccagctggacggccctgttccagggaggaggtgctcggttgacaccatcagggagggagggtgggcactgctgggctgagttcacccccagggctggccagatggggccaggagggacagagcaaggggggtgaaggccgtggtgggagggtcccatgatgatgggccagggctcgtgtagaaatgggggaattggttccccatggcccaggacagctgagaggaggtggaggggccccaggggagtgtacgtcaggctttgcggggcacgggggccactcagcagcgctggggcaggtgcctctgctgtcagctccacccgacaggcagacgaaggccagtggggccatcgcttcctggggcgaccctggcagtggttgggagacgcccagatggagggggaggctgaccaagggccccgcagggcgggctgcaacttttctgttgatcctggaatgtagctggtgcagtgagagggaaagagaattgaaaaactcaggctgccataggttctgcgatgagaggtgcaggaggcaggagcctggcccagggggtgctggtgcctccccggggtctgggcggagagaacaggaggaatggctgggaagtggctgagggagccaggaggccggggggccgggggctgcaggggaggctgtgggggtcctggcagccaggaggccccaggtggttttgaggctcgctcttgcgcggtgcctgagaagagggtgaaggagctggggcaggccccatcctgggcattggagatgatgaaaccgagcagacctggcccatgtggagctggcatgggggacacagcccagagacagagaagcttatgaggaagtgaggaggtggcgtcacaagggtggggagggggccttggggaagggcggccttggatcagaggctcaccacaagcctggcatttcagccagggctggagaaggcagggacgcctgggtgagaggcaaagggcacagccatgcaaaggccctggggcaggacggcacctggtatgcgggaggaacagagtgaggagaggagggcagggcgtgcagggccttgtgggcctcagggaggacttgggcacctacgccgagggagtggagctcctgggtgcgtgtccagatgggaaaggcagggtcgtatctgtggggacctgacaagggcaggggaagcggagaccagggtgcaggctccgcccccacccaaggccgggcccagccagaggaggggcagggcagggcaggaggtttctggatgtttgttgggtttggtttggttttgttttgttttgtttattgtggtaaaatacaaaatctaccgtcttaca

SEQ ID NO: 134640 - DNA, 1331 bp, Homo sapiens
  Payload ID: 6304
  Gene Symbol: FZR1
  Gene Name: fizzy/cell division cycle 20 related 1
  ENST ID: ENST00000591290
  CDS Start-End: 7-1092
ctcgccatggaccaggactatgagcggcgcctgcttcgccagatcgtcatccagaatgagaacacgatgccacgcgtcacagagatgcggcggaccctgacgcctgccagctccccagtgtcctcgcccagcaagcacggagaccgcttcatcccctccagagccggagccaactggagcgtgaacttccacaggattaacgagaatgagaagtctcccagtcagaaccggaaagccaaggacgccacctcagacaacggcaaagacggcctggcctactctgccctgctcaagaatgagctgctgggtgccggcatcgagaaggtgcaggacccgcagactgaggaccgcaggctgcagccctccacgcctgagaagaagggtctgttcacgtattcccttagcaccaagcgctccagccccgatgacggcaacgatgtgtctccctactccctgtctcccgtcagcaacaagagccagaagctgctccggtccccccggaaacccacccgcaagatctccaagatccccttcaaggtgctggacgcgcccgagctgcaggacgacttctacctcaatctggtggactggtcgtccctcaatgtgctcagcgtggggctaggcacctgcgtgtacctgtggagtgcctgtaccagccaggtgacgcggctctgtgacctctcagtggaaggggactcagtgacctccgtgggctggtctgagcgggggaacctggtggcggtgggcacacacaagggcttcgtgcagatctgggacgcagccgcagggaagaagctgtccatgttggagggccacacggcacgcgtcggggcgctggcctggaatgctgagcagctgtcgtccgggagccgcgaccgcatgatcctgcagagggacatccgcaccccgccactgcagtcggagcggcggctgcagggccaccggcaggaggtgtgcgggctcaagtggtccacagaccaccagctcctcgcctcggggggcaacgacaacaaggacaaccactgcagtgtatcgacacgggctcccaagtgtgcaatctggcctggtccaagcacgccaacgagctggtgagcacgcacggctactcacagaaccagatccttgtctggaagtacccctccctgacccaggtggccaagctgaccgggcactcctaccgcgtgctgtacctggcaatgtcccctgatggggaggccatcgtcactggtgctggagacgagaccctgaggttctggaacgtctttagcaaaacccgttcgacaaaggagtctgtgtctgtgctcaacctcttcaccaggatccggtaaacc

SEQ ID NO: 134641 - DNA, 2662 bp, Homo sapiens
  Payload ID: 6305
  Gene Symbol: FKBP10
  Gene Name: FK506 binding protein 10, 65 kDa
  Uniprot ID: Q96AY3
  ENST ID: ENST00000321562
  CDS Start-End: 105-1853
agaggacaggaagagggggagccagttctgggaggcggggggaaggaggttggtggcgactccctcgctcgccctcactgccggcggtcccaactccaggcaccatgttccccgcgggcccccccagccacagcctcctccggctccccctgctgcagttgctgctactggtggtgcaggccgtggggagggggctgggccgcgccagcccggccgggggccccctggaagatgtggtcatcgagaggtaccacatccccagggcctgtccccgggaagtgcagatgggggattttgtgcgctaccactacaacggcacttttgaagatggcaagaagtttgattcaagctatgatcgcaacaccttggtggccatcgtggtgggtgtggggcgcctcatcactggcatggaccgaggcctcatgggcatgtgtgtcaacgagcggcgacgcctcattgtgcctccccacctgggctatgggagcatcggcctggcggggctcattccaccggatgccaccctctacttcgatgtggttctgctggatgtgtggaacaaggaagacaccgtgcaggtgagcacattgctgcgcccgccccactgcccccgcatggtccaggacggcgactttgtccgctaccactacaatggcaccctgctggacggcacctccttcgacaccagctacagtaagggcggcacttatgacacctacgtcggctctggttggctgatcaagggcatggaccaggggctgctgggcatgtgtcctggagagagaaggaagattatcatccctccattcctggcctatggcgagaaaggctatgggacagtgatccccccacaggcctcgctggtctttcacgtcctcctgattgacgtgcacaacccgaaggacgctgtccagctagagacgctggagctcccccccggctgtgtccgcagagccggggccggggacttcatgcgctaccactacaatggctccttgatggacggcaccctcttcgattccagctactcccgcaaccacacctacaatacctatatcgggcagggttacatcatccccgggatggaccaggggctgcagggtgcctgcatgggggaacgccggagaattaccatccccccgcacctcgcctatggggagaatggaactggagacaagatccctggctctgccgtgctaatcttcaacgtccatgtcattgacttccacaaccctgcggatgtggtggaaatcaggacactgtcccggccatctgagacctgcaatgagaccaccaagcttggggactttgttcgataccattacaactgttctttgctggacggcacccagctgttcacctcgcatgactacggggccccccaggaggcgactctcggggccaacaaggtgatcgaaggcctggacacgggcctgcagggcatgtgtgtgggagagaggcggcagctcatcgtgcccccgcacctggcccacggggagagtggagcccggggagtcccaggcagtgctgtgctgctgtttgaggtggagctggtgtcccgggaggatgggctgcccacaggctacctgtttgtgtggcacaaggaccctcctgccaacctgtttgaagacatggacctcaacaaggatggcgaggtccctccggaggagttctccaccttcatcaaggctcaagtgagtgagggcaaaggacgcctcatgcctgggcaggaccctgagaaaaccataggagacatgttccagaaccaggaccgcaaccaggacggcaagatcacagtcgacgagctcaagctgaagtcagatgaggacgaggagcgggtccacgaggagctctgaggggcagggagcctggccaggcctgagacacagaggcccactgcgagggggacagtggcggtgggactgacctgctgacagtcaccctccctctgctgggatgaggtccaggagccaactaaaacaatggcagaggagacatctctggtgttcccaccaccctagatgaaaatccacagcacagacctctaccgtgtttctcttccatccctaaaccacttccttaaaatgtttggatttgcaaagccaatttggggcctgtggagcctggggttggatagggccatggctggtcccccaccatacctcccctccacatcactgacacagctgagcttgttatccatctccccaaactttctctttctttgtacttcttgtcatccccactcccagccccttttcctctatgtgacagctccctaggacccctctgccttcctccccaatcctgactggctcctagggaaggggaaggctcctggagggcagccctacctctcccatgccctttgccctcctccctcgcctccagtggaggctgagctgaccctgggctgctggaggccagactgggctgtagttagcttttcatccctaaagaaggctcctttccctaaggaaccatagaagagaggaagaaaacaaagggcatgtgtgagggaagctgcttgggtgggtgttagggctatgaaatcttggatttggggctgaggggtgggagggagggcagagctctgcacactcaaaggctaaactggtgtcagtccttttttcctttgttccaaataaaagattaaaccaatggc

SEQ ID NO: 134642 - DNA, 398 bp, Homo sapiens
  Payload ID: 6305
  Gene Symbol: FKBP10
  Gene Name: FK506 binding protein 10, 65 kDa
  ENST ID: ENST00000429461
  CDS Start-End: 156-398
gtagtgcctccctcagactctaacacactcagcctggccccctcctcctattgcaaccccctcccccgctcctcccggccaggccagctcagtcttcccagcccccattccacgtggaccagccagggcggggggcctgtccccgggaagtgcagatgggggattttgtgcgctaccactacaacggcacttttgaagatggcaagaagtttgattcaagctatgatcgcaacaccttggtggccatcgtggtgggtgtggggcgcctcatcactggcatggaccgaggcctcatgggcatgtgtgtcaacgagcggcgacgcctcattgtgcctccccacctgggctatgggagcatcggcctggcggggctcattccaccggatgccaccctctac

SEQ ID NO: 134643 - DNA, 1965 bp, Homo sapiens
  Payload ID: 6305
  Gene Symbol: FKBP10
  Gene Name: FK506 binding protein 10, 65 kDa
  ENST ID: ENST00000455106
  CDS Start-End: 1-1160
tgattgacgtgcacaacccgaaggacgctgtccagctagagacgctggagctcccccccggctgtgtccgcagagccggggccggggacttcatgcgctaccactacaatggctccttgatggacggcaccctcttcgattccagctactcccgcaaccacacctacaatacctatatcgggcagggttacatcatccccgggatggaccaggggctgcagggtgcctgcatgggggaacgccggagaattaccatccccccgcacctcgcctatggggagaatggaactgactccatcggtttcctccagggcagcgccccacttcgccccttccgcagtggagaagggcagccaagtttggggagggagggtggttatggaaaaacagaaccagcatacccccaggacccagctgtgctgggagcctcagtgtcctcacctgtcaagtgggcaagccatgctgatccgcagggagacaagatccctggctctgccgtgctaatcttcaacgtccatgtcattgacttccacaaccctgcggatgtggtggaaatcaggacactgtcccggccatctgagacctgcaatgagaccaccaagcttggggactttgttcgataccattacaactgttctttgctggacggcacccagctgttcacctcgcatgactacggggccccccaggaggcgactctcggggccaacaaggtgatcgaaggcctggacacgggcctgcagggcatgtgtgtgggagagaggcggcagctcatcgtgcccccgcacctggcccacggggagagtggagcccggggagtcccaggcagtgctgtgctgctgtttgaggtggagctggtgtcccgggaggatgggctgcccacaggctacctgtttgtgtggcacaaggaccctcctgccaacctgtttgaagacatggacctcaacaaggatggcgaggtccctccggaggagttctccaccttcatcaaggctcaagtgagtgagggcaaaggacgcctcatgcctgggcaggaccctgagaaaaccataggagacatgttccagaaccaggaccgcaaccaggacggcaagatcacagtcgacgagctcaagctgaagtcagatgaggacgaggagcgggtccacgaggagctctgaggggcagggagcctggccaggcctgagacacagaggcccactgcgagggggacagtggcggtgggactgacctgctgacagtcaccctccctctgctgggatgaggtccaggagccaactaaaacaatggcagaggagacatctctggtgttcccaccaccctagatgaaaatccacagcacagacctctaccgtgtttctcttccatccctaaaccacttccttaaaatgtttggatttgcaaagccaatttggggcctgtggagcctggggttggatagggccatggctggtcccccaccatacctcccctccacatcactgacacagctgagcttgttatccatctccccaaactttctctttctttgtacttcttgtcatccccactcccagccccttttcctctatgtgacagctccctaggacccctctgccttcctccccaatcctgactggctcctagggaaggggaaggctcctggagggcagccctacctctcccatgccctttgccctcctccctcgcctccagtggaggctgagctgaccctgggctgctggaggccagactgggctgtagttagcttttcatccctaaagaaggctcctttccctaaggaaccatagaagagaggaagaaaacaaagggcatgtgtgagggaagctgcttgggtgggtgttagggctatgaaatcttggatttggggctgaggggtgggagggagggcagagctctgcacactcaaaggctaaactggtgtcagtccttttttcctttgttccaaataaaagattaaaccaa

SEQ ID NO: 134644 - DNA, 563 bp, Homo sapiens
  Payload ID: 6305
  Gene Symbol: FKBP10
  Gene Name: FK506 binding protein 10, 65 kDa
  ENST ID: ENST00000585922
  CDS Start-End: 51-563
agagttctcatctttcccgagcctctctccctggccaggccccaggcaccatgttccccgcgggcccccccagccacagcctcctccggctccccctgctgcagttgctgctactggtggtgcaggccgtggggagggggctgggccgcgccagcccggccgggggccccctggaagatgtggtcatcgagaggtaccacatccccagggcctgtccccgggaagtgcagatgggggattttgtgcgctaccactacaacggcacttttgaagatggcaagaagtttgattcaagctatgatcgcaacaccttggtggccatcgtggtgggtgtggggcgcctcatcactggcatggaccgaggcctcatgggcatgtgtgtcaacgagcggcgacgcctcattgtgcctccccacctgggctatgggagcatcggcctggcggggctcattccaccggatgccaccctctacttcgatgtggttctgctggatgtgtggaacaaggaagacaccgtgcaggtgagcacattgctgcgcccgccccactgcccccgcatggtc

SEQ ID NO: 134645 - DNA, 2826 bp, Homo sapiens
  Payload ID: 6305
  Gene Symbol: FKBP10
  Gene Name: FK506 binding protein 10, 65 kDa
  ENST ID: ENST00000489591
  CDS Start-End: 47-490
actccctcgctcgccctcactgccggcggtcccaactccaggcaccatgttccccgcgggcccccccagccacagcctcctccggctccccctgctgcagttgctgctactggtggtgcaggccgtggggagggggctgggccgcgccagcccggccgggggccccctggaagatgtggtcatcgagaggtaccacatccccagggcctgtccccgggaagtgcagatgggggattttgtgcgctaccactacaacggcacttttgaagatggcaagaagtttgattcaagcggggctcattccaccggatgccaccctctacttcgatgtggttctgctggatgtgtggaacaaggaagacaccgtgcaggtgagcacattgctgcgcccgccccactgcccccgcatggtccaggacggcgactttgtccgctaccactacaatggcaccctgctggacggcacctccttcgacaccagctacagtaagggcggcacttatgacacctacgtcggctctggttggctgatcaagggcatggaccaggggctgctgggcatgtgtcctggagagagaaggaagattatcatccctccattcctggcctatggcgagaaaggctatgggacagtgatccccccacaggcctcgctggtctttcacgtcctcctgattgacgtgcacaacccgaaggacgctgtccagctagagacgctggagctcccccccggctgtgtccgcagagccggggccggggacttcatgcgctaccactacaatggctccttgatggacggcaccctcttcgattccagctactcccgcaaccacacctacaatacctatatcgggcagggttacatcatccccgggatggaccaggggctgcagggtgcctgcatgggggaacgccggagaattaccatccccccgcacctcgcctatggggagaatggaactggtaggggcgttccccagccaccacctcagctcctcctccgaactgcccattgtgtctaggccaccccctcccacagtgggattccaggcaccgctcggcccctctcatcacaaaaacatgcatgcagcttacatctggtcaccccatctgattcctgccacacagactccatcggtttcctccagggcagcgccccacttcgccccttccgcagtggagaagggcagccaagtttggggagggagggtggttatggaaaaacagaaccagcatacccccaggacccagctgtgctgggagcctcagtgtcctcacctgtcaagtgggcaagccatgctgatccgcagggtaagttactgggagtttgcaagacggagacaagatccctggctctgccgtgctaatcttcaacgtccatgtcattgacttccacaaccctgcggatgtggtggaaatcaggacactgtcccggccatctgagacctgcaatgagaccaccaagcttggggactttgttcgataccattacaactgttctttgctggacggcacccagctgttcacctcgcatgactacggggccccccaggaggcgactctcggggccaacaaggtgatcgaaggcctggacacgggcctgcagggcatgtgtgtgggagagaggcggcagctcatcgtgcccccgcacctggcccacggggagagtggagcccggggagtcccaggcagtgctgtgctgctgtttgaggtggagctggtgtcccgggaggatgggctgcccacaggctacctgtttgtgtggcacaaggaccctcctgccaacctgtttgaagacatggacctcaacaaggatggcgaggtccctccggaggagttctccaccttcatcaaggctcaagtgagtgagggcaaaggacgcctcatgcctgggcaggaccctgagaaaaccataggagacatgttccagaaccaggaccgcaaccaggacggcaagatcacagtcgacgagctcaagctgaagtcagatgaggacgaggagcgggtccacgaggagctctgaggggcagggagcctggccaggcctgagacacagaggcccactgcgagggggacagtggcggtgggactgacctgctgacagtcaccctccctctgctgggatgaggtccaggagccaactaaaacaatggcagaggagacatctctggtgttcccaccaccctagatgaaaatccacagcacagacctctaccgtgtttctcttccatccctaaaccacttccttaaaatgtttggatttgcaaagccaatttggggcctgtggagcctggggttggatagggccatggctggtcccccaccatacctcccctccacatcactgacacagctgagcttgttatccatctccccaaactttctctttctttgtacttcttgtcatccccactcccagccccttttcctctatgtgacagctccctaggacccctctgccttcctccccaatcctgactggctcctagggaaggggaaggctcctggagggcagccctacctctcccatgccctttgccctcctccctcgcctccagtggaggctgagctgaccctgggctgctggaggccagactgggctgtagttagcttttcatccctaaagaaggctcctttccctaaggaaccatagaagagaggaagaaaacaaagggcatgtgtgagggaagctgcttgggtgggtgttagggctatgaaatcttggatttggggctgaggggtgggagggagggcagagctctgcacactcaaaggctaaactggtgtcagtccttttttcctttgttccaaataaaagattaaacc

SEQ ID NO: 134646 - DNA, 598 bp, Homo sapiens
  Payload ID: 6305
  Gene Symbol: FKBP10
  Gene Name: FK506 binding protein 10, 65 kDa
  ENST ID: ENST00000585664
  CDS Start-End: 83-598
ctttggtgtccactcagagttctcatctttcccgagcctctctccctggccaggccccagggcctgtccccgggaagtgcagatgggggattttgtgcgctaccactacaacggcacttttgaagatggcaagaagtttgattcaagctatgatcgcaacaccttggtggccatcgtggtgggtgtggggcgcctcatcactggcatggaccgaggcctcatgggcatgtgtgtcaacgagcggcgacgcctcattgtgcctccccacctgggctatgggagcatcggcctggcggggctcattccaccggatgccaccctctacttcgatgtggttctgctggatgtgtggaacaaggaagacaccgtgcaggtgagcacattgctgcgcccgccccactgcccccgcatggtccaggacggcgactttgtccgctaccactacaatggcaccctgctggacggcacctccttcgacaccagctacagtaagggcggcacttatgacacctacgtcggctctggttggctgatcaagggcatggaccaggggctgctgggcatgtgtcctggagagagaaggaagattatcatccct

SEQ ID NO: 134647 - DNA, 725 bp, Homo sapiens
  Payload ID: 6306
  Gene Symbol: FKBP11
  Gene Name: FK506 binding protein 11, 19 kDa
  ENST ID: ENST00000256680
  CDS Start-End: 58-336
ctgccgccacccgaacagcctgtcctggtgccccggctccctgccccgcgcccagtcatgaccctgcgcccctcactcctcccgctccatctgctgctgctgctgctgctcagtgcggcggtgtgccgggctgaggctgggctcgaaaccgaaagtcccgtccggaccctccaagtggagaccctggggcgagaacgggatctttggaagagcatccgtgacccctgtagtccgatcgtaggtggagcccccagaaccatgtgccgagcccgctgcttttggagacacgcttcacatacactacacgggaagcttggtagatggacgtattattgacacctccctgaccagagaccctctggttatagaacttggccaaaagcaggtgattccaggtctggagcagagtcttctcgacatgtgtgtgggagagaagcgaagggcaatcattccttctcacttggcctatggaaaacggggatttccaccatctgtcccagcggatgcagtggtgcagtatgacgtggagctgattgcactaatccgagccaactactggctaaagctggtgaagggcattttgcctctggtagggatggccatggtgccagccctcctgggcctcattgggtatcacctatacagaaaggccaatagacccaaagtctccaaaaagaagctcaaggaagagaaacgaaacaagagcaaaaagaaataataaataa

SEQ ID NO: 134648 - DNA, 959 bp, Homo sapiens
  Payload ID: 6306
  Gene Symbol: FKBP11
  Gene Name: FK506 binding protein 11, 19 kDa
  Uniprot ID: Q9NYL4
  ENST ID: ENST00000453172
  CDS Start-End: 93-533
agtctggcctgggcgccgcgggaacgctgtcctggctgccgccacccgaacagcctgtcctggtgccccggctccctgccccgcgcccagtcatgaccctgcgcccctcactcctcccgctccatctgctgctgctgctgctgctcagtgcggcggtgtgccgggctgaggctgggctcgaaaccgaaagtcccgtccggaccctccaagtggagaccctggtggagcccccagaaccatgtgccgagcccgctgcttttggagacacgcttcacatacactacacgggaagcttggtagatggacgtattattgacacctccctgaccagagaccctctggttatagaacttggccaaaagcaggtgattccaggtctggagcagagtcttctcgacatgtgtgtgggagagaagcgaagggcaatcattccttctcacttggcctatggaaaacggggatttccaccatctgtcccagggactaaagacaacctgatgaggccacctggcatgacctccagcagccagtaacttgttagggaagagacctgcttgggccacatgggtctgctgcctgtgccaccacctttcccagaacactggacttctttcctgcccttttctacaactctacgctgtgtcagctgtacagccaccccccaccccttcctttcagcctccatcagggaagagacagtaaaaataatcacagtcaagtgattcaaaacaaaacaaaaagcaactgttaaagccaagtctgccccataactttaaaagccatcattggtcactgccgatgtctatttttgaagggttgagatggacagatttcccaagatgcatatcttttgctttcagttctaacaaatgttctattagctaaaatgtgttgtactccacagagtattgggctcgtaattctttttttttttttgagatggagtttcactcttgttg

SEQ ID NO: 134649 - DNA, 630 bp, Homo sapiens
  Payload ID: 6306
  Gene Symbol: FKBP11
  Gene Name: FK506 binding protein 11, 19 kDa
  ENST ID: ENST00000444214
  CDS Start-End: 306-605
cgtggcaagcggttcgggagaagaaactcggggctctggggtcgtcgagcacgtggcgaggggagagacgttgctcttccgtgcctcttttccctccttgcttttctgccagttcctacctggcacggagaagtgcagggtggagagatctccgagaagcgccagccttctggggcttcctgttccttacagcgggaagcttggtagatggacgtattattgacacctccctgaccagagaccctctggttatagaacttggccaaaagcaggtgattccaggtctggagcagagtcttctcgacatgtgtgtgggagagaagcgaagggcaatcattccttctcacttggcctatggaaaacggggatttccaccatctgtcccagcggatgcagtggtgcagtatgacgtggagctgattgcactaatccgagccaactactggctaaagctggtgaagggcattttgcctctggtagggatggccatggtgccagccctcctgggcctcattgggtatcacctatacagaaaggccaatagacccaaagtctccaaaaagaagctcaaggaagagaaacgaaacaagagcaaaaagaaataataaataataaattttaaaaaactta

SEQ ID NO: 134650 - DNA, 524 bp, Homo sapiens
  Payload ID: 6306
  Gene Symbol: FKBP11
  Gene Name: FK506 binding protein 11, 19 kDa
  ENST ID: ENST00000546847
  CDS Start-End: 1-192
tccctgaccagagaccctctggttatagaacttggccaaaagcaggtgattccaggtctggagcagagtcttctcgacatgtgtgtggggtggaaaaattcgtgttttgggtgtgaagattcagggggttttgctgaaggagcttcagctggactgaggctgctggcctacctctcctgcctctggctgtgactgacattccttccctcagagagaagcgaagggcaatcattccttctcacttggcctatggaaaacggggatttccaccatctgtcccagcggatgcagtggtgcagtatgacgtggagctgattgcactaatccgagccaactactggctaaagctggtgaagggcattttgcctctggtagggatggccatggtgccagccctcctgggcctcattgggtatcacctatacagaaaggccaatagacccaaagtctccaaaaagaagctcaaggaagagaaacgaaacaagagcaaaaagaaataataaataataaattttaaaaaactt

SEQ ID NO: 134651 - DNA, 1052 bp, Homo sapiens
  Payload ID: 6306
  Gene Symbol: FKBP11
  Gene Name: FK506 binding protein 11, 19 kDa
  ENST ID: ENST00000552878
  CDS Start-End: 84-632
tgggcgccgcgggaacgctgtcctggctgccgccacccgaacagcctgtcctggtgccccggctccctgccccgcgcccagtcatgaccctgcgcccctcactcctcccgctccatctgctgctgctgctgctgctcagtgcggcggtgtgccgggctgaggctgggctcgaaaccgaaagtcccgtccggaccctccaagtggagaccctggtggagcccccagaaccatgtgccgagcccgctgcttttggagacacgcttcacatacactacacgggaagcttggtagatggacgtattattgacacctccctgaccagagaccctctggttatagaacttggccaaaagcaggtgattccaggtctggagcagagtcttctcgacatgtgtgtgggagagaagcgaagggcaatcattccttctcacttggcctatggaaaacggggatttccaccatctgtcccagatggagtttcactcttgttgcccaggctggagtgcaatagtgcaatcttcactcaccacaacctccgccacccgggttcaagcaattctcctgtctcagcctcccgagtagctgggattacaggcatgcgccaccacgaccggctaattttatacttttagtagagatggggcttctccatgttggccaggctggtctcaaactcccaacctcaggtgatccgcctgccttggcttcccaaagtgcggggattacaggcatgagccaccgcgcctggctgggctcgttaattcttatcctagttccagcttagaggaaggcctggaaggagggtagggggaccaaggagaaacttttacccaaagccctattacctccccattcccagtgctgcttatttgtacctcttctgcccactcatttctgttccacctgcccctttacttcttaagcagcatcctcatccttcttcctcttcagctcttatgttgaaactcctgttatctcataatcacgttgaatgtgctcattggttggttgattttttaaagtctagtttaaatccatttaatttcagccct

SEQ ID NO: 134652 - DNA, 482 bp, Homo sapiens
  Payload ID: 6306
  Gene Symbol: FKBP11
  Gene Name: FK506 binding protein 11, 19 kDa
  ENST ID: ENST00000547789
  CDS Start-End: 65-283
gtcctggctgccgccacccgaacagcctgtcctggtgccccggctccctgccccgcgcccagtcatgaccctgcgcccctcactcctcccgctccatctgctgctgctgctgctgctcagtgcggcggtgtgccgggctgaggctgggctcgaaaccgaaagtcccgtccggaccctccaagtggagaccctgtccgatcgtaggtggagcccccagaaccatgtgccgagcccgctgcttttggagacacgcttcacatacactacacgggaagcttggtagatggacgtattattgacacctccctgaccagagaccctctggttatagaacttggccaaaagcaggtgattccaggtctggagcagagtcttctcgacatgtgtgtgggagagaagcgaagggcaatcattccttctcacttggcctatggaaaacggggatttccaccatctgtcccaggtaatctgactaggactct

SEQ ID NO: 134653 - DNA, 1030 bp, Homo sapiens
  Payload ID: 6306
  Gene Symbol: FKBP11
  Gene Name: FK506 binding protein 11, 19 kDa
  Uniprot ID: Q9NYL4
  ENST ID: ENST00000550765
  CDS Start-End: 400-1005
ggcacatcctgagcaccctgtgccttatctgtaaaatggaaacaatcatgccgacctttcagggtggttttgaggattagagactagctcctgacacacagtaggtaatcgtaaatgggtgctattgtttggcccgacccacgttataggacagaacgtctaacggatgcgtcagaacctgcgccctccggatcttggagggtacagagggcgcccctcggcctcctccctttcggaggtggggacaaggtggaggaagggctgcaggaggaggagctctagcatcgcgacccgccccgtcccgtccagtctggcctgggcgccgcgggaacgctgtcctggctgccgccacccgaacagcctgtcctggtgccccggctccctgccccgcgcccagtcatgaccctgcgcccctcactcctcccgctccatctgctgctgctgctgctgctcagtgcggcggtgtgccgggctgaggctgggctcgaaaccgaaagtcccgtccggaccctccaagtggagaccctggtggagcccccagaaccatgtgccgagcccgctgcttttggagacacgcttcacatacactacacgggaagcttggtagatggacgtattattgacacctccctgaccagagaccctctggttatagaacttggccaaaagcaggtgattccaggtctggagcagagtcttctcgacatgtgtgtgggagagaagcgaagggcaatcattccttctcacttggcctatggaaaacggggatttccaccatctgtcccagcggatgcagtggtgcagtatgacgtggagctgattgcactaatccgagccaactactggctaaagctggtgaagggcattttgcctctggtagggatggccatggtgccagccctcctgggcctcattgggtatcacctatacagaaaggccaatagacccaaagtctccaaaaagaagctcaaggaagagaaacgaaacaagagcaaaaagaaataataaataataaattttaaaaaactta

SEQ ID NO: 134654 - DNA, 4960 bp, Homo sapiens
  Payload ID: 6307
  Gene Symbol: FKBP14
  Gene Name: FK506 binding protein 14, 22 kDa
  Uniprot ID: Q9NWM8
  ENST ID: ENST00000222803
  CDS Start-End: 177-812
aggttcgtgacccttgagaaaagagttggtggtaaatgtgccacgtcttctaagaagggggagtcctgaacttgtctgaagcccttgtccgtaagccttgaactacgttcttaaatctatgaagtcgagggacctttcgctgcttttgtagggacttctttccttgcttcagcaacatgaggcttttcttgtggaacgcggtcttgactctgttcgtcacttctttgattggggctttgatccctgaaccagaagtgaaaattgaagttctccagaagccattcatctgccatcgcaagaccaaaggaggggatttgatgttggtccactatgaaggctacttagaaaaggacggctccttatttcactccactcacaaacataacaatggtcagcccatttggtttaccctgggcatcctggaggctctcaaaggttgggaccagggcttgaaaggaatgtgtgtaggagagaagagaaagctcatcattcctcctgctctgggctatggaaaagaaggaaaaggtaaaattcccccagaaagtacactgatatttaatattgatctcctggagattcgaaatggaccaagatcccatgaatcattccaagaaatggatcttaatgatgactggaaactctctaaagatgaggttaaagcatatttaaagaaggagtttgaaaaacatggtgcggtggtgaatgaaagtcatcatgatgctttggtggaggatatttttgataaagaagatgaagacaaagatgggtttatatctgccagagaatttacatataaacacgatgagttatagagatacatctacccttttaatatagcactcatctttcaagagagggcagtcatctttaaagaacattttatttttatacaatgttctttcttgctttgttttttatttttatatattttttctgactcctatttaaagaaccccttaggtttctaagtacccatttctttctgataagttattgggaagaaaaagctaattggtctttgaatagaagacttctggacaatttttcactttcacagatatgaagctttgttttactttctcacttataaatttaaaatgttgcaactgggaatataccacgacatgagaccaggttatagcacaaattagcaccctatatttctgcttccctctattttctccaagttagaggtcaacatttgaaaagccttttgcaatagcccaaggcttgctattttcatgttataatgaaatagtttatgtgtaactggctctgagtctctgcttgaggaccagaggaaaatggttgttggacctgacttgttaatggctactgctttactaaggagatgtgcaatgctgaagttagaaacaaggttaatagccaggcatggtggctcatgcctgtaatcccagcactttgggaggctgaggcgggcggatcacctgaggttgggagttcgagaccagcctgaccaacacggagaaaccctatctctactaaaaatacaaaagtagccgggcgtggtgatgcgtgcctgtaatcccagctacccaggaaggctgaggcggcagaatcacttgaacccggaggcggaggttgcggtaagccgagatcacctccagcctggacactctgtctcgaaaaaaagaaaagaaacacggttaataacatataaatatgtatgcattgagacatgctacctaggacttaagctgatgaagcttggctcctagtgattggtggcctattatgataaataggacaaatcatttatgtgtgagtttctttgtaataaaatgtatcaatatgttatagatgaggtagaaagttatatttatattcaatatttacttcttaaggctagcggaatatccttcctggttctttaatgggtagtctatagtatattatactacaataacattgtatcataagataaagtagtaaaccagtctacattttcccatttctgtctcatcaaaaactgaagttagctgggtgtggtggctcatgcctgtaatcccagcactttgggggccaaggagggtggatcacttgagatcaggagttcaagaccagcctggccaacatggtgaaaccttgtctctactaaaaatacaaaaattagccaggcgtggtggtgcacacctgtagtcccagctactcgggaggctgagacaggagatttgcttgaacccgggaggcggaggttgcagtgagccaagattgtgccactgcactccagcctgggtgacagagcaagactccatctcaaaaaaaaaaaaagaagcagacctacagcagctactattgaataaatacctatcctggattttaaaaaagaaaaaaatatatataattttattttaaattggcttttatctttaattcttttttttaaagttatcaaatcttcattttctaagagtagccctttatagtgtacaaaatgatattaagtgcattattatcttcgcttttcatggctctgagtcataaaacaagctggtggatctcactgtacctaatttatagacgaggaaattgtcattcaaaaagattgactgttatgcccagggtcagcactaacctgcagaaccagtattcagtccccaagttcagtgtcttctactgccctctactaatgaaaagtgaaaatttccctggggtctaattctctcttcagtttgctgtgccgttgtttatctttgagtcttcattctctgaagatggctttctgcctgtttctggtacattagaattctcactatgatatagaaatggcttcagtttcatagcataatcttgcagttagctctgaattgcctcaaaaaccctgaacaacgcgaggttccagatgtgttttacttctttcattcatatttacccccatttgttgtttaaaaagaattatgaacaattattacatcatatgtagaccactttcactgattatatgttgacattttcctcagtaaaacataaagttcttaacaagactatactgtaacacctttctccaacaaaatcagctgtatgttgaaaactattaagtcattgctaatgttttaagccataatacagacagccttatactctatgatgggagaagggaaagtagtttgtccgatggtgctactctgtataaacattactgatgctatctatagtagggcaagaaaagtaaaaagagttttgattattcaggcagcatttttaaaaacctgtgaatttgtatcagttctcatctaaacatttggacacaagtataaaatgaaaacatatgcacaagttatggtttttaagttatctgctcttttttttggtttcactgtacctttgtactcttctattagtgggaataatcagacatgaactgtgacttcacatgtacagtcatacctcacttaatgatggagatgcactctgagaaatgtctaattaggttatttcatcgttgtgggaacatcatagagtgtacttacacaaacctagatagtgtagcctgctacacatgtaggacatgtatatagcctattgctcctaggctacagcatgttgctgttctgaatcatgtaggcaattgtaacacaatggcaagtgtctgtttattcaaacatctaaacacagaaaagatactacaacaataacaatatggtataaaagattttgtaaaaaatctggtcaggtgcagtggttcacgcctgtaatcctagcactttgggaggctgcctcagcaggtggattgcttgagcccagaagctcaagaccagcctgggcaacatggcgaaaccccgtctctgctaaaagtacaaaagctgaggttggaggatcacctgagcctggcaaggtcaaggctgcagtgagccatgatcataccactgcactccagcctgggtgacagagtgactccccatctaaaaaaaaaaatatatatatatatatatactatatatatatatataccatatatatggtatatatatatatagtatatatatatatggtgtgtgtatatatatatatatggtatacctgtatagggcacttactaacggagcttacagaactggaagttgctctggatgagtcagtggtgagtgaatgtaaaggcctaggacattactgtacactactgtagactttataaacaccgtacacttaggtgacactaaaatttataaaaaatgtttttcttctggttgggcatggtgccttatgcctataatcccagcattatgggaggccaaggtgggtggatcactcgaggtcatgagtttgggaccagccgggccaacatggctaaaccccatctctactaaaaatacgataattagccaggtgtggtggcacatgcgtgtagtcccagctaattgagaggctgaggcaggagaattgcttgaatccaggaggtggaggttgcagtgagccaagatcgaaccactgcactctagtctgggtgacagaggagcaagactctgtctcaaaaaaaaaaattctataatttttatagaaataataaaaaactaaccttagcttactgtaaattttctagtttagaaacttatttaaaaacaatttttggactcttctagtaataacgtagcttaaaacacacattgcatagctgtacaaaaatattttccttatatccttattatataagcttttatctatttaaattttgaatttttaaactttttggtcaaaaaccaagacaaacacactagcctaggcctatgcagggtcaggatcaagacatccctagcaggtgacaggaatttttcaactccattataatctgtggggccaccatcatatatatattgtacattgaccgaaacatggttacatgactatataatttgcgtcaatactgctcagtgtgccatatttaaatttacatgactatattgtgatattcttttcaaaataaagtttatttgggagataa

SEQ ID NO: 134655 - DNA, 703 bp, Homo sapiens
  Payload ID: 6307
  Gene Symbol: FKBP14
  Gene Name: FK506 binding protein 14, 22 kDa
  ENST ID: ENST00000412494
  CDS Start-End: 1-268
agttctccagaagccattcatctgccatcgcaagaccaaaggaggggatttgatgttggtccactatgaaggctacttagaaaaggacggctccttatttcactccactcacaaacataacaatggtcagcccatttggtttaccctgggcatcctggaggctctcaaaggttgggaccagggcttgaaaggaatgtgtgtaggagagaagagaaagctcatcattcctcctgctctgggctatggaaaagaaggaaaagtcttttagtacatgcttgcatgcctcttttggaaagataccagttttatcaacaacctagcgcatgtcacatctctgtctagatctgaaatggtaaaattcccccagaaagtacactgatatttaatattgatctcctggagattcgaaatggaccaagatcccatgaatcattccaagaaatggatcttaatgatgactggaaactctctaaagatgaggttaaagcatatttaaagaaggagtttgaaaaacatggtgcggtggtgaatgaaagtcatcatgatgctttggtggaggatatttttgataaagaagatgaagacaaagatgggtttatatctgccagagaatttacatataaacacgatgagttatagagatacatctacccttttaatatagcactcatctttcaagagagggcagtcatctttaaagaac

SEQ ID NO: 134656 - DNA, 1085 bp, Homo sapiens
  Payload ID: 6307
  Gene Symbol: FKBP14
  Gene Name: FK506 binding protein 14, 22 kDa
  ENST ID: ENST00000419018
  CDS Start-End: 155-355
gagttggtggtaaatgtgccacgtcttctaagaagggggagtcctgaacttgtctgaagcccttgtccgtaagccttgaactacgttcttaaatctatgaagtcgagggacctttcgctgcttttgtagggacttctttccttgcttcagcaacatgaggcttttcttgtggaacgcggtcttgactctgttcgtcacttctttgattggggctttgatccctgaaccagaagtgaaaattgaagttctccagaagccattcatctgccatcgcaagaccaaaggaggggatttgatgttggtccactatgaaggctacttagaaaaggacggctccttatttcactccacgtaaaattcccccagaaagtacactgatatttaatattgatctcctggagattcgaaatggaccaagatcccatgaatcattccaagaaatggatcttaatgatgactggaaactctctaaagatgaggttaaagcatatttaaagaaggagtttgaaaaacatggtgcggtggtgaatgaaagtcatcatgatgctttggtggaggatatttttgataaagaagatgaagacaaagatgggtttatatctgccagagaatttacatataaacacgatgagttatagagatacatctacccttttaatatagcactcatctttcaagagagggcagtcatctttaaagaacattttatttttatacaatgttctttcttgctttgttttttatttttatatattttttctgactcctatttaaagaaccccttaggtttctaagtacccatttctttctgataagttattgggaagaaaaagctaattggtctttgaatagaagacttctggacaatttttcactttcacagatatgaagctttgttttactttctcacttataaatttaaaatgttgcaactgggaatataccacgacatgagaccaggttatagcacaaattagcaccctatatttctgcttccctctattttctccaagttagaggtcaacatttgaaaagccttttgcaatagcccaaggcttgctattttcatgttataatgaaatagt

SEQ ID NO: 134657 - DNA, 4336 bp, Homo sapiens
  Payload ID: 6308
  Gene Symbol: FKBP15
  Gene Name: FK506 binding protein 15, 133kDa
  Uniprot ID: Q5T1M5
  ENST ID: ENST00000238256
  CDS Start-End: 119-3778
agttcgccctgccggaaagcagcacgccgccgcggcattttacgacgtcggcggtgacaggccctgggactctgggaatacccagcttcctccccgcaacccggtgaaagccaacgcaatgttcggtgcgggggacgaggacgacaccgatttcctctcgccgagcggcggtgccagattggcctcactttttggactggatcaggcagctgctggccatggaaatgaatttttccagtacacagccccaaaacagcctaagaaaggccagggaacggcagcaacaggaaatcaggcaacaccaaaaacagcaccagccaccatgagcactcccacaatactggtcgcaacagcagtccatgcatatcgatacacaaatggtcaatatgtaaagcagggcaaatttggtgctgcagttctggggaaccacacagccagagagtataggattcttctttatatcagtcaacaacagccagttacggttgctaggattcatgtgaactttgagctaatggttcggcccaataactatagcaccttttatgatgaccagagacagaactggtccatcatgtttgagtcggaaaaggctgctgtggagttcaataagcaggtgtgcattgctaagtgcaacagtacctcttccctggatgcagtgctctcccaggacctcattgtggcagacggccctgctgtagaagttggagattctttggaagtggcctataccggctggctctttcagaatcatgtgctgggccaggttttcgactccactgctaacaaagataagttgcttcgcttgaagttaggatcaggaaaagtcatcaagggctgggaggatggaatgctgggcatgaaaaaaggaggaaagcgattgcttattgtccctccagcctgtgctgttggctcagaaggggtaataggctggactcaagcaacggactcgatcctggtgttcgaggtggaggttaggcgggtgaagtttgccagagattctggctctgatggtcacagtgttagttcccgcgattctgcagctccgtctcccatccctggtgctgacaacctctctgctgatcctgttgtgtcaccacccacatcaatacctttcaaatcaggggagccagctcttcgtaccaaatctaactccctcagtgaacaacttgcaataaatacaagtcccgatgcagtcaaagccaagttgatctctcggatggctaaaatgggccagcccatgctgcccatccttccaccacagctggattccaatgattcagaaatcgaagatgtgaacactctgcaaggaggtgggcagcctgtggtgactccgtccgtccagccctctcttcatccggcccatccagcgttaccacagatgacctcacaggcacctcagccatctgttactgggctccaggcaccttctgctgccttaatgcaagtgtcatctctcgattcccactcagctgtatctggaaatgcccaatcctttcagccctatgcaggtatgcaagcctacgcttatccccaggcatctgccgtcacctcccagctgcagcccgttcggcctttgtacccagcaccgctctctcagcctccccatttccaaggatcaggtgatatggcttcatttctcatgactgaagcccggcaacataacactgaaattcgaatggcagtcagcaaagtggctgataaaatggatcatctcatgactaaggttgaagagttacagaaacatagtgctggcaattccatgcttattcctagcatgtcagttacaatggaaacaagcatgattatgagcaacatccagcgaatcattcaggaaaatgaaagattgaagcaagagatccttgaaaagagcaatcggatagaagaacagaatgacaagattagtgaactaattgaacgaaatcagaggtatgttgagcagagtaacctgatgatggagaagaggaacaactcacttcagacagccacagaaaacacacaggcaagagtattgcatgctgaacaagagaaggccaaggtgacagaggagttagcagcggccactgcacaggtctctcatctgcagctgaaaatgactgctcaccaaaaaaaggaaacagagctgcagatgcagctgacagaaagcctgaaggagacagatcttctcaggggccagctcaccaaagtgcaggcaaagctctcagagctccaagaaacctctgagcaagcacagtccaaattcaaaagtgaaaagcagaaccggaaacaactggaactcaaggtgacatccctggaggaggaactgactgaccttcgagttgagaaggagtccttggaaaagaacctctcagaaaggaaaaagaagtcagctcaagagcgttctcaggccgaggaggagatagatgaaattcgcaagtcataccaggaggaattggacaaacttcgacagctcttgaaaaagactcgagtgtccacagaccaagcagctgcagagcagctgtctttagtacaggctgagctacagacccagtgggaagcaaaatgtgaacatttgttggcctccgccaaggatgagcacctgcagcagtaccaggaggtgtgcgcacagagagatgcctaccagcagaagctggtacaacttcaggaaaagtgtttagccctccaggcccaaatcacagctctcaccaagcaaaatgaacagcacatcaaggaactagagaagaacaagtcccagatgtctggggttgaagctgctgcatctgacccctcagagaaggtcaagaagatcatgaaccaggtgttccagtccttacggagagagtttgagctggaggaatcttacaatggcaggaccattctgggaaccatcatgaatacgatcaagatggtgactcttcagctgttaaaccaacaggagcaagagaaggaagagagcagcagtgaagaagaagaagaaaaagcagaagagcggccacgaagaccttcccaggagcagtcagcctcagccagttctgggcagcctcaagcacccctgaatagggagaggccagagtcccccatggtgccctcagagcaggtggtcgaggaagctgtcccgttgcctcctcaggccctcaccacttcccaggatggacacagaaggaaaggggactcagaagctgaggcactctcagagataaaagatggttcccttccacccgaactgtcttgcatcccatcccacagagttctagggcccccgacttcaattccacctgagcccctaggccctgtatccatggactctgagtgtgaggagtcacttgctgccagcccaatggcagctaagcccgacaacccatcaggaaaggtctgtgtcagggaagtagcaccagatggcccactacaagaaagctccacaagactgtccctgacttcagaccccgaggagggggacccactggccttagggcctgaaagcccaggagagcctcagcctccacagctcaagaaagatgatgtcactagctccaccggtccccacaaggagctgtcaagcacagaggcaggttccacagttgcaggagcagccctcagacccagccatcattcccagcgttccagtctctctggggatgaagaggatgaactgtttaaaggggcaactctgaaagctctgaggcccaaagcacagcctgaggaggaggatgaagacgaggtgagcatgaagggacgcccgcccccaacgcccctttttggagatgatgatgatgacgatgacattgactggctgggatgaagacccaggaaactggtgcaaaggtttctctgcaacccttccctaagcatgattttgcacagccaaccctgggtctaggcgaaccacagggtgaggtcaaggtgagcattctgggaacaatatttgggctcagagggtgggttggccaccttctgagccccacccccgccagacctggtgaagaggatcataaccctgtcttcaagaacactgggatttcagcagcaagttggaagaaggactggtaggttcccctccaagccagtcacctgtaagagtcctgtcctctgccagactttttaatctcttcattaactctcagactgacctgggagccctcctctacctgaatccagtgctcaactgtgccccggcaacaagacctgggctgaggtctccctggtagaactaagggagattacaccatctaaatcccagtgcagtcaacagcctggcctatagtcctgggacatgtatcttcttctttgccttaaatctgatacaagaggtcaatgactttgaaaataaaactaaaataaatgtctataatgaaacttg

SEQ ID NO: 134658 - DNA, 2815 bp, Homo sapiens
  Payload ID: 6308
  Gene Symbol: FKBP15
  Gene Name: FK506 binding protein 15, 133kDa
  ENST ID: ENST00000414250
  CDS Start-End: 1-1494
gacgtcggcggtgacaggccctgggactctgggaatacccagcttcctccccgcaacccggtgaaagccaacgcaatgttcggtgcgggggacgaggacgacaccgatttcctctcgccgagcggcggtgccagattggcctcactttttggactggatcaggcagctgctggccatggaaatgaatttttccagtacacagccccaaaacagcctaagaaaggccagggaacggcagcaacaggaaatcaggcaacaccaaaaacagcaccagccaccatgagcactcccacaatactggtcgcaacagcagtccatgcatatcgatacacaaatggtcaatatgtaaagcagggcaaatttggtgctgcagttctggggaaccacacagccagagagtataggattcttctttatatcagtcaacaacagccagttacggttgctaggattcatgtgaactttgagctaatggttcggcccaataactatagcaccttttatgatgaccagagacagaactggtccatcatgtttgagtcggaaaaggctgctgtggagttcaataagcaggtgtgcattgctaagtgcaacagtacctcttccctggatgcagtgctctcccaggacctcattgtggcagacggccctgctgtagaagttggagattctttggaagtggcctataccggctggctctttcagaatcatgtgctgggccaggttttcgactccactgctaacaaagataagttgcttcgcttgaagttaggatcaggaaaagtcatcaagggctgggaggatggaatgctgggcatgaaaaaaggaggaaagcgattgcttattgtccctccagcctgtgctgttggctcagaaggggtaataggctggactcaagcaacggactcgatcctggtgttcgaggtggaggttaggcgggtgaagtttgccagagattctggctctgatggtcacagtgttagttcccgcgattctgcagctccgtctcccatccctggtgctgacaacctctctgctgatcctgttgtgtcaccacccacatcaatacctttcaaatcaggggagccagctcttcgtaccaaatctaactccctcagtgaacaacttgcaataaatacaagtcccgatgcagtcaaagccaagttgatctctcggatggctaaaatgggccagcccatgctgcccatccttccaccacagctggattccaatgattcagaaatcgaagatgtgaacactctgcaaggaggtgggcagcctgtggtgactccgtccgtccagccctctcttcatccggcccatccagcgttaccacagatgacctcacaggcacctcagccatctgttactgggctccaggcaccttctgctgccttaatgcaagtgtcatctctcgattcccactcagctgtatctggaaatgcccaatcctttcaggtaacattttataaccgtattaattatatcctataatttgctgtggttctagtcagtctcttttcttcttcctgtacatttcatacagtagcagttccccaaagtcagagtttgtaatttttttcccttccttggttaccactttctcatctctaaaccaggcaaaggataacctacgttccagtgtcataaagattaaatgcaagaacaagtagagcccctagtacaacgtagtaaagatgcaatcaatgtttgtttccttttcttttcacacatatccagttgaagcgtgtatattcgcgttcttctgtattcttttctactaaaagttggcaggctaacattctgcagtatattcagcagaatggtatggtttaaaagtggaaccatgtggaaaatgtagcttgactctgctatctagtaaacttttcttaaagaaggcctttttcctgttatcacagaaaacaatggcagcagcctgtttgccaggggtagcagaccctttcttctgcctcaacacacttggtggataaggcatactgtcactgggaacagctgctcactccttgtgatgcttaatggaggtgtgggaatgatggtggataggctatgcctcattaacatggggagtctcgaaactggaaaaagtcccactgttgccctctttctccccatccctcctctcctccatggagaattactatgctgtagactaagaattttttttaagtggatgcgtagttatatctatccctggaaatgagctagacttccttatttcaaggaagaattaccatcctcattaaaataaaagctgctgtttattaagcgcttactatctgtcaggcctgtaacttactagcttttcagaactttacctatctcacttcatttagtccacagaacagccctatgaagtgatattattatcttcctcttacagttgaggtgaccgagactcaaaggaacatgagagctcttggtctcgtggattagcttcagaatctagcaggggagaggcatccttggaaattggcagatttggtttggaatctcagtgagcacttcttctttaaactcaatggaagctaagcagagtttattaatctaaaaacttcttagacaataggcctgataatggggaatgaatccctgcttaattatctcaccagatgactgggtagtgacctaagatacactttcttcagtttctgggtaggattttagtgactggtttcccctgggatacatagataactctcctgctgcagtccttaccaactgccaaacccagatctcacccatctctagcttcagtaagtttgagtctcctcccagctcatccactttattccac

SEQ ID NO: 134659 - DNA, 8807 bp, Homo sapiens
  Payload ID: 6308
  Gene Symbol: FKBP15
  Gene Name: FK506 binding protein 15, 133kDa
  ENST ID: ENST00000446284
  CDS Start-End: 1-3735
gacgtcggcggtgacaggccctgggactctgggaatacccagcttcctccccgcaacccggtgaaagccaacgcaatgttcggtgcgggggacgaggacgacaccgatttcctctcgccgagcggcggtgccagattggcctcactttttggactggatcaggcagctgctggccatggaaatgaatttttccagtacacagccccaaaacagcctaagaaaggccagggaacggcagcaacaggaaatcaggcaacaccaaaaacagcaccagccaccatgagcactcccacaatactggtcgcaacagcagtccatgcatatcgatacacaaatggtcaatatgtaaagcagggcaaatttggtgctgcagttctggggaaccacacagccagagagtataggattcttctttatatcagtcaacaacagccagttacggttgctaggattcatgtgaactttgagctaatggttcggcccaataactatagcaccttttatgatgaccagagacagaactggtccatcatgtttgagtcggaaaaggctgctgtggagttcaataagcaggtgtgcattgctaagtgcaacagtacctcttccctggatgcagtgctctcccaggacctcattgtggcagacggccctgctgtagaagttggagattctttggaagtggcctataccggctggctctttcagaatcatgtgctgggccaggttttcgactccactgctaacaaagataagttgcttcgcttgaagttaggatcaggaaaagtcatcaagggctgggaggatggaatgctgggcatgaaaaaaggaggaaagcgattgcttattgtccctccagcctgtgctgttggctcagaaggggtaataggctggactcaagcaacggactcgatcctggtgttcgaggtggaggttaggcgggtgaagtttgccagagattctggctctgatggtcacagtgttagttcccgcgattctgcagctccgtctcccatccctggtgctgacaacctctctgctgatcctgttgtgtcaccacccacatcaatacctttcaaatcaggggagccagctcttcgtaccaaatctaactccctcagtgaacaacttgcaataaatacaagtcccgatgcagtcaaagccaagttgatctctcggatggctaaaatgggccagcccatgctgcccatccttccaccacagctggattccaatgattcagaaatcgaagatgtgaacactctgcaaggaggtgggcagcctgtggtgactccgtccgtccagccctctcttcatccggcccatccagcgttaccacagatgacctcacaggcacctcagccatctgttactgggctccaggcaccttctgctgccttaatgcaagtgtcatctctcgattcccactcagctgtatctggaaatgcccaatcctttcagccctatgcaggtatgcaagcctacgcttatccccaggcatctgccgtcacctcccagctgcagcccgttcggcctttgtacccagcaccgctctctcagcctccccatttccaaggatcaggtgatatggcttcatttctcatgactgaagcccggcaacataacactgaaattcgaatggcagtcagcaaagtggctgataaaatggatcatctcatgactaaggttgaagagttacagaaacatagtgctggcaattccatgcttattcctagcatgtcagttacaatggaaacaagcatgattatgagcaacatccagcgaatcattcaggaaaatgaaagattgaagcaagagatccttgaaaagagcaatcggatagaagaacagaatgacaagattagtgaactaattgaacgaaatcagaggtatgttgagcagagtaacctgatgatggagaagaggaacaactcacttcagacagccacagaaaacacacaggcaagagtattgcatgctgaacaagagaaggccaaggtgacagaggagttagcagcggccactgcacaggtctctcatctgcagctgaaaatgactgctcaccaaaaaaaggaaacagagctgcagatgcagctgacagaaagcctgaaggagacagatcttctcaggggccagctcaccaaagtgcaggcaaagctctcagagctccaagaaacctctgagcaagcacagtccaaattcaaaagtgaaaagcagaaccggaaacaactggaactcaaggtgacatccctggaggaggaactgactgaccttcgagttgagaaggagtccttggaaaagaacctctcagaaaggaaaaagaagtcagctcaagagcgttctcaggccgaggaggagatagatgaaattcgcaagtcataccaggaggaattggacaaacttcgacagctcttgaaaaagactcgagtgtccacagaccaagcagctgcagagcagctgtctttagtacaggctgagctacagacccagtgggaagcaaaatgtgaacatttgttggcctccgccaaggatgagcacctgcagcagtaccaggaggtgtgcgcacagagagatgcctaccagcagaagctggtacaacttcaggaaaagtgtttagccctccaggcccaaatcacagctctcaccaagcaaaatgaacagcacatcaaggaactagagaagaacaagtcccagatgtctggggttgaagctgctgcatctgacccctcagagaaggtcaagaagatcatgaaccaggtgttccagtccttacggagagagtttgagctggaggaatcttacaatggcaggaccattctgggaaccatcatgaatacgatcaagatggtgactcttcagctgttaaaccaacaggagcaagagaaggaagagagcagcagtgaagaagaagaagaaaaagcagaagagcggccacgaagaccttcccaggagcagtcagcctcagccagttctgggcagcctcaagcacccctgaatagggagaggccagagtcccccatggtgccctcagagcaggtggtcgaggaagctgtcccgttgcctcctcaggccctcaccacttcccaggatggacacagaaggaaaggggactcagaagctgaggcactctcagagataaaagatggttcccttccacccgaactgtcttgcatcccatcccacagagttctagggcccccgacttcaattccacctgagcccctaggccctgtatccatggactctgagtgtgaggagtcacttgctgccagcccaatggcagctaagcccgacaacccatcaggaaaggtctgtgtcagggaagtagcaccagatggcccactacaagaaagctccacaagactgtccctgacttcagaccccgaggagggggacccactggccttagggcctgaaagcccaggagagcctcagcctccacagctcaagaaagatgatgtcactagctccaccggtccccacaaggagctgtcaagcacagaggcaggttccacagttgcaggagcagccctcagacccagccatcattcccagcgttccagtctctctggggatgaagaggatgaactgtttaaaggggcaactctgaaagctctgaggcccaaagcacagcctgaggaggaggatgaagacgaggtgagcatgaagggacgcccgcccccaacgcccctttttggagatgatgatgatgacgatgacattgactggctgggatgaagacccaggaaactggtgcaaaggtttctctgcaacccttccctaagcatgattttgcacagccaaccctgggtctaggcgaaccacagggtgaggtcaaggtgagcattctgggaacaatatttgggctcagagggtgggttggccaccttctgagccccacccccgccagacctggtgaagaggatcataaccctgtcttcaagaacactgggatttcagcagcaagttggaagaaggactggtaggttcccctccaagccagtcacctgtaagagtcctgtcctctgccagactttttaatctcttcattaactctcagactgacctgggagccctcctctacctgaatccagtgctcaactgtgccccggcaacaagacctgggctgaggtctccctggtagaactaagggagattacaccatctaaatcccagtgcagtcaacagcctggcctatagtcctgggacatgtatcttcttctttgccttaaatctgatacaagaggtcaatgactttgaaaataaaactaaaataaatgtctataatgaaacttgacccaagcccttggagaaaaattgagtttggttccaagggctgtctgtgctcttttgggaatctaagggtaggagtcttacagatctgggtcagttaatgtgcacaaaacgttgtggcatatttactccctttgatacctaaccctggaacttttaggctttcaaagaaagtcaccactgtagtcctagctcatccctggggcatgatggttctgtgaggaccagtccagtcatcctcttgctcctgcaggcttagtcctgcagtctaggaagccatgcaaagaaggtgagagggtcccttctttccattgttcatggcacctgagggattcttcactttgagagcagcttccattcccttagaactcatgggaccaggacttatgcagagaacagtagtgagaaaatacttgtggtcattttcttgattccaggatcttccaaagattatgcaatcagtctttaaaaaaacagaataattaattttaataaaaaatgtttcttgattttaaatgttttaaaagataggacccaaaattccacttcatctggcctggcatcatccttgcaggctttggatatgtctcccgtgtgcggacctgggaggcagtgagaactaattatttctttgttgcttaacaaaaggcggtgctgtttggcactttcacagactggcttatctccagcaaccactgcagaagacagtgttatcaccattttatagaggagaaaactgagacttagagaggtaaagtaatttgcccaaagttacatatctaggaagcctcagcacaagaattcaaatcctggccatctgattccagagcctgggctcttggccagcacagcctgactgtcactggttgggggaaggggcggtgatgcttttagaaacaggcttcttgagacaccaggcagctttccagttccctgcaaacatgggggaatgccctgatcagtcctaaaggtgtgacatagtctactttctagggcagttatttcttattgtaaattaactagtggctattatatttgcttctgcccgcagggagagaagatgctgagtaattgtgccaacacaggtgcttaaagtccgtgtgacagttacttttcttatagcatgtactcaattaatacttgttacatgaatgaagaatgacttgacttgcctcagttggcattctggggtgtctacctgggtgcagcatttcagggctgggtttccctgagcagagttgtctttgtagcagatggatggactctgtcctcagacaggcttataaagagtactaccagttctattagccccactcagcccctgcagttgttacaagggttcatgtgctttctgttggaattaggagaacagaacagtcatagactatttaaaaatatatatttactaaaatgtatttgtttgtttttaattcccaaagcttacaaccatcttttcatctaatctgtgaggtatttagtatacagcagtgattttctctctttccttttttataaagtgaagaggttcaactatccagagagtcccatctaactcaaaaaatgtaatggctttggttggattgcatcttcagtcagtacctgcccatggcttaatcagtattttaagtgaatgaatcatgtttccccactagatcattacgagtaagcagtaagtaataaatagagaatattaagtattgaacattattagatgcagctttttgttctgcatagaagaaagatgaggataaaggagggcattgaggccacgaagagcttcccagacacccacggccatcagatcatcttcttcctgcaggcagtgccttctggtggaaggagctcagtctatcagagaataaaccaggagcctgaaagcagtcctgtgtctctgcctttaatcagctgtcacttattctctccccaagaaagggaaataggtctcagcagtttctgccatccatcatgaatcaatgaaatcatttcattaaaaatttttttgtatgaatgtgcaaaattgccaactaggagttcaatgggaaaaataaaaaaaacttagtttgtcaacatgatccatagacgagatgatcttcatgtgttccaaaggcagaaaggtgagaaaaaggatctagcttggtctctgtccctcaaagacagaagaggtcaggaagtccaatgggcgatgctcctgtagataaggcacaaagcaggagagctgagggtgtccaggttccatgccctgcatcaccaagaacccttctccctggcttgaaatctttggaaattcctggtttgagtcacagagaagcattgtcatgggctcagtaaccctgccacccctgttatctccattctccctttggtcacagcagctgtcttaagacacaagaccatgcctgggccctacgtaggctggctgagaaggaaggttgctgcaatggcttccgaactccagggagcaagtgctggcttcagctcaaagtttccaggggctgggaataaggtggaggaatagccatcagaagaaagggcagttggaagtatagtgtctggaagagggggctccatgtccctccagcctcagtgcctgcacgttcctcaccagctaagctgtgctgagaagtgggtaagctaggtagtagcccacagcagagcccaagaccacaccaaggaaaatccaggtgttgtaggacattacggccagcatgatgaagtagccgatgaccacctggatgacatggattagagactggccaaagtgacacaaataccacctagataaaaaggagaagcaagttaatcctggtaatgagctggtaatgaggaagctgggagtagatatcagggagtagaaagctgttgagttacgtgacccgattgatttataacttgtatgcttaacccaggagtgatttctttctgcccctcccacccccgcccccagaaaaaactcgagatttatttttaaagagacatatcttcactacatttggtttcaagcttcctggcatcctaggcaaaggggaaaatgagggtatctataatctgtctttctgataaggaataagagaaaatcatcagtaaggcatatttcccccctgaatctacttcgggaggcagtatgacaatggaaagaaaaagcatggtcttaggtgacattatcagttcctagacctgccactaactaaaagtggcctagacaaatgtcttaacctctctgaacgtaagattccttatcagtaaaacaggaatgagaatacttcccttgcagtgcagttgtgaagatctgagacacccatgtagggtggctagtgatggagcgggcaggcttattaagcacaggtgaggctggggctggacagagggcagaacagggaccctaaatggttgcctgattcgagtgggaagggaggagaggagagcttgtcatcctcctcccaccaagtgggatacattgcttcaggacagctgcagatcccctcctggatatgggagcctagtgacccatggaactggtgagatttgggggagggtgggtggccacctcatttgctagataggggcctgcacctgaagatcactgttccctaaagaaagccttctgagcctctcaagtggctggctgttcacagagtgctttggcctgggcatcaggagacatgagctctagttcacttggctatgtgtagccactttggcaagtcctggtccttccctgggcctcgctgtcctctctgtgaagtggggctaatgctgtctgggccagcctgtctctcagggtgaatgtgaggcttctgcccctttcccatacccactgcctgtacctgtggtgggttctgccaacagggaatgaatctgagcctgcagagtccccgtctgtctctgcgatggtctgctggctgatggaggttggcaggttcaccagtacctggttgagcagcttggctttgccaaccttgatgccttcatacagtacagccagaagcaggagcaccaacaccgaaagggccatgcctgtcaaaggaggcagagttgtggagacctggccaggccagcactgtttcccttccagcacctccacctgttcatggaatccactccatccacctctatcctgcaccttcttccccacccttgctgagttccgaacttcttcactgtcttcaccagacttttcttagctggagtgtggctttgagatcaggaagagaagccacctgaaaaatccaggggctgagggtgaagaagccacgtaccattaccccacccactcccccagcaggctgcacaaatctgtcgtgacttcttgttaagtgatgagtactgcaaggtcctatttatatgtaagtatgcaaaaaatgtctggaaggaaagataaatagcacaagagtaatagttatctcagcaaagtaggatacaggtggtttttatgttcttgcctaactttctaaggtttcttttatatatattacttttataataggggaaaaacccaataaattattttaccaaaacta

SEQ ID NO: 134660 - DNA, 705 bp, Homo sapiens
  Payload ID: 6309
  Gene Symbol: FKBP1A
  Gene Name: FK506 binding protein 1A, 12kDa
  ENST ID: ENST00000381715
  CDS Start-End: 60-371
ggtgagtagtggcgcgcggcggctcggagtacctctgccgccgcgcgcatcggctcagcatgcccgtctctgtctcctcagggcgcaccttccccaagcgcggccagacctgcgtggtgcactacaccgggatgcttgaagatggaaagaaatttgattcctcccgggacagaaacaagccctttaagtttatgctaggcaagcaggaggtgatccgaggctgggaagaaggggttgcccagatgagtgtgggtcagagagccaaactgactatatctccagattatgcctatggtgccactgggcacccaggcatcatcccaccacatgccactctcgtcttcgatgtggagcttctaaaactggaatgacaggaatggcctcctcccttagctccctgttcttgggtaaggaaatggaatactgaagggcccttcactgcctttgctcctcccatgttatgcccagcgtttgatgggtagcagagagaacaaaaaacaccacaaggctatttttccccctgcattctttctgtattgagtatcctttcagtgttattagtgtatgctttgaatgtaaaaattggtcaccctaaggaaaggaattggcatgtgtatgttcccagttcaactcatggagatggcagctgtttaaatgtttttctatgtagtttataaattaaaactgaattgaggactatggaaa

SEQ ID NO: 134661 - DNA, 747 bp, Homo sapiens
  Payload ID: 6309
  Gene Symbol: FKBP1A
  Gene Name: FK506 binding protein 1A, 12kDa
  Uniprot ID: P62942
  ENST ID: ENST00000381719
  CDS Start-End: 31-357
ccgcccgcccgctcagcgtccgccgccgccatgggagtgcaggtggaaaccatctccccaggagacgggcgcaccttccccaagcgcggccagacctgcgtggtgcactacaccgggatgcttgaagatggaaagaaatttgattcctcccgggacagaaacaagccctttaagtttatgctaggcaagcaggaggtgatccgaggctgggaagaaggggttgcccagatgagtgtgggtcagagagccaaactgactatatctccagattatgcctatggtgccactgggcacccaggcatcatcccaccacatgccactctcgtcttcgatgtggagcttctaaaactggaatgacaggaatggcctcctcccttagctccctgttcttgggtaaggaaatggaatactgaagggcccttcactgcctttgctcctcccatgttatgcccagcgtttgatgggtagcagagagaacaaaaaacaccacaaggctatttttccccctgcattctttctgtattgagtatcctttcagtgttattagtgtatgctttgaatgtaaaaattggtcaccctaaggaaaggaattggcatgtgtatgttcccagttcaactcatggagatggcagctgtttaaatgtttttctatgtagtttataaattaaaactgaattgaggactatggaaatgtaggccaaatttgtagtgccaacattttagttctttggaaataagactcttaat

SEQ ID NO: 134662 - DNA, 976 bp, Homo sapiens
  Payload ID: 6309
  Gene Symbol: FKBP1A
  Gene Name: FK506 binding protein 1A, 12kDa
  ENST ID: ENST00000381724
  CDS Start-End: 136-447
gcccgtcgcgccgcccgcccgctcagcgtccgccgccgccatgggagtgcaggtggaaaccatctccccaggagacggtgagtagtggcgcgcggcggctcggagtacctctgccgccgcgcgcatcggctcagcatgcccgtctctgtctcctcagggcgcaccttccccaagcgcggccagacctgcgtggtgcactacaccgggatgcttgaagatggaaagaaatttgattcctcccgggacagaaacaagccctttaagtttatgctaggcaagcaggaggtgatccgaggctgggaagaaggggttgcccagatgagtgtgggtcagagagccaaactgactatatctccagattatgcctatggtgccactgggcacccaggcatcatcccaccacatgccactctcgtcttcgatgtggagcttctaaaactggaatgacaggaatggcctcctcccttagctccctgttcttggatctgccatggagggatctggtgcctccagacatgtgcacatgaatccatatggagcttttcctgatgttccactccactttgtatagacatctgccctgactgaatgtgttctgtcactcagctttgcttccgacacctctgtttcctcttcccctttctcctcgtatgtgtgtttacctaaactatatgccataaacctcaagttattcattttattttgttttcattttggggtgaagattcagtttcagtcttttggatataggtttccaattaagtacatggtcaagtattaacagcacaagtggtaggttaacattagaataggaattggtgttggggggggggtttgcaagaatattttattttaattttttggatgaaatttttatctattatatattaaacattcttgctgctgcgctgcaaagccatagcagatttgaggcgctgttgaggactgaattactctccaagttgagagatgtctt

SEQ ID NO: 134663 - DNA, 1622 bp, Homo sapiens
  Payload ID: 6309
  Gene Symbol: FKBP1A
  Gene Name: FK506 binding protein 1A, 12kDa
  Uniprot ID: P62942
  ENST ID: ENST00000400137
  CDS Start-End: 165-491
gtcgcgcgccgtgtggggcgcgcacgcagggctgggcgtgagggggcgtgcgcgtgcgcaggcgacgcgccgaggtactaggcagagccgtggaaccgccgccaggtcgctgttggtccacgccgcccgtcgcgccgcccgcccgctcagcgtccgccgccgccatgggagtgcaggtggaaaccatctccccaggagacgggcgcaccttccccaagcgcggccagacctgcgtggtgcactacaccgggatgcttgaagatggaaagaaatttgattcctcccgggacagaaacaagccctttaagtttatgctaggcaagcaggaggtgatccgaggctgggaagaaggggttgcccagatgagtgtgggtcagagagccaaactgactatatctccagattatgcctatggtgccactgggcacccaggcatcatcccaccacatgccactctcgtcttcgatgtggagcttctaaaactggaatgacaggaatggcctcctcccttagctccctgttcttggatctgccatggagggatctggtgcctccagacatgtgcacatgaatccatatggagcttttcctgatgttccactccactttgtatagacatctgccctgactgaatgtgttctgtcactcagctttgcttccgacacctctgtttcctcttcccctttctcctcgtatgtgtgtttacctaaactatatgccataaacctcaagttattcattttattttgttttcattttggggtgaagattcagtttcagtcttttggatataggtttccaattaagtacatggtcaagtattaacagcacaagtggtaggttaacattagaataggaattggtgttggggggggggtttgcaagaatattttattttaattttttggatgaaatttttatctattatatattaaacattcttgctgctgcgctgcaaagccatagcagatttgaggcgctgttgaggactgaattactctccaagttgagagatgtctttgggttaaattaaaagccctacctaaaactgaggtggggatggggagagcctttgcctccaccattcccacccaccctccccttaaaccctctgcctttgaaagtagatcatgttcactgcaatgctggacactacaggtatctgtccctgggccagcagggacctctgaagccttctttgtggccttttttttttttcatcctgtggtttttctaatggactttcaggaattttgtaatctcataactttccaagctccaccacttcctaaatcttaagaactttaattgacagtttcaattgaaggtgctgtttgtagacttaacacccagtgaaagcccagccatcatgacaaatccttgaatgttctcttaagaaaatgatgctggtcatcgcagcttcagcatctcctgttttttgatgcttggctccctctgctgatctcagtttcctggcttttcctccctcagccccttctcacccctttgctgtcctgtgtagtgatttggtgagaaatcgttgctgcacccttcccccagcaccatttatgagtctcaagttttattattgcaataaaagtgctttatgccggcttttctca

SEQ ID NO: 134664 - DNA, 1583 bp, Homo sapiens
  Payload ID: 6309
  Gene Symbol: FKBP1A
  Gene Name: FK506 binding protein 1A, 12kDa
  ENST ID: ENST00000439640
  CDS Start-End: 175-453
tttccgggacgtcgcgcgccgtgtggggcgcgcacgcagggctgggcgtgagggggcgtgcgcgtgcgcaggcgacgcgccgaggtactaggcagagccgtggaaccgccgccaggtcgctgttggtccacgccgcccgtcgcgccgcccgcccgctcagcgtccgccgccgccatgggagtgcaggtggaaaccatctccccaggagacgggatgcttgaagatggaaagaaatttgattcctcccgggacagaaacaagccctttaagtttatgctaggcaagcaggaggtgatccgaggctgggaagaaggggttgcccagatgagtgtgggtcagagagccaaactgactatatctccagattatgcctatggtgccactgggcacccaggcatcatcccaccacatgccactctcgtcttcgatgtggagcttctaaaactggaatgacaggaatggcctcctcccttagctccctgttcttggatctgccatggagggatctggtgcctccagacatgtgcacatgaatccatatggagcttttcctgatgttccactccactttgtatagacatctgccctgactgaatgtgttctgtcactcagctttgcttccgacacctctgtttcctcttcccctttctcctcgtatgtgtgtttacctaaactatatgccataaacctcaagttattcattttattttgttttcattttggggtgaagattcagtttcagtcttttggatataggtttccaattaagtacatggtcaagtattaacagcacaagtggtaggttaacattagaataggaattggtgttggggggggggtttgcaagaatattttattttaattttttggatgaaatttttatctattatatattaaacattcttgctgctgcgctgcaaagccatagcagatttgaggcgctgttgaggactgaattactctccaagttgagagatgtctttgggttaaattaaaagccctacctaaaactgaggtggggatggggagagcctttgcctccaccattcccacccaccctccccttaaaccctctgcctttgaaagtagatcatgttcactgcaatgctggacactacaggtatctgtccctgggccagcagggacctctgaagccttctttgtggccttttttttttttcatcctgtggtttttctaatggactttcaggaattttgtaatctcataactttccaagctccaccacttcctaaatcttaagaactttaattgacagtttcaattgaaggtgctgtttgtagacttaacacccagtgaaagcccagccatcatgacaaatccttgaatgttctcttaagaaaatgatgctggtcatcgcagcttcagcatctcctgttttttgatgcttggctccctctgctgatctcagtttcctggcttttcctccctcagccccttctcacccctttgctgtcctgtgtagtgatttggtgagaaatcgttgctgcacccttcccccagcaccatttatgagtctcaagttttattattgcaataaaagtgctttatgccggcttttctc

SEQ ID NO: 134665 - DNA, 1518 bp, Homo sapiens
  Payload ID: 6309
  Gene Symbol: FKBP1A
  Gene Name: FK506 binding protein 1A, 12kDa
  ENST ID: ENST00000618612
  CDS Start-End: 175-468
tttccgggacgtcgcgcgccgtgtggggcgcgcacgcagggctgggcgtgagggggcgtgcgcgtgcgcaggcgacgcgccgaggtactaggcagagccgtggaaccgccgccaggtcgctgttggtccacgccgcccgtcgcgccgcccgcccgctcagcgtccgccgccgccatgggagtgcaggtggaaaccatctccccaggagacgggcgcaccttccccaagcgcggccagacctgcgtggtgcactacaccgatgagtgtgggtcagagagccaaactgactatatctccagattatgcctatggtgccactgggcacccaggcatcatcccaccacatgccactctcgtcttcgatgtggagcttctaaaactggaatgacaggaatggcctcctcccttagctccctgttcttggatctgccatggagggatctggtgcctccagacatgtgcacatgaatccatatggagcttttcctgatgttccactccactttgtatagacatctgccctgactgaatgtgttctgtcactcagctttgcttccgacacctctgtttcctcttcccctttctcctcgtatgtgtgtttacctaaactatatgccataaacctcaagttattcattttattttgttttcattttggggtgaagattcagtttcagtcttttggatataggtttccaattaagtacatggtcaagtattaacagcacaagtggtaggttaacattagaataggaattggtgttggggggggggtttgcaagaatattttattttaattttttggatgaaatttttatctattatatattaaacattcttgctgctgcgctgcaaagccatagcagatttgaggcgctgttgaggactgaattactctccaagttgagagatgtctttgggttaaattaaaagccctacctaaaactgaggtggggatggggagagcctttgcctccaccattcccacccaccctccccttaaaccctctgcctttgaaagtagatcatgttcactgcaatgctggacactacaggtatctgtccctgggccagcagggacctctgaagccttctttgtggccttttttttttttcatcctgtggtttttctaatggactttcaggaattttgtaatctcataactttccaagctccaccacttcctaaatcttaagaactttaattgacagtttcaattgaaggtgctgtttgtagacttaacacccagtgaaagcccagccatcatgacaaatccttgaatgttctcttaagaaaatgatgctggtcatcgcagcttcagcatctcctgttttttgatgcttggctccctctgctgatctcagtttcctggcttttcctccctcagccccttctcacccctttgctgtcctgtgtagtgatttggtgagaaatcgttgctgcacccttcccccagcaccatttatgagtctcaagttttattattgcaataaaagtgctttatgccggcttttctc

SEQ ID NO: 134666 - DNA, 409 bp, Homo sapiens
  Payload ID: 6309
  Gene Symbol: FKBP1A
  Gene Name: FK506 binding protein 1A, 12kDa
  ENST ID: ENST00000612074
  CDS Start-End: 1-114
atgggagtgcaggtggaaaccatctccccaggagacgggcgcaccttccccaagcgcggccagacctgcgtggtgcactacaccggtggtgactgcattctggtaaacgaatgagctaaatgcataccccagctcaccagttctggggcaccagttccttggagcagggatgcttgaagatggaaagaaatttgattcctcccgggacagaaacaagccctttaagtttatgctaggcaagcaggaggtgatccgaggctgggaagaaggggttgcccagatgagtgtgggtcagagagccaaactgactatatctccagattatgcctatggtgccactgggcacccaggcatcatcccaccacatgccactctcgtcttcgatgtggagcttctaaaactggaatga

SEQ ID NO: 134667 - DNA, 562 bp, Homo sapiens
  Payload ID: 6309
  Gene Symbol: FKBP1A
  Gene Name: FK506 binding protein 1A, 12kDa
  ENST ID: ENST00000614856
  CDS Start-End: 167-556
acgtcgcgcgccgtgtggggcgcgcacgcagggctgggcgtgagggggcgtgcgcgtgcgcaggcgacgcgccgaggtactaggcagagccgtggaaccgccgccaggtcgctgttggtccacgccgcccgtcgcgccgcccgcccgctcagcgtccgccgccgccatgggagtgcaggtggaaaccatctccccaggagacgggcgcaccttccccaagcgcggccagacctgcgtggtgcactacaccgggatgcttgaagatggaaagaaatttgattcctcccgggacagaaacaagccctttaagtttatgctaggcaagcaggaggtgatccgaggctgggaagaaggggttgcccaggtatgctctctcatttgttttgttttgctttctagtatttaccttttatatttttttataggtggcatatttatacggttcaaaaataaaaaaagtgaaaagtctcaccctcatgccatcccatctgaccaatacccccacaagaagctcctgttgttaatgtttcttgtactgtggtttaagcacatataaaaacat

SEQ ID NO: 134668 - DNA, 952 bp, Homo sapiens
  Payload ID: 6310
  Gene Symbol: FKBP1B
  Gene Name: FK506 binding protein 1B, 12.6 kDa
  Uniprot ID: P68106
  ENST ID: ENST00000380986
  CDS Start-End: 137-463
gactccagccgcacctcctccggctctgcagtggcggcgaggaggcgagccggagcgacggcggggctggggccggagccgagccggggtcgggcagcagcagggaccccccagaggcggggcctgtgggaccgctatgggcgtggagatcgagaccatctcccccggagacggaaggacattccccaagaagggccaaacgtgtgtggtgcactacacaggaatgctccaaaatgggaagaagtttgattcatccagagacagaaacaaacctttcaagttcagaattggcaaacaggaagtcatcaaaggttttgaagagggtgcagcccagatgagcttggggcagagggcgaagctgacctgcacccctgatgtggcatatggagccacgggccaccccggtgtcatccctcccaatgccaccctcatctttgacgtggagctgctcaacttagagtgaaggcaggaaggaactcaaggtggctggagatggctgctgctcaccctcctagcctgctctgccactgggacggctcctgcttttggggctcttgatcagtgtgctaacctcactgcctcatggcatcatccattctctctgcccaagttgctctgtatgtgttcgtcagtgttcatgcgaattcttgcttgaggaaacttcggttgcagattgaagcatttcaggttgtgcattttgtgtgatgcatgtagtagcctttcctgatgacagaacacagatctcttgttcgcacaatctacactgccttaccttcacttaaaccacacacacaaggtgctcagacatgaaatgtacatggcgtaccgtacacagagggacttgagccagttacctttgctgtcactttctctcttataaattctgttagctgctcacttaaacaatgtcctctttgagaaaatgtaaaataaaggctctgtgcttgacaaa

SEQ ID NO: 134669 - DNA, 1010 bp, Homo sapiens
  Payload ID: 6310
  Gene Symbol: FKBP1B
  Gene Name: FK506 binding protein 1B, 12.6 kDa
  Uniprot ID: P68106
  ENST ID: ENST00000380991
  CDS Start-End: 150-392
ccgcgcaggtcccgactccagccgcacctcctccggctctgcagtggcggcgaggaggcgagccggagcgacggcggggctggggccggagccgagccggggtcgggcagcagcagggaccccccagaggcggggcctgtgggaccgctatgggcgtggagatcgagaccatctcccccggagacggaaggacattccccaagaagggccaaacgtgtgtggtgcactacacaggaatgctccaaaatgggaagaagtttgattcatccagagacagaaacaaacctttcaagttcagaattggcaaacaggaagtcatcaaaggttttgaagagggtgcagcccagctgggtcctctttctcctctccccatctgcccccatccctgctagatgagcttggggcagagggcgaagctgacctgcacccctgatgtggcatatggagccacgggccaccccggtgtcatccctcccaatgccaccctcatctttgacgtggagctgctcaacttagagtgaaggcaggaaggaactcaaggtggctggagatggctgctgctcaccctcctagcctgctctgccactgggacggctcctgcttttggggctcttgatcagtgtgctaacctcactgcctcatggcatcatccattctctctgcccaagttgctctgtatgtgttcgtcagtgttcatgcgaattcttgcttgaggaaacttcggttgcagattgaagcatttcaggttgtgcattttgtgtgatgcatgtagtagcctttcctgatgacagaacacagatctcttgttcgcacaatctacactgccttaccttcacttaaaccacacacacaaggtgctcagacatgaaatgtacatggcgtaccgtacacagagggacttgagccagttacctttgctgtcactttctctcttataaattctgttagctgctcacttaaacaatgtcctctttgagaaaatgtaaaataaaggctctgtgcttgacaaa

SEQ ID NO: 134670 - DNA, 859 bp, Homo sapiens
  Payload ID: 6310
  Gene Symbol: FKBP1B
  Gene Name: FK506 binding protein 1B, 12.6 kDa
  ENST ID: ENST00000421839
  CDS Start-End: 1-128
tccccaagaagggccaaacgtgtgtggtgcactacacagccagtctagtgggaatgataaaggaggcttggaaggccaactctttccctcttctaccagcaagggccatccatggtgccagcttctaggaatgctccaaaatgggaagaagtttgattcatccagagacagaaacaaacctttcaagttcagaattggcaaacaggaagtcatcaaaggttttgaagagggtgcagcccagatgagcttggggcagagggcgaagctgacctgcacccctgatgtggcatatggagccacgggccaccccggtgtcatccctcccaatgccaccctcatctttgacgtggagctgctcaacttagagtgaaggcaggaaggaactcaaggtggctggagatggctgctgctcaccctcctagcctgctctgccactgggacggctcctgcttttggggctcttgatcagtgtgctaacctcactgcctcatggcatcatccattctctctgcccaagttgctctgtatgtgttcgtcagtgttcatgcgaattcttgcttgaggaaacttcggttgcagattgaagcatttcaggttgtgcattttgtgtgatgcatgtagtagcctttcctgatgacagaacacagatctcttgttcgcacaatctacactgccttaccttcacttaaaccacacacacaaggtgctcagacatgaaatgtacatggcgtaccgtacacagagggacttgagccagttacctttgctgtcactttctctcttataaattctgttagctgctcacttaaacaatgtcctctttgagaaaatgtaaaataaaggctctgtgcttgacaaa

SEQ ID NO: 134671 - DNA, 953 bp, Homo sapiens
  Payload ID: 6310
  Gene Symbol: FKBP1B
  Gene Name: FK506 binding protein 1B, 12.6 kDa
  ENST ID: ENST00000452109
  CDS Start-End: 235-474
acggcggggctggggccggagccgagccggggtcgggcagcagcagggaccccccagaggcggggcctgtgggaccgctatgggcgtggagatcgagaccatctcccccggagacggaaggacattccccaagaagggccaaacgtgtgtggtgcactacacaggcgaggtagagtgagttcttcaggactgctggcaggaagatcatgagcaggtgtttgttccaagggaggaatgctccaaaatgggaagaagtttgattcatccagagacagaaacaaacctttcaagttcagaattggcaaacaggaagtcatcaaaggttttgaagagggtgcagcccagatgagcttggggcagagggcgaagctgacctgcacccctgatgtggcatatggagccacgggccaccccggtgtcatccctcccaatgccaccctcatctttgacgtggagctgctcaacttagagtgaaggcaggaaggaactcaaggtggctggagatggctgctgctcaccctcctagcctgctctgccactgggacggctcctgcttttggggctcttgatcagtgtgctaacctcactgcctcatggcatcatccattctctctgcccaagttgctctgtatgtgttcgtcagtgttcatgcgaattcttgcttgaggaaacttcggttgcagattgaagcatttcaggttgtgcattttgtgtgatgcatgtagtagcctttcctgatgacagaacacagatctcttgttcgcacaatctacactgccttaccttcacttaaaccacacacacaaggtgctcagacatgaaatgtacatggcgtaccgtacacagagggacttgagccagttacctttgctgtcactttctctcttataaattctgttagctgctcacttaaacaatgtcctctttgagaaaatgtaaaataaaggctctgt

SEQ ID NO: 134672 - DNA, 1137 bp, Homo sapiens
  Payload ID: 6310
  Gene Symbol: FKBP1B
  Gene Name: FK506 binding protein 1B, 12.6 kDa
  ENST ID: ENST00000438630
  CDS Start-End: 120-293
ctccggctctgcagtggcggcgaggaggcgagccggagcgacggcggggctggggccggagccgagccggggtcgggcagcagcagggaccccccagaggcggggcctgtgggaccgctatgggcgtggagatcgagaccatctcccccggagacggaaggacattccccaagaagggccaaacgtgtgtggtgcactacacagccagtctagtgggaatgataaaggaggcttggaaggccaactctttccctcttctaccagcaagggccatccatggtgccagcttctaggcgaggtagagtgagttcttcaggactgctggcaggaagatcatgagcaggtgtttgttccaagggaggaatgctccaaaatgggaagaagtttgattcatccagagacagaaacaaacctttcaagttcagaattggcaaacaggaagtcatcaaaggttttgaagagggtgcagcccagctgggtcctctttctcctctccccatctgcccccatccctgctagatgagcttggggcagagggcgaagctgacctgcacccctgatgtggcatatggagccacgggccaccccggtgtcatccctcccaatgccaccctcatctttgacgtggagctgctcaacttagagtgaaggcaggaaggaactcaaggtggctggagatggctgctgctcaccctcctagcctgctctgccactgggacggctcctgcttttggggctcttgatcagtgtgctaacctcactgcctcatggcatcatccattctctctgcccaagttgctctgtatgtgttcgtcagtgttcatgcgaattcttgcttgaggaaacttcggttgcagattgaagcatttcaggttgtgcattttgtgtgatgcatgtagtagcctttcctgatgacagaacacagatctcttgttcgcacaatctacactgccttaccttcacttaaaccacacacacaaggtgctcagacatgaaatgtacatggcgtaccgtacacagagggacttgagccagttacctttgctgtcactttctctcttataaattctgttagctgctcacttaaacaatgtcctctttgagaaaatgtaaaataaaggctctgtgcttgacaaa

SEQ ID NO: 134673 - DNA, 1579 bp, Homo sapiens
  Payload ID: 6311
  Gene Symbol: FKBP1C
  Gene Name: FK506 binding protein 1C
  ENST ID: ENST00000370659
  CDS Start-End: 112-438
atgggcaggcaacgcgctgagggactaggcagagccgtggaaccgccgccaggtcgctgtcggtccacgccgcccgtcgcgctgcccgcccgctcggcgtcggccgccgccatgggagtgcacgtggaaaccatctccccaggagactggcgcaccttcccgaagcgcagccagacctgcgtgatgcactacaccgggatgcttgaagatggaaagaaatttgattcctcccgggacagaaacaagccctttaagtttatgctaggcaagcaggaggtgatccgaggctgggaagaaggggttgtccagatgagtgtgggtcagagagccaaactgactatatctccagattatgcctatggtgccactgggcacccaggcatcatcccaccacatgccactctcgtcttcgatgtggagcttctaaaactggaatgacaggaatggcctcctcccttagctccctgttcttggatctgccatggagggatctggtgcctccagacgtgtgcacataaatccatatggagcttttcctgatgttccactccactttgtatagacatctgccccaactgaatgtgttctgtcactcagctttgcttccgacacctctgtttcctcttcccctttctcctggtatgtgcgtttacctaaactatatgccataaacgtcaagttattcattttactttttcattttggggtgaagattcagtttcagtcttttgaatataggtttccaattaagtacatggtcaagtgttaacagcacaagtgataagttaacgttaggataggaattggtgttgagggggttgcaagaatattttattttaattttttggatgaaatttttatctattatatattaaacattcttgctgctgcgctgcaaaaccatagcagatttgaggcactgttgaggactgaattattctccaagttgagagatgtccttgggttaaattaaaagccctacctaaaactgaggtggggatggggagaggctttgcctccaccattcccaccccaccctccccttaaaccctctgcctttgaaagcaggtcatgttcactgcgatgctggacactacaggtatctgtccctgggccagcagggacctctgaagccttctttgtggccttatttttttttttttttttttcatcctgtggtttttctaacggactttcaggaattttgtaatctcataactttccaagctccaccacttcctaaatcttaagaactttaattgacagtttcaattgaaggtgctgtttgtagacttaacacccagtgaaagcccagccatcatgacaaatccttgaatgttctcttaagaaaatgatgctggtcatcccagcttcagcatctcctgttttttgatgcttggctccctctgctgatctcagagtttcctggcttttcctccctcagccacttctcacccctttgctgtcctgtgtagtgatttggtgagaggaatcgttgctgcccccttcccctagcaccatatatgagtctcaagttttattattgcaataaaagtgctttatgctggcttttctcaaa

SEQ ID NO: 134674 - DNA, 657 bp, Homo sapiens
  Payload ID: 6312
  Gene Symbol: FKBP2
  Gene Name: FK506 binding protein 2, 13kDa
  Uniprot ID: P26885
  ENST ID: ENST00000309366
  CDS Start-End: 134-562
ggcgtgtggccgcgggtttcgcacggtccaataagggagggcggcgtggcccggcctggtagcgacgaggacgcgcctgcgcagaggcggcagcaccaccggggttgactccgggggcgcggcgaggagagacatgaggctgagctggttccgggtcctgacagtactgtccatctgcctgagcgccgtggccacggccacgggggccgagggcaaaaggaagctgcagatcggggtcaagaagcgggtggaccactgtcccatcaaatcgcgcaaaggggatgtcctgcacatgcactacacggggaagctggaagatgggacagagtttgacagcagcctgccccagaaccagccctttgtcttctcccttggcacaggccaggtcatcaagggctgggaccaggggctgctggggatgtgtgagggggaaaagcgcaagctggtgatcccatccgagctagggtatggagagcggggagctcccccaaagattccaggtggtgcaaccctggtgttcgaggtggagctgctcaaaatagagcgacgaactgagctgtaaccagactggggaggggcagggggagaggcccccatcagggaccagactgttccaaaaaaaaaacaaaaaacaaaaacaaacaaaaaaacacttaa

SEQ ID NO: 134675 - DNA, 1002 bp, Homo sapiens
  Payload ID: 6312
  Gene Symbol: FKBP2
  Gene Name: FK506 binding protein 2, 13kDa
  Uniprot ID: P26885
  ENST ID: ENST00000394540
  CDS Start-End: 471-899
gtggtgtgggtggagcgggctcggcggccagcagacacagggccagtctgggtgccccggagacccccaagggctcagagttggggcggcgccccgggcggaagcacagggccaggctggggggtatctcccgaggacccgggctcctcggagccacccagtggggatgtgtgggtgcctcggggccggccccctgcagcggccgcagaggtgttggtgtgctggaccgggggcagctgggtgtggcgtgagtggggccgcccagtcggggcaactgcagtgcagccagatagggtctggactttgcgtaaagggacaggcgggaactgaagagcggaggtggggactgggagggagggaaggtatgggggtgagcaaaggggcgggtccctggctgctgtggcctcccctgaccccctccccccgctgctggggtcctcggccaagcccccttctcactggactgagacatgaggctgagctggttccgggtcctgacagtactgtccatctgcctgagcgccgtggccacggccacgggggccgagggcaaaaggaagctgcagatcggggtcaagaagcgggtggaccactgtcccatcaaatcgcgcaaaggggatgtcctgcacatgcactacacggggaagctggaagatgggacagagtttgacagcagcctgccccagaaccagccctttgtcttctcccttggcacaggccaggtcatcaagggctgggaccaggggctgctggggatgtgtgagggggaaaagcgcaagctggtgatcccatccgagctagggtatggagagcggggagctcccccaaagattccaggtggtgcaaccctggtgttcgaggtggagctgctcaaaatagagcgacgaactgagctgtaaccagactggggaggggcagggggagaggcccccatcagggaccagactgttccaaaaaaaaaacaaaaaacaaaaacaaacaaaaaaacacttaaaagcccaa

SEQ ID NO: 134676 - DNA, 613 bp, Homo sapiens
  Payload ID: 6312
  Gene Symbol: FKBP2
  Gene Name: FK506 binding protein 2, 13kDa
  Uniprot ID: P26885
  ENST ID: ENST00000449942
  CDS Start-End: 88-516
ctggggggagccggggtgcaagagggcaggctggatcaggccgggcagaagcggaccgggctccgagtgtcaacgagagctagagacatgaggctgagctggttccgggtcctgacagtactgtccatctgcctgagcgccgtggccacggccacgggggccgagggcaaaaggaagctgcagatcggggtcaagaagcgggtggaccactgtcccatcaaatcgcgcaaaggggatgtcctgcacatgcactacacggggaagctggaagatgggacagagtttgacagcagcctgccccagaaccagccctttgtcttctcccttggcacaggccaggtcatcaagggctgggaccaggggctgctggggatgtgtgagggggaaaagcgcaagctggtgatcccatccgagctagggtatggagagcggggagctcccccaaagattccaggtggtgcaaccctggtgttcgaggtggagctgctcaaaatagagcgacgaactgagctgtaaccagactggggaggggcagggggagaggcccccatcagggaccagactgttccaaaaaaaaaacaaaaaacaaaaacaaacaaaaaaacacttaaaa

SEQ ID NO: 134677 - DNA, 639 bp, Homo sapiens
  Payload ID: 6312
  Gene Symbol: FKBP2
  Gene Name: FK506 binding protein 2, 13kDa
  ENST ID: ENST00000535135
  CDS Start-End: 334-639
tggccccgggcgtcctcgcgggggtggtctccgtggtggccgggcttggggacgccgtaggccgagaactccaccgggagaggtggtgtgggtggagcgggctcggcggccagcagacacagggccagtctgggtgccccggagacccccaagggctcagagttggggcggcgccccgggcggaagcacagggccaggctggggggtatctcccgaggacccgggctcctcggagccacccagtggggatgtgtgggtgcctcggggccggccccctgcagcggccgcagaggtgttggtgtgctggaccgggggcagctgggtgtggcagacatgaggctgagctggttccgggtcctgacagtactgtccatctgcctgagcgccgtggccacggccacgggggccgagggcaaaaggaagctgcagatcggggtcaagaagcgggtggaccactgtcccatcaaatcgcgcaaaggggatgtcctgcacatgcactacacggggaagctggaagatgggacagagtttgacagcagcctgccccagaaccagccctttgtcttctcccttggcacaggccaggtcatcaagggctgggaccaggggctgctggggatgtgtgagggggaaaagcgc

SEQ ID NO: 134678 - DNA, 1684 bp, Homo sapiens
  Payload ID: 6313
  Gene Symbol: FKBP3
  Gene Name: FK506 binding protein 3, 25kDa
  Uniprot ID: Q00688
  ENST ID: ENST00000216330
  CDS Start-End: 412-1086
gtcagcctacatttttttaagtaaggagtcctgatgttcaactattaaatctttattataggttatagactggactttaaaggcatagctgccttaaatgtgggtaatggttgataaatgtcgctaccatcagaggtcgcttcacaaggtgtctaattcagaatcgaagatctctagcggtcttctactcagtcgactgcagagacgaccgcggtaggtttttcaacccggactcaacaaagaagccctcatagcacagccttgacgtcactcaaagacaggccccaatcccgactgctagagcagaggcccgcccctcgacctccgtgagtggccccgccccgccctagggggcggggcgatgccgaactgcggcgggctggctcagtaaagcggaggcagcgggggaagatggcggcggccgttccacagcgggcgtggaccgtggagcagctgcgcagtgagcagctgcccaagaaggacattatcaagtttctgcaggaacacggttcagattcgtttcttgcagaacataaattattaggaaacattaaaaatgtggccaagacagctaacaaggaccacttggttacagcctataaccatctttttgaaactaagcgttttaagggtactgaaagtataagtaaagtgtctgagcaagtaaaaaatgtgaagcttaatgaagataaacccaaagaaaccaagtctgaagagaccctggatgagggtccaccaaaatatactaaatctgttctgaaaaagggagataaaaccaactttcccaaaaagggagatgttgttcactgctggtatacaggaacactacaagatgggactgtttttgatactaatattcaaacaagtgcaaagaagaagaaaaatgccaagcctttaagttttaaggtcggagtaggcaaagttatcagaggatgggatgaagctctcttgactatgagtaaaggagaaaaggctcgactggagattgaaccagaatgggcttacggaaagaaaggacagcctgatgccaaaattccaccaaatgcaaaactcacttttgaagtggaattagtggatattgattgaaatagcagtgcttcagctctaaggatattagcaacaatgataaaacttggccttgaagaaatttacacaactagttagaacttgttactattgtaaaggaagagtcaactggaaaattcaaggagttaataaaatttgtttacttggtcccagcttttgagagataaatcccttatgaatccctggtctaaaatactttcctacagctgtgtaaaatactggtcaaggagaactttttccttttacctcatgttgtaaacttaagtggctcaataaaaattgatccactgtcttgatctgactgtgatttgtttggtgttaatatattattgttctgattagggaattggaactaaggacctcatcaaaccagggagtaactcccagtaaaattatctggacagattgcctgtataatgagaaggcaaaagcataaggcttgaggggaaacaaaatgctaaaagcagaaaaatcttggcaggaagatcaagacctgaatttagaaaaggtgtacttcaaaaccaatgagccactaataaaggtgaacataaggttaatattactaattgatccccccaaaataaattcataaacaatt

SEQ ID NO: 134679 - DNA, 1346 bp, Homo sapiens
  Payload ID: 6313
  Gene Symbol: FKBP3
  Gene Name: FK506 binding protein 3, 25kDa
  Uniprot ID: Q00688
  ENST ID: ENST00000396062
  CDS Start-End: 74-748
gccccgccctagggggcggggcgatgccgaactgcggcgggctggctcagtaaagcggaggcagcgggggaagatggcggcggccgttccacagcgggcgtggaccgtggagcagctgcgcagtgagcagctgcccaagaaggacattatcaagtttctgcaggaacacggttcagattcgtttcttgcagaacataaattattaggaaacattaaaaatgtggccaagacagctaacaaggaccacttggttacagcctataaccatctttttgaaactaagcgttttaagggtactgaaagtataagtaaagtgtctgagcaagtaaaaaatgtgaagcttaatgaagataaacccaaagaaaccaagtctgaagagaccctggatgagggtccaccaaaatatactaaatctgttctgaaaaagggagataaaaccaactttcccaaaaagggagatgttgttcactgctggtatacaggaacactacaagatgggactgtttttgatactaatattcaaacaagtgcaaagaagaagaaaaatgccaagcctttaagttttaaggtcggagtaggcaaagttatcagaggatgggatgaagctctcttgactatgagtaaaggagaaaaggctcgactggagattgaaccagaatgggcttacggaaagaaaggacagcctgatgccaaaattccaccaaatgcaaaactcacttttgaagtggaattagtggatattgattgaaatagcagtgcttcagctctaaggatattagcaacaatgataaaacttggccttgaagaaatttacacaactagttagaacttgttactattgtaaaggaagagtcaactggaaaattcaaggagttaataaaatttgtttacttggtcccagcttttgagagataaatcccttatgaatccctggtctaaaatactttcctacagctgtgtaaaatactggtcaaggagaactttttccttttacctcatgttgtaaacttaagtggctcaataaaaattgatccactgtcttgatctgactgtgatttgtttggtgttaatatattattgttctgattagggaattggaactaaggacctcatcaaaccagggagtaactcccagtaaaattatctggacagattgcctgtataatgagaaggcaaaagcataaggcttgaggggaaacaaaatgctaaaagcagaaaaatcttggcaggaagatcaagacctgaatttagaaaaggtgtacttcaaaaccaatgagccactaataaaggtgaacataaggttaatattactaattgatccccccaaaataaattcataaacaatt

SEQ ID NO: 134680 - DNA, 643 bp, Homo sapiens
  Payload ID: 6313
  Gene Symbol: FKBP3
  Gene Name: FK506 binding protein 3, 25kDa
  ENST ID: ENST00000557324
  CDS Start-End: 28-225
tcagtaaagcggaggcagcgggggaagatggcggcggccgttccacagcgggcgtggaccgtggagcagctgcgcagtgagcagctgcccaagaaggacattatcaagtttctgcaggaacacggttcagattcggctggagtgcagtggcgcgatctcggctcactgcaacctccgcctcccgggttcaaacgattctcctgcctctgcctctcgagtagctaggactacaggcgcgtgccaccacgccagtttcttgcagaacataaattattaggaaacattaaaaatgtggccaagacagctaacaaggaccacttggttacagcctataaccatctttttgaaactaagcgttttaagggtactgaaagtataagtaaagtgtctgagcaagtaaaaaatgtgaagcttaatgaagataaacccaaagaaaccaagtctgaagagaccctggatgagggtccaccaaaatatactaaatctgttctgaaaaagggagataaaaccaactttcccaaaaagggagatgttgttcactgctggtatacaggaacactacaagatgggactgtttttgatactaatattcaaacaagtgcaaagaagaagaaaaatgccaagcctttaagttttaaggtcg

SEQ ID NO: 134681 - DNA, 3732 bp, Homo sapiens
  Payload ID: 6314
  Gene Symbol: FKBP4
  Gene Name: FK506 binding protein 4, 59kDa
  Uniprot ID: Q02790
  ENST ID: ENST00000001008
  CDS Start-End: 188-1567
gagccgctcctgacccacctaccccagctctcgcgccgcgtgcagaggtgctcaagcctcctcgcggtccgcagtcagtgccgccgcgcccggcctcccgcacgccccgcaggtagcgcccccgcccgcggcccagagtgcgctcgcgccggcaccagctcccggataaacggcgcgccgcgcggagatgacagccgaggagatgaaggcgaccgagagcggggcgcagtcggcgccgctgcccatggagggagtggacatcagccccaaacaggacgaaggcgtgctgaaggtcatcaagagagagggcacaggtacagagatgcccatgattggggaccgagtctttgtccactacactggctggctattagatggcacaaagtttgactccagtctggatcgcaaggacaaattctcctttgacctgggaaaaggggaggtcatcaaggcttgggacattgccatagccaccatgaaggtgggggaggtgtgccacatcacctgcaaaccagaatatgcctacggttcagcaggcagtcctccaaagattccccccaatgccacgcttgtatttgaggtggagttgtttgagtttaagggagaagatctgacggaagaggaagatggcggaatcattcgcagaatacagactcgcggtgaaggctatgctaagcccaatgagggtgctatcgtggaggttgcactggaagggtactacaaggacaagctctttgaccagcgggagctccgctttgagattggcgagggggagaacctggatctgccttatggtctggagagggccattcagcgcatggagaaaggagaacattccatcgtgtacctcaagcccagctatgcttttggcagtgttgggaaggaaaagttccaaatcccaccaaatgctgagctgaaatatgaattacacctcaagagttttgaaaaggccaaggagtcttgggagatgaattcagaagagaagctggaacagagcaccatagtgaaagagcggggcactgtgtacttcaaggaaggtaaatacaagcaagctttactacagtataagaagatcgtgtcttggctggaatatgagtctagtttttccaatgaggaagcacagaaagcacaggcccttcgactggcctctcacctcaacctggccatgtgtcatctgaaactacaggccttctctgctgccattgaaagctgtaacaaggccctagaactggacagcaacaacgagaagggcctcttccgccggggagaggcccacctggccgtgaatgactttgaactggcacgggctgatttccagaaggtcctgcagctctaccccaacaacaaagccgccaagacccagctggctgtgtgccagcagcggatccgaaggcagcttgcccgggagaagaagctctatgccaatatgtttgagaggctggctgaggaggagaacaaggccaaggcagaggcttcctcaggagaccatcccactgacacagagatgaaggaggagcagaagagcaacacggcagggagccagtctcaggtggagacagaagcatagcccctctccaccagccctactcctgcggctgcctgccccccagtctccccactccaccctgttagttttgtaaaaactgaagaattttgagtgaattagacctttatttttctatctggttggatggtggctttaggggaagggggaaaggtgtaggctgggggattgaggtggggaatcattttagctggtgtcagcccctcttcccttcctccattgcacatgaacatatgtccatccatatatattcatcagaatgttaatttattttgctccctctgttaggtccattttctaagggtagaagaggcaagtggtagggatgaggtctgataagaacccagggtggagagggagactcctgggcagccgttttcctcatcctttccctctcccagtccatttccaaatgtggcctccatgtgggtgctagggacatgggaaaaaccactgctatgccatttcttctctctgttcccttcctcacccccgacggtgtggctgatgatgtcttctggtgtcatggtgaccaccccctgttccctgttctggtatttcccctgtcagtttcccctctcggccaggttgtgtcccaaaatcccctcagcctcttctctgcacgttgctgaaggtccaggcttgcctcaagttccatgcttgagcaataaagtggaaacaataaaacctgggtgtcagacaaccctttctgttcagccttggagtggtgggtatgggtgggtacataatgggtagtagcacaatcaaggggtcacccacttagttccagttgagcttaaataagtgagcatctcatgtagatgccatagttgggcaggaagcagccccaccatgcatggcttcctgagcactgcacaggctgccgctgggatttgtgtctatggcttcgcccaaggttcccagcactccctccctccagcaacctggcagttttagtgcctctggttttcttccctgacacttaggaagacgaaagtataaagatctagaagactgggacaccatgcatgttcattttgaagttggaattggtcttctgcctacctctgatctggcagaggtatctgcattttggtttgttaacaaggtaaaactcctggtgtcactgacctcctcctgtcagataacttacatgattaaggttaagagtaaagcagagtgttcacgtccagcttccttctcagccttaacaggaaaaggcttgtgctttttttctaactatgctttgacccttaactcctatggcatgatggggccctgggagaagccaggcagcacaagccagtcatgctgagctgcctccagataatcctggctccaggccagagcccgtgtctgccctcatccctctctcctactgtgagctctccagtcctttcccaacagcgatgtggttgtctgcttagccacatgcctgtatagttccttccagaagaaatgtataatggtggaagatgtatttctgtgtgaaaattttcaccaagtcatacaacacagctgatgctggagccaggattaaaattggggtgtacaagtctcccagtgtgagtatcccttgagcccaagacaccaaggatgcagagaactgtgactgtgccactgcacgccagcctgggcaagagagtgagaccatctcttttttaaaaaagtccctgtgtaactgctttcttactgggcttacctcacatcacagccctgtgtttgtggtttgtgtctgggtcctcttggtatttcaaaagtagtagattcttacgcctgcagccaacaataatcactaactcaagcatttatggagtaagcctagcactgtactgacagcatcacatgagtgaaactgaatccttgcaaccatcctacaaagaaggtataactttaataaccctatttacagataagaaaaccaagactcagaagttaaatggaaaggtgaggtctctgaactaatccagactctcccatgaggttcctttggcaagtcctgggcttctgtcctcatctgcaaaatcgaaagcattcctgaggtttcttccagctctgcatcctgtaggattccaagaatgtaaaactgcatgtaaccgtggaacatctagagataagtcttagtttatgtaacattaaaactgtctagtgaggatgttttgttaaaa

SEQ ID NO: 134682 - DNA, 370 bp, Homo sapiens
  Payload ID: 6314
  Gene Symbol: FKBP4
  Gene Name: FK506 binding protein 4, 59kDa
  ENST ID: ENST00000539181
  CDS Start-End: 1-254
ccgtgaatgactttgaactggcacgggctgatttccagaaggtcctgcagctctaccccaacaacaaagccgccaagacccagctggctgtgtgccagcagcggatccgaaggcagcttgcccgggagaagaagctctatgccaatatgtttgagaggctggctgaggaggagaacaaggcgccgtggctcacacctgcaatcccagcactttgcagagccaaagtgggaggatcacttgaacccagtaggtagagacctcagtgacttaggatggcaccactgcaccccagcctgagtgacaaaatgaaaccccatctcaaaaaaagaaaagcgagatgctttttgtgtgtgattaaataaataataca

SEQ ID NO: 134683 - DNA, 425 bp, Homo sapiens
  Payload ID: 6314
  Gene Symbol: FKBP4
  Gene Name: FK506 binding protein 4, 59kDa
  ENST ID: ENST00000543769
  CDS Start-End: 72-227
cgcccccgcccgcggcccagagtgcgctcgcgccggcaccagctcccggataaacggcgcgccgcgcggagatgacagccgaggagatgaaggcgaccgagagcggggcgcagtcggcgccgctgcccatggagggagtggacatcagccccaaacaggacgaaggcgtgctgaagattattggggacctcaagcgtctgctccagcggctctcctgtggcatgtgacttccccttctcgctccagcgtcctgccgttttctacgagattgttattccaggtcatcaagagagagggcacaggtacagagatgcccatgattggggaccgagtctttgtccactacactggctggctattagatggcacaaagtttgactccagtctggatcgcaaggacaaattctcctttgacctgggaaaag

SEQ ID NO: 134684 - DNA, 287 bp, Homo sapiens
  Payload ID: 6314
  Gene Symbol: FKBP4
  Gene Name: FK506 binding protein 4, 59kDa
  ENST ID: ENST00000544366
  CDS Start-End: 1-71
tgaaggaggagcagaagagcaacacggcagggagccagtctcagataagaaaaccaagactcagaagttaaatggaaaggtgaggtctctgaactaatccagactctcccatgaggttcctttggcaagtcctgggcttctgtcctcatctgcaaaatcgaaagcattcctgaggtttcttccagctctgcatcctgtaggattccaagaatgtaaaactgcatgtaaccgtggaacatctagagataagtcttagtttatgtaacattaaaactgtctagtgagga

SEQ ID NO: 134685 - DNA, 572 bp, Homo sapiens
  Payload ID: 6314
  Gene Symbol: FKBP4
  Gene Name: FK506 binding protein 4, 59kDa
  ENST ID: ENST00000538622
  CDS Start-End: 315-572
caaaccagaccttagtctgacgaccactggcatgaaggaagaaggaggaagtgtggcataaatacttccccctttgccgattataataataatctattattcaaccttttactggtctaatcttccaacaactgtaggagatagggattatcatcactgctttacaaataaagtgtggagaattttaaaaacttaccatacagcggaaacttgaactcagatctctcagccttttgtctcctttttcaaaccaagtcttgctgcacctcaagaaagacaagaaggtcatcaagagagagggcacaggtacagagatgcccatgattggggaccgagtctttgtccactacactggctggctattagatggcacaaagtttgactccagtctggatcgcaaggacaaattctcctttgacctgggaaaaggggaggtcatcaaggcttgggacattgccatagccaccatgaaggtgggggaggtgtgccacatcacctgcaaaccagaatatgcctacggttcagcaggcagtcctccaaagattccccccaatgccacgcttgtatttgag

SEQ ID NO: 134686 - DNA, 156 bp, Homo sapiens
  Payload ID: 6314
  Gene Symbol: FKBP4
  Gene Name: FK506 binding protein 4, 59kDa
  ENST ID: ENST00000630279
  CDS Start-End: 1-156
atgacagccgaggagatgaaggcgaccgagagcggggcgcagtcggcgccgctgcccatggagggagtggacatcagccccaaacaggacgaaggcgtgctgaagattattggggacctcaagcgtctgctccagcggctctcctgtggcatgtga

SEQ ID NO: 134687 - DNA, 3772 bp, Homo sapiens
  Payload ID: 6315
  Gene Symbol: FKBP5
  Gene Name: FK506 binding protein 5
  Uniprot ID: Q13451
  ENST ID: ENST00000357266
  CDS Start-End: 154-1527
gggccggctcgcgggcgctgccagtctcgggcggcggtgtccggcgcgcgggcggcctgctgggcgggctgaagggttagcggagcacgggcaaggcggagagtgacggagtcggcgagcccccgcggcgacaggttctctacttaaaagacaatgactactgatgaaggtgccaagaacaatgaagaaagccccacagccactgttgctgagcagggagaggatattacctccaaaaaagacaggggagtattaaagattgtcaaaagagtggggaatggtgaggaaacgccgatgattggagacaaagtttatgtccattacaaaggaaaattgtcaaatggaaagaagtttgattccagtcatgatagaaatgaaccatttgtctttagtcttggcaaaggccaagtcatcaaggcatgggacattggggtggctaccatgaagaaaggagagatatgccatttactgtgcaaaccagaatatgcatatggctcggctggcagtctccctaaaattccctcgaatgcaactctcttttttgagattgagctccttgatttcaaaggagaggatttatttgaagatggaggcattatccggagaaccaaacggaaaggagagggatattcaaatccaaacgaaggagcaacagtagaaatccacctggaaggccgctgtggtggaaggatgtttgactgcagagatgtggcattcactgtgggcgaaggagaagaccacgacattccaattggaattgacaaagctctggagaaaatgcagcgggaagaacaatgtattttatatcttggaccaagatatggttttggagaggcagggaagcctaaatttggcattgaacctaatgctgagcttatatatgaagttacacttaagagcttcgaaaaggccaaagaatcctgggagatggataccaaagaaaaattggagcaggctgccattgtcaaagagaagggaaccgtatacttcaagggaggcaaatacatgcaggcggtgattcagtatgggaagatagtgtcctggttagagatggaatatggtttatcagaaaaggaatcgaaagcttctgaatcatttctccttgctgcctttctgaacctggccatgtgctacctgaagcttagagaatacaccaaagctgttgaatgctgtgacaaggcccttggactggacagtgccaatgagaaaggcttgtataggaggggtgaagcccagctgctcatgaacgagtttgagtcagccaagggtgactttgagaaagtgctggaagtaaacccccagaataaggctgcaagactgcagatctccatgtgccagaaaaaggccaaggagcacaacgagcgggaccgcaggatatacgccaacatgttcaagaagtttgcagagcaggatgccaaggaagaggccaataaagcaatgggcaagaagacttcagaaggggtcactaatgaaaaaggaacagacagtcaagcaatggaagaagagaaacctgagggccacgtatgacgccacgccaaggagggaagagtcccagtgaactcggcccctcctcaatgggctttcccccaactcaggacagaacagtgtttaatgtaaagtttgttatagtctatgtgattctggaagcaaatggcaaaaccagtagcttcccaaaaacagcccccctgctgctgcccggagggttcactgaggggtggcacgggaccactccaggtggaacaaacagaaatgactgtggtgtggagggagtgagccagcagcttaagtccagctcatttcagtttctatcaaccttcaagtatccaattcagggtccctggagatcatcctaacaatgtggggctgttaggttttacctttgaactttcatagcactgcagaaacctttaaaaaaaaaatgcttcatgaatttctcctttcctacagttgggtagggtaggggaaggaggataagcttttgttttttaaatgactgaagtgctataaatgtagtctgttgcatttttaaccaacagaacccacagtagaggggtctcatgtctccccagttccacagcagtgtcacagacgtgaaagccagaacctcagaggccacttgcttgctgacttagcctcctcccaaagtccccctcctcagccagcctccttgtgagagtggctttctaccacacacagcctgtccctgggggagtaattctgtcattcctaaaacacccttcagcaatgataatgagcagatgagagtttctggattagcttttcctattttcgatgaagttctgagatactgaaatgtgaaaagagcaatcagaattgtgctttttctcccctcctctattccttttagggaataatattcaatacacagtacttcctcccagcattgctactgctcagcttcttctttcattctaatccttgctattaagaatttaagacttgtgcttacaatatttttgacctggagtggatctatttacatagtcatttaggatccatgcagctttttttgtctttttaagattattggctcataagcatatgtatactggtttatggaactttatttacactcctctatcatgcaaaaaaattttgactttttagtactaagcttaatttttaaaaacaaaatctgtagggttgacaaataaatagttgctcttctacactaggggtttcacctgcaggtttgacacgcagttgctcgcttttcctgccctgtcaagcttctctgttctggcgtgagttgtgaaagagttgaagacagcttcccatgccggtacacagccagtagcctaaatctccagtacttgagctgaccattgaactagggcaagtcttaaatgtgtacatgtagttgaatttcagtccttacgggtaaacagattgagcatggctctctattccctcagcctaagaaacactcatgggaatgcatttggcaacccaaggaaccatttgcttaaacctggaacatctcacctttttaaatcctaaaaaacactggcagttatattttaaattagtttttatttttatgatggttttatcaaaagacttttattattagattgggacccccttcaaacctaaaaatcaagttatttccttttataatacttttcttccccatggaacaaatgggatcaatttgtgagttttttcctttaatgataactaaaatccctctaatttctcatttatgcttttgtcttttttatgaaatatttcttttaaaagccccagtctcacctacgaaatatgaagagcaaaagctgattttgcttacttgctaaactgttgggaaagctctgtagagcatggttccagtgaggccaagattgaaatttgatactaaaaaggccacctagctttttgcagataacaaacaagaaagctattccaagactcagatgatgccagctgtctcccacgtgtgtattatggttcaccagggggaactggcaaaagtgtgtgtggggaggggaagggtgtgtgagtggttctgagcaaataactacagggtgcccattaccactcaagaagacacttcacgtattcttgtatcaaattcaataatcttaaacaatttgtgtagaagtccacagacatctttcaaccaccttttaggctgcatatggattgccaagtcagcatatgaggaattaaagacattgtttttaaaaaaaaaaaatcatttagatgcacttttttgtgtgttctttaaataaatccaaaaaaaatgtga

SEQ ID NO: 134688 - DNA, 3827 bp, Homo sapiens
  Payload ID: 6315
  Gene Symbol: FKBP5
  Gene Name: FK506 binding protein 5
  Uniprot ID: Q13451
  ENST ID: ENST00000539068
  CDS Start-End: 204-1577
agtctcgggcggcggtgtccggcgcgcgggcggcctgctgggcgggctgaagggttagcggagcacgggcaaggcggagagtgacggagtcggcgagcccccgcggcgacaggtaccggcgccatggccacggagatggggcggccggccgcggcgccccgggagccgaacgccctccttccaggttctctacttaaaagacaatgactactgatgaaggtgccaagaacaatgaagaaagccccacagccactgttgctgagcagggagaggatattacctccaaaaaagacaggggagtattaaagattgtcaaaagagtggggaatggtgaggaaacgccgatgattggagacaaagtttatgtccattacaaaggaaaattgtcaaatggaaagaagtttgattccagtcatgatagaaatgaaccatttgtctttagtcttggcaaaggccaagtcatcaaggcatgggacattggggtggctaccatgaagaaaggagagatatgccatttactgtgcaaaccagaatatgcatatggctcggctggcagtctccctaaaattccctcgaatgcaactctcttttttgagattgagctccttgatttcaaaggagaggatttatttgaagatggaggcattatccggagaaccaaacggaaaggagagggatattcaaatccaaacgaaggagcaacagtagaaatccacctggaaggccgctgtggtggaaggatgtttgactgcagagatgtggcattcactgtgggcgaaggagaagaccacgacattccaattggaattgacaaagctctggagaaaatgcagcgggaagaacaatgtattttatatcttggaccaagatatggttttggagaggcagggaagcctaaatttggcattgaacctaatgctgagcttatatatgaagttacacttaagagcttcgaaaaggccaaagaatcctgggagatggataccaaagaaaaattggagcaggctgccattgtcaaagagaagggaaccgtatacttcaagggaggcaaatacatgcaggcggtgattcagtatgggaagatagtgtcctggttagagatggaatatggtttatcagaaaaggaatcgaaagcttctgaatcatttctccttgctgcctttctgaacctggccatgtgctacctgaagcttagagaatacaccaaagctgttgaatgctgtgacaaggcccttggactggacagtgccaatgagaaaggcttgtataggaggggtgaagcccagctgctcatgaacgagtttgagtcagccaagggtgactttgagaaagtgctggaagtaaacccccagaataaggctgcaagactgcagatctccatgtgccagaaaaaggccaaggagcacaacgagcgggaccgcaggatatacgccaacatgttcaagaagtttgcagagcaggatgccaaggaagaggccaataaagcaatgggcaagaagacttcagaaggggtcactaatgaaaaaggaacagacagtcaagcaatggaagaagagaaacctgagggccacgtatgacgccacgccaaggagggaagagtcccagtgaactcggcccctcctcaatgggctttcccccaactcaggacagaacagtgtttaatgtaaagtttgttatagtctatgtgattctggaagcaaatggcaaaaccagtagcttcccaaaaacagcccccctgctgctgcccggagggttcactgaggggtggcacgggaccactccaggtggaacaaacagaaatgactgtggtgtggagggagtgagccagcagcttaagtccagctcatttcagtttctatcaaccttcaagtatccaattcagggtccctggagatcatcctaacaatgtggggctgttaggttttacctttgaactttcatagcactgcagaaacctttaaaaaaaaaatgcttcatgaatttctcctttcctacagttgggtagggtaggggaaggaggataagcttttgttttttaaatgactgaagtgctataaatgtagtctgttgcatttttaaccaacagaacccacagtagaggggtctcatgtctccccagttccacagcagtgtcacagacgtgaaagccagaacctcagaggccacttgcttgctgacttagcctcctcccaaagtccccctcctcagccagcctccttgtgagagtggctttctaccacacacagcctgtccctgggggagtaattctgtcattcctaaaacacccttcagcaatgataatgagcagatgagagtttctggattagcttttcctattttcgatgaagttctgagatactgaaatgtgaaaagagcaatcagaattgtgctttttctcccctcctctattccttttagggaataatattcaatacacagtacttcctcccagcattgctactgctcagcttcttctttcattctaatccttgctattaagaatttaagacttgtgcttacaatatttttgacctggagtggatctatttacatagtcatttaggatccatgcagctttttttgtctttttaagattattggctcataagcatatgtatactggtttatggaactttatttacactcctctatcatgcaaaaaaattttgactttttagtactaagcttaatttttaaaaacaaaatctgtagggttgacaaataaatagttgctcttctacactaggggtttcacctgcaggtttgacacgcagttgctcgcttttcctgccctgtcaagcttctctgttctggcgtgagttgtgaaagagttgaagacagcttcccatgccggtacacagccagtagcctaaatctccagtacttgagctgaccattgaactagggcaagtcttaaatgtgtacatgtagttgaatttcagtccttacgggtaaacagattgagcatggctctctattccctcagcctaagaaacactcatgggaatgcatttggcaacccaaggaaccatttgcttaaacctggaacatctcacctttttaaatcctaaaaaacactggcagttatattttaaattagtttttatttttatgatggttttatcaaaagacttttattattagattgggacccccttcaaacctaaaaatcaagttatttccttttataatacttttcttccccatggaacaaatgggatcaatttgtgagttttttcctttaatgataactaaaatccctctaatttctcatttatgcttttgtcttttttatgaaatatttcttttaaaagccccagtctcacctacgaaatatgaagagcaaaagctgattttgcttacttgctaaactgttgggaaagctctgtagagcatggttccagtgaggccaagattgaaatttgatactaaaaaggccacctagctttttgcagataacaaacaagaaagctattccaagactcagatgatgccagctgtctcccacgtgtgtattatggttcaccagggggaactggcaaaagtgtgtgtggggaggggaagggtgtgtgagtggttctgagcaaataactacagggtgcccattaccactcaagaagacacttcacgtattcttgtatcaaattcaataatcttaaacaatttgtgtagaagtccacagacatctttcaaccaccttttaggctgcatatggattgccaagtcagcatatgaggaattaaagacattgtttttaaaaaaaaaaaatcatttagatgcacttttttgtgtgttctttaaataaatccaaaaaaaatgtgacttcc

SEQ ID NO: 134689 - DNA, 7384 bp, Homo sapiens
  Payload ID: 6315
  Gene Symbol: FKBP5
  Gene Name: FK506 binding protein 5
  Uniprot ID: Q13451
  ENST ID: ENST00000542713
  CDS Start-End: 159-965
gattcgggccggctcgcgggcgctgccagtctcgggcggcggtgtccggcgcgcgggcggcctgctgggcgggctgaagggttagcggagcacgggcaaggcggagagtgacggagtcggcgagcccccgcggcgacaggttctctacttaaaagacaatgactactgatgaaggtgccaagaacaatgaagaaagccccacagccactgttgctgagcagggagaggatattacctccaaaaaagacaggggagtattaaagattgtcaaaagagtggggaatggtgaggaaacgccgatgattggagacaaagtttatgtccattacaaaggaaaattgtcaaatggaaagaagtttgattccagtcatgatagaaatgaaccatttgtctttagtcttggcaaaggccaagtcatcaaggcatgggacattggggtggctaccatgaagaaaggagagatatgccatttactgtgcaaaccagaatatgcatatggctcggctggcagtctccctaaaattccctcgaatgcaactctcttttttgagattgagctccttgatttcaaaggagaggatttatttgaagatggaggcattatccggagaaccaaacggaaaggagagggatattcaaatccaaacgaaggagcaacagtagaaatccacctggaaggccgctgtggtggaaggatgtttgactgcagagatgtggcattcactgtgggcgaaggagaagaccacgacattccaattggaattgacaaagctctggagaaaatgcagcgggaagaacaatgtattttatatcttggaccaaggccaaagaatcctgggagatggataccaaagaaaaattggagcaggctgccattgtcaaagagaagggaaccgtatacttcaaggtgtgtgagtccctatgcaatcctttccatctcaaagaatttattcaagtgttggtgaattgtgctgatattccctactctgaattttgtcaacactgcttggtaagaataagctgcaatttttataaatctgtcattttcaatatgaaaaatggtgagaaaacaatcatgtggaaaaaaaaaaaagtacagattcctcttttacacattctgctctagattgtaaccttccatacaggcagaccaggtctggcatccccacccaccacagtatcactcactcctaaagcatcttgcttggtacatagttggcactcaacaagtgtttttggaatgaaaaaagaatgaatagaataattgttagcaaagaatggaattcataagggtaagtttcacatcatttttctttcttcctttttttttttttgtatgagagacagggtctccctttctttcccaggctggtctcaaacttctagcctcaagcaatcctcccacctcagcttcccaaagtgctgagattacaggcgtgagccactgcaccgggcccatcttcctttagactgtcttgatgaagtcactagagcatatgataaaaggagagaggacatgcacaaatttcaaaacaaactgacaggagagtattgattgcttctaatggccaagatgattcctgcacacttgcttttatgaggaatctccggatattcctgaatgatattcatcataaattgcttctcagaaacccttcttggagcaactaggagtgtgatattttctcacttagatcttaaacctctagatgtaagaaaaaaagaaaccgcccttcattctgttttaatcagtgttctacccattgcttccccaccccaaatatatgccttctccatgtcaagcagaaagggcttagtgatgagaattagagggagaatgggagttctgtcaaggtttctttcgttttctgccactgcaatacagaaattagatgtttttcagcagtataaagcagtgaggcataagtgtactttaacaagtctttatggggcatctgctataagacatgctattattaagttacaaccttgtcaggagggaggagtggcaatgttaatccaaatgaaacaactagagaattatgtaagaatatataatcaacccaaaattaacacagccagagggcaccatgtgttttcagaatttgagctgagacaatattgggtcatgaaatcagttttgtggaagtgtattgcaatatgttataaggatcagttttgttgcataaaactttgcttgtgtatgagtaagtactggattgcatatttcttactgtgggtggtattcaaacaaattttaaatcatgggtttagataagtataaatatataaatatgttatttatcattatttactatgtatactaaactcttatggatcaccagaaagcatgggggtatgatagaataagctcagaattgggaaaaatgggctttattgctcttcaaatgatttagtcatttaaggtccaaagaggttatattttcaagtgaaaaataggggagttagatgttccccaagtttctttccagcctgaatttctgtgagtttctaaactctcaagaacaagtgttatttttttggttttgttttgtttttaattctaattgaggtatattggatacttctaaactattcaagtaagattccaagtgggttatttgtatatccaaatacataatacactagagggaaaaatgtttctacaaaatttcttaagatcgtgagtccttaacagtattttctatatttccgaagtccataaaaatccttaactatattttatatatttcctcaatacttccaaatagaatattaacagtttgggaagatttgaggcttttggcctttgactagaattatatcgattcagtgtagtaaaacagctcagctattcagaggctctaatcggtgctatgatacagaattttggagaacattattggtaatgaaataatgttatgaagccatctgtcatatagctgtgttctgaatatatacagagagatggccagaattagtgatcagtagcagaaagcaatgagtgtctgtacagttacttaactttgttgcttatcagcatcacaactgcaagagtgatactattatgaacctacttaaaattaccaatctttggataaaatctggatcagcagtcacacacatggaaaaaattatttttaacatggaatttgataggcaaaatttttcaaaacattagtccattggggaaaaattaatgaaaggttcaaaaccactgacctgagacttttctcccagaatgtctctgaacattttgtaccactaaaaacttccctggaggcacctttataattataggtaaaagatcccagcagtagtcctagcgttagctgtaaaacttcaaaatggttagtagatagtttcctgtacatattcccttcccaactcagggcaggtttcaatctgccatactgccctcccgggccttgtctttccagggtgtctgacttggcatgttatgcatttgcacagagtccagatgtgtaggtgagagcagagatgggctgaactaaagatctgtatttcatgccatctgcatattggaattctgtttccattgatctgttggtttggtttatacctaaatgggtaaagcctctctcctgagtaggattgaattgtactcagcttttaagtgggaatgattttgccattgaagatgtaaagtcctcatttcaacctctgaatactaaagagaagaaaaatagagaactctatttggctctgaaaataattattaagtacaggtaacagcataatattaagccaggcattgtgcaagcgagttaaacagacacgatttttgccctcatagctgacagtgttctgcaggacaggagcattaactcacacctggtcagtgtttttcttttttctgacttggcagcagagtggcaagaaggctaagaacactgaagtgatgtgggattcttgcgcccccttgtgcttctcctgggaagaaagcatttctaaaacaaactagttgaggagaattgttcaacctctaaactcttcagataaatcgggctttgctatattttcaccacccttgctgttccaagataccagtaatgtgatttagaaacaagccgtttatgactctaggatttgatgttttaaaaaaaattcctaagaagagtccaccctgtctttcatctctttcctttagtgcagaatttttcaacctcagtactatcaacatttggagtgggataattcttgattgtgtggggctgtcttgtgcattgtagaatatttagcagcattcctggcctctgcccattagatgccagtagcatcctacccagttatgacaactaaaaatgcctccagacctgccaggtgttccctggggggcaaaatcaccccccagttgagaactgctttagtacctcagaagcagggagtacaagacagacttttcgctaattggaagttgaagtctaaataaagttacatgatatatatgcaagagctttcaaaaaattaaaatgccctatgtgaaggaactattaagaagtctaatacctgttttttgtgttttgttttgttttaccatggccttctaccattctgattattcagaacttattgaaatgttaagatctaggtttttgtcctccctggctcttcttttctttccctatacaatatattaggagataatcagaaaagttaagttaatcaatgcattagagagggaggaggagagaggatgaagaaatgaggcatgacaggggaaatgcctgtccttcctatctcatctcagtgaaacaacacttttcatttccacccacacattttttgctcccaatgatagcaaaaggttttgttgttggtattgtttttagagagagagggtcttactctgtcacccaggctggagtgcagtggcacaagcatagctaactgcagcttcgaactcctggacttaagagatcctcctgcctcagcttcccaaagtgctgggactataggcgtgagccaccacaccactttagaaaaagtcttgattccatatttacattcctttgatttcaatatttactcaacaaacctttattaaagacctcttggtgctaaaccctgaatattccaaaagggagaggacaatgctgcctgtcctcaaagaccagcaagagaaaaggcagtgacagaaagaaaatgccgacctgaaactggtgaggactttattcttttttttttgtagcatccaaaaaaggagtggtaggcctaagactatgacaaaatttaagtattgtcttagcttgggctgccacagtaaaataccatacactgggtggcttcaacaacaggaatttacttctggagactgtaagtcccagatcaaggtgttagcaggatcagtgtctggggagggcctctcctctggttccttgtagctcccttcttgctgtgttctcacatggcctttccacatgcatgtgagtggagagagggcagagggcagcaagcacccgagtttcttcttataaaggctctaatcccatcatgaggccccaccctcatgaccacatctaacctaattccctccccaaatgctccatctgcaaatatcacattcggggtgagggcttcaacataggaatttaggatgggggacacaattcagtccatagcaaatctaatttcctcaagaatttcagcatttaaaataaaatgccctggtttcgtgttcttatgaatgacctgtatcacacacttctgaggcagagagggtgacagactttgattttagtgccagtcttccctctcctaagtgagtgacttgggaagaaggatgttcgagggatgtagcctggccctcattcacacccaggccctccagctggaacaggtctgccccatcttcatcaccagaaaatccacaccagggcttcctttctacaggcagagctcgtttcttacatcacccacttgaagtcctgtatcacaggcatgtcctcttagacctgctctatggtttttctcttactcagactccttgggtgagggttggagtatttgtggggagagacaactcggcagtgagatgtacgcgctgcttgggctgtggtaaatcctagtaacatggtcttaacactgttggtcaggcattgaatttaatgtcctaataggtctggctgctcctctgccatctggcaggatgtatcatctgtggttttgagcttatcacctcctcaaaggagaatccccacttgtactcctgtttctatttgcgtatttaccagcgattccccagtgctttcatttaccttaaaatcacagtggacacattgtctcagccctggaggggttttgttttgttttgttttgttttgttttgtttttgaggagtctcgctctgtcacccaggctggagtgcagtggcatgatcttggctcactgcaacctctgcctcttaggttcaagcagttctcctgcctcagcctcctaagtagccgggattacaggcatatgccaccatgcctggctcatttttgtatttttagtagagacggccaggctggtctcgaactcctgacctcaggtgatccacctgtctcggcctccaaagtgctgggattacaggtatgagccactgtgctcagcccccagcgtttctcatatgagcatgtatatatatatatattatatatatattatatatgtttatatttatatatattatatataactgacagacctttctgatgtatattgttttatagttgttatttatgttgtatgctactatccaactattcatattcccattgcctatagatcaggggtcagcaaactacagtttgctggccaaatctggtccctgcctgtttttgtaagtacagtttaactgaaacacagctgcacccattgatttacatactgtctagagcagcttttgcactacaaatgataagaatttagtagttgcaacagagactggttcaaataggattggctgtgtttggaactagcacttgccagaatgtaatatttgctgtgaagtgctgaaaagaaaagtaacttccttttcatttttttagtggcatagtctaaaactgctcacaatccttttgaaagactaaagaataggccaggtgtggtggctcatgcctgtaatcccagcactttgggaggccaaggcaggcggatcacaaggtcaggagttcaagaccagcctggccaacatagtgaaacgctgtctctactaaaaatacaaaaaaaaatagctgggcttggtggcggccacctgtagtccccagctactcgggaggctgaggcaggagaatcgctggaacccgggaggcggaggttgcagtgagctgagatggcgccattgcactccagccctggagacagtgcgagactgtgtctc

SEQ ID NO: 134690 - DNA, 3940 bp, Homo sapiens
  Payload ID: 6315
  Gene Symbol: FKBP5
  Gene Name: FK506 binding protein 5
  Uniprot ID: Q13451
  ENST ID: ENST00000536438
  CDS Start-End: 317-1690
agaacaaactcctacctctgtttgcaactaagagttacatcccccatgccaagaccttccgaggcgtcccagagggggaaattcctcgctgccggactgcgcccacccttgaggacctcacattctctttgggcagagcggaagccagacagagacagggactacgaagcgacaatccccagccctgtgtgtgcaaggagcccccgaggggcaggcagccacgctgcagaaggctagactctccgacccccagggagcctggtgtgggctgcagggacagaacgcttctcagaggaggttctctacttaaaagacaatgactactgatgaaggtgccaagaacaatgaagaaagccccacagccactgttgctgagcagggagaggatattacctccaaaaaagacaggggagtattaaagattgtcaaaagagtggggaatggtgaggaaacgccgatgattggagacaaagtttatgtccattacaaaggaaaattgtcaaatggaaagaagtttgattccagtcatgatagaaatgaaccatttgtctttagtcttggcaaaggccaagtcatcaaggcatgggacattggggtggctaccatgaagaaaggagagatatgccatttactgtgcaaaccagaatatgcatatggctcggctggcagtctccctaaaattccctcgaatgcaactctcttttttgagattgagctccttgatttcaaaggagaggatttatttgaagatggaggcattatccggagaaccaaacggaaaggagagggatattcaaatccaaacgaaggagcaacagtagaaatccacctggaaggccgctgtggtggaaggatgtttgactgcagagatgtggcattcactgtgggcgaaggagaagaccacgacattccaattggaattgacaaagctctggagaaaatgcagcgggaagaacaatgtattttatatcttggaccaagatatggttttggagaggcagggaagcctaaatttggcattgaacctaatgctgagcttatatatgaagttacacttaagagcttcgaaaaggccaaagaatcctgggagatggataccaaagaaaaattggagcaggctgccattgtcaaagagaagggaaccgtatacttcaagggaggcaaatacatgcaggcggtgattcagtatgggaagatagtgtcctggttagagatggaatatggtttatcagaaaaggaatcgaaagcttctgaatcatttctccttgctgcctttctgaacctggccatgtgctacctgaagcttagagaatacaccaaagctgttgaatgctgtgacaaggcccttggactggacagtgccaatgagaaaggcttgtataggaggggtgaagcccagctgctcatgaacgagtttgagtcagccaagggtgactttgagaaagtgctggaagtaaacccccagaataaggctgcaagactgcagatctccatgtgccagaaaaaggccaaggagcacaacgagcgggaccgcaggatatacgccaacatgttcaagaagtttgcagagcaggatgccaaggaagaggccaataaagcaatgggcaagaagacttcagaaggggtcactaatgaaaaaggaacagacagtcaagcaatggaagaagagaaacctgagggccacgtatgacgccacgccaaggagggaagagtcccagtgaactcggcccctcctcaatgggctttcccccaactcaggacagaacagtgtttaatgtaaagtttgttatagtctatgtgattctggaagcaaatggcaaaaccagtagcttcccaaaaacagcccccctgctgctgcccggagggttcactgaggggtggcacgggaccactccaggtggaacaaacagaaatgactgtggtgtggagggagtgagccagcagcttaagtccagctcatttcagtttctatcaaccttcaagtatccaattcagggtccctggagatcatcctaacaatgtggggctgttaggttttacctttgaactttcatagcactgcagaaacctttaaaaaaaaaatgcttcatgaatttctcctttcctacagttgggtagggtaggggaaggaggataagcttttgttttttaaatgactgaagtgctataaatgtagtctgttgcatttttaaccaacagaacccacagtagaggggtctcatgtctccccagttccacagcagtgtcacagacgtgaaagccagaacctcagaggccacttgcttgctgacttagcctcctcccaaagtccccctcctcagccagcctccttgtgagagtggctttctaccacacacagcctgtccctgggggagtaattctgtcattcctaaaacacccttcagcaatgataatgagcagatgagagtttctggattagcttttcctattttcgatgaagttctgagatactgaaatgtgaaaagagcaatcagaattgtgctttttctcccctcctctattccttttagggaataatattcaatacacagtacttcctcccagcattgctactgctcagcttcttctttcattctaatccttgctattaagaatttaagacttgtgcttacaatatttttgacctggagtggatctatttacatagtcatttaggatccatgcagctttttttgtctttttaagattattggctcataagcatatgtatactggtttatggaactttatttacactcctctatcatgcaaaaaaattttgactttttagtactaagcttaatttttaaaaacaaaatctgtagggttgacaaataaatagttgctcttctacactaggggtttcacctgcaggtttgacacgcagttgctcgcttttcctgccctgtcaagcttctctgttctggcgtgagttgtgaaagagttgaagacagcttcccatgccggtacacagccagtagcctaaatctccagtacttgagctgaccattgaactagggcaagtcttaaatgtgtacatgtagttgaatttcagtccttacgggtaaacagattgagcatggctctctattccctcagcctaagaaacactcatgggaatgcatttggcaacccaaggaaccatttgcttaaacctggaacatctcacctttttaaatcctaaaaaacactggcagttatattttaaattagtttttatttttatgatggttttatcaaaagacttttattattagattgggacccccttcaaacctaaaaatcaagttatttccttttataatacttttcttccccatggaacaaatgggatcaatttgtgagttttttcctttaatgataactaaaatccctctaatttctcatttatgcttttgtcttttttatgaaatatttcttttaaaagccccagtctcacctacgaaatatgaagagcaaaagctgattttgcttacttgctaaactgttgggaaagctctgtagagcatggttccagtgaggccaagattgaaatttgatactaaaaaggccacctagctttttgcagataacaaacaagaaagctattccaagactcagatgatgccagctgtctcccacgtgtgtattatggttcaccagggggaactggcaaaagtgtgtgtggggaggggaagggtgtgtgagtggttctgagcaaataactacagggtgcccattaccactcaagaagacacttcacgtattcttgtatcaaattcaataatcttaaacaatttgtgtagaagtccacagacatctttcaaccaccttttaggctgcatatggattgccaagtcagcatatgaggaattaaagacattgtttttaaaaaaaaaaaatcatttagatgcacttttttgtgtgttctttaaataaatccaaaaaaaatgtgacttcc

SEQ ID NO: 134691 - DNA, 1500 bp, Homo sapiens
  Payload ID: 6316
  Gene Symbol: FKBP6
  Gene Name: FK506 binding protein 6, 36kDa
  Uniprot ID: O75344
  ENST ID: ENST00000252037
  CDS Start-End: 70-1053
gtcacagccagggagggcagcggggcgcaccaggccgaaggctcacgccacagggagggcagctaggacatggggggaagcgcgttaaaccagggagtcctggaaggggacgacgcccccggccagtccctgtacgagcggttaagtcagaggatgctggacatctcgggggaccggggcgtgctgaaggacgtcatccgagaaggagctggagacctagtggcgcctgatgcttcggtgctagtgaaatactcgggatacctggaacacatggacagacccttcgattctaattactttaggaaaactcctcggctaatgaaacttggagaggatattacactgtggggcatggagctgggccttctgagcatgcggagaggagagctggccaggtttctgttcaaaccgaactacgcctatggaacgctgggctgccctcccttgatccccccaaacaccactgtcctgtttgagattgagctgcttgacttcctggactgtgctgagtcagacaagttttgtgctctctcagctgagcagcaagaccaatttccacttcagaaggtcctgaaagtggcagctacggaacgggagtttggcaactaccttttccgccagaatcgtttctatgatgccaaagtgagatataaaagggccctattgcttctgcgccggcgatcagcaccccctgaagagcagcacctggtggaggccgccaagcttcctgttctcctgaacctgtcctttacatacctgaagctagaccgacccaccatagccctgtgctatggagagcaggctttgatcattgaccaaaagaatgccaaggccctcttcaggtgtggacaggcttgtcttctcctgactgagtatcaaaaggcccgggattttctagttcgagcccagaaggagcaacccttcaatcatgacatcaataatgagctgaagaaactggctagctgttacagggactatgtggataaagagaaagaaatgtggcaccgcatgttcgcgccctgtggcgatggttctacagcaggagaaagttgaaggttcttcacctaccaacgaggggagagagctgtggttctccatcattgggggagtggaagggagctcccagcgcagccgtggcagccaccttccaggagcaggggctggaatgtcctgtggccgcatctctcatggacgcggctgaaacgtgttttcacaggtgctgttttctgttttccgtgttcgtaacagaagggaggggaaagcgcagctactgacaagtagaacactgctactttttttaaggcagtttcttgtttttttagacggaattagtccttggcttccctcccagtcccagccctgcttccggctgcgaatgtccctgagtcaacaccaatagagattgctttgtgtattttgtagggttctctgttttgaagacagaattatgttacaaatgtttttgttgtaaataaataaaacacttccttgtccttgcaa

SEQ ID NO: 134692 - DNA, 1507 bp, Homo sapiens
  Payload ID: 6316
  Gene Symbol: FKBP6
  Gene Name: FK506 binding protein 6, 36kDa
  Uniprot ID: O75344
  ENST ID: ENST00000413573
  CDS Start-End: 155-1048
gagtgcctcctcgtggccccagaatggaatgccgccgtcggtaggggtctgccgggcataaaggggccttcggaaccccaccagagtcacagccagggagggcagcggggcgcaccaggccgaaggctcacgccacagggagggcagctaggacatggggggaagcgcgttaaaccagggagtcctggaaggggacgacgcccccggccagtccctgtacgagcggttaagtcagaggatgctggacatctcgggggaccggggcgtgctgaaggacgtcatccgagaaggagctggagacctagtggcgcctgatgcttcggtgctagatattacactgtggggcatggagctgggccttctgagcatgcggagaggagagctggccaggtttctgttcaaaccgaactacgcctatggaacgctgggctgccctcccttgatccccccaaacaccactgtcctgtttgagattgagctgcttgacttcctggactgtgctgagtcagacaagttttgtgctctctcagctgagcagcaagaccaatttccacttcagaaggtcctgaaagtggcagctacggaacgggagtttggcaactaccttttccgccagaatcgtttctatgatgccaaagtgagatataaaagggccctattgcttctgcgccggcgatcagcaccccctgaagagcagcacctggtggaggccgccaagcttcctgttctcctgaacctgtcctttacatacctgaagctagaccgacccaccatagccctgtgctatggagagcaggctttgatcattgaccaaaagaatgccaaggccctcttcaggtgtggacaggcttgtcttctcctgactgagtatcaaaaggcccgggattttctagttcgagcccagaaggagcaacccttcaatcatgacatcaataatgagctgaagaaactggctagctgttacagggactatgtggataaagagaaagaaatgtggcaccgcatgttcgcgccctgtggcgatggttctacagcaggagaaagttgaaggttcttcacctaccaacgaggggagagagctgtggttctccatcattgggggagtggaagggagctcccagcgcagccgtggcagccaccttccaggagcaggggctggaatgtcctgtggccgcatctctcatggacgcggctgaaacgtgttttcacaggtgctgttttctgttttccgtgttcgtaacagaagggaggggaaagcgcagctactgacaagtagaacactgctactttttttaaggcagtttcttgtttttttagacggaattagtccttggcttccctcccagtcccagccctgcttccggctgcgaatgtccctgagtcaacaccaatagagattgctttgtgtattttgtagggttctctgttttgaagacagaattatgttacaaatgtttttgttgtaaataaataaaacacttccttgtccttgcaagatccagtataa

SEQ ID NO: 134693 - DNA, 778 bp, Homo sapiens
  Payload ID: 6316
  Gene Symbol: FKBP6
  Gene Name: FK506 binding protein 6, 36kDa
  ENST ID: ENST00000442793
  CDS Start-End: 21-778
gcggcggttggaacgaaacgatgagtgcctcctcgtggccccagaatggaatgccgccgtcgtccctgtacgagcggttaagtcagaggatgctggacatctcgggggaccggggcgtgctgaaggacgtcatccgagaaggagctggagacctagtggcgcctgatgcttcggtgctagtgaaatactcgggatacctggaacacatggacagacccttcgattctaattactttaggaaaactcctcggctaatgaaacttggagaggatattacactgtggggcatggagctgggccttctgagcatgcggagaggagagctggccaggtttctgttcaaaccgaactacgcctatggaacgctgggctgccctcccttgatccccccaaacaccactgtcctgtttgagattgagctgcttgacttcctggactgtgctgagtcagacaagttttgtgctctctcagctgccctattgcttctgcgccggcgatcagcaccccctgaagagcagcacctggtggaggccgccaagcttcctgttctcctgaacctgtcctttacatacctgaagctagaccgacccaccatagccctgtgctatggagagcaggctttgatcattgaccaaaagaatgccaaggccctcttcaggtgtggacaggcttgtcttctcctgactgagtatcaaaaggcccgggattttctagttcgagcccagaaggagcaacccttcaatcatgacatcaataatgagctgaagaaactggctag

SEQ ID NO: 134694 - DNA, 1176 bp, Homo sapiens
  Payload ID: 6316
  Gene Symbol: FKBP6
  Gene Name: FK506 binding protein 6, 36kDa
  ENST ID: ENST00000429879
  CDS Start-End: 97-696
taaaggggccttcggaaccccaccagagtcacagccagggagggcagcggggcgcaccaggccgaaggctcacgccacagggagggcagctaggacatggggggaagcgcgttaaaccagggagtcctggaaggggacgacgcccccggccagtccctgtacgagcggttaagtcagaggatgctggacatctcgggggaccggggcgtgctgaaggacgtcatccgagaaggagctggagacctagtggcgcctgatgcttcggtgctagtgaaatactcgggatacctggaacacatggacagacccttcgattctaattactttaggaaaactcctcggctaatgaaacttggagaggatattacactgtggggcatggagctgggccttctgagcatgcggagaggagagctggccaggtttctgttcaaaccgaactacgcctatggaacgctgggctgccctcccttgatccccccaaacaccactgtcctgtttgagattgagctgcttgacttcctggactgtgctgagtcagacaagttttgtgctctctcagctgagcagcaagaccaatttccacttcagaaggtcctgaaagtggcagctacggaacgggagtttggcaactaccttttccgccagaatcgtttctatgatgccaaagcaccgtgctgggtgtgctgcggctgaacctgttaacagggtccaggaatgtgttaaagcagctgtgagttgtgcaaatagaagaaaaagctctggaagtacttccacaaaatggatggttagacttgatgacgttgtatatgatgaagttgtatatataagagatcaaggaaacagaagaagggaatgacttgaaacttcctggtctgagaaaaaaatttaaaccaaggaataactgggaaagaaatgtgttactttcaattttgattactcatgggaatgagcaggccctattgcttctgcgccggcgatcagcaccccctgaagagcagcacctggtggaggccgccaagcttcctgttctcctgaacctgtcctttacatacctgaagctagaccgacccaccatagccctgtgctatggagagcaggctttgatcattgaccaaaagaatgccaaggccctcttcaggtgtggacaggcttgtcttctcctgactgagtatc

SEQ ID NO: 134695 - DNA, 1933 bp, Homo sapiens
  Payload ID: 6316
  Gene Symbol: FKBP6
  Gene Name: FK506 binding protein 6, 36kDa
  ENST ID: ENST00000445032
  CDS Start-End: 118-423
tcggtaggggtctgccgggcataaaggggccttcggaaccccaccagagtcacagccagggagggcagcggggcgcaccaggccgaaggctcacgccacagggagggcagctaggacatggggggaagcgcgttaaaccagggagtcctggaaggggacgacgcccccggccagtccctgtacgagcggttaagtcagaggatgctggacatctcgggggaccggggcgtgctgaaggacgtcatccgagaaggagctggagacctagtggcgcctgatgcttcggtgctagtgaaatactcgggatacctggaacacatggacagacccttcgattctaattactttaggaaaactcctcggctaatgaaacttggagagggtaggttcagagtgggagctggagaagaaggaattgtttaggggctagatgaggcacgatgcctcaggctgggaagactgctcagagcgcaggttctttgagttggctttgctgaggctgggttttggtaacacagccatgttctctccccttgagacctaggcatttgggagatggcttaacgggcaaggtataatctttgcactctgacttaactaaccactgggaatgtttctttgttcatttattaagtaaaactcaatcgaatacttacttcccacaatacatggtgaaaagagaggatgtactcagaagattagaacatctccacccttaaggacctcacaatgtagtggaggagactgacctgcactcagctcacttgatattacactgtggggcatggagctgggccttctgagcatgcggagaggagagctggccaggtttctgttcaaaccgaactacgcctatggaacgctgggctgccctcccttgatccccccaaacaccactgtcctgtttgagattgagctgcttgacttcctggactgtgctgagtcagacaagttttgtgctctctcagctgagcagcaagaccaatttccacttcagaaggtcctgaaagtggcagctacggaacgggagtttggcaactaccttttccgccagaatcgtttctatgatgccaaagtgagatataaaagggccctattgcttctgcgccggcgatcagcaccccctgaagagcagcacctggtggaggccgccaagcttcctgttctcctgaacctgtcctttacatacctgaagctagaccgacccaccatagccctgtgctatggagagcaggctttgatcattgaccaaaagaatgccaaggccctcttcaggtgtggacaggcttgtcttctcctgactgagtatcaaaaggcccgggattttctagttcgagcccagaaggagcaacccttcaatcatgacatcaataatgagctgaagaaactggctagctgttacagggactatgtggataaagagaaagaaatgtggcaccgcatgttcgcgccctgtggcgatggttctacagcaggagaaagttgaaggttcttcacctaccaacgaggggagagagctgtggttctccatcattgggggagtggaagggagctcccagcgcagccgtggcagccaccttccaggagcaggggctggaatgtcctgtggccgcatctctcatggacgcggctgaaacgtgttttcacaggtgctgttttctgttttccgtgttcgtaacagaagggaggggaaagcgcagctactgacaagtagaacactgctactttttttaaggcagtttcttgtttttttagacggaattagtccttggcttccctcccagtcccagccctgcttccggctgcgaatgtccctgagtcaacaccaatagagattgctttgtgtattttgtagggttctctgttttgaagacagaattatgttacaaatgtttttgttgtaaataaataaaacacttccttgtccttgcaa

SEQ ID NO: 134696 - DNA, 1446 bp, Homo sapiens
  Payload ID: 6316
  Gene Symbol: FKBP6
  Gene Name: FK506 binding protein 6, 36kDa
  Uniprot ID: O75344
  ENST ID: ENST00000431982
  CDS Start-End: 110-1078
atgtttcgtgcgctcccattacggatcatacctcgcacctcaccgcgtggcctctgtagttccagagctcgcgagggccagggccgttggcggcggttggaacgaaacgatgagtgcctcctcgtggccccagaatggaatgccgccgtcgtccctgtacgagcggttaagtcagaggatgctggacatctcgggggaccggggcgtgctgaaggacgtcatccgagaaggagctggagacctagtggcgcctgatgcttcggtgctagtgaaatactcgggatacctggaacacatggacagacccttcgattctaattactttaggaaaactcctcggctaatgaaacttggagaggatattacactgtggggcatggagctgggccttctgagcatgcggagaggagagctggccaggtttctgttcaaaccgaactacgcctatggaacgctgggctgccctcccttgatccccccaaacaccactgtcctgtttgagattgagctgcttgacttcctggactgtgctgagtcagacaagttttgtgctctctcagctgagcagcaagaccaatttccacttcagaaggtcctgaaagtggcagctacggaacgggagtttggcaactaccttttccgccagaatcgtttctatgatgccaaagtgagatataaaagggccctattgcttctgcgccggcgatcagcaccccctgaagagcagcacctggtggaggccgccaagcttcctgttctcctgaacctgtcctttacatacctgaagctagaccgacccaccatagccctgtgctatggagagcaggctttgatcattgaccaaaagaatgccaaggccctcttcaggtgtggacaggcttgtcttctcctgactgagtatcaaaaggcccgggattttctagttcgagcccagaaggagcaacccttcaatcatgacatcaataatgagctgaagaaactggctagctgttacagggactatgtggataaagagaaagaaatgtggcaccgcatgttcgcgccctgtggcgatggttctacagcaggagaaagttgaaggttcttcacctaccaacgaggggagagagctgtggttctccatcattgggggagtggaagggagctcccagcgcagccgtggcagccaccttccaggagcaggggctggaatgtcctgtggccgcatctctcatggacgcggctgaaacgtgttttcacaggtgctgttttctgttttccgtgttcgtaacagaagggaggggaaagcgcagctactgacaagtagaacactgctactttttttaaggcagtttcttgtttttttagacggaattagtccttggcttccctcccagtcccagccctgcttccggctgcgaatgtccctgagtcaacaccaatagagattgctttgtgtattttgta

SEQ ID NO: 134697 - DNA, 1030 bp, Homo sapiens
  Payload ID: 6317
  Gene Symbol: FKBP7
  Gene Name: FK506 binding protein 7
  ENST ID: ENST00000233092
  CDS Start-End: 77-460
cgtcggaactcggccgcgggacatccacggggcgcgagtgacacgcgggagggagagcagtgttctgctggagccgatgccaaaaaccatgcatttcttattcagattcattgttttcttttatctgtggggcctttttactgctcagagacaaaagaaagaggagagcaccgaagaagtgaaaatagaagttttgcatcgtccagaaaactgctctaagacaagcaagaagggagacctactaaatgcccattatgacggctacctggctaaagacggctcgaaattctactgcagccggacacaaaatgaaggccaccccaaatggtttgttcttggtgttgggcaagtcataaaaggcctagacattgctatgacagatatgtgccctggagaaaagcgaaaagtagttatacccccttcatttgcatacggaaaggaaggctatggtagtacttgaagaagtctttcttctgcaaaatatccttgtctcatgtcacagaacaaccctgcatgtcttgaaatgcatgtgacttgttagtgcttaaataacaatacatgcgcagaaggcaagattccaccggatgctacattgatttttgagattgaactttatgctgtgaccaaaggaccacggagcattgagacatttaaacaaatagacatggacaatgacaggcagctctctaaagccgagataaacctctacttgcaaagggaatttgaaaaagatgagaagccacgtgacaagtcatatcaggatgcagttttagaagatatttttaagaagaatgaccatgatggtgatggcttcatttctcccaaggaatacaatgtataccaacacgatgaactatagcatatttgtatttctactttttttttttagctatttactgtactttatgtataaaacaaagtcacttttctccaagttgtatttgctatttttcccctatgagaagatattttgatctccccaatacattgattttggtataataaatgtgaggctgttttgcaaacttaa

SEQ ID NO: 134698 - DNA, 526 bp, Homo sapiens
  Payload ID: 6317
  Gene Symbol: FKBP7
  Gene Name: FK506 binding protein 7
  ENST ID: ENST00000412612
  CDS Start-End: 1-202
cggctacctggctaaagacggctcgaaattctactgcagccggacacaaaatgaaggccaccccaaatggtttgttcttggtgttgggcaagtcataaaaggcctagacattgctatgacagatatgtgccctggagaaaagcgaaaagtagttatacccccttcatttgcatacggaaaggaaggctatggtagtacttgaagaagtctttcttctgcaaaatatccttgtctcatgtcacagaacaaccctgcatgtcttgaaatgcatgtgacttgttagtgcttaaataacaatacatgcgaaggcaagattccaccggatgctacattgatttttgagattgaactttatgctgtgaccaaaggaccacggagcattgagacatttaaacaaatagacatggacaatgacaggcagctctctaaagccgagagtgaatagcagctgcagatgaattcgcatagtacccaagagctcagcctatgcacacagaccactcattatcacaggcacaccaagagc

SEQ ID NO: 134699 - DNA, 638 bp, Homo sapiens
  Payload ID: 6317
  Gene Symbol: FKBP7
  Gene Name: FK506 binding protein 7
  ENST ID: ENST00000419184
  CDS Start-End: 97-357
gcaggacaacgcctgccacgcgtcggaactcggccgcgggacatccacggggcgcgagtgacacgcgggagggagagcagtgttctgctggagccgatgccaaaaaccatgcatttcttattcagattcattgttttcttttatctgtggggcctttttactgctcagagacaaaagaaagaggagagcaccgaagaagtgaaaatagaagttttgcatcgtccagaaaactgctctaagacaagcaagaagggagacctactaaatgcccattatgacggctacctggctaaagacggctcgaaattctactgcagcagaaggcaagattccaccggatgctacattgatttttgagattgaactttatgctgtgaccaaaggaccacggagcattgagacatttaaacaaatagacatggacaatgacaggcagctctctaaagccgagataaacctctacttgcaaagggaatttgaaaaagatgagaagccacgtgacaagtcatatcaggatgcagttttagaagatatttttaagaagaatgaccatgatggtgatggcttcatttctcccaaggaatacaatgtataccaacacgatgaactatagcatatttgtatttctactttttttt

SEQ ID NO: 134700 - DNA, 764 bp, Homo sapiens
  Payload ID: 6317
  Gene Symbol: FKBP7
  Gene Name: FK506 binding protein 7
  ENST ID: ENST00000435079
  CDS Start-End: 55-279
atccacggggcgcgagtgacacgcgggagggagagcagtgttctgctggagccgatgccaaaaaccatgcatttcttattcagattcattgttttcttttatctgtggggcctttttactgctcagagacaaaagaaagaggagagcaccgaagaagtgaaaatagaagttttgcatcgtccagaaaactgctctaagacaagcaagaagggagacctactaaatgcccattatgacggctacctggctaaagacggctcgaaattctactgcaggtagtacttgaagaagtctttcttctgcaaaatatccttgtctcatgtcacagaacaaccctgcatgtcttgaaatgcatgtgacttgttagtgcttaaataacaatacatgcgcagaaggcaagattccaccggatgctacattgatttttgagattgaactttatgctgtgaccaaaggaccacggagcattgagacatttaaacaaatagacatggacaatgacaggcagctctctaaagccgagataaacctctacttgcaaagggaatttgaaaaagatgagaagccacgtgacaagtcatatcaggatgcagttttagaagatatttttaagaagaatgaccatgatggtgatggcttcatttctcccaaggaatacaatgtataccaacacgatgaactatagcatatttgtatttctactttttttttttagctatttactgtactttatgtataaaacaaagtcacttttctccaagttg

SEQ ID NO: 134701 - DNA, 2834 bp, Homo sapiens
  Payload ID: 6317
  Gene Symbol: FKBP7
  Gene Name: FK506 binding protein 7
  Uniprot ID: Q9Y680
  ENST ID: ENST00000424785
  CDS Start-End: 60-728
gggacatccacggggcgcgagtgacacgcgggagggagagcagtgttctgctggagccgatgccaaaaaccatgcatttcttattcagattcattgttttcttttatctgtggggcctttttactgctcagagacaaaagaaagaggagagcaccgaagaagtgaaaatagaagttttgcatcgtccagaaaactgctctaagacaagcaagaagggagacctactaaatgcccattatgacggctacctggctaaagacggctcgaaattctactgcagccggacacaaaatgaaggccaccccaaatggtttgttcttggtgttgggcaagtcataaaaggcctagacattgctatgacagatatgtgccctggagaaaagcgaaaagtagttatacccccttcatttgcatacggaaaggaaggctatgcagaaggcaagattccaccggatgctacattgatttttgagattgaactttatgctgtgaccaaaggaccacggagcattgagacatttaaacaaatagacatggacaatgacaggcagctctctaaagccgagataaacctctacttgcaaagggaatttgaaaaagatgagaagccacgtgacaagtcatatcaggatgcagttttagaagatatttttaagaagaatgaccatgatggtgatggcttcatttctcccaaggaatacaatgtataccaacacgatgaactatagcatatttgtatttctactttttttttttagctatttactgtactttatgtataaaacaaagtcacttttctccaagttgtatttgctatttttcccctatgagaagatattttgatctccccaatacattgattttggtataataaatgtgaggctgttttgcaaacttaacttgcaggaatggtatgactgtgtttcctactgctttattctgtaaacaagaattgtagcaccatgaaacagacctctgggtcccagtgggcattttttcccctttcaggatgtaggaggacatgtatagtatgtcaaaaactgcaagcttttcccaactttaaccttaccagcatgttaatatccagtttttttatagtttaaaagttaaagtgcctcatattttgaaaatatccattaaggacccaggaattagcatttcacttgtttatacatttttataacattatgaagacgatataaaaatcctagaactgaagagtcttcctttggtatatgtgcaggaagatagttgtatatctctgttccacaaagaacgcaacacagtctctaaactttttggtgtaagcttctagccttgggtattttccagtggggaatgtttaaaaatatttgaccaaaccaaagactttttgcctcttatagcaagcataaagactgtactgcctggcttttgtattccttcagacattattgtaaatgtgcaactcctcttccctcttgtaaacctttataagatgtctgccaccccaagcttttgtcttgatagttttaaattgatgccatgaaatttcttagttttcgttccctttctctagttatctctttccttatgtcacctcatttcccatcattcttgtcactaatgatgaatgatcattacaaattggtatgctgtcaaattttgataaatgtgccaaacaaaggaggatatacagtgccatggcaattttgtgtcatggtcaagttatgatatcatatgacttgagaatagtatgtaagagatgctgtagaagatcacgttggtaccaaagaaagggcacatgtctatcggaacatagattttgcatactgcatggtatggtcaggctttgtgtccacacccaaatctcatcttgaaattataatccccataatttccataatccccacatgtcaatggagagaccaggtggaggtaactgaatcatgggggtggttttccccgtgctgttctcatgcaatctgatggttttataagtgtttggtagttcctcttgcattcattctcccacccgccaccttgtgaagaaagtccttgcttccccgccttccaccatgattgtaagcttcctgaggcctccccagccatggggaaccatgagtcaatttaacctctttcctttacaaattacccagtctggggcagttctttatagcagtgtgaaaatggactactacactgcatatataggaaagtatggtcagacagtaaatagctctgttcaaaataattgagttccaaacaagtaaagttttttctaccttctgaaacttgctctttccaaaccattgttcatcctttaacttctttacactatcaaaaattctatttaaaaatagagggctttcagatgagtacatacaaaaacaaacaaaagtatacataggggtaacacaaccatgagattagtaaataatacatatggctagcacataatttgacaccttataaaacaagaatctgtactatcttttccttcctcccaatatttcttcatttctatgctcaattttctaatactttttcacatgcttaatcatttactctttcatcgccttccctcaaaaaaacctgctccgttgaagtaaactaagtaactcaatattctttattttggtttggaacctgtctcaattttttgtatccatattaagaagtcaccctataatctaaactttgtaattctaatttttttgtcccattatcatacaaagtgcttttaaacttgtttttaaaaaatgacagataatgccacatgaataggaagatgattcattctaaaacttgtatttacataattaaaaataaatttataatcattctacatacaa

SEQ ID NO: 134702 - DNA, 666 bp, Homo sapiens
  Payload ID: 6317
  Gene Symbol: FKBP7
  Gene Name: FK506 binding protein 7
  Uniprot ID: Q9Y680
  ENST ID: ENST00000434643
  CDS Start-End: 1-666
atgccaaaaaccatgcatttcttattcagattcattgttttcttttatctgtggggcctttttactgctcagagacaaaagaaagaggagagcaccgaagaagtgaaaatagaagttttgcatcgtccagaaaactgctctaagacaagcaagaagggagacctactaaatgcccattatgacggctacctggctaaagacggctcgaaattctactgcagccggacacaaaatgaaggccaccccaaatggtttgttcttggtgttgggcaagtcataaaaggcctagacattgctatgacagatatgtgccctggagaaaagcgaaaagtagttatacccccttcatttgcatacggaaaggaaggctatgaaggcaagattccaccggatgctacattgatttttgagattgaactttatgctgtgaccaaaggaccacggagcattgagacatttaaacaaatagacatggacaatgacaggcagctctctaaagccgagataaacctctacttgcaaagggaatttgaaaaagatgagaagccacgtgacaagtcatatcaggatgcagttttagaagatatttttaagaagaatgaccatgatggtgatggcttcatttctcccaaggaatacaatgtataccaacacgatgaactatag

SEQ ID NO: 134703 - DNA, 1710 bp, Homo sapiens
  Payload ID: 6318
  Gene Symbol: FKBP8
  Gene Name: FK506 binding protein 8, 38kDa
  Uniprot ID: Q14318
  ENST ID: ENST00000222308
  CDS Start-End: 65-1303
gggggcgcaggaccccaagtgggggtcccggagccagagggccaattcctgtccccccagcagcatggcatcgtgtgctgaaccctctgagccctctgccccactgcccgccggggtcccaccgctcgaggacttcgaggtactggatggggttgaggatgcagagggtgaggaggaagaggaggaggaagaggaggaagaggatgacctgagtgagctgccaccgctggaggacatgggacaacccccggcggaggaggctgagcagcctggggccctggcccgagagttccttgctgccatggagcccgagcccgccccagccccggccccagaagagtggctggacattctggggaacgggctgttgaggaagaagacgctggtcccagggccgccaggttcgagccgcccggtcaagggccaggtggtcaccgtacatctgcagacgtcgctggagaatggcacacgggtgcaggaggagccggagctggtgttcactctgggtgactgtgacgtcatccaggccctggatctcagtgtcccactcatggacgtgggggagacggccatggtcactgctgactccaagtactgctacggcccccaaggcaggagcccatacatccccccgcacgcggccctgtgcctggaggtgaccctgaagacggctgtggacgggcctgacctggagatgctcacggggcaggagcgcgtggccctggccaaccggaagcgggagtgcggcaacgcccactaccagcgggcggacttcgtcctggccgccaactcctacgacctcgccatcaaggctatcacctccagcgccaaagtggacatgacgttcgaggaggaggcacagctcctgcagttgaaggtgaagtgtctgaacaacctggcggcctcgcagctgaagctcgaccactaccgcgcagccctgcgctcctgcagccttgtgctggagcaccagccagacaacatcaaggctctcttccgcaagggcaaggtgctggcccagcagggggagtacagtgaggccatccccatcctgagggcagccctgaagctggaaccttccaacaagacgatccacgcagagctctcaaagctggtgaagaagcatgcggcgcagcggagcacggagaccgccttgtaccggaaaatgctgggcaaccccagccggctgcctgctaagtgccctggcaagggtgcctggtccatcccatggaagtggctgtttggggcgactgctgttgccttggggggtgtggcactctctgtggtcatcgctgccaggaactgaccacctaggtggctgccaccccctctgcacaccatggaccctgccctgcgctccccaactcccccaggctccctgtccactgccctccctggtctggccccctcctccgggttaggggagcaaggattgggggtcgtgcagcccagccagcaggagggactgaggccctctaggaggaaagcccagagggagggggccctcattccttcagacccagttttcccccaccctccttaccccgctgggctaggtctccgccagggctggcctcagtttctcctcaacaggcctgggggcagcccttcccctgcctagtccccgcctgagtgccagccccccaccccgcctgccgccccctgtccaggttccctccccgccacagtgaaataaagcatcccaccctgcag

SEQ ID NO: 134704 - DNA, 1292 bp, Homo sapiens
  Payload ID: 6318
  Gene Symbol: FKBP8
  Gene Name: FK506 binding protein 8, 38kDa
  ENST ID: ENST00000544835
  CDS Start-End: 114-861
ggccgaacctggttcccgaggcgcggcggccgcggctgggggcggggaggggggcgcaggaccccaagtgggggtcccggagccagagggccaattcctgtccccccagcagcatggcatcgtgtgctgaaccctctgagccctctgccccactgcccgccggggtcccaccgctcgaggacttcgaggtactggatggggttgaggatgcagagggtgaggaggaagaggaggaggaagaggaggaagaggatgacctgagtgagctgccaccgctggaggacatgggacaacccccggcggaggaggctgagcagcctggggccctggcccgagagttccttgctgccatggagcccgagcccgccccagccccggccccagaagagtggctggacattctggtggacatgacgttcgaggaggaggcacagctcctgcagttgaaggtgaagtgtctgaacaacctggcggcctcgcagctgaagctcgaccactaccgcgcagccctgcgctcctgcagccttgtgctggagcaccagccagacaacatcaaggctctcttccgcaagggcaaggtgctggcccagcagggggagtacagtgaggccatccccatcctgagggcagccctgaagctggaaccttccaacaagacgatccacgcagagctctcaaagctggtgaagaagcatgcggcgcagcggagcacggagaccgccttgtaccggaaaatgctgggcaaccccagccggctgcctgctaagtgccctggcaagggtgcctggtccatcccatggaagtggctgtttggggcgactgctgttgccttggggggtgtggcactctctgtggtcatcgctgccaggaactgaccacctaggtggctgccaccccctctgcacaccatggaccctgccctgcgctccccaactcccccaggctccctgtccactgccctccctggtctggccccctcctccgggttaggggagcaaggattgggggtcgtgcagcccagccagcaggagggactgaggccctctaggaggaaagcccagagggagggggccctcattccttcagacccagttttcccccaccctccttaccccgctgggctaggtctccgccagggctggcctcagtttctcctcaacaggcctgggggcagcccttcccctgcctagtccccgcctgagtgccagccccccaccccgcctgccgccccctgtccaggttccctccccgccacagtgaaataaagcatcccaccctgcagtttccacgga

SEQ ID NO: 134705 - DNA, 1781 bp, Homo sapiens
  Payload ID: 6318
  Gene Symbol: FKBP8
  Gene Name: FK506 binding protein 8, 38kDa
  Uniprot ID: Q14318
  ENST ID: ENST00000597960
  CDS Start-End: 122-1363
aagcggccgaacctggttcccgaggcgcggcggccgcggctgggggcggggaggggggcgcaggaccccaagtgggggtcccggagccagaggcaaggccaattcctgtccccccagcagcatggcatcgtgtgctgaaccctctgagccctctgccccactgcccgccggggtcccaccgctcgaggacttcgaggtactggatggggttgaggatgcagagggtgaggaggaagaggaggaggaagaggaggaagaggatgacctgagtgagctgccaccgctggaggacatgggacaacccccggcggaggaggctgagcagcctggggccctggcccgagagttccttgctgccatggagcccgagcccgccccagccccggccccagaagagtggctggacattctggggaacgggctgttgaggaagaagacgctggtcccagggccgccaggttcgagccgcccggtcaagggccaggtggtcaccgtacatctgcagacgtcgctggagaatggcacacgggtgcaggaggagccggagctggtgttcactctgggtgactgtgacgtcatccaggccctggatctcagtgtcccactcatggacgtgggggagacggccatggtcactgctgactccaagtactgctacggcccccaaggcagcaggagcccatacatccccccgcacgcggccctgtgcctggaggtgaccctgaagacggctgtggacgggcctgacctggagatgctcacggggcaggagcgcgtggccctggccaaccggaagcgggagtgcggcaacgcccactaccagcgggcggacttcgtcctggccgccaactcctacgacctcgccatcaaggctatcacctccagcgccaaagtggacatgacgttcgaggaggaggcacagctcctgcagttgaaggtgaagtgtctgaacaacctggcggcctcgcagctgaagctcgaccactaccgcgcagccctgcgctcctgcagccttgtgctggagcaccagccagacaacatcaaggctctcttccgcaagggcaaggtgctggcccagcagggggagtacagtgaggccatccccatcctgagggcagccctgaagctggaaccttccaacaagacgatccacgcagagctctcaaagctggtgaagaagcatgcggcgcagcggagcacggagaccgccttgtaccggaaaatgctgggcaaccccagccggctgcctgctaagtgccctggcaagggtgcctggtccatcccatggaagtggctgtttggggcgactgctgttgccttggggggtgtggcactctctgtggtcatcgctgccaggaactgaccacctaggtggctgccaccccctctgcacaccatggaccctgccctgcgctccccaactcccccaggctccctgtccactgccctccctggtctggccccctcctccgggttaggggagcaaggattgggggtcgtgcagcccagccagcaggagggactgaggccctctaggaggaaagcccagagggagggggccctcattccttcagacccagttttcccccaccctccttaccccgctgggctaggtctccgccagggctggcctcagtttctcctcaacaggcctgggggcagcccttcccctgcctagtccccgcctgagtgccagccccccaccccgcctgccgccccctgtccaggttccctccccgccacagtgaaataaagcatcccaccctgcagtttccacggac

SEQ ID NO: 134706 - DNA, 574 bp, Homo sapiens
  Payload ID: 6318
  Gene Symbol: FKBP8
  Gene Name: FK506 binding protein 8, 38kDa
  ENST ID: ENST00000597547
  CDS Start-End: 85-574
aagtgtcctggggtgctgggggcgccgtgccggccgggccgctgccctggcctaggctgggccaattcctgtccccccagcagcatggcatcgtgtgctgaaccctctgagccctctgccccactgcccgccggggtcccaccgctcgaggacttcgaggtactggatggggttgaggatgcagagggtgaggaggaagaggaggaggaagaggaggaagaggatgacctgagtgagctgccaccgctggaggacatgggacaacccccggcggaggaggctgagcagcctggggccctggcccgagagttccttgctgccatggagcccgagcccgccccagccccggccccagaagagtggctggacattctggggaacgggctgttgaggaagaagacgctggtcccagggccgccaggttcgagccgcccggtcaagggccaggtggtcaccgtacatctgcagacgtcgctggagaatggcacacgggtgcaggaggagccggagctggtgttcactctgggtgactgtgacgtcatccaggccctggatctcagtgtcccactcatgg

SEQ ID NO: 134707 - DNA, 593 bp, Homo sapiens
  Payload ID: 6318
  Gene Symbol: FKBP8
  Gene Name: FK506 binding protein 8, 38kDa
  ENST ID: ENST00000594844
  CDS Start-End: 91-593
gtgcagggccaggggcgcccgaggcgtgcgggggtcgggtgccccagactggtggcgtcagacagggccaattcctgtccccccagcagcatggcatcgtgtgctgaaccctctgagccctctgccccactgcccgccggggtcccaccgctcgaggacttcgaggtactggatggggttgaggatgcagagggtgaggaggaagaggaggaggaagaggaggaagaggatgacctgagtgagctgccaccgctggaggacatgggacaacccccggcggaggaggctgagcagcctggggccctggcccgagagttccttgctgccatggagcccgagcccgccccagccccggccccagaagagtggctggacattctggggaacgggctgttgaggaagaagacgctggtcccagggccgccaggttcgagccgcccggtcaagggccaggtggtcaccgtacatctgcagacgtcgctggagaatggcacacgggtgcaggaggagccggagctggtgttcactctgggtgactgtgacgtcatccaggccctggatctcagtgtcccactcatggacgtgggggagac

SEQ ID NO: 134708 - DNA, 1756 bp, Homo sapiens
  Payload ID: 6318
  Gene Symbol: FKBP8
  Gene Name: FK506 binding protein 8, 38kDa
  Uniprot ID: Q14318
  ENST ID: ENST00000596558
  CDS Start-End: 111-1349
gaattgtgcgggcgcggggaattatgggggtgggggctgggagggtctctcaaagtggggctccgagcccgggaggagcaggcagggccaattcctgtccccccagcagcatggcatcgtgtgctgaaccctctgagccctctgccccactgcccgccggggtcccaccgctcgaggacttcgaggtactggatggggttgaggatgcagagggtgaggaggaagaggaggaggaagaggaggaagaggatgacctgagtgagctgccaccgctggaggacatgggacaacccccggcggaggaggctgagcagcctggggccctggcccgagagttccttgctgccatggagcccgagcccgccccagccccggccccagaagagtggctggacattctggggaacgggctgttgaggaagaagacgctggtcccagggccgccaggttcgagccgcccggtcaagggccaggtggtcaccgtacatctgcagacgtcgctggagaatggcacacgggtgcaggaggagccggagctggtgttcactctgggtgactgtgacgtcatccaggccctggatctcagtgtcccactcatggacgtgggggagacggccatggtcactgctgactccaagtactgctacggcccccaaggcaggagcccatacatccccccgcacgcggccctgtgcctggaggtgaccctgaagacggctgtggacgggcctgacctggagatgctcacggggcaggagcgcgtggccctggccaaccggaagcgggagtgcggcaacgcccactaccagcgggcggacttcgtcctggccgccaactcctacgacctcgccatcaaggctatcacctccagcgccaaagtggacatgacgttcgaggaggaggcacagctcctgcagttgaaggtgaagtgtctgaacaacctggcggcctcgcagctgaagctcgaccactaccgcgcagccctgcgctcctgcagccttgtgctggagcaccagccagacaacatcaaggctctcttccgcaagggcaaggtgctggcccagcagggggagtacagtgaggccatccccatcctgagggcagccctgaagctggaaccttccaacaagacgatccacgcagagctctcaaagctggtgaagaagcatgcggcgcagcggagcacggagaccgccttgtaccggaaaatgctgggcaaccccagccggctgcctgctaagtgccctggcaagggtgcctggtccatcccatggaagtggctgtttggggcgactgctgttgccttggggggtgtggcactctctgtggtcatcgctgccaggaactgaccacctaggtggctgccaccccctctgcacaccatggaccctgccctgcgctccccaactcccccaggctccctgtccactgccctccctggtctggccccctcctccgggttaggggagcaaggattgggggtcgtgcagcccagccagcaggagggactgaggccctctaggaggaaagcccagagggagggggccctcattccttcagacccagttttcccccaccctccttaccccgctgggctaggtctccgccagggctggcctcagtttctcctcaacaggcctgggggcagcccttcccctgcctagtccccgcctgagtgccagccccccaccccgcctgccgccccctgtccaggttccctccccgccacagtgaaataaagcatcccaccctgcag

SEQ ID NO: 134709 - DNA, 966 bp, Homo sapiens
  Payload ID: 6318
  Gene Symbol: FKBP8
  Gene Name: FK506 binding protein 8, 38kDa
  ENST ID: ENST00000597611
  CDS Start-End: 195-966
ttctgtatgcctttgggcacgtcactcctcctcaggccctcaggttcacttctgtaactaaggcttcaggatgggtcattcagcaaccccagagctgccctgcccgtcaagcttgaactctttaaggaaataacatttagagtggactgtgcccccagcagcccccaagggccaattcctgtccccccagcagcatggcatcgtgtgctgaaccctctgagccctctgccccactgcccgccggggtcccaccgctcgaggacttcgaggtactggatggggttgaggatgcagagggtgaggaggaagaggaggaggaagaggaggaagaggatgacctgagtgagctgccaccgctggaggacatgggacaacccccggcggaggaggctgagcagcctggggccctggcccgagagttccttgctgccatggagcccgagcccgccccagccccggccccagaagagtggctggacattctggggaacgggctgttgaggaagaagacgctggtcccagggccgccaggttcgagccgcccggtcaagggccaggtggtcaccgtacatctgcagacgtcgctggagaatggcacacgggtgcaggaggagccggagctggtgttcactctgggtgactgtgacgtcatccaggccctggatctcagtgtcccactcatggacgtgggggagacggccatggtcactgctgactccaagtactgctacggcccccaaggcagcaggagcccatacatccccccgcacgcggccctgtgcctggaggtgaccctgaagacggctgtggacgggcctgacctggagatgctcacggggcaggagcgcgtggccctggccaaccggaagcgggagtgcggcaacgcccactaccagcgggcggacttcgtcctggccgccaactcctacgacctcgccatcaaggctatcacctccagcgccaaag

SEQ ID NO: 134710 - DNA, 1140 bp, Homo sapiens
  Payload ID: 6318
  Gene Symbol: FKBP8
  Gene Name: FK506 binding protein 8, 38kDa
  ENST ID: ENST00000599540
  CDS Start-End: 529-1140
tttcccccagtggccttagaggctctaaaaatggcttccctaaggcctcggaggctgtcctctccacaaaaatcccagcacccttcgctcagcttataatcaggcaaagccacagggcctgaagccccaggttcaaatcctcctttggcctttggctttctctgtgaccttgggcaaatgcctttgcccctctggcctgtttcctgttctgcaaaatgttgaggggaatcttccctacttcctggagtatttgtaaacattaaataataattagctctaataatggctaacactatttgagcctgatgccaagggcttgatgcatgggttaatttctcccaacaagctggggttgttgttacacccactgtatagatgaggaaactgaggcctggagcccttgagttacacagaaagtgatcggcagtgtggggaatcagtacagtggagactttgaggggctgtgtaggattctgacccacatctctgccccccacttccagggccaattcctgtccccccagcagcatggcatcgtgtgctgaaccctctgagccctctgccccactgcccgccggggtcccaccgctcgaggacttcgaggtactggatggggttgaggatgcagagggtgaggaggaagaggaggaggaagaggaggaagaggatgacctgagtgagctgccaccgctggaggacatgggacaacccccggcggaggaggctgagcagcctggggccctggcccgagagttccttgctgccatggagcccgagcccgccccagccccggccccagaagagtggctggacattctggggaacgggctgttgaggaagaagacgctggtcccagggccgccaggttcgagccgcccggtcaagggccaggtggtcaccgtacatctgcagacgtcgctggagaatggcacacgggtgcaggaggagccggagctggtgttcactctgggtgactgtgacgtcatccaggccctggatctcagtgtcccactcatggacgtgggggagacggccatggtcactgctgactccaagtactgctacggcccccaaggcagcaggagcccatacatccccccgcacgcggccctgtgcctggaggtgaccctgaagacggct

SEQ ID NO: 134711 - DNA, 1548 bp, Homo sapiens
  Payload ID: 6318
  Gene Symbol: FKBP8
  Gene Name: FK506 binding protein 8, 38kDa
  ENST ID: ENST00000601844
  CDS Start-End: 122-472
aagcggccgaacctggttcccgaggcgcggcggccgcggctgggggcggggaggggggcgcaggaccccaagtgggggtcccggagccagaggcaaggccaattcctgtccccccagcagcatggcatcgtgtgctgaaccctctgagccctctgccccactgcccgccggggtcccaccgctcgaggacttcgaggtactggatggggttgaggatgcagagggtgaggaggaagaggaggaggaagaggaggaagaggatgacctgagtgagctgccaccgctggaggacatgggacaacccccggcggaggaggctgagcagcctggggccctggcccgagagttccttgctgccatggagcccgagcccgccccagccccggccccagaagagtggctggacattctgggccctggatctcagtgtcccactcatggacgtgggggagacggccatggtcactgctgactccaagtactgctacggcccccaaggcagcaggagcccatacatccccccgcacgcggccctgtgcctggaggtgaccctgaagacggctgtggacgggcctgacctggagatgctcacggggcaggagcgcgtggccctggccaaccggaagcgggagtgcggcaacgcccactaccagcgggcggacttcgtcctggccgccaactcctacgacctcgccatcaaggctatcacctccagcgccaaagtggacatgacgttcgaggaggaggcacagctcctgcagttgaaggtgaagtgtctgaacaacctggcggcctcgcagctgaagctcgaccactaccgcgcagccctgcgctcctgcagccttgtgctggagcaccagccagacaacatcaaggctctcttccgcaagggcaaggtgctggcccagcagggggagtacagtgaggccatccccatcctgagggcagccctgaagctggaaccttccaacaagacgatccacgcagagctctcaaagctggtgaagaagcatgcggcgcagcggagcacggagaccgccttgtaccggaaaatgctgggcaaccccagccggctgcctgctaagtgccctggcaagggtgcctggtccatcccatggaagtggctgtttggggcgactgctgttgccttggggggtgtggcactctctgtggtcatcgctgccaggaactgaccacctaggtggctgccaccccctctgcacaccatggaccctgccctgcgctccccaactcccccaggctccctgtccactgccctccctggtctggccccctcctccgggttaggggagcaaggattgggggtcgtgcagcccagccagcaggagggactgaggccctctaggaggaaagcccagagggagggggccctcattccttcagacccagttttcccccaccctccttaccccgctgggctaggtctccgccagggctggcctcagtttctcctcaacaggcctgggggcagcccttcccctgcctagtccccgcctgagtgccagccccccaccccgcctgccgccc

SEQ ID NO: 134712 - DNA, 612 bp, Homo sapiens
  Payload ID: 6318
  Gene Symbol: FKBP8
  Gene Name: FK506 binding protein 8, 38kDa
  ENST ID: ENST00000596015
  CDS Start-End: 1-548
acgggcctgacctggagatgctcacggggcaggagcgcgtggccctggccaaccggaagcgggagtgcggcaacgcccactaccagcgggcggacttcgtcctggccgccaactcctacgacctcgccatcaaggctatcacctccagcgccaaagtggacatgacgttcgaggaggaggcacagctcctgcagttgaaggtgaagtgtctgaacaacctggcggcctcgcagctgaagctcgaccactaccgcgcagccctgcgctcctgcagccttgtgctggagcaccagccagacaacatcaaggctctcttccgcaagggcaagacgatccacgcagagctctcaaagctggtgaagaagcatgcggcgcagcggagcacggagaccgccttgtaccggaaaatgctgggcaaccccagccggctgcctgctaagtgccctggcaagggtgcctggtccatcccatggaagtggctgtttggggcgactgctgttgccttggggggtgtggcactctctgtggtcatcgctgccaggaactgaccacctaggtggctgccaccccctctgcacaccatggaccctgccctgcgctccccaactcccc

SEQ ID NO: 134713 - DNA, 460 bp, Homo sapiens
  Payload ID: 6318
  Gene Symbol: FKBP8
  Gene Name: FK506 binding protein 8, 38kDa
  ENST ID: ENST00000606531
  CDS Start-End: 1-311
cctcgcagctgaagctcgaccactaccgcgcagccctgcgctcctgcagccttgtgctggagcaccagccagacaacatcaaggctctcttccgcaagggcaaggtgctggcccagcagggggagtacagtgaggccatccccatcctgagggcagccctgaagctggaaccttccaacaagcttcccctgccttctgcagacgatccacgcagagctctcaaagctggtgaagaagcatgcggcgcagcggagcacggagaccgccttgtaccggaaaatgctgggcaaccccagccggctgcctgctaagtgccctggcaagggtgcctggtccatcccatggaagtggctgtttggggcgactgctgttgccttggggggtgtggcactctctgtggtcatcgctgccaggaactgaccacctaggtggctgccaccccctctgcacaccatggacc

SEQ ID NO: 134714 - DNA, 1849 bp, Homo sapiens
  Payload ID: 6318
  Gene Symbol: FKBP8
  Gene Name: FK506 binding protein 8, 38kDa
  Uniprot ID: Q14318
  ENST ID: ENST00000608443
  CDS Start-End: 201-1442
acgcccgggacggacgtctgcatgagccaacgggtgcggcagtcgcggcagcggcggccaatgggcacggcaggggcggggccaagcggccgaacctggttcccgaggcgcggcggccgcggctgggggcggggaggggggcgcaggaccccaagtgggggtcccggagccagagggccaattcctgtccccccagcagcatggcatcgtgtgctgaaccctctgagccctctgccccactgcccgccggggtcccaccgctcgaggacttcgaggtactggatggggttgaggatgcagagggtgaggaggaagaggaggaggaagaggaggaagaggatgacctgagtgagctgccaccgctggaggacatgggacaacccccggcggaggaggctgagcagcctggggccctggcccgagagttccttgctgccatggagcccgagcccgccccagccccggccccagaagagtggctggacattctggggaacgggctgttgaggaagaagacgctggtcccagggccgccaggttcgagccgcccggtcaagggccaggtggtcaccgtacatctgcagacgtcgctggagaatggcacacgggtgcaggaggagccggagctggtgttcactctgggtgactgtgacgtcatccaggccctggatctcagtgtcccactcatggacgtgggggagacggccatggtcactgctgactccaagtactgctacggcccccaaggcagcaggagcccatacatccccccgcacgcggccctgtgcctggaggtgaccctgaagacggctgtggacgggcctgacctggagatgctcacggggcaggagcgcgtggccctggccaaccggaagcgggagtgcggcaacgcccactaccagcgggcggacttcgtcctggccgccaactcctacgacctcgccatcaaggctatcacctccagcgccaaagtggacatgacgttcgaggaggaggcacagctcctgcagttgaaggtgaagtgtctgaacaacctggcggcctcgcagctgaagctcgaccactaccgcgcagccctgcgctcctgcagccttgtgctggagcaccagccagacaacatcaaggctctcttccgcaagggcaaggtgctggcccagcagggggagtacagtgaggccatccccatcctgagggcagccctgaagctggaaccttccaacaagacgatccacgcagagctctcaaagctggtgaagaagcatgcggcgcagcggagcacggagaccgccttgtaccggaaaatgctgggcaaccccagccggctgcctgctaagtgccctggcaagggtgcctggtccatcccatggaagtggctgtttggggcgactgctgttgccttggggggtgtggcactctctgtggtcatcgctgccaggaactgaccacctaggtggctgccaccccctctgcacaccatggaccctgccctgcgctccccaactcccccaggctccctgtccactgccctccctggtctggccccctcctccgggttaggggagcaaggattgggggtcgtgcagcccagccagcaggagggactgaggccctctaggaggaaagcccagagggagggggccctcattccttcagacccagttttcccccaccctccttaccccgctgggctaggtctccgccagggctggcctcagtttctcctcaacaggcctgggggcagcccttcccctgcctagtccccgcctgagtgccagccccccaccccgcctgccgccccctgtccaggttccctccccgccacagtgaaataaagcatcccaccctgcag

SEQ ID NO: 134715 - DNA, 220 bp, Homo sapiens
  Payload ID: 6318
  Gene Symbol: FKBP8
  Gene Name: FK506 binding protein 8, 38kDa
  ENST ID: ENST00000609656
  CDS Start-End: 152-220
cgtcactcctcctcaggccctcaggttcacttctgtaactaaggcttcaggatgggtcattcagcaaccccagagctgccctgcccgtcaagcttgaactctttaaggaaataacatttagagtggactgtgcccccagcagcccccaagcatggcatcgtgtgctgaaccctctgagccctctgccccactgcccgccggggtcccaccgctcgaggac

SEQ ID NO: 134716 - DNA, 3462 bp, Homo sapiens
  Payload ID: 6319
  Gene Symbol: FKBP9
  Gene Name: FK506 binding protein 9, 63 kDa
  Uniprot ID: O95302
  ENST ID: ENST00000242209
  CDS Start-End: 170-1882
ccctggagctgcggccgggagggcgggcggccggggagacggggtggcggctgcagcccgggtagggccaggagacccggtccacgtttgcaaacgcagccgaacgcccaggccgacccgtgccgcccgagcgccgcgctgcgtccgcgccactcttctcgccgccccgatggcgttccggggctggaggcccccgccgccaccgctgctcctgctgctgctctgggtgaccgggcaggcagcgcccgtggcgggcctgggctccgacgcggagctgcagatcgagcggcgcttcgtgcccgacgagtgcccgcgcaccgtgcgcagcggcgacttcgtgcgctaccactacgtggggacgttccccgacggccagaagttcgactccagctatgacagagactccactttcaatgtgtttgtgggaaaaggacagctgatcacagggatggaccaggctcttgttgggatgtgcgtaaacgagagacgtttcgtgaagattcccccaaagcttgcctacggaaatgaaggagtttctggtgtgatcccccccaattcagtgcttcattttgatgtacttctgatggatatttggaattctgaagaccaggttcagattcacacctatttcaagcccccgagttgccctcggaccatccaggtgtctgattttgtgaggtaccactacaacgggacgttcctggacggaactctgtttgattcgagtcacaatcgcatgaaaacatatgacacgtatgtgggaattggctggctgattcctggaatggataaagggctgctggggatgtgtgtgggtgagaagcgcatcatcaccattcctccttttctggcctatggagaggatggagatgggaaagacattcccggtcaggcatctctggtgtttgatgttgcattattggacctccataaccccaaggacagcatttccattgagaacaaggtagtacctgaaaactgtgagcggataagtcaaagtggggactttctcaggtatcattacaatggcacgcttctggatggcaccctctttgattccagctactctcggaaccgcacgtttgacacgtacattgggcagggctacgtgattcctgggatggatgaaggtctacttggtgtttgcattggagaaaagcgaaggattgtggtcccgcctcacctggggtatggagaggaaggaagagggaatatccccggctcggctgtgctggtgtttgacatccatgtgatcgacttccacaacccttcggactccatcagcatcacctcccactacaaaccccctgactgctcagtgctgagtaagaagggagattacctcaaatatcactacaatgcctcacttctggatgggaccctgctggactccacgtggaatttaggcaaaacttacaatattgttctgggatctgggcaagttgtgttggggatggacatgggtctcagagagatgtgcgttggcgagaaacggacagtgatcattccgcctcacctgggctatggggaagctggcgtggatggagaagtgcccggcagtgccgtattagtgtttgacattgagctgctggagctggtggctggccttcctgaggggtacatgttcatatggaatggtgaggtgtcacccaacctctttgaagaaattgacaaggatggcaacggagaagtcctcctggaagagttctcagagtacattcacgcccaggtggcatctggcaaagggaaactcgctcctggctttgatgctgagctgattgtgaagaatatgttcaccaaccaggaccggaatggagatgggaaggtcacagccgaggaatttaaactcaaagaccaggaagccaaacacgatgaactctaaacctggcatgaaccagatggtgccagggagtacgtgacaccaagccacctgtgtggcaagacgtgcagtgagggtgcaagggtctctcagaagttgcatcattagccagtagtaggtgggtcacatagtacctggtgtacacatcggggtgggttgatatatggggtgagaagtttgggctgatcgccagtgatagtaaacaaaatctgtgcagagggccttagcatgggatgtgtccagtattgaaaaggctgcactgccaaccatgatttgtgagccttctgggaaattttgttattaaaggaatatatagtgtcagacggaagttataatcatcttggaggaaccataagaaaaggtgtccagggtatctatataaagagggttaaatttttttttaacttgctggttaaaacattttagaaatattctagagatgggcaggagagtcaaagggcttgcttgccccagcagagttcccagcagacagccatggctcttcccagcagcctgtgcaaattctgatgatggccccacccccgcacacgcacacgcacatcatgcttttccagctcatcacaccccgccccactatgggcctaccattaatagtgtataacttggaggttaaaagagccttttggacagaaaactgggccaggaaaaggcatctcagaccacaaatagagaatttgattcctcatttgccacataagtcatctgcttagcttttcctttcctttttttttttttttttttttctggaggcagagtctccctttgtcgccaggctggagtgcagtggtgccatctcggctcactgcagcactgtctcggctcactgcagcctccgcctcccgtattcaagcgattctcctgtctcagcctcctgagtagctgggactacaggtgtgcaccaccacgcccggctaatttttgtatttttagtagagacggggtttcactgtgttggccaggatggtctcaatctcgacctcgtgatccgcccaccttggcctcccaaagtgttgggattacaggcgtgactcaccatgcccagccacttagttttttcttattcccacctttctatcccatagaacactcttttttatcttccctgaaccatattgatgagataaatagggctgggggctgggccccgctggtcactcaacagagtatttcccttggccgagatggaagttttgtcccaatagatgagctgctgagcatcaacaaggtgacatttttctgctgcccatttgtgtcctggagacggtggtaccctgaaggcagaggccagctgccgcaagacagcaatgacagtccacctgccgacctgattcctgcatcatggaataaccacatggctaccttctatcctctgttcccaaatggtggtggcacttatcctgaagtcgtcaatgatttccctttgaaactactttattttactaatttaaactattttgtactgatgtagccctgaggtagttcatgaaaatgctgtgcactcattccatggaataaatgttggaaagctgatcttttctgatataaaatgttgaatgatatta

SEQ ID NO: 134717 - DNA, 780 bp, Homo sapiens
  Payload ID: 6319
  Gene Symbol: FKBP9
  Gene Name: FK506 binding protein 9, 63 kDa
  ENST ID: ENST00000418354
  CDS Start-End: 104-780
aaggagatgcagggtgggctttgccaaaggccagtggaaggagctcaggcttggcggcatctggtttgcttgtctgggcctactcctttgcatgatataacaaatggcagggaaagacattcccggtcaggcatctctggtgtttgatgttgcattattggacctccataaccccaaggacagcatttccattgagaacaaggtagtacctgaaaactgtgagcggataagtcaaagtggggactttctcaggtatcattacaatggcacgcttctggatggcaccctctttgattccagctactctcggaaccgcacgtttgacacgtacattgggcagggctacgtgattcctgggatggatgaaggtctacttggtgtttgcattggagaaaagcgaaggattgtggtcccgcctcacctggggtatggagaggaaggaagagggaatatccccggctcggctgtgctggtgtttgacatccatgtgatcgacttccacaacccttcggactccatcagcatcacctcccactacaaaccccctgactgctcagtgctgagtaagaagggagattacctcaaatatcactacaatgcctcacttctggatgggaccctgctggactccacgtggaatttaggcaaaacttacaatattgttctgggatctgggcaagttgtgttggggatggacatgggtctcagagagatgtgcgttggcgagaaacggacagtgatcattccgcctcacctgggctatggggaagctggcgtggg

SEQ ID NO: 134718 - DNA, 3621 bp, Homo sapiens
  Payload ID: 6319
  Gene Symbol: FKBP9
  Gene Name: FK506 binding protein 9, 63 kDa
  Uniprot ID: O95302
  ENST ID: ENST00000538336
  CDS Start-End: 171-2042
cccctggagctgcggccgggagggcgggcggccggggagacggggtggcggctgcagcccgggtagggccaggagacccggtccacgtttgcaaacgcagccgaacgcccaggccgacccgtgccgcccgagcgccgcgctgcgtccgcgccactcttctcgccgccccgatggcgttccggggctggaggcccccgccgccaccgctgctcctgctgctgctctgggtgaccgggcaggcagcgcccgtggcgggcctgggctccgacgcggagctgcagatcgagcggcgcttcgtgcccgacgagtgcccgcgcaccgtgcgcagcggcgacttcgtgcgctaccactacgtggggacgttccccgacggccagaagttcgactccaggtactgggatacagcggaggataaagctgacaaaagtccctgccctcaagtcagggttggggtgaacacaagcccgtcctgcagacttaagcagaaaggagtgggaatttattggaaggatctccaattccttgtgagggtccagaatcatggactgagctatgacagagactccactttcaatgtgtttgtgggaaaaggacagctgatcacagggatggaccaggctcttgttgggatgtgcgtaaacgagagacgtttcgtgaagattcccccaaagcttgcctacggaaatgaaggagtttctggtgtgatcccccccaattcagtgcttcattttgatgtacttctgatggatatttggaattctgaagaccaggttcagattcacacctatttcaagcccccgagttgccctcggaccatccaggtgtctgattttgtgaggtaccactacaacgggacgttcctggacggaactctgtttgattcgagtcacaatcgcatgaaaacatatgacacgtatgtgggaattggctggctgattcctggaatggataaagggctgctggggatgtgtgtgggtgagaagcgcatcatcaccattcctccttttctggcctatggagaggatggagatgggaaagacattcccggtcaggcatctctggtgtttgatgttgcattattggacctccataaccccaaggacagcatttccattgagaacaaggtagtacctgaaaactgtgagcggataagtcaaagtggggactttctcaggtatcattacaatggcacgcttctggatggcaccctctttgattccagctactctcggaaccgcacgtttgacacgtacattgggcagggctacgtgattcctgggatggatgaaggtctacttggtgtttgcattggagaaaagcgaaggattgtggtcccgcctcacctggggtatggagaggaaggaagagggaatatccccggctcggctgtgctggtgtttgacatccatgtgatcgacttccacaacccttcggactccatcagcatcacctcccactacaaaccccctgactgctcagtgctgagtaagaagggagattacctcaaatatcactacaatgcctcacttctggatgggaccctgctggactccacgtggaatttaggcaaaacttacaatattgttctgggatctgggcaagttgtgttggggatggacatgggtctcagagagatgtgcgttggcgagaaacggacagtgatcattccgcctcacctgggctatggggaagctggcgtggatggagaagtgcccggcagtgccgtattagtgtttgacattgagctgctggagctggtggctggccttcctgaggggtacatgttcatatggaatggtgaggtgtcacccaacctctttgaagaaattgacaaggatggcaacggagaagtcctcctggaagagttctcagagtacattcacgcccaggtggcatctggcaaagggaaactcgctcctggctttgatgctgagctgattgtgaagaatatgttcaccaaccaggaccggaatggagatgggaaggtcacagccgaggaatttaaactcaaagaccaggaagccaaacacgatgaactctaaacctggcatgaaccagatggtgccagggagtacgtgacaccaagccacctgtgtggcaagacgtgcagtgagggtgcaagggtctctcagaagttgcatcattagccagtagtaggtgggtcacatagtacctggtgtacacatcggggtgggttgatatatggggtgagaagtttgggctgatcgccagtgatagtaaacaaaatctgtgcagagggccttagcatgggatgtgtccagtattgaaaaggctgcactgccaaccatgatttgtgagccttctgggaaattttgttattaaaggaatatatagtgtcagacggaagttataatcatcttggaggaaccataagaaaaggtgtccagggtatctatataaagagggttaaatttttttttaacttgctggttaaaacattttagaaatattctagagatgggcaggagagtcaaagggcttgcttgccccagcagagttcccagcagacagccatggctcttcccagcagcctgtgcaaattctgatgatggccccacccccgcacacgcacacgcacatcatgcttttccagctcatcacaccccgccccactatgggcctaccattaatagtgtataacttggaggttaaaagagccttttggacagaaaactgggccaggaaaaggcatctcagaccacaaatagagaatttgattcctcatttgccacataagtcatctgcttagcttttcctttcctttttttttttttttttttttctggaggcagagtctccctttgtcgccaggctggagtgcagtggtgccatctcggctcactgcagcactgtctcggctcactgcagcctccgcctcccgtattcaagcgattctcctgtctcagcctcctgagtagctgggactacaggtgtgcaccaccacgcccggctaatttttgtatttttagtagagacggggtttcactgtgttggccaggatggtctcaatctcgacctcgtgatccgcccaccttggcctcccaaagtgttgggattacaggcgtgactcaccatgcccagccacttagttttttcttattcccacctttctatcccatagaacactcttttttatcttccctgaaccatattgatgagataaatagggctgggggctgggccccgctggtcactcaacagagtatttcccttggccgagatggaagttttgtcccaatagatgagctgctgagcatcaacaaggtgacatttttctgctgcccatttgtgtcctggagacggtggtaccctgaaggcagaggccagctgccgcaagacagcaatgacagtccacctgccgacctgattcctgcatcatggaataaccacatggctaccttctatcctctgttcccaaatggtggtggcacttatcctgaagtcgtcaatgatttccctttgaaactactttattttactaatttaaactattttgtactgatgtagccctgaggtagttcatgaaaatgctgtgcactcattccatggaataaatgttggaaagctgatcttttctgatataaaatgttgaatgatatt

SEQ ID NO: 134719 - DNA, 2699 bp, Homo sapiens
  Payload ID: 6319
  Gene Symbol: FKBP9
  Gene Name: FK506 binding protein 9, 63 kDa
  Uniprot ID: O95302
  ENST ID: ENST00000490776
  CDS Start-End: 104-1120
aaggagatgcagggtgggctttgccaaaggccagtggaaggagctcaggcttggcggcatctggtttgcttgtctgggcctactcctttgcatgatataacaaatggcagggaaagacattcccggtcaggcatctctggtgtttgatgttgcattattggacctccataaccccaaggacagcatttccattgagaacaaggtagtacctgaaaactgtgagcggataagtcaaagtggggactttctcaggtatcattacaatggcacgcttctggatggcaccctctttgattccagctactctcggaaccgcacgtttgacacgtacattgggcagggctacgtgattcctgggatggatgaaggtctacttggtgtttgcattggagaaaagcgaaggattgtggtcccgcctcacctggggtatggagaggaaggaagagggaatatccccggctcggctgtgctggtgtttgacatccatgtgatcgacttccacaacccttcggactccatcagcatcacctcccactacaaaccccctgactgctcagtgctgagtaagaagggagattacctcaaatatcactacaatgcctcacttctggatgggaccctgctggactccacgtggaatttaggcaaaacttacaatattgttctgggatctgggcaagttgtgttggggatggacatgggtctcagagagatgtgcgttggcgagaaacggacagtgatcattccgcctcacctgggctatggggaagctggcgtggatggagaagtgcccggcagtgccgtattagtgtttgacattgagctgctggagctggtggctggccttcctgaggggtacatgttcatatggaatggtgaggtgtcacccaacctctttgaagaaattgacaaggatggcaacggagaagtcctcctggaagagttctcagagtacattcacgcccaggtggcatctggcaaagggaaactcgctcctggctttgatgctgagctgattgtgaagaatatgttcaccaaccaggaccggaatggagatgggaaggtcacagccgaggaatttaaactcaaagaccaggaagccaaacacgatgaactctaaacctggcatgaaccagatggtgccagggagtacgtgacaccaagccacctgtgtggcaagacgtgcagtgagggtgcaagggtctctcagaagttgcatcattagccagtagtaggtgggtcacatagtacctggtgtacacatcggggtgggttgatatatggggtgagaagtttgggctgatcgccagtgatagtaaacaaaatctgtgcagagggccttagcatgggatgtgtccagtattgaaaaggctgcactgccaaccatgatttgtgagccttctgggaaattttgttattaaaggaatatatagtgtcagacggaagttataatcatcttggaggaaccataagaaaaggtgtccagggtatctatataaagagggttaaatttttttttaacttgctggttaaaacattttagaaatattctagagatgggcaggagagtcaaagggcttgcttgccccagcagagttcccagcagacagccatggctcttcccagcagcctgtgcaaattctgatgatggccccacccccgcacacgcacacgcacatcatgcttttccagctcatcacaccccgccccactatgggcctaccattaatagtgtataacttggaggttaaaagagccttttggacagaaaactgggccaggaaaaggcatctcagaccacaaatagagaatttgattcctcatttgccacataagtcatctgcttagcttttcctttcctttttttttttttttttttttctggaggcagagtctccctttgtcgccaggctggagtgcagtggtgccatctcggctcactgcagcactgtctcggctcactgcagcctccgcctcccgtattcaagcgattctcctgtctcagcctcctgagtagctgggactacaggtgtgcaccaccacgcccggctaatttttgtatttttagtagagacggggtttcactgtgttggccaggatggtctcaatctcgacctcgtgatccgcccaccttggcctcccaaagtgttgggattacaggcgtgactcaccatgcccagccacttagttttttcttattcccacctttctatcccatagaacactcttttttatcttccctgaaccatattgatgagataaatagggctgggggctgggccccgctggtcactcaacagagtatttcccttggccgagatggaagttttgtcccaatagatgagctgctgagcatcaacaaggtgacatttttctgctgcccatttgtgtcctggagacggtggtaccctgaaggcagaggccagctgccgcaagacagcaatgacagtccacctgccgacctgattcctgcatcatggaataaccacatggctaccttctatcctctgttcccaaatggtggtggcacttatcctgaagtcgtcaatgatttccctttgaaactactttattttactaatttaaactattttgtactgatgtagccctgaggtagttcatgaaaatgctgtgcactcattccatggaataaatgttggaaagctgatcttttctgatataaaatgttgaatgatatt

SEQ ID NO: 134720 - DNA, 1345 bp, Homo sapiens
  Payload ID: 6320
  Gene Symbol: FKBPL
  Gene Name: FK506 binding protein like
  Uniprot ID: Q9UIM3
  ENST ID: ENST00000375156
  CDS Start-End: 272-1321
agggttagttgtcagtatctttcccagttgttccgccccctacccccgcctcccgcaccgcgcccctctccggctgccctctccgcgtggggcaaggctccgagggcagcattcagtagccatttagctttggaaggagaggtgattcgaatggcccggctcctcctgtcaccatgctaggcactttggccgcgcaggtgctgacctgaacctggttcatccctttctgaccaaaactgttcactcaccgtggaagggactaagcatccatatggagacgccaccagtcaatacaattggagaaaaggacacctctcagccgcaacaagagtgggaaaagaaccttcgggagaaccttgattcagttattcagattaggcagcagccccgagaccctcctaccgaaacgcttgagctggaagtaagcccagatccagccagccaaattctagagcatactcaaggagctgaaaaactggttgctgaacttgaaggagactctcataagtctcatggatcaaccagtcagatgccagaggcccttcaagcttctgatctctggtactgccccgatgggagctttgtcaagaagatcgtaatccgtggccatggcttggacaaacccaaactaggctcctgctgccgggtactggctttggggtttcctttcggatcagggccgccagagggctggacagagctaactatgggcgtagggccatggagggaggaaacttggggggagctcatagagaaatgcttggagtccatgtgtcaaggtgaggaagcagagcttcagctgcctgggcactctggacctcctgtcaggctcacactggcatccttcactcaaggccgagactcctgggagctggagactagcgagaaggaagccctggccagggaagaacgtgcaaggggcacagaactatttcgagctgggaaccctgaaggagctgcccgatgctatggacgggctcttcggctgctcctgactttacccccacctggccctccagaacgaactgtccttcatgccaatctggctgcctgtcagttgttgctagggcagcctcagttggcagcccagagctgtgaccgggtgttggagcgggagcctggccatttaaaggccttataccgaaggggggttgcccaggctgcccttgggaacctggaaaaagcaactgctgacctcaagaaggtgctggcgatagatcccaaaaaccgggcagcccaggaggaactggggaaggtggtcattcaggggaagaaccaggatgcagggctggctcagggtctgcgcaagatgtttggctgattaaaagttaaaccttaaaagaga

SEQ ID NO: 134721 - DNA, 1345 bp, Homo sapiens; identical to SEQ ID NO: 134720
  Payload ID: 6320
  Gene Symbol: FKBPL
  Gene Name: FK506 binding protein like
  Uniprot ID: Q9UIM3
  ENST ID: ENST00000425378
  CDS Start-End: 272-1321

SEQ ID NO: 134722 - DNA, 1345 bp, Homo sapiens
  Payload ID: 6320
  Gene Symbol: FKBPL
  Gene Name: FK506 binding protein like
  Uniprot ID: Q9UIM3
  ENST ID: ENST00000443350
  CDS Start-End: 272-1321
agggttagttgtcagtatctttcccagttgttccgccccctacccccgcctcccgcaccgcgcccctctccggctgccctctccgcgtggggcaaggctccgagggcagcattcagtagccatttagctttggaaggagaggtgattcgaatggcccggctcctcctgtcaccatgctaggcactttggccgcgcaggtgctgacctgaacctggtttatccctttctgaccaaaactgttcactcaccgtggaagggactaagcatccatatggagacgccaccagtcaatacaattggagaaaaggacacctctcagccgcaacaagagtgggaaaagaaccttcgggagaaccttgattcagttattcagattaggcagcagccccgagaccctcctaccgaaacgcttgagctggaagtaagcccagatccagccagccaaattctagagcatactcaaggagctgaaaaactggttgctgaacttgaaggagactctcataagtctcatggatcaaccagtcagatgccagaggcccttcaagcttctgatctctggtactgccccgatgggagctttgtcaagaagatcgtaatccgtggccatggcttggacaaacccaaactaggctcctgctgccgggtactggctttggggtttcctttcggatcagggccgccagagggctggacagagctaactatgggcgtagggccatggagggaggaaacttggggggagctcatagagaaatgcttggagtccatgtgtcaaggtgaggaagcagagcttcagctgcctgggcactctggacctcctgtcaggctcacactggcatccttcactcaaggccgagactcctgggagctggagactagcgagaaggaagccctggccagggaagaacgtgcaaggggcacagaactatttcgagctgggaaccctgaaggagctgcccgatgctatggacgggctcttcggctgctcctgactttacccccacctggccctccagaacgaactgtccttcatgccaatctggctgcctgtcagttgttgctagggcagcctcagttggcagcccagagctgtgaccgggtgttggagcgggagcctggccatttaaaggccttataccgaaggggggttgcccaggctgcccttgggaacctggaaaaagcaactgctgacctcaagaaggtgctggcgatagatcccaaaaaccgggcagcccaggaggaactggggaaggtggtcattcaggggaagaaccaggatgcagggctggctcagggtctgcgcaagatgtttggctgattaaaagttaaaccttaaaagaga

SEQ ID NO: 134723 - DNA, 1345 bp, Homo sapiens
  Payload ID: 6320
  Gene Symbol: FKBPL
  Gene Name: FK506 binding protein like
  Uniprot ID: Q9UIM3
  ENST ID: ENST00000456854
  CDS Start-End: 272-1321
agggttagttgtcagtatctttcccagttgttccgccccctacccccgcctcccgcaccgcgcccctctccggctgccctctccgtgtggggcaaggctccgagggcagcattcagtagccatttagctttggaaggagaggtgattcgaatggcccggctcctcctgtcaccatgctaggcactttggccgcgcaggtgctgacctgaacctggttcatccctttctgaccaaaactgttcactcaccgtggaagggactaagcatccatatggagacgccaccagtcaatacaattggagaaaaggacacctctcagccgcaacaagagtgggaaaagaaccttcgggagaaccttgattcagttattcagattaggcagcagccccgagaccctcctaccgaaacgcttgagctggaagtaagcccagatccagccagccaaattctagagcatactcaaggagctgaaaaactggttgctgaacttgaaggagactctcataagtctcatggatcaaccagtcagatgccagagacccttcaagcttctgatctctggtactgccccgatgggagctttgtcaagaagatcgtaatccgtggccatggcttggacaaacccaaactaggctcctgctgccgggtactggctttggggtttcctttcggatcagggccgccagagggctggacagagctaactatgggcgtagggccatggagggaggaaacttggggggagctcatagagaaatgcttggagtccatgtgtcaaggtgaggaagcagagcttcagctgcctgggcactctggacctcctgtcaggctcacactggcatccttcactcaaggccgagactcctgggagctggagactagcgagaaggaagccctggccagggaagaacgtgcaaggggcacagaactatttcgagctgggaaccctgaaggagctgcccgatgctatggacgggctcttcggctgctcctgactttacccccacctggccctccagaacgaactgtccttcatgccaatctggctgcctgtcagttgttgctagggcagcctcagttggcagcccagagctgtgaccgggtgttggagcgggagcctggccatttaaaggccttataccgaaggggggttgcccaggctgcccttgggaacctggaaaaagcaactgctgacctcaagaaggtgctggcgatagatcccaaaaaccgggcagcccaggaggaactggggaaggtggtcattcaggggaagaaccaggatgcagggctggctcagggtctgcgcaagatgtttggctgattaaaagttaaaccttaaaagaga

SEQ ID NO: 134724 - DNA, 2296 bp, Homo sapiens
  Payload ID: 6321
  Gene Symbol: FEN1
  Gene Name: flap structure-specific endonuclease 1
  Uniprot ID: P39748
  ENST ID: ENST00000305885
  CDS Start-End: 414-1556
aaaggaagtgcctccggcgcaagtggcattgagggacttgtagtcctgcgatttcgggtgtagagggagcaggggcctgcggggacctggtgtgggtggagtggggacaagcggtggagaagggtacgccagggtcgctgagagactctgttctccctggagggactggttgccatgagagcagccgtctgaggggacgcagcctgcactacgcgccccaagaggctgtgcgtggcgagcaggtcacgtgacgggagcgcgggctttggaaggcggctgaacgtcaggccacccgccgctaagctgagaagggagagcgagcttaggaccgcctgcccggggcaaccccgaaccaagctttagccgccgaggccgcgtgtcccaaaggccagtcatccctcctctgtgttgccatgggaattcaaggcctggccaaactaattgctgatgtggcccccagtgccatccgggagaatgacatcaagagctactttggccgtaaggtggccattgatgcctctatgagcatttatcagttcctgattgctgttcgccagggtggggatgtgctgcagaatgaggagggtgagaccaccagccacctgatgggcatgttctaccgcaccattcgcatgatggagaacggcatcaagcccgtgtatgtctttgatggcaagccgccacagctcaagtcaggcgagctggccaaacgcagtgagcggcgggctgaggcagagaagcagctgcagcaggctcaggctgctggggccgagcaggaggtggaaaaattcactaagcggctggtgaaggtcactaagcagcacaatgatgagtgcaaacatctgctgagcctcatgggcatcccttatcttgatgcacccagtgaggcagaggccagctgtgctgccctggtgaaggctggcaaagtctatgctgcggctaccgaggacatggactgcctcaccttcggcagccctgtgctaatgcgacacctgactgccagtgaagccaaaaagctgccaatccaggaattccacctgagccggattctgcaggagctgggcctgaaccaggaacagtttgtggatctgtgcatcctgctaggcagtgactactgtgagagtatccggggtattgggcccaagcgggctgtggacctcatccagaagcacaagagcatcgaggagatcgtgcggcgacttgaccccaacaagtaccctgtgccagaaaattggctccacaaggaggctcaccagctcttcttggaacctgaggtgctggacccagagtctgtggagctgaagtggagcgagccaaatgaagaagagctgatcaagttcatgtgtggtgaaaagcagttctctgaggagcgaatccgcagtggggtcaagaggctgagtaagagccgccaaggcagcacccagggccgcctggatgatttcttcaaggtgaccggctcactctcttcagctaagcgcaaggagccagaacccaagggatccactaagaagaaggcaaagactggggcagcagggaagtttaaaaggggaaaataaatgtgtttccccattatacctccttcaccccagaatatttgccgtcttgtacccttaagagctacagctagagaaaccttcacggggtggagagaggattctaaggcttttctagcgtgacccttttcagtagtgctagtcccttttttacttgatcttaatggcaagaaggccacagaggtacttttccttttttagctcaggaaaatatgtcaggctcaaaccacttctcaggcagtttaatggacactaagtccattgttacatgaaagtgatagatagcaacaagttttggagaagagagagggagataaaagggggagacaaaagatgtacagaaatgatttcctggctggccaactggtggccagtgggaggtgatggtggacctagactgtgcttttctgtcttgttcagccttgacccaccttgagagagagccaccaggaaggcgcatcttagcagatgggaggaactgctgagagaagatgggcagaaagctggagcccctggagttggctgtgtctgtgtttgtgactgattactggctgtgtcttgggtgggcagaaactcgaacttgctatgtaatttgtgtctagttattcagaggagtaagatggtgatgttcacctggcaatcagctgagttgagactttggaataagacactggttttcatgcgctgtttttgttttaaagttatgaagaaaaaagtcaataaaattctaaaagtaaccaaaa

SEQ ID NO: 134725 - DNA, 776 bp, Homo sapiens
  Payload ID: 6321
  Gene Symbol: FEN1
  Gene Name: flap structure-specific endonuclease 1
  ENST ID: ENST00000535723
  CDS Start-End: 282-776
gagcgagcttaggaccgcctgcccggggcaaccccgaaccaagctttagccgccgaggccgcgtgtcccaaaggccaggtgagaccccatgggaagcgcctccgggagcgacggggtccgcttggcgctgggggccgtggggagccggggtctggagtgcgcgggattcgcagtcaagaggtcccgccacttttccccctgtgagccttgggccagtcgcgtaagctccgagcctctctttcctccattgtagaaaagcgtcatccctcctctgtgttgccatgggaattcaaggcctggccaaactaattgctgatgtggcccccagtgccatccgggagaatgacatcaagagctactttggccgtaaggtggccattgatgcctctatgagcatttatcagttcctgattgctgttcgccagggtggggatgtgctgcagaatgaggagggtgagaccaccagccacctgatgggcatgttctaccgcaccattcgcatgatggagaacggcatcaagcccgtgtatgtctttgatggcaagccgccacagctcaagtcaggcgagctggccaaacgcagtgagcggcgggctgaggcagagaagcagctgcagcaggctcaggctgctggggccgagcaggaggtggaaaaattcactaagcggctggtgaaggtcactaagcagcacaatgatgagtgcaaacatctgctgagcctcatgggcatcccttatcttgatgcacccagtgaggcagaggccagctgtgctgcc

SEQ ID NO: 134726 - DNA, 768 bp, Homo sapiens
  Payload ID: 6321
  Gene Symbol: FEN1
  Gene Name: flap structure-specific endonuclease 1
  ENST ID: ENST00000535307
  CDS Start-End: 1-463
cctgactgccagtgaagccaaaaagctgccaatccaggaattccacctgagccggattctgcaggagctgggcctgaaccaggaacagtttgtggatctgtgcatcctgctaggcagtgactactgtgagagtatccggggtattgggcccaagcgggctgtggacctcatccagaagcacaagagcatcgaggagatcgtgcggcgacttgaccccaacaagtaccctgtgccagaaaattggctccacaaggaggctcaccagctcttcttggaacctgaggtgctggacccagagtctgtggagctgaagtggagcgagccaaatgaagaagagctgatcaagttcatgtgtggtgaaaagcagttctctgaggagcgaatccgcagtggggtcaagaggctgagtaagagccgccaaggcagcacccagggccgcctggatgatttcttcaagccttgacccaccttgagagagagccaccaggaaggcgcatcttagcagatgggaggaactgctgagagaagatgggcagaaagctggagcccctggagttggctgtgtctgtgtttgtgactgattactggctgtgtcttgggtgggcagaaactcgaacttgctatgtaatttgtgtctagttattcagaggagtaagatggtgatgttcacctggcaatcagctgagttgagactttggaataagacactggttttcatgcgctgtttttgttttaaagttatgaagaaaaaagtcaataaaattctaa

SEQ ID NO: 134727 - DNA, 2160 bp, Homo sapiens
  Payload ID: 6322
  Gene Symbol: FLAD1
  Gene Name: flavin adenine dinucleotide synthetase 1
  Uniprot ID: Q8NFF5
  ENST ID: ENST00000292180
  CDS Start-End: 323-2086
gccggtgaaggggcagaacaggcaggtgagagtctaagagggctcagtaatctgaagcttggtgggaagaagggattctgggctagaaagggtgcagaagcctgaagtagaaagagacgggattttggtccggggtggagagcgaatgcattgaaaagggccaaggcccaggataaggtagacatttaaaggggtacggatgcccaaggtagagcagacacttgaggagaccagctcagcaaacggaagacacttaaagtggtaggttctcaagagagaagaagtttttaagactagagctaagcaagacatttaaaaggacatgggttgggatttgggaacacgtttattccagaggcaggaacaaaggagtcgcttgtcaaggatctggttagagaagactagggtcttcctcgaaggaagcacgcgcacgcctgctctcccccattgtcttttctggcttctccaggttccctcgacccaggaccccctgttcccaggctatggcccccagtgccctgtagacctggcaggccccccgtgcttgcgacccctatttgggggtctgggtggctactggagggccttgcagaggggcagagaaggcaggaccatgacatctagggcctctgaactttctccggggcgcagcgtgacggctggcatcatcattgttggagatgagatccttaagggacacactcaggacaccaacaccttctttctgtgccggacactgcgctccctaggggtccaggtttgccgagtctcagttgtacctgatgaggtagccaccattgcagctgaggtcacttctttctccaaccgcttcacccatgtcctcacagcagggggcatcggccccactcatgatgatgtgacctttgaggcagtggcacaggcctttggagatgagctgaagccacaccccaagttggaagcagccaccaaagccctaggaggggaaggctgggagaagctatcattggtgccctcctctgcccgcctgcattatggcacagatccttgcactggtcaacctttcagattccctctggtctccgtccgaaacgtctacctcttcccaggcattccagagctgctgcggcgggtgctggaggggatgaagggactattccaaaacccagctgttcagttccactcaaaggagctatatgtggctgctgatgaagcctccatcgcccccattctggctgaggcccaggcccactttggacgtaggcttggcctgggttcctaccctgactggggcagcaactactatcaggtgaagctgactctagactcagaggaagaaggacccctggaggaatgcttggcctacctgactgcccgtttgccccagggatcgctggtcccctacatgcccaacgctgtggagcaggccagtgaggctgtatacaaactcgctgaatcagggtcttctttggggaaaaaggtggcaggtgccctacagaccattgagacctccctggctcagtacagcctcacccagctctgtgtgggcttcaacgggggcaaagactgcactgccctcctgcacctcttccatgcagctgtgcagaggaaattacctgatgttccaaaccccctccagatcctgtatatccgcagcatctcccctttccctgagctggaacagtttctacaggacactatcaagaggtataatctgcagatgttggaagctgagggcagcatgaagcaggccctgggtgaactgcaggcacggcacccccagctggaggctgtccttatgggcacccgccggactgacccctactcctgtagcctctgccctttcagccccactgacccaggctggcccgcattcatgcgcatcaacccactgctggactggacctacagagacatctgggattttctgcgtcagctgtttgtcccatactgtatcctgtatgaccgaggatacacatcactggggagtcgggagaataccgtgcggaacccggccctgaagtgcctgagcccaggaggacaccccacataccgtccagcctatctactggagaacgaagaagaggagcggaactcccgcacatgacctcccaccctaggagggagggaaggacaccgtcctagggtataacctggcaataaaccgtgcctctcactgtg

SEQ ID NO: 134728 - DNA, 1211 bp, Homo sapiens
  Payload ID: 6322
  Gene Symbol: FLAD1
  Gene Name: flavin adenine dinucleotide synthetase 1
  ENST ID: ENST00000295530
  CDS Start-End: 478-990
cttcatccctacagtactgatggcctcatcttccccttcaacccccagggacacactcaggacaccaacaccttctttctgtgccggacactgcgctccctaggggtccaggtttgccgagtctcagttgtacctgatgaggtagccaccattgcagctgaggtcacttctttctccaaccgcttcacccatgtcctcacagcagggggcatcggccccactcatgatgatgtgacctttgaggcagtggcacaggcctttggagatgagctgaagccacaccccaagttggaagcagccaccaaagccctaggaggggaaggctgggagaagctatcattggtgccctcctctgcccgcctgcattatggcacagatccttgcactggtcaacctttcagattccctctggtctccgtccgaaacgtctacctcttcccaggcattccagagctgctgcggcgggtgctggaggggatgaagggactattccaaaacccagctgttcagttccactcaaaggagctatatgtggctgctgatgaagcctccatcgcccccattctggctgaggcccaggcccactttggacgtaggcttggcctgggttcctaccctgactggggcagcaactactatcaggtgaagctgactctagactcagaggaagaaggacccctggaggaatgcttggcctacctgactgcccgtttgccccagggatcgctggtcccctacatgcccaacgctgtggagcaggccagtgaggctgtatacaaactcgctgaatcaggaaattacctgatgttccaaaccccctccagatcctgtatatccgcagcatctcccctttccctgagctggaacagtttctacaggacactatcaagagagcaagctataccagagaatcagatagcaagccctccctcagaggccaagggagcagaagagccatggatgggccccttcccaggacagcaggggtagaagtgggaaagatacacatcactggggagtcgggagaataccgtgcggaacccggccctgaagtgcctgagcccaggaggacaccccacataccgtccagcctatctactggagaacgaagaagaggagcggaactcccgcacatgacctcccaccctaggagggagggaaggacaccgtcctagggtataacctggcaataaaccgtgcctctcactgtg

SEQ ID NO: 134729 - DNA, 1730 bp, Homo sapiens
  Payload ID: 6322
  Gene Symbol: FLAD1
  Gene Name: flavin adenine dinucleotide synthetase 1
  Uniprot ID: Q8NFF5
  ENST ID: ENST00000315144
  CDS Start-End: 184-1656
gaacaagggaaagagccggtgaaggggcagaacaggcaggttccctcgacccaggaccccctgttcccaggctatggcccccagtgccctgtagacctggcaggccccccgtgcttgcgacccctatttgggggtctgggtggctactggagggccttgcagaggggcagagaaggcaggaccatgacatctagggcctctgaactttctccggggcgcagcgtgacggctggcatcatcattgttggagatgagatccttaagggacacactcaggacaccaacaccttctttctgtgccggacactgcgctccctaggggtccaggtttgccgagtctcagttgtacctgatgaggtagccaccattgcagctgaggtcacttctttctccaaccgcttcacccatgtcctcacagcagggggcatcggccccactcatgatgatgtgacctttgaggcagtggcacaggcctttggagatgagctgaagccacaccccaagttggaagcagccaccaaagccctaggaggggaaggctgggagaagctatcattggtgccctcctctgcccgcctgcattatggcacagatccttgcactggtcaacctttcagattccctctggtctccgtccgaaacgtctacctcttcccaggcattccagagctgctgcggcgggtgctggaggggatgaagggactattccaaaacccagctgttcagttccactcaaaggagctatatgtggctgctgatgaagcctccatcgcccccattctggctgaggcccaggcccactttggacgtaggcttggcctgggttcctaccctgactggggcagcaactactatcaggtgaagctgactctagactcagaggaagaaggacccctggaggaatgcttggcctacctgactgcccgtttgccccagggatcgctggtcccctacatgcccaacgctgtggagcaggccagtgaggctgtatacaaactcgctgaatcagggtcttctttggggaaaaaggtggcaggtgccctacagaccattgagacctccctggctcagtacagcctcacccagctctgtgtgggcttcaacgggggcaaagactgcactgccctcctgcacctcttccatgcagctgtgcagaggaaattacctgatgttccaaaccccctccagatcctgtatatccgcagcatctcccctttccctgagctggaacagtttctacaggacactatcaagaggtataatctgcagatgttggaagctgagggcagcatgaagcaggccctgggtgaactgcaggcacggcacccccagctggaggctgtccttatgggcacccgccggactgacccctactcctgtagcctctgccctttcagccccactgacccaggctggcccgcattcatgcgcatcaacccactgctggactggacctacagagacatctgggattttctgcgtcagctgtttgtcccatactgtatcctgtatgaccgaggatacacatcactggggagtcgggagaataccgtgcggaacccggccctgaagtgcctgagcccaggaggacaccccacataccgtccagcctatctactggagaacgaagaagaggagcggaactcccgcacatgacctcccaccctaggagggagggaaggacaccgtcctagggtataacctggcaataaaccgtgcctctcactgtg

SEQ ID NO: 134730 - DNA, 1111 bp, Homo sapiens
  Payload ID: 6322
  Gene Symbol: FLAD1
  Gene Name: flavin adenine dinucleotide synthetase 1
  ENST ID: ENST00000368428
  CDS Start-End: 651-1037
gactattccaaaacccagctgttcagttccactcaaaggagctatatgtggctgctgatgaagcctccatcgcccccattctggctgaggcccaggcccactttggacgtaggcttggcctgggttcctaccctgactggggcagcaactactatcaggtgaagctgactctagactcagaggaagaaggacccctggaggaatgcttggcctacctgactgcccgtttgccccagggatcgctggtcccctacatgcccaacgctgtggagcaggccagtgaggctgtatacaaactcgctgaatcagggtcttctttggggaaaaaggtggcaggtgccctacagaccattgagacctccctggctcagtacagcctcacccagctctgtgtgggcttcaacgggggcaaagactgcactgccctcctgcacctcttccatgcagctgtgcagaggaaattacctgatgttccaaaccccctccagatcctgtatatccgcagcatctcccctttccctgagctggaacagtttctacaggacactatcaagaggtactaggggcctggaggtttgggctccaagagaagcttgacagagcccacgcccgacccctacttctgtttcttcctaaggtataatctgcagatgttggaagctgagggcagcatgaagcaggccctgggtgaactgcaggcacggcacccccagctggaggctgtccttatgggcacccgccggactgacccctactcctgtagcctctgccctttcagccccactgacccaggctggcccgcattcatgcgcatcaacccactgctggactggacctacagagacatctgggattttctgcgtcagctgtttgtcccatactgtatcctgtatgaccgaggatacacatcactggggagtcgggagaataccgtgcggaacccggccctgaagtgcctgagcccaggaggacaccccacataccgtccagcctatctactggagaacgaagaagaggagcggaactcccgcacatgacctcccaccctaggagggagggaaggacaccgtcctagggtataacctggcaataaaccgtgcctctcactgtg

SEQ ID NO: 134731 - DNA, 1803 bp, Homo sapiens
  Payload ID: 6322
  Gene Symbol: FLAD1
  Gene Name: flavin adenine dinucleotide synthetase 1
  Uniprot ID: Q8NFF5
  ENST ID: ENST00000368431
  CDS Start-End: 821-1705
gaaagagccggtgaaggggcagaacaggcaggttccctcgacccaggaccccctgttcccaggctatggcccccagtgccctgtagacctggcaggccccccgtgcttgcgacccctatttgggggtctgggtggctactggagggccttgcagaggggcagagaaggcaggaccatgacatctagggcctctgaactttctccggggcgcagcgtgacggctggcatcatcattgttggagatgagatccttaagttggaaacaacaaatggcttttgagtccaagagtgatgcaatcacagtgacgcattaaaacggttactccggagacatcagagcactgtggctggaggctgggagcctggccaggaagctgtcgccattgtccaggtgaaaggtgctaaggacctgcttggtggcagtggggacagaaagaagaaagcaggccaggcgtggtggctcacacctataattccagcactttgggaggctgaggcaggaggatcacttgagaccaggaattcaacaccagcctgggcaacatggcaagaccccatttctacaaaaaaaatttaaaatgagctgaatgtggtggcacgcgcctgtagtcccagctactcggaaggctggggtggcccttgaagccaggaggttgaggctgcagtgaactgtgactgagccactatactccagcctgggtgacagagacccagctttaaaaccaaacaaatggattttcccactcttgtgtccagtccaggcccctcagcagcctgaggtggtgtccttcaaagagcagagcactgcatcatcaggtggatgcagccatcatcttcaacccctccccttcatccctacagtactgatggcctcatcttccccttcaacccccagggacacactcaggacaccaacaccttctttctgtgccggacactgcgctccctaggggtccaggtttgccgagtctcagttgtacctgatgaggtagccaccattgcagctgaggtcacttctttctccaaccgcttcacccatgtcctcacagcagggggcatcggccccactcatgatgatgtgacctttgaggcagtggcacaggcctttggagatgagctgaagccacaccccaagttggaagcagccaccaaagccctaggaggggaaggctgggagaagctatcattggtgccctcctctgcccgcctgcattatggcacagatccttgcactggtcaacctttcagattccctctggtctccgtccgaaacgtctacctcttcccaggcattccagagctgctgcggcgggtgctggaggggatgaagggactattccaaaacccagctgttcagttccactcaaaggagctatatgtggctgctgatgaagcctccatcgcccccattctggctgaggcccaggcccactttggacgtaggcttggcctgggttcctaccctgactggggcagcaactactatcaggtgaagctgactctagactcagaggaagaaggacccctggaggaatgcttggcctacctgactgcccgtttgccccagggatcgctggtcccctacatgcccaacgctgtggagcaggccagtgaggctgtatacaaactcgctgaatcaggtagggaccttatggaggaggggcattatgcccaaagccattggtggcaccccagatctcagtaatgcaggggctgttgggtgcttcctgcaaatccctgagagggcagaagatagcttctgttaattcattattcttccaataaatgttgattgagtaccta

SEQ ID NO: 134732 - DNA, 1839 bp, Homo sapiens
  Payload ID: 6322
  Gene Symbol: FLAD1
  Gene Name: flavin adenine dinucleotide synthetase 1
  Uniprot ID: Q8NFF5
  ENST ID: ENST00000368432
  CDS Start-End: 178-1518
gggaaagagccggtgaaggggcagaacaggcaggttccctcgacccaggaccccctgttcccaggctatggcccccagtgccctgtagacctggcaggccccccgtgcttgcgacccctatttgggggtctgggtggctactggagggccttgcagaggggcagagaaggcaggaccatgacatctagggcctctgaactttctccggggcgcagcgtgacggctggcatcatcattgttggagatgagatccttaagggacacactcaggacaccaacaccttctttctgtgccggacactgcgctccctaggggtccaggtttgccgagtctcagttgtacctgatgaggtagccaccattgcagctgaggtcacttctttctccaaccgcttcacccatgtcctcacagcagggggcatcggccccactcatgatgatgtgacctttgaggcagtggcacaggcctttggagatgagctgaagccacaccccaagttggaagcagccaccaaagccctaggaggggaaggctgggagaagctatcattggtgccctcctctgcccgcctgcattatggcacagatccttgcactggtcaacctttcagattccctctggtctccgtccgaaacgtctacctcttcccaggcattccagagctgctgcggcgggtgctggaggggatgaagggactattccaaaacccagctgttcagttccactcaaaggagctatatgtggctgctgatgaagcctccatcgcccccattctggctgaggcccaggcccactttggacgtaggcttggcctgggttcctaccctgactggggcagcaactactatcaggtgaagctgactctagactcagaggaagaaggacccctggaggaatgcttggcctacctgactgcccgtttgccccagggatcgctggtcccctacatgcccaacgctgtggagcaggccagtgaggctgtatacaaactcgctgaatcagggtcttctttggggaaaaaggtggcaggtgccctacagaccattgagacctccctggctcagtacagcctcacccagctctgtgtgggcttcaacgggggcaaagactgcactgccctcctgcacctcttccatgcagctgtgcagaggaaattacctgatgttccaaaccccctccagatcctgtatatccgcagcatctcccctttccctgagctggaacagtttctacaggacactatcaagaggtataatctgcagatgttggaagctgagggcagcatgaagcaggccctgggtgaactgcaggcacggcacccccagctggaggctgtccttatgggcacccgccggactgacccctactcctgtagcctctgccctttcagccccactgacccaggctggcccgcattcatgcgcatcaacccactgctggactggacctacagagacatctgggattttctgcgtcagctgtttgtcccatactgtatcctgtatgaccgagggtaagggtattaggggaagggaatgggtaagggagtttttagggtgctgggatagggagggccaataggatcgcccaccctaccacatgcttgccctccaccctccctgctccagatacacatcactggggagtcgggagaataccgtgcggaacccggccctgaagtgcctgagcccaggaggacaccccacataccgtccagcctatctactggagaacgaagaagaggagcggaactcccgcacatgacctcccaccctaggagggagggaaggacaccgtcctagggtataacctggcaataaaccgtgcctctcactgtg

SEQ ID NO: 134733 - DNA, 2656 bp, Homo sapiens
  Payload ID: 6322
  Gene Symbol: FLAD1
  Gene Name: flavin adenine dinucleotide synthetase 1
  ENST ID: ENST00000368433
  CDS Start-End: 344-1714
aggaaaggaacaagggaaagagccggtgaaggggcagaacaggcaggtgagagtctaagagggctcagtaatctgaagcttggtgggaagaagggattctgggctagaaagggtgcagaagcctgaagtagaaagagacgggattttggtccggggtggagagcgaatgcattgaaaagggccaaggcccaggataaggtagacatttaaaggggtacggatgcccaaggtagagcagacacttgaggagaccagctcagcaaacggaagacacttaaagtggtaggttctcaagagagaagaagtttttaagactagagctaagcaagacatttaaaaggacatgggttgggatttgggaacacgtttattccagaggcaggaacaaaggagtcgcttgtcaaggatctggttagagaagactagggtcttcctcgaaggaagcacgcgcacgcctgctctcccccattgtcttttctggcttctccaggttccctcgacccaggaccccctgttcccaggctatggcccccagtgccctgtagacctggcaggccccccgtgcttgcgacccctatttgggggtctgggtggctactggagggccttgcagaggggcagagaaggcaggaccatgacatctagggcctctgaactttctccggggcgcagcgtgacggctggcatcatcattgttggagatgagatccttaagggacacactcaggacaccaacaccttctttctgtgccggacactgcgctccctaggggtccaggtttgccgagtctcagttgtacctgatgaggtagccaccattgcagctgaggtcacttctttctccaaccgcttcacccatgtcctcacagcagggggcatcggccccactcatgatgatgtgacctttgaggcagtggcacaggcctttggagatgagctgaagccacaccccaagttggaagcagccaccaaagccctaggaggggaaggctgggagaagctatcattggtgccctcctctgcccgcctgcattatggcacagatccttgcactggtcaacctttcagattccctctggtctccgtccgaaacgtctacctcttcccaggcattccagagctgctgcggcgggtgctggaggggatgaagggactattccaaaacccagctgttcagttccactcaaaggagctatatgtggctgctgatgaagcctccatcgcccccattctggctgaggcccaggcccactttggacgtaggcttggcctgggttcctaccctgactggggcagcaactactatcaggtgaagctgactctagactcagaggaagaaggacccctggaggaatgcttggcctacctgactgcccgtttgccccagggatcgctggtcccctacatgcccaacgctgtggagcaggccagtgaggctgtatacaaactcgctgaatcagggtcttctttggggaaaaaggtggcaggtgccctacagaccattgagacctccctggctcagtacagcctcacccagctctgtgtgggcttcaacgggggcaaagactgcactgccctcctgcacctcttccatgcagctgtgcagaggaaattacctgatgttccaaaccccctccagatcctgtatatccgcagcatctcccctttccctgagctggaacagtttctacaggacactatcaagaggtactaggggcctggaggtttgggctccaagagaagcttgacagagcccacgcccgacccctacttctgtttcttcctaaggtataatctgcagatgttggaagctgagggcagcatgaagcaggccctgggtgaactgcaggcacggcacccccagctggaggctgtccttatgggcacccgccggactgacccctactcctgtagcctctgccctttcagccccactgacccaggctggcccgcattcatgcgcatcaacccactgctggtaatggggaagagggtttatcaccttcagtctcacgtgccccagcagtcactgcaccctagctcacctgcagtagtggggaggctagagcctggaacctggatgaaggggcctcatcatccaagggaggcagtgctatctgttcattcatccttttgaccaatatttattgagcccaaattcaatagcaggcattgcacttcctactgtggatagaatagtgacttagacttgtgctgtccaatatagccattaattatttatttatacttaaattttaattaattagaatgaaatacatatgactaaaaaccactgaattatatactttaaaaggatgaatttgatggtatgtggatacctcaatttttaaaattaagtacaattaaaaattcagttctggctgggcgcagtggctcacgcctgtaatcccagcactttgggaggccatggtgggcagatcacttgaggccaggagttcgagaccagcctggccaacatggcgaaaccctgtctctactaaaaatacaaaaaattagccaggcgtggtggcctgtagtcctagttactcgagaggctgaggcaggagaattgcttgaacccaggagacggaggttgcagtgagctgagatggcaccactgtactccagcctgggcaacagaacaagactctgtctc

SEQ ID NO: 134734 - DNA, 2160 bp, Homo sapiens
  Payload ID: 6323
  Gene Symbol: FMO1
  Gene Name: flavin containing monooxygenase 1
  Uniprot ID: Q01740
  ENST ID: ENST00000354841
  CDS Start-End: 132-1730
cgctacagaagattcaaactgagcaaatcgcctaatcttccaaattctttttcctggcttgttagagcagccaagggtggggtggagcttgtgaataaaaagcctgcttcatcttcctcatgcaggagaacatggccaagcgagttgccattgtgggagctggggtcagcggcctggcctccatcaagtgctgtctggaagaaggactggagcccacctgctttgagaggagcgatgaccttggggggctgtggagattcaccgaacatgttgaagaaggcagagccagtctctacaagtctgtggtttccaacagctgcaaggagatgtcttgttactcagactttccattcccagaagattatccaaactatgtgccaaattctcaattcctggaatatctcaaaatgtatgcaaaccactttgaccttctgaaacacattcaattcaagaccaaagtctgcagtgtaacaaaatgctcagattctgctgtctctggccaatgggaggtggtcactatgcatgaagagaagcaagagtcagccatctttgatgctgtcatggtctgcactggctttcttactaatccttatttgccactggattcctttccaggtattaatgcctttaaaggccagtactttcatagccggcaatataagcatccagatatatttaaggacaagagagtccttgtgattggaatgggaaattctggcacagacattgctgtggaggccagccacctggcggaaaaggtgttcctcagcaccaccggagggggatgggtgatcagccgaatctttgactcgggctacccatgggacatggtgttcatgacacgctttcagaacatgttgagaaattccctcccaaccccaattgtgacttggttgatggagcgaaagataaacaactggctcaatcatgcaaattacggcttaataccagaagacaggactcagctgaaagagtttgtgctaaatgatgagctcccaggacgcatcatcactgggaaagtgttcatcaggccaagcataaaagaggtaaaggaaaactctgtcatatttaacaatacttcaaaggaagagcctattgacatcattgtctttgccactggatacacatttgctttccccttccttgatgagtctgtagtgaaagttgaagatggccaggcctcactgtacaagtatatcttccctgcacatctgcaaaagccaaccctggccattattggcctcatcaaacccttgggctccatgatacctacaggagaaacacaagctcggtgggctgttcgagtcctgaaaggtgtaaataagttaccaccaccaagtgtcatgatagaggaaattaatgcaaggaaagaaaacaagcccagttggtttggcttgtgctactgcaaggctttacaatcagattatatcacatacatagatgaactcctgacctatatcaatgcaaaacccaacctgttctctatgctcctaacggatccacatctggctctgaccgtcttctttggcccatgctcaccataccagttccgcttgactggcccaggaaaatgggaaggagccagaaatgccatcatgacccagtgggaccgaacattcaaggtcatcaaagctcgagttgtacaagagtctccatctccctttgaaagttttcttaaagtctttagctttctggctttgcttgtggctatttttctgattttcctataagtaaaagatctcctaaatggaagatgcacagagtagatttacaatgctccaattcctctcttacagcaatattgccttcacagttataaactgtattcaaatagtaaaggccaccctctcgcttccctggctggccccagggctaccactggtattcctgagcctctcccagctccacttctaatgctagagaatgataactaagacttctgtgcatttgaaggttgttggaaagttacaggttcattttagaaagaaagctgttcttgacagcactctgagccatcatacctctttcccatataaactattttcacagatctcaactaaaaccccttacttcacaaatgattgtgttgtgctgaaatggtgctcttatagtactggcttattaaaagtaaaaaataaacctaaaaattgattgttttaa

SEQ ID NO: 134735 - DNA, 2155 bp, Homo sapiens
  Payload ID: 6323
  Gene Symbol: FMO1
  Gene Name: flavin containing monooxygenase 1
  Uniprot ID: Q01740
  ENST ID: ENST00000367750
  CDS Start-End: 123-1721
aggtttatccactgtgctggggactcccaagccagcactggctcatactgattcattttgatctctgctaataccagagtcctgcgtggcagagccattggcaccagaaattacaagagaacatggccaagcgagttgccattgtgggagctggggtcagcggcctggcctccatcaagtgctgtctggaagaaggactggagcccacctgctttgagaggagcgatgaccttggggggctgtggagattcaccgaacatgttgaagaaggcagagccagtctctacaagtctgtggtttccaacagctgcaaggagatgtcttgttactcagactttccattcccagaagattatccaaactatgtgccaaattctcaattcctggaatatctcaaaatgtatgcaaaccactttgaccttctgaaacacattcaattcaagaccaaagtctgcagtgtaacaaaatgctcagattctgctgtctctggccaatgggaggtggtcactatgcatgaagagaagcaagagtcagccatctttgatgctgtcatggtctgcactggctttcttactaatccttatttgccactggattcctttccaggtattaatgcctttaaaggccagtactttcatagccggcaatataagcatccagatatatttaaggacaagagagtccttgtgattggaatgggaaattctggcacagacattgctgtggaggccagccacctggcggaaaaggtgttcctcagcaccaccggagggggatgggtgatcagccgaatctttgactcgggctacccatgggacatggtgttcatgacacgctttcagaacatgttgagaaattccctcccaaccccaattgtgacttggttgatggagcgaaagataaacaactggctcaatcatgcaaattacggcttaataccagaagacaggactcagctgaaagagtttgtgctaaatgatgagctcccaggacgcatcatcactgggaaagtgttcatcaggccaagcataaaagaggtaaaggaaaactctgtcatatttaacaatacttcaaaggaagagcctattgacatcattgtctttgccactggatacacatttgctttccccttccttgatgagtctgtagtgaaagttgaagatggccaggcctcactgtacaagtatatcttccctgcacatctgcaaaagccaaccctggccattattggcctcatcaaacccttgggctccatgatacctacaggagaaacacaagctcggtgggctgttcgagtcctgaaaggtgtaaataagttaccaccaccaagtgtcatgatagaggaaattaatgcaaggaaagaaaacaagcccagttggtttggcttgtgctactgcaaggctttacaatcagattatatcacatacatagatgaactcctgacctatatcaatgcaaaacccaacctgttctctatgctcctaacggatccacatctggctctgaccgtcttctttggcccatgctcaccataccagttccgcttgactggcccaggaaaatgggaaggagccagaaatgccatcatgacccagtgggaccgaacattcaaggtcatcaaagctcgagttgtacaagagtctccatctccctttgaaagttttcttaaagtctttagctttctggctttgcttgtggctatttttctgattttcctataagtaaaagatctcctaaatggaagatgcacagagtagatttacaatgctccaattcctctcttacagcaatattgccttcacagttataaactgtattcaaatagtaaaggccaccctctcgcttccctggctggccccagggctaccactggtattcctgagcctctcccagctccacttctaatgctagagaatgataactaagacttctgtgcatttgaaggttgttggaaagttacaggttcattttagaaagaaagctgttcttgacagcactctgagccatcatacctctttcccatataaactattttcacagatctcaactaaaaccccttacttcacaaatgattgtgttgtgctgaaatggtgctcttatagtactggcttattaaaagtaaaaaataaacctaaaaattgattgttttaagtga

SEQ ID NO: 134736 - DNA, 2003 bp, Homo sapiens
  Payload ID: 6323
  Gene Symbol: FMO1
  Gene Name: flavin containing monooxygenase 1
  Uniprot ID: Q01740
  ENST ID: ENST00000402921
  CDS Start-End: 160-1569
aaatttaacattccttatctcttagaccaggtttatccactgtgctggggactcccaagccagcactggctcatactgattcattttgatctctgctaataccagagtcctgcgtggcagagccattggcaccagaaattacaagtacgtaaagagaacatggccaagcgagttgccattgtgggagctggggtcagcggcctggcctccatcaagtgctgtctggaagaaggactggagcccacctgctttgagaggagcgatgaccttggggggctgtggagattcaccaccaaagtctgcagtgtaacaaaatgctcagattctgctgtctctggccaatgggaggtggtcactatgcatgaagagaagcaagagtcagccatctttgatgctgtcatggtctgcactggctttcttactaatccttatttgccactggattcctttccaggtattaatgcctttaaaggccagtactttcatagccggcaatataagcatccagatatatttaaggacaagagagtccttgtgattggaatgggaaattctggcacagacattgctgtggaggccagccacctggcggaaaaggtgttcctcagcaccaccggagggggatgggtgatcagccgaatctttgactcgggctacccatgggacatggtgttcatgacacgctttcagaacatgttgagaaattccctcccaaccccaattgtgacttggttgatggagcgaaagataaacaactggctcaatcatgcaaattacggcttaataccagaagacaggactcagctgaaagagtttgtgctaaatgatgagctcccaggacgcatcatcactgggaaagtgttcatcaggccaagcataaaagaggtaaaggaaaactctgtcatatttaacaatacttcaaaggaagagcctattgacatcattgtctttgccactggatacacatttgctttccccttccttgatgagtctgtagtgaaagttgaagatggccaggcctcactgtacaagtatatcttccctgcacatctgcaaaagccaaccctggccattattggcctcatcaaacccttgggctccatgatacctacaggagaaacacaagctcggtgggctgttcgagtcctgaaaggtgtaaataagttaccaccaccaagtgtcatgatagaggaaattaatgcaaggaaagaaaacaagcccagttggtttggcttgtgctactgcaaggctttacaatcagattatatcacatacatagatgaactcctgacctatatcaatgcaaaacccaacctgttctctatgctcctaacggatccacatctggctctgaccgtcttctttggcccatgctcaccataccagttccgcttgactggcccaggaaaatgggaaggagccagaaatgccatcatgacccagtgggaccgaacattcaaggtcatcaaagctcgagttgtacaagagtctccatctccctttgaaagttttcttaaagtctttagctttctggctttgcttgtggctatttttctgattttcctataagtaaaagatctcctaaatggaagatgcacagagtagatttacaatgctccaattcctctcttacagcaatattgccttcacagttataaactgtattcaaatagtaaaggccaccctctcgcttccctggctggccccagggctaccactggtattcctgagcctctcccagctccacttctaatgctagagaatgataactaagacttctgtgcatttgaaggttgttggaaagttacaggttcattttagaaagaaagctgttcttgacagcactctgagccatcatacctctttcccatataaactattttcacagatctcaactaaaaccccttacttcacaaatgattgtgttgtgctgaaatggtgctcttatagtactggcttattaaaagtaaaaaataaacctaaaaattgattgttttaagtga

SEQ ID NO: 134737 - DNA, 757 bp, Homo sapiens
  Payload ID: 6323
  Gene Symbol: FMO1
  Gene Name: flavin containing monooxygenase 1
  ENST ID: ENST00000433267
  CDS Start-End: 132-757
aggtttatccactgtgctggggactcccaagccagcactggctcatactgattcattttgatctctgctaataccagagtcctgcgtggcagagccattggcaccagaaattacaagtacgtaaagagaacatggccaagcgagttgccattgtgggagctggggtcagcggcctggcctccatcaagtgctgtctggaagaaggactggagcccacctgctttgagaggagcgatgaccttggggggctgtggagattcaccgaacatgttgaagaaggcagagccagtctctacaagtctgtggtttccaacagctgcaaggagatgtcttgttactcagactttccattcccagaagattatccaaactatgtgccaaattctcaattcctggaatatctcaaaatgtatgcaaaccactttgaccttctgaaacacattcaattcaagaccaaagtctgcagtgtaacaaaatgctcagattctgctgtctctggccaatgggaggtggtcactatgcatgaagagaagcaagagtcagccatctttgatgctgtcatggtctgcactggctttcttactaatccttatttgccactggattcctttccaggtattaatgcctttaaaggccagtactttcatagccggcaatataagcatccagatatatttaaggacaagagagtccttgtgattggaatgggaaattctggcacagacattgctgtggaggccagccacctggcggaaaa

SEQ ID NO: 134738 - DNA, 2192 bp, Homo sapiens
  Payload ID: 6323
  Gene Symbol: FMO1
  Gene Name: flavin containing monooxygenase 1
  Uniprot ID: Q01740
  ENST ID: ENST00000617670
  CDS Start-End: 160-1758
aaatttaacattccttatctcttagaccaggtttatccactgtgctggggactcccaagccagcactggctcatactgattcattttgatctctgctaataccagagtcctgcgtggcagagccattggcaccagaaattacaagtacgtaaagagaacatggccaagcgagttgccattgtgggagctggggtcagcggcctggcctccatcaagtgctgtctggaagaaggactggagcccacctgctttgagaggagcgatgaccttggggggctgtggagattcaccgaacatgttgaagaaggcagagccagtctctacaagtctgtggtttccaacagctgcaaggagatgtcttgttactcagactttccattcccagaagattatccaaactatgtgccaaattctcaattcctggaatatctcaaaatgtatgcaaaccactttgaccttctgaaacacattcaattcaagaccaaagtctgcagtgtaacaaaatgctcagattctgctgtctctggccaatgggaggtggtcactatgcatgaagagaagcaagagtcagccatctttgatgctgtcatggtctgcactggctttcttactaatccttatttgccactggattcctttccaggtattaatgcctttaaaggccagtactttcatagccggcaatataagcatccagatatatttaaggacaagagagtccttgtgattggaatgggaaattctggcacagacattgctgtggaggccagccacctggcggaaaaggtgttcctcagcaccaccggagggggatgggtgatcagccgaatctttgactcgggctacccatgggacatggtgttcatgacacgctttcagaacatgttgagaaattccctcccaaccccaattgtgacttggttgatggagcgaaagataaacaactggctcaatcatgcaaattacggcttaataccagaagacaggactcagctgaaagagtttgtgctaaatgatgagctcccaggacgcatcatcactgggaaagtgttcatcaggccaagcataaaagaggtaaaggaaaactctgtcatatttaacaatacttcaaaggaagagcctattgacatcattgtctttgccactggatacacatttgctttccccttccttgatgagtctgtagtgaaagttgaagatggccaggcctcactgtacaagtatatcttccctgcacatctgcaaaagccaaccctggccattattggcctcatcaaacccttgggctccatgatacctacaggagaaacacaagctcggtgggctgttcgagtcctgaaaggtgtaaataagttaccaccaccaagtgtcatgatagaggaaattaatgcaaggaaagaaaacaagcccagttggtttggcttgtgctactgcaaggctttacaatcagattatatcacatacatagatgaactcctgacctatatcaatgcaaaacccaacctgttctctatgctcctaacggatccacatctggctctgaccgtcttctttggcccatgctcaccataccagttccgcttgactggcccaggaaaatgggaaggagccagaaatgccatcatgacccagtgggaccgaacattcaaggtcatcaaagctcgagttgtacaagagtctccatctccctttgaaagttttcttaaagtctttagctttctggctttgcttgtggctatttttctgattttcctataagtaaaagatctcctaaatggaagatgcacagagtagatttacaatgctccaattcctctcttacagcaatattgccttcacagttataaactgtattcaaatagtaaaggccaccctctcgcttccctggctggccccagggctaccactggtattcctgagcctctcccagctccacttctaatgctagagaatgataactaagacttctgtgcatttgaaggttgttggaaagttacaggttcattttagaaagaaagctgttcttgacagcactctgagccatcatacctctttcccatataaactattttcacagatctcaactaaaaccccttacttcacaaatgattgtgttgtgctgaaatggtgctcttatagtactggcttattaaaagtaaaaaataaacctaaaaattgattgttttaagtga

SEQ ID NO: 134739 - DNA, 3851 bp, Homo sapiens
  Payload ID: 6324
  Gene Symbol: FMO2
  Gene Name: flavin containing monooxygenase 2 (non-functional)
  Uniprot ID: Q99518
  ENST ID: ENST00000209929
  CDS Start-End: 159-1766
ttcagctggaagaatgctggaggaatacggaactcctcccatttctcacagccacctccaactcttaaaaacgcttccaactgcctcccagcacacaaccaagggagaaaactattctgtcaaagagacggtgccaaaaggcaaaaacaaaggagctgatggcaaagaaggtagctgtgattggagctggggtcagtggcctaatttctctgaagtgctgtgtggatgagggacttgagcccacttgctttgagagaactgaagatattggaggagtgtggaggttcaaagagaatgtggaagatggccgagcaagtatctatcaatctgtcgttaccaacaccagcaaagaaatgtcctgtttcagtgactttccaatgcctgaagattttccaaacttcctgcataattctaaacttctggaatatttcaggatttttgctaaaaaatttgatctgctaaaatatattcagttccagacaactgtccttagtgtgagaaaatgtccagatttctcatcctctggccaatggaaggttgtcactcagagcaacggcaaggagcagagtgctgtctttgacgcagttatggtttgcagtggccaccacattctacctcatatcccactgaagtcatttccaggtatggagaggttcaaaggccaatatttccatagccgccaatacaagcatccagatggatttgagggaaaacgcatcctggtgattggaatgggaaactcaggctcagatattgctgttgagctgagtaagaatgctgctcaggtttttatcagcaccaggcatggcacctgggtcatgagccgtatctctgaagatggctatccttgggactcagtgttccacacccggtttcgttctatgctccgcaatgtactgccacgaacagctgtaaaatggatgatagaacaacagatgaatcggtggttcaaccatgaaaattatggccttgagcctcaaaacaaatacattatgaaggaacctgtactaaatgatgatgtcccaagtcgtctactctgtggagccatcaaggtgaaatctacagtgaaagagctcacagaaacttctgccatctttgaggatggaacagtggaggagaacattgatgtcatcatttttgcaacaggatatagtttctcttttcccttccttgaagattcactcgttaaagtagagaataatatggtctcactgtataaatacatattccccgctcacctggacaagtcaaccctcgcgtgcattggtctcatccagcccctaggttccattttcccaactgctgaacttcaagctcgttgggtgacaagagttttcaaaggcttgtgtagcctgccctcagagagaactatgatgatggacattatcaaaaggaatgaaaaaagaattgacctgtttggagaaagccagagccagacgttgcagaccaattatgttgactacttggacgagctcgccttagagataggtgcgaagccagatttctgctctctcttgttcaaagatcctaaactggctgtgagactctatttcggaccctgcaactcctatcagtatcgcctggttgggcctgggcaatgggaaggagccagaaatgccatcttcacccagaaacaaagaatactgaagccactcaagactcgggccctgaaggattcatctaatttctcagtttcttttctgttgaaaatcctgggccttcttgctgttgttgtggcctttttttgccaacttcaatggtcctagtcagcataatgctttgggctttattatcttgtcagtcactacctcctaaagaaaaaaaaaaaggctagaagaaaaaacattacattcatgttctaattatagattttagagttaggtagtacaggtaagggggaaattgtaaagaattagcagaattaggcatatgtacaaaaccaaaattttgtcatgaaattttgcctttccacgcttccctcagttcaccaaagttaccaaaatgtaaaataaaataagactggctcaggtaagtagtgctgccaaccctgatataggggagttgtatggaaaaatagtagaattacacagcatgaaaagcagcccatggtttaaattattggacaatttaaattgtgggtaaatatttaaaactcctgaacaatgtttctgatggtcttctatccaccctacttggtaacaaagttctcagatgttaggtcatgtttcatttgctcagtcggggatcactcaaaactactagacaaaaaagtgagaggatagatttagaaaacatcagtgatgctcagataaacttttaggacctcatattaagagctaagcaaatggccacatttcctatattttgacagagatactgctggaaaaattaaaattaaaatgccataatagctacctaacaaatatatatgtttaatgtttatcataggccagacattgtgctatgtgcatatcatatgtattatttcatttaattctcacaacaattctgtgaaatggttacagctattatagtcatttcacagatgatgaaactaagattcagagcagctgatcttgtgaggcagctggaattggaactcagatttgttgaactctagaactaaagatcataatgttgtcttgtaatatatttatttacaaaacacttcattatttataaagaatttactaacagtttatcttatttatacccatacatctgctactttgggaggccctttacatagaaaacagcattctttttgccaaatatgaccaaattacttttatttataatttttgatttatatttcagctagatctaaaaagcatctgaaggaatttacaatgaaagatacctatgcaataacatttaggataatctttgacattttggaaaaataagaattgaggaaaaaaagtgtatctttcaagtagatgcaaagcattataatgactgacacttgtatctaactccagtcttacagataactaaggcaaaaagctaaataaacaatatgtaacctctaacatttggtaaaaggaagtatactggtctgttagcagagacaaactttttttagaattgaagtctgaaacaaacaaaagcaattcaatgtcaatagacattaagcaacataatagacaaacatctcctaagggaacatttgttacagctgctccttccctgaactgtgctttggaagataagctctgtcctgagtccaaaccaagcccttccaagagagaacaaaggtcagagatgttgaagattccagcaaatttctcctcttatttctaccaagcctttgtgaacattgctcttcattttggcctgtacttctccctcagggacgtagaacaatggaatgtcagtcagtctctgtagttaaaactttttctttaaaattcaattaaggtacttctccctcagggacgtagaacaatggaatgtcagtcagtctctgtagttaaaactttttctttaaaattcaattaaggtacttctccctcagggacgtagaacaatggaatgtcagtcagtctctgtagttaaaactttttctttaaaattcaattaagttacaccagaatttacaggcaagattttttttttcattgctcccataagcaaatttgttttaaaataattgtaaatgaggtatatacttagttcttggttaaaaaatatattgctttgttaagtattaaagattatttgtaagtcattgtattaataatactaataaaatttatcaagcctttatagcaagggtcagtgaattaccactgcctgtgggccaaatctagctcactatctgtttttgtaaataaaattttataatagta

SEQ ID NO: 134740 - DNA, 1444 bp, Homo sapiens
  Payload ID: 6324
  Gene Symbol: FMO2
  Gene Name: flavin containing monooxygenase 2 (non-functional)
  ENST ID: ENST00000529935
  CDS Start-End: 1-462
acacaaccaagggagaaaactattctgtcaaagagacggtgccaaaaggcaaaaacaaaggagaatgtggaagatggccgagcaagtatctatcaatctgtcgttaccaacaccagcaaagaaatgtcctgtttcagtgactttccaatgcctgaagattttccaaacttcctgcataattctaaacttctggaatatttcaggatttttgctaaaaaatttgatctgctaaaatatattcagttccagacaactgtccttagtgtgagaaaatgtccagatttctcatcctctggccaatggaaggttgtcactcagagcaacggcaaggagcagagtgctgtctttgacgcagttatggtttgcagtggccaccacattctacctcatatcccactgaagtcatttccaggtttttatcagcaccaggcatggcacctgggtcatgagccgtatctctgaagatggctatccttgggactcagtgttccacacccggtttcgttctatgctccgcaatgtactgccacgaacagctgtaaaatggatgatagaacaacagatgaatcggtggttcaaccatgaaaattatggccttgagcctcaaaacaaatacattatgaaggaacctgtactaaatgatgatgtcccaagtcgtctactctgtggagccatcaaggtgaaatctacagtgaaagagctcacagaaacttctgccatctttgaggatggaacagtggaggagaacattgatgtcatcatttttgcaacaggatatagtttctcttttcccttccttgaagattcactcgttaaagtagagaataatatggtctcactgtataaatacatattccccgctcacctggacaagtcaaccctcgcgtgcattggtctcatccagcccctaggttccattttcccaactgctgaacttcaagctcgttgggtgacaagagttttcaaaggcttgtgtagcctgccctcagagagaactatgatgatggacattatcaaaaggaatgaaaaaagaattgacctgtttggagaaagccagagccagacgttgcagaccaattatgttgactacttggacgagctcgccttagagataggtgcgaagccagatttctgctctctcttgttcaaagatcctaaactggctgtgagactctatttcggaccctgcaactcctatcagtatcgcctggttgggcctgggcaatgggaaggagccagaaatgccatcttcacccagaaacaaagaatactgaagccactcaagactcgggccctgaaggattcatctaatttctcagtttcttttctgttgaaaatcctgggccttcttgctgttgttgtggcctttttttgccaacttcaatggtcctagtcagcataatgctttgggctttattatcttgtcagtcactacctcctaaag

SEQ ID NO: 134741 - DNA, 583 bp, Homo sapiens
  Payload ID: 6324
  Gene Symbol: FMO2
  Gene Name: flavin containing monooxygenase 2 (non-functional)
  ENST ID: ENST00000483192
  CDS Start-End: 191-583
aagaaactcagcttttctcaaaggcaagaagagagcaggatttttgactggctctttattcaatagtgctgcttattaaattaccactgctacaatgtttaaagccaattacctgagcacatcataaggattctcttaccggttgtcccagttaagtaatgttgattgatcaactccttgacaggagctgatggcaaagaaggtagctgtgattggagctggggtcagtggcctaatttctctgaagtgctgtgtggatgagggacttgagcccacttgctttgagagaactgaagatattggaggagtgtggaggttcaaagagaatgtggaagatggccgagcaagtatctatcaatctgtcgttaccaacaccagcaaagaaatgtcctgtttcagtgactttccaatgcctgaagattttccaaacttcctgcataattctaaacttctggaatatttcaggatttttgctaaaaaatttgatctgctaaaatatattcagttccagacaactgtccttagtgtgagaaaatgtccagatttctcatcctctggccaatggaaggttgtcactcagagc

SEQ ID NO: 134742 - DNA, 2087 bp, Homo sapiens
  Payload ID: 6325
  Gene Symbol: FMO3
  Gene Name: flavin containing monooxygenase 3
  Uniprot ID: P31513
  ENST ID: ENST00000367755
  CDS Start-End: 112-1710
gtaggctcactagaacattttctctttcaaactgcccagacggttggacaggacgtagacacacagaagaaaagaagacaaagaacgggtaggaaaattaaaaaggttaccatggggaagaaagtggccatcattggagctggtgtgagtggcttggcctccatcaggagctgtctggaagaggggctggagcccacctgctttgagaagagcaatgacattgggggcctgtggaaattttcagaccatgcagaggagggcagggctagcatttacaaatcagtcttttccaactcttccaaagagatgatgtgtttcccagacttcccatttcccgatgacttccccaactttatgcacaacagcaagatccaggaatatatcattgcatttgccaaagaaaagaacctcctgaagtacatacaatttaagacatttgtatccagtgtaaataaacatcctgattttgcaactactggccagtgggatgttaccactgaaagggatggtaaaaaagaatcggctgtctttgatgctgtaatggtttgttccggacatcatgtgtatcccaacctaccaaaagagtcctttccaggactaaaccactttaaaggcaaatgcttccacagcagggactataaagaaccaggtgtattcaatggaaagcgtgtcctggtggttggcctggggaattcgggctgtgatattgccacagaactcagccgcacagcagaacaggtcatgatcagttccagaagtggctcctgggtgatgagccgggtctgggacaatggttatccttgggacatgctgctcgtcactcgatttggaaccttcctcaagaacaatttaccgacagccatctctgactggttgtacgtgaagcagatgaatgcaagattcaagcatgaaaactatggcttgatgcctttaaatggagtcctgaggaaagagcctgtatttaacgatgagctcccagcaagcattctgtgtggcattgtgtccgtaaagcctaacgtgaaggaattcacagagacctcggccatttttgaggatgggaccatatttgagggcattgactgtgtaatctttgcaacagggtatagttttgcctaccccttccttgatgagtctatcatcaaaagcagaaacaatgagatcattttatttaaaggagtatttcctcctctacttgagaagtcaaccatagcagtgattggctttgtccagtcccttggggctgccattcccacagttgacctccagtcccgctgggcagcacaagtaataaagggaacttgtactttgccttctatggaagacatgatgaatgatattaatgagaaaatggagaaaaagcgcaaatggtttggcaaaagcgagaccatacagacagattacattgtttatatggatgaactctcctccttcattggggcaaagcccaacatcccatggctgtttctcacagatcccaaattggccatggaagtttattttggcccttgtagtccctaccagtttaggctggtgggcccagggcagtggccaggagccagaaatgccatactgacccagtgggaccggtcgttgaaacccatgcagacacgagtggtcgggagacttcagaagccttgcttctttttccattggctgaagctctttgcaattcctattctgttaatcgctgttttccttgtgttgacctaatcatcattttctctaggatttctgaaagttactgacaatacccagacaggggctttgctatttaaaaattaaaattttcacaccacctgcttttctattcagcatcttttgcagtactctgtagacattagtcagtaatacagtgttatttctaggctctgaaatagccactttaagaatcatgtcatgatcttaagagagcactaatcatttctgtttgagttccactaacacttcaaaatcagaactatgttctttatatctaacttaaatcatttcctgaaacattttgacatgattcctttttccttttaaacaatgtatgaaagatgtattttaaatctaaataaagagcaaattaagcagaataattataa

SEQ ID NO: 134743 - DNA, 582 bp, Homo sapiens
  Payload ID: 6325
  Gene Symbol: FMO3
  Gene Name: flavin containing monooxygenase 3
  ENST ID: ENST00000472784
  CDS Start-End: 72-218
cggttggacaggacgtagacacacagaagaaaagaagacaaagaacgggtaggaaaattaaaaaggttaccatggggaagaaagtggccatcattggagctggtgtgagtggcttggcctccatcaggagctgtctggaagaggggctggagcccacctgctttgagaagagcaatgacattgggggcctgtggaaattttcaaggagccatgagtgaaggcgtacaagaggggtcttgccactgaaaaaaataagaaatgccagcatccaccagaagccagaagcggcaaggaatggattctctcctggagcctctgaaaatgaacatggaccatgcagaggagggcagggctagcatttacaaatcagtcttttccaactcttccaaagagatgatgtgtttcccagacttcccatttcccgatgacttccccaactttatgcacaacagcaagatccaggaatatatcattgcatttgccaaagaaaagaacctcctgaagtacatacaatttaagacatttgtatccagtgtaaataaacatcctgattttgcaactactggccagtgggatgttacc

SEQ ID NO: 134744 - DNA, 723 bp, Homo sapiens
  Payload ID: 6325
  Gene Symbol: FMO3
  Gene Name: flavin containing monooxygenase 3
  ENST ID: ENST00000479749
  CDS Start-End: 70-723
gttggacaggacgtagacacacagaagaaaagaagacaaagaacgggtaggaaaattaaaaaggttaccatggggaagaaagtggccatcattggagctggtgtgagtggcttggcctccatcaggagctgtctggaagaggggctggagcccacctgctttgagaagagcaatgacattgggggcctgtggaaattttcagaccatgcagaggagggcagggctagcatttacaaatcagtcttttccaactcttccaaagagatgatgtgtttcccagacttcccatttcccgatgacttccccaactttatgcacaacagcaagatccaggaatatatcattgcatttgccaaagaaaagaacctcctgaagtacatacaatttaagacatttgtatccagtgtaaataaacatcctgattttgcaactactggccagtgggatgttaccactgaaagggatggtaaaaaagaatcggctgtctttgatgctgtaatggtttgttccggacatcatgtgtatcccaacctaccggactataaagaaccaggtgtattcaatggaaagcgtgtcctggtggttggcctggggaattcgggctgtgatattgccacagaactcagccgcacagcagaacaggtcatgatcagttccagaagtggctcctgggtgatgagccgggtctgggacaatggttatccttgggacatgctgctcgtc

SEQ ID NO: 134745 - DNA, 2252 bp, Homo sapiens
  Payload ID: 6326
  Gene Symbol: FMO4
  Gene Name: flavin containing monooxygenase 4
  Uniprot ID: P31512
  ENST ID: ENST00000367749
  CDS Start-End: 331-2007
agaaaagacgaatggcttttgttttaaactgagggcacttttacaaaagtcatctttccatttatttttctttcagaaaaaagaatttgggttttgagcttttttaaaaaaaaaagacaaacactttccttgactttgagaaataatttaagtcaaagaatctgctctatgctaaccaagagatagagcacagcaaagatctgccagccccaggcctctacctagtggcctggaaattcaagtattcttattggtggaggccatttgtttctgattagaagctgtctaaacctcctactcctcaactcaaaggaaaacacagagcataccatggccaagaaagttgcagtgattggagctggtgtgagtggcctctcctccatcaaatgctgtgtggatgaggacctggagcccacctgctttgagagaagtgatgacattgggggattatggaagtttactgaatcttccaaagatgggatgaccagggtctataagtcattagtgacaaatgtctgtaaggaaatgtcatgttacagtgacttccctttccacgaagattatcctaatttcatgaaccatgaaaaattttgggactatctccaagaatttgctgagcactttgacctcctgaaatacattcagtttaagaccactgtgtgcagcataacgaagcgtccagacttctccgaaactggtcagtgggatgttgtcacagagacagagggcaagcaaaatagagctgtctttgatgctgttatggtttgcactggacatttcctgaatccccatttacctttggaagcctttcctggaattcataagtttaaaggtcagatcctgcatagtcaagagtacaagatcccagaaggctttcagggcaaacgcgtcttggtgattggtcttgggaacactggaggagacattgctgtggaactcagtcgaacggcagctcaggtacttctcagtactagaactggtacctgggttcttgggcgctcttcagattggggctatccttataatatgatggttacaagaagatgctgtagttttattgcacaagttctgccttcacgttttctaaactggattcaagaaaggaagttgaataagagatttaatcatgaggattatggattaagtattaccaaagggaaaaaagcaaaattcattgtgaatgatgagctgccaaactgtatcctctgtggggcaatcactatgaaaaccagcgtgattgaatttacagaaacctctgctgtctttgaagatgggacagtggaagaaaacattgatgttgtgatcttcactacaggatatacattttcttttccattttttgaagaacctcttaaaagcctctgtacaaagaagatatttctatacaagcaagtctttcccttaaacctagagagagcgacattagccatcatcggccttatcggccttaaaggatccatcttatcaggcacagagctccaagcacgatgggtcacaagagtattcaaaggactctgtaagatacctccatcccaaaaattgatgatggaggctactgaaaaggaacagctcattaaaaggggagtgtttaaagacaccagcaaagacaaatttgactacattgcctacatggatgatatcgctgcctgcataggcacaaagcccagcatcccacttctgttcctcaaggatcccagactagcttgggaagttttctttggaccatgtactccttatcagtaccgcctcatgggccctggaaaatgggatggagccagaaatgccatcctgacccagtgggacagaacattgaaacctttaaaaactcgaattgtccctgattcctccaagcctgcctccatgtcacattatttaaaagcctggggggcacctgtcctacttgcctctcttctacttatctgtaaatcttcacttttcttgaaattggtgagagataaactacaggacagaatgtccccttacctagtaagtctttggcgaggatgaacctgattgttacaagggttacacaaagtcatgctaattctatctccaagtatcttgtgcatccctcctctgctctccatcataactgctattagccaaattcaggcccagtcatctcctatctgaattattgtattatcttcttctttgttttcagtaccctctttcttgccaccctttccaatgcatcttctaccctgctacctcagtgattattctaaaataaatatatatgatatggttta

SEQ ID NO: 134746 - DNA, 2632 bp, Homo sapiens
  Payload ID: 6327
  Gene Symbol: FMO5
  Gene Name: flavin containing monooxygenase 5
  Uniprot ID: P49326
  ENST ID: ENST00000254090
  CDS Start-End: 390-1991
aaaaaccaggaagttaaaagtggatgcagaagcgagcacagacggggctaggggtttcagagaaagtaattgagagtgctggcaacagcagctgaaatatagagaagttgtaggattaactttttcgcccaaagcagcttcagcccacgttttattcccatcgagggagggagaatgggtgccgctgagtgggcgggggagtggtccctgaaaggaggtggagtgctacagcccctccccgttggctctcgctgtttgtccgttgttggtttatagtaatttgacaacagccgcctgttgagtctcctccagatcgcagctgaaggatctgttgagcgcttcaggaaaggcggacaggcgacactaacaggtgaagatctcgggagaccatgactaagaaaagaattgctgtgattgggggaggagtgagcgggctctcttccatcaagtgctgcgtagaagaaggcttggaacctgtctgctttgaaaggactgatgacatcggagggctctggaggttccaggaaaatcctgaagaaggaagggccagtatttacaaatcagtgatcatcaatacttctaaagagatgatgtgcttcagtgactatccaatcccagatcattatcccaacttcatgcataatgcccaggtcctggagtatttcaggatgtatgccaaagaatttgaccttctaaagtatattcgatttaagaccactgtgtgcagtgtgaagaagcagcctgattttgccacttcaggccaatgggaagtggtcactgaatctgaagggaaaaaggagatgaatgtctttgatggagtcatggtttgcactggccatcacaccaatgctcatctacctctggaaagcttccctggaattgagaagttcaaagggcagtacttccacagtcgagactataagaacccagagggattcactggaaagagagtcattataattggcattgggaattctggaggggatctggctgtagagattagccaaacagccaagcaggttttcctcagcaccaggagaggggcttggatcctgaatcgtgtaggggactacggatatcctgctgatgtgttgttctcttctcgacttacacattttatatggaagatctgtggccaatcattagcaaacaaatatttggaaaaaaagataaaccaaaggtttgaccatgaaatgtttggcctgaagcctaaacacagagctctgagtcagcatccaaccttaaatgatgacctgccaaatcgtatcatttctggcttggtgaaagtgaaaggaaatgtgaaggaattcacggagacagctgccatatttgaggatggctccagggaggatgacattgatgctgttatctttgccacaggctatagctttgactttccatttctggaagattccgtcaaagtggtcaaaaacaagatatccctgtataaaaaggtcttccctcctaacctggaaaggccaactcttgcaatcataggcttgattcagcccttaggagccattatgcccatttcagagctccaaggacgctgggccactcaggtatttaaaggtctaaagacattgccctcacagagtgaaatgatggcagaaatatctaaagctcaagaggaaattgacaaaaggtatgtggagagccaacgccataccattcagggagactacatagataccatggaagagcttgctgatttggtgggggtcaggcccaatctgctgtctctggccttcactgaccccaagctggcattacacttattactgggaccctgcactccaatccactatcgtgtacagggccctggaaagtgggatggggctcgaaaagctatcctcaccacagatgatcgcatcaggaagcctctgatgacaagagtagttgaaaggagtagttctatgacttcaacaatgacaataggcaagtttatgctagctcttgccttctttgctataattatagcttacttctagttgtcctattgtcactgccctgtttttcattgggaagcttatctacagatgccttcagaatctgacgagattgactctcagtttcatattgcccagaaatctactttaatgtctctttcgaaagcattaattcactttcctttttcctacaatgaaacctgttttccatttgtattaactcatctcccttccactcatgatccgtcactcttccttgtggtaatccctagactgggagctcaggtactcttttagtcatctttgtatgtctttagcagagttcttgacatgtggtaggtgcttaataaatgtttgttgtttatcaaattttatggtagggagagtaagtcagcatcggtataaaatcgcttactccacgtaactcttcttctgatagggtttgattttctattagaagctcaattttagttttttttcatattataactaaatatgtttcctgagagataagagaaataatgttcctacaatagttgtatgtatctaagataagacatatagatgcttaagacattttgtttcacttgctattcactagtgtacttgaaacatggtcatttttagcccttttccttaggaaccatgtctttattttctcaataaagaaattactttcaact

SEQ ID NO: 134747 - DNA, 2168 bp, Homo sapiens
  Payload ID: 6327
  Gene Symbol: FMO5
  Gene Name: flavin containing monooxygenase 5
  Uniprot ID: P49326
  ENST ID: ENST00000369272
  CDS Start-End: 281-1138
tgttgagcgcttcaggaaaggcggtgagatccggtaccgcagcagagcactctcagctctgggtcttgcaggcgcagggctcccccatgccagcagaaagatttcctctggtgaagaggaccgtcgaatctgtcctcctcaagacacctcttgtacagaatttattcgaatgccacggccaaggtcttccttgaaaaatgttaaccgatgtgtgctttttgtcttttgtcatcctttctttaggacaggcgacactaacaggtgaagatctcgggagaccatgactaagaaaagaattgctgtgattgggggaggagtgagcgggctctcttccatcaagtgctgcgtagaagaaggcttggaacctgtctgctttgaaaggactgatgacatcggagggctctggaggttccaggaaaatcctgaagaaggaagggccagtatttacaaatcagtgatcatcaatacttctaaagagatgatgtgcttcagtgactatccaatcccagatcattatcccaacttcatgcataatgcccaggtcctggagtatttcaggatgtatgccaaagaatttgaccttctaaagtatattcgatttaagaccactgtgtgcagtgtgaagaagcagcctgattttgccacttcaggccaatgggaagtggtcactgaatctgaagggaaaaaggagatgaatgtctttgatggagtcatggtttgcactggccatcacaccaatgctcatctacctctggaaagcttccctggaattgagaagttcaaagggcagtacttccacagtcgagactataagaacccagagggattcactggaaagagagtcattataattggcattgggaattctggaggggatctggctgtagagattagccaaacagccaagcaggttttcctcagcaccaggagaggggcttggatcctgaatcgtgtaggggactacggatatcctgctgatgtgttgttctcttctcgacttacacattttatatggaagatctgtggccaatcattagcaaacaaatatttggaaaaaaagataaaccaaaggtttgaccatgaaatgtttggcctgaagcctaaacacaggtctaaagacattgccctcacagagtgaaatgatggcagaaatatctaaagctcaagaggaaattgacaaaaggtatgtggagagccaacgccataccattcagggagactacatagataccatggaagagcttgctgatttggtgggggtcaggcccaatctgctgtctctggccttcactgaccccaagctggcattacacttattactgggaccctgcactccaatccactatcgtgtacagggccctggaaagtgggatggggctcgaaaagctatcctcaccacagatgatcgcatcaggaagcctctgatgacaagagtagttgaaaggagtagttctatgacttcaacaatgacaataggcaagtttatgctagctcttgccttctttgctataattatagcttacttctagttgtcctattgtcactgccctgtttttcattgggaagcttatctacagatgccttcagaatctgacgagattgactctcagtttcatattgcccagaaatctactttaatgtctctttcgaaagcattaattcactttcctttttcctacaatgaaacctgttttccatttgtattaactcatctcccttccactcatgatccgtcactcttccttgtggtaatccctagactgggagctcaggtactcttttagtcatctttgtatgtctttagcagagttcttgacatgtggtaggtgcttaataaatgtttgttgtttatcaaattttatggtagggagagtaagtcagcatcggtataaaatcgcttactccacgtaactcttcttctgatagggtttgattttctattagaagctcaattttagttttttttcatattataactaaatatgtttcctgagagataagagaaataatgttcctacaatagttgtatgtatctaagataagacatatagatgcttaagacattttgtttcacttgctattcactagtgtacttgaaacatggtcatttttagcccttttccttaggaaccatgtctttattttctcaataaagaaattactttcaa

SEQ ID NO: 134748 - DNA, 1696 bp, Homo sapiens
  Payload ID: 6327
  Gene Symbol: FMO5
  Gene Name: flavin containing monooxygenase 5
  Uniprot ID: P49326
  ENST ID: ENST00000441068
  CDS Start-End: 115-1509
aacagccgcctgttgagtctcctccagatcgcagctgaaggatctgttgagcgcttcaggaaaggcggtgagatccggacaggcgacactaacaggtgaagatctcgggagaccatgactaagaaaagaattgctgtgattgggggaggagtgagcgggctctcttccatcaagtgctgcgtagaagaaggcttggaacctgtctgctttgaaaggactgatgacatcggagggctctggaggttccaggaaaatcctgaagaaggaagggccagtatttacaaatcagtgatcatcaatacttctaaagagatgatgtgcttcagtgactatccaatcccagatcattatcccaacttcatgcataatgcccaggtcctggagtatttcaggatgtatgccaaagaatttgaccttctaaagtatattcgatttaagaccactgtgtgcagtgtgaagaagcagcctgattttgccacttcaggccaatgggaagtggtcactgaatctgaagggaaaaaggagatgaatgtctttgatggagtcatggtttgcactggccatcacaccaatgctcatctacctctggaaagcttccctggaattgagaagttcaaagggcagtacttccacagtcgagactataagaacccagagggattcactggaaagagagtcattataattggcattgggaattctggaggggatctggctgtagagattagccaaacagccaagcaggttttcctcagcaccaggagaggggcttggatcctgaatcgtgtaggggactacggatatcctgctgatgtgttgttctcttctcgacttacacattttatatggaagatctgtggccaatcattagcaaacaaatatttggaaaaaaagataaaccaaaggtttgaccatgaaatgtttggcctgaagcctaaacacagagctctgagtcagcatccaaccttaaatgatgacctgccaaatcgtatcatttctggcttggtgaaagtgaaaggaaatgtgaaggaattcacggagacagctgccatatttgaggatggctccagggaggatgacattgatgctgttatctttgccacaggctatagctttgactttccatttctggaagattccgtcaaagtggtcaaaaacaagatatccctgtataaaaaggtcttccctcctaacctggaaaggccaactcttgcaatcataggcttgattcagcccttaggagccattatgcccatttcagagctccaaggacgctgggccactcaggtatttaaaggtctaaagacattgccctcacagagtgaaatgatggcagaaatatctaaagctcaagaggaaattgacaaaagtctaaccatgagaaaaacatcagacaaacccaagttgaagaatattctacaaatacctgactacctcaaaactgtcaagatcatcaacaaagaaagtctgagaaattgtcccggaataaaggggcctaaggagacataacatctaaatgtaatgtagtatcctggatggactcctgcaacagaaaaagaactttaagtaaaaattaagggaatattaataaagtatgcattttggttaataatgtatcaatattggtttattagttgtgacaaatgtaccagaggaatgtaaaatgtcaacaataaaggaaattggatgtggggta

SEQ ID NO: 134749 - DNA, 618 bp, Homo sapiens
  Payload ID: 6327
  Gene Symbol: FMO5
  Gene Name: flavin containing monooxygenase 5
  ENST ID: ENST00000533848
  CDS Start-End: 183-618
ctttttcggggagctcggctcttaagacgcgagtctgccgacgctcccggccgaataaaaacctcttccttctttaattcggtgtctgaggagttttgtctgtggctcatcctgctacaatctgtttgaacagatcacctgaaaggacaggcgacactaacaggtgaagatctcgggagaccatgactaagaaaagaattgctgtgattgggggaggagtgagcgggctctcttccatcaagtgctgcgtagaagaaggcttggaacctgtctgctttgaaaggactgatgacatcggagggctctggaggttccaggaaaatcctgaagaaggaagggccagtatttacaaatcagtgatcatcaatacttctaaagagatgatgtgcttcagtgactatccaatcccagatcattatcccaacttcatgcataatgcccaggtcctggagtatttcaggatgtatgccaaagaatttgaccttctaaagtatattcgatttaagaccactgtgtgcagtgtgaagaagcagcctgattttgccacttcaggccaatgggaagtggtcactgaatctgaagggaaaaaggagatgaatgtctttgatggagtcatgg

SEQ ID NO: 134750 - DNA, 2410 bp, Homo sapiens
  Payload ID: 6327
  Gene Symbol: FMO5
  Gene Name: flavin containing monooxygenase 5
  ENST ID: ENST00000527849
  CDS Start-End: 276-1112
attcatctggcgtccgccggccccgcgcgccgcgcaggcgggggccgtggccaccaagcccgggcgcagtttctctccgcccacggcaggagcgaaggaaggccctggcgcgagcgggtaaactgcccaccgggcggcccacccgctgcgcccccggcccgcaagaggcagtcccaataggttggcccgcctggccgaagtccgcccggagcccgctcacctgtcagcccccactgccgacaggcgacactaacaggtgaagatctcgggagaccatgactaagaaaagaattgctgtgattgggggaggagtgagcgggctctcttccatcaagtgctgcgtagaagaaggcttggaacctgtctgctttgaaaggactgatgacatcggagggctctggaggttccaggaaaatcctgaagaaggaagggccagtatttacaaatcagtgatcatcaatacttctaaagagatgatgtgcttcagtgactatccaatcccagatcattatcccaacttcatgcataatgcccaggtcctggagtatttcaggatgtatgccaaagaatttgaccttctaaagtatattcgatttaagaccactgtgtgcagtgtgaagaagcagcctgattttgccacttcaggccaatgggaagtggtcactgaatctgaagggaaaaaggagatgaatgtctttgatggagtcatggtttgcactggccatcacaccaatgctcatctacctctggaaagcttccctggaattgagaagttcaaagggcagtacttccacagtcgagactataagaacccagagggattcactggaaagagagtcattataattggcattgggaattctggaggggatctggctgtagagattagccaaacagccaagcaggttttcctcagcaccaggagaggggcttggatcctgaatcgtgtaggggactacggatatcctgctgatgtgttgttctcttctcgacttacacattttatatggaagatctgtggccaatcattagcaaacaaatatttggaaaaaaagataaaccaaaggtttgaccatgaaatgtttggcctgaagcctaaacacaggctatagctttgactttccatttctggaagattccgtcaaagtggtcaaaaacaagatatccctgtataaaaaggtcttccctcctaacctggaaaggccaactcttgcaatcataggcttgattcagcccttaggagccattatgcccatttcagagctccaaggacgctgggccactcaggtatttaaaggtctaaagacattgccctcacagagtgaaatgatggcagaaatatctaaagctcaagaggaaattgacaaaagggtggttctgaggatcacatgatagaatttacatgcaaatcctttggaatctgaaaggaaaaattatgatactatttggggaaaattctgtacctttgaattgggtctatcttcctttaggtgagcagaatcactattatttctctgcctgtataaaaactataaaaagattaaaatcaatggtatttgtttaaaaataattagtttacccaatggttgagtagtctcttgtgtataaactcatatattttgctaatgctgattttattaatagtttttaatttaggcataattttcatacaataaaaatttactttttattgtacagtttggtaagtatcaataactccactgcagtcaagatacagacctgttccatacctccccttcaaaatttcttcatgcccttttgtagtcaatcactccccaccccccacccccaagtcctggcaaacactgatctgttttctgaccgtatagtcttcctttttccagaatgtcacataagtggagcctggcttcttttacttcccataatgcatttgagattcatcaatattattgtatgtatcgagttattcttttattactgagtagtattccatttatagctatgctacattttaattattgattcaccagatgtattagcctattttcacactgctataaagacatacctgagactaggtaatttataaagaaaagaggtttaatttacttatagttctgcatggctggggaggacttcagaaacttacagttatggtagaagggaagcaagctcatcttatgtggcacaggggagagacagtgagtgtgtgtgaatgaaggaagaactgccaaacacttttaaaaccatcatctctggtgagaattcatgcaccatcacaagaacagcatgggggaaaccgcccccatcatccaatcacttccctcccttgacacgtgaaggttataggtccttccttcaacacgtgggtattacaatttgagatgagatttgggtggggacacagaaccaaaccatatcaccaggt

SEQ ID NO: 134751 - DNA, 671 bp, Homo sapiens
  Payload ID: 6327
  Gene Symbol: FMO5
  Gene Name: flavin containing monooxygenase 5
  ENST ID: ENST00000533174
  CDS Start-End: 96-671
aggaagttaaaagtggatgcagaagcgagcacagacggggctaggggtttcagagaaagacaggcgacactaacaggtgaagatctcgggagaccatgactaagaaaagaattgctgtgattgggggaggagtgagcgggctctcttccatcaagtgctgcgtagaagaaggcttggaacctgtctgctttgaaaggactgatgacatcggagggctctggaggttccaggaaaatcctgaagaaggaagggccagtatttacaaatcagtgatcatcaatacttctaaagagatgatgtgcttcagtgactatccaatcccagatcattatcccaacttcatgcataatgcccaggtcctggagtatttcaggatgtatgccaaagaatttgaccttctaaagtatattcgatttaagaccactgtgtgcagtgtgaagaagcagcctgattttgccacttcaggccaatgggaagtggtcactgaatctgaagggaaaaaggagatgaatgtctttgatggagtcatggtttgcactggccatcacaccaatgctcatctacctctggaaagcttccctggaattgagaagttcaaagggcagtacttccacagtcgagactataagaacccagagggattcactggaaagagagtcattataattggc

SEQ ID NO: 134752 - DNA, 1784 bp, Homo sapiens
  Payload ID: 6327
  Gene Symbol: FMO5
  Gene Name: flavin containing monooxygenase 5
  Uniprot ID: P49326
  ENST ID: ENST00000578284
  CDS Start-End: 390-1784
aaaaaccaggaagttaaaagtggatgcagaagcgagcacagacggggctaggggtttcagagaaagtaattgagagtgctggcaacagcagctgaaatatagagaagttgtaggattaactttttcgcccaaagcagcttcagcccacgttttattcccatcgagggagggagaatgggtgccgctgagtgggcgggggagtggtccctgaaaggaggtggagtgctacagcccctccccgttggctctcgctgtttgtccgttgttggtttatagtaatttgacaacagccgcctgttgagtctcctccagatcgcagctgaaggatctgttgagcgcttcaggaaaggcggacaggcgacactaacaggtgaagatctcgggagaccatgactaagaaaagaattgctgtgattgggggaggagtgagcgggctctcttccatcaagtgctgcgtagaagaaggcttggaacctgtctgctttgaaaggactgatgacatcggagggctctggaggttccaggaaaatcctgaagaaggaagggccagtatttacaaatcagtgatcatcaatacttctaaagagatgatgtgcttcagtgactatccaatcccagatcattatcccaacttcatgcataatgcccaggtcctggagtatttcaggatgtatgccaaagaatttgaccttctaaagtatattcgatttaagaccactgtgtgcagtgtgaagaagcagcctgattttgccacttcaggccaatgggaagtggtcactgaatctgaagggaaaaaggagatgaatgtctttgatggagtcatggtttgcactggccatcacaccaatgctcatctacctctggaaagcttccctggaattgagaagttcaaagggcagtacttccacagtcgagactataagaacccagagggattcactggaaagagagtcattataattggcattgggaattctggaggggatctggctgtagagattagccaaacagccaagcaggttttcctcagcaccaggagaggggcttggatcctgaatcgtgtaggggactacggatatcctgctgatgtgttgttctcttctcgacttacacattttatatggaagatctgtggccaatcattagcaaacaaatatttggaaaaaaagataaaccaaaggtttgaccatgaaatgtttggcctgaagcctaaacacagagctctgagtcagcatccaaccttaaatgatgacctgccaaatcgtatcatttctggcttggtgaaagtgaaaggaaatgtgaaggaattcacggagacagctgccatatttgaggatggctccagggaggatgacattgatgctgttatctttgccacaggctatagctttgactttccatttctggaagattccgtcaaagtggtcaaaaacaagatatccctgtataaaaaggtcttccctcctaacctggaaaggccaactcttgcaatcataggcttgattcagcccttaggagccattatgcccatttcagagctccaaggacgctgggccactcaggtatttaaaggtctaaagacattgccctcacagagtgaaatgatggcagaaatatctaaagctcaagaggaaattgacaaaagtctaaccatgagaaaaacatcagacaaacccaagttgaagaatattctacaaatacctgactacctcaaaactgtcaagatcatcaacaaagaaagtctgagaaattgtcccggaataaaggggcctaaggagacataa

SEQ ID NO: 134753 - DNA, 4151 bp, Homo sapiens
  Payload ID: 6328
  Gene Symbol: FLI1
  Gene Name: Fli-1 proto-oncogene, ETS transcription factor
  Uniprot ID: Q01543
  ENST ID: ENST00000281428
  CDS Start-End: 713-1873
agagaagagagaggagagctcgaggcgagagagagagagagagagagagagagagagagagagagagagagagagagataggacttcctccccgattcgcaaagtgaagtcacttcccaaaattagctgaaaaaaaagtttcatccggttaactgtctctttcgctccgctacaacaacaaacgtgcacaggggagtgagggcagggcgctcgcagggggcacgcagggagggcccagggcgccagggaggccgcgccgggctaatccgaaggggctgcgaggtcaggctgtaaccgggtcaatgtgtggaatattggggggctcggctgcagacttggccaaatggacgggactattaaggaggctctgtcggtggtgagcgacgaccagtccctctttgactcagcgtacggagcggcagcccatctccccaaggccgacatgactgcctcggggagtcctgactacgggcagccccacaagatcaaccccctcccaccacagcaggagtggatcaatcagccagtgagggtcaacgtcaagcgggagtatgaccacatgaatggatccaggcgccagctgcctcattaaagagcagccttttatgctgggcttcacctgtacccaccctgagcggcagccgtggagccccatggccgcacgcagggcttgcgctggctggaggaggcacggtgcttgggagctgcaagaatggagggaggactggcaggcgagcgggcgagggagtctccggtggactgcagcgttagcaaatgcagcaagctggtgggcggaggcgagtccaaccccatgaactacaacagctatatggacgagaagaatggcccccctcctcccaacatgaccaccaacgagaggagagtcatcgtccccgcagaccccacactgtggacacaggagcatgtgaggcaatggctggagtgggccataaaggagtacagcttgatggagatcgacacatcctttttccagaacatggatggcaaggaactgtgtaaaatgaacaaggaggacttcctccgcgccaccaccctctacaacacggaagtgctgttgtcacacctcagttacctcagggaaagttcactgctggcctataatacaacctcccacaccgaccaatcctcacgattgagtgtcaaagaagacccttcttatgactcagtcagaagaggagcttggggcaataacatgaattctggcctcaacaaaagtcctccccttggaggggcacaaacgatcagtaagaatacagagcaacggccccagccagatccgtatcagatcctgggcccgaccagcagtcgcctagccaaccctggaagcgggcagatccagctgtggcaattcctcctggagctgctctccgacagcgccaacgccagctgtatcacctgggaggggaccaacggggagttcaaaatgacggaccccgatgaggtggccaggcgctggggcgagcggaaaagcaagcccaacatgaattacgacaagctgagccgggccctccgttattactatgataaaaacattatgaccaaagtgcacggcaaaagatatgcttacaaatttgacttccacggcattgcccaggctctgcagccacatccgaccgagtcgtccatgtacaagtacccttctgacatctcctacatgccttcctaccatgcccaccagcagaaggtgaactttgtccctccccatccatcctccatgcctgtcacttcctccagcttctttggagccgcatcacaatactggacctcccccacggggggaatctaccccaaccccaacgtcccccgccatcctaacacccacgtgccttcacacttaggcagctactactagaagcttactcatcagtggccttctagctgaagcccatcctgcacacttactggatgctttggactcaacaggacatatgtggccttgaagggaagacaaaactggatgttctttcttgttggatagaacctttgtatttgttctttaaaaacattttttttaatgttggtaacttttgcttcctctacctgaacaaagagatgaataattccatgggccagtatgccagtttgaattctcagtctcctagcatcttgtgagttgcatattaagattactggaatggttaagtcatggttctgagaaagaagctgtacgttttctttatgtttttatgaccaaagcagtttcttgtcaatacacggggttcagtatgacacagaatcatggacttaacccgtcatgttctggtttgagatttagtgacaaatagaggtgggaagcttataatctaattttaggaggaccaaattcagtggatggcaactggaacattgattgtaaggccagtgaagttttcacccaactggaatttgatggaaagaaggtttgtgtgtttaagacgccaagggcattgcagaatccctctcagtggacagtatgcactcagctgaccactctctctagaaatagtcaagatatgaactaagaaattttaatgcaaatacatacattcctgaaagacggggaattaaattactaatttttttttttttttaaatgatgacagtggtcccagaacttggaaaagttgtagggatttctaaactcaagcagattcgcaagtgctgtgcgcttgtcagaccatcagaccagggccaaccaatcagaaggcaacttactgtataaattatgcagagttattttcctatatctcacagtattaaaaataaataattaaaaattaagaataaataaacgagttgacctcggtcacaaaagcagttttactatcgaatcaatcgctgttattttttttaatgtaatttgtacatcttttttcaatctgtacatttgggctgtctgtatgtttttatagctggtttttaaaaagcataatatgcctatagctgaaaaggaaacagggctgtttaagtcactgacttatgagaaagcaaagcactggtacagttatttaacaggcatacacaagcagggaaaagataatccatttagatctttaatgctttggaaatgcgtgtaacagtactgcaataatcacagctctgggaaaaacaacgaaactttcccttgtggagaggagggattttcctgctctatataagcaacatatttttagacattaaaatatatataattttgcaggtaattgttgacttttttaactatattaagtgttaagctgacaactgtcaaagaagaccatgttgtaaaataatttgactaaataaatggttccttctctcagtgctgaggacagttttcttatttaccgcccccgttaggtcaaagggttttccctggggaactttcctatttacttcttgcactatcaagaatttttcgaatgtacctactgcagtacagcagaaggtaaaaaatcagtgtggtttttcattgttgttgatgatgtttgtagtgtttttgtgtgtgttatttaaatcttcctccagcctaaaagggttttataaaacagcagctaaggccatggataaacctgtatgtaaggactggagcaaagcgagctggtctatccagactggtctgtgagatttaactctgcagcctcccctgggcacttcagacccagacggccaccttctgccactccagcaaagaataagcgccctgcttccttcaggtctcagaccaggactttatggctcatgcagatttttaaggtcatttttcttcccaaggaagaaacttgcctccagttccttcactgttaggtagcttattttcattttctctattttacaatgaaaagagtgagacctgggaagtccttgatttgcaaggaattagactcacagcattggtaaccctagaaccttcttagggtaacactaagtaccttctagacaacatgtctacctaaatgaaatgggatgtgtttcggaacatttgtctccagtttttttttaatcttgcaccctgccatttaaaaagatgtgtaaagcacatattctcaacatatgcacattgatttataaatcatatatacaaactgttacattattcttcatattagaaaacaaatacaaaatagaacattttaaatggtgatataaaaataaattgaaactgaaattct

SEQ ID NO: 134754 - DNA, 3427 bp, Homo sapiens
  Payload ID: 6328
  Gene Symbol: FLI1
  Gene Name: Fli-1 proto-oncogene, ETS transcription factor
  Uniprot ID: Q01543
  ENST ID: ENST00000344954
  CDS Start-End: 370-1149
acagtctctccatctgcatccccacttcatcaccatcccaccgtctctccctcgctccactcgcgggtaaccgaggcttctccctcccaggctggttcttgggcgttcccgacccttagctacccacgatgtttcagacagtccccgacacgtcgtcttacatcaaggaggctctgtcggtggtgagcgacgaccagtccctctttgactcagcgtacggagcggcagcccatctccccaaggccgacatgactgcctcggggagtcctgactacgggcagccccacaagatcaaccccctcccaccacagcaggagtggatcaatcagccagtgagggtcaacgtcaagcgggagtatgaccacatgaatggatccaggttcactgctggcctataatacaacctcccacaccgaccaatcctcacgattgagtgtcaaagaagacccttcttatgactcagtcagaagaggagcttggggcaataacatgaattctggcctcaacaaaagtcctccccttggaggggcacaaacgatcagtaagaatacagagcaacggccccagccagatccgtatcagatcctgggcccgaccagcagtcgcctagccaaccctggaagcgggcagatccagctgtggcaattcctcctggagctgctctccgacagcgccaacgccagctgtatcacctgggaggggaccaacggggagttcaaaatgacggaccccgatgaggtggccaggcgctggggcgagcggaaaagcaagcccaacatgaattacgacaagctgagccgggccctccgttattactatgataaaaacattatgaccaaagtgcacggcaaaagatatgcttacaaatttgacttccacggcattgcccaggctctgcagccacatccgaccgagtcgtccatgtacaagtacccttctgacatctcctacatgccttcctaccatgcccaccagcagaaggtgaactttgtccctccccatccatcctccatgcctgtcacttcctccagcttctttggagccgcatcacaatactggacctcccccacggggggaatctaccccaaccccaacgtcccccgccatcctaacacccacgtgccttcacacttaggcagctactactagaagcttactcatcagtggccttctagctgaagcccatcctgcacacttactggatgctttggactcaacaggacatatgtggccttgaagggaagacaaaactggatgttctttcttgttggatagaacctttgtatttgttctttaaaaacattttttttaatgttggtaacttttgcttcctctacctgaacaaagagatgaataattccatgggccagtatgccagtttgaattctcagtctcctagcatcttgtgagttgcatattaagattactggaatggttaagtcatggttctgagaaagaagctgtacgttttctttatgtttttatgaccaaagcagtttcttgtcaatacacggggttcagtatgacacagaatcatggacttaacccgtcatgttctggtttgagatttagtgacaaatagaggtgggaagcttataatctaattttaggaggaccaaattcagtggatggcaactggaacattgattgtaaggccagtgaagttttcacccaactggaatttgatggaaagaaggtttgtgtgtttaagacgccaagggcattgcagaatccctctcagtggacagtatgcactcagctgaccactctctctagaaatagtcaagatatgaactaagaaattttaatgcaaatacatacattcctgaaagacggggaattaaattactaatttttttttttttttaaatgatgacagtggtcccagaacttggaaaagttgtagggatttctaaactcaagcagattcgcaagtgctgtgcgcttgtcagaccatcagaccagggccaaccaatcagaaggcaacttactgtataaattatgcagagttattttcctatatctcacagtattaaaaataaataattaaaaattaagaataaataaacgagttgacctcggtcacaaaagcagttttactatcgaatcaatcgctgttattttttttaatgtaatttgtacatcttttttcaatctgtacatttgggctgtctgtatgtttttatagctggtttttaaaaagcataatatgcctatagctgaaaaggaaacagggctgtttaagtcactgacttatgagaaagcaaagcactggtacagttatttaacaggcatacacaagcagggaaaagataatccatttagatctttaatgctttggaaatgcgtgtaacagtactgcaataatcacagctctgggaaaaacaacgaaactttcccttgtggagaggagggattttcctgctctatataagcaacatatttttagacattaaaatatatataattttgcaggtaattgttgacttttttaactatattaagtgttaagctgacaactgtcaaagaagaccatgttgtaaaataatttgactaaataaatggttccttctctcagtgctgaggacagttttcttatttaccgcccccgttaggtcaaagggttttccctggggaactttcctatttacttcttgcactatcaagaatttttcgaatgtacctactgcagtacagcagaaggtaaaaaatcagtgtggtttttcattgttgttgatgatgtttgtagtgtttttgtgtgtgttatttaaatcttcctccagcctaaaagggttttataaaacagcagctaaggccatggataaacctgtatgtaaggactggagcaaagcgagctggtctatccagactggtctgtgagatttaactctgcagcctcccctgggcacttcagacccagacggccaccttctgccactccagcaaagaataagcgccctgcttccttcaggtctcagaccaggactttatggctcatgcagatttttaaggtcatttttcttcccaaggaagaaacttgcctccagttccttcactgttaggtagcttattttcattttctctattttacaatgaaaagagtgagacctgggaagtccttgatttgcaaggaattagactcacagcattggtaaccctagaaccttcttagggtaacactaagtaccttctagacaacatgtctacctaaatgaaatgggatgtgtttcggaacatttgtctccagtttttttttaatcttgcaccctgccatttaaaaagatgtgtaaagcacatattctcaacatatgcacattgatttataaatcatatatacaaactgttacattattcttcatattagaaaacaaatacaaaatagaacattttaaatggtgatataaaaataaattgaaactgaaattct

SEQ ID NO: 134755 - DNA, 3130 bp, Homo sapiens
  Payload ID: 6328
  Gene Symbol: FLI1
  Gene Name: Fli-1 proto-oncogene, ETS transcription factor
  ENST ID: ENST00000429175
  CDS Start-End: 172-420
caacaacaaacgtgcacaggggagtgagggcagggcgctcgcagggggcacgcagggagggcccagggcgccagggaggccgcgccgggctaatccgaaggggctgcgaggtcaggctgtaaccgggtcaatgtgtggaatattggggggctcggctgcagacttggccaaatggacgggactattaaggaggctctgtcggtggtgagcgacgaccagtccctctttgactcagcgtacggagcggcagcccatctccccaaggccgacatgactgcctcggggagtcctgactacgggcagccccacaagatcaaccccctcccaccacagcaggagtggatcaatcagccagtgagggtcaacgtcaagcgggagtatgaccacatgaatggatccaggcgccagctgcctcattaaagagcagccttttatgctgggcttcacctgtacccaccctgagcggcagccgtggagccccatggccgcacgcagggcttgcgctggctggaggaggcacggtgcttgggagctgcaagaatggagggaggactggcaggcgagcgggcgagggagtctccggtggactgcagcgttagcaaatgcagcaagctggtgggcggaggcgagtccaaccccatgaactacaacagctatatggacgagaagaatggcccccctcctcccaacatgaccaccaacgagaggagagtcatcgtccccgcagaccccacactgtggacacaggagcatgtgaggcaatggctggagtgggccataaaggagtacagcttgatggagatcgacacatcctttttccagaacatggatggcaaggaactgtgtaaaatgaacaaggaggacttcctccgcgccaccaccctctacaacacggaagtgctgttgtcacacctcagttacctcagggaaagttcactgctggcctataatacaacctcccacaccgaccaatcctcacgattgagtgtcaaagaagacccttcttatgactcagtcagaagaggagcttggggcaataacatgaattctggcctcaacaaaagtcctccccttggaggggcacaaacgatcagtaagaatacagagcaacggccccagccagatccgtatcagatcctgggcccgaccagcagtcgcctagccaaccctggaagcgggcagatccagctgtggcaattcctcctggagctgctctccgacagcgccaacgccagctgtatcacctgggaggggaccaacggggagttcaaaatgacggaccccgatgaggtggccaggcgctggggcgagcggaaaagcaagcccaacatgaattacgacaagctgagccgggccctccgttattactatgataaaaacattatgaccaaagtgcacggcaaaagatatgcttacaaatttgacttccacggcattgcccaggctctgcagccacatccgaccgagtcgtccatgtacaagtacccttctgacatctcctacatgccttcctaccatgcccaccagcagaaggtgaactttgtccctccccatccatcctccatgcctgtcacttcctccagcttctttggagccgcatcacaatactggacctcccccacggggggaatctaccccaaccccaacgtcccccgccatcctaacacccacgtgccttcacacttaggcagctactactagaagcttactcatcagtggccttctagctgaagcccatcctgcacacttactggatgctttggactcaacaggacatatgtggccttgaagggaagacaaaactggatgttctttcttgttggatagaacctttgtatttgttctttaaaaacattttttttaatgttggtaacttttgcttcctctacctgaacaaagagatgaataattccatgggccagtatgccagtttgaattctcagtctcctagcatcttgtgagttgcatattaagattactggaatggttaagtcatggttctgagaaagaagctgtacgttttctttatgtttttatgaccaaagcagtttcttgtcaatacacggggttcagtatgacacagaatcatggacttaacccgtcatgttctggtttgagatttagtgacaaatagaggtgggaagcttataatctaattttaggaggaccaaattcagtggatggcaactggaacattgattgtaaggccagtgaagttttcacccaactggaatttgatggaaagaaggtttgtgtgtttaagacgccaagggcattgcagaatccctctcagtggacagtatgcactcagctgaccactctctctagaaatagtcaagatatgaactaagaaattttaatgcaaatacatacattcctgaaagacggggaattaaattactaatttttttttttttttaaatgatgacagtggtcccagaacttggaaaagttgtagggatttctaaactcaagcagattcgcaagtgctgtgcgcttgtcagaccatcagaccagggccaaccaatcagaaggcaacttactgtataaattatgcagagttattttcctatatctcacagtattaaaaataaataattaaaaattaagaataaataaacgagttgacctcggtcacaaaagcagttttactatcgaatcaatcgctgttattttttttaatgtaatttgtacatcttttttcaatctgtacatttgggctgtctgtatgtttttatagctggtttttaaaaagcataatatgcctatagctgaaaaggaaacagggctgtttaagtcactgacttatgagaaagcaaagcactggtacagttatttaacaggcatacacaagcagggaaaagataatccatttagatctttaatgctttggaaatgcgtgtaacagtactgcaataatcacagctctgggaaaaacaacgaaactttcccttgtggagaggagggattttcctgctctatataagcaacatatttttagacattaaaatatatataattttgcaggtaattgttgacttttttaactatattaagtgttaagctgacaactgtcaaagaagaccatgttgtaaaataatttgactaaataaatggttccttctctcag

SEQ ID NO: 134756 - DNA, 3859 bp, Homo sapiens
  Payload ID: 6328
  Gene Symbol: FLI1
  Gene Name: Fli-1 proto-oncogene, ETS transcription factor
  Uniprot ID: Q01543
  ENST ID: ENST00000534087
  CDS Start-End: 321-1580
aacaaacgtgcacaggggagtgagggcagggcgctcgcagggggcacgcagggagggcccagggcgccagggaggccgcgccgggctaatccgaaggggctgcgaggtcaggctgtaaccgggtcaatgtgtggaatattggggggctcggctgcagacttggccaaatggacgggactattaaggaattctttctctgggtcatccactgctgagccccctccccaggaagtggaattgaggctctgtcggtggtgagcgacgaccagtccctctttgactcagcgtacggagcggcagcccatctccccaaggccgacatgactgcctcggggagtcctgactacgggcagccccacaagatcaaccccctcccaccacagcaggagtggatcaatcagccagtgagggtcaacgtcaagcgggagtatgaccacatgaatggatccagggagtctccggtggactgcagcgttagcaaatgcagcaagctggtgggcggaggcgagtccaaccccatgaactacaacagctatatggacgagaagaatggcccccctcctcccaacatgaccaccaacgagaggagagtcatcgtccccgcagaccccacactgtggacacaggagcatgtgaggcaatggctggagtgggccataaaggagtacagcttgatggagatcgacacatcctttttccagaacatggatggcaaggaactgtgtaaaatgaacaaggaggacttcctccgcgccaccaccctctacaacacggaagtgctgttgtcacacctcagttacctcagggaaagttcactgctggcctataatacaacctcccacaccgaccaatcctcacgattgagtgtcaaagaagacccttcttatgactcagtcagaagaggagcttggggcaataacatgaattctggcctcaacaaaagtcctccccttggaggggcacaaacgatcagtaagaatacagagcaacggccccagccagatccgtatcagatcctgggcccgaccagcagtcgcctagccaaccctggaagcgggcagatccagctgtggcaattcctcctggagctgctctccgacagcgccaacgccagctgtatcacctgggaggggaccaacggggagttcaaaatgacggaccccgatgaggtggccaggcgctggggcgagcggaaaagcaagcccaacatgaattacgacaagctgagccgggccctccgttattactatgataaaaacattatgaccaaagtgcacggcaaaagatatgcttacaaatttgacttccacggcattgcccaggctctgcagccacatccgaccgagtcgtccatgtacaagtacccttctgacatctcctacatgccttcctaccatgcccaccagcagaaggtgaactttgtccctccccatccatcctccatgcctgtcacttcctccagcttctttggagccgcatcacaatactggacctcccccacggggggaatctaccccaaccccaacgtcccccgccatcctaacacccacgtgccttcacacttaggcagctactactagaagcttactcatcagtggccttctagctgaagcccatcctgcacacttactggatgctttggactcaacaggacatatgtggccttgaagggaagacaaaactggatgttctttcttgttggatagaacctttgtatttgttctttaaaaacattttttttaatgttggtaacttttgcttcctctacctgaacaaagagatgaataattccatgggccagtatgccagtttgaattctcagtctcctagcatcttgtgagttgcatattaagattactggaatggttaagtcatggttctgagaaagaagctgtacgttttctttatgtttttatgaccaaagcagtttcttgtcaatacacggggttcagtatgacacagaatcatggacttaacccgtcatgttctggtttgagatttagtgacaaatagaggtgggaagcttataatctaattttaggaggaccaaattcagtggatggcaactggaacattgattgtaaggccagtgaagttttcacccaactggaatttgatggaaagaaggtttgtgtgtttaagacgccaagggcattgcagaatccctctcagtggacagtatgcactcagctgaccactctctctagaaatagtcaagatatgaactaagaaattttaatgcaaatacatacattcctgaaagacggggaattaaattactaatttttttttttttttaaatgatgacagtggtcccagaacttggaaaagttgtagggatttctaaactcaagcagattcgcaagtgctgtgcgcttgtcagaccatcagaccagggccaaccaatcagaaggcaacttactgtataaattatgcagagttattttcctatatctcacagtattaaaaataaataattaaaaattaagaataaataaacgagttgacctcggtcacaaaagcagttttactatcgaatcaatcgctgttattttttttaatgtaatttgtacatcttttttcaatctgtacatttgggctgtctgtatgtttttatagctggtttttaaaaagcataatatgcctatagctgaaaaggaaacagggctgtttaagtcactgacttatgagaaagcaaagcactggtacagttatttaacaggcatacacaagcagggaaaagataatccatttagatctttaatgctttggaaatgcgtgtaacagtactgcaataatcacagctctgggaaaaacaacgaaactttcccttgtggagaggagggattttcctgctctatataagcaacatatttttagacattaaaatatatataattttgcaggtaattgttgacttttttaactatattaagtgttaagctgacaactgtcaaagaagaccatgttgtaaaataatttgactaaataaatggttccttctctcagtgctgaggacagttttcttatttaccgcccccgttaggtcaaagggttttccctggggaactttcctatttacttcttgcactatcaagaatttttcgaatgtacctactgcagtacagcagaaggtaaaaaatcagtgtggtttttcattgttgttgatgatgtttgtagtgtttttgtgtgtgttatttaaatcttcctccagcctaaaagggttttataaaacagcagctaaggccatggataaacctgtatgtaaggactggagcaaagcgagctggtctatccagactggtctgtgagatttaactctgcagcctcccctgggcacttcagacccagacggccaccttctgccactccagcaaagaataagcgccctgcttccttcaggtctcagaccaggactttatggctcatgcagatttttaaggtcatttttcttcccaaggaagaaacttgcctccagttccttcactgttaggtagcttattttcattttctctattttacaatgaaaagagtgagacctgggaagtccttgatttgcaaggaattagactcacagcattggtaaccctagaaccttcttagggtaacactaagtaccttctagacaacatgtctacctaaatgaaatgggatgtgtttcggaacatttgtctccagtttttttttaatcttgcaccctgccatttaaaaagatgtgtaaagcacatattctcaacatatgcacattgatttataaatcatatatacaaactgttacattattcttcatattagaaaacaaatacaaaatagaacattttaaatggtgatataaaaataaattgaaactgaaattcta

SEQ ID NO: 134757 - DNA, 4127 bp, Homo sapiens
  Payload ID: 6328
  Gene Symbol: FLI1
  Gene Name: Fli-1 proto-oncogene, ETS transcription factor
  Uniprot ID: Q01543
  ENST ID: ENST00000527786
  CDS Start-End: 490-1848
aggagcaagtatcctgtgtgcgcagcgcatgaatgtgtctgggcatctccgcgtatatttatatagtgtgtgatgcgaaaagcaggaccagcaggggaggaagagggggtgtggggggggagggaagacgagggagagcagaggggagagaagagagaggagagctcgaggcgagagagagagagagagagagagagagagagagagagagagagagagagagataggacttcctccccgattcgcaaagtgaagtcacttcccaaaattagctgaaaaaaaagtttcatccggttaactgtctctttcgctccgctacaacaacaaacgtgcacaggggagtgagggcagggcgctcgcagggggcacgcagggagggcccagggcgccagggaggccgcgccgggctaatccgaaggggctgcgaggtcaggctgtaaccgggtcaatgtgtggaatattggggggctcggctgcagacttggccaaatggacgggactattaaggaggctctgtcggtggtgagcgacgaccagtccctctttgactcagcgtacggagcggcagcccatctccccaaggccgacatgactgcctcggggagtcctgactacgggcagccccacaagatcaaccccctcccaccacagcaggagtggatcaatcagccagtgagggtcaacgtcaagcgggagtatgaccacatgaatggatccagggagtctccggtggactgcagcgttagcaaatgcagcaagctggtgggcggaggcgagtccaaccccatgaactacaacagctatatggacgagaagaatggcccccctcctcccaacatgaccaccaacgagaggagagtcatcgtccccgcagaccccacactgtggacacaggagcatgtgaggcaatggctggagtgggccataaaggagtacagcttgatggagatcgacacatcctttttccagaacatggatggcaaggaactgtgtaaaatgaacaaggaggacttcctccgcgccaccaccctctacaacacggaagtgctgttgtcacacctcagttacctcagggaaagttcactgctggcctataatacaacctcccacaccgaccaatcctcacgattgagtgtcaaagaagacccttcttatgactcagtcagaagaggagcttggggcaataacatgaattctggcctcaacaaaagtcctccccttggaggggcacaaacgatcagtaagaatacagagcaacggccccagccagatccgtatcagatcctgggcccgaccagcagtcgcctagccaaccctggaagcgggcagatccagctgtggcaattcctcctggagctgctctccgacagcgccaacgccagctgtatcacctgggaggggaccaacggggagttcaaaatgacggaccccgatgaggtggccaggcgctggggcgagcggaaaagcaagcccaacatgaattacgacaagctgagccgggccctccgttattactatgataaaaacattatgaccaaagtgcacggcaaaagatatgcttacaaatttgacttccacggcattgcccaggctctgcagccacatccgaccgagtcgtccatgtacaagtacccttctgacatctcctacatgccttcctaccatgcccaccagcagaaggtgaactttgtccctccccatccatcctccatgcctgtcacttcctccagcttctttggagccgcatcacaatactggacctcccccacggggggaatctaccccaaccccaacgtcccccgccatcctaacacccacgtgccttcacacttaggcagctactactagaagcttactcatcagtggccttctagctgaagcccatcctgcacacttactggatgctttggactcaacaggacatatgtggccttgaagggaagacaaaactggatgttctttcttgttggatagaacctttgtatttgttctttaaaaacattttttttaatgttggtaacttttgcttcctctacctgaacaaagagatgaataattccatgggccagtatgccagtttgaattctcagtctcctagcatcttgtgagttgcatattaagattactggaatggttaagtcatggttctgagaaagaagctgtacgttttctttatgtttttatgaccaaagcagtttcttgtcaatacacggggttcagtatgacacagaatcatggacttaacccgtcatgttctggtttgagatttagtgacaaatagaggtgggaagcttataatctaattttaggaggaccaaattcagtggatggcaactggaacattgattgtaaggccagtgaagttttcacccaactggaatttgatggaaagaaggtttgtgtgtttaagacgccaagggcattgcagaatccctctcagtggacagtatgcactcagctgaccactctctctagaaatagtcaagatatgaactaagaaattttaatgcaaatacatacattcctgaaagacggggaattaaattactaatttttttttttttttaaatgatgacagtggtcccagaacttggaaaagttgtagggatttctaaactcaagcagattcgcaagtgctgtgcgcttgtcagaccatcagaccagggccaaccaatcagaaggcaacttactgtataaattatgcagagttattttcctatatctcacagtattaaaaataaataattaaaaattaagaataaataaacgagttgacctcggtcacaaaagcagttttactatcgaatcaatcgctgttattttttttaatgtaatttgtacatcttttttcaatctgtacatttgggctgtctgtatgtttttatagctggtttttaaaaagcataatatgcctatagctgaaaaggaaacagggctgtttaagtcactgacttatgagaaagcaaagcactggtacagttatttaacaggcatacacaagcagggaaaagataatccatttagatctttaatgctttggaaatgcgtgtaacagtactgcaataatcacagctctgggaaaaacaacgaaactttcccttgtggagaggagggattttcctgctctatataagcaacatatttttagacattaaaatatatataattttgcaggtaattgttgacttttttaactatattaagtgttaagctgacaactgtcaaagaagaccatgttgtaaaataatttgactaaataaatggttccttctctcagtgctgaggacagttttcttatttaccgcccccgttaggtcaaagggttttccctggggaactttcctatttacttcttgcactatcaagaatttttcgaatgtacctactgcagtacagcagaaggtaaaaaatcagtgtggtttttcattgttgttgatgatgtttgtagtgtttttgtgtgtgttatttaaatcttcctccagcctaaaagggttttataaaacagcagctaaggccatggataaacctgtatgtaaggactggagcaaagcgagctggtctatccagactggtctgtgagatttaactctgcagcctcccctgggcacttcagacccagacggccaccttctgccactccagcaaagaataagcgccctgcttccttcaggtctcagaccaggactttatggctcatgcagatttttaaggtcatttttcttcccaaggaagaaacttgcctccagttccttcactgttaggtagcttattttcattttctctattttacaatgaaaagagtgagacctgggaagtccttgatttgcaaggaattagactcacagcattggtaaccctagaaccttcttagggtaacactaagtaccttctagacaacatgtctacctaaatgaaatgggatgtgtttcggaacatttgtctccagtttttttttaatcttgcaccctgccatttaaaaagatgtgtaaagcacatattctcaacatatgcacattgatttataaatcatatatacaaactgttacattattcttcatattagaaaacaaatacaaaatagaacattttaaatggtgatataaaaataaattgaaactgaaattcta

SEQ ID NO: 134758 - DNA, 561 bp, Homo sapiens
  Payload ID: 6328
  Gene Symbol: FLI1
  Gene Name: Fli-1 proto-oncogene, ETS transcription factor
  ENST ID: ENST00000527767
  CDS Start-End: 244-561
ctcaccccgggaaaagtctgggtctgctctgcgctgttgcgtgctgcgctcctgggacctgctgactgtcctagagggaacgtcccgcggtagtgtcagttccctggggaccaggaagggcgactcttgcctgggagtcagtgcttgggccgtcgggtccgggaggctctgtcggtggtgagcgacgaccagtccctctttgactcagcgtacggagcggcagcccatctccccaaggccgacatgactgcctcggggagtcctgactacgggcagccccacaagatcaaccccctcccaccacagcaggagtggatcaatcagccagtgagggtcaacgtcaagcgggagtatgaccacatgaatggatccagggagtctccggtggactgcagcgttagcaaatgcagcaagctggtgggcggaggcgagtccaaccccatgaactacaacagctatatggacgagaagaatggcccccctcctcccaacatgaccaccaacgagaggagagtcatcgtccccgcagaccccacactgtggacacaggagcatgtgagg

SEQ ID NO: 134759 - DNA, 2577 bp, Homo sapiens
  Payload ID: 6328
  Gene Symbol: FLI1
  Gene Name: Fli-1 proto-oncogene, ETS transcription factor
  ENST ID: ENST00000608303
  CDS Start-End: 249-398
acagtctctccatctgcatccccacttcatcaccatcccaccgtctctccctcgctccactcgcgggtaaccgaggcttctccctcccaggctggttcttgggcgttcccgacccttagctacccacgatgtttcagacagtccccgacacgtcgtcttacatcaaggaggctctgtcggtggtgagcgacgaccagtccctctttgactcagcgtacggagcggcagcccatctccccaaggccgacatgactgcctcggggagtcctgactacgggcagccccacaagatcaaccccctcccaccacagcaggagtggatcaatcagccagtgagggtcaacgtcaagcgggagtatgaccacatgaatggatccaggttcactgctggcctataatacaacctcccacaccgaccaatcctcacgattgagtgtcaaagaagacccttcttatgactcagtcagaagaggagcttggggcaataacatgaattctggcctcaacaaaagtcctccccttggaggggcacaaacgatcagtaagaatacagagcaacggccccagccagatccgtatcagatcctgggcccgaccagcagtcgcctagccaaccctggaagcgggcagatccagctgtggcaattcctcctggagctgctctccgacagcgccaacgccagctgtatcacctgggaggggaccaacggggagttcaaaatgacggaccccgatgaggtggccaggcgctggggcgagcggaaaagcaagcccaacatgaattacgacaagctgagccgggccctccgttattactatgataaaaacattatgaccaaagtgcacggcaaaagatatgcttacaaatttgacttccacggcattgcccaggctctgcagccacatccgaccgagtcgtccatgtacaagtacccttctgacatctcctacatgccttcctaccatgcccaccagcagaaggtgaactttgtccctccccatccatcctccatgcctgtcacttcctccagcttctttggagccgcatcacaatactggacctcccccacggggggaatctaccccaaccccaacgtcccccgccatcctaacacccacgtgccttcacacttaggcagctactactagaagcttactcatcagtggccttctagctgaagcccatcctgcacacttactggatgctttggactcaacaggacatatgtggccttgaagggaagacaaaactggatgttctttcttgttggatagaacctttgtatttgttctttaaaaacattttttttaatgttggtaacttttgcttcctctacctgaacaaagagatgaataattccatgggccagtatgccagtttgaattctcagtctcctagcatcttgtgagttgcatattaagattactggaatggttaagtcatggttctgagaaagaagctgtacgttttctttatgtttttatgaccaaagcagtttcttgtcaatacacggggttcagtatgacacagaatcatggacttaacccgtcatgttctggtttgagatttagtgacaaatagaggtgggaagcttataatctaattttaggaggaccaaattcagtggatggcaactggaacattgattgtaaggccagtgaagttttcacccaactggaatttgatggaaagaaggtttgtgtgtttaagacgccaagggcattgcagaatccctctcagtggacagtatgcactcagctgaccactctctctagaaatagtcaagatatgaactaagaaattttaatgcaaatacatacattcctgaaagacggggaattaaattactaatttttttttttttttaaatgatgacagtggtcccagaacttggaaaagttgtagggatttctaaactcaagcagattcgcaagtgctgtgcgcttgtcagaccatcagaccagggccaaccaatcagaaggcaacttactgtataaattatgcagagttattttcctatatctcacagtattaaaaataaataattaaaaattaagaataaataaacgagttgacctcggtcacaaaagcagttttactatcgaatcaatcgctgttattttttttaatgtaatttgtacatcttttttcaatctgtacatttgggctgtctgtatgtttttatagctggtttttaaaaagcataatatgcctatagctgaaaaggaaacagggctgtttaagtcactgacttatgagaaagcaaagcactggtacagttatttaacaggcatacacaagcagggaaaagataatccatttagatctttaatgctttggaaatgcgtgtaacagtactgcaataatcacagctctgggaaaaacaacgaaactttcccttgtggagaggagggattttcctgctctatataagcaacatatttttagacattaaaatatatataattttgcaggtaattgttgacttttttaactatattaagtgttaagctgacaactgtcaaagaagaccatgttgtaaaataatttgactaaataaatggttccttctctca

SEQ ID NO: 134760 - DNA, 4338 bp, Homo sapiens
  Payload ID: 6329
  Gene Symbol: FLII
  Gene Name: flightless I actin binding protein
  Uniprot ID: Q13045
  ENST ID: ENST00000327031
  CDS Start-End: 227-4036
aactccagcacagggggggcccgcactccttggtgcctccgcagtcttcgaacagacggggaaactgaggccctaagaggcctaaagcctacacttccccgcggaatgcggcgggcgcgggcgggttaaaggggcggggccggcgctggcccagcccgcggctccccccagcgccctcgccccggcgctccctagcccggcgcggcccggcagcgagagcggcgccatggaggccaccggggtgctgccgttcgtgcgtggcgtggacctcagcggcaacgacttcaagggcggctacttccctgagaatgtcaaggccatgaccagcctgcggtggctgaagctgaaccgcactggcctctgctacctgcccgaggagctggccgccctgcagaagctggaacacttgtctgtgagccacaacaacctgaccacgcttcatggggagctgtccagcctgccatcgctgcgcgccatcgtggcccgagccaacagtctgaagaattccggagtccccgatgacatcttcaagctagatgatctctcagtcctggacttgagccacaaccagctgacagagtgcccgcgggagctggagaacgccaagaacatgctggtgctgaacctcagccacaacagcatcgacaccatccccaaccagctcttcatcaacctcactgacctactatacctggacctcagcgagaaccgcctggagagcctgcccccgcagatgcgccgcctggtgcacctgcagacgctcgtgctcaatggaaaccccctgctgcatgcacagctccggcagctcccagcgatgacggccctgcagaccctgcacctgcggagcacccagcgcacccagagcaacctgcccaccagcctggagggtctgagcaacctcgcagacgtggatctgtcctgcaatgacctgacacgggtgcccgagtgtctgtacaccctccccagcctgcgccgcctcaacctcagcagcaaccagatcacggagctgtccctgtgcatagaccagtgggtgcacgtggaaactctgaacctgtcccgaaatcagctcacctcactgccctcagccatttgcaagctgagcaagctgaagaagctgtacctgaattccaacaagctggactttgacgggctgccctcaggcattggcaagctcaccaacctggaagagttcatggctgccaacaacaacctggagctggtccctgaaagtctctgcaggtgcccaaagctgaggaaacttgtcctgaacaagaaccacctggtgaccctcccagaagccatccatttcctgacggagatcgaggtcctggatgtgcgggagaaccccaacctggtcatgccgcccaagcccgcagaccgtgccgctgagtggtacaacatcgacttctcgctgcagaaccagctgcggctagcgggtgcctctcctgctaccgtggctgcagctgcagctgcagggagtgggcccaaggaccctatggctcgcaagatgcgactgcggaggcgcaaggattcagcccaggatgaccaggccaagcaggtgctgaagggcatgtcagatgttgcccaggagaagaacaaaaagcaggaggagagcgcagatgcccgggcccccagcgggaaggtgcggcgttgggaccagggcctggagaagccccgccttgactactccgagttcttcacggaggacgtgggccagctgcccggactgaccatctggcagatagagaacttcgtgcctgtgctggtggaggaagccttccacggcaagttctacgaggctgactgctacattgtgctcaagacctttctggatgacagcggctccctcaactgggagatctactactggattggcggggaggccacactcgacaagaaagcttgctctgccatccacgctgtcaacttgcgcaactacctgggtgctgagtgccgcactgtccgggaggagatgggcgatgagagcgaggagttcctgcaggtgtttgacaacgacatctcctacattgagggtggaacagccagtggcttctacactgtggaagacacacactatgtcaccaggatgtatcgtgtgtatgggaaaaagaacatcaagttggagcctgtgcccctcaaggggacctctctggacccaaggtttgttttcctgctggaccgagggctagacatctacgtatggcggggggcccaggccacactgagcagcaccaccaaggccaggctctttgcagagaaaattaacaagaatgagcggaaagggaaggctgagatcacactgctggtgcagggccaggagctcccagagttctgggaggcactgggtggggagccctctgagatcaagaagcacgtgcctgaagacttctggccgccgcagcccaagctgtacaaggtgggcctgggcttgggctacctggagctgccacagatcaactacaagctctccgtggaacataagcagcgtcccaaggtggagctgatgccaagaatgcggctgctgcagagtctgctggacacgcgctgcgtgtacattctggactgttggtccgacgtgttcatctggctcggccgcaagtccccgcgcctggtgcgcgctgccgccctcaagctgggtcaggagctgtgcgggatgctgcaccggccacgccatgccacggtcagccgcagcctcgagggcaccgaggcgcaggtgttcaaggccaagttcaagaattgggacgatgtgttgacggtggactacacacgcaatgcggaggccgtgctgcagagcccgggtctctccgggaaggtgaaacgcgacgccgagaagaaagaccagatgaaggctgacctcactgcgcttttcctgccgcggcagccgcccatgtcgctggccgaggcggagcagctgatggaggagtggaacgaagacctagacggcatggagggtttcgtgctggagggcaagaagtttgcgcggctgccggaagaggagtttggccacttctacacgcaggactgctacgtcttcctctgcaggtactgggtgcctgtggagtacgaggaggaggaaaagaaggaagacaaggaggagaaggccgagggcaaagaaggcgaggaagcaaccgctgaggcagaggagaagcagccagaggaggacttccagtgcatcgtgtacttctggcagggccgtgaagcctccaatatgggctggctcaccttcaccttcagcctgcaaaagaagttcgagagcctcttccctgggaagctggaggtggtacgcatgacgcagcagcaggagaaccccaagttcctgtcccatttcaagaggaagttcatcatccaccggggcaagaggaaggcggtccagggcgcccaacagcccagcctctaccagatccgcaccaacggcagcgccctctgcacccggtgcatccagatcaacaccgactccagcctcctcaactccgagttctgcttcatcctcaaggttccctttgagagtgaggacaaccagggcatcgtgtatgcctgggtgggccgggcatcagaccctgacgaagccaagttggcagaagacatcctgaacaccatgtttgacacctcctacagcaagcaggttatcaacgaaggtgaggagcctgagaacttcttctgggtgggcattggggcacagaagccctatgatgacgatgccgagtacatgaaacacacacgtctcttccggtgctccaacgagaagggctactttgcagtgactgagaaatgctccgacttttgccaagatgacctggcagatgatgacatcatgttgctagacaatggccaagaggtctacatgtgggtggggacccagactagccaggtggagatcaagctgagcctgaaggcctgccaggtatatatccagcacatgcggtccaaggaacatgagcggccgcgccggctgcgcctggtccgcaagggcaatgagcagcacgcctttacccgctgcttccacgcctggagcgccttctgcaaggccctggcctaagacaggctggcacagccccaggcttggtgaggaagaggaaggggcctcatccactgtctgctagcaaagaatgtactcaggtgacaccacctgctccagccacgtccagtgccacagtccccagtagcctcaagcagcaccaatggggatgaccctgacaggtgccctcaggggtctgggaaatccaactctctccacagtgtgagtgcacgtgtgaagccccctcactcttccgctagggataaagcagatgtggatgccctttaagagatattaaatgcttttattttcaatattaaaaa

SEQ ID NO: 134761 - DNA, 3975 bp, Homo sapiens
  Payload ID: 6329
  Gene Symbol: FLII
  Gene Name: flightless I actin binding protein
  Uniprot ID: Q13045
  ENST ID: ENST00000545457
  CDS Start-End: 34-3678
agcccggcgcggcccggcagcgagagcggcgccatggaggccaccggggtgctgccgttcgtgcgtggcgtggacctcagcggcaacgacttcaagggcggctacttccctgagaatgtcaaggccatgaccagcctgcggtggctgaagctgaaccgcactggcctctgctacctgcccgaggagctggccgccctgcagaagctggaacacttgtctgtgagccacaacaacctgaccacgcttcatggggagctgtccagcctgccatcgctgcgcgccatcgtggcccgagccaacagtctgaagaattccggagtccccgatgacatcttcaagctagatgatctctcagtcctggacttgagccacaaccagctgacagagtgcccgcgggagctggagaacgccaagaacatgctggtgctgaacctcagccacaacaggcagctcccagcgatgacggccctgcagaccctgcacctgcggagcacccagcgcacccagagcaacctgcccaccagcctggagggtctgagcaacctcgcagacgtggatctgtcctgcaatgacctgacacgggtgcccgagtgtctgtacaccctccccagcctgcgccgcctcaacctcagcagcaaccagatcacggagctgtccctgtgcatagaccagtgggtgcacgtggaaactctgaacctgtcccgaaatcagctcacctcactgccctcagccatttgcaagctgagcaagctgaagaagctgtacctgaattccaacaagctggactttgacgggctgccctcaggcattggcaagctcaccaacctggaagagttcatggctgccaacaacaacctggagctggtccctgaaagtctctgcaggtgcccaaagctgaggaaacttgtcctgaacaagaaccacctggtgaccctcccagaagccatccatttcctgacggagatcgaggtcctggatgtgcgggagaaccccaacctggtcatgccgcccaagcccgcagaccgtgccgctgagtggtacaacatcgacttctcgctgcagaaccagctgcggctagcgggtgcctctcctgctaccgtggctgcagctgcagctgggagtgggcccaaggaccctatggctcgcaagatgcgactgcggaggcgcaaggattcagcccaggatgaccaggccaagcaggtgctgaagggcatgtcagatgttgcccaggagaagaacaaaaagcaggaggagagcgcagatgcccgggcccccagcgggaaggtgcggcgttgggaccagggcctggagaagccccgccttgactactccgagttcttcacggaggacgtgggccagctgcccggactgaccatctggcagatagagaacttcgtgcctgtgctggtggaggaagccttccacggcaagttctacgaggctgactgctacattgtgctcaagacctttctggatgacagcggctccctcaactgggagatctactactggattggcggggaggccacactcgacaagaaagcttgctctgccatccacgctgtcaacttgcgcaactacctgggtgctgagtgccgcactgtccgggaggagatgggcgatgagagcgaggagttcctgcaggtgtttgacaacgacatctcctacattgagggtggaacagccagtggcttctacactgtggaagacacacactatgtcaccaggatgtatcgtgtgtatgggaaaaagaacatcaagttggagcctgtgcccctcaaggggacctctctggacccaaggtttgttttcctgctggaccgagggctagacatctacgtatggcggggggcccaggccacactgagcagcaccaccaaggccaggctctttgcagagaaaattaacaagaatgagcggaaagggaaggctgagatcacactgctggtgcagggccaggagctcccagagttctgggaggcactgggtggggagccctctgagatcaagaagcacgtgcctgaagacttctggccgccgcagcccaagctgtacaaggtgggcctgggcttgggctacctggagctgccacagatcaactacaagctctccgtggaacataagcagcgtcccaaggtggagctgatgccaagaatgcggctgctgcagagtctgctggacacgcgctgcgtgtacattctggactgttggtccgacgtgttcatctggctcggccgcaagtccccgcgcctggtgcgcgctgccgccctcaagctgggtcaggagctgtgcgggatgctgcaccggccacgccatgccacggtcagccgcagcctcgagggcaccgaggcgcaggtgttcaaggccaagttcaagaattgggacgatgtgttgacggtggactacacacgcaatgcggaggccgtgctgcagagcccgggtctctccgggaaggtgaaacgcgacgccgagaagaaagaccagatgaaggctgacctcactgcgcttttcctgccgcggcagccgcccatgtcgctggccgaggcggagcagctgatggaggagtggaacgaagacctagacggcatggagggtttcgtgctggagggcaagaagtttgcgcggctgccggaagaggagtttggccacttctacacgcaggactgctacgtcttcctctgcaggtactgggtgcctgtggagtacgaggaggaggaaaagaaggaagacaaggaggagaaggccgagggcaaagaaggcgaggaagcaaccgctgaggcagaggagaagcagccagaggaggacttccagtgcatcgtgtacttctggcagggccgtgaagcctccaatatgggctggctcaccttcaccttcagcctgcaaaagaagttcgagagcctcttccctgggaagctggaggtggtacgcatgacgcagcagcaggagaaccccaagttcctgtcccatttcaagaggaagttcatcatccaccggggcaagaggaaggcggtccagggcgcccaacagcccagcctctaccagatccgcaccaacggcagcgccctctgcacccggtgcatccagatcaacaccgactccagcctcctcaactccgagttctgcttcatcctcaaggttccctttgagagtgaggacaaccagggcatcgtgtatgcctgggtgggccgggcatcagaccctgacgaagccaagttggcagaagacatcctgaacaccatgtttgacacctcctacagcaagcaggttatcaacgaaggtgaggagcctgagaacttcttctgggtgggcattggggcacagaagccctatgatgacgatgccgagtacatgaaacacacacgtctcttccggtgctccaacgagaagggctactttgcagtgactgagaaatgctccgacttttgccaagatgacctggcagatgatgacatcatgttgctagacaatggccaagaggtctacatgtgggtggggacccagactagccaggtggagatcaagctgagcctgaaggcctgccaggtatatatccagcacatgcggtccaaggaacatgagcggccgcgccggctgcgcctggtccgcaagggcaatgagcagcacgcctttacccgctgcttccacgcctggagcgccttctgcaaggccctggcctaagacaggctggcacagccccaggcttggtgaggaagaggaaggggcctcatccactgtctgctagcaaagaatgtactcaggtgacaccacctgctccagccacgtccagtgccacagtccccagtagcctcaagcagcaccaatggggatgaccctgacaggtgccctcaggggtctgggaaatccaactctctccacagtgtgagtgcacgtgtgaagccccctcactcttccgctagggataaagcagatgtggatgccctttaagagatattaaatgcttttattttcaatatt

SEQ ID NO: 134762 - DNA, 4148 bp, Homo sapiens
  Payload ID: 6329
  Gene Symbol: FLII
  Gene Name: flightless I actin binding protein
  ENST ID: ENST00000578101
  CDS Start-End: 16-171
agcgagagcggcgccatggaggccaccggggtgctgccgttcgtgcgtggcgtggacctcagcggcaacgacttcaagatggtgagagttggttctgtggctccccaaaggctcccatgggctggaggagccatagaaggtggtgagcaggggctctgtgcttcaccttgacatccttcccccagggcggctacttccctgagaatgtcaaggccatgaccagcctgcggtggctgaagctgaaccgcactggcctctgctacctgcccgaggagctggccgccctgcagaagctggaacacttgtctgtgagccacaacaacctgaccacgcttcatggggagctgtccagcctgccatcgctgcgcgccatcgtggcccgagccaacagtctgaagaattccggagtccccgatgacatcttcaagctagatgatctctcagtcctggacttgagccacaaccagctgacagagtgcccgcgggagctggagaacgccaagaacatgctggtgctgaacctcagccacaacagcatcgacaccatccccaaccagctcttcatcaacctcactgacctactatacctggacctcagcgagaaccgcctggagagcctgcccccgcagatgcgccgcctggtgcacctgcagacgctcgtgctcaatggaaaccccctgctgcatgcacagctccggcagctcccagcgatgacggccctgcagaccctgcacctgcggagcacccagcgcacccagagcaacctgcccaccagcctggagggtctgagcaacctcgcagacgtggatctgtcctgcaatgacctgacacgggtgcccgagtgtctgtacaccctccccagcctgcgccgcctcaacctcagcagcaaccagatcacggagctgtccctgtgcatagaccagtgggtgcacgtggaaactctgaacctgtcccgaaatcagctcacctcactgccctcagccatttgcaagctgagcaagctgaagaagctgtacctgaattccaacaagctggactttgacgggctgccctcaggcattggcaagctcaccaacctggaagagttcatggctgccaacaacaacctggagctggtccctgaaagtctctgcaggtgcccaaagctgaggaaacttgtcctgaacaagaaccacctggtgaccctcccagaagccatccatttcctgacggagatcgaggtcctggatgtgcgggagaaccccaacctggtcatgccgcccaagcccgcagaccgtgccgctgagtggtacaacatcgacttctcgctgcagaaccagctgcggctagcgggtgcctctcctgctaccgtggctgcagctgcagctgcagggagtgggcccaaggaccctatggctcgcaagatgcgactgcggaggcgcaaggattcagcccaggatgaccaggccaagcaggtgctgaagggcatgtcagatgttgcccaggagaagaacaaaaagcaggaggagagcgcagatgcccgggcccccagcgggaaggtgcggcgttgggaccagggcctggagaagccccgccttgactactccgagttcttcacggaggacgtgggccagctgcccggactgaccatctggcagatagagaacttcgtgcctgtgctggtggaggaagccttccacggcaagttctacgaggctgactgctacattgtgctcaagacctttctggatgacagcggctccctcaactgggagatctactactggattggcggggaggccacactcgacaagaaagcttgctctgccatccacgctgtcaacttgcgcaactacctgggtgctgagtgccgcactgtccgggaggagatgggcgatgagagcgaggagttcctgcaggtgtttgacaacgacatctcctacattgagggtggaacagccagtggcttctacactgtggaagacacacactatgtcaccaggatgtatcgtgtgtatgggaaaaagaacatcaagttggagcctgtgcccctcaaggggacctctctggacccaaggtttgttttcctgctggaccgagggctagacatctacgtatggcggggggcccaggccacactgagcagcaccaccaaggccaggctctttgcagagaaaattaacaagaatgagcggaaagggaaggctgagatcacactgctggtgcagggccaggagctcccagagttctgggaggcactgggtggggagccctctgagatcaagaagcacgtgcctgaagacttctggccgccgcagcccaagctgtacaaggtgggcctgggcttgggctacctggagctgccacagatcaactacaagctctccgtggaacataagcagcgtcccaaggtggagctgatgccaagaatgcggctgctgcagagtctgctggacacgcgctgcgtgtacattctggactgttggtccgacgtgttcatctggctcggccgcaagtccccgcgcctggtgcgcgctgccgccctcaagctgggtcaggagctgtgcgggatgctgcaccggccacgccatgccacggtcagccgcagcctcgagggcaccgaggcgcaggtgttcaaggccaagttcaagaattgggacgatgtgttgacggtggactacacacgcaatgcggaggccgtgctgcagagcccgggtctctccgggaaggtgaaacgcgacgccgagaagaaagaccagatgaaggctgacctcactgcgcttttcctgccgcggcagccgcccatgtcgctggccgaggcggagcagctgatggaggagtggaacgaagacctagacggcatggagggtttcgtgctggagggcaagaagtttgcgcggctgccggaagaggagtttggccacttctacacgcaggactgctacgtcttcctctgcaggtactgggtgcctgtggagtacgaggaggaggaaaagaaggaagacaaggaggagaaggccgagggcaaagaaggcgaggaagcaaccgctgaggcagaggagaagcagccagaggaggacttccagtgcatcgtgtacttctggcagggccgtgaagcctccaatatgggctggctcaccttcaccttcagcctgcaaaagaagttcgagagcctcttccctgggaagctggaggtggtacgcatgacgcagcagcaggagaaccccaagttcctgtcccatttcaagaggaagttcatcatccaccggggcaagaggaaggcggtccagggcgcccaacagcccagcctctaccagatccgcaccaacggcagcgccctctgcacccggtgcatccagatcaacaccgactccagcctcctcaactccgagttctgcttcatcctcaaggttccctttgagagtgaggacaaccagggcatcgtgtatgcctgggtgggccgggcatcagaccctgacgaagccaagttggcagaagacatcctgaacaccatgtttgacacctcctacagcaagcaggttatcaacgaaggtgaggagcctgagaacttcttctgggtgggcattggggcacagaagccctatgatgacgatgccgagtacatgaaacacacacgtctcttccggtgctccaacgagaagggctactttgcagtgactgagaaatgctccgacttttgccaagatgacctggcagatgatgacatcatgttgctagacaatggccaagaggtctacatgtgggtggggacccagactagccaggtggagatcaagctgagcctgaaggcctgccaggtatatatccagcacatgcggtccaaggaacatgagcggccgcgccggctgcgcctggtccgcaagggcaatgagcagcacgcctttacccgctgcttccacgcctggagcgccttctgcaaggccctggcctaagacaggctggcacagccccaggcttggtgaggaagaggaaggggcctcatccactgtctgctagcaaagaatgtactcaggtgacaccacctgctccagccacgtccagtgccacagtccccagtagcctcaagcagcaccaatggggatgaccctgacaggtgccctcaggggtctgggaaatccaactctctccacagtgtgagtgcacgtgtg

SEQ ID NO: 134763 - DNA, 2377 bp, Homo sapiens
  Payload ID: 6329
  Gene Symbol: FLII
  Gene Name: flightless I actin binding protein
  ENST ID: ENST00000578558
  CDS Start-End: 37-2139
cctagcccggcgcggcccggcagcgagagcggcgccatggaggccaccggggtgctgccgttcgtgcgtggcgtggacctcagcggcaacgacttcaagggcggctacttccctgagaatgtcaaggccatgaccagcctgcggtggctgaagctgaaccgcactggcctctgctacctgcccgaggagctggccgccctgcagaagctggaacacttgtctgtgagccacaacaacctgaccacgcttcatggggagctgtccagcctgccatcgctgcgcgccatcgtggcccgagccaacagtctgaagaattccggagtccccgatgacatcttcaagctagatgatctctcagtcctggacttgagccacaaccagctgacagagtgcccgcgggagctggagaacgccaagaacatgctggtgctgaacctcagccacaacagcatcgacaccatccccaaccagctcttcatcaacctcactgacctactatacctggacctcagcgagaaccgcctggagagcctgcccccgcagatgcgccgcctggtgcacctgcagacgctcgtgctcaatggaaaccccctgctgcatgcacagctccggcagctcccagcgatgacggccctgcagaccctgcacctgcggagcacccagcgcacccagagcaacctgcccaccagcctggagggtctgagcaacctcgcagacgtggatctgtcctgcaatgacctgacacgggtgcccgagtgtctgtacaccctccccagcctgcgccgcctcaacctcagcagcaaccagatcacggagctgtccctgtgcatagaccagtgggtgcacgtggaaactctgaacctgtcccgaaatcagctcacctcactgccctcagccatttgcaagctgagcaagctgaagaagctgtacctgaattccaacaagctggactttgacgggctgccctcaggcattggcaagctcaccaacctggaagagttcatggctgccaacaacaacctggagctggtccctgaaagtctctgcaggtgcccaaagctgaggaaacttgtcctgaacaagaaccacctggtgaccctcccagaagccatccatttcctgacggagatcgaggtcctggatgtgcgggagaaccccaacctggtcatgccgcccaagcccgcagaccgtgccgctgagtggtacaacatcgacttctcgctgcagaaccagctgcggctagcgggtgcctctcctgctaccgtggctgcagctgcagctgggagtgggcccaaggaccctatggctcgcaagatgcgactgcggaggcgcaaggattcagcccaggatgaccaggccaagcaggtgctgaagggcatgtcagatgttgcccaggagaagaacaaaaagcaggaggagagcgcagatgcccgggcccccagcgggaaggtgcggcgttgggaccagggcctggagaagccccgccttgactactccgagttcttcacggaggacgtgggccagctgcccggactgaccatctggcagatagagaacttcgtgcctgtgctggtggaggaagccttccacggcaagttctacgaggctgactgctacattgtgctcaagacctttctggatgacagcggctccctcaactgggagatctactactggattggcggggaggccacactcgacaagaaagcttgctctgccatccacgctgtcaacttgcgcaactacctgggtgctgagtgccgcactgtccgggaggagatgggcgatgagagcgaggagttcctgcaggtgtttgacaacgacatctcctacattgagggtggaacagccagtggcttctacactgtggaagacacacactatgtcaccaggatgtatcgtgtgtatgggaaaaagaacatcaagttggagcctgtgcccctcaaggggacctctctggacccaaggaacatgagcggccgcgccggctgcgcctggtccgcaagggcaatgagcagcacgcctttacccgctgcttccacgcctggagcgccttctgcaaggccctggcctaagacaggctggcacagccccaggcttggtgaggaagaggaaggggcctcatccactgtctgctagcaaagaatgtactcaggtgacaccacctgctccagccacgtccagtgccacagtccccagtagcctcaagcagcaccaatggggatgaccctgacaggtgccctcaggggtctgggaaatccaactctctccacagtgtgagtgcacgtgtgaagccccctcactcttccgctagggataaagcagatgtggatgccctttaagagatattaaatgcttttattttcaatattaaaaa

SEQ ID NO: 134764 - DNA, 385 bp, Homo sapiens
  Payload ID: 6329
  Gene Symbol: FLII
  Gene Name: flightless I actin binding protein
  ENST ID: ENST00000581401
  CDS Start-End: 1-90
cccccgcagatgcgccgcctggtgcacctgcagacgctcgtgctcaatggaaaccccctgctgcatgcacagctccgctcccagcgatgacggccctgcagaccctgcacctgcggagcacccagcgcacccagagcaacctgcccaccagcctggagggtctgagcaacctcgcagacgtggatctgtcctgcaatgacctgacacgggtgcccgagtgtctgtacaccctccccagcctgcgccgcctcaacctcagcagcaaccagatcacggagctgtccctgtgcatagaccagtgggtgcacgtggaaactctgaacctgtcccgaaatcagctcacctcactgccctcagccatttgcaagctgagcaagctgaagaa

SEQ ID NO: 134765 - DNA, 3936 bp, Homo sapiens
  Payload ID: 6329
  Gene Symbol: FLII
  Gene Name: flightless I actin binding protein
  Uniprot ID: Q13045
  ENST ID: ENST00000579294
  CDS Start-End: 81-3857
ttcctgtcccgctcggctccaggccctgcgtgtcccagggactgcggccggggcggggtggggctctcccctggccaggaatggacctccgaggcctccgcccagtgcctggcggctacttccctgagaatgtcaaggccatgaccagcctgcggtggctgaagctgaaccgcactggcctctgctacctgcccgaggagctggccgccctgcagaagctggaacacttgtctgtgagccacaacaacctgaccacgcttcatggggagctgtccagcctgccatcgctgcgcgccatcgtggcccgagccaacagtctgaagaattccggagtccccgatgacatcttcaagctagatgatctctcagtcctggacttgagccacaaccagctgacagagtgcccgcgggagctggagaacgccaagaacatgctggtgctgaacctcagccacaacagcatcgacaccatccccaaccagctcttcatcaacctcactgacctactatacctggacctcagcgagaaccgcctggagagcctgcccccgcagatgcgccgcctggtgcacctgcagacgctcgtgctcaatggaaaccccctgctgcatgcacagctccggcagctcccagcgatgacggccctgcagaccctgcacctgcggagcacccagcgcacccagagcaacctgcccaccagcctggagggtctgagcaacctcgcagacgtggatctgtcctgcaatgacctgacacgggtgcccgagtgtctgtacaccctccccagcctgcgccgcctcaacctcagcagcaaccagatcacggagctgtccctgtgcatagaccagtgggtgcacgtggaaactctgaacctgtcccgaaatcagctcacctcactgccctcagccatttgcaagctgagcaagctgaagaagctgtacctgaattccaacaagctggactttgacgggctgccctcaggcattggcaagctcaccaacctggaagagttcatggctgccaacaacaacctggagctggtccctgaaagtctctgcaggtgcccaaagctgaggaaacttgtcctgaacaagaaccacctggtgaccctcccagaagccatccatttcctgacggagatcgaggtcctggatgtgcgggagaaccccaacctggtcatgccgcccaagcccgcagaccgtgccgctgagtggtacaacatcgacttctcgctgcagaaccagctgcggctagcgggtgcctctcctgctaccgtggctgcagctgcagctgcagggagtgggcccaaggaccctatggctcgcaagatgcgactgcggaggcgcaaggattcagcccaggatgaccaggccaagcaggtgctgaagggcatgtcagatgttgcccaggagaagaacaaaaagcaggaggagagcgcagatgcccgggcccccagcgggaaggtgcggcgttgggaccagggcctggagaagccccgccttgactactccgagttcttcacggaggacgtgggccagctgcccggactgaccatctggcagatagagaacttcgtgcctgtgctggtggaggaagccttccacggcaagttctacgaggctgactgctacattgtgctcaagacctttctggatgacagcggctccctcaactgggagatctactactggattggcggggaggccacactcgacaagaaagcttgctctgccatccacgctgtcaacttgcgcaactacctgggtgctgagtgccgcactgtccgggaggagatgggcgatgagagcgaggagttcctgcaggtgtttgacaacgacatctcctacattgagggtggaacagccagtggcttctacactgtggaagacacacactatgtcaccaggatgtatcgtgtgtatgggaaaaagaacatcaagttggagcctgtgcccctcaaggggacctctctggacccaaggtttgttttcctgctggaccgagggctagacatctacgtatggcggggggcccaggccacactgagcagcaccaccaaggccaggctctttgcagagaaaattaacaagaatgagcggaaagggaaggctgagatcacactgctggtgcagggccaggagctcccagagttctgggaggcactgggtggggagccctctgagatcaagaagcacgtgcctgaagacttctggccgccgcagcccaagctgtacaaggtgggcctgggcttgggctacctggagctgccacagatcaactacaagctctccgtggaacataagcagcgtcccaaggtggagctgatgccaagaatgcggctgctgcagagtctgctggacacgcgctgcgtgtacattctggactgttggtccgacgtgttcatctggctcggccgcaagtccccgcgcctggtgcgcgctgccgccctcaagctgggtcaggagctgtgcgggatgctgcaccggccacgccatgccacggtcagccgcagcctcgagggcaccgaggcgcaggtgttcaaggccaagttcaagaattgggacgatgtgttgacggtggactacacacgcaatgcggaggccgtgctgcagagcccgggtctctccgggaaggtgaaacgcgacgccgagaagaaagaccagatgaaggctgacctcactgcgcttttcctgccgcggcagccgcccatgtcgctggccgaggcggagcagctgatggaggagtggaacgaagacctagacggcatggagggtttcgtgctggagggcaagaagtttgcgcggctgccggaagaggagtttggccacttctacacgcaggactgctacgtcttcctctgcaggtactgggtgcctgtggagtacgaggaggaggaaaagaaggaagacaaggaggagaaggccgagggcaaagaaggcgaggaagcaaccgctgaggcagaggagaagcagccagaggaggacttccagtgcatcgtgtacttctggcagggccgtgaagcctccaatatgggctggctcaccttcaccttcagcctgcaaaagaagttcgagagcctcttccctgggaagctggaggtggtacgcatgacgcagcagcaggagaaccccaagttcctgtcccatttcaagaggaagttcatcatccaccggggcaagaggaaggcggtccagggcgcccaacagcccagcctctaccagatccgcaccaacggcagcgccctctgcacccggtgcatccagatcaacaccgactccagcctcctcaactccgagttctgcttcatcctcaaggttccctttgagagtgaggacaaccagggcatcgtgtatgcctgggtgggccgggcatcagaccctgacgaagccaagttggcagaagacatcctgaacaccatgtttgacacctcctacagcaagcaggttatcaacgaaggtgaggagcctgagaacttcttctgggtgggcattggggcacagaagccctatgatgacgatgccgagtacatgaaacacacacgtctcttccggtgctccaacgagaagggctactttgcagtgactgagaaatgctccgacttttgccaagatgacctggcagatgatgacatcatgttgctagacaatggccaagaggtctacatgtgggtggggacccagactagccaggtggagatcaagctgagcctgaaggcctgccaggtatatatccagcacatgcggtccaaggaacatgagcggccgcgccggctgcgcctggtccgcaagggcaatgagcagcacgcctttacccgctgcttccacgcctggagcgccttctgcaaggccctggcctaagacaggctggcacagccccaggcttggtgaggaagaggaaggggcctcatccactgtctgctagcaaagaatgtactca

SEQ ID NO: 134766 - DNA, 555 bp, Homo sapiens
  Payload ID: 6329
  Gene Symbol: FLII
  Gene Name: flightless I actin binding protein
  ENST ID: ENST00000577485
  CDS Start-End: 1-555
aacctcactgacctactatacctggacctcagcgagaaccgcctggagagcctgcccccgcagatgcgccgcctggtgcacctgcagacgctcgtgctcaatggaaaccccctgctgcatgcacagctccggcagctcccagcgatgacggccctgcagaccctgcacctgcggagcacccagcgcacccagagcaacctgcccaccagcctggaggccaagttggcagaagacatcctgaacaccatgtttgacacctcctacagcaagcaggttatcaacgaaggtgaggagcctgagaacttcttctgggtgggcattggggcacagaagccctatgatgacgatgccgagtacatgaaacacacacgtctcttccggtgctccaacgagaagggctactttgcagtgactgagaaatgctccgacttttgccaagatgacctggcagatgatgacatcatgttgctagacaatggccaagaggtctacatgtgggtggggacccagactagccaggtggagatcaagctgagcctgaaggcctgccaggta

SEQ ID NO: 134767 - DNA, 838 bp, Homo sapiens
  Payload ID: 6329
  Gene Symbol: FLII
  Gene Name: flightless I actin binding protein
  ENST ID: ENST00000488932
  CDS Start-End: 1-838
cccgatgacatcttcaagctagatgatctctcagtcctggacttgagccacaaccagctgacagagtgcccgcgggagctggagaacgccaagaacatgctggtgctgaacctcagccacaacagcgagaaccgcctggagagcctgcccccgcagatgcgccgcctggtgcacctgcagacgctcgtgctcaatggaaaccccctgctgcatgcacagctccggcagctcccagcgatgacggccctgcagaccctgcacctgcggagcacccagcgcacccagagcaacctgcccaccagcctggagggtctgagcaacctcgcagacgtggatctgtcctgcaatgacctgacacgggtgcccgagtgtctgtacaccctccccagcctgcgccgcctcaacctcagcagcaaccagatcacggagctgtccctgtgcatagaccagtgggtgcacgtggaaactctgaacctgtcccgaaatcagctcacctcactgccctcagccatttgcaagctgagcaagctgaagaagctgtacctgaattccaacaagctggactttgacgggctgccctcaggcattggcaagctcaccaacctggaagagttcatggctgccaacaacaacctggagctggtccctgaaagtctctgcaggtgcccaaagctgaggaaacttgtcctgaacaagaaccacctggtgaccctcccagaagccatccatttcctgacggagatcgaggtcctggatgtgcgggagaaccccaacctggtcatgccgcccaagcccgcagaccgtgccgctgagtggtacaacatcgacttctcgctgc

SEQ ID NO: 134768 - DNA, 557 bp, Homo sapiens
  Payload ID: 6329
  Gene Symbol: FLII
  Gene Name: flightless I actin binding protein
  ENST ID: ENST00000577626
  CDS Start-End: 1-354
ctggacctcagcgagaaccgcctggagagcctgcccccgcagatgcgccgcctggtgcacctgcagacgctcgtgctcaatggaaaccccctgctgcatgcacagctccggcagctcccagcgatgacggccctgcagaccctgcacctgcggagcacccagcgcacccagagcaacctgcccaccagcctggagggtctgagcaacctcgcagacgtggatctgtcctgcaatgacctgacacgggtgcccgagtgtctgtacaccctccccagcctgcgccgcctcaacctcagcagcaaccagatcacggagctgtccctgtgcatagaccatcagccatttgcaagctgagcaagctgaagaagctgtacctgaattccaacaagctggactttgacgggctgccctcaggcattggcaagctcaccaacctggaagagttcatggctgccaacaacaacctggagctggtccctgaaagtctctgcaggtgcccaaagctgaggaaacttgtcctgaacaagaaccacctggtgaccctcccagaagccatc

SEQ ID NO: 134769 - DNA, 644 bp, Homo sapiens
  Payload ID: 6329
  Gene Symbol: FLII
  Gene Name: flightless I actin binding protein
  ENST ID: ENST00000581858
  CDS Start-End: 1-71
tgaacaccatgtttgacacctcctacagcaagcaggtgctccaacgagaagggctactttgcagtgactgagaaatgctccgacttttgccaagatgacctggcagatgatgacatcatgttgctagacaatggccaagaggtctacatgtgggtggggacccagactagccaggtggagatcaagctgagcctgaaggcctgccaggtatatatccagcacatgcggtccaaggaacatgagcggccgcgccggctgcgcctggtccgcaagggcaatgagcagcacgcctttacccgctgcttccacgcctggagcgccttctgcaaggccctggcctaagacaggctggcacagccccaggcttggtgaggaagaggaaggggcctcatccactgtctgctagcaaagaatgtactcaggtgacaccacctgctccagccacgtccagtgccacagtccccagtagcctcaagcagcaccaatggggatgaccctgacaggtgccctcaggggtctgggaaatccaactctctccacagtgtgagtgcacgtgtgaagccccctcactcttccgctagggataaagcagatgtggatgccctttaagagatattaaatgcttttattttcaatattaaaaa

SEQ ID NO: 134770 - DNA, 582 bp, Homo sapiens
  Payload ID: 6329
  Gene Symbol: FLII
  Gene Name: flightless I actin binding protein
  ENST ID: ENST00000581349
  CDS Start-End: 184-582
agttttgtcctggccctcctggggcccagaatccagtaggagagacaaatcttaggccaacacttttgtcacgggggggcttaaaattcccattctatgggtgaagaaattgaggcacaatgatgaaatgacttgtctgtgttctcacagatgggcggctacttccctgagaatgtcaaggccatgaccagcctgcggtggctgaagctgaaccgcactggcctctgctacctgcccgaggagctggccgccctgcagaagctggaacacttgtctgtgagccacaacaacctgaccacgcttcatggggagctgtccagcctgccatcgctgcgcgccatcgtggcccgagccaacagtctgaagaattccggagtccccgatgacatcttcaagctagatgatctctcagtcctggacttgagccacaaccagctgacagagtgcccgcgggagctggagaacgccaagaacatgctggtgctgaacctcagccacaacagcatcgacaccatccccaaccagctcttcatcaacctcactgacctactatacctggacctcagcgagaaccgcctggag

SEQ ID NO: 134771 - DNA, 585 bp, Homo sapiens
  Payload ID: 6329
  Gene Symbol: FLII
  Gene Name: flightless I actin binding protein
  ENST ID: ENST00000473425
  CDS Start-End: 288-585
agttttgtcctggccctcctggggcccagaatccagtaggagagacaaatcttaggccaacacttttgtcacgggggggcttaaaattcccattctatgggtgaagaaattgaggcacaatgatgaaatgacttgtctgtgttctcacagatggtgagagttggttctgtggctccccaaaggctcccatgggctggaggagccatagaaggtggtgagcaggggctctgtgcttcaccttgacatccttcccccagggcggctacttccctgagaatgtcaaggccatgaccagcctgcggtggctgaagctgaaccgcactggcctctgctacctgcccgaggagctggccgccctgcagaagctggaacacttgtctgtgagccacaacaacctgaccacgcttcatggggagctgtccagcctgccatcgctgcgcgccatcgtggcccgagccaacagtctgaagaattccggagtccccgatgacatcttcaagctagatgatctctcagtcctggacttgagccacaaccagctgacagagtgcccgcgggagctggagaacgccaagaacatgctgg

SEQ ID NO: 134772 - DNA, 926 bp, Homo sapiens
  Payload ID: 6329
  Gene Symbol: FLII
  Gene Name: flightless I actin binding protein
  ENST ID: ENST00000577398
  CDS Start-End: 1-624
gttccctttgagagtgaggacaaccagggcatcgtgtatgcctgggtgggccgggcatcagaccctgacgaagccaagttggcagaagacatcctgaacaccatgtttgacacctcctacagcaagcaggttatcaacgaaggtgaggagcctgagaacttcttctgggtgggcattggggcacagaagccctatgatgacgatgccgagtacatgaaacacacacgtctcttccggtgctccaacgagaagggctactttgcagtgactgagaaatgctccgacttttgccaagatgacctggcagatgatgacatcatgttgctagacaatggccaagaggtctacatgtgggtggggacccagactagccaggtggagatcaagctgagcctgaaggcctgccaggtaatctgggtggagggagggccgaggtgggcctgtgggcagggcagggtcatcacccaaggctcgctgtccccttgccaggtatatatccagcacatgcggtccaaggaacatgagcggccgcgccggctgcgcctggtccgcaagggcaatgagcagcacgcctttacccgctgcttccacgcctggagcgccttctgcaaggccctggcctaagacaggctggcacagccccaggcttggtgaggaagaggaaggggcctcatccactgtctgctagcaaagaatgtactcaggtgacaccacctgctccagccacgtccagtgccacagtccccagtagcctcaagcagcaccaatggggatgaccctgacaggtgccctcaggggtctgggaaatccaactctctccacagtgtgagtgcacgtgtgaagccccctcactcttccgctagggataaagcagatgtggatgccctttaagagatattaaatgcttttattttcaatattaaaaa

SEQ ID NO: 134773 - DNA, 156 bp, Homo sapiens
  Payload ID: 6329
  Gene Symbol: FLII
  Gene Name: flightless I actin binding protein
  ENST ID: ENST00000628188
  CDS Start-End: 1-156
atggaggccaccggggtgctgccgttcgtgcgtggcgtggacctcagcggcaacgacttcaagatggtgagagttggttctgtggctccccaaaggctcccatgggctggaggagccatagaaggtggtgagcaggggctctgtgcttcaccttga

SEQ ID NO: 134774 - DNA, 1912 bp, Homo sapiens
  Payload ID: 6330
  Gene Symbol: FLOT1
  Gene Name: flotillin 1
  Uniprot ID: O75955
  ENST ID: ENST00000376389
  CDS Start-End: 222-1505
ggcggggcgaagtgggggtgcttagtccgttgcggggggcggggtcgcgtctgccgcagcaacggggtgcggcagggtggggaacgcgggagcggggccagctcccaggaaagctggtctgcgagcggcccctgcccggctcccaggtccctgcgcgaccccgcccttcccgagaccccagccgggctgccgcccgcgtcccggaagctccagcctgaaccatgtttttcacttgtggcccaaatgaggccatggtggtctccgggttctgccgaagccccccagtcatggtggctggagggcgtgtctttgtcctgccctgcatccaacagatccagaggatctctctcaacacactgaccctcaatgtcaagagtgaaaaggtttacactcgccatggggtccccatctcagtcactggcattgcccaggtaaaaatccaggggcagaacaaggagatgttggcggccgcctgtcagatgttcctggggaagacggaggctgagattgcccacattgccctggagacgttagagggccaccagagggccatcatggcccacatgactgtggaggagatctataaggacaggcagaaattctcagaacaggttttcaaagtggcctcctcagacctggtcaacatgggcatcagtgtggttagctacactctgaaggacattcacgatgaccaggactatttgcactctttggggaaggctcgaacagctcaagtccaaaaagatgcacggattggagaagcagaggccaagagagatgctgggatccgggaagctaaagccaagcaggaaaaggtgtctgctcagtacctgagtgagatcgagatggccaaggcacagagagattacgaactgaagaaggccgcctatgacatcgaggtcaacacccgccgagcacaggctgacctggcctatcagcttcaggtggccaagactaagcagcagattgaggagcagcgggtgcaggtgcaggtggtggagcgggcccagcaggtggcagtgcaggagcaggagatcgcccggcgggagaaggagctggaggcccgggtgcggaagccagcggaagcggagcgctacaagctggagcgcctagccgaggcagagaagtcccaactaattatgcaggcggaggcagaagccgcgtctgtgcggatgcgtggggaagctgaggcctttgccataggggcccgagcccgagccgaggctgagcagatggccaagaaggcagaagccttccagctgtaccaagaggctgctcagctggacatgctgctagagaagctgccccaggtggcagaggagatcagtggtcccttgacttcagccaataagatcacactggtgtccagcggcagtgggaccatgggggcagccaaagtgactggggaagtactggacattctaactcgcctgccagagagtgtggaaagactcacaggcgtgagcatctcccaggtgaatcacaagcctttgagaacagcctgagccttcagccctcacagatgcccagcctcatagctgaagttgcctgaatgatcctcctgttgcatgtaacccactggcctccctgagcatgtccattgacagtgaggtcccacccctcatctctccttgccaaatagtttgtgccttgtcttgaagggggttgctccccttgccaacctcacactgctatgattgccaactccagcggtcccatgtcagccttctgatgatcccactccaccccacctcaacttatttaacttcctaattaaatcagactgtttgagcctgttgtctagaatattttcctgaccaagactgagggatgggctggaggttttcaactttgctacccaaataaattgctgtaagtaagtactaataaaacagaagcaactggaaattaa

SEQ ID NO: 134775 - DNA, 1912 bp, Homo sapiens; identical to SEQ ID NO: 134774
  Payload ID: 6330
  Gene Symbol: FLOT1
  Gene Name: flotillin 1
  Uniprot ID: O75955
  ENST ID: ENST00000383382
  CDS Start-End: 222-1505

SEQ ID NO: 134776 - DNA, 1912 bp, Homo sapiens; identical to SEQ ID NO: 134774
  Payload ID: 6330
  Gene Symbol: FLOT1
  Gene Name: flotillin 1
  Uniprot ID: O75955
  ENST ID: ENST00000383562
  CDS Start-End: 222-1505

SEQ ID NO: 134777 - DNA, 856 bp, Homo sapiens
  Payload ID: 6330
  Gene Symbol: FLOT1
  Gene Name: flotillin 1
  ENST ID: ENST00000445669
  CDS Start-End: 141-856
gatgcagactgggagggcctgacgggaaagggaaaggatgggcccctgtggacgccacagcgcgccttccccatccgcaaaggctttccctccctctcctccagctccagcctgaaccatgtttttcacttgtggcccaaatgaggccatggtggtctccggtaaaaatccaggggcagaacaaggagatgttggcggccgcctgtcagatgttcctggggaagacggaggctgagattgcccacattgccctggagacgttagagggccaccagagggccatcatggcccacatgactgtggaggagatctataaggacaggcagaaattctcagaacaggttttcaaagtggcctcctcagacctggtcaacatgggcatcagtgtggttagctacactctgaaggacattcacgatgaccaggactatttgcactctttggggaaggctcgaacagctcaagtccaaaaagatgcacggattggagaagcagaggccaagagagatgctgggatccgggaagctaaagccaagcaggaaaaggtgtctgctcagtacctgagtgagatcgagatggccaaggcacagagagattacgaactgaagaaggccgcctatgacatcgaggtcaacacccgccgagcacaggctgacctggcctatcagcttcaggtggccaagactaagcagcagattgaggagcagcgggtgcaggtgcaggtggtggagcgggcccagcaggtggcagtgcaggagcaggagatcgcccggcgggagaaggagctggaggcccgggtgcggaagccagcggaagcggagcgctacaagctggagcgcctagccgaggcagagaa

SEQ ID NO: 134778 - DNA, 182 bp, Homo sapiens
  Payload ID: 6330
  Gene Symbol: FLOT1
  Gene Name: flotillin 1
  ENST ID: ENST00000445395
  CDS Start-End: 1-182
gtggccaagactaagcagcagattgaggagcagcgggtgcaggtgcaggtggtggagcgggcccagcaggtggcagtgcaggagcaggagatcgcccggcgggagaaggagctggaggcccgggtgcggaagccagcggaagcggagcgctacaagctggagcgcctagccgaggcagagaa

SEQ ID NO: 134779 - DNA, 246 bp, Homo sapiens
  Payload ID: 6330
  Gene Symbol: FLOT1
  Gene Name: flotillin 1
  ENST ID: ENST00000439396
  CDS Start-End: 1-246
gactatttgcactctttggggaaggctcgaacagctcaagtccaaaaagatgcacggattggagaagcagaggccaagagagatgctgggatccgggaagctaaagccaagcaggaaaaggtgtctgctcagtacctgagtgagatcgagatggccaaggcacagagagattacgaactgaagaaggccgcctatgacatcgaggtcaacacccgccgagcacaggctgacctggcctatcagctt

SEQ ID NO: 134780 - DNA, 581 bp, Homo sapiens
  Payload ID: 6330
  Gene Symbol: FLOT1
  Gene Name: flotillin 1
  ENST ID: ENST00000431966
  CDS Start-End: 141-581
gatgcagactgggagggcctgacgggaaagggaaaggatgggcccctgtggacgccacagcgcgccttccccatccgcaaaggctttccctccctctcctccagctccagcctgaaccatgtttttcacttgtggcccaaatgaggccatggtggtctccggtaaaaatccaggggcagaacaaggagatgttggcggccgcctgtcagatgttcctggggaagacggaggctgagattgcccacattgccctggagacgttagagggccaccagagggccatcatggcccacatgactgtggaggagatctataaggacaggcagaaattctcagaacaggttttcaaagtggcctcctcagacctggtcaacatgggcatcagtgtggttagctacactctgaaggacattcacgatgaccaggactatttgcactctttggggaaggctcgaacagctcaagtccaaaaagatgcacggattggagaagcagaggccaagagagatgctgggatccgggaagctaaagccaagcaggaaaaggtgtctgctcagtacctgagtgagatcgagatggcc

SEQ ID NO: 134781 - DNA, 1912 bp, Homo sapiens; identical to SEQ ID NO: 134774
  Payload ID: 6330
  Gene Symbol: FLOT1
  Gene Name: flotillin 1
  Uniprot ID: O75955
  ENST ID: ENST00000444632
  CDS Start-End: 222-1505

SEQ ID NO: 134782 - DNA, 592 bp, Homo sapiens
  Payload ID: 6330
  Gene Symbol: FLOT1
  Gene Name: flotillin 1
  ENST ID: ENST00000411944
  CDS Start-End: 15-592
ctccagcctgaaccatgtttttcacttgtggcccaaatgaggccatggtggtctccgggttctgccgaagccccccagtcatggtggctggagggcgtgtctttgtcctgccctgcatccaacagatccagaggatctctctcaacacactgaccctcaatgtcaagagtgaaaaggtaaaaatccaggggcagaacaaggagatgttggcggccgcctgtcagatgttcctggggaagacggaggctgagattgcccacattgccctggagacgttagagggccaccagagggccatcatggcccacatgactgtggaggagatctataaggacaggcagaaattctcagaacaggttttcaaagtggcctcctcagacctggtcaacatgggcatcagtgtggttagctacactctgaaggacattcacgatgaccaggactatttgcactctttggggaaggctcgaacagctcaagtccaaaaagatgcacggattggagaagcagaggccaagagagatgctgggatccgggaagctaaagccaagcaggaaaaggtgtctgctcagtacctgagtgagatcgagat

SEQ ID NO: 134783 - DNA, 457 bp, Homo sapiens
  Payload ID: 6330
  Gene Symbol: FLOT1
  Gene Name: flotillin 1
  ENST ID: ENST00000455034
  CDS Start-End: 23-457
agggaaaagccttagcggacccatgggtgtagaagggacgggccgtggcggatgcagactgggagggcctgacgggaaagggaaaggatgggcccctgtggacgccacagcgcgccttccccatccgcaaaggctttccctccctctcctccagctccagcctgaaccatgtttttcacttgtggcccaaatgaggccatggtggtctccggactatttgcactctttggggaaggctcgaacagctcaagtccaaaaagatgcacggattggagaagcagaggccaagagagatgctgggatccgggaagctaaagccaagcaggaaaaggtgtctgctcagtacctgagtgagatcgagatggccaaggcacagagagattacgaactgaagaaggccgcctatgacatcgaggtcaacacccgccgagcacaggctgacctggcctatcagctt

SEQ ID NO: 134784 - DNA, 629 bp, Homo sapiens
  Payload ID: 6330
  Gene Symbol: FLOT1
  Gene Name: flotillin 1
  ENST ID: ENST00000428438
  CDS Start-End: 73-629
gagtgggggaggggagatggagcctggggctgccgagaagcagggagagaggggaaagctccagcctgaaccatgtttttcacttgtggcccaaatgaggccatggtggtctccgggttctgccgaagccccccagtcatggtggctggagggcgtgtctttgtcctgccctgcatccaacagatccagaggatctctctcaacacactgaccctcaatgtcaagagtgaaaaggtttacactcgccatggggtccccatctcagtcactggcattgcccaggtaaaaatccaggggcagaacaaggagatgttggcggccgcctgtcagatgttcctggggaagacggaggctgagattgcccacattgccctggagacgttagagggccaccagagggccatcatggcccacatgactgtggaggagatctataaggacaggcagaaattctcagaacaggttttcaaagtggcctcctcagacctggtcaacatgggcatcagtgtggttagctacactctgaaggacattcacgatgaccaggactatttgcactctttggggaaggctcgaacagctcaagtccaaaaagatgcacggattggagaagcagaggccaagagaga

SEQ ID NO: 134785 - DNA, 717 bp, Homo sapiens
  Payload ID: 6330
  Gene Symbol: FLOT1
  Gene Name: flotillin 1
  ENST ID: ENST00000430384
  CDS Start-End: 88-717
gaaaggatgggcccctgtggacgccacagcgcgccttccccatccgcaaaggctttccctccctctcctccagctccagcctgaaccatgtttttcacttgtggcccaaatgaggccatggtggtctccgggttctgccgaagccccccagtcatggtggctggagggcgtgtctttgtcctgccctgcatccaacagatccagaggatctctctcaacacactgaccctcaatgtcaagagtgaaaaggtttacactcgccatggggtccccatctcagtcactggcattgcccaggtaaaaatccaggggcagaacaaggagatgttggcggccgcctgtcagatgttcctggggaagacggaggctgagattgcccacattgccctggagacgttagagggccaccagagggccatcatggcccacatgactgtggaggagatctataaggacaggcagaaattctcagaacaggttttcaaagtggcctcctcagacctggtcaacatgggcatcagtgtggttagctacactctgaaggacattcacgatgaccaggactatttgcactctttggggaaggctcgaacagctcaagtccaaaaagatgcacggattggagaagcagaggccaagagagatgctgggatccgggaagctaaagccaagcaggaaaaggtgtctgctcagtacctgagtgagatcgagatggcc

SEQ ID NO: 134786 - DNA, 792 bp, Homo sapiens
  Payload ID: 6330
  Gene Symbol: FLOT1
  Gene Name: flotillin 1
  ENST ID: ENST00000421565
  CDS Start-End: 88-792
gaaaggatgggcccctgtggacgccacagcgcgccttccccatccgcaaaggctttccctccctctcctccagctccagcctgaaccatgtttttcacttgtggcccaaatgaggccatggtggtctccgggttctgccgaagccccccagtcatggtggctggagggcgtgtctttgtcctgccctgcatccaacagatccagaggatctctctcaacacactgaccctcaatgtcaagagtgaaaaggtttacactcgccatggggtccccatctcagtcactggcattgcccaggtaaaaatccaggggcagaacaaggagatgttggcggccgcctgtcagatgttcctggggaagacggaggctgagattgcccacattgccctggagacgttagagggccaccagagggccatcatggcccacatgactgtggaggagatctataaggacaggcagaaattctcagaacaggttttcaaagtggcctcctcagacctggtcaacatgggcatcagtgtggttagctacactctgaaggacattcacgatgaccaggactatttgcactctttggggaaggctcgaacagctcaagtccaaaaagatgcacggattggagaagcagaggccaagagagatgctgggatccgggaagctaaagccaagcaggaaaaggtgtctgctcagtacctgagtgagatcgagatggccaaggcacagagagattacgaactgaagaaggccgcctatgacatcgaggtcaacacccgccgagcacaggctgac

SEQ ID NO: 134787 - DNA, 629 bp, Homo sapiens; identical to SEQ ID NO: 134784
  Payload ID: 6330
  Gene Symbol: FLOT1
  Gene Name: flotillin 1
  ENST ID: ENST00000454845
  CDS Start-End: 73-629

SEQ ID NO: 134788 - DNA, 1912 bp, Homo sapiens; identical to SEQ ID NO: 134774
  Payload ID: 6330
  Gene Symbol: FLOT1
  Gene Name: flotillin 1
  Uniprot ID: O75955
  ENST ID: ENST00000436822
  CDS Start-End: 222-1505

SEQ ID NO: 134789 - DNA, 592 bp, Homo sapiens; identical to SEQ ID NO: 134782
  Payload ID: 6330
  Gene Symbol: FLOT1
  Gene Name: flotillin 1
  ENST ID: ENST00000416389
  CDS Start-End: 15-592

SEQ ID NO: 134790 - DNA, 592 bp, Homo sapiens; identical to SEQ ID NO: 134782
  Payload ID: 6330
  Gene Symbol: FLOT1
  Gene Name: flotillin 1
  ENST ID: ENST00000445319
  CDS Start-End: 15-592

SEQ ID NO: 134791 - DNA, 547 bp, Homo sapiens
  Payload ID: 6330
  Gene Symbol: FLOT1
  Gene Name: flotillin 1
  ENST ID: ENST00000432428
  CDS Start-End: 1-547
gtaaaaatccaggggcagaacaaggagatgttggcggccgcctgtcagatgttcctggggaagacggaggctgagattgcccacattgccctggagacgttagagggccaccagagggccatcatggcccacatgactgtggaggagatctataaggacaggcagaaattctcagaacaggttttcaaagtggcctcctcagacctggtcaacatgggcatcagtgtggttagctacactctgaaggacattcacgatgaccaggactatttgcactctttggggaaggctcgaacagctcaagtccaaaaagatgcacggattggagaagcagaggccaagagagatgctgggatccgggaagctaaagccaagcaggaaaaggtgtctgctcagtacctgagtgagatcgagatggccaaggcacagagagattacgaactgaagaaggccgcctatgacatcgaggtcaacacccgccgagcacaggctgacctggcctatcagcttcaggtggccaagactaagcagcagattgaggagcagc

SEQ ID NO: 134792 - DNA, 416 bp, Homo sapiens
  Payload ID: 6330
  Gene Symbol: FLOT1
  Gene Name: flotillin 1
  ENST ID: ENST00000422714
  CDS Start-End: 1-416
gtaaaaatccaggggcagaacaaggagatgttggcggccgcctgtcagatgttcctggggaagacggaggctgagattgcccacattgccctggagacgttagagggccaccagagggccatcatggcccacatgactgtggaggagatctataaggacaggcagaaattctcagaacaggttttcaaagtggcctcctcagacctggtcaacatgggcatcagtgtggttagctacactctgaaggacattcacgatgaccaggactatttgcactctttggggaaggctcgaacagctcaagtccaaaaagatgcacggattggagaagcagaggccaagagagatgctgggatccgggaagctaaagccaagcaggaaaaggtgtctgctcagtacctgagtgagatcgagat

SEQ ID NO: 134793 - DNA, 888 bp, Homo sapiens
  Payload ID: 6330
  Gene Symbol: FLOT1
  Gene Name: flotillin 1
  ENST ID: ENST00000442932
  CDS Start-End: 132-888
tggggctgccgagaagcagggagagaggggaaaggtctgcaggcctctgggcgcgggggacctttatcaaagggagcggcgaggggaagggagggaccatacgcaggcggagaagagctccagcctgaaccatgtttttcacttgtggcccaaatgaggccatggtggtctccgggttctgccgaagccccccagtcatggtggctggagggcgtgtctttgtcctgccctgcatccaacagatccagaggatctctctcaacacactgaccctcaatgtcaagagtgaaaaggtttacactcgccatggggtccccatctcagtcactggcattgcccaggtaaaaatccaggggcagaacaaggagatgttggcggccgcctgtcagatgttcctggggaagacggaggctgagattgcccacattgccctggagacgttagagggccaccagagggccatcatggcccacatgactgtggaggagatctataaggacaggcagaaattctcagaacaggttttcaaagtggcctcctcagacctggtcaacatgggcatcagtgtggttagctacactctgaaggacattcacgatgaccaggactatttgcactctttggggaaggctcgaacagctcaagtccaaaaagatgcacggattggagaagcagaggccaagagagatgctgggatccgggaagctaaagccaagcaggaaaaggtgtctgctcagtacctgagtgagatcgagatggccaaggcacagagagattacgaactgaagaaggccgcctatgacatcgaggtcaacacccgccgagcacaggctgacctggcctatcagcttcaggtggccaagactaagcagcagattgaggagcagc

SEQ ID NO: 134794 - DNA, 888 bp, Homo sapiens; identical to SEQ ID NO: 134793
  Payload ID: 6330
  Gene Symbol: FLOT1
  Gene Name: flotillin 1
  ENST ID: ENST00000439376
  CDS Start-End: 132-888

SEQ ID NO: 134795 - DNA, 678 bp, Homo sapiens
  Payload ID: 6330
  Gene Symbol: FLOT1
  Gene Name: flotillin 1
  ENST ID: ENST00000420604
  CDS Start-End: 1-271
ggccaagaaggcagaagccttccagctgtaccaagaggctgctcagctggacatgctgctagagaagctgccccaggtggcagaggagatcagtggtcccttgacttcagccaataagatcacactggtgtccagcggcagtgggaccatgggggcagccaaagtgactggggaagtactggacattctaactcgcctgccagagagtgtggaaagactcacaggcgtgagcatctcccaggtgaatcacaagcctttgagaacagcctgagccttcagccctcacagatgcccagcctcatagctgaagttgcctgaatgatcctcctgttgcatgtaacccactggcctccctgagcatgtccattgacagtgaggtcccacccctcatctctccttgccaaatagtttgtgccttgtcttgaagggggttgctccccttgccaacctcacactgctatgattgccaactccagcggtcccatgtcagccttctgatgatcccactccaccccacctcaacttatttaacttcctaattaaatcagactgtttgagcctgttgtctagaatattttcctgaccaagactgagggatgggctggaggttttcaactttgctacccaaataaattgctgtaagtaagtactaataaaacagaagcaactggaaattaa

SEQ ID NO: 134796 - DNA, 856 bp, Homo sapiens; identical to SEQ ID NO: 134777
  Payload ID: 6330
  Gene Symbol: FLOT1
  Gene Name: flotillin 1
  ENST ID: ENST00000413165
  CDS Start-End: 141-856

SEQ ID NO: 134797 - DNA, 792 bp, Homo sapiens; identical to SEQ ID NO: 134786
  Payload ID: 6330
  Gene Symbol: FLOT1
  Gene Name: flotillin 1
  ENST ID: ENST00000436197
  CDS Start-End: 88-792

SEQ ID NO: 134798 - DNA, 856 bp, Homo sapiens; identical to SEQ ID NO: 134777
  Payload ID: 6330
  Gene Symbol: FLOT1
  Gene Name: flotillin 1
  ENST ID: ENST00000444497
  CDS Start-End: 141-856

SEQ ID NO: 134799 - DNA, 592 bp, Homo sapiens; identical to SEQ ID NO: 134782
  Payload ID: 6330
  Gene Symbol: FLOT1
  Gene Name: flotillin 1
  ENST ID: ENST00000411848
  CDS Start-End: 15-592

SEQ ID NO: 134800 - DNA, 347 bp, Homo sapiens
  Payload ID: 6330
  Gene Symbol: FLOT1
  Gene Name: flotillin 1
  ENST ID: ENST00000436025
  CDS Start-End: 1-347
gtaaaaatccaggggcagaacaaggagatgttggcggccgcctgtcagatgttcctggggaagacggaggctgagattgcccacattgccctggagacgttagagggccaccagagggccatcatggcccacatgactgtggaggagatctataaggacaggcagaaattctcagaacaggttttcaaagtggcctcctcagacctggtcaacatgggcatcagtgtggttagctacactctgaaggacattcacgatgaccaggactatttgcactctttggggaaggctcgaacagctcaagtccaaaaagatgcacggattggagaagcagaggccaagagaga

SEQ ID NO: 134801 - DNA, 792 bp, Homo sapiens; identical to SEQ ID NO: 134786
  Payload ID: 6330
  Gene Symbol: FLOT1
  Gene Name: flotillin 1
  ENST ID: ENST00000445853
  CDS Start-End: 88-792

SEQ ID NO: 134802 - DNA, 495 bp, Homo sapiens
  Payload ID: 6330
  Gene Symbol: FLOT1
  Gene Name: flotillin 1
  ENST ID: ENST00000437093
  CDS Start-End: 1-495
gtaaaaatccaggggcagaacaaggagatgttggcggccgcctgtcagatgttcctggggaagacggaggctgagattgcccacattgccctggagacgttagagggccaccagagggccatcatggcccacatgactgtggaggagatctataaggacaggcagaaattctcagaacaggttttcaaagtggcctcctcagacctggtcaacatgggcatcagtgtggttagctacactctgaaggacattcacgatgaccaggactatttgcactctttggggaaggctcgaacagctcaagtccaaaaagatgcacggattggagaagcagaggccaagagagatgctgggatccgggaagctaaagccaagcaggaaaaggtgtctgctcagtacctgagtgagatcgagatggccaaggcacagagagattacgaactgaagaaggccgcctatgacatcgaggtcaacacccgccgagcacaggctgac

SEQ ID NO: 134803 - DNA, 629 bp, Homo sapiens; identical to SEQ ID NO: 134784
  Payload ID: 6330
  Gene Symbol: FLOT1
  Gene Name: flotillin 1
  ENST ID: ENST00000444068
  CDS Start-End: 73-629

SEQ ID NO: 134804 - DNA, 888 bp, Homo sapiens; identical to SEQ ID NO: 134793
  Payload ID: 6330
  Gene Symbol: FLOT1
  Gene Name: flotillin 1
  ENST ID: ENST00000438162
  CDS Start-End: 132-888

SEQ ID NO: 134805 - DNA, 629 bp, Homo sapiens; identical to SEQ ID NO: 134784
  Payload ID: 6330
  Gene Symbol: FLOT1
  Gene Name: flotillin 1
  ENST ID: ENST00000439743
  CDS Start-End: 73-629

SEQ ID NO: 134806 - DNA, 34 bp, Homo sapiens
  Payload ID: 6330
  Gene Symbol: FLOT1
  Gene Name: flotillin 1
  ENST ID: ENST00000446416
  CDS Start-End: 1-34
gtggccaagactaagcagcagattgaggagcagc

SEQ ID NO: 134807 - DNA, 792 bp, Homo sapiens; identical to SEQ ID NO: 134786
  Payload ID: 6330
  Gene Symbol: FLOT1
  Gene Name: flotillin 1
  ENST ID: ENST00000445383
  CDS Start-End: 88-792

SEQ ID NO: 134808 - DNA, 761 bp, Homo sapiens
  Payload ID: 6330
  Gene Symbol: FLOT1
  Gene Name: flotillin 1
  ENST ID: ENST00000457733
  CDS Start-End: 132-761
tggggctgccgagaagcagggagagaggggaaaggtctgcaggcctctgggcgcgggggacctttatcaaagggagcggcgaggggaagggagggaccatacgcaggcggagaagagctccagcctgaaccatgtttttcacttgtggcccaaatgaggccatggtggtctccgggttctgccgaagccccccagtcatggtggctggagggcgtgtctttgtcctgccctgcatccaacagatccagaggatctctctcaacacactgaccctcaatgtcaagagtgaaaaggtttacactcgccatggggtccccatctcagtcactggcattgcccaggtaaaaatccaggggcagaacaaggagatgttggcggccgcctgtcagatgttcctggggaagacggaggctgagattgcccacattgccctggagacgttagagggccaccagagggccatcatggcccacatgactgtggaggagatctataaggacaggcagaaattctcagaacaggttttcaaagtggcctcctcagacctggtcaacatgggcatcagtgtggttagctacactctgaaggacattcacgatgaccaggactatttgcactctttggggaaggctcgaacagctcaagtccaaaaagatgcacggattggagaagcagaggccaagagagatgctgggatccgggaagctaaagccaagcaggaaaaggtgtctgctcagtacctgagtgagatcgagatggcc

SEQ ID NO: 134809 - DNA, 457 bp, Homo sapiens; identical to SEQ ID NO: 134783
  Payload ID: 6330
  Gene Symbol: FLOT1
  Gene Name: flotillin 1
  ENST ID: ENST00000418160
  CDS Start-End: 23-457

SEQ ID NO: 134810 - DNA, 367 bp, Homo sapiens
  Payload ID: 6330
  Gene Symbol: FLOT1
  Gene Name: flotillin 1
  ENST ID: ENST00000426417
  CDS Start-End: 23-367
agggaaaagccttagcggacccatgggtgtagaagggacgggccgtggcggatgcagactgggagggcctgacgggaaagggaaaggatgggcccctgtggacgccacagcgcgccttccccatccgcaaaggctttccctccctctcctccagctccagcctgaaccatgtttttcacttgtggcccaaatgaggccatggtggtctccggactatttgcactctttggggaaggctcgaacagctcaagtccaaaaagatgcacggattggagaagcagaggccaagagagatgctgggatccgggaagctaaagccaagcaggaaaaggtgtctgctcagtacctgagtgagatcgagatggcc

SEQ ID NO: 134811 - DNA, 592 bp, Homo sapiens; identical to SEQ ID NO: 134782
  Payload ID: 6330
  Gene Symbol: FLOT1
  Gene Name: flotillin 1
  ENST ID: ENST00000458306
  CDS Start-End: 15-592

SEQ ID NO: 134812 - DNA, 629 bp, Homo sapiens; identical to SEQ ID NO: 134784
  Payload ID: 6330
  Gene Symbol: FLOT1
  Gene Name: flotillin 1
  ENST ID: ENST00000424683
  CDS Start-End: 73-629

SEQ ID NO: 134813 - DNA, 851 bp, Homo sapiens
  Payload ID: 6330
  Gene Symbol: FLOT1
  Gene Name: flotillin 1
  ENST ID: ENST00000430843
  CDS Start-End: 222-851
ggcggggcgaagtgggggtgcttagtccgttgcggggggcggggtcgcgtctgccgcagcaacggggtgcggcagggtggggaacgcgggagcggggccagctcccaggaaagctggtctgcgagcggcccctgcccggctcccaggtccctgcgcgaccccgcccttcccgagaccccagccgggctgccgcccgcgtcccggaagctccagcctgaaccatgtttttcacttgtggcccaaatgaggccatggtggtctccgggttctgccgaagccccccagtcatggtggctggagggcgtgtctttgtcctgccctgcatccaacagatccagaggatctctctcaacacactgaccctcaatgtcaagagtgaaaaggtttacactcgccatggggtccccatctcagtcactggcattgcccaggtaaaaatccaggggcagaacaaggagatgttggcggccgcctgtcagatgttcctggggaagacggaggctgagattgcccacattgccctggagacgttagagggccaccagagggccatcatggcccacatgactgtggaggagatctataaggacaggcagaaattctcagaacaggttttcaaagtggcctcctcagacctggtcaacatgggcatcagtgtggttagctacactctgaaggacattcacgatgaccaggactatttgcactctttggggaaggctcgaacagctcaagtccaaaaagatgcacggattggagaagcagaggccaagagagatgctgggatccgggaagctaaagccaagcaggaaaaggtgtctgctcagtacctgagtgagatcgagatggcc

SEQ ID NO: 134814 - DNA, 457 bp, Homo sapiens; identical to SEQ ID NO: 134783
  Payload ID: 6330
  Gene Symbol: FLOT1
  Gene Name: flotillin 1
  ENST ID: ENST00000427784
  CDS Start-End: 23-457

SEQ ID NO: 134815 - DNA, 1481 bp, Homo sapiens
  Payload ID: 6330
  Gene Symbol: FLOT1
  Gene Name: flotillin 1
  ENST ID: ENST00000446072
  CDS Start-End: 1-1074
gtaaaaatccaggggcagaacaaggagatgttggcggccgcctgtcagatgttcctggggaagacggaggctgagattgcccacattgccctggagacgttagagggccaccagagggccatcatggcccacatgactgtggaggagatctataaggacaggcagaaattctcagaacaggttttcaaagtggcctcctcagacctggtcaacatgggcatcagtgtggttagctacactctgaaggacattcacgatgaccaggactatttgcactctttggggaaggctcgaacagctcaagtccaaaaagatgcacggattggagaagcagaggccaagagagatgctgggatccgggaagctaaagccaagcaggaaaaggtgtctgctcagtacctgagtgagatcgagatggccaaggcacagagagattacgaactgaagaaggccgcctatgacatcgaggtcaacacccgccgagcacaggctgacctggcctatcagcttcaggtggccaagactaagcagcagattgaggagcagcgggtgcaggtgcaggtggtggagcgggcccagcaggtggcagtgcaggagcaggagatcgcccggcgggagaaggagctggaggcccgggtgcggaagccagcggaagcggagcgctacaagctggagcgcctagccgaggcagagaagtcccaactaattatgcaggcggaggcagaagccgcgtctgtgcggatgcgtggggaagctgaggcctttgccataggggcccgagcccgagccgaggctgagcagatggccaagaaggcagaagccttccagctgtaccaagaggctgctcagctggacatgctgctagagaagctgccccaggtggcagaggagatcagtggtcccttgacttcagccaataagatcacactggtgtccagcggcagtgggaccatgggggcagccaaagtgactggggaagtactggacattctaactcgcctgccagagagtgtggaaagactcacaggcgtgagcatctcccaggtgaatcacaagcctttgagaacagcctgagccttcagccctcacagatgcccagcctcatagctgaagttgcctgaatgatcctcctgttgcatgtaacccactggcctccctgagcatgtccattgacagtgaggtcccacccctcatctctccttgccaaatagtttgtgccttgtcttgaagggggttgctccccttgccaacctcacactgctatgattgccaactccagcggtcccatgtcagccttctgatgatcccactccaccccacctcaacttatttaacttcctaattaaatcagactgtttgagcctgttgtctagaatattttcctgaccaagactgagggatgggctggaggttttcaactttgctacccaaataaattgctgtaagtaagtactaataaaacagaagcaactggaaattaa

SEQ ID NO: 134816 - DNA, 888 bp, Homo sapiens; identical to SEQ ID NO: 134793
  Payload ID: 6330
  Gene Symbol: FLOT1
  Gene Name: flotillin 1
  ENST ID: ENST00000454249
  CDS Start-End: 132-888

SEQ ID NO: 134817 - DNA, 592 bp, Homo sapiens; identical to SEQ ID NO: 134782
  Payload ID: 6330
  Gene Symbol: FLOT1
  Gene Name: flotillin 1
  ENST ID: ENST00000416018
  CDS Start-End: 15-592

SEQ ID NO: 134818 - DNA, 629 bp, Homo sapiens; identical to SEQ ID NO: 134784
  Payload ID: 6330
  Gene Symbol: FLOT1
  Gene Name: flotillin 1
  ENST ID: ENST00000456844
  CDS Start-End: 73-629

SEQ ID NO: 134819 - DNA, 792 bp, Homo sapiens; identical to SEQ ID NO: 134786
  Payload ID: 6330
  Gene Symbol: FLOT1
  Gene Name: flotillin 1
  ENST ID: ENST00000454773
  CDS Start-End: 88-792

SEQ ID NO: 134820 - DNA, 457 bp, Homo sapiens; identical to SEQ ID NO: 134783
  Payload ID: 6330
  Gene Symbol: FLOT1
  Gene Name: flotillin 1
  ENST ID: ENST00000438134
  CDS Start-End: 23-457

SEQ ID NO: 134821 - DNA, 856 bp, Homo sapiens; identical to SEQ ID NO: 134777
  Payload ID: 6330
  Gene Symbol: FLOT1
  Gene Name: flotillin 1
  ENST ID: ENST00000456042
  CDS Start-End: 141-856

SEQ ID NO: 134822 - DNA, 695 bp, Homo sapiens
  Payload ID: 6330
  Gene Symbol: FLOT1
  Gene Name: flotillin 1
  ENST ID: ENST00000457133
  CDS Start-End: 1-695
gtaaaaatccaggggcagaacaaggagatgttggcggccgcctgtcagatgttcctggggaagacggaggctgagattgcccacattgccctggagacgttagagggccaccagagggccatcatggcccacatgactgtggaggagatctataaggacaggcagaaattctcagaacaggttttcaaagtggcctcctcagacctggtcaacatgggcatcagtgtggttagctacactctgaaggacattcacgatgaccaggactatttgcactctttggggaaggctcgaacagctcaagtccaaaaagatgcacggattggagaagcagaggccaagagagatgctgggatccgggaagctaaagccaagcaggaaaaggtgtctgctcagtacctgagtgagatcgagatggccaaggcacagagagattacgaactgaagaaggccgcctatgacatcgaggtcaacacccgccgagcacaggctgacctggcctatcagcttcaggtggccaagactaagcagcagattgaggagcagcgggtgcaggtgcaggtggtggagcgggcccagcaggtggcagtgcaggagcaggagatcgcccggcgggagaaggagctggaggcccgggtgcggaagccagcggaagcggagcgctacaagctggagcgcctagccgaggcagagaa

SEQ ID NO: 134823 - DNA, 968 bp, Homo sapiens
  Payload ID: 6330
  Gene Symbol: FLOT1
  Gene Name: flotillin 1
  ENST ID: ENST00000427701
  CDS Start-End: 1-561
gtggccaagactaagcagcagattgaggagcagcgggtgcaggtgcaggtggtggagcgggcccagcaggtggcagtgcaggagcaggagatcgcccggcgggagaaggagctggaggcccgggtgcggaagccagcggaagcggagcgctacaagctggagcgcctagccgaggcagagaagtcccaactaattatgcaggcggaggcagaagccgcgtctgtgcggatgcgtggggaagctgaggcctttgccataggggcccgagcccgagccgaggctgagcagatggccaagaaggcagaagccttccagctgtaccaagaggctgctcagctggacatgctgctagagaagctgccccaggtggcagaggagatcagtggtcccttgacttcagccaataagatcacactggtgtccagcggcagtgggaccatgggggcagccaaagtgactggggaagtactggacattctaactcgcctgccagagagtgtggaaagactcacaggcgtgagcatctcccaggtgaatcacaagcctttgagaacagcctgagccttcagccctcacagatgcccagcctcatagctgaagttgcctgaatgatcctcctgttgcatgtaacccactggcctccctgagcatgtccattgacagtgaggtcccacccctcatctctccttgccaaatagtttgtgccttgtcttgaagggggttgctccccttgccaacctcacactgctatgattgccaactccagcggtcccatgtcagccttctgatgatcccactccaccccacctcaacttatttaacttcctaattaaatcagactgtttgagcctgttgtctagaatattttcctgaccaagactgagggatgggctggaggttttcaactttgctacccaaataaattgctgtaagtaagtactaataaaacagaagcaactggaaattaa

SEQ ID NO: 134824 - DNA, 457 bp, Homo sapiens; identical to SEQ ID NO: 134783
  Payload ID: 6330
  Gene Symbol: FLOT1
  Gene Name: flotillin 1
  ENST ID: ENST00000411778
  CDS Start-End: 23-457

SEQ ID NO: 134825 - DNA, 856 bp, Homo sapiens; identical to SEQ ID NO: 134777
  Payload ID: 6330
  Gene Symbol: FLOT1
  Gene Name: flotillin 1
  ENST ID: ENST00000422636
  CDS Start-End: 141-856

SEQ ID NO: 134826 - DNA, 888 bp, Homo sapiens; identical to SEQ ID NO: 134793
  Payload ID: 6330
  Gene Symbol: FLOT1
  Gene Name: flotillin 1
  ENST ID: ENST00000431913
  CDS Start-End: 132-888

SEQ ID NO: 134827 - DNA, 2756 bp, Homo sapiens
  Payload ID: 6331
  Gene Symbol: FLOT2
  Gene Name: flotillin 2
  ENST ID: ENST00000394906
  CDS Start-End: 79-1530
gggcgcggccggcgctgcagacccgctgctgttgtccgggtctgtgcggtcccgagggccctccgtgccgccggcgccatgggcaattgccacacggtggggcccaacgaggcgctggtggtttcagggggctgttgtggttccgactataaacagtacgtgtttggcggctgggcctgggcctggtggtgtatctccgacactcagagactgtctctggaggttatgaccatcctgtgtcgctgtgagaatattgagacgtcggagggggttccactattcgtaacaggggttgcacaggtcccttgcccttgcctattggactgcaagtggggaaacagcaagggattctggaagctctgccaagtctgccagatttccctagagattatgacgttgcagccccgctgcgaggacgtagagacggccgagggggtagctttaactgtgacgggtgtcgcccaggtgaagatcatgacggagaaggaactcctggccgtggcttgtgagcagtttctgggtaagaatgtgcaggacatcaaaaacgtcgtcctgcagaccctggagggacatctgcgctccatcctcgggaccctgacagtggagcagatttatcaggaccgggaccagtttgccaagctggtgcgggaggtggcagcccctgatgttggccgcatgggcattgagatcctcagcttcaccatcaaggacgtgtatgacaaagtggactatctgagctccctgggcaagacgcagactgccgtggtgcagagagatgctgacattggcgtggccgaggctgaacgggacgcaggcatccgggaagctgagtgcaagaaggagatgctggatgtgaagttcatggcagacaccaagattgctgactctaagcgagccttcgagctgcaaaagtcagccttcagtgaggaggttaacatcaagacagctgaggcccagttggcctatgagctgcagggggcccgtgaacagcagaagatccggcaggaagagattgagattgaggttgtgcagcgcaagaaacagattgccgtggaggcacaggagatcctgcgtacggacaaggagctcatcgctacagtgcgccggcctgccgaggccgaggcccaccgcatccagcagattgccgagggtgaaaaggtgaagcaggtcctcttggcacaggcagaggctgagaagatccgcaaaatcggggaggcggaagcggcagtcatcgaggcgatgggcaaggcagaggctgagcggatgaagctcaaggcagaagcctaccagaaatacggggatgcagccaagatggccttggtgctagaggccctgccccagattgctgccaaaatcgctgccccacttaccaaggtcgatgagattgtggtcctcagtggagacaacagtaaggtcacatcagaagtgaaccgactgctggccgagctgcctgcctctgtgcatgccctcacaggcgtggacctgtctaagatacccctgatcaagaaggccactggtgtgcaggtgtgaggctcctgcaggcccactctcttcagcagccacccggccctccctccagcacccgttttaatcccacagaacaacgggaacgttactgactctggtgccttatctcgaagggaccagaagtgctgcgtgttcaggccatctctggctgtcttcctgtctctcctgtctgtccacctcctcctcttcctctcctttaccccactttcactgccactttcatcaggtttgtgtctcatctccctgcgtgtcttttcctttgtctgtctttttctttcccccatgcacatcatgtagattaagctgaagatgtttattacaatcactctctgtggggggtggccctgctgctcctcagaatcctggtgccttgaagttctctgtgcatctgtccatcctccctatggccctggccagagctcagcatgggcaggggttctgggtaggacggtcactgtcctctctcctggactggtcttcccagccctaaaccctgccccaggaagcccacagcctcacctgctgctgcccctctaggtctgggcagccatgacctgcagggcccagagacactgtccttcccctcatccacccaaggccccagccagcgctcataccctgtcctttctccctgaccccaagggcacagaggcaaggcctcctgtctacagcagcttcctcagtttcctactgccttaggaggcccctgcttgtgctcagggaaggcctcttcatgggcatgttcctgctggggcggtgcggtttggtcccaactctgctaagttttctgagatgagggtctagccctgttggggacagaaaagtgtgtagaccttcttcctgctagggctgcactgtcctgggtgttgggcccttctggtggacaaggctgtgccaaccctgtacagaatcgagtgctgtagcctggccagaccccagagcccttgtgccatctttcttcctggccagagtgatggggttccagccatggggaagcaacccaatcctctgtctccttgctccaatggaggcagaagagcccaggacccaagcgtcttggcaggggtgctgtgaatgtccagtggtcccagctccccaccctggccctgccccagcctgtgtagctcttcctgcatgtggatgctgcatgtctggtctggggcttggatgttgcactgccccactgcctgtcccttctggtaaaataaagaactcttaatgcccacccc

SEQ ID NO: 134828 - DNA, 2618 bp, Homo sapiens
  Payload ID: 6331
  Gene Symbol: FLOT2
  Gene Name: flotillin 2
  Uniprot ID: Q14254
  ENST ID: ENST00000394908
  CDS Start-End: 106-1392
cggccgctgggggtggcgggataggctgggcgcggccggcgctgcagacccgctgctgttgtccgggtctgtgcggtcccgagggccctccgtgccgccggcgccatgggcaattgccacacggtggggcccaacgaggcgctggtggtttcagggggctgttgtggttccgactataaacagtacgtgtttggcggctgggcctgggcctggtggtgtatctccgacactcagaggatttccctagagattatgacgttgcagccccgctgcgaggacgtagagacggccgagggggtagctttaactgtgacgggtgtcgcccaggtgaagatcatgacggagaaggaactcctggccgtggcttgtgagcagtttctgggtaagaatgtgcaggacatcaaaaacgtcgtcctgcagaccctggagggacatctgcgctccatcctcgggaccctgacagtggagcagatttatcaggaccgggaccagtttgccaagctggtgcgggaggtggcagcccctgatgttggccgcatgggcattgagatcctcagcttcaccatcaaggacgtgtatgacaaagtggactatctgagctccctgggcaagacgcagactgccgtggtgcagagagatgctgacattggcgtggccgaggctgaacgggacgcaggcatccgggaagctgagtgcaagaaggagatgctggatgtgaagttcatggcagacaccaagattgctgactctaagcgagccttcgagctgcaaaagtcagccttcagtgaggaggttaacatcaagacagctgaggcccagttggcctatgagctgcagggggcccgtgaacagcagaagatccggcaggaagagattgagattgaggttgtgcagcgcaagaaacagattgccgtggaggcacaggagatcctgcgtacggacaaggagctcatcgctacagtgcgccggcctgccgaggccgaggcccaccgcatccagcagattgccgagggtgaaaaggtgaagcaggtcctcttggcacaggcagaggctgagaagatccgcaaaatcggggaggcggaagcggcagtcatcgaggcgatgggcaaggcagaggctgagcggatgaagctcaaggcagaagcctaccagaaatacggggatgcagccaagatggccttggtgctagaggccctgccccagattgctgccaaaatcgctgccccacttaccaaggtcgatgagattgtggtcctcagtggagacaacagtaaggtcacatcagaagtgaaccgactgctggccgagctgcctgcctctgtgcatgccctcacaggcgtggacctgtctaagatacccctgatcaagaaggccactggtgtgcaggtgtgaggctcctgcaggcccactctcttcagcagccacccggccctccctccagcacccgttttaatcccacagaacaacgggaacgttactgactctggtgccttatctcgaagggaccagaagtgctgcgtgttcaggccatctctggctgtcttcctgtctctcctgtctgtccacctcctcctcttcctctcctttaccccactttcactgccactttcatcaggtttgtgtctcatctccctgcgtgtcttttcctttgtctgtctttttctttcccccatgcacatcatgtagattaagctgaagatgtttattacaatcactctctgtggggggtggccctgctgctcctcagaatcctggtgccttgaagttctctgtgcatctgtccatcctccctatggccctggccagagctcagcatgggcaggggttctgggtaggacggtcactgtcctctctcctggactggtcttcccagccctaaaccctgccccaggaagcccacagcctcacctgctgctgcccctctaggtctgggcagccatgacctgcagggcccagagacactgtccttcccctcatccacccaaggccccagccagcgctcataccctgtcctttctccctgaccccaagggcacagaggcaaggcctcctgtctacagcagcttcctcagtttcctactgccttaggaggcccctgcttgtgctcagggaaggcctcttcatgggcatgttcctgctggggcggtgcggtttggtcccaactctgctaagttttctgagatgagggtctagccctgttggggacagaaaagtgtgtagaccttcttcctgctagggctgcactgtcctgggtgttgggcccttctggtggacaaggctgtgccaaccctgtacagaatcgagtgctgtagcctggccagaccccagagcccttgtgccatctttcttcctggccagagtgatggggttccagccatggggaagcaacccaatcctctgtctccttgctccaatggaggcagaagagcccaggacccaagcgtcttggcaggggtgctgtgaatgtccagtggtcccagctccccaccctggccctgccccagcctgtgtagctcttcctgcatgtggatgctgcatgtctggtctggggcttggatgttgcactgccccactgcctgtcccttctggtaaaataaagaactcttaatgcccacccc

SEQ ID NO: 134829 - DNA, 2679 bp, Homo sapiens
  Payload ID: 6331
  Gene Symbol: FLOT2
  Gene Name: flotillin 2
  ENST ID: ENST00000580805
  CDS Start-End: 80-436
tgggcgcggccggcgctgcagacccgctgctgttgtccgggtctgtgcggtcccgagggccctccgtgccgccggcgccatgggcaattgccacacggtggggcccaacgaggcgctggtggtttcagggggctgttgtggttccgactataaacagtacgtgtttggcggctgggcctgggcctggtggtgtatctccgacactcagagactgtctctggaggttatgaccatcctgtgtcgctgtgagaatattgagacgtcggagggggttccactattcgtaacaggggttgcacaggatttccctagagattatgacgttgcagccccgctgcgaggacgtagagacggccgagggggtagctttaactgtgacgggtgtcgcccaggtgaagatcatgacggagaaggaactcctggccgtggcttgtgagcagtttctgggtaagaatgtgcaggacatcaaaaacgtcgtcctgcagaccctggagggacatctgcgctccatcctcgggaccctgacagtggagcagatttatcaggaccgggaccagtttgccaagctggtgcgggaggtggcagcccctgatgttggccgcatgggcattgagatcctcagcttcaccatcaaggacgtgtatgacaaagtggactatctgagctccctgggcaagacgcagactgccgtggtgcagagagatgctgacattggcgtggccgaggctgaacgggacgcaggcatccgggaagctgagtgcaagaaggagatgctggatgtgaagttcatggcagacaccaagattgctgactctaagcgagccttcgagctgcaaaagtcagccttcagtgaggaggttaacatcaagacagctgaggcccagttggcctatgagctgcagggggcccgtgaacagcagaagatccggcaggaagagattgagattgaggttgtgcagcgcaagaaacagattgccgtggaggcacaggagatcctgcgtacggacaaggagctcatcgctacagtgcgccggcctgccgaggccgaggcccaccgcatccagcagattgccgagggtgaaaaggtgaagcaggtcctcttggcacaggcagaggctgagaagatccgcaaaatcggggaggcggaagcggcagtcatcgaggcgatgggcaaggcagaggctgagcggatgaagctcaaggcagaagcctaccagaaatacggggatgcagccaagatggccttggtgctagaggccctgccccagattgctgccaaaatcgctgccccacttaccaaggtcgatgagattgtggtcctcagtggagacaacagtaaggtcacatcagaagtgaaccgactgctggccgagctgcctgcctctgtgcatgccctcacaggcgtggacctgtctaagatacccctgatcaagaaggccactggtgtgcaggtgtgaggctcctgcaggcccactctcttcagcagccacccggccctccctccagcacccgttttaatcccacagaacaacgggaacgttactgactctggtgccttatctcgaagggaccagaagtgctgcgtgttcaggccatctctggctgtcttcctgtctctcctgtctgtccacctcctcctcttcctctcctttaccccactttcactgccactttcatcaggtttgtgtctcatctccctgcgtgtcttttcctttgtctgtctttttctttcccccatgcacatcatgtagattaagctgaagatgtttattacaatcactctctgtggggggtggccctgctgctcctcagaatcctggtgccttgaagttctctgtgcatctgtccatcctccctatggccctggccagagctcagcatgggcaggggttctgggtaggacggtcactgtcctctctcctggactggtcttcccagccctaaaccctgccccaggaagcccacagcctcacctgctgctgcccctctaggtctgggcagccatgacctgcagggcccagagacactgtccttcccctcatccacccaaggccccagccagcgctcataccctgtcctttctccctgaccccaagggcacagaggcaaggcctcctgtctacagcagcttcctcagtttcctactgccttaggaggcccctgcttgtgctcagggaaggcctcttcatgggcatgttcctgctggggcggtgcggtttggtcccaactctgctaagttttctgagatgagggtctagccctgttggggacagaaaagtgtgtagaccttcttcctgctagggctgcactgtcctgggtgttgggcccttctggtggacaaggctgtgccaaccctgtacagaatcgagtgctgtagcctggccagaccccagagcccttgtgccatctttcttcctggccagagtgatggggttccagccatggggaagcaacccaatcctctgtctccttgctccaatggaggcagaagagcccaggacccaagcgtcttggcaggggtgctgtgaatgtccagtggtcccagctccccaccctggccctgccccagcctgtgtagctcttcctgcatgtggatgctgcatgtctggtctggggcttggatgttgcactgccccactgcctgtcccttctggtaaaataaagaactcttaatgccca

SEQ ID NO: 134830 - DNA, 2585 bp, Homo sapiens
  Payload ID: 6331
  Gene Symbol: FLOT2
  Gene Name: flotillin 2
  ENST ID: ENST00000585169
  CDS Start-End: 79-1365
gggcgcggccggcgctgcagacccgctgctgttgtccgggtctgtgcggtcccgagggccctccgtgccgccggcgccatgggcaattgccacacggtggggcccaacgaggcgctggtggtttcagggggctgttgtggttccgactataaacagtacgtgtttggcggctgggcctgggcctggtggtgtatctccgacactcagagactgtctctggaggttatgaccatcctgtgtcgctgtgagaatattgagacgtcggagggggttccactattcgtaacaggggttgcacaggtgaagatcatgacggagaaggaactcctggccgtggcttgtgagcagtttctgggtaagaatgtgcaggacatcaaaaacgtcgtcctgcagaccctggagggacatctgcgctccatcctcgggaccctgacagtggagcagatttatcaggaccgggaccagtttgccaagctggtgcgggaggtggcagcccctgatgttggccgcatgggcattgagatcctcagcttcaccatcaaggacgtgtatgacaaagtggactatctgagctccctgggcaagacgcagactgccgtggtgcagagagatgctgacattggcgtggccgaggctgaacgggacgcaggcatccgggaagctgagtgcaagaaggagatgctggatgtgaagttcatggcagacaccaagattgctgactctaagcgagccttcgagctgcaaaagtcagccttcagtgaggaggttaacatcaagacagctgaggcccagttggcctatgagctgcagggggcccgtgaacagcagaagatccggcaggaagagattgagattgaggttgtgcagcgcaagaaacagattgccgtggaggcacaggagatcctgcgtacggacaaggagctcatcgctacagtgcgccggcctgccgaggccgaggcccaccgcatccagcagattgccgagggtgaaaaggtgaagcaggtcctcttggcacaggcagaggctgagaagatccgcaaaatcggggaggcggaagcggcagtcatcgaggcgatgggcaaggcagaggctgagcggatgaagctcaaggcagaagcctaccagaaatacggggatgcagccaagatggccttggtgctagaggccctgccccagattgctgccaaaatcgctgccccacttaccaaggtcgatgagattgtggtcctcagtggagacaacagtaaggtcacatcagaagtgaaccgactgctggccgagctgcctgcctctgtgcatgccctcacaggcgtggacctgtctaagatacccctgatcaagaaggccactggtgtgcaggtgtgaggctcctgcaggcccactctcttcagcagccacccggccctccctccagcacccgttttaatcccacagaacaacgggaacgttactgactctggtgccttatctcgaagggaccagaagtgctgcgtgttcaggccatctctggctgtcttcctgtctctcctgtctgtccacctcctcctcttcctctcctttaccccactttcactgccactttcatcaggtttgtgtctcatctccctgcgtgtcttttcctttgtctgtctttttctttcccccatgcacatcatgtagattaagctgaagatgtttattacaatcactctctgtggggggtggccctgctgctcctcagaatcctggtgccttgaagttctctgtgcatctgtccatcctccctatggccctggccagagctcagcatgggcaggggttctgggtaggacggtcactgtcctctctcctggactggtcttcccagccctaaaccctgccccaggaagcccacagcctcacctgctgctgcccctctaggtctgggcagccatgacctgcagggcccagagacactgtccttcccctcatccacccaaggccccagccagcgctcataccctgtcctttctccctgaccccaagggcacagaggcaaggcctcctgtctacagcagcttcctcagtttcctactgccttaggaggcccctgcttgtgctcagggaaggcctcttcatgggcatgttcctgctggggcggtgcggtttggtcccaactctgctaagttttctgagatgagggtctagccctgttggggacagaaaagtgtgtagaccttcttcctgctagggctgcactgtcctgggtgttgggcccttctggtggacaaggctgtgccaaccctgtacagaatcgagtgctgtagcctggccagaccccagagcccttgtgccatctttcttcctggccagagtgatggggttccagccatggggaagcaacccaatcctctgtctccttgctccaatggaggcagaagagcccaggacccaagcgtcttggcaggggtgctgtgaatgtccagtggtcccagctccccaccctggccctgccccagcctgtgtagctcttcctgcatgtggatgctgcatgtctggtctggggcttggatgttgcactgccccactgcctgtcccttctggtaaaataaagaactcttaatgcc

SEQ ID NO: 134831 - DNA, 1069 bp, Homo sapiens
  Payload ID: 6331
  Gene Symbol: FLOT2
  Gene Name: flotillin 2
  ENST ID: ENST00000586827
  CDS Start-End: 15-221
gtgccgccggcgccatgggcaattgccacacggtggggcccaacgaggcgctggtggtttcagggggctgttgtggttccgactataaacagtacgtgtttggcggctgggcctgggcctggtggtgtatctccgacactcagagggaccctgacagtggagcagatttatcaggaccgggaccagtttgccaagctggtgcgggaggtggcagcccctgatgttggccgcatgggcattgagatcctcagcttcaccatcaaggacgtgtatgacaaagtggactatctgagctccctgggcaagacgcagactgccgtggtgcagagagatgctgacattggcgtggccgaggctgaacgggacgcaggcatccgggaagctgagtgcaagaaggagatgctggatgtgaagttcatggcagacaccaagattgctgactctaagcgagccttcgagctgcaaaagtcagccttcagtgaggaggttaacatcaagacagctgaggcccagttggcctatgagctgcagggggcccgtgaacagcagaagatccggcaggaagagattgagattgaggttgtgcagcgcaagaaacagattgccgtggaggcacaggagatcctgcgtacggacaaggagctcatcgctacagtgcgccggcctgccgaggccgaggcccaccgcatccagcagattgccgagggtgaaaaggtgaagcaggtcctcttggcacaggcagaggctgagaagatccgcaaaatcggggaggcggaagcggcagtcatcgaggcgatgggcaaggcagaggctgagcggatgaagctcaaggcagaagcctaccagaaatacggggatgcagccaagatggccttggtgctagaggccctgccccagattgctgccaaaatcgctgccccacttaccaaggtcgatgagattgtggtcctcagtggagacaacagtaaggtcacatcagaagtgaaccgactgctggccgagctgcctgcctctgtgcatgccctcacaggcgtggacctgtctaagatacccctgatcaagaaggcca

SEQ ID NO: 134832 - DNA, 746 bp, Homo sapiens
  Payload ID: 6331
  Gene Symbol: FLOT2
  Gene Name: flotillin 2
  ENST ID: ENST00000465427
  CDS Start-End: 1-746
actgtctctggaggttatgaccatcctgtgtcgctgtgagaatattgagacgtcggagggggttccactattcgtaacaggggttgcacaggtgaagatcatgacggagaaggaactcctggccgtggcttgtgagcagtttctggggaccctgacagtggagcagatttatcaggaccgggaccagtttgccaagctggtgcgggaggtggcagcccctgatgttggccgcatgggcattgagatcctcagcttcaccatcaaggacgtgtatgacaaagtggactatctgagctccctgggcaagacgcagactgccgtggtgcagagagatgctgacattggcgtggccgaggctgaacgggacgcaggcatccgggaagctgagtgcaagaaggagatgctggatgtgaagttcatggcagacaccaagattgctgactctaagcgagccttcgagctgcaaaagtcagccttcagtgaggaggttaacatcaagacagctgaggcccagttggcctatgagctgcagggggcccgtgaacagcagaagatccggcaggaagagattgagattgaggttgtgcagcgcaagaaacagattgccgtggaggcacaggagatcctgcgtacggacaaggagctcatcgctacagtgcgccggcctgccgaggccgaggcccaccgcatccagcagattgccgagggtgaaaaggtgaagcaggtcctcttggcacaggcagagg

SEQ ID NO: 134833 - DNA, 2660 bp, Homo sapiens
  Payload ID: 6332
  Gene Symbol: FIZ1
  Gene Name: FLT3-interacting zinc finger 1
  Uniprot ID: Q96SL8
  ENST ID: ENST00000221665
  CDS Start-End: 91-1581
gggtggaagtgacgctgcccccgctgcccaaaatgtcggcgcccagagggaggtagagagcccccacataccactgtattccccgccaccatggatgacgtccccgccccaacccctgcaccagcaccgcccgccgctgccgcccccagggtcccgtttcactgcagtgaatgtggcaagagcttccgctaccgctcagacctgcggcgccactttgcccggcacacagcgctcaagccccacgcatgtccgcgctgcggcaagggtttcaagcacagcttcaacctagccaaccacctgcgctcgcacaccggggagcggccctaccgctgctctgcctgccccaaggggttccgcgactccaccggcctgctgcaccaccaggtcgtccacactggtgagaaaccctactgctgcctggtctgcgagctccgcttctcctcacgctccagcctgggccgccacctcaagcgccagcaccgtggggttctcccctctcccctgcagcccggccctggcctgcccgccttgagtgcgccctgctccgtctgctgcaatgtggggccctgctcggtgtgcgggggctcaggggccggcggcggagagggccccgagggggcaggcgcgggtctgggcagctgggggctggcagaggcggcagctgcggccgcggcctccttgcccccatttgcgtgcggcgcctgcgcgcggcgcttcgaccacggccgcgagctggcggcccactgggcggcgcacaccgacgtgaagcccttcaagtgcccgcgctgcgagcgcgacttcaacgcgcccgcgctgctggagcggcacaagctgacgcacgacctgcagggcccgggcgcgcccccagcgcaggcctgggccgcggggccaggcgcagggcccgagacggcgggcgaaggcaccgctgcggaggcgggcgacgctcctctggcttcggaccgcaggctgctcctgggccccgcggggggcggcgtgcccaagctcggggggctgctccccgagggcggtggggaggcgcctgcacctgcggcggccgccgagccctcggaagacaccctgtaccagtgcgactgcgggaccttctttgcgtcggccgcggccctggccagtcacctggaggcccactcgggcccggccacctacggctgcggccactgcggggctctgtacgcggcgctggccgccttggaggagcaccggcgggtcagccacggtgagggcggcggggaggaggcggcgaccgccgcccgggaaagggaaccggcgtccggggaacccccgtctggctccggccgcggcaagaagatcttcggctgctccgagtgcgagaagctgttccgctcaccgcgagacctggagcggcacgtgctggtgcacactggcgagaagccgttcccgtgcctggagtgcggcaagttcttccgccacgagtgctacctcaagcgccaccggctgctgcacggcaccgagcggcccttcccttgccacatctgcggcaagggcttcatcacgctcagcaacctctccaggcacctgaagctgcaccggggcatggactgactgccaggctgcgtgcgccctgccctccacccagcctcctggactcggcctggaccaggggacctcgggactgcgcgtgaggccccggccctccaaatccaaatccagacgcaggccctgaaatgaggggaccctgactggagaggtgggggccaccaaaaacccacaaaggccccggagctgggggaccacaaacaaacagggtccttagctggggcaggggagcccaaatctagggagagactcctgagcctgaggtccctggaatgagtgtgggtagccgtaagtccccaagacatggggactttgcagtgagcaatgggtctccacaagtacctctcatcttgagagccctaatactaaaagatgggcacccacccccaccaagggaagactgccccattccctgagagccatcattcctaacgaccttgatctggagaatgtggagggagcatgtccctgaattttcctagatccctccaaatgccacccaccagagtcactggtgaccccagaaaatggatatagccgaaatctgcctttcccctttttcattccctgtgctgaaagagggaccagggtagatgccccctgccctcgaatcccccctccccgactgtggaatggatcgaccctaacgatcttccccgccccaaacactagaatagactggcctgaaatccccttgcccagtagaatggactgatctatgtgcacacacccccatcacatggaatgggctggtctaggctgtggcctgccaccttccttagagtgaatagggcggacactcctctcttttcctgtagcgtgtggaccggtccacgcaattctttatcctgtgaactcatctgagtgggaggtggtggacactggggtttccttccctctctccgtagcatccgttggtctttctctccatctctgttggtttgtctgtctctgtcttcctcccaatccctaggggaagggggcatttggctagggggtgcccctgtgagcctcgaccttgccccctcgtccctctccccagtgtttccaggacccccaataaaccttgtcctgtcagtcgctga

SEQ ID NO: 134834 - DNA, 4686 bp, Homo sapiens
  Payload ID: 6332
  Gene Symbol: FIZ1
  Gene Name: FLT3-interacting zinc finger 1
  ENST ID: ENST00000590714
  CDS Start-End: 4106-4686
gtttgacattcatccagatacacaattttagctatgctggtgggtaaaacagtgagatgatcttgtatcagctgataaacaggcacttccctgagctccaccagacatccctatgcctccctaactctccttctggatctagaagttcaagatcaacatgagcaacacccctccccacctccccacaaaaaaaaaccttccagagaggatagagtccaactgagagtgcagaccagtattgtgatccttgaaacggagagcccatcaaactccagagccatagaggcctcacgaatgctctcatccctccctgctgactggcagaagtggggaaggggttccagagtggaaaaaagggactggtcccaggtgatatttgaccctgattcctggatgaggaaacatatctgcgatgttaagagcctgggccctggagtcaagacatcattcgttcaaatctttactctctgcgtggccttgggcaaggtgttcgcttctctaagccttaatcaagacttttgcaaaatgggacacatagttctacgtacttgcccagacatgccatgagcataatacccacaaagtgttcatacacagaagctttcaggacacattagccattgttatcaggagcagctaagcctcacatcaaccctctgaatagggcatatctgtcccattttgcagatggggaaactgaggcacaggaaagccaagtcagttgcctaagttcctctgccagtaaatggcagggccaaaactggaaacaggtcttgtgacccgaatgtcccagagaatggagaacaaataaacccaaggaggaaaggggacattacgagggctcagtcctgggtttgaattcagctctgcctataactagcaattgactttgccagtttcctcctctgaaaagtgaataaaccagggttgtcaggagaatcgaataagacagtgggctttaaaatgcccctcgaacactgcctggtgcacagtaagcactcaataaacttcaccaacgccaccaccatcttcccggcgcccactcagatactgggagcatgggattggggtgtaacggaggggaaggggaggcacaggtgcagctggaagcaggtgctgcaggtgcccccctgcacccccccctcccctttaacagccacatagactgctgtccagagaggagcaaccacctttccatacggttcgctcccacggggtagcctagtctaggagtctggtctttggaacggtggaaagggggagactggtcccccgaccctccccgtcccctcgccccggtactgacgcgcccatcggcccccgagctgcgaagcccaagcgcggggcgggccctgcgggggcgacggccaatgagcggcgccgggtaagcgggcggcgggggctgccaggaagggggtctgcgcgcgcgcgcccggacggcttcgcggggcgcgagcgcgggagcaggaacaggtgttggaggcgcgctccgggagcgcgcggcccggcctcccctacccccacaccccccctcccgcctgcgccccccgcctctcgggtacctcatttgcatgtcgccggggctcgcgagtgtgcgcgcgcgcgggggcaacggggccggcgcgtgggaaggggagggggtgagggggccctgcccctcggcggcggcgaggcgggggcggcggcgcgcggtgccggccccgcccctcggagaagcgccgggcccctcccttcctgcccttcccgcccgcctgcgcgcccgcgggaaacaaaggggactcgctgggtcctaacgaccggtcgcggccacgcccggaagccgcgcctgcgcaccggcggccctggtgtgtccccagtgggaaataacccagcaccacatccccaaccacctcgaaacgcctttcctctcacaaagcccacagtcgggtgacccaaagacagataccgaatgatgaggagcgggaaaatggctgcccagtgcccgtaattaacatggcaccggacaggcttcgaagcccatggagtgctaagtggataagatggtgccggtcttttccagctctgtattgcagttggcgcacttcgctttctttttttttccctagtccaactgtacatcctaatcggaggagtccgaggctgtgaaaaagaaatagtatctgctctcatttacgttagcatcgcctagtgtcgccacggagaagccccctcgctctcagctccttgcccttagtctgtatggcgccgtgggtgtccctaagccccgccccttcccgctgccctcacccaagatggcgcgggcctggcttcttcaacctccagggctgggaaaggaaagggaaagagggagaagggcggggatgaggaaggggagccaagagggcgggagaaagggggagtacggcgggggaagggagctgaggcggaagtcgaggggccccccgggtggaagtgacgctgcccccgctgcccaaaatgtcggcgcccagagggaggtgtaagtaattaaagaggaaagccgacggacttccccggcctcccggggccgccccgggtctccaggaccaacgctccgtacgagcgaggtggactcgcctggccccggggcctgcccgacctgccccccaaccgggcgcccagggctgcaccttttaggggcagggggaggggcacaaaaggccggctctcggggcctggggcctggagcagactgggcaagtgggggggcccgctcctcaggctgcggggtggaggaggaggcggggcctagtggctgctggggcggagcaagggctgggaggagcctgagttgggcggagcttagagtggaagtgggaggggcgtggaggagggagagtctggatagaaaatgggagggtcttaggcaaagaggtggggtttgataaaggggcgtggctcagaaggaatggtgggtaggccctggattgaggggtggaaggaaactcattgaggctggttgggtaaagggagcccaggaagcaggagggaggagtttagagtagaagggatggagtttgtctggggtgtggcttagagaagtaggtaggcctagtgaggggggtggagtttaagggtgtaatttggaggggtttaatgcaactatcaggtctttataatgaatgtggaaaggacttgcaggggatgggaatagacttcgtagagaaggcctgagaaggtgacgggagtccagtggagagtcttagaaaggatgtggcttctttaaaggaaaaattgggtggagttttggaagtgggtcttagtggacccgagaggggcttagataagtcaaataacttagcaatcatggtaggacttaaggaggaatccaggaggaacttacgggataatagtcatccaaacagcttacttgttgcgtctttgctgtgcaccagcttaagtgggcacgtagcatttattgccacaattttacttaattctcgccaccactccatgaggtaggtactactattcccattttacagatgaagaatttttattatctgatgttacaggagtaattctggtctccctgcaaggatgactccagtgtgcttagccccaaatctttgccctcccattcgctaagtggtcatcctggaagaggagtgggaggagcttagaggggagtgggagggccttttggaaggaaaagggcttggcaaagaatacaagatccttagggaacattgtgggggactttgaagggagtaggtgggacttaaggaagagtgggagaggcttaaattacagtgggaggggcacagagagcagtggccgcgcattggcgaagagcgaggagaggcttaaaaacactccgtggagtgaggagactatgaagtgattaggaagattttgccacaggcgtggagccgcgagagaagggtttctaagagagtaggaggattttaaagaacaatgagagtggcttagagaggtgggcagtgggagggtctcccaggggacaggtggtgggtctgggaacctgggaggagagagctgatggggagccgaccccctcacctgctcctctgtctccccactactccagagagagcccccacataccactgtattccccgccaccatggatgacgtccccgccccaacccctgcaccagcaccgcccgccgctgccgcccccagggtcccgtttcactgcagtgaatgtggcaagagcttccgctaccgctcagacctgcggcgccactttgcccggcacacagcgctcaagccccacgcatgtccgcgctgcggcaagggtttcaagcacagcttcaacctagccaaccacctgcgctcgcacaccggggagcggccctaccgctgctctgcctgccccaaggggttccgcgactccaccggcctgctgcaccaccaggtcgtccacactggtgagaaaccctactgctgcctggtctgcgagctccgcttctcctcacgctccagcctgggccgccacctcaagcgccagcaccgtggggttctcccctctcccctgcagcccggccctggcctgcccgccttgagtgcgccctgctccgtctgctgcaatgtggggccctgctcggtgtgcgggggctcaggggccggcggcggagagggccccgagggggcaggcgcgggtctgggcagctgggggctggcagaggcggcagctgcggccgc

SEQ ID NO: 134835 - DNA, 462 bp, Homo sapiens
  Payload ID: 6332
  Gene Symbol: FIZ1
  Gene Name: FLT3-interacting zinc finger 1
  ENST ID: ENST00000587414
  CDS Start-End: 331-462
gaaggcctgagaaggtgacgggagtccagtggagagtcttagaaaggatgtggcttctttaaaggaaaaattgggtggagttttggaagtgggtcttagtggacccgagaggggcttagataagtcaaataacttagcaatcatggtaggacttaaggaggaatccaggaggaacttacgggataatagtcatccaaacagcttacttgttgcgtctttgctgtgcaccagcttaagtgggcacgtagcatttattgccacaattttacttaattctcgccaccactccatgagagagagcccccacataccactgtattccccgccaccatggatgacgtccccgccccaacccctgcaccagcaccgcccgccgctgccgcccccagggtcccgtttcactgcagtgaatgtggcaagagcttccgctaccgctcagacctgcggcgccactttgcccgg

SEQ ID NO: 134836 - DNA, 600 bp, Homo sapiens
  Payload ID: 6332
  Gene Symbol: FIZ1
  Gene Name: FLT3-interacting zinc finger 1
  ENST ID: ENST00000587678
  CDS Start-End: 1-403
ccctgcaccagcaccgcccgccgctgccgcccccagggtcccgtttcactgcagtgaatgtggcaagagcttccgctaccgctcagacctgcggcgccactttgcccggcacacagcgctcaagccccacgcatgtccgcgctgcggcaagggtttcaagcacagcttcaacctagccaaccacctgcgctcgcacaccggggagcggccctaccgctgctctgcctgccccaaggggttccgcgactccaccggcctgctgcaccaccaggaagcaaagcaggctttggaggaactggaggaaggccaatgtgactggagcatggagaagcagaaagtgtggctcaggagaagtctggagagtgccggaccctggaaatacagctgtcgtccacactggtgagaaaccctactgctgcctggtctgcgagctccgcttctcctcacgctccagcctgggccgccacctcaagcgccagcaccgtggggttctcccctctcccctgcagcccggccctggcctgcccgccttgagtgcgccctgctccgtctgctgcaatgtggggccctgctcggtgtgcgggggctcaggggccggcg

SEQ ID NO: 134837 - DNA, 489 bp, Homo sapiens
  Payload ID: 6332
  Gene Symbol: FIZ1
  Gene Name: FLT3-interacting zinc finger 1
  ENST ID: ENST00000592585
  CDS Start-End: 194-400
aaagagggagaagggcggggatgaggaaggggagccaagagggcgggagaaagggggagtacggcgggggaagggagctgaggcggaagtcgaggggccccccgggtggaagtgacgctgcccccgctgcccaaaatgtcggcgcccagagggaggtagagagcccccacataccactgtattccccgccaccatggatgacgtccccgccccaacccctgcaccagcaccgcccgccgctgccgcccccagggtcccgtttcactgcagtgaatgtggcaagagcttccgctaccgctcagacctgcggcgccactttgcccggcacacagcgctcaacgccagcaccgtggggttctcccctctcccctgcagcccggccctggcctgcccgccttgagtgcgccctgctccgtctgctgcaatgtggggccctgctcggtgtgcgggggctcaggggccggcggcggagagggccccgagggggca

SEQ ID NO: 134838 - DNA, 915 bp, Homo sapiens
  Payload ID: 6333
  Gene Symbol: FLYWCH2
  Gene Name: FLYWCH family member 2
  Uniprot ID: Q96CP2
  ENST ID: ENST00000293981
  CDS Start-End: 260-682
ccagaagacagggcacccgcggccttgctgcgcatgctcgcgctgtgaccccggcttgaggccagaagccaaggagtcctcagtgacggtgggatccacaacatctccacatcgctgtccccacccagccagggcagcgccagcactagctcagacgcaaggacggaaccgctggactccaggttccttgcctgggagtaggagaaatccacctgctgggggctgagtgtggcctgagggacaggccctgggtcccgggatgcccctgcccgagcccagcgagcaggagggtgagagtgtgaaggccagccaggagccatcccccaagccaggcacagaagtcatcccggcagcccccaggaagcccagaaagttctccaaactggtcctgctcacagcctccaaagacagcaccaaggtggcgggggccaagcgcaagggtgtgcactgtgtcatgtccctgggggtgcccggccccgccacccttgccaaggccctcctccagacccaccccgaggcccagcgggccattgaggcagcccctcaggagcctgagcagaaacggagcaggcaggacccaggcacagacagaacagaagacagtggattagcagcggggcctcctgaggctgctggggagaactttgccccctgctctgtggcgcccggcaagtccctgtaaccttgacaacaggcgcatcctcccaggccaccaacccagccataggctcttctctgtccgcagggcttctggggccaaatgggtgaatctttgcttttaacattgtgtgatttcttttctttttttttttttttttagatcaagtataagttacttttgtaagcagaaaaatactttcaaacaagaataaaagaagctgttcgctagaccccataatgggcaggttttaaaca

SEQ ID NO: 134839 - DNA, 1036 bp, Homo sapiens
  Payload ID: 6333
  Gene Symbol: FLYWCH2
  Gene Name: FLYWCH family member 2
  Uniprot ID: Q96CP2
  ENST ID: ENST00000396958
  CDS Start-End: 381-803
gggcaagacgcggaggagcggccccagccagaagacagggcacccgcggccttgctgcgcatgctcgcgctgtgaccccggcttgaggtaacagcgcgagctgaggctggggcccttggcgcggaggctgagggacccgccgcggcgctgtcgccggagagggagggcaccgctgtcgtcggccagaagccaaggagtcctcagtgacggtgggatccacaacatctccacatcgctgtccccacccagccagggcagcgccagcactagctcagacgcaaggacggaaccgctggactccaggttccttgcctgggagtaggagaaatccacctgctgggggctgagtgtggcctgagggacaggccctgggtcccgggatgcccctgcccgagcccagcgagcaggagggtgagagtgtgaaggccagccaggagccatcccccaagccaggcacagaagtcatcccggcagcccccaggaagcccagaaagttctccaaactggtcctgctcacagcctccaaagacagcaccaaggtggcgggggccaagcgcaagggtgtgcactgtgtcatgtccctgggggtgcccggccccgccacccttgccaaggccctcctccagacccaccccgaggcccagcgggccattgaggcagcccctcaggagcctgagcagaaacggagcaggcaggacccaggcacagacagaacagaagacagtggattagcagcggggcctcctgaggctgctggggagaactttgccccctgctctgtggcgcccggcaagtccctgtaaccttgacaacaggcgcatcctcccaggccaccaacccagccataggctcttctctgtccgcagggcttctggggccaaatgggtgaatctttgcttttaacattgtgtgatttcttttctttttttttttttttttagatcaagtataagttacttttgtaagcagaaaaatactttcaaacaagaataaaagaagctgttcgctagaccccataatgggcaggttttaaaca

SEQ ID NO: 134840 - DNA, 754 bp, Homo sapiens
  Payload ID: 6333
  Gene Symbol: FLYWCH2
  Gene Name: FLYWCH family member 2
  ENST ID: ENST00000572006
  CDS Start-End: 308-742
gaccccggcttgaggtaacagcgcgagctgaggctggggcccttggcgcggaggctgagggacccgccgcggcgctgtcgccggagagggagggcaccgctgtcgtcggccagaagccaaggagtcctcagtgacggtgggatccacaacatctccacatcgctgtccccacccagccagggcagcgccagcactagctcagacgcaaggacggaaccgctggactccaggttccttgcctgggagtaggagaaatccacctgctgggggctgagtgtggcctgagggacaggccctgggtcccgggatgcccctgcccgagcccagcgagcaggagggtgagagtgtgaaggccagccaggagccatcccccaagccaggcacagaagtcatcccggcagcccccaggaagcccagaaagttctccaaactggtcctgctcacagcctccaaagacagcaccaaggtggcgggggccaagcgcaagggtgtgcactgtgtcatgtccctgggggtgcccggccccgccacccttgccaaggccctcctccagacccaccccgaggcccagcgggccattgaggcagcccctcaggagcctgagcagaaacggagcaggcaggacccaggtgaggctccacagcggccccccaggacagctcggcacctcccagggtggcccccacagccgcgctggctccatcaggcgcttctccctggcatgcgggtccttgttccctgactttgaccacgt

SEQ ID NO: 134841 - DNA, 511 bp, Homo sapiens
  Payload ID: 6333
  Gene Symbol: FLYWCH2
  Gene Name: FLYWCH family member 2
  ENST ID: ENST00000573965
  CDS Start-End: 238-511
cccgcggccttgctgcgcatgctcgcgctgtgaccccggcttgaggtaacagcgcgagctgaggctggggcccttggcgcggaggctgagggacccgccgcggcgctgtcgccggagagggagggcaccgctgtcgtcggacggaaccgctggactccaggttccttgcctgggagtaggagaaatccacctgctgggggctgagtgtggcctgagggacaggccctgggtcccgggatgcccctgcccgagcccagcgagcaggagggtgagagtgtgaaggccagccaggagccatcccccaagccaggcacagaagtcatcccggcagcccccaggaagcccagaaagttctccaaactggtcctgctcacagcctccaaagacagcaccaaggtggcgggggccaagcgcaagggtgtgcactgtgtcatgtccctgggggtgcccggccccgccacccttgccaaggccctcctccagacccaccccgaggcccagcgggccattg

SEQ ID NO: 134842 - DNA, 5037 bp, Homo sapiens
  Payload ID: 6334
  Gene Symbol: FLYWCH1
  Gene Name: FLYWCH-type zinc finger 1
  Uniprot ID: Q4VC44
  ENST ID: ENST00000253928
  CDS Start-End: 406-2556
gcgcgcctgagcgttccgcaaggccggctccccggcggggtcgcgcgcgcggtcacggggctcgctcccgaggggcaggtcggggctgggagctggtgcccgggtcggggtggcggcggcggcctgggtcgcggggtcgacgctcgctgctgcagcggcagaggctgaaggatccgccgcggcgctgtcgcgggagagggagggccccgctgccgtcggtgaaaccagcccagagaagttacgggatttgcccccggggctcctgcccagcaagccagcgccgtgacccaggtgtgggggatgatggtgacgcttctcactcacgtgtgaaggacggaaccactgcactccaggttccttgctgggtgctgagcgtggcctgagggacaggccctgggtcccgggatgcccctgcccgagcccagcgagcaggagggcgagagtgtgaaggccggccaggagccatcccccaagccaggcacggacgtcatcccggcagcccccaggaagcccagggagttctccaaactggtgctgctcacagcctccgaccaagatgaggatggggtgggatccaagccccaggaagtgcactgcgtcctgtccctggagatggctggccccgccaccctcgccagcaccttgcagatcctgccagttgaggagcagggaggggtggtccagccagccctagagatgcctgaacagaagtgcagcaagctggatgcagcagcccctcagtccctggagttcctgaggacaccattcgggggccgcctcctggtgctggagtccttcctgtacaagcaggagaaggcagtgggggacaaggtgtactggaagtgccgccaacatgctgagctgggctgccggggccgggccatcacccgaggcctgcgggccacagtgatgcggggccactgccacgcgcccgatgagcaaggcctggaggcccggcgccagagggagaaactgcccagcctggccctgccagagggcttgggagagccccagggtcctgagggccctggaggccgagtggaggagcccctggagggggtgggcccgtggcagtgccctgaggagcccgagcccactcctgggctggtgctgagcaagccggccctggaggaggaggaggcaccccgagccctgtcactgctgagcctgccgcccaagaagcgctcgatcctggggctgggacaggcccggcccctcgagttcctgaggacgtgctacgggggcagcttcctggtacacgagtcgttcctctacaagcgggagaaggctgtcggggacaaggtgtattggacctgccgggaccacgcgctgcacggctgccggagccgggccatcacccagggacagcgggtgactgtgatgcgtgggcactgccaccagcccgatatggagggcctggaagcccggcggcagcaggagaaggccgtggagacgctgcaggctgggcaggacggccctgggagccaagtggacacgctgctccgaggcgtggatagtttgctctaccgcaggggtccgggtcccctgactctcaccaggcctcggcccagaaagcgagcaaaggtcgaagaccaggagctgccaacccagcccgaggccccagacgagcaccaggacatggacgcagacccgggaggccctgagttcctgaagacgcccctggggggcagcttcctggtgtacgagtccttcctctaccggcgggagaaggcggctggggagaaggtgtattggacctgccgggaccaggcccgcatgggctgccgcagccgcgccatcacccagggccgacgggtgactgtcatgcgtggtcactgccacccgcccgacctgggaggcctggaggccctgaggcagcgggagaaacgccccaacacggcgcagcgggggagcccaggaggccccgagttcctgaagacgcccctggggggcagcttcctggtgtacgagtccttcctctaccggcgggagaaggcggccggggagaaggtgtattggacctgccgggaccaggcccgcatgggctgccgcagccgcgccatcacccagggccggcgggtcatggtcatgcgcaggcactgccacccaccggacctgggcggcctggaggccctgcggcagcgggagcacttccccaacctggcgcagtgggacagcccagatcctctccggcccctggagttcctgaggacttccctggggggcaggttcctggtgcacgagtccttcctctacaggaaggagaaggcggctggggagaaggtgtactggatgtgccgggaccaggctcggctgggctgccgcagccgcgccataacccagggccaccgcatcatggtcatgcgcagccactgccatcagcctgacctggcaggcctggaggccttgaggcaacgggagcggctccccaccacggcccagcaggaggacccagaaaagattcaagttcagctgtgcttcaagacgtgttctcctgaaagccagcagatttatggggacatcaaagacgtcagactggatggcgagtcccagtgaggcgatgtgggcagaggagctccgagccgcccacccaaggtggcttcacatccacacaggcacttcccatccacctaggtttggcttagcagaaacttcttttcattcttccaaagcatcgatggtcttcgcgtctcctcaggaggtctcccaggaggaattcttggatggtgtcctcatgtcggcggagaacagtgctcagagctggcgcttgcagacgcagctgtcgtggggcagggcggtggcgccttcctgacctttggaagacatgacaaagctgcctggacacggacgcccctgctgtacggccacagcacccctgggtttgcagagcacgcagccttcctagggctttccacctggcgaggccccgctctgctcagcacggtgcaaagtgaatgctgctgtcttggagcctgggcacgtttggggaagttcctgcttcaaactgagctgccccgcataggccaggtcaacccacaccaatctcttctggacaggtgctgggtaggccttcctggtctctggccgcctgctgccagggtgtggccatccccagcaaccggagctggccaaaccagaggcctcgctccgcactccacactttcctttctgtgctccttccaagttaaattaaaccccctctccacgattcccacggcaggcgtcattcccgagatgggagccagtccaggggtcagcaggagccagcgctgggcacacgtgccctggctgaggccagcggcatcctgggtggcccaggtccatcctgggcagcaaaggcgtgtccccttctgtcagacagcttcacagagtgtggcttcaccagtcagagggagcagtccggagaggcaagatgaccccaccgggactgcagagcctcctccttactaacaaggacctgtccgcagccgcgaggtccttcactcccaccctgtaattgtggggggagtgccagcaacaggcctgtcccctggcaagttggccacggaacccaccatgcactgcaaggctgtgacagcctgggcacccctgcttctcctctgcttgtacggttcccccaataaatcctattttccatctcaccgtgtggagctggtacttgttcacatccctcttgcagcaacagttggccgccgtgaaaccacactccgtcacatctccatgccagtgcccagggggagacccctccccatgcctgggctgttacagtcacctggcccagacgtaacctggaccaagagtggacggagacacctggggttggggcctctggaagggctgctggggggccagctgcagcctgtggcctctcccaggcccggatatggcaggacatttgcgtcgtgttgctggaagaggcaggatgctctgttctcgccattagcctgcgttacgcctagactcatctgcataagcctgggcaagtggcacccctgggccaagggcagacttgcccacccgtccatcctttgcctatggcagaggacacacaacacagtggctgcgctttgggcactgttctcggccctgaagcatcctgccccgaggctgacctaactgcccccagctggactcatggccaaggctacagacccagtactccaatcccgactcccactgtgtggtccaaatgtgtacgcccacaggaggcagccatgcccgaggaaggtacttgctgaaagatggtccagttcatgccgccaccagctggacctctgatcaggccccctgcagaaggggaagctctccacatgcccaagatacgagagaaacgcccgggtcacagcagcctgagtcactgcagcctctgctacctgccaagcctgcgccctccacctgtgggctccttgcctctgtgatggggcctccacggccagcatcttcccgccatggtcacatgatgccatgccctgctctgggcacccctaagcgggtatgaggcgaatcagaggaagaatatcggcttctcttcccttttggatatttgcgtcattgaccgggactggcccactcttcctctgcctcacgcctgctttgaccttagaagacagacggcagctcgcgttgctgggctgagattctccaatggacgtgaatttagatgatgctgttgccttgggtggcttcatggccaccaacccgcaccctggtggccactcagccatgacaagggcctgacagccactaagtgagcttcagagccttccccttgcaaagttccagggccaccagatgtcgcctgcccagtcactgtcacagagttaaagcgtgcgggtgaacgctggccgcggagcgtgcagcccggcagcagctcagcggggcagctcctgcttccagccctgcctctgctggtgcttcgcccacaaaccctgctgtatgacatttgcaccacatggtgtgtgtccgtgccctttgacatgacagtgccaacaacatctcatgaaatttaaaataaatccccaaggcatcagaaacgta

SEQ ID NO: 134843 - DNA, 2565 bp, Homo sapiens
  Payload ID: 6334
  Gene Symbol: FLYWCH1
  Gene Name: FLYWCH-type zinc finger 1
  ENST ID: ENST00000344592
  CDS Start-End: 1-1483
gttcctgaggacgtgctacgggggcagcttcctggtacacgagtcgttcctctacaagcgggagaaggctgtcggggacaaggtgtattggacctgccgggaccacgcgctgcacggctgccggagccgggccatcacccagggacagcgggtgactgtgatgcgtgggcactgccaccagcccgatatggagggcctggaagcccggcggcagcaggagaaggccgtggagacgctgcaggctgggcaggacggccctgggagccaagtggacacgctgctccgaggcgtggatagtttgctctaccgcaggggtccgggtcccctgactctcaccaggcctcggcccagaaagcgagcaaaggtcgaagaccaggagctgccaacccagcccgaggccccagacgagcaccaggacatggacgcagacccgggaggccctgagttcctgaagacgcccctggggggcagcttcctggtgtacgagtccttcctctaccggcgggagaaggcggctggggagaaggtgtattggacctgccgggaccaggcccgcatgggctgccgcagccgcgccatcacccagggccgacgggtgactgtcatgcgtggtcactgccacccgcccgacctgggaggcctggaggccctgaggcagcgggagaaacgccccaacacggcgcagcgggggagcccaggcgctggcctctctttccagtggctcttccggatcctgcagcttttgggtcatgctcctgtgctgctgtgcccctcagggtcctcctgcctcccgagcctccctgctccacatggcccctgcccagccctctccatccctcttgaaggaggccccgagttcctgaagacgcccctggggggcagcttcctggtgtacgagtccttcctctaccggcgggagaaggcggccggggagaaggtgtattggacctgccgggaccaggcccgcatgggctgccgcagccgcgccatcacccagggccggcgggtcatggtcatgcgcaggcactgccacccaccggacctgggcggcctggaggccctgcggcagcgggagcacttccccaacctggcgcagtgggacagcccagatcctctccggcccctggagttcctgaggacttccctggggggcaggttcctggtgcacgagtccttcctctacaggaaggagaaggcggctggggagaaggtgtactggatgtgccgggaccaggctcggctgggctgccgcagccgcgccataacccagggccaccgcatcatggtcatgcgcagccactgccatcagcctgacctggcaggcctggaggccttgaggcaacgggagcggctccccaccacggcccagcaggaggacccagaaaagattcaagttcagctgtgcttcaagacgtgttctcctgaaagccagcagatttatggggacatcaaagacgtcagactggatggcgagtcccagtgaggcgatgtgggcagaggagctccgagccgcccacccaaggtggcttcacatccacacaggcacttcccatccacctaggtttggcttagcagaaacttcttttcattcttccaaagcatcgatggtcttcgcgtctcctcaggaggtctcccaggaggaattcttggatggtgtcctcatgtcggcggagaacagtgctcagagctggcgcttgcagacgcagctgtcgtggggcagggcggtggcgccttcctgacctttggaagacatgacaaagctgcctggacacggacgcccctgctgtacggccacagcacccctgggtttgcagagcacgcagccttcctagggctttccacctggcgaggccccgctctgctcagcacggtgcaaagtgaatgctgctgtcttggagcctgggcacgtttggggaagttcctgcttcaaactgagctgccccgcataggccaggtcaacccacaccaatctcttctggacaggtgctgggtaggccttcctggtctctggccgcctgctgccagggtgtggccatccccagcaaccggagctggccaaaccagaggcctcgctccgcactccacactttcctttctgtgctccttccaagttaaattaaaccccctctccacgattcccacggcaggcgtcattcccgagatgggagccagtccaggggtcagcaggagccagcgctgggcacacgtgccctggctgaggccagcggcatcctgggtggcccaggtccatcctgggcagcaaaggcgtgtccccttctgtcagacagcttcacagagtgtggcttcaccagtcagagggagcagtccggagaggcaagatgaccccaccgggactgcagagcctcctccttactaacaaggacctgtccgcagccgcgaggtccttcactcccaccctgtaattgtggggggagtgccagcaacaggcctgtcccctggcaagttggccacggaacccaccatgcactgcaaggctgtgacagcctgggcacccctgcttctcctctgcttgtacggttcccccaataaatcctattttccatc

SEQ ID NO: 134844 - DNA, 4963 bp, Homo sapiens
  Payload ID: 6334
  Gene Symbol: FLYWCH1
  Gene Name: FLYWCH-type zinc finger 1
  Uniprot ID: Q4VC44
  ENST ID: ENST00000416288
  CDS Start-End: 344-2491
cgctcccgaggggcaggtcggggctgggagctggtgcccgggtcggggtggcggcggcggcctgggtcgcggggtcgacgctcgctgctgcagcggcagaggctgaaggatccgccgcggcgctgtcgcgggagagggagggccccgctgccgtcggtgaaaccagcccagagaagttacgggatttgcccccggggctcctgcccagcaagccagcgccgtgacccaggtgtgggggatgatggtgacgcttctcactcacgtgtgaaggacggaaccactgcactccaggttccttgctgggtgctgagcgtggcctgagggacaggccctgggtcccgggatgcccctgcccgagcccagcgagcaggagggcgagagtgtgaaggccggccaggagccatcccccaagccaggcacggacgtcatcccggcagcccccaggaagcccagggagttctccaaactggtgctgctcacagcctccgaccaagatgaggatggggtgggatccaagccccaggaagtgcactgcgtcctgtccctggagatggctggccccgccaccctcgccagcaccttgcagatcctgccagttgaggagcagggaggggtggtccagccagccctagagatgcctgaacagaagtgcagcaagctggatgcagcccctcagtccctggagttcctgaggacaccattcgggggccgcctcctggtgctggagtccttcctgtacaagcaggagaaggcagtgggggacaaggtgtactggaagtgccgccaacatgctgagctgggctgccggggccgggccatcacccgaggcctgcgggccacagtgatgcggggccactgccacgcgcccgatgagcaaggcctggaggcccggcgccagagggagaaactgcccagcctggccctgccagagggcttgggagagccccagggtcctgagggccctggaggccgagtggaggagcccctggagggggtgggcccgtggcagtgccctgaggagcccgagcccactcctgggctggtgctgagcaagccggccctggaggaggaggaggcaccccgagccctgtcactgctgagcctgccgcccaagaagcgctcgatcctggggctgggacaggcccggcccctcgagttcctgaggacgtgctacgggggcagcttcctggtacacgagtcgttcctctacaagcgggagaaggctgtcggggacaaggtgtattggacctgccgggaccacgcgctgcacggctgccggagccgggccatcacccagggacagcgggtgactgtgatgcgtgggcactgccaccagcccgatatggagggcctggaagcccggcggcagcaggagaaggccgtggagacgctgcaggctgggcaggacggccctgggagccaagtggacacgctgctccgaggcgtggatagtttgctctaccgcaggggtccgggtcccctgactctcaccaggcctcggcccagaaagcgagcaaaggtcgaagaccaggagctgccaacccagcccgaggccccagacgagcaccaggacatggacgcagacccgggaggccctgagttcctgaagacgcccctggggggcagcttcctggtgtacgagtccttcctctaccggcgggagaaggcggctggggagaaggtgtattggacctgccgggaccaggcccgcatgggctgccgcagccgcgccatcacccagggccgacgggtgactgtcatgcgtggtcactgccacccgcccgacctgggaggcctggaggccctgaggcagcgggagaaacgccccaacacggcgcagcgggggagcccaggaggccccgagttcctgaagacgcccctggggggcagcttcctggtgtacgagtccttcctctaccggcgggagaaggcggccggggagaaggtgtattggacctgccgggaccaggcccgcatgggctgccgcagccgcgccatcacccagggccggcgggtcatggtcatgcgcaggcactgccacccaccggacctgggcggcctggaggccctgcggcagcgggagcacttccccaacctggcgcagtgggacagcccagatcctctccggcccctggagttcctgaggacttccctggggggcaggttcctggtgcacgagtccttcctctacaggaaggagaaggcggctggggagaaggtgtactggatgtgccgggaccaggctcggctgggctgccgcagccgcgccataacccagggccaccgcatcatggtcatgcgcagccactgccatcagcctgacctggcaggcctggaggccttgaggcaacgggagcggctccccaccacggcccagcaggaggacccagaaaagattcaagttcagctgtgcttcaagacgtgttctcctgaaagccagcagatttatggggacatcaaagacgtcagactggatggcgagtcccagtgaggcgatgtgggcagaggagctccgagccgcccacccaaggtggcttcacatccacacaggcacttcccatccacctaggtttggcttagcagaaacttcttttcattcttccaaagcatcgatggtcttcgcgtctcctcaggaggtctcccaggaggaattcttggatggtgtcctcatgtcggcggagaacagtgctcagagctggcgcttgcagacgcagctgtcgtggggcagggcggtggcgccttcctgacctttggaagacatgacaaagctgcctggacacggacgcccctgctgtacggccacagcacccctgggtttgcagagcacgcagccttcctagggctttccacctggcgaggccccgctctgctcagcacggtgcaaagtgaatgctgctgtcttggagcctgggcacgtttggggaagttcctgcttcaaactgagctgccccgcataggccaggtcaacccacaccaatctcttctggacaggtgctgggtaggccttcctggtctctggccgcctgctgccagggtgtggccatccccagcaaccggagctggccaaaccagaggcctcgctccgcactccacactttcctttctgtgctccttccaagttaaattaaaccccctctccacgattcccacggcaggcgtcattcccgagatgggagccagtccaggggtcagcaggagccagcgctgggcacacgtgccctggctgaggccagcggcatcctgggtggcccaggtccatcctgggcagcaaaggcgtgtccccttctgtcagacagcttcacagagtgtggcttcaccagtcagagggagcagtccggagaggcaagatgaccccaccgggactgcagagcctcctccttactaacaaggacctgtccgcagccgcgaggtccttcactcccaccctgtaattgtggggggagtgccagcaacaggcctgtcccctggcaagttggccacggaacccaccatgcactgcaaggctgtgacagcctgggcacccctgcttctcctctgcttgtacggttcccccaataaatcctattttccatctcaccgtgtggagctggtacttgttcacatccctcttgcagcaacagttggccgccgtgaaaccacactccgtcacatctccatgccagtgcccagggggagacccctccccatgcctgggctgttacagtcacctggcccagacgtaacctggaccaagagtggacggagacacctggggttggggcctctggaagggctgctggggggccagctgcagcctgtggcctctcccaggcccggatatggcaggacatttgcgtcgtgttgctggaagaggcaggatgctctgttctcgccattagcctgcgttacgcctagactcatctgcataagcctgggcaagtggcacccctgggccaagggcagacttgcccacccgtccatcctttgcctatggcagaggacacacaacacagtggctgcgctttgggcactgttctcggccctgaagcatcctgccccgaggctgacctaactgcccccagctggactcatggccaaggctacagacccagtactccaatcccgactcccactgtgtggtccaaatgtgtacgcccacaggaggcagccatgcccgaggaaggtacttgctgaaagatggtccagttcatgccgccaccagctggacctctgatcaggccccctgcagaaggggaagctctccacatgcccaagatacgagagaaacgcccgggtcacagcagcctgagtcactgcagcctctgctacctgccaagcctgcgccctccacctgtgggctccttgcctctgtgatggggcctccacggccagcatcttcccgccatggtcacatgatgccatgccctgctctgggcacccctaagcgggtatgaggcgaatcagaggaagaatatcggcttctcttcccttttggatatttgcgtcattgaccgggactggcccactcttcctctgcctcacgcctgctttgaccttagaagacagacggcagctcgcgttgctgggctgagattctccaatggacgtgaatttagatgatgctgttgccttgggtggcttcatggccaccaacccgcaccctggtggccactcagccatgacaagggcctgacagccactaagtgagcttcagagccttccccttgcaaagttccagggccaccagatgtcgcctgcccagtcactgtcacagagttaaagcgtgcgggtgaacgctggccgcggagcgtgcagcccggcagcagctcagcggggcagctcctgcttccagccctgcctctgctggtgcttcgcccacaaaccctgctgtatgacatttgcaccacatggtgtgtgtccgtgccctttgacatgacagtgccaacaacatctcatgaaatttaaaataaatccccaaggcatc

SEQ ID NO: 134845 - DNA, 721 bp, Homo sapiens
  Payload ID: 6334
  Gene Symbol: FLYWCH1
  Gene Name: FLYWCH-type zinc finger 1
  ENST ID: ENST00000570425
  CDS Start-End: 581-721
aggggcaggtcggggctgggagctggtgcccgggtcggggtggcggcggcggcctgggtcgcggggtcgacgctcgctgctgcagcggcagaggctgaaggatccgccgcggcgctgtcgcgggagagggagggccccgctgccgtcgtgctactggcgggacgtgtggaaggaacaaggctgaggttggggctagattgcggagtgtttatgacgcccagctgatgatgcactaaggctggagatggagatgatttaattggggagagacatgctgaaagttaagctttaggaagagtgacctgtcagcaccctatgtggagaattggagtggctgcttgccaaagctggcaagatcgttcagaggctttggcttgggctaaagaggtcgtggtgaaaccagcccagagaagttacgggatttgcccccggggctcctgcccagcaagccagcgccgtgacccaggtgtgggggatgatggtgacgcttctcactcacgtgtgaaggacggaaccactgcactccaggttccttgctgggtgctgagcgtggcctgagggacaggccctgggtcccgggatgcccctgcccgagcccagcgagcaggagggcgagagtgtgaaggccggccaggagccatcccccaagccaggcacggacgtcatcccggcagcccccaggaagcccagggagttctccaaactggtgctgctcacagcc

SEQ ID NO: 134846 - DNA, 1470 bp, Homo sapiens
  Payload ID: 6334
  Gene Symbol: FLYWCH1
  Gene Name: FLYWCH-type zinc finger 1
  ENST ID: ENST00000573564
  CDS Start-End: 1-1403
agccggccctggaggaggaggaggcaccccgagccctgtcactgctgagcctgccgcccaagaagcgctcgatcctggggctgggacaggcccggcccctcgagttcctgaggacgtgctacgggggcagcttcctggtacacgagtcgttcctctacaagcgggagaaggctgtcggggacaaggtgtattggacctgccgggaccacgcgctgcacggctgccggagccgggccatcacccagggacagcgggtgactgtgatgcgtgggcactgccaccagcccgatatggagggcctggaagcccggcggcagcaggagaaggccgtggagacgctgcaggctgggcaggacggccctgggagccaagtggacacgctgctccgaggcgtggatagtttgctctaccgcaggggtccgggtcccctgactctcaccaggcctcggcccagaaagcgagcaaaggtcgaagaccaggagctgccaacccagcccgaggccccagacgagcaccaggacatggacgcagacccgggaggccctgagttcctgaagacgcccctggggggcagcttcctggtgtacgagtccttcctctaccggcgggagaaggcggctggggagaaggtgtattggacctgccgggaccaggcccgcatgggctgccgcagccgcgccatcacccagggccgacgggtgactgtcatgcgtggtcactgccacccgcccgacctgggaggcctggaggccctgaggcagcgggagaaacgccccaacacggcgcagcgggggagcccaggaggccccgagttcctgaagacgcccctggggggcagcttcctggtgtacgagtccttcctctaccggcgggagaaggcggccggggagaaggtgtattggacctgccgggaccaggcccgcatgggctgccgcagccgcgccatcacccagggccggcgggtcatggtcatgcgcaggcactgccacccaccggacctgggcggcctggaggccctgcggcagcgggagcacttccccaacctggcgcagtgggacagcccagatcctctccggcccctggagttcctgaggacttccctggggggcaggttcctggtgcacgagtccttcctctacaggaaggagaaggcggctggggagaaggtgtactggatgtgccgggaccaggctcggctgggctgccgcagccgcgccataacccagggccaccgcatcatggtcatgcgcagccactgccatcagcctgacctggcaggcctggaggccttgaggcaacgggagcggctccccaccacggcccagcaggaggacccagaaaagattcaagttcagctgtgcttcaagacgtgttctcctgaaagccagcagatttatgggtaattgtatttgttatctaatggtgcatgaccaattacaacaaaacgtagtgggcttaaaacaacaaata

SEQ ID NO: 134847 - DNA, 404 bp, Homo sapiens
  Payload ID: 6334
  Gene Symbol: FLYWCH1
  Gene Name: FLYWCH-type zinc finger 1
  ENST ID: ENST00000571983
  CDS Start-End: 1-235
ccaggctcggctgggctgccgcagccgcgccataacccagggccaccgcatcatggtcatgcgcagccactgccatcagcctgacctggcaggcctggaggccttgaggcaacgggagcggctccccaccacggcccagcaggaggacccagaaaagattcaagttcagctgtgcttcaagacgtgttctcctgaaagccagcagatttatggtaaatcccagccactagtatgatggtaggctaagtcctgtgagtccctcaagtgcagtcaccaagcctagtgtgtgatggggatgcctgcataccagatcagtagagaaaaggacaaaaaccgtgtgatcactgaatagacacaaaacatttgacaacctccaacacgctttcatgataaaaacattcaac

SEQ ID NO: 134848 - DNA, 643 bp, Homo sapiens
  Payload ID: 6334
  Gene Symbol: FLYWCH1
  Gene Name: FLYWCH-type zinc finger 1
  ENST ID: ENST00000573525
  CDS Start-End: 413-643
gggagctggtgcccgggtcggggtggcggcggcggcctgggtcgcggggtcgacgctcgctgctgcagcggcagaggctgaaggatccgccgcggcgctgtcgcgggagagggagggccccgctgccgtcggtgaaaccagcccagagaagttacgggatttgcccccggggctcctgcccagcaagccagcgccgtgacccaggtgtgggggatgatggtgacgcttctcactcacgtgtgaaggctggaacccgtggtgacctcagaattctccagacaccaccacagccccgtccccgaccagccgaggcagccacagcaacagctccggcacaaggacggaaccactgcactccaggttccttgctgggtgctgagcgtggcctgagggacaggccctgggtcccgggatgcccctgcccgagcccagcgagcaggagggcgagagtgtgaaggccggccaggagccatcccccaagccaggcacggacgtcatcccggcagcccccaggaagcccagggagttctccaaactggtgctgctcacagcctccgaccaagatgaggatggggtgggatccaagccccaggaagtgcactgcgtcctgtccctggagatggctggccccgccaccctcgcc

SEQ ID NO: 134849 - DNA, 757 bp, Homo sapiens
  Payload ID: 6334
  Gene Symbol: FLYWCH1
  Gene Name: FLYWCH-type zinc finger 1
  ENST ID: ENST00000575679
  CDS Start-End: 1-280
ggccttgaggcaacgggagcggctccccaccacggcccagcaggaggacccagaaaagattcaagttcagctgtgcttcaagacgtgttctcctgaaagccagcagatttatggggacatcaaagacgtcagactggatgcatcgatggtcttcgcgtctcctcaggaggtctcccaggaggaattcttggatggtgtcctcatgtcggcggagaacagtgctcagagctggcgcttgcagacgcagctgtcgtggggcagggcggtggcgccttcctgacctttggaagacatgacaaagctgcctggacacggacgcccctgctgtacggccacagcacccctgggtttgcagagcacgcagccttcctagggctttccacctggcgaggccccgctctgctcagcacggtgcaaagtgaatgctgctgtcttggagcctgggcacgtttggggaagttcctgcttcaaactgagctgccccgcataggccaggtcaacccacaccaatctcttctggacaggtgctgggtaggccttcctggtctctggccgcctgctgccagggtgtggccatccccagcaaccggagctggccaaaccagaggcctcgctccgcactccacactttcctttctgtgctccttccaagttaaattaaaccccctctccacgattcccacggcaggcgtcattcccgagatgggagccagtccaggggtcagcaggagccagcgctgggcacacgtgccctggc

SEQ ID NO: 134850 - DNA, 594 bp, Homo sapiens
  Payload ID: 6334
  Gene Symbol: FLYWCH1
  Gene Name: FLYWCH-type zinc finger 1
  ENST ID: ENST00000571580
  CDS Start-End: 1-594
ctggggagaaggtgtattggacctgccgggaccaggcccgcatgggctgccgcagccgcgccatcacccagggccgacgggtgactgtcatgcgtggtcactgccacccgcccgacctgggaggcctggaggccctgaggcagcgggagaaacgccccaacacggcgcagcgggggagcccagagagacagtgctgcgaggtccccgcctcgtcctcacccccgctcctgaccccacaaagtcctggggtcacacctctacctgcgcggctctcgggggccacccctctcagccccatccggctcctgagcagctttgtccccagagggccccgggtcattcctctgaccaaccaggcacggcgcaccctgcatgcaagcctgggcgggtgctggggacggacgagtgacgcagcagacactgcctccctgaaggcatggcaaggaggccccgagttcctgaagacgcccctggggggcagcttcctggtgtacgagtccttcctctaccggcgggagaaggcggccggggagaaggtgtattggacctgccgggaccaggcccgcatgggctgccgcagccgcgccatcaccc

SEQ ID NO: 134851 - DNA, 3930 bp, Homo sapiens
  Payload ID: 6335
  Gene Symbol:
  Gene Name: FMN1
  ENST ID: ENST00000633316
  CDS Start-End: 468-2456
ggactggagcgcagcatccttcgaggctgcagccgccacggctgttgccgtaagcaatcctcctgcctcagcctcccgagtagctgggactcgggaccagcctcccgagtattggtcagatgacatttaccatcaccgttttcttcttctttcatcatcatcatcatcaccattgccactaccaccacctccaaggccactaccaccacagcatctctgttcctccatcagagctcttcaagttctgtaaaggcagattctctaaaggcatgcctggtggcatcacgtttttcacatctccgcatctggaccctgcccaagcgaaggctgatctaggcagtctcattgctggagatgactgtcagctgctttctctgcatagccaccatcacatgcctcaccactggagcctgggaagcctgaccacaaaccggcatctccaaggcatgaataattaggtaggcataatggaaggcactcattgtaccctccaattgcataagcccattacggaactctgctacatcagcttctgtcttccaaagggggaagtcagaggattttcatacaagggcactgtaactctagacagatccaataaaggttttcataactgctaccaagtcagggaggagtcagacatcatcagcctcagccaggagccggacgaacatccaggcgacatatttttcaagcagactcccacgaaagacattctaactgagctgtacaaactcacaacagagagggagagactgctaaccaatctcctgagctcagaccacatcctggggatcacgatggggaaccaggaggggaagctgcaagagctgtccgtgagcctggcccccgaggatgactgtttccagagtgctggtgactggcagggagagctccccgtgggccctctcaataagaggagcacccacgggaacaaaaagcctcggaggtctagtggaaggagagagagctttggggcccttccacagaagaggaccaaaagaaaagggcgtggaggccgagaatcagctcctctgatgggcaaggacaagatctgttccagccactcccttcctctttctagaacaaggcctaacctttgggtactagaggagaaaggaaatctgctcccgaatggggcacttgcctgctccctgcagaggagagagagctgccccccagatattcccaagacgccagacacagaccttggctttgggagctttgagacggctttcaaggacactgggcttggaagagaagtgctgccccctgactgcagctccacagaggcaggaggggatggcattcggaggccgccgagcgggctggagcatcagcaaacaggtttgtctgaaagtcaccaggaccctgagaagcatccagaggcagaaaaggatgagatggagaagccggctaagcggacttgcaagcagaaacctgtctccaaagtggtggccaaagttcaggacctgtcctcccaggtacaaagagtagttaaaacgcattctaagggtaaggagacgattgccattcgcccagcagcccacgctgagtttgtacccaaagccgacttgctcaccctcccgggagctgaggctggggctcatggctccaggcggcagggcaaggagcggcaaggggataggtcatcgcagtcgccagccggggaaacagcctccatttctagtgtgtcggccagtgccgagggggccgtgaacaaggtccccctgaaggtgatagagagtgagaagttagatgaagcccctgaggggaaaagactgggcttccctgtccacacgagtgtccctcacactcgcccagaaacgagaaacaagaggagagccgggttgccccttggtggccacaagtccttgtttctggatctgccccacaaagtaggtcctgactcctcacaacccagaggtgataagaagaagccatccccaccagcaccggcagctcttggcaaggtgtttaataattcagcctcgcagtccagcacacacaaacagacgtcacctgttccctcgcctctgtctccaaggctccccagccctcagcagcatcacaggatcctccggctccctgcattgcctggtgagagggaagctgctcttaatgactctccttgtagaaagagccgtgtcttctctgggtgcgtctctgctgacaccttggagccaccatcctctgcaaaggtcacggagaccaaaggagccagcccggccttcctcagagcaggccaacctcggttggtgcctggggaaactttggaaaagagcttggggccagggaagaccacagctgagccccagcaccagtcacctccagccttccattgggatcttcagcagcactttcaggaaccagtcataagaactgtaagcatctcctgtgcttctaaccttataaaagaagaagctggaaaagggaaggagagtagaagtgggtaagagctttttttgatatgggtaacttctctactgtggagacttcctatagggcctccagccattacctcctattggccctactttgaaaggcatgagggagggagttccccagatagtacctttgatttgtatcctctgtctagttcccttttctctcttgattttccctttcctgtcgctgtgagtcctctttatattctgaacccttcagtgactccctgcagctgggaagcccatacagggagaagtttcctgcttccagctacctttgtctttcacttcatttctcttcccacctaaacccagaagagggctcagagagttgccagcagtccagaaagaggggtgaataattcatttaccatcacactacagtgtccctttatctgaacccaactcccacctttctcccaggttagctattaaccagattaagtttatggtctgtggacatttatttcctgtggaaataacatctaggtatttttattgaagtgatgtcattaagattattgaaagctctcattaactgcttaagaaagagattaagtctggcaaaagtaatcagatctgtttccagttggaagactcttcaatgttagaggcaagtagtaattcccaggaaccagtgaaacccgcttatccttgttacaagactaagcagttaaagctgacattaccattcatgcaggatgtagcataaggatgtcacagaggccagcgatgcaccttctgttgggtttgtaatttcttaacttctcatttcaaggatgatgcatgggaatctccattatcaccacatagtggtgataaaatagagaatatactaacaagaactggtagtcaggtttttcttctcctgcctcctcccaccaccaacctggagattggttttatagtattttatttggcgggtggagactgatgtggaatgttcccaagcctttgtggagtatggtcttcccccaaaccttgaggaactctagttgtgctagcctgcaaagcagtgtccttggagcttggtgctaggattcctttctgttttgcttgctttcatttacctttgattcaaagtaaacccttttagtgccagaagaatcacagggagcttggctcaccatacttgggaaatgcccaatctttagtatgctcttgagtaatcctgtggttgttttcctttgactgaagtcactgatgtggtgatggaagcatatgctccaggcatagttcttcctgatattgagaactgagaatctcttgatcaattcttgtgcccatgaaaatatgtaattaatgtcaacttattaagagttaagaggcatacatgaaataaattttatttacatgtgtaaacccctaatactactgtcaaagctttgattgtctctgtggatatacattatgggaagtaaatataaactcttcccatattaatattaaggtttgatgcaattccaataaaattgtaaagaag

SEQ ID NO: 134852 - DNA, 4251 bp, Homo sapiens
  Payload ID: 6335
  Gene Symbol:
  Gene Name: FMN1
  ENST ID: ENST00000633180
  CDS Start-End: 127-4092
ctcattgctggagatgactgtcagctgctttctctgcatagccaccatcacatgcctcaccactggagcctgggaagcctgaccacaaaccggcatctccaaggcatgaataattaggtaggcataatggaaggcactcattgtaccctccaattgcataagcccattacggaactctgctacatcagcttctgtcttccaaagggggaagtcagaggattttcatacaagggcactgtaactctagacagatccaataaaggttttcataactgctaccaagtcagggaggagtcagacatcatcagcctcagccaggagccggacgaacatccaggcgacatatttttcaagcagactcccacgaaagacattctaactgagctgtacaaactcacaacagagagggagagactgctaaccaatctcctgagctcagaccacatcctggggatcacgatggggaaccaggaggggaagctgcaagagctgtccgtgagcctggcccccgaggatgactgtttccagagtgctggtgactggcagggagagctccccgtgggccctctcaataagaggagcacccacgggaacaaaaagcctcggaggtctagtggaaggagagagagctttggggcccttccacagaagaggaccaaaagaaaagggcgtggaggccgagaatcagctcctctgatgggcaaggacaagatctgttccagccactcccttcctctttctagaacaaggcctaacctttgggtactagaggagaaaggaaatctgctcccgaatggggcacttgcctgctccctgcagaggagagagagctgccccccagatattcccaagacgccagacacagaccttggctttgggagctttgagacggctttcaaggacactgggcttggaagagaagtgctgccccctgactgcagctccacagaggcaggaggggatggcattcggaggccgccgagcgggctggagcatcagcaaacaggtttgtctgaaagtcaccaggaccctgagaagcatccagaggcagaaaaggatgagatggagaagccggctaagcggacttgcaagcagaaacctgtctccaaagtggtggccaaagttcaggacctgtcctcccaggtacaaagagtagttaaaacgcattctaagggtaaggagacgattgccattcgcccagcagcccacgctgagtttgtacccaaagccgacttgctcaccctcccgggagctgaggctggggctcatggctccaggcggcagggcaaggagcggcaaggggataggtcatcgcagtcgccagccggggaaacagcctccatttctagtgtgtcggccagtgccgagggggccgtgaacaaggtccccctgaaggtgatagagagtgagaagttagatgaagcccctgaggggaaaagactgggcttccctgtccacacgagtgtccctcacactcgcccagaaacgagaaacaagaggagagccgggttgccccttggtggccacaagtccttgtttctggatctgccccacaaagtaggtcctgactcctcacaacccagaggtgataagaagaagccatccccaccagcaccggcagctcttggcaaggtgtttaataattcagcctcgcagtccagcacacacaaacagacgtcacctgttccctcgcctctgtctccaaggctccccagccctcagcagcatcacaggatcctccggctccctgcattgcctggtgagagggaagctgctcttaatgactctccttgtagaaagagccgtgtcttctctgggtgcgtctctgctgacaccttggagccaccatcctctgcaaaggtcacggagaccaaaggagccagcccggccttcctcagagcaggccaacctcggttggtgcctggggaaactttggaaaagagcttggggccagggaagaccacagctgagccccagcaccagtcacctccagaataccaagctgctattttacacttgaagagggagcacaaagaagaaattgaaaacctgcaggcacagtttgaacttcgggcatttcatatccggggcgagcatgcaatgataacagcgagactagaagaaaccattgaaaatctgaaacacgagctagaacacagatggcgagggggttgtgaagagaggaaagatgtgtgcatttccaccgatgatgactgccctccaaagaccttcagaaatgtgtgcgtccagacagacagagagaccttcctcaagccctgtgaaagtgaaagcaagacaaccagaagtaatcaattagtacccaaaaagctgaatatctcctctttaagccagctctcacccccaaatgaccacaaagacatccatgcagcactccagccaatggagggcatggcatcaaatcagcagaaggcattgcctccgcctcccgcatccatccctccccctccgcccctcccctcaggacttggatctttgtctcccgcacctccaatgccacctgtgagtgctgggccaccgctaccacctccgcctcctccaccgccacctctacctccaccttcaagtgctggacctccaccacccccacccccacccccacttcctaactcccctgccccacccaaccctggagggcctcctcctgctccaccacccccaggacttgcacccccacctccccctggactcttctttggacttggctcttcttccagtcaatgtcctcgaaaaccagccatcgagcccagttgtcccatgaagcctttatattggactaggatacaaataagtgataggagccaaaatgctacaccaaccttatgggactccttagaagaacctgacattcgggaccccagtgaatttgagtatttattctccaaagacacaactcaacagaagaaaaaacctctgtcagagacttatgagaagaaaaacaaggtcaaaaagatcatcaaattgttggatggaaaacgatctcaaactgtgggaatcttgatatctagtttacatttagaaatgaaggatatccaacaggccattttcaatgtggatgactccgtggttgatctggagaccctggcagccttatatgaaaacagagcccaagaggatgagctggttaaaataagaaagtattacgagacatccaaagaagaagaactgaagctgctggataaacctgagcaatttttacatgagttagcccagattcctaattttgctgaacgtgcccagtgcataatcttcagatctgtcttttctgagggtatcacctccttgcacagaaaggtagagatcatcacgcgagcttctaaggacttgctgcacgtgaagagcgtgaaggatattttagctctcatcttggcttttggaaattatatgaatggaggaaataggactcggggacaagccgatggatatagcttagaaattctgcccaaactcaaggatgtcaaaagtcgggataatgggattaatctggtggactacgttgttaagtattacctgcgttactatgatcaggaagctggaacagaaaagagtgttttccccttgccggaaccacaggatttctttctggcctcccaagtcaagtttgaagacctcataaaagatttgagaaaactgaagaggcaactagaagcaagtgagaaacagatggtggtggtgtgcaaggagtccccaaaggagtatctccagcctttcaaggacaaactagaggagttcttccaaaaagccaaaaaagagcataagatggaagaaagtcacttggagaatgcacagaaaagttttgaaacaacagtacgatattttgggatgaagccaaagtctggtgagaaggagatcacacccagctacgtgtttatggtgtggtatgagttctgcagtgacttcaagacaatttggaaacgggagagtaaaaacatatctaaagaaagattgaaaatggctcaggaatcagtcagcaagttgacttcagagaagaaagtggagacaaagaaaatcaatcccactgctagcctgaaagaaagactgcgtcagaaggaagccagtgtgaccactaactaagatgaagacacatggaaatgatggcactggaggtggaggaccttgcacgcatactctttgtgaccacagggttgcaggacgttcttgaaagatgtgtcactaaatgtttgtttttgctcatctctttctgaggtcatctgcagagagtgccccatgcct

SEQ ID NO: 134853 - DNA, 12355 bp, Homo sapiens
  Payload ID: 6335
  Gene Symbol:
  Gene Name: FMN1
  ENST ID: ENST00000631811
  CDS Start-End: 1-3591
atggagaacgttgataattctctggatggcagtgatgtgtcagaaccagcaaaaccagaagccggacttgaagtggctcagtcgatcctgagtaagttctctatgaaatccctatttgggtttacgagtaaattagaatctgtgaatccagaagaggaagatgctgtgctgaaagcattccatagtttagacgtgaatcccacatctcagcaggatgattccagcaatggcttggatccacaggaagcagggtctcgggtttcacctgacctcggaaatgatgagaaaattgcaagcgtggagacagaatcagagggaagtcagagaaaagaagcagggacatctctccttgctcaagagctgcttccactgtctactttgaaagggacaaaagacgatgtcatttgtgttcgtgggaccctggtgcacaccaccagtgattctgactctgatgatggtggccaggagccagaggagggaagcagcaccaatggcccaaagtcccctagtggtgttttatctgagccatctcaggagtccaaagaaaacccaggaggtttcagggaaaatactgtcactggggaaatgaatggtgcagagctctgtgcagaagatcctcaaaggattccacctgagatgagcagcaaactggaagctggcaacggtggtcttcagacagagcgtcgccccagccaggaccaggtgggagaagaagggtcccaagacctacctgcagtaacaaaccagaattcgagtgttggtatcactgagagtgcctcttctaaaaaagaagtctctggagagaagtcattccaacttccagcttttttcagtgggcttcgtgtgctgaagaagggggctaccgctgagggaggagagaccatcacggaaattaaaccaaaggatggggacttagctttgctcaaattgacgcagcctgtgcagaagtccttagtgcaggcagggctgcagacagtgaagagtgagaagaaagcaactgatccgaaggccactcccactctcctggagcagctctctctgctgctcaacattgacatgcccaaaactgaaccgaagggagcagaccctgagtcgcccaggagagaagagatgggctgcaatgctgaccaagagagccagagcggccctggagtaccacaaacccagggtggtgaggtcaagccaaagtcgccagagacagccctggaggcttttaaagccctattcatccggccccccagaaaggggaccacagctgacacctctgagctggaagctctcaagcgcaagatgagacatgagaaggagtcgctaagagctgtgtttgaacggtccaattctaagccagcggatggcccctctgattccaaaagtcctgaccacagcctgactgagcaggatgacaggactcctggcagacttcaagctgtctggccacccccaaagacaaaagacacagaagaaaaagtgggactgaagtacactgaagcagaataccaagctgctattttacacttgaagagggagcacaaagaagaaattgaaaacctgcaggcacagtttgaacttcgggcatttcatatccggggcgagcatgcaatgataacagcgagactagaagaaaccattgaaaatctgaaacacgagctagaacacagatggcgagggggttgtgaagagaggaaagatgtgtgcatttccaccgatgatgactgccctccaaagaccttcagaaatgtgtgcgtccagacagacagagagaccttcctcaagccctgtgaaagtgaaagcaagacaaccagaagtaatcaattagtacccaaaaagctgaatatctcctctttaagccagctctcacccccaaatgaccacaaagacatccatgcagcactccagccaatggagggcatggcatcaaatcagcagaaggcattgcctccgcctcccgcatccatccctccccctccgcccctcccctcaggacttggatctttgtctcccgcacctccaatgccacctgtgagtgctgggccaccgctaccacctccgcctcctccaccgccacctctacctccaccttcaagtgctggacctccaccacccccacccccacccccacttcctaactcccctgccccacccaaccctggagggcctcctcctgctccaccacccccaggacttgcacccccacctccccctggactcttctttggacttggctcttcttccagtcaatgtcctcgaaaaccagccatcgagcccagttgtcccatgaagcctttatattggactaggatacaaataagtgataggagccaaaatgctacaccaaccttatgggactccttagaagaacctgacattcgggaccccagtgaatttgagtatttattctccaaagacacaactcaacagaagaaaaaacctctgtcagagacttatgagaagaaaaacaaggtcaaaaagatcatcaaattgttggatggaaaacgatctcaaactgtgggaatcttgatatctagtttacatttagaaatgaaggatatccaacaggccattttcaatgtggatgactccgtggttgatctggagaccctggcagccttatatgaaaacagagcccaagaggatgagctggttaaaataagaaagtattacgagacatccaaagaagaagaactgaagctgctggataaacctgagcaatttttacatgagttagcccagattcctaattttgctgaacgtgcccagtgcataatcttcagatctgtcttttctgagggtatcacctccttgcacagaaaggtagagatcatcacgcgagcttctaaggacttgctgcacgtgaagagcgtgaaggatattttagctctcatcttggcttttggaaattatatgaatggaggaaataggactcggggacaagccgatggatatagcttagaaattctgcccaaactcaaggatgtcaaaagtcgggataatgggattaatctggtggactacgttgttaagtattacctgcgttactatgatcaggaagctggaacagaaaagagtgttttccccttgccggaaccacaggatttctttctggcctcccaagtcaagtttgaagacctcataaaagatttgagaaaactgaagaggcaactagaagcaagtgagaaacagatggtggtggtgtgcaaggagtccccaaaggagtatctccagcctttcaaggacaaactagaggagttcttccaaaaagccaaaaaagagcataagatggaagaaagtcacttggagaatgcacagaaaagttttgaaacaacagtacgatattttgggatgaagccaaagtctggtgagaaggagatcacacccagctacgtgtttatggtgtggtatgagttctgcagtgacttcaagacaatttggaaacgggagagtaaaaacatatctaaagaaagattgaaaatggctcaggaatcagtcagcaagttgacttcagagaagaaagtggagacaaagaaaatcaatcccactgctagcctgaaagaaagactgcgtcagaaggaagccagtgtgaccactaactaagatgaagacacatggaaatgatggcactggaggtggaggaccttgcacgcatactctttgtgaccacagggttgcaggacgttcttgaaagatgtgtcactaaatgtttgtttttgctcatctctttctgaggtcatctgcagagagtgccccatgccttctttaagaagtccctcattaagccgcaggaacaatggaaaactatttaagggaacattgcagaaatatttgatgactgtttcttgtggaagcccaaagtccactctaagagcagaagaaataccaaaatgtttccaaaatttttttaaaagctgagatttccagctttataaccaaagcttgatatatgtcacattgtcacagaagagagaaaagatcattgaggacagttgccttgggagagttcaagtctttgtcgttacacactgctgttttgattattggtcttagttttgatcctgttgcagcaaaatcctgcagcatctttctctccaataatgttgcaactcaccaaaactattcttgaagaggtccaagaacatgtattatccagactaaaaaaatgattttttgttgttatggtttacgtgatgaaaaggagaaaaaacagaatcatacctgggtggagagagggagacaaatagccataaacttcatcctggagaacaagttaccatgcaaggagttgacatcagttgttaagtgaggcccattcttgtttttacatcggtcctttgtggtttttctgggccagcagagattctgcaccccaactcccaggagaaaatgtaatacctgagcaagcacagccttgggtgtgcttggacaagagacccagcggcagagcaccttttacattttggaccgttcatgaatgggcaatgttgtgttgatacgcagccgagttctacgttatgtgctgtgactgtgcagctggacgacccccatccccaggaggcagtttccagacaggagagcaaatgcaactcacagcacctgctcatgaccttggctgataggcatgtgaagtaggatgaagcaggactctttaatgtcaaaaaaactgaagggcagaaaaaaggttccttacatcaaaatgaaagtaattacattaatagaaaacttccaagtggaatattgttcacaggcagctctttctgaccctggctcttgagtcacataaggaaaccacctttgacctctctgacacttttgtctttaagccacgtctctgaaatcttgtgaggggtgaagaaagaggactggagatgaatggacaatatgatcaaagactcatttttaggccttgaagaggccgagctttctccccccaattggtggaggacagtccagagatgagcagaaatcttaaattccttcctgatccagcctccacatgtggcctgccccttgccccagcatctttccagaacccctggacttgccaggtgcctgagcatcttcccaggatatgcctgccagccagcagcccctcaggaatgcttctataatagatccagtaatgaaagcagcaccatatcctaatctaatgtcagcttcgagaatgaagactgcagtcaggatcaaatcaagtcacagaagccatattcatgcaggtgctaaccgccttttctactggtgcaactgaaaggaatatggtaacatggttggatttttaaaattcacaatgaaggaacgagacaagcaaaacagaaaagccgagaaggaacatgcatgactaaaaaggcttgaagttgcttgtgagcaagaagctttttatgctgctttcttacatagtttctcttcattttcacttaactctgaagacaaccaaaagaacggatcaattaaaaactgattccacttataaccattgtatgctccttctagtgttatcatgcacaagaaaagtgccagttttacccatgccatataattcagctcttttgagttatgtggggccagcagaagtctcaatccttataggcttgatggtgagagcagcgggaggtttgaggtgtactcattgcagtccactttggtctgtaagtaggatgcttacgagaaatcagtgaaggtaagcagggctgccactgtggccacgtaacccttcaggaaccagtgctgaagaataatgagtgagaacacttaatttgagagttagacaaatacagcccactttggatttcatcctagtgaacagactaaaactttgcagtaaaatacctatttctacaaagcaaggtttgcctgcctcggttggggaaacctagtggttttgtcacactagtcgatgtatgatgttagtgttgtaagacaccatggcagaatcttcattattctcacctattctgaaccctgcatcatgtatctgggatgccccctcccaagtccaccaatgtaccacgttgctgacacagccttcatttttaactcaaattgatgctcagtaaaggtcaatgacaatttgttcaaggaagttcatctaaaataatctggaggccttgaaaatgatccctctaaaatgctgttgagcttgtgttcagtgtagcaggaggatctgaacttttcctggagaggaggtgatcgggatgccatttggcagcttaagcacatcctgccagcaggctttaagtggctgttctaggcatagccctccctgaactagaaaggagagtaaccagtttgctatgctgcatctaaccagacacacctgacttagtagtaactctaagaacccttaacttacaaacaactttgtctcctcttagacaatattcattaaatctgaggacacagtttgacagtagttcagattcttgcatgagcaattgacagcatcagagcacacaatatcataagttacataaattacacaaagtacatcataaattacactacagacacgttaggtaaaaagcatcaggcccgggccgggcgtggtggctcatgcctataatcccagcactttgggaggccaagcgggggcggatcacgaggtcaggagattgagaccatcctggctaacacggtgaaaccccatctctactaaaaatacaaaaaattagccgggcgtggtggtgggcgcctgtagtcccagctactcgggaggctgaggcaggagaatggcgtgaacccaggaggtggagcttgcagctagccgagatagcaccactgcactccagcctgggcgacagtgagactccgtttcaaaaaaaaaagcatcaggcccatgaagtatcaaaaaccaggttaggaggtgtgctgtatggcttttatctcaataagtggcagcttactggggaaaaagaaataagaaaaagtgtggccaagcagaagtggatgtttatgatgacggtgggggcccagaggtcataggtgatggtcctactgcccaacagttgccttttgaatccttatgttgatgatggtgtctttctacacactcactgcaactactcaggaattataaagattttctgaaatctgagaagtggaataaggaaacccagtggagctattacacttttaaatgttctagccaaaacaaattgccagtatggttgaggaattgaatatcagatggcatgcagtctcccctcccctcccctatcaaggacagtagaagctgcaaacctcttctcagcctccttcaggcacctcctgttttcataagcaccatgaagaatggtgtttcctaaatgaaaagttcagatactgctggtaaagaaactggaaaaactgaaggaaggaataaaatatgttggtggtattaacacctccagtaagataagtcattggtacggtttttctaagggccgcagtgagatgtagcagaagaaatatgtttattttgggcaaagatttgcttattggcctgggattgcacattttctctatgatgtttgcaacagagaaattttcattttaatgatactcttcctttcttgaaagttacatgtcctcatttctgtttctgcttctcccttggccagtgtcattgatgcagatcattgcatacaacagcacagcaaattgcgccaagtcagtgtgtgaatgggaattagcaatgcacgcttgcaggctctttttccaggaaccaggctgtaacattgaccggggaacctcttcattccctgacatactaaattggtcaattttgtagtactcatctccatccacaaaaacaacaaagataaaatcaatttggagctttatatgacaaaaaggaagaagtccaaaaatatatagccttcccccctcccacatatctgatccaaatattaaatatctgattttataaaacagtttaaattgtctttttaaattgctaacaagcatcagttatatttgagcttcatttttcttttatcctgtctgtcctaataaaaacaaaaatggccaaaaagtggagaggaaagaaaaagcttccactttttaaaatttgttttgtattagttattttacctttagggaccctacaactgaagagagtggagagaataaagaagtgaactttcattcatgtctgctactttgacctcataaagaaatctgcaacacagatgaaaccagtctgtgtggccaagctgatgggatttgaaaagagtggataatttttagcctttccaaaatgcaaataacttggatatatttccattttccagctatagagagaaacaatccagctgcctggaaactgttattagtatagaagtggcttaaagaaaagcatcttcaaatacttgacttagcatatctttcttctttagacttacataatgatattcatctctccattagcaattgaatccaggcataaccgggctcagttacacagcttgtctgtgactgggaagcccattttgtgtcatttctgcacacctgtccgctgttgacaccttattagaggcactgcattttggtttcacaattcttcatctcccttcccaaggaatgggcaatctactgaacttccagatcaatgctttgttggaaagtgatgaatttaagagagttttaacatgtcaaatttgaagccaattcagtatccttatttgttccaagactcttaaccaatactgtgatataaagttaggatttgggaaacgtgtagttaacaacttggaaacatgaagatattaaaatggcagctggctaactgtctcttaagccactatgcaatttctaccaatggagagattagggaagcaaattaagcctcattcagtaggtctgctgtctggtggaacttacggaactcatttcctcctctatccccagcccttctcctaactatggtgataaccagggccatagaagaccttttctctcttacctttctctgataggatcgtgtccttcagtcaagagctcatgtgaactccagactttatattacatctctgaagttcttgatgtggggaagattgacttttattccatttttatatgaaggtgttagatatagccatcaatttatttttctacattccctctacgcttatgtaattttctatttttaaatcttctcttaaatatactgagaatctctagtctccttttctaaaggctgatccaactacacttgtgggctatttttccaagctttgtgtgaaacttgatgacattgggccagcaaaatgcaaagaagactatagtttcaggcagaaaatcacgtccaaagaatttggcatggattaaacaacctctaccacactatagctctcacataggctgaacattttcctaaattctacctgtgcagacactgaggggctctctacctttgaaactatgagaacgtcttaaattaatatgaatatttctctccatgtatagtgtgagctgccaatgcattatcttaatacatcaagaaggaaatcagatttcaggcacacattagcaattgtttgttaatgtccttggcaaacgtgtacctgctttccttcattgttctcttcaggggctttcttccactttcctcttatgaaacgaatgtgtttttgactgttaactgggttcgctttccagatctgtctttcccaaatgaaaggttagtcccatagaccactggctattcagggaaattactctctacctccccatgacatggatgataagtgttgagggatgaacactctggaaactcttagcatggattttgaattccagatttctttataggagatgtataaaaaggagtttatagcatacaaaaattatactgctcttcccagtaagggactaaaaggacatttgaaatctttacattttagatgtttttgtgaattataaatatctcctttttcctcgcttcatgctaacttgtctctagataaaatcttatttcttcatacattggaccacaaggcataaagaaggtagctcagcgccactgagattgtgttctgcataatatttggaaggcttccatttccattgaaaacaaatccatgagtgagagggaaagtctagtatcaattcttctgtttgctcgcaatgacacaaataggttttggggatctacctaagggataggtctactccaaaattattaaatttataattgtgcaattctgtaatttcccaaggcataagtaatatgaccctactgtcagctagatgtcttatcttcaaagagagtatgcattaataaaaagaacttccctttaaagaaccaatctaaaatactaaaaaggcagaaacttttaaaattagaaattggataatttttaagaatctttagagaaaacattggtttatcatagtctttttctttcattgagttttcatttagactagcatggcaagcagggtggccttggactttgatttaggggatcgtgctttggcctggaaaataagcactggcctgcatgcctagaacctgagtgaaggcagtcaacatcctagtatgaatcagacctagcagaaatgtaaattatttcaagtacttcagggtttagttttcttagtgacaccctggaccctggatgctgctttctaaagtgcacctgatccatgcagttttatgtcttcatataactggtatcttgtgagtttgcaagcaatgggatgagcaagaaaaaaaggacgcatggaggagaaaaatttgaacgaggctagtgcaatgttttgctgatagattacattgttagggagctggtgattttttgccatggtcgtatcgtggacagcttttccgtggaaattcaaggcatctgtattaggcaaatgtgagtgcccttgatcttgtattgatcagtgccaatgtactgggaaagcaggtaccccagtgaaactggtctgtgcttggtttaacagctccaacaatttcagatccatggggctgcttgaccatagaccctgtttactccatgcctgttcaaaagtcattttgacttctagctttgtttcactttcttctttcaatacttctgtttcctcgtccttttccttcatattccatggctatttctttcctactttacagtttcccccagacccagattttttcacacctctgcatcatagacaactgagtagctcccttggcccctcctccatcctctcacaccctgtgctccgttcctcagccgtttggacagggagctccgctgtcaccaaggagcccatgtgagacacactgctgtgactgcctcttgttaatgtcagcatcacctcatcacttaagcaaaaaggaaaatccataaaagagatggaaaatacgtctctttttattttattttaagaagattgggcggggtggggggggggttcttattctaggccttctcaatttctcatagattttaccttaaactaattaaggccattctcttgataaatttgtacatcagaccgggtcaccagctatgatgcagaacgccagatttttgaatctcaagtaactttctgtggtgctggacaaattgacttaattctgtgcaggcaaacactttgaatcataaggatttttattgccgctccattcttactactattcatgattcaaacatctacccctgttctgaatcaggatgttgacacttcttggttattttcagatgaacagtaactgctacactcttgaaagcacttaaaagtgcaagcatgtcctaaatagccatttaacctggtaaaacataggcttttctgtttaattaagtattagaccagtctgtagatataatctgaaaagattgtaggcagtaatgaagacagttggggaaaggagaaggccctttaaagacatgaaaccttacacgctcttgggatatttttaagcataataagctcattggattcaggtatttttccctttgcatttttaaaaatacgtatttctaatttgtttgcatatttaattttgtcaaagctgagaaatgctcatgagttgaatttataaatgtcatttgcaaccaaatgaagtatttatttttaaaaagagagtgaaggaaccaacactgatttgtacataataaaaatgtgtgtattatatatatatattttttcctccttgacagtacttggtcacaatatcaagtgtatttttgtacataatatatattgattagaaaaacgtcaattgtctattcaaaaaattctatctctgtgatagattatatttatcctaatctgttgatacctctgttaatttgttttaagagaattatattttttggaatttacagagaattgcattcatggctttcaattgtaaatatgctaagggtattttaataaatcttggtttcatgtc

SEQ ID NO: 134854 - DNA, 4260 bp, Homo sapiens
  Payload ID: 6335
  Gene Symbol:
  Gene Name: FMN1
  ENST ID: ENST00000631756
  CDS Start-End: 1-4260
atggaaggcactcattgtaccctccaattgcataagcccattacggaactctgctacatcagcttctgtcttccaaagggggaagtcagaggattttcatacaagggcactgtaactctagacagatccaataaaggttttcataactgctaccaagtcagggaggagtcagacatcatcagcctcagccaggagccggacgaacatccaggcgacatatttttcaagcagactcccacgaaagacattctaactgagctgtacaaactcacaacagagagggagagactgctaaccaatctcctgagctcagaccacatcctggggatcacgatggggaaccaggaggggaagctgcaagagctgtccgtgagcctggcccccgaggatgactgtttccagagtgctggtgactggcagggagagctccccgtgggccctctcaataagaggagcacccacgggaacaaaaagcctcggaggtctagtggaaggagagagagctttggggcccttccacagaagaggaccaaaagaaaagggcgtggaggccgagaatcagctcctctgatgggcaaggacaagatctgttccagccactcccttcctctttctagaacaaggcctaacctttgggtactagaggagaaaggaaatctgctcccgaatggggcacttgcctgctccctgcagaggagagagagctgccccccagatattcccaagacgccagacacagaccttggctttgggagctttgagacggctttcaaggacactgggcttggaagagaagtgctgccccctgactgcagctccacagaggcaggaggggatggcattcggaggccgccgagcgggctggagcatcagcaaacaggtttgtctgaaagtcaccaggaccctgagaagcatccagaggcagaaaaggatgagatggagaagccggctaagcggacttgcaagcagaaacctgtctccaaagtggtggccaaagttcaggacctgtcctcccaggtacaaagagtagttaaaacgcattctaagggtaaggagacgattgccattcgcccagcagcccacgctgagtttgtacccaaagccgacttgctcaccctcccgggagctgaggctggggctcatggctccaggcggcagggcaaggagcggcaaggggataggtcatcgcagtcgccagccggggaaacagcctccatttctagtgtgtcggccagtgccgagggggccgtgaacaaggtccccctgaaggtgatagagagtgagaagttagatgaagcccctgaggggaaaagactgggcttccctgtccacacgagtgtccctcacactcgcccagaaacgagaaacaagaggagagccgggttgccccttggtggccacaagtccttgtttctggatctgccccacaaagtaggtcctgactcctcacaacccagaggtgataagaagaagccatccccaccagcaccggcagctcttggcaaggtgtttaataattcagcctcgcagtccagcacacacaaacagacgtcacctgttccctcgcctctgtctccaaggctccccagccctcagcagcatcacaggatcctccggctccctgcattgcctggtgagagggaagctgctcttaatgactctccttgtagaaagagccgtgtcttctctgggtgcgtctctgctgacaccttggagccaccatcctctgcaaaggtcacggagaccaaaggagccagcccggccttcctcagagcaggccaacctcggttggtgcctggggaaactttggaaaagagcttggggccagggaagaccacagctgagccccagcaccagtcacctccaggtatctcctctgagggctttccctgggacggcttcaatgagcagacacctaaagaccttcccaacagagatggaggcgcgtgggttctgggctacagagcgggaccagcctgtccatttttgcttcatgaggaaagggagaagtcaaacaggagcgaattgtacttggatctccatcctgaccacagcctgactgagcaggatgacaggactcctggcagacttcaagctgtctggccacccccaaagacaaaagacacagaagaaaaagtgggactgaagtacactgaagcagaataccaagctgctattttacacttgaagagggagcacaaagaagaaattgaaaacctgcaggcacagtttgaacttcgggcatttcatatccggggcgagcatgcaatgataacagcgagactagaagaaaccattgaaaatctgaaacacgagctagaacacagatggcgagggggttgtgaagagaggaaagatgtgtgcatttccaccgatgatgactgccctccaaagaccttcagaaatgtgtgcgtccagacagacagagagaccttcctcaagccctgtgaaagtgaaagcaagacaaccagaagtaatcaattagtacccaaaaagctgaatatctcctctttaagccagctctcacccccaaatgaccacaaagacatccatgcagcactccagccaatggagggcatggcatcaaatcagcagaaggcattgcctccgcctcccgcatccatccctccccctccgcccctcccctcaggacttggatctttgtctcccgcacctccaatgccacctgtgagtgctgggccaccgctaccacctccgcctcctccaccgccacctctacctccaccttcaagtgctggacctccaccacccccacccccacccccacttcctaactcccctgccccacccaaccctggagggcctcctcctgctccaccacccccaggacttgcacccccacctccccctggactcttctttggacttggctcttcttccagtcaatgtcctcgaaaaccagccatcgagcccagttgtcccatgaagcctttatattggactaggatacaaataagtgataggagccaaaatgctacaccaaccttatgggactccttagaagaacctgacattcgggaccccagtgaatttgagtatttattctccaaagacacaactcaacagaagaaaaaacctctgtcagagacttatgagaagaaaaacaaggtcaaaaagatcatcaaattgttggatggaaaacgatctcaaactgtgggaatcttgatatctagtttacatttagaaatgaaggatatccaacaggccattttcaatgtggatgactccgtggttgatctggagaccctggcagccttatatgaaaacagagcccaagaggatgagctggttaaaataagaaagtattacgagacatccaaagaagaagaactgaagctgctggataaacctgagcaatttttacatgagttagcccagattcctaattttgctgaacgtgcccagtgcataatcttcagatctgtcttttctgagggtatcacctccttgcacagaaaggtagagatcatcacgcgagcttctaaggacttgctgcacgtgaagagcgtgaaggatattttagctctcatcttggcttttggaaattatatgaatggaggaaataggactcggggacaagccgatggatatagcttagaaattctgcccaaactcaaggatgtcaaaagtcgggataatgggattaatctggtggactacgttgttaagtattacctgcgttactatgatcaggaagctggaacagaaaagagtgttttccccttgccggaaccacaggatttctttctggcctcccaagtcaagtttgaagacctcataaaagatttgagaaaactgaagaggcaactagaagcaagtgagaaacagatggtggtggtgtgcaaggagtccccaaaggagtatctccagcctttcaaggacaaactagaggagttcttccaaaaagccaaaaaagagcataagatggaagaaagtcacttggagaatgcacagaaaagttttgaaacaacagtacgatattttgggatgaagccaaagtctggtgagaaggagatcacacccagctacgtgtttatggtgtggtatgagttctgcagtgacttcaagacaatttggaaacgggagagtaaaaacatatctaaagaaagattgaaaatggctcaggaatcagtcagcaagttgacttcagagaagaaagtggagacaaagaaaatcaatcccactgctagcctgaaagaaagactgcgtcagaaggaagccagtgtgaccactaactaa

SEQ ID NO: 134855 - DNA, 576 bp, Homo sapiens
  Payload ID: 6335
  Gene Symbol:
  Gene Name: FMN1
  ENST ID: ENST00000631673
  CDS Start-End: 1-175
atttttacatgagttagcccagattcctaattttgctgaacgtgcccagtgcataatcttcagatctgtcttttctgagggtatcacctccttgcacagaaaggtagagatcatcacgcgagcttctaagcaactgttaattctgttggtaccaagcctcccgacagcctattgagtacacagtcgatatttgttactgaatgaacatgggtgcatttggagttcagctccgtaataactggtgtttgccatcacaggacttgctgcacgtgaagagcgtgaaggatattttagctctcatcttggcttttggaaattatatgaatggaggaaataggactcggggacaagccgatggatatagcttagaaattctgcccaaactcaaggatgtcaaaagtcgggtatttatttttcataataagttcccatgatctgccattattttctttctttacctttaattttaaaaaacgtattccagattgttccatttatctctatcctccccttaacaacatttatattagagcatgcatttttttgtttgctttcttttcactttcgaataaagag

SEQ ID NO: 134856 - DNA, 13529 bp, Homo sapiens
  Payload ID: 6335
  Gene Symbol:
  Gene Name: FMN1
  ENST ID: ENST00000632024
  CDS Start-End: 505-4764
ggaggtcggcgcagctgcccctttgggctttggctctggactggagcgcagcatccttcgaggctgcagccgccacggctgttgccgtaagcaatcctcctgcctcagcctcccgagtagctgggactcgggaccagcctcccgagtattggtcagatgacatttaccatcaccgttttcttcttctttcatcatcatcatcatcaccattgccactaccaccacctccaaggccactaccaccacagcatctctgttcctccatcagagctcttcaagttctgtaaaggcagattctctaaaggcatgcctggtggcatcacgtttttcacatctccgcatctggaccctgcccaagcgaaggctgatctaggcagtctcattgctggagatgactgtcagctgctttctctgcatagccaccatcacatgcctcaccactggagcctgggaagcctgaccacaaaccggcatctccaaggcatgaataattaggtaggcataatggaaggcactcattgtaccctccaattgcataagcccattacggaactctgctacatcagcttctgtcttccaaagggggaagtcagaggattttcatacaagggcactgtaactctagacagatccaataaaggttttcataactgctaccaagtcagggaggagtcagacatcatcagcctcagccaggagccggacgaacatccaggcgacatatttttcaagcagactcccacgaaagacattctaactgagctgtacaaactcacaacagagagggagagactgctaaccaatctcctgagctcagaccacatcctggggatcacgatggggaaccaggaggggaagctgcaagagctgtccgtgagcctggcccccgaggatgactgtttccagagtgctggtgactggcagggagagctccccgtgggccctctcaataagaggagcacccacgggaacaaaaagcctcggaggtctagtggaaggagagagagctttggggcccttccacagaagaggaccaaaagaaaagggcgtggaggccgagaatcagctcctctgatgggcaaggacaagatctgttccagccactcccttcctctttctagaacaaggcctaacctttgggtactagaggagaaaggaaatctgctcccgaatggggcacttgcctgctccctgcagaggagagagagctgccccccagatattcccaagacgccagacacagaccttggctttgggagctttgagacggctttcaaggacactgggcttggaagagaagtgctgccccctgactgcagctccacagaggcaggaggggatggcattcggaggccgccgagcgggctggagcatcagcaaacaggtttgtctgaaagtcaccaggaccctgagaagcatccagaggcagaaaaggatgagatggagaagccggctaagcggacttgcaagcagaaacctgtctccaaagtggtggccaaagttcaggacctgtcctcccaggtacaaagagtagttaaaacgcattctaagggtaaggagacgattgccattcgcccagcagcccacgctgagtttgtacccaaagccgacttgctcaccctcccgggagctgaggctggggctcatggctccaggcggcagggcaaggagcggcaaggggataggtcatcgcagtcgccagccggggaaacagcctccatttctagtgtgtcggccagtgccgagggggccgtgaacaaggtccccctgaaggtgatagagagtgagaagttagatgaagcccctgaggggaaaagactgggcttccctgtccacacgagtgtccctcacactcgcccagaaacgagaaacaagaggagagccgggttgccccttggtggccacaagtccttgtttctggatctgccccacaaagtaggtcctgactcctcacaacccagaggtgataagaagaagccatccccaccagcaccggcagctcttggcaaggtgtttaataattcagcctcgcagtccagcacacacaaacagacgtcacctgttccctcgcctctgtctccaaggctccccagccctcagcagcatcacaggatcctccggctccctgcattgcctggtgagagggaagctgctcttaatgactctccttgtagaaagagccgtgtcttctctgggtgcgtctctgctgacaccttggagccaccatcctctgcaaaggtcacggagaccaaaggagccagcccggccttcctcagagcaggccaacctcggttggtgcctggggaaactttggaaaagagcttggggccagggaagaccacagctgagccccagcaccagtcacctccaggtatctcctctgagggctttccctgggacggcttcaatgagcagacacctaaagaccttcccaacagagatggaggcgcgtgggttctgggctacagagcgggaccagcctgtccatttttgcttcatgaggaaagggagaagtcaaacaggagcgaattgtacttggatctccatcctgaccacagcctgactgagcaggatgacaggactcctggcagacttcaagctgtctggccacccccaaagacaaaagacacagaagaaaaagtgggactgaagtacactgaagcagaataccaagctgctattttacacttgaagagggagcacaaagaagaaattgaaaacctgcaggcacagtttgaacttcgggcatttcatatccggggcgagcatgcaatgataacagcgagactagaagaaaccattgaaaatctgaaacacgagctagaacacagatggcgagggggttgtgaagagaggaaagatgtgtgcatttccaccgatgatgactgccctccaaagaccttcagaaatgtgtgcgtccagacagacagagagaccttcctcaagccctgtgaaagtgaaagcaagacaaccagaagtaatcaattagtacccaaaaagctgaatatctcctctttaagccagctctcacccccaaatgaccacaaagacatccatgcagcactccagccaatggagggcatggcatcaaatcagcagaaggcattgcctccgcctcccgcatccatccctccccctccgcccctcccctcaggacttggatctttgtctcccgcacctccaatgccacctgtgagtgctgggccaccgctaccacctccgcctcctccaccgccacctctacctccaccttcaagtgctggacctccaccacccccacccccacccccacttcctaactcccctgccccacccaaccctggagggcctcctcctgctccaccacccccaggacttgcacccccacctccccctggactcttctttggacttggctcttcttccagtcaatgtcctcgaaaaccagccatcgagcccagttgtcccatgaagcctttatattggactaggatacaaataagtgataggagccaaaatgctacaccaaccttatgggactccttagaagaacctgacattcgggaccccagtgaatttgagtatttattctccaaagacacaactcaacagaagaaaaaacctctgtcagagacttatgagaagaaaaacaaggtcaaaaagatcatcaaattgttggatggaaaacgatctcaaactgtgggaatcttgatatctagtttacatttagaaatgaaggatatccaacaggccattttcaatgtggatgactccgtggttgatctggagaccctggcagccttatatgaaaacagagcccaagaggatgagctggttaaaataagaaagtattacgagacatccaaagaagaagaactgaagctgctggataaacctgagcaatttttacatgagttagcccagattcctaattttgctgaacgtgcccagtgcataatcttcagatctgtcttttctgagggtatcacctccttgcacagaaaggtagagatcatcacgcgagcttctaaggacttgctgcacgtgaagagcgtgaaggatattttagctctcatcttggcttttggaaattatatgaatggaggaaataggactcggggacaagccgatggatatagcttagaaattctgcccaaactcaaggatgtcaaaagtcgggataatgggattaatctggtggactacgttgttaagtattacctgcgttactatgatcaggaagctggaacagaaaagagtgttttccccttgccggaaccacaggatttctttctggcctcccaagtcaagtttgaagacctcataaaagatttgagaaaactgaagaggcaactagaagcaagtgagaaacagatggtggtggtgtgcaaggagtccccaaaggagtatctccagcctttcaaggacaaactagaggagttcttccaaaaagccaaaaaagagcataagatggaagaaagtcacttggagaatgcacagaaaagttttgaaacaacagtacgatattttgggatgaagccaaagtctggtgagaaggagatcacacccagctacgtgtttatggtgtggtatgagttctgcagtgacttcaagacaatttggaaacgggagagtaaaaacatatctaaagaaagattgaaaatggctcaggaatcagtcagcaagttgacttcagagaagaaagtggagacaaagaaaatcaatcccactgctagcctgaaagaaagactgcgtcagaaggaagccagtgtgaccactaactaagatgaagacacatggaaatgatggcactggaggtggaggaccttgcacgcatactctttgtgaccacagggttgcaggacgttcttgaaagatgtgtcactaaatgtttgtttttgctcatctctttctgaggtcatctgcagagagtgccccatgccttctttaagaagtccctcattaagccgcaggaacaatggaaaactatttaagggaacattgcagaaatatttgatgactgtttcttgtggaagcccaaagtccactctaagagcagaagaaataccaaaatgtttccaaaatttttttaaaagctgagatttccagctttataaccaaagcttgatatatgtcacattgtcacagaagagagaaaagatcattgaggacagttgccttgggagagttcaagtctttgtcgttacacactgctgttttgattattggtcttagttttgatcctgttgcagcaaaatcctgcagcatctttctctccaataatgttgcaactcaccaaaactattcttgaagaggtccaagaacatgtattatccagactaaaaaaatgattttttgttgttatggtttacgtgatgaaaaggagaaaaaacagaatcatacctgggtggagagagggagacaaatagccataaacttcatcctggagaacaagttaccatgcaaggagttgacatcagttgttaagtgaggcccattcttgtttttacatcggtcctttgtggtttttctgggccagcagagattctgcaccccaactcccaggagaaaatgtaatacctgagcaagcacagccttgggtgtgcttggacaagagacccagcggcagagcaccttttacattttggaccgttcatgaatgggcaatgttgtgttgatacgcagccgagttctacgttatgtgctgtgactgtgcagctggacgacccccatccccaggaggcagtttccagacaggagagcaaatgcaactcacagcacctgctcatgaccttggctgataggcatgtgaagtaggatgaagcaggactctttaatgtcaaaaaaactgaagggcagaaaaaaggttccttacatcaaaatgaaagtaattacattaatagaaaacttccaagtggaatattgttcacaggcagctctttctgaccctggctcttgagtcacataaggaaaccacctttgacctctctgacacttttgtctttaagccacgtctctgaaatcttgtgaggggtgaagaaagaggactggagatgaatggacaatatgatcaaagactcatttttaggccttgaagaggccgagctttctccccccaattggtggaggacagtccagagatgagcagaaatcttaaattccttcctgatccagcctccacatgtggcctgccccttgccccagcatctttccagaacccctggacttgccaggtgcctgagcatcttcccaggatatgcctgccagccagcagcccctcaggaatgcttctataatagatccagtaatgaaagcagcaccatatcctaatctaatgtcagcttcgagaatgaagactgcagtcaggatcaaatcaagtcacagaagccatattcatgcaggtgctaaccgccttttctactggtgcaactgaaaggaatatggtaacatggttggatttttaaaattcacaatgaaggaacgagacaagcaaaacagaaaagccgagaaggaacatgcatgactaaaaaggcttgaagttgcttgtgagcaagaagctttttatgctgctttcttacatagtttctcttcattttcacttaactctgaagacaaccaaaagaacggatcaattaaaaactgattccacttataaccattgtatgctccttctagtgttatcatgcacaagaaaagtgccagttttacccatgccatataattcagctcttttgagttatgtggggccagcagaagtctcaatccttataggcttgatggtgagagcagcgggaggtttgaggtgtactcattgcagtccactttggtctgtaagtaggatgcttacgagaaatcagtgaaggtaagcagggctgccactgtggccacgtaacccttcaggaaccagtgctgaagaataatgagtgagaacacttaatttgagagttagacaaatacagcccactttggatttcatcctagtgaacagactaaaactttgcagtaaaatacctatttctacaaagcaaggtttgcctgcctcggttggggaaacctagtggttttgtcacactagtcgatgtatgatgttagtgttgtaagacaccatggcagaatcttcattattctcacctattctgaaccctgcatcatgtatctgggatgccccctcccaagtccaccaatgtaccacgttgctgacacagccttcatttttaactcaaattgatgctcagtaaaggtcaatgacaatttgttcaaggaagttcatctaaaataatctggaggccttgaaaatgatccctctaaaatgctgttgagcttgtgttcagtgtagcaggaggatctgaacttttcctggagaggaggtgatcgggatgccatttggcagcttaagcacatcctgccagcaggctttaagtggctgttctaggcatagccctccctgaactagaaaggagagtaaccagtttgctatgctgcatctaaccagacacacctgacttagtagtaactctaagaacccttaacttacaaacaactttgtctcctcttagacaatattcattaaatctgaggacacagtttgacagtagttcagattcttgcatgagcaattgacagcatcagagcacacaatatcataagttacataaattacacaaagtacatcataaattacactacagacacgttaggtaaaaagcatcaggcccgggccgggcgtggtggctcatgcctataatcccagcactttgggaggccaagcgggggcggatcacgaggtcaggagattgagaccatcctggctaacacggtgaaaccccatctctactaaaaatacaaaaaattagccgggcgtggtggtgggcgcctgtagtcccagctactcgggaggctgaggcaggagaatggcgtgaacccaggaggtggagcttgcagctagccgagatagcaccactgcactccagcctgggcgacagtgagactccgtttcaaaaaaaaaagcatcaggcccatgaagtatcaaaaaccaggttaggaggtgtgctgtatggcttttatctcaataagtggcagcttactggggaaaaagaaataagaaaaagtgtggccaagcagaagtggatgtttatgatgacggtgggggcccagaggtcataggtgatggtcctactgcccaacagttgccttttgaatccttatgttgatgatggtgtctttctacacactcactgcaactactcaggaattataaagattttctgaaatctgagaagtggaataaggaaacccagtggagctattacacttttaaatgttctagccaaaacaaattgccagtatggttgaggaattgaatatcagatggcatgcagtctcccctcccctcccctatcaaggacagtagaagctgcaaacctcttctcagcctccttcaggcacctcctgttttcataagcaccatgaagaatggtgtttcctaaatgaaaagttcagatactgctggtaaagaaactggaaaaactgaaggaaggaataaaatatgttggtggtattaacacctccagtaagataagtcattggtacggtttttctaagggccgcagtgagatgtagcagaagaaatatgtttattttgggcaaagatttgcttattggcctgggattgcacattttctctatgatgtttgcaacagagaaattttcattttaatgatactcttcctttcttgaaagttacatgtcctcatttctgtttctgcttctcccttggccagtgtcattgatgcagatcattgcatacaacagcacagcaaattgcgccaagtcagtgtgtgaatgggaattagcaatgcacgcttgcaggctctttttccaggaaccaggctgtaacattgaccggggaacctcttcattccctgacatactaaattggtcaattttgtagtactcatctccatccacaaaaacaacaaagataaaatcaatttggagctttatatgacaaaaaggaagaagtccaaaaatatatagccttcccccctcccacatatctgatccaaatattaaatatctgattttataaaacagtttaaattgtctttttaaattgctaacaagcatcagttatatttgagcttcatttttcttttatcctgtctgtcctaataaaaacaaaaatggccaaaaagtggagaggaaagaaaaagcttccactttttaaaatttgttttgtattagttattttacctttagggaccctacaactgaagagagtggagagaataaagaagtgaactttcattcatgtctgctactttgacctcataaagaaatctgcaacacagatgaaaccagtctgtgtggccaagctgatgggatttgaaaagagtggataatttttagcctttccaaaatgcaaataacttggatatatttccattttccagctatagagagaaacaatccagctgcctggaaactgttattagtatagaagtggcttaaagaaaagcatcttcaaatacttgacttagcatatctttcttctttagacttacataatgatattcatctctccattagcaattgaatccaggcataaccgggctcagttacacagcttgtctgtgactgggaagcccattttgtgtcatttctgcacacctgtccgctgttgacaccttattagaggcactgcattttggtttcacaattcttcatctcccttcccaaggaatgggcaatctactgaacttccagatcaatgctttgttggaaagtgatgaatttaagagagttttaacatgtcaaatttgaagccaattcagtatccttatttgttccaagactcttaaccaatactgtgatataaagttaggatttgggaaacgtgtagttaacaacttggaaacatgaagatattaaaatggcagctggctaactgtctcttaagccactatgcaatttctaccaatggagagattagggaagcaaattaagcctcattcagtaggtctgctgtctggtggaacttacggaactcatttcctcctctatccccagcccttctcctaactatggtgataaccagggccatagaagaccttttctctcttacctttctctgataggatcgtgtccttcagtcaagagctcatgtgaactccagactttatattacatctctgaagttcttgatgtggggaagattgacttttattccatttttatatgaaggtgttagatatagccatcaatttatttttctacattccctctacgcttatgtaattttctatttttaaatcttctcttaaatatactgagaatctctagtctccttttctaaaggctgatccaactacacttgtgggctatttttccaagctttgtgtgaaacttgatgacattgggccagcaaaatgcaaagaagactatagtttcaggcagaaaatcacgtccaaagaatttggcatggattaaacaacctctaccacactatagctctcacataggctgaacattttcctaaattctacctgtgcagacactgaggggctctctacctttgaaactatgagaacgtcttaaattaatatgaatatttctctccatgtatagtgtgagctgccaatgcattatcttaatacatcaagaaggaaatcagatttcaggcacacattagcaattgtttgttaatgtccttggcaaacgtgtacctgctttccttcattgttctcttcaggggctttcttccactttcctcttatgaaacgaatgtgtttttgactgttaactgggttcgctttccagatctgtctttcccaaatgaaaggttagtcccatagaccactggctattcagggaaattactctctacctccccatgacatggatgataagtgttgagggatgaacactctggaaactcttagcatggattttgaattccagatttctttataggagatgtataaaaaggagtttatagcatacaaaaattatactgctcttcccagtaagggactaaaaggacatttgaaatctttacattttagatgtttttgtgaattataaatatctcctttttcctcgcttcatgctaacttgtctctagataaaatcttatttcttcatacattggaccacaaggcataaagaaggtagctcagcgccactgagattgtgttctgcataatatttggaaggcttccatttccattgaaaacaaatccatgagtgagagggaaagtctagtatcaattcttctgtttgctcgcaatgacacaaataggttttggggatctacctaagggataggtctactccaaaattattaaatttataattgtgcaattctgtaatttcccaaggcataagtaatatgaccctactgtcagctagatgtcttatcttcaaagagagtatgcattaataaaaagaacttccctttaaagaaccaatctaaaatactaaaaaggcagaaacttttaaaattagaaattggataatttttaagaatctttagagaaaacattggtttatcatagtctttttctttcattgagttttcatttagactagcatggcaagcagggtggccttggactttgatttaggggatcgtgctttggcctggaaaataagcactggcctgcatgcctagaacctgagtgaaggcagtcaacatcctagtatgaatcagacctagcagaaatgtaaattatttcaagtacttcagggtttagttttcttagtgacaccctggaccctggatgctgctttctaaagtgcacctgatccatgcagttttatgtcttcatataactggtatcttgtgagtttgcaagcaatgggatgagcaagaaaaaaaggacgcatggaggagaaaaatttgaacgaggctagtgcaatgttttgctgatagattacattgttagggagctggtgattttttgccatggtcgtatcgtggacagcttttccgtggaaattcaaggcatctgtattaggcaaatgtgagtgcccttgatcttgtattgatcagtgccaatgtactgggaaagcaggtaccccagtgaaactggtctgtgcttggtttaacagctccaacaatttcagatccatggggctgcttgaccatagaccctgtttactccatgcctgttcaaaagtcattttgacttctagctttgtttcactttcttctttcaatacttctgtttcctcgtccttttccttcatattccatggctatttctttcctactttacagtttcccccagacccagattttttcacacctctgcatcatagacaactgagtagctcccttggcccctcctccatcctctcacaccctgtgctccgttcctcagccgtttggacagggagctccgctgtcaccaaggagcccatgtgagacacactgctgtgactgcctcttgttaatgtcagcatcacctcatcacttaagcaaaaaggaaaatccataaaagagatggaaaatacgtctctttttattttattttaagaagattgggcggggtggggggggggttcttattctaggccttctcaatttctcatagattttaccttaaactaattaaggccattctcttgataaatttgtacatcagaccgggtcaccagctatgatgcagaacgccagatttttgaatctcaagtaactttctgtggtgctggacaaattgacttaattctgtgcaggcaaacactttgaatcataaggatttttattgccgctccattcttactactattcatgattcaaacatctacccctgttctgaatcaggatgttgacacttcttggttattttcagatgaacagtaactgctacactcttgaaagcacttaaaagtgcaagcatgtcctaaatagccatttaacctggtaaaacataggcttttctgtttaattaagtattagaccagtctgtagatataatctgaaaagattgtaggcagtaatgaagacagttggggaaaggagaaggccctttaaagacatgaaaccttacacgctcttgggatatttttaagcataataagctcattggattcaggtatttttccctttgcatttttaaaaatacgtatttctaatttgtttgcatatttaattttgtcaaagctgagaaatgctcatgagttgaatttataaatgtcatttgcaaccaaatgaagtatttatttttaaaaagagagtgaaggaaccaacactgatttgtacataataaaaatgtgtgtattatatatatatattttttcctccttgacagtacttggtcacaatatcaagtgtatttttgtacataatatatattgattagaaaaacgtcaattgtctattcaaaaaattctatctctgtgatagattatatttatcctaatctgttgatacctctgttaatttgttttaagagaattatattttttggaatttacagagaattgcattcatggctttcaattgtaaatatgctaagggtattttaataaatcttggtttcatgtcc

SEQ ID NO: 134857 - DNA, 699 bp, Homo sapiens
  Payload ID: 6335
  Gene Symbol:
  Gene Name: FMN1
  ENST ID: ENST00000632025
  CDS Start-End: 1-545
tcatcaaattgttggatggaaaacgatctcaaactgtgggaatcttgatatctagtttacatttagaaatgaaggatatccaacaggccattttcaatgtggatgactccgtggttgatctggagaccctggcagccttatatgaaaacagagcccaagaggatgagctggttaaaataagaaagtattacgagacatccaaagaagaagaactgaagctgctggataaacctgagcaatttttacatgagttagcccagattcctaattttgctgaacgtgcccagtgcataatcttcagatctgtcttttctgagggtatcacctccttgcacagaaaggtagagatcatcacgcgagcttctaaggacttgctgcacgtgaagagcgtgaaggatattttagctctcatcttggcttttggaaattatatgaatggaggaaataggactcggggacaagccgatggatatagcttagaaattctgcccaaactcaaggatgtcaaaagtcgggtatttatttttcataataagttcccatgatctgccattattttctttctttacctttaattttaaaaaacgtattccagattgttccatttatctctatcctccccttaacaacatttatattagagcatgcatttttttgtttgctttcttttcactttcgaataaagagttttgtttggtt

SEQ ID NO: 134858 - DNA, 393 bp, Homo sapiens
  Payload ID: 6335
  Gene Symbol:
  Gene Name: FMN1
  ENST ID: ENST00000632613
  CDS Start-End: 1-343
accacaggatttctttctggcctcccaagtcaagtttgaagacctcataaaagatttgagaaaactgaagaggcaactagaagcaagtgagaaacagatggtggtggtgtgcaaggagtccccaaaggagtatctccagcctttcaaggacaaactagaggagttcttccaaaaaggccatccctttccgatgtcagcgtgctgtgcctctgttggtgtaaagcatttgtttctcctggaaagtgcacaacggggattttctaagaaatggaaaacgattgccacactcacatcagacggatcccacgtgaagcagagcgcagtccctttgtttcctcgttagcatcacccggctcccatatttgtagagctgtaataaaaacaacttcttaa

SEQ ID NO: 134859 - DNA, 4060 bp, Homo sapiens
  Payload ID: 6335
  Gene Symbol:
  Gene Name: FMN1
  ENST ID: ENST00000631469
  CDS Start-End: 279-1790
tccctggtccgtgtgtagtaaggtgcgcagcctcggctgcttctgggcatagactccacagatttttcacagttgccctggaacacatcatcgcacaaaccggaaggagggcactgtgacccgaaagagaccaagtgtgtttgctgtgcggctgacagcctgactcccgggtcctgttgctctctgtcctgtaaattaagagcagatggagtggataaactgagagcgcaggagaaggtaacacaagtcagaacttccaccaagggcattactgagacatggagaacgttgataattctctggatggcagtgatgtgtcagaaccagcaaaaccagaagccggacttgaagtggctcagtcgatcctgagtaagttctctatgaaatccctatttgggtttacgagtaaattagaatctgtgaatccagaagaggaagatgctgtgctgaaagcattccatagtttagacgtgaatcccacatctcagcaggatgattccagcaatggcttggatccacaggaagcagggtctcgggtttcacctgacctcggaaatgatgagaaaattgcaagcgtggagacagaatcagagggaagtcagagaaaagaagcagggacatctctccttgctcaagagctgcttccactgtctactttgaaagggacaaaagacgatgtcatttgtgttcgtgggaccctggtgcacaccaccagtgattctgactctgatgatggtggccaggagccagaggagggaagcagcaccaatggcccaaagtcccctagtggtgttttatctgagccatctcaggagtccaaagaaaacccaggaggtttcagggaaaatactgtcactggggaaatgaatggtgcagagctctgtgcagaagatcctcaaaggattccacctgagatgagcagcaaactggaagctggcaacggtggtcttcagacagagcgtcgccccagccaggaccaggtgggagaagaagggtcccaagacctacctgcagtaacaaaccagaattcgagtgttggtatcactgagagtgcctcttctaaaaaagaagtctctggagagaagtcattccaacttccagcttttttcagtgggcttcgtgtgctgaagaagggggctaccgctgagggaggagagaccatcacggaaattaaaccaaaggatggggacttagctttgctcaaattgacgcagcctgtgcagaagtccttagtgcaggcagggctgcagacagtgaagagtgagaagaaagcaactgatccgaaggccactcccactctcctggagcagctctctctgctgctcaacattgacatgcccaaaactgaaccgaagggagcagaccctgagtcgcccaggagagaagagatgggctgcaatgctgaccaagagagccagagcggccctggagtaccacaaacccagggtggtgaggtcaagccaaagtcgccagagacagccctggaggcttttaaagccctattcatccggccccccagaaaggggaccacagctgacacctctgagctggaagctctcaagcgcaagatgagacatgagaaggagtcgctaagagctgtgtttgaacggtccaattctaagccagcggatggcccctctgattccaaaagtcctgaccacagcctgactgagcaggatgacaggactcctggcagacttcaagctgtctggccacccccaaagacaaaagacacagaagaaaaagtgggactgaagtacactgaagcaggtaatgtgaaaggaagctagggacccgggaatgaatctcttcctgcaatggcttttagttctagcttagttgactctcagaatttggggttttatttcattataaaatgtaatgctgaagggtttctttttggttttgctgttaaagtgaacctttgcacacttattgttaacgagcctctgaaagatgaaagatgaatgcagtggaatgaatgaaagggggaatgtgtgtgaagtaggagaaccttgggggacctgatggagaaggtagattgcaaatccctcaggaagccggtggttggtcctcatacaattttgtgagctggcagtgttgctagaagaggcagagtatggttctctagagctgtaatctgatttgttgtttgtcttcgagtaatgcttttgagataaaggaaccttgtgcagagtgaatgtacagataccgtatcagttactcgttcacttttgtgagacaaagctttatttaatgcatggccaactttaaagcaacctaactctctggaaacctgcctaggaactttacttgaatttatttaaatgaaatgggaatctagatatggttactatttaagtggaagtttcacgtgaactgtaaaatgacaccaaagcattagaggatgggtatgtaagatattaagaattgcatgtgtgtgtatatatccatgaaacctctctgccttcttcctgatatttggagattacctatacgtggcttatatttgttgtttttattaggtgtatgtgtgcattgaggtctatctatctatctggttatagaaaaataacttctttccattcctgttcattgatagacatgaacagatcaaagttgggtggttcagtaggtttttccataatatcaaattactccagtgattgagaacacactggcagttgaatcttgagatgatttctagctttcatttacacagtttctgcagggcattggttacttcatagcattttctttctgtggtgtttgacttacaggatgaaaactcatatccttaatgaaaatatgtatagcaatttaagtcttctttcccacatttgattttccaaaaatcataattgtgtaagaatgaacagcataagggtggaaaatgattgtttcatctgagcagagcaattcagacacagcagtaaagaaagcataaggatgttctaggtaattgaagcatagaagtagcatagggctaaacttctgtttaacccaaacttgaatggaaaatttcctaaaccacattagatcacttttttccttttgctttgtttagtccaaacgcacttaactttattttctctagggtaattacatatatgactgtatcaatgagggtcgtactaatcaggaatcaggtggcactcaaatggagtgatttgaggagagtttattagagacctttcacagaggtacagacggggtttagaaaaagcagtaagagagcgctactctggggccagtaccaaggagaagcttttaccacacccaagcctgaaggggcaagagtagaagtcgctatcgaaaactagaacttaagagggaggctgagtggtgtggaggcagctgctgggcaggacccgcagccctcagcagggaggtgccgccggtccatagtgacatgccaggctgggaactgagggcacacaacctgatctcttctcatcccactctctggtccctcatcgtcattcccattggccaaacccaaagagaagtcagcagactgggagccacttgaggctatcatttcaggcctgtcaccggggcccagaaagggcacagacctggagaagcacgtagaagatcccctgcacagttatggtaccaccatgggcgcccagcaggccctgggcagagagacttctaaagccctcctggagaagaatctgcacagacatgctggtgttgtcataccacacgacacgggagtttagtacaagggcacaaagacaagcttctgttattatcatcctgtgggagggttatattttctagtataatcagttcatagaaaatatacagctattattcgaggcttgctctgtagaaaactacttcattttaatgtgagggatttgtttactgatctcagaaaatctctcataaggttttaaatgttccccaaataaagtaaaatttgaagatatccagaaaaatcatgaagcaaaagaaactttctatgattctatttcagagaaactgttgtcacttttgaaactaggcctatgaatttaatgtggaaaaataaaaatagaatttgaatcat

SEQ ID NO: 134860 - DNA, 7092 bp, Homo sapiens
  Payload ID: 6336
  Gene Symbol: FLT1
  Gene Name: fms-related tyrosine kinase 1
  Uniprot ID: P17948
  ENST ID: ENST00000282397
  CDS Start-End: 253-4269
gcggacactcctctcggctcctccccggcagcggcggcggctcggagcgggctccggggctcgggtgcagcggccagcgggcgcctggcggcgaggattacccggggaagtggttgtctcctggctggagccgcgagacgggcgctcagggcgcggggccggcggcggcgaacgagaggacggactctggcggccgggtcgttggccgcggggagcgcgggcaccgggcgagcaggccgcgtcgcgctcaccatggtcagctactgggacaccggggtcctgctgtgcgcgctgctcagctgtctgcttctcacaggatctagttcaggttcaaaattaaaagatcctgaactgagtttaaaaggcacccagcacatcatgcaagcaggccagacactgcatctccaatgcaggggggaagcagcccataaatggtctttgcctgaaatggtgagtaaggaaagcgaaaggctgagcataactaaatctgcctgtggaagaaatggcaaacaattctgcagtactttaaccttgaacacagctcaagcaaaccacactggcttctacagctgcaaatatctagctgtacctacttcaaagaagaaggaaacagaatctgcaatctatatatttattagtgatacaggtagacctttcgtagagatgtacagtgaaatccccgaaattatacacatgactgaaggaagggagctcgtcattccctgccgggttacgtcacctaacatcactgttactttaaaaaagtttccacttgacactttgatccctgatggaaaacgcataatctgggacagtagaaagggcttcatcatatcaaatgcaacgtacaaagaaatagggcttctgacctgtgaagcaacagtcaatgggcatttgtataagacaaactatctcacacatcgacaaaccaatacaatcatagatgtccaaataagcacaccacgcccagtcaaattacttagaggccatactcttgtcctcaattgtactgctaccactcccttgaacacgagagttcaaatgacctggagttaccctgatgaaaaaaataagagagcttccgtaaggcgacgaattgaccaaagcaattcccatgccaacatattctacagtgttcttactattgacaaaatgcagaacaaagacaaaggactttatacttgtcgtgtaaggagtggaccatcattcaaatctgttaacacctcagtgcatatatatgataaagcattcatcactgtgaaacatcgaaaacagcaggtgcttgaaaccgtagctggcaagcggtcttaccggctctctatgaaagtgaaggcatttccctcgccggaagttgtatggttaaaagatgggttacctgcgactgagaaatctgctcgctatttgactcgtggctactcgttaattatcaaggacgtaactgaagaggatgcagggaattatacaatcttgctgagcataaaacagtcaaatgtgtttaaaaacctcactgccactctaattgtcaatgtgaaaccccagatttacgaaaaggccgtgtcatcgtttccagacccggctctctacccactgggcagcagacaaatcctgacttgtaccgcatatggtatccctcaacctacaatcaagtggttctggcacccctgtaaccataatcattccgaagcaaggtgtgacttttgttccaataatgaagagtcctttatcctggatgctgacagcaacatgggaaacagaattgagagcatcactcagcgcatggcaataatagaaggaaagaataagatggctagcaccttggttgtggctgactctagaatttctggaatctacatttgcatagcttccaataaagttgggactgtgggaagaaacataagcttttatatcacagatgtgccaaatgggtttcatgttaacttggaaaaaatgccgacggaaggagaggacctgaaactgtcttgcacagttaacaagttcttatacagagacgttacttggattttactgcggacagttaataacagaacaatgcactacagtattagcaagcaaaaaatggccatcactaaggagcactccatcactcttaatcttaccatcatgaatgtttccctgcaagattcaggcacctatgcctgcagagccaggaatgtatacacaggggaagaaatcctccagaagaaagaaattacaatcagagatcaggaagcaccatacctcctgcgaaacctcagtgatcacacagtggccatcagcagttccaccactttagactgtcatgctaatggtgtccccgagcctcagatcacttggtttaaaaacaaccacaaaatacaacaagagcctggaattattttaggaccaggaagcagcacgctgtttattgaaagagtcacagaagaggatgaaggtgtctatcactgcaaagccaccaaccagaagggctctgtggaaagttcagcatacctcactgttcaaggaacctcggacaagtctaatctggagctgatcactctaacatgcacctgtgtggctgcgactctcttctggctcctattaaccctctttatccgaaaaatgaaaaggtcttcttctgaaataaagactgactacctatcaattataatggacccagatgaagttcctttggatgagcagtgtgagcggctcccttatgatgccagcaagtgggagtttgcccgggagagacttaaactgggcaaatcacttggaagaggggcttttggaaaagtggttcaagcatcagcatttggcattaagaaatcacctacgtgccggactgtggctgtgaaaatgctgaaagagggggccacggccagcgagtacaaagctctgatgactgagctaaaaatcttgacccacattggccaccatctgaacgtggttaacctgctgggagcctgcaccaagcaaggagggcctctgatggtgattgttgaatactgcaaatatggaaatctctccaactacctcaagagcaaacgtgacttattttttctcaacaaggatgcagcactacacatggagcctaagaaagaaaaaatggagccaggcctggaacaaggcaagaaaccaagactagatagcgtcaccagcagcgaaagctttgcgagctccggctttcaggaagataaaagtctgagtgatgttgaggaagaggaggattctgacggtttctacaaggagcccatcactatggaagatctgatttcttacagttttcaagtggccagaggcatggagttcctgtcttccagaaagtgcattcatcgggacctggcagcgagaaacattcttttatctgagaacaacgtggtgaagatttgtgattttggccttgcccgggatatttataagaaccccgattatgtgagaaaaggagatactcgacttcctctgaaatggatggctcctgaatctatctttgacaaaatctacagcaccaagagcgacgtgtggtcttacggagtattgctgtgggaaatcttctccttaggtgggtctccatacccaggagtacaaatggatgaggacttttgcagtcgcctgagggaaggcatgaggatgagagctcctgagtactctactcctgaaatctatcagatcatgctggactgctggcacagagacccaaaagaaaggccaagatttgcagaacttgtggaaaaactaggtgatttgcttcaagcaaatgtacaacaggatggtaaagactacatcccaatcaatgccatactgacaggaaatagtgggtttacatactcaactcctgccttctctgaggacttcttcaaggaaagtatttcagctccgaagtttaattcaggaagctctgatgatgtcagatacgtaaatgctttcaagttcatgagcctggaaagaatcaaaacctttgaagaacttttaccgaatgccacctccatgtttgatgactaccagggcgacagcagcactctgttggcctctcccatgctgaagcgcttcacctggactgacagcaaacccaaggcctcgctcaagattgacttgagagtaaccagtaaaagtaaggagtcggggctgtctgatgtcagcaggcccagtttctgccattccagctgtgggcacgtcagcgaaggcaagcgcaggttcacctacgaccacgctgagctggaaaggaaaatcgcgtgctgctccccgcccccagactacaactcggtggtcctgtactccaccccacccatctagagtttgacacgaagccttatttctagaagcacatgtgtatttatacccccaggaaactagcttttgccagtattatgcatatataagtttacacctttatctttccatgggagccagctgctttttgtgatttttttaatagtgcttttttttttttgactaacaagaatgtaactccagatagagaaatagtgacaagtgaagaacactactgctaaatcctcatgttactcagtgttagagaaatccttcctaaacccaatgacttccctgctccaacccccgccacctcagggcacgcaggaccagtttgattgaggagctgcactgatcacccaatgcatcacgtaccccactgggccagccctgcagcccaaaacccagggcaacaagcccgttagccccagggatcactggctggcctgagcaacatctcgggagtcctctagcaggcctaagacatgtgaggaggaaaaggaaaaaaagcaaaaagcaagggagaaaagagaaaccgggagaaggcatgagaaagaatttgagacgcaccatgtgggcacggagggggacggggctcagcaatgccatttcagtggcttcccagctctgacccttctacatttgagggcccagccaggagcagatggacagcgatgaggggacattttctggattctgggaggcaagaaaaggacaaatatcttttttggaactaaagcaaattttagaactttacctatggaagtggttctatgtccattctcattcgtggcatgttttgatttgtagcactgagggtggcactcaactctgagcccatacttttggctcctctagtaagatgcactgaaaacttagccagagttaggttgtctccaggccatgatggccttacactgaaaatgtcacattctattttgggtattaatatatagtccagacacttaactcaatttcttggtattattctgttttgcacagttagttgtgaaagaaagctgagaagaatgaaaatgcagtcctgaggagaggagttttctccatatcaaaacgagggctgatggaggaaaaaggtcaataaggtcaagggaaaaccccgtctctataccaaccaaaccaattcaccaacacagttgggacccaaaacacaggaagtcagtcacgtttccttttcatttaatggggattccactatctcacactaatctgaaaggatgtggaagagcattagctggcgcatattaagcactttaagctccttgagtaaaaaggtggtatgtaatttatgcaaggtatttctccagttgggactcaggatattagttaatgagccatcactagaagaaaagcccattttcaactgctttgaaacttgcctggggtctgagcatgatgggaatagggagacagggtaggaaagggcgcctactcttcagggtctaaagatcaagtgggccttggatcgctaagctggctctgtttgatgctatttatgcaagttagggtctatgtatttatgatgtctgcaccttctgcagccagtcagaagctggagaggcaacagtggattgctgcttcttggggagaagagtatgcttccttttatccatgtaatttaactgtagaacctgagctctaagtaaccgaagaatgtatgcctctgttcttatgtgccacatccttgtttaaaggctctctgtatgaagagatgggaccgtcatcagcacattccctagtgagcctactggctcctggcagcggcttttgtggaagactcactagccagaagagaggagtgggacagtcctctccaccaagatctaaatccaaacaaaagcaggctagagccagaagagaggacaaatctttgttcttcctcttctttacatacgcaaaccacctgtgacagctggcaattttataaatcaggtaactggaaggaggttaaacacagaaaaaagaagacctcagtcaattctctacttttttttttttttccaaatcagataatagcccagcaaatagtgataacaaataaaaccttagctattcatgtcttgatttcaataattaattcttaatcattaagagaccataataaatactccttttcaagagaaaagcaaaaccattagaattgttactcagctccttcaaactcaggtttgtagcatacatgagtccatccatcagtcaaagaatggttccatctggagtcttaatgtagaaagaaaaatggagacttgtaataatgagctagttacaaagtgcttgttcattaaaatagcactgaaaattgaaacatgaattaactgataatattccaatcatttgccatttatgacaaaaatggttggcactaacaaagaacgagcacttcctttcagagtttctgagataatgtacgtggaacagtctgggtggaatggggctgaaaccatgtgcaagtctgtgtcttgtcagtccaagaagtgacaccgagatgttaattttagggacccgtgccttgtttcctagcccacaagaatgcaaacatcaaacagatactcgctagcctcatttaaattgattaaaggaggagtgcatctttggccgacagtggtgtaactgtatgtgtgtgtgtgtgtgtgtgtgtgtgtgtgtgtgtgggtgtatgtgtgttttgtgcataactatttaaggaaactggaattttaaagttacttttatacaaaccaagaatatatgctacagatataagacagacatggtttggtcctatatttctagtcatgatgaatgtattttgtataccatcttcatataataaacttccaaaaacacata

SEQ ID NO: 134861 - DNA, 2969 bp, Homo sapiens
  Payload ID: 6336
  Gene Symbol: FLT1
  Gene Name: fms-related tyrosine kinase 1
  Uniprot ID: P17948
  ENST ID: ENST00000541932
  CDS Start-End: 286-2487
atcgaggtccgcgggaggctcggagcgcgccaggcggacactcctctcggctcctccccggcagcggcggcggctcggagcgggctccggggctcgggtgcagcggccagcgggcgcctggcggcgaggattacccggggaagtggttgtctcctggctggagccgcgagacgggcgctcagggcgcggggccggcggcggcgaacgagaggacggactctggcggccgggtcgttggccgcggggagcgcgggcaccgggcgagcaggccgcgtcgcgctcaccatggtcagctactgggacaccggggtcctgctgtgcgcgctgctcagctgtctgcttctcacaggatctagttcaggttcaaaattaaaagatcctgaactgagtttaaaaggcacccagcacatcatgcaagcaggccagacactgcatctccaatgcaggggggaagcagcccataaatggtctttgcctgaaatggtgagtaaggaaagcgaaaggctgagcataactaaatctgcctgtggaagaaatggcaaacaattctgcagtactttaaccttgaacacagctcaagcaaaccacactggcttctacagctgcaaatatctagctgtacctacttcaaagaagaaggaaacagaatctgcaatctatatatttattagtgatacaggtagacctttcgtagagatgtacagtgaaatccccgaaattatacacatgactgaaggaagggagctcgtcattccctgccgggttacgtcacctaacatcactgttactttaaaaaagtttccacttgacactttgatccctgatggaaaacgcataatctgggacagtagaaagggcttcatcatatcaaatgcaacgtacaaagaaatagggcttctgacctgtgaagcaacagtcaatgggcatttgtataagacaaactatctcacacatcgacaaaccaatacaatcatagatgtccaaataagcacaccacgcccagtcaaattacttagaggccatactcttgtcctcaattgtactgctaccactcccttgaacacgagagttcaaatgacctggagttaccctgatgaaaaaaataagagagcttccgtaaggcgacgaattgaccaaagcaattcccatgccaacatattctacagtgttcttactattgacaaaatgcagaacaaagacaaaggactttatacttgtcgtgtaaggagtggaccatcattcaaatctgttaacacctcagtgcatatatatgataaagcattcatcactgtgaaacatcgaaaacagcaggtgcttgaaaccgtagctggcaagcggtcttaccggctctctatgaaagtgaaggcatttccctcgccggaagttgtatggttaaaagatgggttacctgcgactgagaaatctgctcgctatttgactcgtggctactcgttaattatcaaggacgtaactgaagaggatgcagggaattatacaatcttgctgagcataaaacagtcaaatgtgtttaaaaacctcactgccactctaattgtcaatgtgaaaccccagatttacgaaaaggccgtgtcatcgtttccagacccggctctctacccactgggcagcagacaaatcctgacttgtaccgcatatggtatccctcaacctacaatcaagtggttctggcacccctgtaaccataatcattccgaagcaaggtgtgacttttgttccaataatgaagagtcctttatcctggatgctgacagcaacatgggaaacagaattgagagcatcactcagcgcatggcaataatagaaggaaagaataagatggctagcaccttggttgtggctgactctagaatttctggaatctacatttgcatagcttccaataaagttgggactgtgggaagaaacataagcttttatatcacagatgtgccaaatgggtttcatgttaacttggaaaaaatgccgacggaaggagaggacctgaaactgtcttgcacagttaacaagttcttatacagagacgttacttggattttactgcggacagttaataacagaacaatgcactacagtattagcaagcaaaaaatggccatcactaaggagcactccatcactcttaatcttaccatcatgaatgtttccctgcaagattcaggcacctatgcctgcagagccaggaatgtatacacaggggaagaaatcctccagaagaaagaaattacaatcagagatcaggaagcaccatacctcctgcgaaacctcagtgatcacacagtggccatcagcagttccaccactttagactgtcatgctaatggtgtccccgagcctcagatcacttggtttaaaaacaaccacaaaatacaacaagagcctgaactgtatacatcaacgtcaccatcgtcatcgtcatcatcaccattgtcatcatcatcatcatcgtcatcatcatcatcatcatagctatcatcattatcatcatcatcatcatcatcatcatagctaccatttattgaaaactattatgtgtcaacttcaaagaacttatcctttagttggagagccaagacaatcataacaataacaaatggccgggcatggtggctcacgcctgtaatcccagcactttgggaggccaaggcaggtggatcatttgaggtcaggagttcaagaccagcctgaccaagatggtgaaatgctgtctctattaaaaatacaaaattagccaggcatggtggctcatgcctgtaatgccagctactcgggaggctgagacaggagaatcacttgaacccaggaggcagaggttgcagggagccgagatcgtgtactgcactccagcctgggcaacaagagcgaaactccgtctcaaaaaacaaataaataaataaataaataaacagacaaaattcactttttattctattaaacttaacatacatgca

SEQ ID NO: 134862 - DNA, 1275 bp, Homo sapiens
  Payload ID: 6336
  Gene Symbol: FLT1
  Gene Name: fms-related tyrosine kinase 1
  Uniprot ID: P17948
  ENST ID: ENST00000543394
  CDS Start-End: 157-1242
acagagttactaattttgacagggaactgtaccgttttctcccctcagggattttcatcttaatggatcatccccctgcccccatgcttggataaagtgggctggaggcctggaaaaatctctggtgttcatgttgaaactcaaatactcttaaaaatgaactctgatctacttgttgattctgacggtttctacaaggagcccatcactatggaagatctgatttcttacagttttcaagtggccagaggcatggagttcctgtcttccagaaagtgcattcatcgggacctggcagcgagaaacattcttttatctgagaacaacgtggtgaagatttgtgattttggccttgcccgggatatttataagaaccccgattatgtgagaaaaggagatactcgacttcctctgaaatggatggctcctgaatctatctttgacaaaatctacagcaccaagagcgacgtgtggtcttacggagtattgctgtgggaaatcttctccttaggtgggtctccatacccaggagtacaaatggatgaggacttttgcagtcgcctgagggaaggcatgaggatgagagctcctgagtactctactcctgaaatctatcagatcatgctggactgctggcacagagacccaaaagaaaggccaagatttgcagaacttgtggaaaaactaggtgatttgcttcaagcaaatgtacaacaggatggtaaagactacatcccaatcaatgccatactgacaggaaatagtgggtttacatactcaactcctgccttctctgaggacttcttcaaggaaagtatttcagctccgaagtttaattcaggaagctctgatgatgtcagatacgtaaatgctttcaagttcatgagcctggaaagaatcaaaacctttgaagaacttttaccgaatgccacctccatgtttgatgactaccagggcgacagcagcactctgttggcctctcccatgctgaagcgcttcacctggactgacagcaaacccaaggcctcgctcaagattgacttgagagtaaccagtaaaagtaaggagtcggggctgtctgatgtcagcaggcccagtttctgccattccagctgtgggcacgtcagcgaaggcaagcgcaggttcacctacgaccacgctgagctggaaaggaaaatcgcgtgctgctccccgcccccagactacaactcggtggtcctgtactccaccccacccatctagagtttgacacgaagccttatttctagaagcaca

SEQ ID NO: 134863 - DNA, 1911 bp, Homo sapiens
  Payload ID: 6336
  Gene Symbol: FLT1
  Gene Name: fms-related tyrosine kinase 1
  Uniprot ID: P17948
  ENST ID: ENST00000539099
  CDS Start-End: 286-1911
atcgaggtccgcgggaggctcggagcgcgccaggcggacactcctctcggctcctccccggcagcggcggcggctcggagcgggctccggggctcgggtgcagcggccagcgggcgcctggcggcgaggattacccggggaagtggttgtctcctggctggagccgcgagacgggcgctcagggcgcggggccggcggcggcgaacgagaggacggactctggcggccgggtcgttggccgcggggagcgcgggcaccgggcgagcaggccgcgtcgcgctcaccatggtcagctactgggacaccggggtcctgctgtgcgcgctgctcagctgtctgcttctcacaggatctagttcaggttcaaaattaaaagatcctgaactgagtttaaaaggcacccagcacatcatgcaagcaggccagacactgcatctccaatgcaggggggaagcagcccataaatggtctttgcctgaaatggtgagtaaggaaagcgaaaggctgagcataactaaatctgcctgtggaagaaatggcaaacaattctgcagtactttaaccttgaacacagctcaagcaaaccacactggcttctacagctgcaaatatctagctgtacctacttcaaagaagaaggaaacagaatctgcaatctatatatttattagtgatacaggtagacctttcgtagagatgtacagtgaaatccccgaaattatacacatgactgaaggaagggagctcgtcattccctgccgggttacgtcacctaacatcactgttactttaaaaaagtttccacttgacactttgatccctgatggaaaacgcataatctgggacagtagaaagggcttcatcatatcaaatgcaacgtacaaagaaatagggcttctgacctgtgaagcaacagtcaatgggcatttgtataagacaaactatctcacacatcgacaaaccaatacaatcatagatgtccaaataagcacaccacgcccagtcaaattacttagaggccatactcttgtcctcaattgtactgctaccactcccttgaacacgagagttcaaatgacctggagttaccctgatgaaaaaaataagagagcttccgtaaggcgacgaattgaccaaagcaattcccatgccaacatattctacagtgttcttactattgacaaaatgcagaacaaagacaaaggactttatacttgtcgtgtaaggagtggaccatcattcaaatctgttaacacctcagtgcatatatatgataaagcattcatcactgtgaaacatcgaaaacagcaggtgcttgaaaccgtagctggcaagcggtcttaccggctctctatgaaagtgaaggcatttccctcgccggaagttgtatggttaaaagatgggttacctgcgactgagaaatctgctcgctatttgactcgtggctactcgttaattatcaaggacgtaactgaagaggatgcagggaattatacaatcttgctgagcataaaacagtcaaatgtgtttaaaaacctcactgccactctaattgtcaatgtgaaaccccagatttacgaaaaggccgtgtcatcgtttccagacccggctctctacccactgggcagcagacaaatcctgacttgtaccgcatatggtatccctcaacctacaatcaagtggttctggcacccctgtaaccataatcattccgaagcaaggtgtgacttttgttccaataatgaagagtcctttatcctggatgctgacagcaacatgggaaacagaattgagagcatcactcagcgcatggcaataatagaaggaaagaataagcttccaccagctaacagttctttcatgttgccacctacaagcttctcttccaactacttccatttccttccgtga

SEQ ID NO: 134864 - DNA, 1927 bp, Homo sapiens
  Payload ID: 6336
  Gene Symbol: FLT1
  Gene Name: fms-related tyrosine kinase 1
  ENST ID: ENST00000540678
  CDS Start-End: 1647-1904
actttaagtcttttccttttggtcttggaggaacagtgctcagcttttgatctctgtgattctgatagagaagctgtttctggaattacaaagtttgcaaacttgacagcaaaatttctggaaagccttttctatgaacctcggacaagtctaatctggagctgatcactctaacatgcacctgtgtggctgcgactctcttctggctcctattaaccctctttatccgaaaaatgaaaaggtcttcttctgaaataaagactgactacctatcaattataatggacccagatgaagttcctttggatgagcagtgtgagcggctcccttatgatgccagcaagtgggagtttgcccgggagagacttaaactgggcaaatcacttggaagaggggcttttggaaaagtggttcaagcatcagcatttggcattaagaaatcacctacgtgccggactgtggctgtgaaaatgctgaaagagggggccacggccagcgagtacaaagctctgatgactgagctaaaaatcttgacccacattggccaccatctgaacgtggttaacctgctgggagcctgcaccaagcaaggagggcctctgatggtgattgttgaatactgcaaatatggaaatctctccaactacctcaagagcaaacgtgacttattttttctcaacaaggatgcagcactacacatggagcctaagaaagaaaaaatggagccaggcctggaacaaggcaagaaaccaagactagatagcgtcaccagcagcgaaagctttgcgagctccggctttcaggaagataaaagtctgagtgatgttgaggaagaggaggattctgacggtttctacaaggagcccatcactatggaagatctgatttcttacagttttcaagtggccagaggcatggagttcctgtcttccagaaagtgcattcatcgggacctggcagcgagaaacattcttttatctgagaacaacgtggtgaagatttgtgattttggccttgcccgggatatttataagaaccccgattatgtgagaaaaggagatactcgacttcctctgaaatggatggctcctgaatctatctttgacaaaatctacagcaccaagagcgacgtgtggtcttacggagtattgctgtgggaaatcttctccttaggtgggtctccatacccaggagtacaaatggatgaggacttttgcagtcgcctgagggaaggcatgaggatgagagctcctgagtactctactcctgaaatctatcagatcatgctggactgctggcacagagacccaaaagaaaggccaagatttgcagaacttgtggaaaaactaggtgatttgcttcaagcaaatgtacaacaggatggtaaagactacatcccaatcaatgccatactgacaggaaatagtgggtttacatactcaactcctgccttctctgaggacttcttcaaggaaagtatttcagctccgaagtttaattcaggaagctctgatgatgtcagatacgtaaatgctttcaagttcatgagcctggaaagaatcaaaacctttgaagaacttttaccgaatgccacctccatgtttgatgactaccagggcgacagcagcactctgttggcctctcccatgctgaagcgcttcacctggactgacagcaaacccaaggcctcgctcaagattgacttgagagtaaccagtaaaagtaaggagtcggggctgtctgatgtcagcaggcccagtttctgccattccagctgtgggcacgtcagcgaaggcaagcgcaggttcacctacgaccacgctgagctggaaaggaaaatcgcgtgctgctccccgcccccagactacaactcggtggtcctgtactccaccccacccatctagagtttgacacgaagccttatttc

SEQ ID NO: 134865 - DNA, 6453 bp, Homo sapiens
  Payload ID: 6336
  Gene Symbol: FLT1
  Gene Name: fms-related tyrosine kinase 1
  Uniprot ID: P17948
  ENST ID: ENST00000615840
  CDS Start-End: 237-2300
gctcctccccggcagcggcggcggctcggagcgggctccggggctcgggtgcagcggccagcgggcgcctggcggcgaggattacccggggaagtggttgtctcctggctggagccgcgagacgggcgctcagggcgcggggccggcggcggcgaacgagaggacggactctggcggccgggtcgttggccgcggggagcgcgggcaccgggcgagcaggccgcgtcgcgctcaccatggtcagctactgggacaccggggtcctgctgtgcgcgctgctcagctgtctgcttctcacaggatctagttcaggttcaaaattaaaagatcctgaactgagtttaaaaggcacccagcacatcatgcaagcaggccagacactgcatctccaatgcaggggggaagcagcccataaatggtctttgcctgaaatggtgagtaaggaaagcgaaaggctgagcataactaaatctgcctgtggaagaaatggcaaacaattctgcagtactttaaccttgaacacagctcaagcaaaccacactggcttctacagctgcaaatatctagctgtacctacttcaaagaagaaggaaacagaatctgcaatctatatatttattagtgatacaggtagacctttcgtagagatgtacagtgaaatccccgaaattatacacatgactgaaggaagggagctcgtcattccctgccgggttacgtcacctaacatcactgttactttaaaaaagtttccacttgacactttgatccctgatggaaaacgcataatctgggacagtagaaagggcttcatcatatcaaatgcaacgtacaaagaaatagggcttctgacctgtgaagcaacagtcaatgggcatttgtataagacaaactatctcacacatcgacaaaccaatacaatcatagatgtccaaataagcacaccacgcccagtcaaattacttagaggccatactcttgtcctcaattgtactgctaccactcccttgaacacgagagttcaaatgacctggagttaccctgatgaaaaaaataagagagcttccgtaaggcgacgaattgaccaaagcaattcccatgccaacatattctacagtgttcttactattgacaaaatgcagaacaaagacaaaggactttatacttgtcgtgtaaggagtggaccatcattcaaatctgttaacacctcagtgcatatatatgataaagcattcatcactgtgaaacatcgaaaacagcaggtgcttgaaaccgtagctggcaagcggtcttaccggctctctatgaaagtgaaggcatttccctcgccggaagttgtatggttaaaagatgggttacctgcgactgagaaatctgctcgctatttgactcgtggctactcgttaattatcaaggacgtaactgaagaggatgcagggaattatacaatcttgctgagcataaaacagtcaaatgtgtttaaaaacctcactgccactctaattgtcaatgtgaaaccccagatttacgaaaaggccgtgtcatcgtttccagacccggctctctacccactgggcagcagacaaatcctgacttgtaccgcatatggtatccctcaacctacaatcaagtggttctggcacccctgtaaccataatcattccgaagcaaggtgtgacttttgttccaataatgaagagtcctttatcctggatgctgacagcaacatgggaaacagaattgagagcatcactcagcgcatggcaataatagaaggaaagaataagatggctagcaccttggttgtggctgactctagaatttctggaatctacatttgcatagcttccaataaagttgggactgtgggaagaaacataagcttttatatcacagatgtgccaaatgggtttcatgttaacttggaaaaaatgccgacggaaggagaggacctgaaactgtcttgcacagttaacaagttcttatacagagacgttacttggattttactgcggacagttaataacagaacaatgcactacagtattagcaagcaaaaaatggccatcactaaggagcactccatcactcttaatcttaccatcatgaatgtttccctgcaagattcaggcacctatgcctgcagagccaggaatgtatacacaggggaagaaatcctccagaagaaagaaattacaatcagaggtgagcactgcaacaaaaaggctgttttctctcggatctccaaatttaaaagcacaaggaatgattgtaccacacaaagtaatgtaaaacattaaaggactcattaaaaagtaacagttgtctcatatcatcttgatttattgtcactgttgctaactttcaggctcggaggagatgctcctcccaaaatgagttcggagatgatagcagtaataatgagacccccgggccccagctctgggccccccattcaggccgagggggctgctccggggggccgacttggtgcacgtttggatttggaggatccctgcactgccttctctgtgtttgttgctcttgctgttttctcctgcctgataaacaacaacttgggatgatcctttccttccattttgatgccaacctctttttatttttaagtgttgaagctgcacaaactgaataatttaaacaaatgctggtttctgccaaagatggacacgaataagttaattttccagctcagaatgagtacagttgaatttgagactctgtcggacttctgcctggttttatttgggactatttcatctgctcttgatttgtaaatagcacctggatagcaagttataatgcttatttatttgaaaatgctttttttttttttacgttaagcacatttatcttgaactggagcttctaaaatgggccccaggggtgcaagatgttggtgtaattcagagatagtaaaggtttatcgcagtgtgaattataagagtccatccaaatcaacgtcccctccctcctctcatgcgatccaggtaattatgcagttagtgccacagtagactagcctagcaaagggtttgctccttgctgtctctgactgcaccacacagctattgatggcagctgaaagaaagtggatcatgccttaattttaaatattcctgtcctctggttattattttaaggaacttcatcatgttaaaatgacagcattcaaaggtgtaccacaatcaatttatcaaggaaataaaggctattgtaaccagagatttaatgcattcttctaaatgtaaatttaaaatttgccctttaaaaaagtccactttccccatatgcaaatgttaataggatttttatggggattaagaagcggcaaaactacagaagcagaattcaaagtaatttaaaaaatacacaccagttttaaatcaagagaagttgtaatctcttgttttaagcttgcgtttgagggaaaatgactttttcaccaatttaatatgcattgttctgttgtttttatttatgattgatcattatatgtgacttgcataaactatttaaaaaaaaaaactataatgaccaaaatagccatggctgagaaacacagtggctgggcagttcaataggaggtgacaatatgacaacttctcaagcttgggaactcaccagactgtttcctcctttaggtaacagattctgtcccacggctaaacttgtctttcacgtgggaattgcttttgtcaaacgtgaaagagtaaacaatagcatttccccagaatgccagttttatggagccccaaatgctctgaaaacaattagtaacctggaagttgtcagcccaaaggaaagaaaaatcaattgtatcttgaaattttacctatggctctttggcctggcttctttgttcattataagttagtgtgttccttcaggaaacaatgccttaataccatagaacatgggggccttaatagttgctaacattaaaaaagcaaacagaatgattgagggatccttatgaaaacaaaatggtgaattggacatgcagaacctaccatttccttcccctgtttgcaatttttgtggggaggggaggatgttagtatttacaaaagatgattttaagaacttccaagagatgagtttaagaattccatagagtattagttgttcactgtgtaattaatccttccggagagtctttttttttttttttaaagaaacttttgggtgggttttgttttttattagttaccctaggggtatgttaccctggggtatgaagggaggtgaagataacggaggggggagaaaaaaaaaaggagaaaaaaggagcctaaaatggggaataattgaaatggaacagggggtgtgaggctggttcctcagtccccattccaaacggaggatagaagctgtgtatttatgtgacctggcagatctctggggccataacactgaaaagtgaaagaacctggtgggcagctatctttggctactgataaccagcagaaatgtctgttaattctgattttctcaatttgaagggatcagctacactgttaaattttggaaagccactacctacttccatcaagtaacttaggtttcgaaatatgggttcaacgcacctcccttattcaaaatgtcaaaatagattattataatgtataaagtaagaattgacaaaatatgattcttgggttgattggtcatttagaaactagccaaaagtgagacttttaatgtagaacatttttcagaaatgggtacaaagaaaaatgcatattactgtatatttcagagtgtttatgtgaaccttgtatttaattgagagtcccatgtacgttctgcagcctttttgctgcttctatcatctgaagtttgtgtagtacaaataaggcctttgggattcttaatgacatttatgttaaaatgttctcttctctttaaacaccgttttccaatccacctgtcagggagtccaaatcgtgtctgtgttgatgatgctatactttgtagctagaaaaacaattttagtgttgtgggctctgtattcagacttcctttttacaagaccgatgggcagtgatagattattttatcatatttaatgcatgggaaatagtgtgctgaggaagctattaaaagtataactcagtgaattgggtctgagttttaaatgagatatttcaaaattggcttgccactgtaaaagcgactaaataataatatgatactgttctttatgatcttgtcatgtttcactgatatgtttggggtcttcactatgtaaaaaatgtcaaaattgtaatgagcaagcatgtacaagtagtcgtaaatcaaaggttttaaacaggactgcattttcaattaggaaaagctgtttggcagatagcatccaatgcaaaaacagaaatatcgtaacgttctgcttagtgggcaagataagataggaaagacatgctcaaagaggcaaaagaatcattgctatcattcattctacactagtttgaagaagtttttgtacatcagagcacttccttcagcacacttttttgccttcagatttcattttttataaaatgagaagactaatgataaactgtagaaatcaaaatttattgagaaatctgtttctcctaacagatagtaaccctgccatgatatactacttcaacaatgttataaaatttatgtgataatatacattttaacctgggatttctaaattgctttaacaaatgctaatcctgagagttgccctgcaggactcaaaagggaaaggttttgggacgtggcagaaccctgcagggacatggaattaaggccattgcaatgtatcatctttgtagcattgtcatcactcctaagctgccttcacagttttagtacactaagatgaggaaatcgaaaatgggcagagaaagctcatactgtataattgaagacagtgacagagaacgtgtcagttatgccaaaactcttttgatttctgttccaggatttccaacaagaggggaaaggaatgacttgggagggtgggaaagacattaggagttgtttttattttttaccttggaagctttagctaccaatccagtaccctcctaactagaatgtatacacatcagcaggactgactgactacttcattagagatatactgtactcattgggggccttgggggtactgctgttcttatgtgggattttaatgttgtaatgtattgcatcttaatgtattgaattcattttgttgtactatattggttggcattttattaaaataaattgtattgtatcatatttgtatgttttaagagaaaataatataaaatacaatatttgtactattatatagtgcaaaaactacaaatctgtgcctctgcctcttgaattaattctttggttgcttgcatttgggaagggaatggagaaaggaaagaaccaataaagctttcaaagttcaagaaa

SEQ ID NO: 134866 - DNA, 1476 bp, Homo sapiens
  Payload ID: 6336
  Gene Symbol: FLT1
  Gene Name: fms-related tyrosine kinase 1
  ENST ID: ENST00000615611
  CDS Start-End: 134-1435
tgcatgcccagcccaggcatgcagtggaaacgcagggcaggagagaggaggccttcagagtgcagctggacttccttcccaaccctcttgcttccttcagaccggggtcgggttggcaaaccaagggcctctgatggtgattgttgaatactgcaaatatggaaatctctccaactacctcaagagcaaacgtgacttattttttctcaacaaggatgcagcactacacatggagcctaagaaagaaaaaatggagccaggcctggaacaaggcaagaaaccaagactagatagcgtcaccagcagcgaaagctttgcgagctccggctttcaggaagataaaagtctgagtgatgttgaggaagaggaggattctgacggtttctacaaggagcccatcactatggaagatctgatttcttacagttttcaagtggccagaggcatggagttcctgtcttccagaaagtgcattcatcgggacctggcagcgagaaacattcttttatctgagaacaacgtggtgaagatttgtgattttggccttgcccgggatatttataagaaccccgattatgtgagaaaaggagatactcgacttcctctgaaatggatggctcctgaatctatctttgacaaaatctacagcaccaagagcgacgtgtggtcttacggagtattgctgtgggaaatcttctccttaggtgggtctccatacccaggagtacaaatggatgaggacttttgcagtcgcctgagggaaggcatgaggatgagagctcctgagtactctactcctgaaatctatcagatcatgctggactgctggcacagagacccaaaagaaaggccaagatttgcagaacttgtggaaaaactaggtgatttgcttcaagcaaatgtacaacaggatggtaaagactacatcccaatcaatgccatactgacaggaaatagtgggtttacatactcaactcctgccttctctgaggacttcttcaaggaaagtatttcagctccgaagtttaattcaggaagctctgatgatgtcagatacgtaaatgctttcaagttcatgagcctggaaagaatcaaaacctttgaagaacttttaccgaatgccacctccatgtttgatgactaccagggcgacagcagcactctgttggcctctcccatgctgaagcgcttcacctggactgacagcaaacccaaggcctcgctcaagattgacttgagagtaaccagtaaaagtaaggagtcggggctgtctgatgtcagcaggcccagtttctgccattccagctgtgggcacgtcagcgaaggcaagcgcaggttcacctacgaccacgctgagctggaaaggaaaatcgcgtgctgctccccgcccccagactacaactcggtggtcctgtactccaccccacccatctagagtttgacacgaagccttatttctagaagcacatgtgtatt

SEQ ID NO: 134867 - DNA, 434 bp, Homo sapiens
  Payload ID: 6336
  Gene Symbol: FLT1
  Gene Name: fms-related tyrosine kinase 1
  ENST ID: ENST00000617835
  CDS Start-End: 136-393
tatgctcctttcccctgaggttctacagattgaacagctgtgttcctacccaatcacaatgggagaagctaaccagtatagcctggcaaacaagaggactaccagggcgacagcagcactctgttggcctctcccatgctgaagcgcttcacctggactgacagcaaacccaaggcctcgctcaagattgacttgagagtaaccagtaaaagtaaggagtcggggctgtctgatgtcagcaggcccagtttctgccattccagctgtgggcacgtcagcgaaggcaagcgcaggttcacctacgaccacgctgagctggaaaggaaaatcgcgtgctgctccccgcccccagactacaactcggtggtcctgtactccaccccacccatctagagtttgacacgaagccttatttctagaagcacatgtgtatt

SEQ ID NO: 134868 - DNA, 3842 bp, Homo sapiens
  Payload ID: 6337
  Gene Symbol: FLT3
  Gene Name: fms-related tyrosine kinase 3
  Uniprot ID: P36888
  ENST ID: ENST00000241453
  CDS Start-End: 83-3064
acctgcagcgcgaggcgcgccgctccaggcggcatcgcagggctgggccggcgcggcctggggaccccgggctccggaggccatgccggcgttggcgcgcgacggcggccagctgccgctgctcgttgttttttctgcaatgatatttgggactattacaaatcaagatctgcctgtgatcaagtgtgttttaatcaatcataagaacaatgattcatcagtggggaagtcatcatcatatcccatggtatcagaatccccggaagacctcgggtgtgcgttgagaccccagagctcagggacagtgtacgaagctgccgctgtggaagtggatgtatctgcttccatcacactgcaagtgctggtcgacgccccagggaacatttcctgtctctgggtctttaagcacagctccctgaattgccagccacattttgatttacaaaacagaggagttgtttccatggtcattttgaaaatgacagaaacccaagctggagaatacctactttttattcagagtgaagctaccaattacacaatattgtttacagtgagtataagaaataccctgctttacacattaagaagaccttactttagaaaaatggaaaaccaggacgccctggtctgcatatctgagagcgttccagagccgatcgtggaatgggtgctttgcgattcacagggggaaagctgtaaagaagaaagtccagctgttgttaaaaaggaggaaaaagtgcttcatgaattatttgggacggacataaggtgctgtgccagaaatgaactgggcagggaatgcaccaggctgttcacaatagatctaaatcaaactcctcagaccacattgccacaattatttcttaaagtaggggaacccttatggataaggtgcaaagctgttcatgtgaaccatggattcgggctcacctgggaattagaaaacaaagcactcgaggagggcaactactttgagatgagtacctattcaacaaacagaactatgatacggattctgtttgcttttgtatcatcagtggcaagaaacgacaccggatactacacttgttcctcttcaaagcatcccagtcaatcagctttggttaccatcgtagaaaagggatttataaatgctaccaattcaagtgaagattatgaaattgaccaatatgaagagttttgtttttctgtcaggtttaaagcctacccacaaatcagatgtacgtggaccttctctcgaaaatcatttccttgtgagcaaaagggtcttgataacggatacagcatatccaagttttgcaatcataagcaccagccaggagaatatatattccatgcagaaaatgatgatgcccaatttaccaaaatgttcacgctgaatataagaaggaaacctcaagtgctcgcagaagcatcggcaagtcaggcgtcctgtttctcggatggatacccattaccatcttggacctggaagaagtgttcagacaagtctcccaactgcacagaagagatcacagaaggagtctggaatagaaaggctaacagaaaagtgtttggacagtgggtgtcgagcagtactctaaacatgagtgaagccataaaagggttcctggtcaagtgctgtgcatacaattcccttggcacatcttgtgagacgatccttttaaactctccaggccccttccctttcatccaagacaacatctcattctatgcaacaattggtgtttgtctcctcttcattgtcgttttaaccctgctaatttgtcacaagtacaaaaagcaatttaggtatgaaagccagctacagatggtacaggtgaccggctcctcagataatgagtacttctacgttgatttcagagaatatgaatatgatctcaaatgggagtttccaagagaaaatttagagtttgggaaggtactaggatcaggtgcttttggaaaagtgatgaacgcaacagcttatggaattagcaaaacaggagtctcaatccaggttgccgtcaaaatgctgaaagaaaaagcagacagctctgaaagagaggcactcatgtcagaactcaagatgatgacccagctgggaagccacgagaatattgtgaacctgctgggggcgtgcacactgtcaggaccaatttacttgatttttgaatactgttgctatggtgatcttctcaactatctaagaagtaaaagagaaaaatttcacaggacttggacagagattttcaaggaacacaatttcagtttttaccccactttccaatcacatccaaattccagcatgcctggttcaagagaagttcagatacacccggactcggatcaaatctcagggcttcatgggaattcatttcactctgaagatgaaattgaatatgaaaaccaaaaaaggctggaagaagaggaggacttgaatgtgcttacatttgaagatcttctttgctttgcatatcaagttgccaaaggaatggaatttctggaatttaagtcgtgtgttcacagagacctggccgccaggaacgtgcttgtcacccacgggaaagtggtgaagatatgtgactttggattggctcgagatatcatgagtgattccaactatgttgtcaggggcaatgcccgtctgcctgtaaaatggatggcccccgaaagcctgtttgaaggcatctacaccattaagagtgatgtctggtcatatggaatattactgtgggaaatcttctcacttggtgtgaatccttaccctggcattccggttgatgctaacttctacaaactgattcaaaatggatttaaaatggatcagccattttatgctacagaagaaatatacattataatgcaatcctgctgggcttttgactcaaggaaacggccatccttccctaatttgacttcgtttttaggatgtcagctggcagatgcagaagaagcgatgtatcagaatgtggatggccgtgtttcggaatgtcctcacacctaccaaaacaggcgacctttcagcagagagatggatttggggctactctctccgcaggctcaggtcgaagattcgtagaggaacaatttagttttaaggacttcatccctccacctatccctaacaggctgtagattaccaaaacaagattaatttcatcactaaaagaaaatctattatcaactgctgcttcaccagacttttctctagaagctgtctgcgtttactcttgttttcaaagggacttttgtaaaatcaaatcatcctgtcacaaggcaggaggagctgataatgaactttattggagcattgatctgcatccaaggccttctcaggctggcttgagtgaattgtgtacctgaagtacagtatattcttgtaaatacataaaacaaaagcattttgctaaggagaagctaatatgattttttaagtctatgttttaaaataatatgtaaatttttcagctatttagtgatatattttatgggtgggaataaaatttctactacagaattgcccattattgaattatttacatggtataattagggcaagtcttaactggagttcacgaaccccctgaaattgtgcacccatagccacctacacattccttccagagcacgtgtgcttttaccccaagatacaaggaatgtgtaggcagctatggttgtcacagcctaagatttctgcaacaacaggggttgtattgggggaagtttataatgaataggtgttctaccataaagagtaatacatcacctagacactttggcggccttcccagactcagggccagtcagaagtaacatggaggattagtattttcaataaagttactcttgtccccaca

SEQ ID NO: 134869 - DNA, 3634 bp, Homo sapiens
  Payload ID: 6337
  Gene Symbol: FLT3
  Gene Name: fms-related tyrosine kinase 3
  ENST ID: ENST00000380987
  CDS Start-End: 83-2302
acctgcagcgcgaggcgcgccgctccaggcggcatcgcagggctgggccggcgcggcctggggaccccgggctccggaggccatgccggcgttggcgcgcgacggcggccagctgccgctgctcgttgttttttctgcaatgatatttgggactattacaaatcaagatctgcctgtgatcaagtgtgttttaatcaatcataagaacaatgattcatcagtggggaagtcatcatcatatcccatggtatcagaatccccggaagacctcgggtgtgcgttgagaccccagagctcagggacagtgtacgaagctgccgctgtggaagtggatgtatctgcttccatcacactgcaagtgctggtcgacgccccagggaacatttcctgtctctgggtctttaagcacagctccctgaattgccagccacattttgatttacaaaacagaggagttgtttccatggtcattttgaaaatgacagaaacccaagctggagaatacctactttttattcagagtgaagctaccaattacacaatattgtttacagtgagtataagaaataccctgctttacacattaagaagaccttactttagaaaaatggaaaaccaggacgccctggtctgcatatctgagagcgttccagagccgatcgtggaatgggtgctttgcgattcacagggggaaagctgtaaagaagaaagtccagctgttgttaaaaaggaggaaaaagtgcttcatgaattatttgggacggacataaggtgctgtgccagaaatgaactgggcagggaatgcaccaggctgttcacaatagatctaaatcaaactcctcagaccacattgccacaattatttcttaaagtaggggaacccttatggataaggtgcaaagctgttcatgtgaaccatggattcgggctcacctgggaattagaaaacaaagcactcgaggagggcaactactttgagatgagtacctattcaacaaacagaactatgatacggattctgtttgcttttgtatcatcagtggcaagaaacgacaccggatactacacttgttcctcttcaaagcatcccagtcaatcagctttggttaccatcgtagaaaagggatttataaatgctaccaattcaagtgaagattatgaaattgaccaatatgaagagttttgtttttctgtcaggtttaaagcctacccacaaatcagatgtacgtggaccttctctcgaaaatcatttccttgtgagcaaaagggtcttgataacggatacagcatatccaagttttgcaatcataagcaccagccaggagaatatatattccatgcagaaaatgatgatgcccaatttaccaaaatgttcacgctgaatataagaaggaaacctcaagtgctcgcagaagcatcggcaagtcaggcgtcctgtttctcggatggatacccattaccatcttggacctggaagaagtgttcagacaagtctcccaactgcacagaagagatcacagaaggagtctggaatagaaaggctaacagaaaagtgtttggacagtgggtgtcgagcagtactctaaacatgagtgaagccataaaagggttcctggtcaagtgctgtgcatacaattcccttggcacatcttgtgagacgatccttttaaactctccaggccccttccctttcatccaagacaacatctcattctatgcaacaattggtgtttgtctcctcttcattgtcgttttaaccctgctaatttgtcacaagtacaaaaagcaatttaggtatgaaagccagctacagatggtacaggtgaccggctcctcagataatgagtacttctacgttgatttcagagaatatgaatatgatctcaaatgggagtttccaagagaaaatttagagtttgggaaggtactaggatcaggtgcttttggaaaagtgatgaacgcaacagcttatggaattagcaaaacaggagtctcaatccaggttgccgtcaaaatgctgaaagaaaaagcagacagctctgaaagagaggcactcatgtcagaactcaagatgatgacccagctgggaagccacgagaatattgtgaacctgctgggggcgtgcacactgtcaggaccaatttacttgatttttgaatactgttgctatggtgatcttctcaactatctaagaagtaaaagagaaaaatttcacaggacttggacagagattttcaaggaacacaatttcagtttttaccccactttccaatcacatccaaattccagtaaaaagaaatgagctttacaaaggcaaactggaaaaaagaaggatggtgaaacgcttacgggactctcgggaagatctgtattatgtgagggaaagtgggctgagttcagaaaccaaagaatgagatcgatcatgcctggttcaagagaagttcagatacacccggactcggatcaaatctcagggcttcatgggaattcatttcactctgaagatgaaattgaatatgaaaaccaaaaaaggctggaagaagaggaggacttgaatgtgcttacatttgaagatcttctttgctttgcatatcaagttgccaaaggaatggaatttctggaatttaagtcgtgtgttcacagagacctggccgccaggaacgtgcttgtcacccacgggaaagtggtgaagatatgtgactttggattggctcgagatatcatgagtgattccaactatgttgtcaggggcaatgcccgtctgcctgtaaaatggatggcccccgaaagcctgtttgaaggcatctacaccattaagagtgatgtctggtcatatggaatattactgtgggaaatcttctcacttggtgtgaatccttaccctggcattccggttgatgctaacttctacaaactgattcaaaatggatttaaaatggatcagccattttatgctacagaagaaatatacattataatgcaatcctgctgggcttttgactcaaggaaacggccatccttccctaatttgacttcgtttttaggatgtcagctggcagatgcagaagaagcgatgtatcagaatgtggatggccgtgtttcggaatgtcctcacacctaccaaaacaggcgacctttcagcagagagatggatttggggctactctctccgcaggctcaggtcgaagattcgtagaggaacaatttagttttaaggacttcatccctccacctatccctaacaggctgtagattaccaaaacaagattaatttcatcactaaaagaaaatctattatcaactgctgcttcaccagacttttctctagaagctgtctgcgtttactcttgttttcaaagggacttttgtaaaatcaaatcatcctgtcacaaggcaggaggagctgataatgaactttattggagcattgatctgcatccaaggccttctcaggctggcttgagtgaattgtgtacctgaagtacagtatattcttgtaaatacataaaacaaaagcattttgctaaggagaagctaatatgattttttaagtctatgttttaaaataatatgtaaatttttcagctatttagtgatatattttatgggtgggaataaaatttctactacagaa

SEQ ID NO: 134870 - DNA, 1046 bp, Homo sapiens
  Payload ID: 6338
  Gene Symbol: FLT3LG
  Gene Name: fms-related tyrosine kinase 3 ligand
  Uniprot ID: P49771
  ENST ID: ENST00000204637
  CDS Start-End: 347-808
ctgtcacccggcttggccccttccacacccaactggggcaagcctgacccggcgacaggaggcatgaggggcccccggccgaaatgacagtgctggcgccagcctggagcccaacacacccgctcccctgcagacctatctcctcctgctgctgctgctgagctcgggactcagtgggacccaggactgctccttccaacacagccccatctcctccgacttcgctgtcaaaatccgtgagctgtctgactacctgcttcaagattacccagtcaccgtggcctccaacctgcaggacgaggagctctgcgggggcctctggcggctggtcctggcacagcgctggatggagcggctcaagactgtcgctgggtccaagatgcaaggcttgctggagcgcgtgaacacggagatacactttgtcaccaaatgtgcctttcagcccccccccagctgtcttcgcttcgtccagaccaacatctcccgcctcctgcaggagacctccgagcagctggtggcgctgaagccctggatcactcgccagaacttctcccggtgcctggagctgcagtgtcagcccgactcctcaaccctgccacccccatggagtccccggcccctggaggccacagccccgacagccccgcagccccctctgctcctcctactgctgctgcccgtgggcctcctgctgctggccgctgcctggtgcctgcactggcagaggacgcggcggaggacaccccgccctggggagcaggtgccccccgtccccagtccccaggacctgctgcttgtggagcactgacctggccaaggcctcatcctggggaggatactgaggcacacagaggggagtcaccagccagaggatgcatagcctggacacagaggaagttggctagaggccggtcccttccttgggcccctctcattccctccccagaatggaggcaacgccagaatccagcaccggccccatttacccaactctgtacaaagcccttgtccccatgaaattgtatataaatcatccttttctacca

SEQ ID NO: 134871 - DNA, 951 bp, Homo sapiens
  Payload ID: 6338
  Gene Symbol: FLT3LG
  Gene Name: fms-related tyrosine kinase 3 ligand
  Uniprot ID: P49771
  ENST ID: ENST00000597551
  CDS Start-End: 86-793
ggctgtcacccggcttggccccttccacacccaactggggcaagcctgacccggcgacaggaggcatgaggggcccccggccgaaatgacagtgctggcgccagcctggagcccaacaacctatctcctcctgctgctgctgctgagctcgggactcagtgggacccaggactgctccttccaacacagccccatctcctccgacttcgctgtcaaaatccgtgagctgtctgactacctgcttcaagattacccagtcaccgtggcctccaacctgcaggacgaggagctctgcgggggcctctggcggctggtcctggcacagcgctggatggagcggctcaagactgtcgctgggtccaagatgcaaggcttgctggagcgcgtgaacacggagatacactttgtcaccaaatgtgcctttcagcccccccccagctgtcttcgcttcgtccagaccaacatctcccgcctcctgcaggagacctccgagcagctggtggcgctgaagccctggatcactcgccagaacttctcccggtgcctggagctgcagtgtcagcccgactcctcaaccctgccacccccatggagtccccggcccctggaggccacagccccgacagccccgcagccccctctgctcctcctactgctgctgcccgtgggcctcctgctgctggccgctgcctggtgcctgcactggcagaggacgcggcggaggacaccccgccctggggagcaggtgccccccgtccccagtccccaggacctgctgcttgtggagcactgacctggccaaggcctcatcctggggaggatactgaggcacacagaggggagtcaccagccagaggatgcatagcctggacacagaggaagttggctagaggccggtcccttccttgggcccctctcattccctccccagaatggaggcaacgccagaat

SEQ ID NO: 134872 - DNA, 591 bp, Homo sapiens
  Payload ID: 6338
  Gene Symbol: FLT3LG
  Gene Name: fms-related tyrosine kinase 3 ligand
  ENST ID: ENST00000598555
  CDS Start-End: 1-562
cgctgtcaaaatccgtgagctgtctgactacctgcttcaagattacccagtcaccgtggcctccaacctgcaggacgaggagctctgcgggggcctctggcggctggtcctggcacagcgctggatggagcggctcaagactgtcgctgggtccaagatgcaaggcttgctggagcgcgtgaacacggagatacactttgtcaccaaatgtgcctttcaggagacctccgagcagctggtggcgctgaagccctggatcactcgccagaacttctcccggtgcctggagctgcagtgtcagcccggtgccccccgtccccagtccccaggacctgctgcttgtggagcactgacctggccaaggcctcatcctggggaggatactgaggcacacagaggggagtcaccagccagaggatgcatagcctggacacagaggaagttggctagaggccggtcccttccttgggcccctctcattccctccccagaatggaggcaacgccagaatccagcaccggccccatttacccaactctgtacaaagcccttgtccccatgaaattgtatataaatcatccttttctacca

SEQ ID NO: 134873 - DNA, 1076 bp, Homo sapiens
  Payload ID: 6338
  Gene Symbol: FLT3LG
  Gene Name: fms-related tyrosine kinase 3 ligand
  Uniprot ID: P49771
  ENST ID: ENST00000594009
  CDS Start-End: 80-787
ggggcatgagggtccgagacttgttcttctgtcccttccaagacccggcgacaggaggcatgaggggcccccggccgaaatgacagtgctggcgccagcctggagcccaacaacctatctcctcctgctgctgctgctgagctcgggactcagtgggacccaggactgctccttccaacacagccccatctcctccgacttcgctgtcaaaatccgtgagctgtctgactacctgcttcaagattacccagtcaccgtggcctccaacctgcaggacgaggagctctgcgggggcctctggcggctggtcctggcacagcgctggatggagcggctcaagactgtcgctgggtccaagatgcaaggcttgctggagcgcgtgaacacggagatacactttgtcaccaaatgtgcctttcagcccccccccagctgtcttcgcttcgtccagaccaacatctcccgcctcctgcaggagacctccgagcagctggtggcgctgaagccctggatcactcgccagaacttctcccggtgcctggagctgcagtgtcagcccgactcctcaaccctgccacccccatggagtccccggcccctggaggccacagccccgacagccccgcagccccctctgctcctcctactgctgctgcccgtgggcctcctgctgctggccgctgcctggtgcctgcactggcagaggacgcggcggaggacaccccgccctggggagcaggtgccccccgtccccagtccccaggacctgctgcttgtggagcactgacctggccaaggcctcatcctgcggagccttaaacaacgcagtgagacagacatctatcatcccattttacaggggaggatactgaggcacacagaggggagtcaccagccagaggatgcatagcctggacacagaggaagttggctagaggccggtcccttccttgggcccctctcattccctccccagaatggaggcaacgccagaatccagcaccggccccatttacccaactctgtacaaagcccttgtccccatgaaattgtatataaatcatccttttctacca

SEQ ID NO: 134874 - DNA, 1034 bp, Homo sapiens
  Payload ID: 6338
  Gene Symbol: FLT3LG
  Gene Name: fms-related tyrosine kinase 3 ligand
  ENST ID: ENST00000596435
  CDS Start-End: 92-745
gtctctggctgtcacccggcttggccccttccacacccaactggggcaagcctgacccggcgacaggaggcatgaggggcccccggccgaaatgacagtgctggcgccagcctggagcccaacaacctatctcctcctgctgctgctgctgagctcgggactcagtgggacccaggactgctccttccaacacagccccatctcctccgacttcgctgtcaaaatccgtgagctgtctgactacctgcttcaagattacccagtcaccgtggcctccaacctgcaggacgaggagctctgcgggggcctctggcggctggtcctggcacagcgctggatggagcggctcaagactgtcgctgggtccaagatgcaaggcttgctggagcgcgtgaacacggagatacactttgtcaccaaatgtgcctttcaggagacctccgagcagctggtggcgctgaagccctggatcactcgccagaacttctcccggtgcctggagctgcagtgtcagcccgactcctcaaccctgccacccccatggagtccccggcccctggaggccacagccccgacagccccgcagccccctctgctcctcctactgctgctgcccgtgggcctcctgctgctggccgctgcctggtgcctgcactggcagaggacgcggcggaggacaccccgccctggggagcaggtgccccccgtccccagtccccaggacctgctgcttgtggagcactgacctggccaaggcctcatcctgcggagccttaaacaacgcagtgagacagacatctatcatcccattttacaggggaggatactgaggcacacagaggggagtcaccagccagaggatgcatagcctggacacagaggaagttggctagaggccggtcccttccttgggcccctctcattccctccccagaatggaggcaacgccagaatccagcaccggccccatttacccaactctgtacaaagcccttgtccccatgaaattgtatataaatcatccttttctacca

SEQ ID NO: 134875 - DNA, 984 bp, Homo sapiens
  Payload ID: 6338
  Gene Symbol: FLT3LG
  Gene Name: fms-related tyrosine kinase 3 ligand
  Uniprot ID: P49771
  ENST ID: ENST00000600429
  CDS Start-End: 68-775
ccccttccacacccaactggggcaagcctgacccggcgacaggaggcatgaggggcccccggccgaaatgacagtgctggcgccagcctggagcccaacaacctatctcctcctgctgctgctgctgagctcgggactcagtgggacccaggactgctccttccaacacagccccatctcctccgacttcgctgtcaaaatccgtgagctgtctgactacctgcttcaagattacccagtcaccgtggcctccaacctgcaggacgaggagctctgcgggggcctctggcggctggtcctggcacagcgctggatggagcggctcaagactgtcgctgggtccaagatgcaaggcttgctggagcgcgtgaacacggagatacactttgtcaccaaatgtgcctttcagcccccccccagctgtcttcgcttcgtccagaccaacatctcccgcctcctgcaggagacctccgagcagctggtggcgctgaagccctggatcactcgccagaacttctcccggtgcctggagctgcagtgtcagcccgactcctcaaccctgccacccccatggagtccccggcccctggaggccacagccccgacagccccgcagccccctctgctcctcctactgctgctgcccgtgggcctcctgctgctggccgctgcctggtgcctgcactggcagaggacgcggcggaggacaccccgccctggggagcaggtgccccccgtccccagtccccaggacctgctgcttgtggagcactgacctggccaaggcctcatcctgcggagccttaaacaacgcagtgagacagacatctatcatcccattttacaggggaggatactgaggcacacagaggggagtcaccagccagaggatgcatagcctggacacagaggaagttggctagaggccggtcccttccttgggcccctctcattccctccccagaatggaggcaacgccagaat

SEQ ID NO: 134876 - DNA, 1301 bp, Homo sapiens
  Payload ID: 6338
  Gene Symbol: FLT3LG
  Gene Name: fms-related tyrosine kinase 3 ligand
  Uniprot ID: P49771
  ENST ID: ENST00000595510
  CDS Start-End: 302-763
gacccggcgacaggaggcatgaggggcccccggccgaaatgacagtgctggcgccagcctggagcccaacacacccgctcccctgcagacctatctcctcctgctgctgctgctgagctcgggactcagtgggacccaggactgctccttccaacacagccccatctcctccgacttcgctgtcaaaatccgtgagctgtctgactacctgcttcaagattacccagtcaccgtggcctccaacctgcaggacgaggagctctgcgggggcctctggcggctggtcctggcacagcgctggatggagcggctcaagactgtcgctgggtccaagatgcaaggcttgctggagcgcgtgaacacggagatacactttgtcaccaaatgtgcctttcagcccccccccagctgtcttcgcttcgtccagaccaacatctcccgcctcctgcaggagacctccgagcagctggtggcgctgaagccctggatcactcgccagaacttctcccggtgcctggagctgcagtgtcagcccgactcctcaaccctgccacccccatggagtccccggcccctggaggccacagccccgacagccccgcagccccctctgctcctcctactgctgctgcccgtgggcctcctgctgctggccgctgcctggtgcctgcactggcagaggacgcggcggaggacaccccgccctggggagcaggtgccccccgtccccagtccccaggacctgctgcttgtggagcactgacctggccaaggcctcatcctgtagagatggggtttcgccatgttggccaggctggtctcaaactcctgatctcagctgatccgcccgcctcagcctcccaaagtgctgggatgacaggtgtgagccactgttcctggcccatgctgggctttccacaaatgaactcacttccttgagaagttcgtgccattatgatcccaaggcatagagaggtaaataatttgccaaaagtcacacagctcaagggtgacaaccaagatttgacttcaggttgtcttttttttttttttgagatggagtcttgctctgtcgcccaggctgtagtgcagtggcatgatctcggctcactgcagcccccgcctcccaggttcaagtgattctcctgcctcagcctctggagtagctgggattacaggtacccaccaccacactcggctaatttttgtatttgtagtagagacggggtttcaccatgttggccaggctggtctcgaactcctgaccttagctgatccgcccgcctcagcctcccaaagtg

SEQ ID NO: 134877 - DNA, 1032 bp, Homo sapiens
  Payload ID: 6338
  Gene Symbol: FLT3LG
  Gene Name: fms-related tyrosine kinase 3 ligand
  ENST ID: ENST00000601800
  CDS Start-End: 113-289
aaaaatttcctttcactttcggtctctggctgtcacccggcttggccccttccacacccaactggggcaagcctgacccggcgacaggaggcatgaggggcccccggccgaaatgacagtgctggcgccagcctggagcccaacaacctatctcctcctgctgctgctgctgagctcgggactcagtgggacccaggactgctccttccaacacagccccatctcctccgacttcgctgtcaaaatccgtgagctgccaggcctgatcctgttttctcccgcagtctgactacctgcttcaagattacccagtcaccgtggcctccaacctgcaggacgaggagctctgcgggggcctctggcggctggtcctggcacagcgctggatggagcggctcaagactgtcgctgggtccaagatgcaaggcttgctggagcgcgtgaacacggagatacactttgtcaccaaatgtgcctttcaggagacctccgagcagctggtggcgctgaagccctggatcactcgccagaacttctcccggtgcctggagctgcagtgtcagcccgactcctcaaccctgccacccccatggagtccccggcccctggaggccacagccccgacagccccgcagccccctctgctcctcctactgctgctgcccgtgggcctcctgctgctggccgctgcctggtgcctgcactggcagaggacgcggcggaggacaccccgccctggggagcaggtgccccccgtccccagtccccaggacctgctgcttgtggagcactgacctggccaaggcctcatcctggggaggatactgaggcacacagaggggagtcaccagccagaggatgcatagcctggacacagaggaagttggctagaggccggtcccttccttgggcccctctcattccctccccagaatggaggcaacgccagaatccagcaccggccccatttacccaactctgtacaaagcccttgtccccatgaaattgtatataaatcatccttttctacca

SEQ ID NO: 134878 - DNA, 1057 bp, Homo sapiens
  Payload ID: 6338
  Gene Symbol: FLT3LG
  Gene Name: fms-related tyrosine kinase 3 ligand
  ENST ID: ENST00000600084
  CDS Start-End: 84-260
ctgtcacccggcttggccccttccacacccaactggggcaagcctgacccggcgacaggaggcatgaggggcccccggccgaaatgacagtgctggcgccagcctggagcccaacaacctatctcctcctgctgctgctgctgagctcgggactcagtgggacccaggactgctccttccaacacagccccatctcctccgacttcgctgtcaaaatccgtgagctgccaggcctgatcctgttttctcccgcagtctgactacctgcttcaagattacccagtcaccgtggcctccaacctgcaggacgaggagctctgcgggggcctctggcggctggtcctggcacagcgctggatggagcggctcaagactgtcgctgggtccaagatgcaaggcttgctggagcgcgtgaacacggagatacactttgtcaccaaatgtgcctttcagcccccccccagctgtcttcgcttcgtccagaccaacatctcccgcctcctgcaggagacctccgagcagctggtggcgctgaagccctggatcactcgccagaacttctcccggtgcctggagctgcagtgtcagcccgactcctcaaccctgccacccccatggagtccccggcccctggaggccacagccccgacagccccgcagccccctctgctcctcctactgctgctgcccgtgggcctcctgctgctggccgctgcctggtgcctgcactggcagaggacgcggcggaggacaccccgccctggggagcaggtgccccccgtccccagtccccaggacctgctgcttgtggagcactgacctggccaaggcctcatcctggggaggatactgaggcacacagaggggagtcaccagccagaggatgcatagcctggacacagaggaagttggctagaggccggtcccttccttgggcccctctcattccctccccagaatggaggcaacgccagaatccagcaccggccccatttacccaactctgtacaaagcccttgtccccatgaaattgtatataaatcatccttttctacca

SEQ ID NO: 134879 - DNA, 1161 bp, Homo sapiens
  Payload ID: 6338
  Gene Symbol: FLT3LG
  Gene Name: fms-related tyrosine kinase 3 ligand
  ENST ID: ENST00000597914
  CDS Start-End: 1-397
cagctgtcttcgcttcgtccagaccaacatctcccgcctcctgcaggagacctccgagcagctggtggcgctgaagccctggatcactcgccagaacttctcccggtgcctggagctgcagtgtcagcccggtgccccccgtccccagtccccaggacctgctgcttgtggagcactgacctggccaaggcctcatcctggtgagtccttcctgggctatggggcctggactttgtgtctgcaggttgggagggtcactaggaggccatggaagggtggtgagcagtggaggggcaggggcagctctaggtgcagaaagacccctctggggccaggcgcggtggctcacgcctgtaatcccagcactttgggaggccgaggcgggtggatcacttgaggtcaggagttcaagaccagcctggccaacatggcaaaccccagtctctactaaaaatacaaaaattaactgggcatagtggtgtgtgcctgtaatcccagctactcaggaggctgaggaaggagaattgcttgaacccaggaggcggaggttgcagtgagccgagattgcgccactggactccagcctgagtgacagagctagactccgtctcaaaaaaaaaaaaaaaaaagaaaaggaaagacccctctggggccacggagacagactggagaccaagccggaggctgtgggaaggcccagggtgaggaccatgactgagccagggctgggaccatgggatggagtggagtggatgggcagagagtcaggggtcagagatcaggagggaccggcctggggcctgacaggcttgagttggcacagatagccctggtccagtgatggggtggacaggggggaacctgggggaggagtcagattagggaaagacatggagctcactggggacctgaaggagcaaggggccctggggagatctgtggatgtgggagtttgcaagcctcctgggacaggaaggaaatggcattccagaaagagggaactgcctttggaagccctttggtatgagaaagctcagggtgttccagtaacttgggccagcgtggggcagcaaggagccatgggaggtgtgagagggaggaaaggagctgggaacaggtgtggagggtgcaggcaggtaggcaggtgggccaggagggaag

SEQ ID NO: 134880 - DNA, 5857 bp, Homo sapiens
  Payload ID: 6339
  Gene Symbol: FLT4
  Gene Name: fms-related tyrosine kinase 4
  Uniprot ID: P35916
  ENST ID: ENST00000261937
  CDS Start-End: 80-4171
aggccagccggcgcccgcgcggacactttcagccccgagccgcggccgctcgggtcggacccacgcgcagcggccggagatgcagcggggcgccgcgctgtgcctgcgactgtggctctgcctgggactcctggacggcctggtgagtggctactccatgacccccccgaccttgaacatcacggaggagtcacacgtcatcgacaccggtgacagcctgtccatctcctgcaggggacagcaccccctcgagtgggcttggccaggagctcaggaggcgccagccaccggagacaaggacagcgaggacacgggggtggtgcgagactgcgagggcacagacgccaggccctactgcaaggtgttgctgctgcacgaggtacatgccaacgacacaggcagctacgtctgctactacaagtacatcaaggcacgcatcgagggcaccacggccgccagctcctacgtgttcgtgagagactttgagcagccattcatcaacaagcctgacacgctcttggtcaacaggaaggacgccatgtgggtgccctgtctggtgtccatccccggcctcaatgtcacgctgcgctcgcaaagctcggtgctgtggccagacgggcaggaggtggtgtgggatgaccggcggggcatgctcgtgtccacgccactgctgcacgatgccctgtacctgcagtgcgagaccacctggggagaccaggacttcctttccaaccccttcctggtgcacatcacaggcaacgagctctatgacatccagctgttgcccaggaagtcgctggagctgctggtaggggagaagctggtcctgaactgcaccgtgtgggctgagtttaactcaggtgtcacctttgactgggactacccagggaagcaggcagagcggggtaagtgggtgcccgagcgacgctcccagcagacccacacagaactctccagcatcctgaccatccacaacgtcagccagcacgacctgggctcgtatgtgtgcaaggccaacaacggcatccagcgatttcgggagagcaccgaggtcattgtgcatgaaaatcccttcatcagcgtcgagtggctcaaaggacccatcctggaggccacggcaggagacgagctggtgaagctgcccgtgaagctggcagcgtaccccccgcccgagttccagtggtacaaggatggaaaggcactgtccgggcgccacagtccacatgccctggtgctcaaggaggtgacagaggccagcacaggcacctacaccctcgccctgtggaactccgctgctggcctgaggcgcaacatcagcctggagctggtggtgaatgtgcccccccagatacatgagaaggaggcctcctcccccagcatctactcgcgtcacagccgccaggccctcacctgcacggcctacggggtgcccctgcctctcagcatccagtggcactggcggccctggacaccctgcaagatgtttgcccagcgtagtctccggcggcggcagcagcaagacctcatgccacagtgccgtgactggagggcggtgaccacgcaggatgccgtgaaccccatcgagagcctggacacctggaccgagtttgtggagggaaagaataagactgtgagcaagctggtgatccagaatgccaacgtgtctgccatgtacaagtgtgtggtctccaacaaggtgggccaggatgagcggctcatctacttctatgtgaccaccatccccgacggcttcaccatcgaatccaagccatccgaggagctactagagggccagccggtgctcctgagctgccaagccgacagctacaagtacgagcatctgcgctggtaccgcctcaacctgtccacgctgcacgatgcgcacgggaacccgcttctgctcgactgcaagaacgtgcatctgttcgccacccctctggccgccagcctggaggaggtggcacctggggcgcgccacgccacgctcagcctgagtatcccccgcgtcgcgcccgagcacgagggccactatgtgtgcgaagtgcaagaccggcgcagccatgacaagcactgccacaagaagtacctgtcggtgcaggccctggaagcccctcggctcacgcagaacttgaccgacctcctggtgaacgtgagcgactcgctggagatgcagtgcttggtggccggagcgcacgcgcccagcatcgtgtggtacaaagacgagaggctgctggaggaaaagtctggagtcgacttggcggactccaaccagaagctgagcatccagcgcgtgcgcgaggaggatgcgggacgctatctgtgcagcgtgtgcaacgccaagggctgcgtcaactcctccgccagcgtggccgtggaaggctccgaggataagggcagcatggagatcgtgatccttgtcggtaccggcgtcatcgctgtcttcttctgggtcctcctcctcctcatcttctgtaacatgaggaggccggcccacgcagacatcaagacgggctacctgtccatcatcatggaccccggggaggtgcctctggaggagcaatgcgaatacctgtcctacgatgccagccagtgggaattcccccgagagcggctgcacctggggagagtgctcggctacggcgccttcgggaaggtggtggaagcctccgctttcggcatccacaagggcagcagctgtgacaccgtggccgtgaaaatgctgaaagagggcgccacggccagcgagcaccgcgcgctgatgtcggagctcaagatcctcattcacatcggcaaccacctcaacgtggtcaacctcctcggggcgtgcaccaagccgcagggccccctcatggtgatcgtggagttctgcaagtacggcaacctctccaacttcctgcgcgccaagcgggacgccttcagcccctgcgcggagaagtctcccgagcagcgcggacgcttccgcgccatggtggagctcgccaggctggatcggaggcggccggggagcagcgacagggtcctcttcgcgcggttctcgaagaccgagggcggagcgaggcgggcttctccagaccaagaagctgaggacctgtggctgagcccgctgaccatggaagatcttgtctgctacagcttccaggtggccagagggatggagttcctggcttcccgaaagtgcatccacagagacctggctgctcggaacattctgctgtcggaaagcgacgtggtgaagatctgtgactttggccttgcccgggacatctacaaagaccccgactacgtccgcaagggcagtgcccggctgcccctgaagtggatggcccctgaaagcatcttcgacaaggtgtacaccacgcagagtgacgtgtggtcctttggggtgcttctctgggagatcttctctctgggggcctccccgtaccctggggtgcagatcaatgaggagttctgccagcggctgagagacggcacaaggatgagggccccggagctggccactcccgccatacgccgcatcatgctgaactgctggtccggagaccccaaggcgagacctgcattctcggagctggtggagatcctgggggacctgctccagggcaggggcctgcaagaggaagaggaggtctgcatggccccgcgcagctctcagagctcagaagagggcagcttctcgcaggtgtccaccatggccctacacatcgcccaggctgacgctgaggacagcccgccaagcctgcagcgccacagcctggccgccaggtattacaactgggtgtcctttcccgggtgcctggccagaggggctgagacccgtggttcctccaggatgaagacatttgaggaattccccatgaccccaacgacctacaaaggctctgtggacaaccagacagacagtgggatggtgctggcctcggaggagtttgagcagatagagagcaggcatagacaagaaagcggcttcagctgtaaaggacctggccagaatgtggctgtgaccagggcacaccctgactcccaagggaggcggcggcggcctgagcggggggcccgaggaggccaggtgttttacaacagcgagtatggggagctgtcggagccaagcgaggaggaccactgctccccgtctgcccgcgtgactttcttcacagacaacagctactaagcagcatcggacaagacccccagcacttgggggttcaggcccggcagggcgggcagagggctggaggcccaggctgggaactcatctggttgaactctggtggcacaggagtgtcctcttccctctctgcagacttcccagctaggaagagcaggactccaggcccaaggctcccggaattccgtcaccacgactggccagggccacgctccagctgccccggcccctccccctgagattcagatgtcatttagttcagcatccgcaggtgctggtcccggggccagcacttccatgggaatgtctctttggcgacctcctttcatcacactgggtggtggcctggtccctgttttcccacgaggaatctgtgggtctgggagtcacacagtgttggaggttaaggcatacgagagcagaggtctcccaaacgccctttcctcctcaggcacacagctactctccccacgagggctggctggcctcacccacccctgcacagttgaagggaggggctgtgtttccatctcaaagaaggcatttgcagggtcctcttctgggcctgaccaaacagccaactagcccctggggtggccaccagtatgacagtattatacgctggcaacacagaggcagcccgcacacctgcgcctgggtgttgagagccatcctgcaagtctttttcaacagaacttcacagactgttagagctgctgagaagaatttgctttccgaattcagcctggaaggcgcccagggacagctgtactgagtctagatgactctgacccccgccccaggtcaaggccagcagagcagtcagtgcctctggagaaggcccttgctctcccacctggcccagactccgaggagcctgggtctggagctgccggtctggttcttccctttagagcccggatctgccacctgcggcccctcccaagccgtgaaccagctcatgagagatgaacactgtgggatccactcaggaaggctcggggctggcacaaaggaccacccagcattgccctgtgccacccagcactcagtggacattctggggacctgccttcagccttttcctgccctgtgcctgacatcagcaccctggctggtcagaatgccgccctcccagaggagcagccgagagatcccctgaaggctggaggcattctgctcaggacccctatcccagctcacagtgcccaaccatctcaccaggagaaagagccacatccccacgttaggaccacggagactgaccaccaccctgaccccccaaacccacgcaccagacgcttgcaggacaggcgccgcgcagcgggcaggggcttgcccggccgaccctcccctccccacctcccccactgcgcgttactccaggatatgccgagtgcacgtataaggtcatcttcgtcgtccccgtggacctcccccttcctctgcacgtcgtccaacgtgggactggcgtgtcaggcttccctgggaggatctggaggttgttctctgcagagaaccagcctggctcctggcgcgcacctctgctcccttctcctcactacccacccacgcatgtaccgggaaaaaaactactatgcccttctagaccatgttctgagaaaagatcgaaaatatttaacaagagataataataaatctgatgccggtctttgtgtgtgttgcgga

SEQ ID NO: 134881 - DNA, 4292 bp, Homo sapiens
  Payload ID: 6339
  Gene Symbol: FLT4
  Gene Name: fms-related tyrosine kinase 4
  Uniprot ID: P35916
  ENST ID: ENST00000393347
  CDS Start-End: 80-3976
aggccagccggcgcccgcgcggacactttcagccccgagccgcggccgctcgggtcggacccacgcgcagcggccggagatgcagcggggcgccgcgctgtgcctgcgactgtggctctgcctgggactcctggacggcctggtgagtggctactccatgacccccccgaccttgaacatcacggaggagtcacacgtcatcgacaccggtgacagcctgtccatctcctgcaggggacagcaccccctcgagtgggcttggccaggagctcaggaggcgccagccaccggagacaaggacagcgaggacacgggggtggtgcgagactgcgagggcacagacgccaggccctactgcaaggtgttgctgctgcacgaggtacatgccaacgacacaggcagctacgtctgctactacaagtacatcaaggcacgcatcgagggcaccacggccgccagctcctacgtgttcgtgagagactttgagcagccattcatcaacaagcctgacacgctcttggtcaacaggaaggacgccatgtgggtgccctgtctggtgtccatccccggcctcaatgtcacgctgcgctcgcaaagctcggtgctgtggccagacgggcaggaggtggtgtgggatgaccggcggggcatgctcgtgtccacgccactgctgcacgatgccctgtacctgcagtgcgagaccacctggggagaccaggacttcctttccaaccccttcctggtgcacatcacaggcaacgagctctatgacatccagctgttgcccaggaagtcgctggagctgctggtaggggagaagctggtcctgaactgcaccgtgtgggctgagtttaactcaggtgtcacctttgactgggactacccagggaagcaggcagagcggggtaagtgggtgcccgagcgacgctcccagcagacccacacagaactctccagcatcctgaccatccacaacgtcagccagcacgacctgggctcgtatgtgtgcaaggccaacaacggcatccagcgatttcgggagagcaccgaggtcattgtgcatgaaaatcccttcatcagcgtcgagtggctcaaaggacccatcctggaggccacggcaggagacgagctggtgaagctgcccgtgaagctggcagcgtaccccccgcccgagttccagtggtacaaggatggaaaggcactgtccgggcgccacagtccacatgccctggtgctcaaggaggtgacagaggccagcacaggcacctacaccctcgccctgtggaactccgctgctggcctgaggcgcaacatcagcctggagctggtggtgaatgtgcccccccagatacatgagaaggaggcctcctcccccagcatctactcgcgtcacagccgccaggccctcacctgcacggcctacggggtgcccctgcctctcagcatccagtggcactggcggccctggacaccctgcaagatgtttgcccagcgtagtctccggcggcggcagcagcaagacctcatgccacagtgccgtgactggagggcggtgaccacgcaggatgccgtgaaccccatcgagagcctggacacctggaccgagtttgtggagggaaagaataagactgtgagcaagctggtgatccagaatgccaacgtgtctgccatgtacaagtgtgtggtctccaacaaggtgggccaggatgagcggctcatctacttctatgtgaccaccatccccgacggcttcaccatcgaatccaagccatccgaggagctactagagggccagccggtgctcctgagctgccaagccgacagctacaagtacgagcatctgcgctggtaccgcctcaacctgtccacgctgcacgatgcgcacgggaacccgcttctgctcgactgcaagaacgtgcatctgttcgccacccctctggccgccagcctggaggaggtggcacctggggcgcgccacgccacgctcagcctgagtatcccccgcgtcgcgcccgagcacgagggccactatgtgtgcgaagtgcaagaccggcgcagccatgacaagcactgccacaagaagtacctgtcggtgcaggccctggaagcccctcggctcacgcagaacttgaccgacctcctggtgaacgtgagcgactcgctggagatgcagtgcttggtggccggagcgcacgcgcccagcatcgtgtggtacaaagacgagaggctgctggaggaaaagtctggagtcgacttggcggactccaaccagaagctgagcatccagcgcgtgcgcgaggaggatgcgggacgctatctgtgcagcgtgtgcaacgccaagggctgcgtcaactcctccgccagcgtggccgtggaaggctccgaggataagggcagcatggagatcgtgatccttgtcggtaccggcgtcatcgctgtcttcttctgggtcctcctcctcctcatcttctgtaacatgaggaggccggcccacgcagacatcaagacgggctacctgtccatcatcatggaccccggggaggtgcctctggaggagcaatgcgaatacctgtcctacgatgccagccagtgggaattcccccgagagcggctgcacctggggagagtgctcggctacggcgccttcgggaaggtggtggaagcctccgctttcggcatccacaagggcagcagctgtgacaccgtggccgtgaaaatgctgaaagagggcgccacggccagcgagcaccgcgcgctgatgtcggagctcaagatcctcattcacatcggcaaccacctcaacgtggtcaacctcctcggggcgtgcaccaagccgcagggccccctcatggtgatcgtggagttctgcaagtacggcaacctctccaacttcctgcgcgccaagcgggacgccttcagcccctgcgcggagaagtctcccgagcagcgcggacgcttccgcgccatggtggagctcgccaggctggatcggaggcggccggggagcagcgacagggtcctcttcgcgcggttctcgaagaccgagggcggagcgaggcgggcttctccagaccaagaagctgaggacctgtggctgagcccgctgaccatggaagatcttgtctgctacagcttccaggtggccagagggatggagttcctggcttcccgaaagtgcatccacagagacctggctgctcggaacattctgctgtcggaaagcgacgtggtgaagatctgtgactttggccttgcccgggacatctacaaagaccccgactacgtccgcaagggcagtgcccggctgcccctgaagtggatggcccctgaaagcatcttcgacaaggtgtacaccacgcagagtgacgtgtggtcctttggggtgcttctctgggagatcttctctctgggggcctccccgtaccctggggtgcagatcaatgaggagttctgccagcggctgagagacggcacaaggatgagggccccggagctggccactcccgccatacgccgcatcatgctgaactgctggtccggagaccccaaggcgagacctgcattctcggagctggtggagatcctgggggacctgctccagggcaggggcctgcaagaggaagaggaggtctgcatggccccgcgcagctctcagagctcagaagagggcagcttctcgcaggtgtccaccatggccctacacatcgcccaggctgacgctgaggacagcccgccaagcctgcagcgccacagcctggccgccaggtattacaactgggtgtcctttcccgggtgcctggccagaggggctgagacccgtggttcctccaggatgaagacatttgaggaattccccatgaccccaacgacctacaaaggctctgtggacaaccagacagacagtgggatggtgctggcctcggaggagtttgagcagatagagagcaggcatagacaagaaagcggcttcaggtagctgaagcagagagagagaaggcagcatacgtcagcattttcttctctgcacttataagaaagatcaaagactttaagactttcgctatttcttctactgctatctactacaaacttcaaagaggaaccaggaggacaagaggagcatgaaagtggacaaggagtgtgaccactgaagcaccacagggaggggttaggcctccggatgactgcgggcaggcctggataatatccagcctcccacaagaagctggtggagcagagtgttccctgactcctccaaggaaagggagacgccctttcatggtctgctgagt

SEQ ID NO: 134882 - DNA, 580 bp, Homo sapiens
  Payload ID: 6339
  Gene Symbol: FLT4
  Gene Name: fms-related tyrosine kinase 4
  ENST ID: ENST00000512795
  CDS Start-End: 154-580
cagagggcgccacggccagcgagcaccgcgcgctgatgtcggagctcaagatcctcattcacatcggcaaccacctcaacgtggtcaacctcctcggggcgtgcaccaagccgcagggagaagtctcccgagcagcgcggacgcttccgcgccatggtggagctcgccaggctggatcggaggcggccggggagcagcgacagggtcctcttcgcgcggttctcgaagaccgagggcggagcgaggcgggcttctccagaccaagaagctgaggacctgtggctgagcccgctgaccatggaagatcttgtctgctacagcttccaggtggccagagggatggagttcctggcttcccgaaagtgcatccacagagacctggctgctcggaacattctgctgtcggaaagcgacgtggtgaagatctgtgactttggccttgcccgggacatctacaaagaccccgactacgtccgcaagggcagtgcccggctgcccctgaagtggatggcccctgaaagcatcttcgacaaggtgtacaccacgcagagtgacgtgtggtcctttggggtgcttctct

SEQ ID NO: 134883 - DNA, 4140 bp, Homo sapiens
  Payload ID: 6339
  Gene Symbol: FLT4
  Gene Name: fms-related tyrosine kinase 4
  ENST ID: ENST00000502649
  CDS Start-End: 56-3976
actttcagccccgagccgcggccgctcgggtcggacccacgcgcagcggccggagatgcagcggggcgccgcgctgtgcctgcgactgtggctctgcctgggactcctggacggcctggtgagtggctactccatgacccccccgaccttgaacatcacggaggagtcacacgtcatcgacaccggtgacagcctgtccatctcctgcaggggacagcaccccctcgagtgggcttggccaggagctcaggaggcgccagccaccggagacaaggacagcgaggacacgggggtggtgcgagactgcgagggcacagacgccaggccctactgcaaggtgttgctgctgcacgaggtacatgccaacgacacaggcagctacgtctgctactacaagtacatcaaggcacgcatcgagggcaccacggccgccagctcctacgtgttcgtgagagactttgagcagccattcatcaacaagcctgacacgctcttggtcaacaggaaggacgccatgtgggtgccctgtctggtgtccatccccggcctcaatgtcacgctgcgctcgcaaagctcggtgctgtggccagacgggcaggaggtggtgtgggatgaccggcggggcatgctcgtgtccacgccactgctgcacgatgccctgtacctgcagtgcgagaccacctggggagaccaggacttcctttccaaccccttcctggtgcacatcacaggcaacgagctctatgacatccagctgttgcccaggaagtcgctggagctgctggtaggggagaagctggtcctgaactgcaccgtgtgggctgagtttaactcaggtgtcacctttgactgggactacccagggaagcaggcagagcggggtaagtgggtgcccgagcgacgctcccagcagacccacacagaactctccagcatcctgaccatccacaacgtcagccagcacgacctgggctcgtatgtgtgcaaggccaacaacggcatccagcgatttcgggagagcaccgaggtcattgtgcatgaaaatcccttcatcagcgtcgagtggctcaaaggacccatcctggaggccacggcaggagacgagctggtgaagctgcccgtgaagctggcagcgtaccccccgcccgagttccagtggtacaaggatggaaaggcactgtccgggcgccacagtccacatgccctggtgctcaaggaggtgacagaggccagcacaggcacctacaccctcgccctgtggaactccgctgctggcctgaggcgcaacatcagcctggagctggtggtgaatgtgcccccccagatacatgagaaggaggcctcctcccccagcatctactcgcgtcacagccgccaggccctcacctgcacggcctacggggtgcccctgcctctcagcatccagtggcactggcggccctggacaccctgcaagatgtttgcccagcgtagtctccggcggcggcagcagcaagacctcatgccacagtgccgtgactggagggcggtgaccacgcaggatgccgtgaaccccatcgagagcctggacacctggaccgagtttgtggagggaaagaataagactgtgagcaagctggtgatccagaatgccaacgtgtctgccatgtacaagtgtgtggtctccaacaaggtgggccaggatgagcggctcatctacttctatgtgaccaccatccccgacggcttcaccatcgaatccaagccatccgaggagctactagagggccagccggtgctcctgagctgccaagccgacagctacaagtacgagcatctgcgctggtaccgcctcaacctgtccacgctgcacgatgcgcacgggaacccgcttctgctcgactgcaagaacgtgcatctgttcgccacccctctggccgccagcctggaggaggtggcacctggggcgcgccacgccacgctcagcctgagtatcccccgcgtcgcgcccgagcacgagggccactatgtgtgcgaagtgcaagaccggcgcagccatgacaagcactgccacaagaagtacctgtcggtgcaggccctggaagcccctcggctcacgcagaacttgaccgacctcctggtgaacgtgagcgactcgctggagatgcagtgcttggtggccggagcgcacgcgcccagcatcgtgtggtacaaagacgagaggctgctggaggaaaagtctggagtcgacttggcggactccaaccagaagctgagcatccagcgcgtgcgcgaggaggatgcgggacgctatctgtgcagcgtgtgcaacgccaagggctgcgtcaactcctccgccagcgtggccgtggaaggctccgaggataagggcagcatggagatcgtgatccttgtcggtaccggcgtcatcgctgtcttcttctgggtcctcctcctcctcatcttctgtaacatgaggaggccggcccacgcagacatcaagacgggctacctgtccatcatcatggaccccggggaggtgcctctggaggagcaatgcgaatacctgtcctacgatgccagccagtgggaattcccccgagagcggctgcacctggggagagtgctcggctacggcgccttcgggaaggtggtggaagcctccgctttcggcatccacaagggcagcagctgtgacaccgtggccgtgaaaatgctgaaagagggcgccacggccagcgagcaccgcgcgctgatgtcggagctcaagatcctcattcacatcggcaaccacctcaacgtggtcaacctcctcggggcgtgcaccaagccgcagggccccctcatggtgatcgtggagttctgcaagtacggcaacctctccaacttcctgcgcgccaagcgggacgccttcagcccctgcgcggagaagtctcccgagcagcgcggacgcttccgcgccatggtggagctcgccaggctggatcggaggcggccggggagcagcgacagggtcctcttcgcgcggttctcgaagaccgagggcggagcgaggcgggcttctccagaccaagaagctgaggacctgtggctgagcccgctgaccatggaagatcttgtctgctacagcttccaggtggccagagggatggagttcctggcttcccgaaagtgcatccacagagacctggctgctcggaacattctgctgtcggaaagcgacgtggtgaagatctgtgactttggccttgcccgggacatctacaaagaccccgactacgtccgcaagggcagtgcccggctgcccctgaagtggatggcccctgaaagcatcttcgacaaggtgtacaccacgcagagtgacgtgtggtcctttggggtgcttctctgggagatcttctctctgggggcctccccgtaccctggggtgcagatcaatgaggagttctgccagcggctgagagacggcacaaggatgagggccccggagctggccactcccgccatacgccgcatcatgctgaactgctggtccggagaccccaaggcgagacctgcattctcggagctggtggagatcctgggggacctgctccagggcaggggcctgcaagaggaagaggaggtctgcatggccccgcgcagctctcagagctcagaagagggcagcttctcgcaggtgtccaccatggccctacacatcgcccaggctgacgctgaggacagcccgccaagcctgcagcgccacagcctggccgccaggtattacaactgggtgtcctttcccgggtgcctggccagaggggctgagacccgtggttcctccaggatgaagacatttgaggaattccccatgaccccaacgacctacaaaggctctgtggacaaccagacagacagtgggatggtgctggcctcggaggagtttgagcagatagagagcaggcatagacaagaaagcggcttcagaggaaccaggaggacaagaggagcatgaaagtggacaaggagtgtgaccactgaagcaccacagggaggggttaggcctccggatgactgcgggcaggcctggataatatccagcctcccacaagaagctggtggagcagagtgttccctgactcctccaaggaaagggagacgccctttcatggtctgctg

SEQ ID NO: 134884 - DNA, 3806 bp, Homo sapiens
  Payload ID: 6339
  Gene Symbol: FLT4
  Gene Name: fms-related tyrosine kinase 4
  ENST ID: ENST00000619105
  CDS Start-End: 80-967
aggccagccggcgcccgcgcggacactttcagccccgagccgcggccgctcgggtcggacccacgcgcagcggccggagatgcagcggggcgccgcgctgtgcctgcgactgtggctctgcctgggactcctggacggcctggtgagtggctactccatgacccccccgaccttgaacatcacggaggagtcacacgtcatcgacaccggtgacagcctgtccatctcctgcaggggacagcaccccctcgagtgggcttggccaggagctcaggaggcgccagccaccggagacaaggacagcgaggacacgggggtggtgcgagactgcgagggcacagacgccaggccctactgcaaggtgttgctgctgcacgaggtacatgccaacgacacaggcagctacgtctgctactacaagtacatcaaggcacgcatcgagggcaccacggccgccagctcctacgtgttcgtgagagactttgagcagccattcatcaacaagcctgacacgctcttggtcaacaggaaggacgccatgtgggtgccctgtctggtgtccatccccggcctcaatgtcacgctgcgctcgcaaagctcggtgctgtggccagacgggcaggaggtggtgtgggatgaccggcggggcatgctcgtgtccacgccactgctgcacgatgccctgtacctgcagtgcgagaccacctggggagaccaggacttcctttccaaccccttcctggtgcacatcacaggcaacgagctctatgacatccagctgttgcccaggaagtcgctggagctgctggtaggggagaagctggtcctgaactgcaccgtgtgggctgagtttaactcaggtgtcacctttgactgggactacccagggaagcagaaaatcccttcatcagcgtcgagtggctcaaaggacccatcctggaggccacggcaggagacgagctggtgaagctgcccgtgaagctggcagcgtaccccccgcccgagttccagtggtacaaggatggaaaggcactgtccgggcgccacagtccacatgccctggtgctcaaggaggtgacagaggccagcacaggcacctacaccctcgccctgtggaactccgctgctggcctgaggcgcaacatcagcctggagctggtggtgaatgtgcccccccagatacatgagaaggaggcctcctcccccagcatctactcgcgtcacagccgccaggccctcacctgcacggcctacggggtgcccctgcctctcagcatccagtggcactggcggccctggacaccctgcaagatgtttgcccagcgtagtctccggcggcggcagcagcaagacctcatgccacagtgccgtgactggagggcggtgaccacgcaggatgccgtgaaccccatcgagagcctggacacctggaccgagtttgtggagggaaagaataagactgtgagcaagctggtgatccagaatgccaacgtgtctgccatgtacaagtgtgtggtctccaacaaggtgggccaggatgagcggctcatctacttctatgtgaccaccatccccgacggcttcaccatcgaatccaagccatccgaggagctactagagggccagccggtgctcctgagctgccaagccgacagctacaagtacgagcatctgcgctggtaccgcctcaacctgtccacgctgcacgatgcgcacgggaacccgcttctgctcgactgcaagaacgtgcatctgttcgccacccctctggccgccagcctggaggaggtggcacctggggcgcgccacgccacgctcagcctgagtatcccccgcgtcgcgcccgagcacgagggccactatgtgtgcgaagtgcaagaccggcgcagccatgacaagcactgccacaagaagtacctgtcggtgcaggccctggaagcccctcggctcacgcagaacttgaccgacctcctggtgaacgtgagcgactcgctggagatgcagtgcttggtggccggagcgcacgcgcccagcatcgtgtggtacaaagacgagaggctgctggaggaaaagtctggagtcgacttggcggactccaaccagaagctgagcatccagcgcgtgcgcgaggaggatgcgggacgctatctgtgcagcgtgtgcaacgccaagggctgcgtcaactcctccgccagcgtggccgtggaaggctccgaggataagggcagcatggagatcgtgatccttgtcggtaccggcgtcatcgctgtcttcttctgggtcctcctcctcctcatcttctgtaacatgaggaggccggcccacgcagacatcaagacgggctacctgtccatcatcatggaccccggggaggtgcctctggaggagcaatgcgaatacctgtcctacgatgccagccagtgggaattcccccgagagcggctgcacctggggagagtgctcggctacggcgccttcgggaaggtggtggaagcctccgctttcggcatccacaagggcagcagctgtgacaccgtggccgtgaaaatgctgaaagagggcgccacggccagcgagcaccgcgcgctgatgtcggagctcaagatcctcattcacatcggcaaccacctcaacgtggtcaacctcctcggggcgtgcaccaagccgcagggccccctcatggtgatcgtggagttctgcaagtacggcaacctctccaacttcctgcgcgccaagcgggacgccttcagcccctgcgcggagaagtctcccgagcagcgcggacgcttccgcgccatggtggagctcgccaggctggatcggaggcggccggggagcagcgacagggtcctcttcgcgcggttctcgaagaccgagggcggagcgaggcgggcttctccagaccaagaagctgaggacctgtggctgagcccgctgaccatggaagatcttgtctgctacagcttccaggtggccagagggatggagttcctggcttcccgaaagtgcatccacagagacctggctgctcggaacattctgctgtcggaaagcgacgtggtgaagatctgtgactttggccttgcccgggacatctacaaagaccccgactacgtccgcaagggcagtgcccggctgcccctgaagtggatggcccctgaaagcatcttcgacaaggtgtacaccacgcagagtgacgtgtggtcctttggggtgcttctctgggagatcttctctctgggggcctccccgtaccctggggtgcagatcaatgaggagttctgccagcggctgagagacggcacaaggatgagggccccggagctggccactcccgccatacgccgcatcatgctgaactgctggtccggagaccccaaggcgagacctgcattctcggagctggtggagatcctgggggacctgctccagggcaggggcctgcaagaggaagaggaggtctgcatggccccgcgcagctctcagagctcagaagagggcagcttctcgcaggtgtccaccatggccctacacatcgcccaggctgacgctgaggacagcccgccaagcctgcagcgccacagcctggccgccaggtattacaactgggtgtcctttcccgggtgcctggccagaggggctgagacccgtggttcctccaggatgaagacatttgaggaattccccatgaccccaacgacctacaaaggctctgtggacaaccagacagacagtgggatggtgctggcctcggaggagtttgagcagatagagagcaggcatagacaagaaagcggcttcaggta

SEQ ID NO: 134885 - DNA, 1374 bp, Homo sapiens
  Payload ID: 6340
  Gene Symbol:
  Gene Name: FO538757.2
  ENST ID: ENST00000623834
  CDS Start-End: 1-1080
atgactcctgtgaggatgcagcactccctggcaggtcagacctatgccgtgcccctcatccagccagacctgcggcgagaggaggccgtccagcagatggcggatgccctgcagtacctgcagaaggtctctggagacatcttcagcaggtggcaggtagagcagagccggagccaggtgcaggccattggagagaaggtctccttggcccaggccaagattgagaagatcaagggcagcaagaaggccatcaaggtgttctccagtgccaagtaccctgctccagggcgcctgcaggaatatggctccatcttcacgggcgcccaggaccctggcctgcagagacgcccccacaggatccagagcaagcaccgccccctggacgagcgggccctgcaggagaagctgaaggactttcctgtgtgcgtgagcaccaagccggagcccgaggacgatgcagaagagggacttgggggtcttcccagcaacatcagctctgtcagctccttgctgctcttcaacaccaccgagaacctccaggggaagaagtatgtcttcctggaccccctggctggtgctgtaacaaagacccatgtgatgctgggggcagagacagaggagaagctgtttgatgcccccttgtccatcagcaagagagagcagctggaacagcaggtcccagagaactacttctatgtgccagacctgggccaggtgcctgagattgatgttccatcctacctgcctgacctgtccggcattgccaacgacctcatgtacattgccgacctgggccccggcattgccccctctgcccctggcaccattccagaactgcccaccttccacactgaggtagccgagcctctcaaggtagtgagagccacgagccaaggtgggcacttgatgtcggatctcttcaacaagctggtcatgaggcgcaagggcatctctgggaaaggacctggggctggtgaggggcccggaggagcctttgcccgcgtgtcagactccatccctcctctgccgccaccgcagcagccacaggcagaggaggacgaggacgactgggaatcctagggggctccatgacaccttcccccccagacccagacttgggccgttgctctgacatggacacagccaggacaagctgctcagacctacttccttgggagggggtgacggaaccagcactgtgtggagaccagcttcaaggagcggaaggctggcttgaggccacacagctggggcggggacttttgtctgcctgtgctccatggggggacggctccacccagcctgcgccactgtgttcttctcttaagaggcttccagagaaaacggcacaccaatcaataaagaactgagcag

SEQ ID NO: 134886 - DNA, 1604 bp, Homo sapiens
  Payload ID: 6340
  Gene Symbol:
  Gene Name: FO538757.2
  ENST ID: ENST00000624735
  CDS Start-End: 237-1604
ggaaagcgggtcaaggcgtagggctggagggcaggggcgggccctgggcctgggctgggggtcctgccccggggcgcaccccgggcaagggctgcccggaggagccgaggctggcggacagcttggccctgagcttgaggggaaggcagcgatgggacaaaggacggaggtctgggaagagggtctgcagagcagaaagcacgggtaggggcggcctgacgctcggaagacaacgcatgggagccgtgtgcacgtcgggagctcggagtgagcgcaccatgactcctgtgaggatgcagcactccctggcaggtcagacctatgccgtgcccctcatccagccagacctgcggcgagaggaggccgtccagcagatggcggatgccctgcagtacctgcagaaggtctctggagacatcttcagcaggtgggtagagcagagccggagccaggtgcaggccattggagagaaggtctccttggcccaggccaagattgagaagatcaagggcagcaagaaggccatcaaggtgttctccagtgccaagtaccctgctccagggcgcctgcaggaatatggctccatcttcacgggcgcccaggaccctggcctgcagagacgcccccacaggatccagagcaagcaccgccccctggacgagcgggccctgcaggagaagctgaaggactttcctgtgtgcgtgagcaccaagccggagcccgaggacgatgcagaagagggacttgggggtcttcccagcaacatcagctctgtcagctccttgctgctcttcaacaccaccgagaacctgggtaagaagtatgtcttcctggaccccctggctggtgctgtaacaaagacccatgtgatgctgggggcagagacagaggagaagctgtttgatgcccccttgtccatcagcaagagagagcagctggaacagcaggtcccagagaactacttctatgtgccagacctgggccaggtgcctgagattgatgttccatcctacctgcctgacctgtccggcattgccaacgacctcatgtacattgccgacctgggccccggcattgccccctctgcccctggcaccattccagaactgcccaccttccacactgaggtagccgagcctctcaagacctacaagatggggtacacaccacccccaccgcccccaccaccacccccagctcctgaggtgctggccagtgcacccccactcccaccctcaaccgcggcccctgtaggccaaggcgccaggcaggacgacagcagcagcagcgcgtctccttcagtccagggagctcccagggaagtggtcgacccctccggtggccgggccactctgctagagtccatccgccaagctgggggcatcggcaaggccaagctgcgcagcatgaaggagcgaaagctggagaagaagaagcagaaggagcaggagcaagtgagagccacgagccaaggtgggcacttgatctggggcggggacttttgtctgcctgtgctccatggggggacggctccacccagcctgcgccactgtgttcttaagaggcttccagagaaaacggcacaccaatcaataaagaactga

SEQ ID NO: 134887 - DNA, 1687 bp, Homo sapiens
  Payload ID: 6340
  Gene Symbol:
  Gene Name: FO538757.2
  ENST ID: ENST00000623083
  CDS Start-End: 1-1395
atgactcctgtgaggatgcagcactccctggcaggtcagacctatgccgtgcccctcatccagccagacctgcggcgagaggaggccgtccagcagatggcggatgccctgcagtacctgcagaaggtctctggagacatcttcagcaggatctcccagcaggtagagcagagccggagccaggtgcaggccattggagagaaggtctccttggcccaggccaagattgagaagatcaagggcagcaagaaggccatcaaggtgttctccagtgccaagtaccctgctccagggcgcctgcaggaatatggctccatcttcacgggcgcccaggaccctggcctgcagagacgcccccacaggatccagagcaagcaccgccccctggacgagcgggccctgcaggagaagctgaaggactttcctgtgtgcgtgagcaccaagccggagcccgaggacgatgcagaagagggacttgggggtcttcccagcaacatcagctctgtcagctccttgctgctcttcaacaccaccgagaacctgtataagaagtatgtcttcctggaccccctggctggtgctgtaacaaagacccatgtgatgctgggggcagagacagaggagaagctgtttgatgcccccttgtccatcagcaagagagagcagctggaacagcaggtcccagagaactacttctatgtgccagacctgggccaggtgcctgagattgatgttccatcctacctgcctgacctgtccggcattgccaacgacctcatgtacattgccgacctgggccccggcattgccccctctgcccctggcaccattccagaactgcccaccttccacactgaggtagccgagcctctcaaggtagacctacaagatggggtactaacaccacccccaccgcccccaccaccacccccagctcctgaggtgctggccagtgcacccccactcccaccctcaaccgcggcccctgtaggccaaggcgccaggcaggacgacagcagcagcagcgcgtctccttcagtccagggagctcccagggaagtggtcgacccctccggtggccgggccactctgctagagtccatccgccaagctgggggcatcggcaaggccaagctgcgcagcatgaaggagcgaaagctggagaagaagaagcagaaggagcaggagcaagtgagagccacgagccaaggtgggcacttgatgtcggatctcttcaacaagctggtcatgaggcgcaagggcatctctgggaaaggacctggggctggtgaggggcccggaggagcctttgcccgcgtgtcagactccatccctcctctgccgccaccgcagcagccacaggcagaggaggacgaggacgactgggaatcctagggggctccatgacaccttcccccccagacccagacttgggccgttgctctgacatggacacagccaggacaagctgctcagacctacttccttgggagggggtgacggaaccagcactgtgtggagaccagcttcaaggagcggaaggctggcttgaggccacacagctggggcggggacttttgtctgcctgtgctccatggggggacggctccacccagcctgcgccactgtgttcttctcttaagaggcttccagagaaaacggcacaccaatcaataaagaactgagc

SEQ ID NO: 134888 - DNA, 718 bp, Homo sapiens
  Payload ID: 6341
  Gene Symbol:
  Gene Name: FO538757.3
  ENST ID: ENST00000624431
  CDS Start-End: 317-718
cttgccgtcagccttttctttgacctcttctttctgttcatgtgtatttgctgtctcttagcccagacttcccgtgtcctttccaccgggcctttgagaggtcacagggtcttgatgctgtggtcttcatctgcaggtgtctgacttccagcaactgctggcctgtgccagggtgcaagctgagcactggagtggagttttcctgtggagaggagccatgcctagagtgggatgggccattgttcatcttctggcccctgttgtctgcatgtaacttaataccacaaccaggcataggggaaagattggaggaaagatgagtgacagcatcaacttctctcacaacctaggccagctcctgtctccccccaggtgtgtggtgatgccaggcatgcccttccccagcatcaggtctccagagctgcagaagacgacggccgacttggatcacactcttgtgagtgtccccagtgttgcagagagcctccaccaccccgagatcacatttctcactgccttttgtctgcccagtttcaccagaagtaggcctcttcctgacaggcagctgcaccactgcctggcgctgtgcccttcctttgctctgcccgctggagacggtgtttgtcatgggcctggtctgcagggatcctgctacaaaggtgaaacccaggagagtgtggagtccagagtgttgccaggacccaggcacaggcattag

SEQ ID NO: 134889 - DNA, 5765 bp, Homo sapiens
  Payload ID: 6342
  Gene Symbol: FOCAD
  Gene Name: focadhesin
  Uniprot ID: Q5VW36
  ENST ID: ENST00000338382
  CDS Start-End: 34-5439
gaagctgcacacatacatgtaagagaagcaaaaatgtcagatgatatcaggaaaaggtttgaatttccaaattctcttatccaatcacaggctgtgggtcatcttattgctgcagtcctaaaggaaaatggtttttcagaaaagattcaccaatctacaaatcagactcctgctttgaacttgctgtgggagaagtgttgcagtgacaatgtagtggttcgaacagcctgctgtgaaggtctggtggcactcgttgctcaggatcatgcagagttcagctatgttctcaatgggatactcaacttgattccatcaaccagaaatacacatggcttgataaaagccattatgcacttactacaaatgcaagctcttaaggaaggacaaggtggggaaaagaatattcagagtatatataccattagaaatcatcctcatcctttgataactgtgcttgaacacagacctgattgctggccagtgtttttgcagcagctgacagcgtttttccagcagtgccctgaaaggttagaagtttcatgcattcaaataatggcaccatttctgtggtatctgtattgtgaaccatctcagttacaagaatatgctaaactccgactagccctgctgaaagtcttacttcaaccccaggttctttgtgacaaagatcaaccatcaatactggaacagcagatacttcaactgtgttgtgacatagttccatgtttgcaggtaaaagatttgatacagacaacagaggcgatgatgtttattgaggaagtatgtttaagccttttgcgtcatcctgttttctggaaaattcagcttacccagatgagtcttcagctgctgtgtgtcagtgaagtcagcttaaagataactggtgaatgttcatcttcaattcaccttttagagcacagtgttgaacttctgaaggaggattttcctgttgaactggtcataattggaatagctttactacttctacagactccagcaagtcagcagaagccaatcttaaatctagctttgaagctcctctctgttactgaggatcagaaaatcccaaagtcctctctgctgctagtgatgccaattctgcagatactatcttctactgccttggaagactgtatatctgtggatgaagaaggtccctctaggcagcagttggctctaaaccttttggaaatgatacagcaggaatgttacagagatgaccaccaaaagctctcctacaagcttgtgtgccctgtaaccagtatgtatggtacaatatttacagcctggaggattcttgaagtaatgacagactcgtctgctgcaagtgactggttggcttcagtagagtcattgcttcctattactgctgtgatccctgcgcctgcctttcttctgctggctcacctccttgttgaagacaaaggacaaaatcttcaccaaatactcaaggtcactacagaattagcccaagcagattcctcccaggtgccaaatctgattccagttttgatgttcaaattgggaagaccactggaacctatattatataatgatatattgtatactttacctaagcttggtgttcacaaggtgtgtataggacaaattctacgaataatacaactacttggaaccacaccacgactaagagctgtcactttgcgcttgctgacatctttgtgggaaaagcaggaccgagtctatcctgaactgcagcgtttcatggctgtgtctgatgtaccttctctttcggtgggcaaggaagtccaatgggagaaactgattgcaaaagcagcatcaatcagagatatatgtaagcagaggccatatcaacatggtgcagatatgttggcagctatttctcaagtgttgaatgaatgcaccaagcctgatcaagctactccagcagccttggtattacagggtcttcatgcactctgtcaagctgaggttgtttgcattcgctccacttggaatgctctctctccaaagctgagttgtgacacaagacctctcattctgaagacactgagtgaactattttctctagttccttccttaacggtcaatacaactgaatatgagaattttaaagttcaagtcctcagcttcctctggactcatactcaaaacaaggacccaattgtagcaaatgctgcatatagatccctggccaactttagtgcaggagaacacaccattcttcatctgcctgaaaagataagaccagaaattcccattcctgaagagttagatgacgatgaagatgttgaggatgtggatctttcagttcctggctcttgctatctcaaactgttgtcactcactccccctttggttttaccagctttggaggaattttttacatcacttgtgaagcaagaaatggtgaatatgcctcgtgggatatatcactctgcattaaaaggaggtgcccgctcagaccaaggaaagactgtagcaggaatccccaattttatattgaaaatgtatgaaacaaacaagcaaccaggactgaaacctggccttgcaggtggtatgttattttgctatgatgtttccatgtatcagagtaaagatggaaaaccattgaacagactgatggccagcagagggcgaagtttcaagcagacttcacttgctcttgtacatgaggttcatatccagctttcagagtggcaccgtgcaatttttcttccacaggcctggcttgcatacatgaatcgagcttatcatgccattttacagggaagactaggagagctggagttgcagttaaaacatggaaaagaagaacctgaggaggtgcagtacaaaaaaagcacagcctggctctgggttagagacatgctgactgatgagatcaccaaggcagctgcaaaggagagtccggtagtgaaaggcaatgcgctgttagctctaagcagccttgctgtcgtcgtatctagacatgaagccagcctctcctcagactctgacgggctcctggaggttcaacctaatttcctttcaatgaaagagtgggtttccatggtacttgatacactcttggtcattgtggatagccattaccaacccagagggcaacttctctcctggttttattataagtcctattctggtgaaaacacagctagtgccattgcccgttctgctgccgccacggctttgtctctccttgtgccagttttcattatctcttgcaaagagaaggttgaggaaatcctgaacatgctgactgccaggttacctgggaaaccaagtgctgatgagtctcaagccgtgcaaatccacatgggccttgctttagggatgtttctctctcgcttgtgtgaagagaaactcagtgatatatctggccaagagatgaaccttcttctgatgaagtcgttggatgccctggaaaattgctgctttgacactagtcttgaatacaacacgggctgtatattgggagttggacttgttctgtccctcatgagccacagcagccaaatgcagtcccgcgttcacgtagcagcattgctccggaagctgtctgcgcacgtagatgacagcgggagccagagcagaacgtttcaggaggtccttgcctacacacttagctgtgtatgtacatcagcgttcagtgctggaattattgaggctacagaggctgaggatgttatgaacaagcttcgactgttagtggagaatagccagcagacttcaggttttgccctggctttaggaaacatagttcatggattgtctgtgtgtggacatggaaaagctgaagacttgggcagcaaactactccctgcctggatcagaattgttctaacagagggcactcccacaatgctttgtctggcagctcttcatggcatggtggccttggtaggctctgaaggggatgtaatgcagctgaaatcagaagccatccagacctctcattttcaaggcagacttaatgaagtcattagaaccttaactcaggtcattagtgtctctggggtgattggtctccagtcaaatgcagtctggcttcttggacatcttcatctatctactctatcctcaagtcaaagtagagcctctgttcctactgactatagctacttgcctgaaagcagttttattggagcagctattggcttcttcattacaggaggaaaaaaaggtcctgaatctgtgcctccttcccttcttaaagtagtgatgaaacccatagcaactgttggagaaagctaccaatatcctcctgtgaactgggctgcacttctctctccacttatgaggctaaattttggtgaagagatccagcaactgtgccttgaaattatggtgacccaggcacagtcatcccagaatgcagctgcactattgggcttgtgggtgacaccaccactgatccacagtctgagtctgaataccaagagatatctcctgatatctgcacctctgtggataaaacacatctctgatgaacagatcctgggttttgttgaaaatttaatggtggcagtttttaaagcagcttccccacttggaagtcctgagctatgcccaagtgctttacacggtctgagccaggccatgaaactgcccagccctgcccaccacctctggagtctgctctctgaagctactgggaaaatttttgacctcctgccaaataagattcggagaaaggatctagagctgtatatcagcatagcaaaatgcctcttagaaatgacagatgatgatgccaatcggatcgcccaggttactaagagcaacatagaaaaagctgcctttgtcaaactgtacttagtctctcaaggacgattccccttggtgaacctgaccgatatgctgagcgttgctgtgcagcaccgtgagaaagaggtgttggcctggatgattctgcacagcttataccaggcacggattgtgagccatgccaatacgggcgttttgaagagaatggagtggctcttggaactgatgggttatattagaaatgttgcttaccagtcaacatcctttcacaatacggctcttgacaaggctttggacttcttcttgctgatatttgcaaccgcagtggttgcatgggctgaccacactgcccctctcctcctcggcctcagtgccagttggttgccatggcatcaggagaatggcccggctgggccagtaccaagcttccttggcaggagtccaatgcacagggtcactctgcaggaggttctcactctccttcccaatagcatggctctgctgctgcagaaagagccatggaaggaacagacccagaagttcattgactggctattcagcatcatggaaagccctaaagaagccctctcagcacagtccagggatcttttgaaagccaccctgctgtccttgagagttctcccagagtttaagaagaaagctgtatggaccagagcatatggttggtgaacagttttgcagtaaccagcagcattctcagctggatgaggaaaaccatataagtggaagaagtttttcagaattcatgcctggtattgctgagacatgatgcagagagttaagggtcatgaaaagatggccacatcactgacagcttgacacatgcctcctaagagaggagtgcattgctttagtacccgggccagttgagactgaaacaggaacttggattttctttatttggcttgagttcaatgtggagattttctttgtgaaagcttgaagatattatcttctccctgctaaattccagtaaaataatgttgtcaattttg

SEQ ID NO: 134890 - DNA, 6096 bp, Homo sapiens
  Payload ID: 6342
  Gene Symbol: FOCAD
  Gene Name: focadhesin
  Uniprot ID: Q5VW36
  ENST ID: ENST00000380249
  CDS Start-End: 365-5770
gttcgagcttcccggctgctttgtttacctaatcaagcctgggcaatggcgggcgcccctcccgcagcctcgctgccgccttgcaggttgatctcagactgctgtgctagcaatcagtgagactccgtgggcgtaggactctccaagccagtgagatgaactcggtatctcagatggaaatgcagaaatcaccgtcttctccatcgctcacgctgggagctgtagaccggagctgttcctattcggccatctttgctcctccctgcaactaactccattcttaattgaccatcaaggaaatttccatccacacagattagcagttgaaaatgaagctgcacacatacatgtaagagaagcaaaaatgtcagatgatatcaggaaaaggtttgaatttccaaattctcttatccaatcacaggctgtgggtcatcttattgctgcagtcctaaaggaaaatggtttttcagaaaagattcaccaatctacaaatcagactcctgctttgaacttgctgtgggagaagtgttgcagtgacaatgtagtggttcgaacagcctgctgtgaaggtctggtggcactcgttgctcaggatcatgcagagttcagctatgttctcaatgggatactcaacttgattccatcaaccagaaatacacatggcttgataaaagccattatgcacttactacaaatgcaagctcttaaggaaggacaaggtggggaaaagaatattcagagtatatataccattagaaatcatcctcatcctttgataactgtgcttgaacacagacctgattgctggccagtgtttttgcagcagctgacagcgtttttccagcagtgccctgaaaggttagaagtttcatgcattcaaataatggcaccatttctgtggtatctgtattgtgaaccatctcagttacaagaatatgctaaactccgactagccctgctgaaagtcttacttcaaccccaggttctttgtgacaaagatcaaccatcaatactggaacagcagatacttcaactgtgttgtgacatagttccatgtttgcaggtaaaagatttgatacagacaacagaggcgatgatgtttattgaggaagtatgtttaagccttttgcgtcatcctgttttctggaaaattcagcttacccagatgagtcttcagctgctgtgtgtcagtgaagtcagcttaaagataactggtgaatgttcatcttcaattcaccttttagagcacagtgttgaacttctgaaggaggattttcctgttgaactggtcataattggaatagctttactacttctacagactccagcaagtcagcagaagccaatcttaaatctagctttgaagctcctctctgttactgaggatcagaaaatcccaaagtcctctctgctgctagtgatgccaattctgcagatactatcttctactgccttggaagactgtatatctgtggatgaagaaggtccctctaggcagcagttggctctaaaccttttggaaatgatacagcaggaatgttacagagatgaccaccaaaagctctcctacaagcttgtgtgccctgtaaccagtatgtatggtacaatatttacagcctggaggattcttgaagtaatgacagactcgtctgctgcaagtgactggttggcttcagtagagtcattgcttcctattactgctgtgatccctgcgcctgcctttcttctgctggctcacctccttgttgaagacaaaggacaaaatcttcaccaaatactcaaggtcactacagaattagcccaagcagattcctcccaggtgccaaatctgattccagttttgatgttcaaattgggaagaccactggaacctatattatataatgatatattgtatactttacctaagcttggtgttcacaaggtgtgtataggacaaattctacgaataatacaactacttggaaccacaccacgactaagagctgtcactttgcgcttgctgacatctttgtgggaaaagcaggaccgagtctatcctgaactgcagcgtttcatggctgtgtctgatgtaccttctctttcggtgggcaaggaagtccaatgggagaaactgattgcaaaagcagcatcaatcagagatatatgtaagcagaggccatatcaacatggtgcagatatgttggcagctatttctcaagtgttgaatgaatgcaccaagcctgatcaagctactccagcagccttggtattacagggtcttcatgcactctgtcaagctgaggttgtttgcattcgctccacttggaatgctctctctccaaagctgagttgtgacacaagacctctcattctgaagacactgagtgaactattttctctagttccttccttaacggtcaatacaactgaatatgagaattttaaagttcaagtcctcagcttcctctggactcatactcaaaacaaggacccaattgtagcaaatgctgcatatagatccctggccaactttagtgcaggagaacacaccattcttcatctgcctgaaaagataagaccagaaattcccattcctgaagagttagatgacgatgaagatgttgaggatgtggatctttcagttcctggctcttgctatctcaaactgttgtcactcactccccctttggttttaccagctttggaggaattttttacatcacttgtgaagcaagaaatggtgaatatgcctcgtgggatatatcactctgcattaaaaggaggtgcccgctcagaccaaggaaagactgtagcaggaatccccaattttatattgaaaatgtatgaaacaaacaagcaaccaggactgaaacctggccttgcaggtggtatgttattttgctatgatgtttccatgtatcagagtaaagatggaaaaccattgaacagactgatggccagcagagggcgaagtttcaagcagacttcacttgctcttgtacatgaggttcatatccagctttcagagtggcaccgtgcaatttttcttccacaggcctggcttgcatacatgaatcgagcttatcatgccattttacagggaagactaggagagctggagttgcagttaaaacatggaaaagaagaacctgaggaggtgcagtacaaaaaaagcacagcctggctctgggttagagacatgctgactgatgagatcaccaaggcagctgcaaaggagagtccggtagtgaaaggcaatgcgctgttagctctaagcagccttgctgtcgtcgtatctagacatgaagccagcctctcctcagactctgacgggctcctggaggttcaacctaatttcctttcaatgaaagagtgggtttccatggtacttgatacactcttggtcattgtggatagccattaccaacccagagggcaacttctctcctggttttattataagtcctattctggtgaaaacacagctagtgccattgcccgttctgctgccgccacggctttgtctctccttgtgccagttttcattatctcttgcaaagagaaggttgaggaaatcctgaacatgctgactgccaggttacctgggaaaccaagtgctgatgagtctcaagccgtgcaaatccacatgggccttgctttagggatgtttctctctcgcttgtgtgaagagaaactcagtgatatatctggccaagagatgaaccttcttctgatgaagtcgttggatgccctggaaaattgctgctttgacactagtcttgaatacaacacgggctgtatattgggagttggacttgttctgtccctcatgagccacagcagccaaatgcagtcccgcgttcacgtagcagcattgctccggaagctgtctgcgcacgtagatgacagcgggagccagagcagaacgtttcaggaggtccttgcctacacacttagctgtgtatgtacatcagcgttcagtgctggaattattgaggctacagaggctgaggatgttatgaacaagcttcgactgttagtggagaatagccagcagacttcaggttttgccctggctttaggaaacatagttcatggattgtctgtgtgtggacatggaaaagctgaagacttgggcagcaaactactccctgcctggatcagaattgttctaacagagggcactcccacaatgctttgtctggcagctcttcatggcatggtggccttggtaggctctgaaggggatgtaatgcagctgaaatcagaagccatccagacctctcattttcaaggcagacttaatgaagtcattagaaccttaactcaggtcattagtgtctctggggtgattggtctccagtcaaatgcagtctggcttcttggacatcttcatctatctactctatcctcaagtcaaagtagagcctctgttcctactgactatagctacttgcctgaaagcagttttattggagcagctattggcttcttcattacaggaggaaaaaaaggtcctgaatctgtgcctccttcccttcttaaagtagtgatgaaacccatagcaactgttggagaaagctaccaatatcctcctgtgaactgggctgcacttctctctccacttatgaggctaaattttggtgaagagatccagcaactgtgccttgaaattatggtgacccaggcacagtcatcccagaatgcagctgcactattgggcttgtgggtgacaccaccactgatccacagtctgagtctgaataccaagagatatctcctgatatctgcacctctgtggataaaacacatctctgatgaacagatcctgggttttgttgaaaatttaatggtggcagtttttaaagcagcttccccacttggaagtcctgagctatgcccaagtgctttacacggtctgagccaggccatgaaactgcccagccctgcccaccacctctggagtctgctctctgaagctactgggaaaatttttgacctcctgccaaataagattcggagaaaggatctagagctgtatatcagcatagcaaaatgcctcttagaaatgacagatgatgatgccaatcggatcgcccaggttactaagagcaacatagaaaaagctgcctttgtcaaactgtacttagtctctcaaggacgattccccttggtgaacctgaccgatatgctgagcgttgctgtgcagcaccgtgagaaagaggtgttggcctggatgattctgcacagcttataccaggcacggattgtgagccatgccaatacgggcgttttgaagagaatggagtggctcttggaactgatgggttatattagaaatgttgcttaccagtcaacatcctttcacaatacggctcttgacaaggctttggacttcttcttgctgatatttgcaaccgcagtggttgcatgggctgaccacactgcccctctcctcctcggcctcagtgccagttggttgccatggcatcaggagaatggcccggctgggccagtaccaagcttccttggcaggagtccaatgcacagggtcactctgcaggaggttctcactctccttcccaatagcatggctctgctgctgcagaaagagccatggaaggaacagacccagaagttcattgactggctattcagcatcatggaaagccctaaagaagccctctcagcacagtccagggatcttttgaaagccaccctgctgtccttgagagttctcccagagtttaagaagaaagctgtatggaccagagcatatggttggtgaacagttttgcagtaaccagcagcattctcagctggatgaggaaaaccatataagtggaagaagtttttcagaattcatgcctggtattgctgagacatgatgcagagagttaagggtcatgaaaagatggccacatcactgacagcttgacacatgcctcctaagagaggagtgcattgctttagtacccgggccagttgagactgaaacaggaacttggattttctttatttggcttgagttcaatgtggagattttctttgtgaaagcttgaagatattatcttctccctgctaaattccagtaaaataatgttgtcaattttg

SEQ ID NO: 134891 - DNA, 572 bp, Homo sapiens
  Payload ID: 6342
  Gene Symbol: FOCAD
  Gene Name: focadhesin
  ENST ID: ENST00000604254
  CDS Start-End: 32-572
gctaagatcatgaatttagcttaaaaccttaatgccgaaggtcttctctgtgtattttgtgtgcctctgtcctgcccttgggaagatctgtgatatatctggccaagagatgaaccttcttctgatgaagtcgttggatgccctggaaaattgctgctttgacactagtcttgaatacaacacgggctgtatattgggagttggacttgttctgtccctcatgagccacagcagccaaatgcagtcccgcgttcacgtagcagcattgctccggaagctgtctgcgcacgtagatgacagcgggagccagagcagaacgtttcaggaggtccttgcctacacacttagctgtgtatgtacatcagcgttcagtgctggaattattgaggctacagaggctgaggatgttatgaacaagcttcgactgttagtggagaatagccagcagacttcaggttttgccctggctttaggaaacatagttcatggattgtctgtgtgtggacatggaaaagctgaagacttgggcagcaaactactccctgcctggatcagaattgttctaacagagg

SEQ ID NO: 134892 - DNA, 559 bp, Homo sapiens
  Payload ID: 6342
  Gene Symbol: FOCAD
  Gene Name: focadhesin
  ENST ID: ENST00000603695
  CDS Start-End: 263-559
acatttataatgtggcttgctggtttgtccaagctcagatagcttcagttttttttttgtttgtttttctgtttttttgtttttttaatatatatacatgtgggcttttaggaacactgaaattgtttcaagccttataaagtcctattctggtgaaaacacagctagtgccattgcccgttctgctgccgccacggctttgtctctccttgtgccagttttcattatctcttgcaaagagaaggttgaggaaatcctgaacatgctgactgccaggttacctgggaaaccaagtgctgatgagtctcaagccgtgcaaatccacatgggccttgctttagggatgtttctctctcgcttgtgtgaagagaaactcagtgatatatctggccaagagatgaaccttcttctgatgaagtcgttggatgccctggaaaattgctgctttgacactagtcttgaatacaacacgggctgtatattgggagttggacttgttctgtccctcatgagccacagcagccaaatgcagtcccgcgttcacgtagcagcattgctc

SEQ ID NO: 134893 - DNA, 4195 bp, Homo sapiens
  Payload ID: 6342
  Gene Symbol: FOCAD
  Gene Name: focadhesin
  ENST ID: ENST00000605086
  CDS Start-End: 163-3876
tgcaactagagtttcttcaatattttctaggtgtgtataggacaaattctacgaataatacaactacttggaaccacaccacgactaagagctgtcactttgcgcttgctgacatctttgtgggaaaagcaggaccgagtctatcctgaactgcagcgtttcatggctgtgtctgatgtaccttctctttcggtgggcaaggaagtccaatgggagaaactgattgcaaaagcagcatcaatcagagatatatgtaagcagaggccatatcaacatggtgcagatatgttggcagctatttctcaagtgttgaatgaatgcaccaagcctgatcaagctactccagcagccttggtattacagggtcttcatgcactctgtcaagctgaggttgtttgcattcgctccacttggaatgctctctctccaaagctgagttgtgacacaagacctctcattctgaagacactgagtgaactattttctctagttccttccttaacggtcaatacaactgaatatgagaattttaaagttcaagtcctcagcttcctctggactcatactcaaaacaaggacccaattgtagcaaatgctgcatatagatccctggccaactttagtgcaggagaacacaccattcttcatctgcctgaaaagataagaccagaaattcccattcctgaagagttagatgacgatgaagatgttgaggatgtggatctttcagttcctggctcttgctatctcaaactgttgtcactcactccccctttggttttaccagctttggaggaattttttacatcacttgtgaagcaagaaatggtgaatatgcctcgtgggatatatcactctgcattaaaaggaggtgcccgctcagaccaaggaaagactgtagcaggaatccccaattttatattgaaaatgtatgaaacaaacaagcaaccaggactgaaacctggccttgcaggtggtatgttattttgctatgatgtttccatgtatcagagtaaagatggaaaaccattgaacagactgatggccagcagagggcgaagtttcaagcagacttcacttgctcttgtacatgaggttcatatccagctttcagagtggcaccgtgcaatttttcttccacaggcctggcttgcatacatgaatcgagcttatcatgccattttacagggaagactaggagagctggagttgcagttaaaacatggaaaagaagaacctgaggaggtgcagtacaaaaaaagcacagcctggctctgggttagagacatgctgactgatgagatcaccaaggcagctgcaaaggagagtccggtagtgaaaggcaatgcgctgttagctctaagcagccttgctgtcgtcgtatctagacatgaagccagcctctcctcagactctgacgggctcctggaggttcaacctaatttcctttcaatgaaagagtgggtttccatggtacttgatacactcttggtcattgtggatagccattaccaacccagagggcaacttctctcctggttttattataagtcctattctggtgaaaacacagctagtgccattgcccgttctgctgccgccacggctttgtctctccttgtgccagttttcattatctcttgcaaagagaaggttgaggaaatcctgaacatgctgactgccaggttacctgggaaaccaagtgctgatgagtctcaagccgtgcaaatccacatgggccttgctttagggatgtttctctctcgcttgtgtgaagagaaactcagtgatatatctggccaagagatgaaccttcttctgatgaagtcgttggatgccctggaaaattgctgctttgacactagtcttgaatacaacacgggctgtatattgggagttggacttgttctgtccctcatgagccacagcagccaaatgcagtcccgcgttcacgtagcagcattgctccggaagctgtctgcgcacgtagatgacagcgggagccagagcagaacgtttcaggaggtccttgcctacacacttagctgtgtatgtacatcagcgttcagtgctggaattattgaggctacagaggctgaggatgttatgaacaagcttcgactgttagtggagaatagccagcagacttcaggttttgccctggctttaggaaacatagttcatggattgtctgtgtgtggacatggaaaagctgaagacttgggcagcaaactactccctgcctggatcagaattgttctaacagagggcactcccacaatgctttgtctggcagctcttcatggcatggtggccttggtaggctctgaaggggatgtaatgcagctgaaatcagaagccatccagacctctcattttcaaggcagacttaatgaagtcattagaaccttaactcaggtcattagtgtctctggggtgattggtctccagtcaaatgcagtctggcttcttggacatcttcatctatctactctatcctcaagtcaaagtagagcctctgttcctactgactatagctacttgcctgaaagcagttttattggagcagctattggcttcttcattacaggaggaaaaaaaggtcctgaatctgtgcctccttcccttcttaaagtagtgatgaaacccatagcaactgttggagaaagctaccaatatcctcctgtgaactgggctgcacttctctctccacttatgaggctaaattttggtgaagagatccagcaactgtgccttgaaattatggtgacccaggcacagtcatcccagaatgcagctgcactattgggcttgtgggtgacaccaccactgatccacagtctgagtctgaataccaagagatatctcctgatatctgcacctctgtggataaaacacatctctgatgaacagatcctgggttttgttgaaaatttaatggtggcagtttttaaagcagcttccccacttggaagtcctgagctatgcccaagtgctttacacggtctgagccaggccatgaaactgcccagccctgcccaccacctctggagtctgctctctgaagctactgggaaaatttttgacctcctgccaaataagattcggagaaaggatctagagctgtatatcagcatagcaaaatgcctcttagaaatgacagatgatgatgccaatcggatcgcccaggttactaagagcaacatagaaaaagctgcctttgtcaaactgtacttagtctctcaaggacgattccccttggtgaacctgaccgatatgctgagcgttgctgtgcagcaccgtgagaaagaggtgttggcctggatgattctgcacagcttataccaggcacggattgtgagccatgccaatacgggcgttttgaagagaatggagtggctcttggaactgatgggttatattagaaatgttgcttaccagtcaacatcctttcacaatacggctcttgacaaggctttggacttcttcttgctgatatttgcaaccgcagtggttgcatgggctgaccacactgcccctctcctcctcggcctcagtgccagttggttgccatggcatcaggagaatggcccggctgggccagtaccaagcttccttggcaggagtccaatgcacagggtcactctgcaggaggttctcactctccttcccaatagcatggctctgctgctgcagaaagagccatggaaggaacagacccagaagttcattgactggctattcagcatcatggaaagccctaaagaagccctctcagcacagtccagggatcttttgaaagccaccctgctgtccttgagagttctcccagagtttaagaagaaagctgtatggaccagagcatatggttggtgaacagttttgcagtaaccagcagcattctcagctggatgaggaaaaccatataagtggaagaagtttttcagaattcatgcctggtattgctgagacatgatgcagagagttaagggtcatgaaaagatggccacatcactgacagcttgacacatgcctcctaagagaggagtgcattgctttagtacccgggccagttgagactgaaacaggaacttggattttctttatttggcttgagttcaatgtggagattttctttgtgaaagcttgaagatattatcttctccctgctaaattccagtaaaataatgttgtc

SEQ ID NO: 134894 - DNA, 592 bp, Homo sapiens
  Payload ID: 6342
  Gene Symbol: FOCAD
  Gene Name: focadhesin
  ENST ID: ENST00000603648
  CDS Start-End: 68-208
cactttgcgcttgctgacatctttgtgggaaaagcaggaccgagtctatcctgaactgcagcgtttcatggctgtgtctgatgtaccttctctttcggtgggcaaggaagtccaatgggagaaactgattgcaaaagcagcatcaatcagagatatatgccatatcaacatggtgcagatatgttggcagctatttctcaagtgttgaatgaatgcaccaagcctgatcaagctactccagcagccttggtattacagggtcttcatgcactctgtcaagctgaggttgtttgcattcgctccacttggaatgctctctctccaaagctgagttgtgacacaagacctctcattctgaagacactgagtgaactattttctctagttccttccttaacggtcaatacaactgaatatgagatcatctgactgagacaggcttagaagatacttcaactcattctaaatgctgcacaatgaataaaatcaaatttatccttactgggctatacaatacctatcacagtacctggtgcataatctatatgtaaattttaaagttcaagtcctcagcttcctctggactcatact

SEQ ID NO: 134895 - DNA, 635 bp, Homo sapiens
  Payload ID: 6342
  Gene Symbol: FOCAD
  Gene Name: focadhesin
  ENST ID: ENST00000603044
  CDS Start-End: 251-635
aattttaataaaaatataacacagattctgaactgttgctaagatcatgaatttagcttaaaaccttaatgccgaaggtcttctctgtgtattttgtgtgcctctgtcctgcccttgggaagatctgaagtcctattctggtgaaaacacagctagtgccattgcccgttctgctgccgccacggctttgtctctccttgtgccagttttcattatctcttgcaaagagaaggttgaggaaatcctgaacatgctgactgccaggttacctgggaaaccaagtgctgatgagtctcaagccgtgcaaatccacatgggccttgctttagggatgtttctctctcgcttgtgtgaagagaaactcagtgatatatctggccaagagatgaaccttcttctgatgaagtcgttggatgccctggaaaattgctgctttgacactagtcttgaatacaacacgggctgtatattgggagttggacttgttctgtccctcatgagccacagcagccaaatgcagtcccgcgttcacgtagcagcattgctccggaagctgtctgcgcacgtagatgacagcgggagccagagcagaacgtttcaggaggtccttgcctacacacttagctgtgtatgta

SEQ ID NO: 134896 - DNA, 2635 bp, Homo sapiens
  Payload ID: 6343
  Gene Symbol: FOLH1
  Gene Name: folate hydrolase (prostate-specific membrane antigen) 1
  Uniprot ID: Q04609
  ENST ID: ENST00000256999
  CDS Start-End: 262-2514
ctcaaaaggggccggatttccttctcctggaggcagatgttgcctctctctctcgctcggattggttcagtgcactctagaaacactgctgtggtggagaaactggaccccaggtctggagcgaattccagcctgcagggctgataagcgaggcattagtgagattgagagagactttaccccgccgtggtggttggagggcgcgcagtagagcagcagcacaggcgcgggtcccgggaggccggctctgctcgcgccgagatgtggaatctccttcacgaaaccgactcggctgtggccaccgcgcgccgcccgcgctggctgtgcgctggggcgctggtgctggcgggtggcttctttctcctcggcttcctcttcgggtggtttataaaatcctccaatgaagctactaacattactccaaagcataatatgaaagcatttttggatgaattgaaagctgagaacatcaagaagttcttatataattttacacagataccacatttagcaggaacagaacaaaactttcagcttgcaaagcaaattcaatcccagtggaaagaatttggcctggattctgttgagctagcacattatgatgtcctgttgtcctacccaaataagactcatcccaactacatctcaataattaatgaagatggaaatgagattttcaacacatcattatttgaaccacctcctccaggatatgaaaatgtttcggatattgtaccacctttcagtgctttctctcctcaaggaatgccagagggcgatctagtgtatgttaactatgcacgaactgaagacttctttaaattggaacgggacatgaaaatcaattgctctgggaaaattgtaattgccagatatgggaaagttttcagaggaaataaggttaaaaatgcccagctggcaggggccaaaggagtcattctctactccgaccctgctgactactttgctcctggggtgaagtcctatccagatggttggaatcttcctggaggtggtgtccagcgtggaaatatcctaaatctgaatggtgcaggagaccctctcacaccaggttacccagcaaatgaatatgcttataggcgtggaattgcagaggctgttggtcttccaagtattcctgttcatccaattggatactatgatgcacagaagctcctagaaaaaatgggtggctcagcaccaccagatagcagctggagaggaagtctcaaagtgccctacaatgttggacctggctttactggaaacttttctacacaaaaagtcaagatgcacatccactctaccaatgaagtgacaagaatttacaatgtgataggtactctcagaggagcagtggaaccagacagatatgtcattctgggaggtcaccgggactcatgggtgtttggtggtattgaccctcagagtggagcagctgttgttcatgaaattgtgaggagctttggaacactgaaaaaggaagggtggagacctagaagaacaattttgtttgcaagctgggatgcagaagaatttggtcttcttggttctactgagtgggcagaggagaattcaagactccttcaagagcgtggcgtggcttatattaatgctgactcatctatagaaggaaactacactctgagagttgattgtacaccgctgatgtacagcttggtacacaacctaacaaaagagctgaaaagccctgatgaaggctttgaaggcaaatctctttatgaaagttggactaaaaaaagtccttccccagagttcagtggcatgcccaggataagcaaattgggatctggaaatgattttgaggtgttcttccaacgacttggaattgcttcaggcagagcacggtatactaaaaattgggaaacaaacaaattcagcggctatccactgtatcacagtgtctatgaaacatatgagttggtggaaaagttttatgatccaatgtttaaatatcacctcactgtggcccaggttcgaggagggatggtgtttgagctagccaattccatagtgctcccttttgattgtcgagattatgctgtagttttaagaaagtatgctgacaaaatctacagtatttctatgaaacatccacaggaaatgaagacatacagtgtatcatttgattcacttttttctgcagtaaagaattttacagaaattgcttccaagttcagtgagagactccaggactttgacaaaagcaacccaatagtattaagaatgatgaatgatcaactcatgtttctggaaagagcatttattgatccattagggttaccagacaggcctttttataggcatgtcatctatgctccaagcagccacaacaagtatgcaggggagtcattcccaggaatttatgatgctctgtttgatattgaaagcaaagtggacccttccaaggcctggggagaagtgaagagacagatttatgttgcagccttcacagtgcaggcagctgcagagactttgagtgaagtagcctaagaggattctttagagaatccgtattgaatttgtgtggtatgtcactcagaaagaatcgtaatgggtatattgataaattttaaaattggtatatttgaaataaagttgaatattatatata

SEQ ID NO: 134897 - DNA, 2258 bp, Homo sapiens
  Payload ID: 6343
  Gene Symbol: FOLH1
  Gene Name: folate hydrolase (prostate-specific membrane antigen) 1
  Uniprot ID: Q04609
  ENST ID: ENST00000343844
  CDS Start-End: 812-2140
ctcaaaaggggccggatttccttctcctggaggcagatgttgcctctctctctcgctcggattggttcagtgcactctagaaacactgctgtggtggagaaactggaccccaggtctggagcgaattccagcctgcagggctgataagcgaggcattagtgagattgagagagactttaccccgccgtggtggttggagggcgcgcagtagagcagcagcacaggcgcgggtcccgggaggccggctctgctcgcgccgagatgtggaatctccttcacgaaaccgactcggctgtggccaccgcgcgccgcccgcgctggctgtgcgctggggcgctggtgctggcgggtggcttctttctcctcggcttcctcttcgggtggtttataaaatcctccaatgaagctactaacattactccaaagcataatatgaaagcatttttggatgaattgaaagctgagaacatcaagaagttcttataattttcaacacatcattatttgaaccacctcctccaggatatgaaaatgtttcggatattgtaccacctttcagtgctttctctcctcaaggaatgccagagggcgatctagtgtatgttaactatgcacgaactgaagacttctttaaattggaacgggacatgaaaatcaattgctctgggaaaattgtaattgccagatatgggaaagttttcagaggaaataagaatatgcttataggcgtggaattgcagaggctgttggtcttccaagtattcctgttcatccaattggatactatgatgcacagaagctcctagaaaaaatgggtggctcagcaccaccagatagcagctggagaggaagtctcaaagtgccctacaatgttggacctggctttactggaaacttttctacacaaaaagtcaagatgcacatccactctaccaatgaagtgacaagaatttacaatgtgataggtactctcagaggagcagtggaaccagacagatatgtcattctgggaggtcaccgggactcatgggtgtttggtggtattgaccctcagagtggagcagctgttgttcatgaaattgtgaggagctttggaacactgaaaaaggaagggtggagacctagaagaacaattttgtttgcaagctgggatgcagaagaatttggtcttcttggttctactgagtgggcagaggagaattcaagactccttcaagagcgtggcgtggcttatattaatgctgactcatctatagaaggaaactacactctgagagttgattgtacaccgctgatgtacagcttggtacacaacctaacaaaagagctgaaaagccctgatgaaggctttgaaggcaaatctctttatgaaagttggactaaaaaaagtccttccccagagttcagtggcatgcccaggataagcaaattgggatctggaaatgattttgaggtgttcttccaacgacttggaattgcttcaggcagagcacggtatactaaaaattgggaaacaaacaaattcagcggctatccactgtatcacagtgtctatgaaacatatgagttggtggaaaagttttatgatccaatgtttaaatatcacctcactgtggcccaggttcgaggagggatggtgtttgagctagccaattccatagtgctcccttttgattgtcgagattatgctgtagttttaagaaagtatgctgacaaaatctacagtatttctatgaaacatccacaggaaatgaagacatacagtgtatcatttgattcacttttttctgcagtaaagaattttacagaaattgcttccaagttcagtgagagactccaggactttgacaaaagcaacccaatagtattaagaatgatgaatgatcaactcatgtttctggaaagagcatttattgatccattagggttaccagacaggcctttttataggcatgtcatctatgctccaagcagccacaacaagtatgcaggggagtcattcccaggaatttatgatgctctgtttgatattgaaagcaaagtggacccttccaaggcctggggagaagtgaagagacagatttatgttgcagccttcacagtgcaggcagctgcagagactttgagtgaagtagcctaagaggattctttagagaatccgtattgaatttgtgtggtatgtcactcagaaagaatcgtaatgggtatattgataaattttaaaattggtatatttgaaataaagttgaatattatat

SEQ ID NO: 134898 - DNA, 2697 bp, Homo sapiens
  Payload ID: 6343
  Gene Symbol: FOLH1
  Gene Name: folate hydrolase (prostate-specific membrane antigen) 1
  Uniprot ID: Q04609
  ENST ID: ENST00000340334
  CDS Start-End: 370-2577
agatgttgcctctctctctcgctcggattggttcagtgcactctagaaacactgctgtggtggagaaactggaccccaggtctggagcgaattccagcctgcagggctgataagcgaggcattagtgagattgagagagactttaccccgccgtggtggttggagggcgcgcagtagagcagcagcacaggcgcgggtcccgggaggccggctctgctcgcgccgagatgtggaatctccttcacgaaaccgactcggctgtggccaccgcgcgccgcccgcgctggctgtgcgctggggcgctggtgctggcgggtggcttctttctcctcggcttcctcttcggttaaaagccaactgcaaggtctaatgactgcaggatctagctatccattgtttctggccgcctatgcgtgcactgggtgtctggcagagaggctggggtggtttataaaatcctccaatgaagctactaacattactccaaagcataatatgaaagcatttttggatgaattgaaagctgagaacatcaagaagttcttatataattttacacagataccacatttagcaggaacagaacaaaactttcagcttgcaaagcaaattcaatcccagtggaaagaatttggcctggattctgttgagctagcacattatgatgtcctgttgtcctacccaaataagactcatcccaactacatctcaataattaatgaagatggaaatgagattttcaacacatcattatttgaaccacctcctccaggatatgaaaatgtttcggatattgtaccacctttcagtgctttctctcctcaaggaatgccagagggcgatctagtgtatgttaactatgcacgaactgaagacttctttaaattggaacgggacatgaaaatcaattgctctgggaaaattgtaattgccagatatgggaaagttttcagaggaaataaggttaaaaatgcccagctggcaggggccaaaggagtcattctctactccgaccctgctgactactttgctcctggggtgaagtcctatccagatggttggaatcttcctggaggtggtgtccagcgtggaaatatcctaaatctgaatggtgcaggagaccctctcacaccaggttacccagcaaatgaatatgcttataggcgtggaattgcagaggctgttggtcttccaagtattcctgttcatccaattggatactatgatgcacagaagctcctagaaaaaatgggtggctcagcaccaccagatagcagctggagaggaagtctcaaagtgccctacaatgttggacctggctttactggaaacttttctacacaaaaagtcaagatgcacatccactctaccaatgaagtgacaagaatttacaatgtgataggtactctcagaggagcagtggaaccagacagatatgtcattctgggaggtcaccgggactcatgggtgtttggtggtattgaccctcagagtggagcagctgttgttcatgaaattgtgaggagctttggaacactgaaaaaggaagggtggagacctagaagaacaattttgtttgcaagctgggatgcagaagaatttggtcttcttggttctactgagtgggcagaggagaattcaagactccttcaagagcgtggcgtggcttatattaatgctgactcatctatagaaggaaactacactctgagagttgattgtacaccgctgatgtacagcttggtacacaacctaacaaaagagctgaaaagccctgatgaaggctttgaaggcaaatctctttatgaaagttggactaaaaaaagtccttccccagagttcagtggcatgcccaggataagcaaattgggatctggaaatgattttgaggtgttcttccaacgacttggaattgcttcaggcagagcacggtatactaaaaattgggaaacaaacaaattcagcggctatccactgtatcacagtgtctatgaaacatatgagttggtggaaaagttttatgatccaatgtttaaatatcacctcactgtggcccaggttcgaggagggatggtgtttgagctagccaattccatagtgctcccttttgattgtcgagattatgctgtagttttaagaaagtatgctgacaaaatctacagtatttctatgaaacatccacaggaaatgaagacatacagtgtatcatttgattcacttttttctgcagtaaagaattttacagaaattgcttccaagttcagtgagagactccaggactttgacaaaagcaacccaatagtattaagaatgatgaatgatcaactcatgtttctggaaagagcatttattgatccattagggttaccagacaggcctttttataggcatgtcatctatgctccaagcagccacaacaagtatgcaggggagtcattcccaggaatttatgatgctctgtttgatattgaaagcaaagtggacccttccaaggcctggggagaagtgaagagacagatttatgttgcagccttcacagtgcaggcagctgcagagactttgagtgaagtagcctaagaggattctttagagaatccgtattgaatttgtgtggtatgtcactcagaaagaatcgtaatgggtatattgataaattttaaaattggtatatttgaaataaagttgaatattatatat

SEQ ID NO: 134899 - DNA, 2403 bp, Homo sapiens
  Payload ID: 6343
  Gene Symbol: FOLH1
  Gene Name: folate hydrolase (prostate-specific membrane antigen) 1
  Uniprot ID: Q04609
  ENST ID: ENST00000356696
  CDS Start-End: 124-2283
ggctgataagcgaggcattagtgagattgagagagactttaccccgccgtggtggttggagggcgcgcagtagagcagcagcacaggcgcgggtcccgggaggccggctctgctcgcgccgagatgtggaatctccttcacgaaaccgactcggctgtggccaccgcgcgccgcccgcgctggctgtgcgctggggcgctggtgctggcgggtggcttctttctcctcggcttcctcttcgggtggtttataaaatcctccaatgaagctactaacattactccaaagcataatatgaaagcatttttggatgaattgaaagctgagaacatcaagaagttcttatataattttacacagataccacatttagcaggaacagaacaaaactttcagcttgcaaagcaaattcaatcccagtggaaagaatttggcctggattctgttgagctagcacattatgatgtcctgttgtcctacccaaataagactcatcccaactacatctcaataattaatgaagatggaaatgagattttcaacacatcattatttgaaccacctcctccaggatatgaaaatgtttcggatattgtaccacctttcagtgctttctctcctcaaggaatgccagagggcgatctagtgtatgttaactatgcacgaactgaagacttctttaaattggaacgggacatgaaaatcaattgctctgggaaaattgtaattgccagatatgggaaagttttcagaggaaataaggttaaaaatgcccagctggcaggggccaaaggagtcattctctactccgaccctgctgactactttgctcctggggtgaagtcctatccagatggttggaatcttcctggaggtggtgtccagcgtggaaatatcctaaatctgaatggtgcaggagaccctctcacaccaggttacccagcaaatgaatatgcttataggcgtggaattgcagaggctgttggtcttccaagtattcctgttcatccaattggatactatgatgcacagaagctcctagaaaaaatgggtggctcagcaccaccagatagcagctggagaggaagtctcaaagtgccctacaatgttggacctggctttactggaaacttttctacacaaaaagtcaagatgcacatccactctaccaatgaagtgacaagaatttacaatgtgataggtactctcagaggagcagtggaaccagacagatatgtcattctgggaggtcaccgggactcatgggtgtttggtggtattgaccctcagagtggagcagctgttgttcatgaaattgtgaggagctttggaacactgaaaaaggaagggtggagacctagaagaacaattttgtttgcaagctgggatgcagaagaatttggtcttcttggttctactgagtgggcagaggagaattcaagactccttcaagagcgtggcgtggcttatattaatgctgactcatctatagaaggaaactacactctgagagttgattgtacaccgctgatgtacagcttggtacacaacctaacaaaagagctgaaaagccctgatgaaggctttgaaggcaaatctctttatgaaagttggactaaaaaaagtccttccccagagttcagtggcatgcccaggataagcaaattgggatctggaaatgattttgaggtgttcttccaacgacttggaattgcttcaggcagagcacggtatactaaaaattgggaaacaaacaaattcagcggctatccactgtatcacagtgtctatgaaacatatgagttggtggaaaagttttatgatccaatgtttaaatatcacctcactgtggcccaggttcgaggagggatggtgtttgagctagccaattccatagtgctcccttttgattgtcgagattatgctgtagttttaagaaagtatgctgacaaaatctacagtatttctatgaaacatccacaggaaatgaagacatacagtgtatcatttgattcacttttttctgcagtaaagaattttacagaaattgcttccaagttcagtgagagactccaggactttgacaaaagcaagcatgtcatctatgctccaagcagccacaacaagtatgcaggggagtcattcccaggaatttatgatgctctgtttgatattgaaagcaaagtggacccttccaaggcctggggagaagtgaagagacagatttatgttgcagccttcacagtgcaggcagctgcagagactttgagtgaagtagcctaagaggattctttagagaatccgtattgaatttgtgtggtatgtcactcagaaagaatcgtaatgggtatattgataaattttaaaattggtatatttgaaataaagttgaatattatatat

SEQ ID NO: 134900 - DNA, 660 bp, Homo sapiens
  Payload ID: 6343
  Gene Symbol: FOLH1
  Gene Name: folate hydrolase (prostate-specific membrane antigen) 1
  ENST ID: ENST00000529648
  CDS Start-End: 230-376
gcagatgttgcctctctctctcgctcggattggttcagtgcactctagaaacactgctgtggtggagaaactggaccccaggtctggagcgaattccagcctgcagggctgataagcgaggcattagtgagattgagagagactttaccccgccgtggtggttggagggcgcgcagtagagcagcagcacaggcgcgggtcccgggaggccggctctgctcgcgccgagatgtggaatctccttcacgaaaccgactcggctgtggccaccgcgcgccgcccgcgctggctgtgcgctggggcgctggtgctggcgggtggcttctttctcctcggcttcctcttcgtaacagaggcaagcttgggaactgtgtgaaccaggtcagcaatctggacaggtctttaccagcgggtcttttgctgtttttcctgggtactgatttgcagacttgatccaactttctaagaaaagcagaaccacacagggtggtttataaaatcctccaatgaagctactaacattactccaaagcataatatgaaagcatttttggatgaattgaaagctgagaacatcaagaagttcttatataattttacacagataccacatttagcaggaacagaacaaaactttcagcttgcaaagcaaattcaatc

SEQ ID NO: 134901 - DNA, 2225 bp, Homo sapiens
  Payload ID: 6343
  Gene Symbol: FOLH1
  Gene Name: folate hydrolase (prostate-specific membrane antigen) 1
  Uniprot ID: Q04609
  ENST ID: ENST00000533034
  CDS Start-End: 106-2220
ccaccgcgcgccgcccgcgctggctgtgcgctggggcgctggtgctggcgggtggcttctttctcctcggcttcctcttcggttaaaagccaactgcaaggtctaatgactgcaggatctagctatccattgtttctggccgcctatgcgtgcactgggtgtctggcagagaggctggggtggtttataaaatcctccaatgaagctactaacattactccaaagcataatatgaaagcatttttggatgaattgaaagctgagaacatcaagaagttcttatataattttacacagataccacatttagcaggaacagaacaaaactttcagcttgcaaagcaaattcaatcccagtggaaagaatttggcctggattctgttgagctagcacattatgatgtcctgttgtcctacccaaataagactcatcccaactacatctcaataattaatgaagatggaaatgagattttcaacacatcattatttgaaccacctcctccaggatatgaaaatgtttcggatattgtaccacctttcagtgctttctctcctcaaggaatgccagagggcgatctagtgtatgttaactatgcacgaactgaagacttctttaaattggaacgggacatgaaaatcaattgctctgggaaaattgtaattgccagatatgggaaagttttcagaggaaataaggttaaaaatgcccagctggcaggggccaaaggagtcattctctactccgaccctgctgactactttgctcctggggtgaagtcctatccagatggttggaatcttcctggaggtggtgtccagcgtggaaatatcctaaatctgaatggtgcaggagaccctctcacaccaggttacccagcaaatgaatatgcttataggcgtggaattgcagaggctgttggtcttccaagtattcctgttcatccaattggatactatgatgcacagaagctcctagaaaaaatgggtggctcagcaccaccagatagcagctggagaggaagtctcaaagtgccctacaatgttggacctggctttactggaaacttttctacacaaaaagtcaagatgcacatccactctaccaatgaagtgacaagaatttacaatgtgataggtactctcagaggagcagtggaaccagacagatatgtcattctgggaggtcaccgggactcatgggtgtttggtggtattgaccctcagagtggagcagctgttgttcatgaaattgtgaggagctttggaacactgaaaaaggaagggtggagacctagaagaacaattttgtttgcaagctgggatgcagaagaatttggtcttcttggttctactgagtgggcagaggagaattcaagactccttcaagagcgtggcgtggcttatattaatgctgactcatctatagaaggaaactacactctgagagttgattgtacaccgctgatgtacagcttggtacacaacctaacaaaagagctgaaaagccctgatgaaggctttgaaggcaaatctctttatgaaagttggactaaaaaaagtccttccccagagttcagtggcatgcccaggataagcaaattgggatctggaaatgattttgaggtgttcttccaacgacttggaattgcttcaggcagagcacggtatactaaaaattgggaaacaaacaaattcagcggctatccactgtatcacagtgtctatgaaacatatgagttggtggaaaagttttatgatccaatgtttaaatatcacctcactgtggcccaggttcgaggagggatggtgtttgagctagccaattccatagtgctcccttttgattgtcgagattatgctgtagttttaagaaagtatgctgacaaaatctacagtatttctatgaaacatccacaggaaatgaagacatacagtgtatcatttgattcacttttttctgcagtaaagaattttacagaaattgcttccaagttcagtgagagactccaggactttgacaaaagcaagcatgtcatctatgctccaagcagccacaacaagtatgcaggggagtcattcccaggaatttatgatgctctgtttgatattgaaagcaaagtggacccttccaaggcctggggagaagtgaagagacagatttatgttgcagccttcacagtgcaggcagctgcagagactttgagtgaagtagcctaagagga

SEQ ID NO: 134902 - DNA, 540 bp, Homo sapiens
  Payload ID: 6343
  Gene Symbol: FOLH1
  Gene Name: folate hydrolase (prostate-specific membrane antigen) 1
  ENST ID: ENST00000529117
  CDS Start-End: 347-540
atgtggggtgagcacccctcgagttaggaggagggtagctgggaacggtgcagggctgagttctcgacaagctgctggtaggacagtcactcaggttgagggtagaactgagagaacctgaaactgggcgtaggaaggttccaagtgctggagccctgcaagacagaggaagttttttttttgcttttgttttgttttgttttgttttgtttgtttgtttgtttttttacctctctgtgcattctttcttccttggaagtaacagaggcaagcttgggaactgtgtgaaccagggtggtttataaaatcctccaatgaagctactaacattactccaaagcataatatgaaagcatttttggatgaattgaaagctgagaacatcaagaagttcttatataattttacacagataccacatttagcaggaacagaacaaaactttcagcttgcaaagcaaattcaatcccagtggaaagaatttggcctggattctgttgagctagcacattatgatgtcctgttgtcctacccaaataa

SEQ ID NO: 134903 - DNA, 2192 bp, Homo sapiens
  Payload ID: 6343
  Gene Symbol: FOLH1
  Gene Name: folate hydrolase (prostate-specific membrane antigen) 1
  ENST ID: ENST00000525826
  CDS Start-End: 194-418
agtgcactctagaaacactgctgtggtggagaaactggaccccaggtctggagcgaattccagcctgcagggctgataagcgaggcattagtgagattgagagagactttaccccgccgtggtggttggagggcgcgcagtagagcagcagcacaggcgcgggtcccgggaggccggctctgctcgcgccgagatgtggaatctccttcacgaaaccgactcggctgtggccaccgcgcgccgcccgcgctggctgtgcgctggggcgctggtgctggcgggtggcttctttctcctcggcttcctcttcgggtggtttataaaatcctccaatgaagctactaacattactccaaagcataatatgaaagcatttttggatgaattgaaagctgagaacatcaagaagttcttataattttcaacacatcattatttgaaccacctcctccaggatatgaaaatgtttcggatattgtaccacctttcagtgctttctctcctcaaggaatgccagagggcgatctagtgtatgttaactatgcacgaactgaagacttctttaaattggaacgggacatgaaaatcaattgctctgggaaaattgtaattgccagatatgggaaagttttcagaggaaataagaatatgcttataggcgtggaattgcagaggctgttggtcttccaagtattcctgttcatccaattggatactatgatgcacagaagctcctagaaaaaatgggtggctcagcaccaccagatagcagctggagaggaagtctcaaagtgccctacaatgttggacctggctttactggaaacttttctacacaaaaagtcaagatgcacatccactctaccaatgaagtgacaagaatttacaatgtgataggtactctcagaggagcagtggaaccagacagatatgtcattctgggaggtcaccgggactcatgggtgtttggtggtattgaccctcagagtggagcagctgttgttcatgaaattgtgaggagctttggaacactgaaaaaggaagggtggagacctagaagaacaattttgtttgcaagctgggatgcagaagaatttggtcttcttggttctactgagtgggcagaggagaattcaagactccttcaagagcgtggcgtggcttatattaatgctgactcatctatagaaggaaactacactctgagagttgattgtacaccgctgatgtacagcttggtacacaacctaacaaaagagctgaaaagccctgatgaaggctttgaaggcaaatctctttatgaaagttggactaaaaaaagtccttccccagagttcagtggcatgcccaggataagcaaattgggatctggaaatgattttgaggtgttcttccaacgacttggaattgcttcaggcagagcacggtatactaaaaattgggaaacaaacaaattcagcggctatccactgtatcacagtgtctatgaaacatatgagttggtggaaaagttttatgatccaatgtttaaatatcacctcactgtggcccaggttcgaggagggatggtgtttgagctagccaattccatagtgctcccttttgattgtcgagattatgctgtagttttaagaaagtatgctgacaaaatctacagtatttctatgaaacatccacaggaaatgaagacatacagtgtatcatttgattcacttttttctgcagtaaagaattttacagaaattgcttccaagttcagtgagagactccaggactttgacaaaagcaacccaatagtattaagaatgatgaatgatcaactcatgtttctggaaagagcatttattgatccattagggttaccagacaggcctttttataggcatgtcatctatgctccaagcagccacaacaagtatgcaggggagtcattcccaggaatttatgatgctctgtttgatattgaaagcaaagtggacccttccaaggcctggggagaagtgaagagacagatttatgttgcagccttcacagtgcaggcagctgcagagactttgagtgaagtagcctaagaggattctttagagaatccgtattgaatttgtgtggtatgtcactcagaaagaatcgtaatgggtatattgataaattttaaaattggtatatttgaaataaagttgaatattatatat

SEQ ID NO: 134904 - DNA, 751 bp, Homo sapiens
  Payload ID: 6343
  Gene Symbol: FOLH1
  Gene Name: folate hydrolase (prostate-specific membrane antigen) 1
  ENST ID: ENST00000533510
  CDS Start-End: 185-325
tagaaacactgctgtggtggagaaactggaccccaggtctggagcgaattccagcctgcagggctgataagcgaggcattagtgagattgagagagactttaccccgccgtggtggttggagggcgcgcagtagagcagcagcacaggcgcgggtcccgggaggccggctctgctcgcgccgagatgtggaatctccttcacgaaaccgactcggctgtggccaccgcgcgccgcccgcgctggctgtgcgctggggcgctggtgctggcgggtggcttctttctcctcggcttcctcttcgtgaaagtaggcaagagaaattaaaattcagaaatatctcacctaatgtcagagggtggtttataaaatcctccaatgaagctactaacattactccaaagcataatatgaaagcatttttggatgaattgaaagctgagaacatcaagaagttcttatataattttacacagataccacatttagcaggaacagaacaaaactttcagcttgcaaagcaaattcaatcccagtggaaagaatttggcctggattctgttgagctagcacattatgatgtcctgttgtcctacccaaataagactcatcccaactacatctcaataattaatgaagatggaaatgagattttcaacacatcattatttgaaccacctcctccaggatatgaaaatgtttcggatattgtaccacctttcagtgctttctctcctcaaggaatgccagagg

SEQ ID NO: 134905 - DNA, 1107 bp, Homo sapiens
  Payload ID: 6344
  Gene Symbol: FOLR1
  Gene Name: folate receptor 1 (adult)
  Uniprot ID: P15328
  ENST ID: ENST00000312293
  CDS Start-End: 211-984
tggaggcctggctggtgctcacatacaataattaactgctgagtggccttcgcccaatcccaggctccactcctgggctccattcccactccctgcctgtctcctaggccactaaaccacagctgtcccctggaataaggcaagggggagtgtagagcagagcagaagcctgagccagacggagagccacctcctctcccagggacagacatggctcagcggatgacaacacagctgctgctccttctagtgtgggtggctgtagtaggggaggctcagacaaggattgcatgggccaggactgagcttctcaatgtctgcatgaacgccaagcaccacaaggaaaagccaggccccgaggacaagttgcatgagcagtgtcgaccctggaggaagaatgcctgctgttctaccaacaccagccaggaagcccataaggatgtttcctacctatatagattcaactggaaccactgtggagagatggcacctgcctgcaaacggcatttcatccaggacacctgcctctacgagtgctcccccaacttggggccctggatccagcaggtggatcagagctggcgcaaagagcgggtactgaacgtgcccctgtgcaaagaggactgtgagcaatggtgggaagattgtcgcacctcctacacctgcaagagcaactggcacaagggctggaactggacttcagggtttaacaagtgcgcagtgggagctgcctgccaacctttccatttctacttccccacacccactgttctgtgcaatgaaatctggactcactcctacaaggtcagcaactacagccgagggagtggccgctgcatccagatgtggttcgacccagcccagggcaaccccaatgaggaggtggcgaggttctatgctgcagccatgagtggggctgggccctgggcagcctggcctttcctgcttagcctggccctaatgctgctgtggctgctcagctgacctccttttaccttctgatacctggaaatccctgccctgttcagccccacagctcccaactatttggttcctgctccatggtcgggcctctgacagccactttgaataaaccagacaccgcac

SEQ ID NO: 134906 - DNA, 947 bp, Homo sapiens
  Payload ID: 6344
  Gene Symbol: FOLR1
  Gene Name: folate receptor 1 (adult)
  Uniprot ID: P15328
  ENST ID: ENST00000393676
  CDS Start-End: 50-823
tccgcattccttggtgccactgaccacagctctttcttcagggacagacatggctcagcggatgacaacacagctgctgctccttctagtgtgggtggctgtagtaggggaggctcagacaaggattgcatgggccaggactgagcttctcaatgtctgcatgaacgccaagcaccacaaggaaaagccaggccccgaggacaagttgcatgagcagtgtcgaccctggaggaagaatgcctgctgttctaccaacaccagccaggaagcccataaggatgtttcctacctatatagattcaactggaaccactgtggagagatggcacctgcctgcaaacggcatttcatccaggacacctgcctctacgagtgctcccccaacttggggccctggatccagcaggtggatcagagctggcgcaaagagcgggtactgaacgtgcccctgtgcaaagaggactgtgagcaatggtgggaagattgtcgcacctcctacacctgcaagagcaactggcacaagggctggaactggacttcagggtttaacaagtgcgcagtgggagctgcctgccaacctttccatttctacttccccacacccactgttctgtgcaatgaaatctggactcactcctacaaggtcagcaactacagccgagggagtggccgctgcatccagatgtggttcgacccagcccagggcaaccccaatgaggaggtggcgaggttctatgctgcagccatgagtggggctgggccctgggcagcctggcctttcctgcttagcctggccctaatgctgctgtggctgctcagctgacctccttttaccttctgatacctggaaatccctgccctgttcagccccacagctcccaactatttggttcctgctccatggtcgggcctctgacagccactttgaataaaccagacaccgcaca

SEQ ID NO: 134907 - DNA, 1331 bp, Homo sapiens
  Payload ID: 6344
  Gene Symbol: FOLR1
  Gene Name: folate receptor 1 (adult)
  Uniprot ID: P15328
  ENST ID: ENST00000393679
  CDS Start-End: 437-1210
ggaaaggattttctcagcccccatccccagcactgtgtgttggccgcacccatgagagcctcagcactctgaaggtgcagggggcaaaggccaaaagagctctggcctgaacttgggtggtccctactgtgtgacttggggcatggccctcatctgtgctgaaatgattccacaaagattaaactggctatcatttgttgatttcccccttcttacatttaatccttgcaggagaaagctaagcctcaagatagtttgcttctctttcccccaaggccaaggagaaggtggagtgagggctggggtcgggacaggttgaacgggaaccctgtgctctaaacagttagggtttgttcccgcaggaactgaacccaaaggatcacctggtattccctgagagtacagatttctccggcgtggccctcaagggacagacatggctcagcggatgacaacacagctgctgctccttctagtgtgggtggctgtagtaggggaggctcagacaaggattgcatgggccaggactgagcttctcaatgtctgcatgaacgccaagcaccacaaggaaaagccaggccccgaggacaagttgcatgagcagtgtcgaccctggaggaagaatgcctgctgttctaccaacaccagccaggaagcccataaggatgtttcctacctatatagattcaactggaaccactgtggagagatggcacctgcctgcaaacggcatttcatccaggacacctgcctctacgagtgctcccccaacttggggccctggatccagcaggtggatcagagctggcgcaaagagcgggtactgaacgtgcccctgtgcaaagaggactgtgagcaatggtgggaagattgtcgcacctcctacacctgcaagagcaactggcacaagggctggaactggacttcagggtttaacaagtgcgcagtgggagctgcctgccaacctttccatttctacttccccacacccactgttctgtgcaatgaaatctggactcactcctacaaggtcagcaactacagccgagggagtggccgctgcatccagatgtggttcgacccagcccagggcaaccccaatgaggaggtggcgaggttctatgctgcagccatgagtggggctgggccctgggcagcctggcctttcctgcttagcctggccctaatgctgctgtggctgctcagctgacctccttttaccttctgatacctggaaatccctgccctgttcagccccacagctcccaactatttggttcctgctccatggtcgggcctctgacagccactttgaataaaccagacaccgc

SEQ ID NO: 134908 - DNA, 1061 bp, Homo sapiens
  Payload ID: 6344
  Gene Symbol: FOLR1
  Gene Name: folate receptor 1 (adult)
  Uniprot ID: P15328
  ENST ID: ENST00000393681
  CDS Start-End: 167-940
actaaaccacagctgtcccctggaataaggcaagggggagtgtagagcagagcagaagcctgagccagacggagagccacctcctctcccaggaactgaacccaaaggatcacctggtattccctgagagtacagatttctccggcgtggccctcaagggacagacatggctcagcggatgacaacacagctgctgctccttctagtgtgggtggctgtagtaggggaggctcagacaaggattgcatgggccaggactgagcttctcaatgtctgcatgaacgccaagcaccacaaggaaaagccaggccccgaggacaagttgcatgagcagtgtcgaccctggaggaagaatgcctgctgttctaccaacaccagccaggaagcccataaggatgtttcctacctatatagattcaactggaaccactgtggagagatggcacctgcctgcaaacggcatttcatccaggacacctgcctctacgagtgctcccccaacttggggccctggatccagcaggtggatcagagctggcgcaaagagcgggtactgaacgtgcccctgtgcaaagaggactgtgagcaatggtgggaagattgtcgcacctcctacacctgcaagagcaactggcacaagggctggaactggacttcagggtttaacaagtgcgcagtgggagctgcctgccaacctttccatttctacttccccacacccactgttctgtgcaatgaaatctggactcactcctacaaggtcagcaactacagccgagggagtggccgctgcatccagatgtggttcgacccagcccagggcaaccccaatgaggaggtggcgaggttctatgctgcagccatgagtggggctgggccctgggcagcctggcctttcctgcttagcctggccctaatgctgctgtggctgctcagctgacctccttttaccttctgatacctggaaatccctgccctgttcagccccacagctcccaactatttggttcctgctccatggtcgggcctctgacagccactttgaataaaccagacaccgc

SEQ ID NO: 134909 - DNA, 1138 bp, Homo sapiens
  Payload ID: 6345
  Gene Symbol: FOLR2
  Gene Name: folate receptor 2 (fetal)
  Uniprot ID: P14207
  ENST ID: ENST00000298223
  CDS Start-End: 188-955
ctaagtagggagatttcactcagtgcttaccagagcgcgttgtctaccctgtaccgaagacagaggctgtggggacagcctaggggcctggatctattgcctacttagagagaggccaactcagacacagccgtgtatgctcccagcagcaacggaggttcagctccgcctgcagggacagaaagacatggtctggaaatggatgccacttctgctgcttctggtctgtgtagccaccatgtgcagtgcccaggacaggactgatctcctcaatgtctgtatggatgccaagcaccacaagacaaagccaggtcctgaggacaagctgcatgaccaatgcagtccctggaagaagaatgcctgctgcacagccagcaccagccaggagctgcacaaggacacctcccgcctgtacaactttaactgggaccactgcggcaagatggagcccgcctgcaagcgccacttcatccaggacacctgtctctatgagtgctcacccaacctggggccctggatccagcaggtgaatcagagctggcgcaaagaacgcttcctggatgtgcccttatgcaaagaggactgtcagcgctggtgggaggattgtcacacctcccacacgtgcaagagcaactggcacagaggatgggactggacctcaggagttaacaagtgcccagctggggctctctgccgcacctttgagtcctacttccccactccagctgccctttgtgaaggcctctggagtcactcatacaaggtcagcaactacagccgagggagcggccgctgcatccagatgtggtttgattcagcccagggcaaccccaacgaggaagtggcgaggttctatgctgcagccatgcatgtgaatgctggtgagatgcttcatgggactgggggtctcctgctcagtctggccctgatgctgcaactctggctccttggctgagttcagtcctcccagactacctgccctcagcttggataaccaggctgggctcagctcagctcccacaaatgacagccccttaagcatgcttctattagtcacctaaccctctgtcacccagtctgttgctgctccatggtggggccaagagtcacttctaataaacagactgttttctaataa

SEQ ID NO: 134910 - DNA, 699 bp, Homo sapiens
  Payload ID: 6345
  Gene Symbol: FOLR2
  Gene Name: folate receptor 2 (fetal)
  ENST ID: ENST00000321324
  CDS Start-End: 69-699
gtggggacagcctaggggcctggatctattgcctacttagagagaggccaactcagacacagccgtgtatgctcccagcagcaacggaggttcagggacagaaagacatggtctggaaatggatgccacttctgctgcttctggtctgtgtagccaccatgtgcagtgcccaggacaggactgatctcctcaatgtctgtatggatgccaagcaccacaagacaaagccaggtcctgaggacaagctgcatgaccaatgcagtccctggaagaagaatgcctgctgcacagccagcaccagccaggagctgcacaaggacacctcccgcctgtacaactttaactgggaccactgcggcaagatggagcccgcctgcaagcgccacttcatccaggacacctgtctctatgagtgctcacccaacctggggccctggatccagcaggtgaatcagagctggcgcaaagaacgcttcctggatgtgcccttatgcaaagaggactgtcagcgctggtgggaggattgtcacacctcccacacgtgcaagagcaactggcacagaggatgggactggacctcaggagttaacaagtgcccagctggggctctctgccgcacctttgagtcctacttccccactccagctgccctttgtgaaggcctctggagtcactcatacaaggtcagcaactacagcc

SEQ ID NO: 134911 - DNA, 1242 bp, Homo sapiens
  Payload ID: 6345
  Gene Symbol: FOLR2
  Gene Name: folate receptor 2 (fetal)
  ENST ID: ENST00000449475
  CDS Start-End: 299-1054
agcaattctctagattttgatgaaagttgaatgtgtggatgctggaatgagtaaattaacaagtaaggagatgaatgcaagcaggaatgactaaatggacagactcagggagccttgaagagggtggggtctggaagggaaggaagagaggaaggagaatagctaagtagggagatttcactcagtgcttaccagagcgcgttgtctaccctgtaccgaagacagaggctgtggggacagcctaggggcctggatctattgcctacttagagagaggccaactcagacacagccgtgtatgctcccagcagcaacggaggttcagctccgcctgcagggacagaaagacatggtctggaaatggatgccacttctgctgcttctggtctgtgtagccaccatgtgcagtgcccaggacaggactgatctcctcaatgtctgtatggatgccaagcaccacaagacaaagccaggtcctgaggacaagctgcatgaccaatgcagtccctggaagaagaatgcctgctgcacagccagcaccagccaggagctgcacaaggacacctcccgcctgtacaactttaactgggaccactgcggcaagatggagcccgcctgcaagcgccacttcatccaggacacctgtctctatgagtgctcacccaacctggggccctggatccagcaggtgaatcagagctggcgcaaagaacgcttcctggatgtgcccttatgcaaagaggactgtcagcgctggtgggaggattgtcacacctcccacacgtgcaagagcaactggcacagaggatgggactggacctcagctgccctttgtgaaggcctctggagtcactcatacaaggtcagcaactacagccgagggagcggccgctgcatccagatgtggtttgattcagcccagggcaaccccaacgaggaagtggcgaggttctatgctgcagccatgcatgtgaatgctggtgagatgcttcatgggactgggggtctcctgctcagtctggccctgatgctgcaactctggctccttggctgagttcagtcctcccagactacctgccctcagcttggataaccaggctgggctcagctcagctcccacaaatgacagccccttaagcatgcttctattagtcacctaaccctctgtcacccagtctgttgctgctccatggtggggccaagagtcacttctaataaacagactgttttctaataattcca

SEQ ID NO: 134912 - DNA, 951 bp, Homo sapiens
  Payload ID: 6345
  Gene Symbol: FOLR2
  Gene Name: folate receptor 2 (fetal)
  ENST ID: ENST00000454954
  CDS Start-End: 119-763
ctcagtgcttaccagagcgcgttgtctaccctgtaccgaagacagaggctgtggggacagcctaggggcctggatctattgcctacttagagagaggccaactcagacacagccgtgtatgctcccagcagcaacggaggttcagtgcagtccctggaagaagaatgcctgctgcacagccagcaccagccaggagctgcacaaggacacctcccgcctgtacaactttaactgggaccactgcggcaagatggagcccgcctgcaagcgccacttcatccaggacacctgtctctatgagtgctcacccaacctggggccctggatccagcaggtgaatcagagctggcgcaaagaacgcttcctggatgtgcccttatgcaaagaggactgtcagcgctggtgggaggattgtcacacctcccacacgtgcaagagcaactggcacagaggatgggactggacctcaggagttaacaagtgcccagctggggctctctgccgcacctttgagtcctacttccccactccagctgccctttgtgaaggcctctggagtcactcatacaaggtcagcaactacagccgagggagcggccgctgcatccagatgtggtttgattcagcccagggcaaccccaacgaggaagtggcgaggttctatgctgcagccatgcatgtgaatgctggtgagatgcttcatgggactgggggtctcctgctcagtctggccctgatgctgcaactctggctccttggctgagttcagtcctcccagactacctgccctcagcttggataaccaggctgggctcagctcagctcccacaaatgacagccccttaagcatgcttctattagtcacctaaccctctgtcacccagtctgttgctgctccatggtggggccaagagtcacttctaataaacagactgttttctaataattcca

SEQ ID NO: 134913 - DNA, 697 bp, Homo sapiens
  Payload ID: 6345
  Gene Symbol: FOLR2
  Gene Name: folate receptor 2 (fetal)
  ENST ID: ENST00000536778
  CDS Start-End: 104-697
agcgcgttgtctaccctgtaccgaagacagaggctgtggggacagcctaggggcctggatctattgcctacttagagagaggccaactcagacacagccgtgtatgctcccagcagcaacggagctccgcctgcagggacagaaagacatggtctggaaatggatgccacttctgctgcttctggtctgtgtagccaccatgtgcagtgcccaggacaggactgatctcctcaatgtctgtatggatgccaagcaccacaagacaaagccaggtcctgaggacaagctgcatgaccaatgcagtccctggaagaagaatgcctgctgcacagccagcaccagccaggagctgcacaaggacacctcccgcctgtacaactttaactgggaccactgcggcaagatggagcccgcctgcaagcgccacttcatccaggacacctgtctctatgagtgctcacccaacctggggccctggatccagcaggtgaatcagagctggcgcaaagaacgcttcctggatgtgcccttatgcaaagaggactgtcagcgctggtgggaggattgtcacacctcccacacgtgcaagagcaactggcacagaggatgggactggacctcaggagttaacaagtgcccagctggggctctctgccgcacctttgagtcctacttccccactccagctgccctttgt

SEQ ID NO: 134914 - DNA, 556 bp, Homo sapiens
  Payload ID: 6345
  Gene Symbol: FOLR2
  Gene Name: folate receptor 2 (fetal)
  ENST ID: ENST00000538353
  CDS Start-End: 48-556
aggacttggtttccctaccctagctccgcctgcagggacagaaagacatggtctggaaatggatgccacttctgctgcttctggtctgtgtagccaccatgtgcagtgcccaggacaggactgatctcctcaatgtctgtatggatgccaagcaccacaagacaaagccaggtcctgaggacaagctgcatgaccaatgcagtccctggaagaagaatgcctgctgcacagccagcaccagccaggagctgcacaaggacacctcccgcctgtacaactttaactgggaccactgcggcaagatggagcccgcctgcaagcgccacttcatccaggacacctgtctctatgagtgctcacccaacctggggccctggatccagcaggtgaatcagagctggcgcaaagaacgcttcctggatgtgcccttatgcaaagaggactgtcagcgctggtgggaggattgtcacacctcccacacgtgcaagagcaactggcacagaggatgggactggacctcagctgccctttgtgaaggcctctggagtcactcata

SEQ ID NO: 134915 - DNA, 647 bp, Homo sapiens
  Payload ID: 6345
  Gene Symbol: FOLR2
  Gene Name: folate receptor 2 (fetal)
  ENST ID: ENST00000539412
  CDS Start-End: 106-647
agagcgcgttgtctaccctgtaccgaagacagaggctgtggggacagcctaggggcctggatctattgcctacttagagagaggccaactcagacacagccgtgtatgctcccagcagcaacggagggacagaaagacatggtctggaaatggatgccacttctgctgcttctggtctgtgtagccaccatgtgcagtgcccaggacaggactgatctcctcaatgtctgtatggatgccaagcaccacaagacaaagccaggtcctgaggacaagctgcatgaccaatgcagtccctggaagaagaatgcctgctgcacagccagcaccagccaggagctgcacaaggacacctcccgcctgtacaactttaactgggaccactgcggcaagatggagcccgcctgcaagcgccacttcatccaggacacctgtctctatgagtgctcacccaacctggggccctggatccagcaggtgaatcagagctggcgcaaagaacgcttcctggatgtgcccttatgcaaagaggactgtcagcgctggtgggaggattgtcacacctcccacacgtgcaagagcaactggcacagaggatgggactggacctcaggagttaacaagtgcccagctggggctctctgccg

SEQ ID NO: 134916 - DNA, 551 bp, Homo sapiens
  Payload ID: 6345
  Gene Symbol: FOLR2
  Gene Name: folate receptor 2 (fetal)
  ENST ID: ENST00000541003
  CDS Start-End: 106-551
agagcgcgttgtctaccctgtaccgaagacagaggctgtggggacagcctaggggcctggatctattgcctacttagagagaggccaactcagacacagccgtgtatgctcccagcagcaacggaggttcagaaagatcatgctggctcctgtggggaaggcaacttgaaggggaagaaattggaagagggaagacttgacactaaacatagagccatgctccgcctgcagggacagaaagacatggtctggaaatggatgccacttctgctgcttctggtctgtgtagccaccatgtgcagtgcccaggacaggactgatctcctcaatgtctgtatggatgccaagcaccacaagacaaagccaggtcctgaggacaagctgcatgaccaatgcagtccctggaagaagaatgcctgctgcacagccagcaccagccaggagctgcacaaggacacctcccgcctgtacaactttaactgggaccactgcggcaagatggagcccgcctgcaagcgccacttcatccaggacacctgtctctatgagtg

SEQ ID NO: 134917 - DNA, 610 bp, Homo sapiens
  Payload ID: 6345
  Gene Symbol: FOLR2
  Gene Name: folate receptor 2 (fetal)
  ENST ID: ENST00000535625
  CDS Start-End: 96-610
aggctgtggggacagcctaggggcctggatctattgcctacttagagagaggccaactcagacacagccgtctccgcctgcagggacagaaagacatggtctggaaatggatgccacttctgctgcttctggtctgtgtagccaccatgtgcagtgcccaggacaggactgatctcctcaatgtctgtatggatgccaagcaccacaagacaaagccaggtcctgaggacaagctgcatgaccaatgcagtccctggaagaagaatgcctgctgcacagccagcaccagccaggagctgcacaaggacacctcccgcctgtacaactttaactgggaccactgcggcaagatggagcccgcctgcaagcgccacttcatccaggacacctgtctctatgagtgctcacccaacctggggccctggatccagcaggtgaatcagagctggcgcaaagaacgcttcctggatgtgcccttatgcaaagaggactgtcagcgctggtgggaggattgtcacacctcccacacgtgcaagagcaactggcacagaggatgggactggacctcaggagttaacaagtgcccagctggggctctctgccgcacctt

SEQ ID NO: 134918 - DNA, 1126 bp, Homo sapiens
  Payload ID: 6345
  Gene Symbol: FOLR2
  Gene Name: folate receptor 2 (fetal)
  ENST ID: ENST00000619261
  CDS Start-End: 125-859
atttcactcagtgcttaccagagcgcgttgtctaccctgtaccgaagacagaggctgtggggacagcctaggggcctggatctattgcctacttagagagaggccaactcagacacagccgtgtatgctcccagcagcaacggaggttcagctccgcctgcagggacagaaagacatggtctggaaatggatgccacttctgctgcttctggtctgtgtagccaccatgtgcagtgcccaggacaggactgatctcctcaatgtctgtatggatgccaagcaccacaagacaaagccaggtcctgaggacaagctgcatgaccaatgcagtccctggaagaagaatgcctgctgcacagccagcaccagccaggagctgcacaaggacacctcccgcctgtacaactttaactgggaccactgcggcaagatggagcccgcctgcagcgccacttcatccaggacacctgtctctatgagtgctcaccaacctggggccctggatccagcagggatcagagctggcgcaaagaacgcttcctggatgtgcccttatgcaaagaggactgtcagcgctggtgggaggattgtcacacctcccacacgtgcaagagcaactggcacagaggatgggactggacctcaggagttaacaagtgcccagctggggctctctgccgcacctttgagtcctacttccccactccagctgccctttgtgaaggcctctggagtcactcatacaaggtcagcaactacagccgagggagcggccgctgcatccagatgtggtttgattcagcccagggcaaccccaacgaggaagtggcgaggttctatgctgcagccatgcatgtgaatgctggtgagatgcttcatgggactgggggtctcctgctcagtctggccctgatgctgcaactctggctccttggctgagttcagtcctcccagactacctgccctcagcttggataaccaggctgggctcagctcagctcccacaaatgacagccccttaagcatgcttctattagtcacctaaccctctgtcacccagtctgttgctgctccatggtggggccaagagtcacttctaataaacagactgttttctaataattcc

SEQ ID NO: 134919 - DNA, 805 bp, Homo sapiens
  Payload ID: 6346
  Gene Symbol: FOLR3
  Gene Name: folate receptor 3 (gamma)
  Uniprot ID: P41439
  ENST ID: ENST00000442948
  CDS Start-End: 17-331
gcaggaatagatggacatggcctggcagatgatgcagctgctgcttctggctttggtgactgctgcggggagtgcccagcccaggagtgcgcgggccaggacggacctgctcaatgtctgcatgaacgccaagcaccacaagacacagcccagccccgaggacgagctgtatggccagtgcagtccctggaagaagaatgcctgctgcacggccagcaccagccaggagctgcacaaggacacctcccgcctgtacaactttaactgggatcactgtggtaagatggaacccacctgcaagcgccactttatccaggacagctgtctctgagtgctcacccaacctggggccctggatccggcaggtcaaccagagctggcgcaaagagcgcattctgaacgtgcccctgtgcaaagaggactgtgagcgctggtgggaggactgtcgcacctcctacacctgcaaaagcaactggcacaaaggctggaattggacctcagggattaatgagtgtccggccggggccctctgcagcacctttgagtcctacttccccactccagccgccctttgtgaaggcctctggagccactccttcaaggtcagcaactatagtcgagggagcggccgctgcatccagatgtggtttgactcagcccagggcaaccccaatgaggaggtggccaagttctatgctgcggccatgaatgctggggccccgtctcgtgggattattgattcctgatccaagaagggtcctctggggttcttccaacaacctattctaatagacaaatccacatg

SEQ ID NO: 134920 - DNA, 335 bp, Homo sapiens
  Payload ID: 6346
  Gene Symbol: FOLR3
  Gene Name: folate receptor 3 (gamma)
  ENST ID: ENST00000546166
  CDS Start-End: 112-335
acagcagagatctgggcctgggagggagagagtacacaatcacatggctgttgcccctgtctcaggccttgtctacctctgactgtggctctctggcaggaatagatggacatggcctggcagatgatgcagctgctgcttctggctttggtgactgctgcggggagtgcccagcccaggagtgcgcgggccaggacggacctgctcaatgtctgcatgaacgccaagcaccacaagacacagcccagccccgaggacgagctgtatggccagtgcagtccctggaagaagaatgcctgctgcacggccagcaccagccaggagctgcacaagga

SEQ ID NO: 134921 - DNA, 992 bp, Homo sapiens
  Payload ID: 6346
  Gene Symbol: FOLR3
  Gene Name: folate receptor 3 (gamma)
  ENST ID: ENST00000612844
  CDS Start-End: 66-584
gagcaagctggtgtcagagcctggacctacagcgctgttggtggaggtcctgcctccaggaatagatggacatggcctggcagatgatgcagctgctgcttctggctttggtgactgctgcggggagtgcccagcccaggagtgcgcgggccaggacggacctgctcaatgtctgcatgaacgccaagcaccacaagacacagcccagccccgaggacgagctgtatggccaggtgggagctcctcaagggccctccccaggaagtgttcctctggatgacctacctggggcagaggagccagaatatggaggagatggctgtggtggggagagacttagtcctgtgtcttccccacccagtgcagtccctggaagaagaatgcctgctgcacggccagcaccagccaggagctgcacaaggacacctcccgcctgtacaactttaactgggatcactgtggtaagatggaacccacctgcaagcgccactttatccaggacagctgtctctatgagtgctcacccaacctggggccctggatccggcaggtcaaccagagctggcgcaaagagcgcattctgaacgtgcccctgtgcaaagaggactgtgagcgctggtgggaggactgtcgcacctcctacacctgcaaaagcaactggcacaaaggctggaattggacctcagggattaatgagtgtccggccggggccctctgcagcacctttgagtcctacttccccactccagccgccctttgtgaaggcctctggagccactccttcaaggtcagcaactatagtcgagggagcggccgctgcatccagatgtggtttgactcagcccagggcaaccccaatgaggaggtggccaagttctatgctgcggccatgaatgctggggccccgtctcgtgggattattgattcctgatccaagaagggtcctctggggttcttccaacaacctattctaatagacaaatccacatgtg

SEQ ID NO: 134922 - DNA, 820 bp, Homo sapiens
  Payload ID: 6346
  Gene Symbol: FOLR3
  Gene Name: folate receptor 3 (gamma)
  ENST ID: ENST00000611028
  CDS Start-End: 24-761
ggaggtcctgcctccaggaatagatggacatggcctggcagatgatgcagctgctgcttctggctttggtgactgctgcggggagtgcccagcccaggagtgcgcgggccaggacggacctgctcaatgtctgcatgaacgccaagcaccacaagacacagcccagccccgaggacgagctgtatggccagtgcagtccctggaagaagaatgcctgctgcacggccagcaccagccaggagctgcacaaggacacctcccgcctgtacaactttaactgggatcactgtggtaagatggaacccacctgcaagcgccactttatccaggacagctgtctctatgagtgctcacccaacctggggccctggatccggcaggtcaaccagagctggcgcaaagagcgcattctgaacgtgcccctgtgcaaagaggactgtgagcgctggtgggaggactgtcgcacctcctacacctgcaaaagcaactggcacaaaggctggaattggacctcagggattaatgagtgtccggccggggccctctgcagcacctttgagtcctacttccccactccagccgccctttgtgaaggcctctggagccactccttcaaggtcagcaactatagtcgagggagcggccgctgcatccagatgtggtttgactcagcccagggcaaccccaatgaggaggtggccaagttctatgctgcggccatgaatgctggggccccgtctcgtgggattattgattcctgatccaagaagggtcctctggggttcttccaacaacctattctaatagacaaatccacatg

SEQ ID NO: 134923 - DNA, 749 bp, Homo sapiens
  Payload ID: 6346
  Gene Symbol: FOLR3
  Gene Name: folate receptor 3 (gamma)
  ENST ID: ENST00000622388
  CDS Start-End: 215-749
aggaaaagcagcaaaccagatggagaaggaaggccaaaaagataagtagaaagctggaccatgagctccttgagggcagggactgaatggttactatgtccccagggcccagcatgaccttctcctggattcctcatcttccttctgtgacctgtgtctccatcagtttctcctccggcatctttttcttacaggattcttacctcaggaatagatggacatggcctggcagatgatgcagctgctgcttctggctttggtgactgctgcggggagtgcccagcccaggagtgcgcgggccaggacggacctgctcaatgtctgcatgaacgccaagcaccacaagacacagcccagccccgaggacgagctgtatggccagtgcagtccctggaagaagaatgcctgctgcacggccagcaccagccaggagctgcacaaggacacctcccgcctgtacaactttaactgggatcactgtggtaagatggaacccacctgcaagcgccactttatccaggacagctgtctctatgagtgctcacccaacctggggccctggatccggcaggtcaaccagagctggcgcaaagagcgcattctgaacgtgcccctgtgcaaagaggactgtgagcgctggtgggaggactgtcgcacctcctacacctgcaaaagcaactggcacaaaggctggaattggacctcagggattaatgagtgtccggccggggccctctgcagcacctttg

SEQ ID NO: 134924 - DNA, 2176 bp, Homo sapiens
  Payload ID: 6347
  Gene Symbol: FSHR
  Gene Name: follicle stimulating hormone receptor
  Uniprot ID: P23945
  ENST ID: ENST00000304421
  CDS Start-End: 65-2074
ctgagatctgtggaggtttttctctgcaaatgcaggaagaaatcaggtggatggatgcataattatggccctgctcctggtctctttgctggcattcctgagcttgggctcaggatgtcatcatcggatctgtcactgctctaacagggtttttctctgccaagagagcaaggtgacagagattccttctgacctcccgaggaatgccattgaactgaggtttgtcctcaccaagcttcgagtcatccaaaaaggtgcattttcaggatttggggacctggagaaaatagagatctctcagaatgatgtcttggaggtgatagaggcagatgtgttctccaaccttcccaaattacatgaaattagaattgaaaaggccaacaacctgctctacatcaaccctgaggccttccagaaccttcccaaccttcaatatctgttaatatccaacacaggtattaagcaccttccagatgttcacaagattcattctctccaaaaagttttactatggctgaataagaatgggattcaagaaatacacaactgtgcattcaatggaacccaactagatgagctgaatctaagcgataataataatttagaagaattgcctaatgatgttttccacggagcctctggaccagtcattctagatatttcaagaacaaggatccattccctgcctagctatggcttagaaaatcttaagaagctgagggccaggtcgacttacaacttaaaaaagctgcctactctggaaaagcttgtcgccctcatggaagccagcctcacctatcccagccattgctgtgcctttgcaaactggagacggcaaatctctgagcttcatccaatttgcaacaaatctattttaaggcaagaagttgattatatgactcaggctaggggtcagagatcctctctggcagaagacaatgagtccagctacagcagaggatttgacatgacgtacactgagtttgactatgacttatgcaatgaagtggttgacgtgacctgctcccctaagccagatgcattcaacccatgtgaagatatcatggggtacaacatcctcagagtcctgatatggtttatcagcatcctggccatcactgggaacatcatagtgctagtgatcctaactaccagccaatataaactcacagtccccaggttccttatgtgcaacctggcctttgctgatctctgcattggaatctacctgctgctcattgcatcagttgatatccataccaagagccaatatcacaactatgccattgactggcaaactggggcaggctgtgatgctgctggctttttcactgtctttgccagtgagctgtcagtctacactctgacagctatcaccttggaaagatggcataccatcacgcatgccatgcagctggactgcaaggtgcagctccgccatgctgccagtgtcatggtgatgggctggatttttgcttttgcagctgccctctttcccatctttggcatcagcagctacatgaaggtgagcatctgcctgcccatggatattgacagccctttgtcacagctgtatgtcatgtccctccttgtgctcaatgtcctggcctttgtggtcatctgtggctgctatatccacatctacctcacagtgcggaaccccaacatcgtgtcctcctctagtgacaccaggatcgccaagcgcatggccatgctcatcttcactgacttcctctgcatggcacccatttctttctttgccatttctgcctccctcaaggtgcccctcatcactgtgtccaaagcaaagattctgctggttctgtttcaccccatcaactcctgtgccaaccccttcctctatgccatctttaccaaaaactttcgcagagatttcttcattctgctgagcaagtgtggctgctatgaaatgcaagcccaaatttataggacagaaacttcatccactgtccacaacacccatccaaggaatggccactgctcttcagctcccagagtcaccagtggttccacttacatacttgtccctctaagtcatttagcccaaaactaaaacacaatgtgaaaatgtatctgagtattgaatgataattcagtcttgcctttgaagggtatgtcacaaagagctgacagtgcttctacacatttcatctaa

SEQ ID NO: 134925 - DNA, 2784 bp, Homo sapiens
  Payload ID: 6347
  Gene Symbol: FSHR
  Gene Name: follicle stimulating hormone receptor
  ENST ID: ENST00000406846
  CDS Start-End: 121-2208
tgaccctaccagttctcaagtcagatctcttctcataagggcactgtgtggagcttctgagatctgtggaggtttttctctgcaaatgcaggaagaaatcaggtggatggatgcataattatggccctgctcctggtctctttgctggcattcctgagcttgggctcaggatgtcatcatcggatctgtcactgctctaacagggtttttctctgccaagagagcaaggtgacagagattccttctgacctcccgaggaatgccattgaactgaggtttgtcctcaccaagcttcgagtcatccaaaaaggtgcattttcaggatttggggacctggagaaaatagagatctctcagaatgatgtcttggaggtgatagaggcagatgtgttctccaaccttcccaaattacatgaaattagaattgaaaaggccaacaacctgctctacatcaaccctgaggccttccagaaccttcccaaccttcaatatctgttaatatccaacacaggtattaagcaccttccagatgttcacaagattcattctctccaaaaagttttacttgacattcaagataacataaacatccacacaattgaaagaaattctttcgtggggctgagctttgaaagtgtgattctatggctgaataagaatgggattcaagaaatacacaactgtgcattcaatggaacccaactagatgagctgaatctaagcgataataataatttagaagaattgcctaatgatgttttccacggagcctctggaccagtcattctagatatttcaagaacaaggatccattccctgcctagctatggcttagaaaatcttaagaagctgagggccaggtcgacttacaacttaaaaaagctgcctactctggaaaagcttgtcgccctcatggaagccagcctcacctatcccagccattgctgtgcctttgcaaactggagacggcaaatctctgagcttcatccaatttgcaacaaatctattttaaggcaagaagttgattatatgactcaggctaggggtcagagatcctctctggcagaagacaatgagtccagctacagcagaggatttgacatgacgtacactgagtttgactatgacttatgcaatgaagtggttgacgtgacctgctcccctaagccagatgcattcaacccatgtgaagatatcatggggtacaacatcctcagagtcctgatatggtttatcagcatcctggccatcactgggaacatcatagtgctagtgatcctaactaccagccaatataaactcacagtccccaggttccttatgtgcaacctggcctttgctgatctctgcattggaatctacctgctgctcattgcatcagttgatatccataccaagagccaatatcacaactatgccattgactggcaaactggggcaggctgtgatgctgctggctttttcactgtctttgccagtgagctgtcagtctacactctgacagctatcaccttggaaagatggcataccatcacgcatgccatgcagctggactgcaaggtgcagctccgccatgctgccagtgtcatggtgatgggctggatttttgcttttgcagctgccctctttcccatctttggcatcagcagctacatgaaggtgagcatctgcctgcccatggatattgacagccctttgtcacagctgtatgtcatgtccctccttgtgctcaatgtcctggcctttgtggtcatctgtggctgctatatccacatctacctcacagtgcggaaccccaacatcgtgtcctcctctagtgacaccaggatcgccaagcgcatggccatgctcatcttcactgacttcctctgcatggcacccatttctttctttgccatttctgcctccctcaaggtgcccctcatcactgtgtccaaagcaaagattctgctggttctgtttcaccccatcaactcctgtgccaaccccttcctctatgccatctttaccaaaaactttcgcagagatttcttcattctgctgagcaagtgtggctgctatgaaatgcaagcccaaatttataggacagaaacttcatccactgtccacaacacccatccaaggaatggccactgctcttcagctcccagagtcaccagtggttccacttacatacttgtccctctaagtcatttagcccaaaactaaaacacaatgtgaaaatgtatctgagtattgaatgataattcagtcttgcctttgaagggtatgtcacaaagagctgacagtgcttctacacatttcatctaatttaatattcctggcatacctttaaggtaaattggtcaggaactattaattccatgtgatacattaggaagctgaattattagtaacaacaataataattaaagaatgcaatactgtattacatattttatccttatatatgttatttttgcacgttatgttcaaagtgcttttgttcagatatctcaagtgatccctgttaaataagcaggacagggattattcttggagttttacaaatgaggaaaccacgactcaaagagttaagtgacttgttcaaaattgtttagtttgtaagaggcagagccaggattaggtattccgactcccagagaatttcccagagaagcaccatggtattcattcattcattcattcaacaaatattaattgaacacccatctgaagcctttgtaatgcgtcagtgtggataggctgaaatacatttcccagatttcccttcctcatgtgttt

SEQ ID NO: 134926 - DNA, 936 bp, Homo sapiens
  Payload ID: 6347
  Gene Symbol: FSHR
  Gene Name: follicle stimulating hormone receptor
  ENST ID: ENST00000419927
  CDS Start-End: 111-569
agttctcaagtcagatctcttctcataagggcactgtgtggagcttctgagatctgtggaggtttttctctgcaaatgcaggaagaaatcaggtggatggatgcataattatggccctgctcctggtctctttgctggcattcctgagcttgggctcaggatgtcatcatcggatctgtcactgctctaacagggtttttctctgccaagagagcaaggtgacagagattccttctgacctcccgaggaatgccattgaactgaggtttgtcctcaccaagcttcgagtcatccaaaaaggtgcattttcaggatttggggacctggagaaaatagagatctctcagaatgatgtcttggaggtgatagaggcagatgtgttctccaaccttcccaaattacatgaaattagaattgaaaaggccaacaacctgctctacatcaaccctgaggccttccagaaccttcccaaccttcaatatctatccttctcttcttttgttttggagaatgccaaagtggaaaatggggatcatagagccttcagtgacagaacaaatgctctctaggacatgaagaggcatccccagagacactttcattcataaactatcacatatggctaatgcaaagcactcctgccaaggacaaacccaagaagaaaaccagctcttcacatagatatccctagcccatgataataatagcatatctgaaaatgcggattggaaacaggttaatatccaacacaggtattaagcaccttccagatgttcacaagattcattctctccaaaaagttttacttgacattcaagataacataaacatccacacaattgaaagaaattctttcgtggggctgagctttgaaagtgtgattctatggctgaataagaatgggattcaagaaatacacaactgtgcattcaatgg

SEQ ID NO: 134927 - DNA, 851 bp, Homo sapiens
  Payload ID: 6347
  Gene Symbol: FSHR
  Gene Name: follicle stimulating hormone receptor
  ENST ID: ENST00000454032
  CDS Start-End: 17-851
ggatggatgcataattatggccctgctcctggtctctttgctggcattcctgagcttgggctcaggatgtcatcatcggatctgtcactgctctaacagggtttttctctgccaagagagcaaggtgacagagattccttctgacctcccgaggaatgccattgaactgaggtttgtcctcaccaagcttcgagtcatccaaaaaggtgcattttcaggatttggggacctggagaaaatagagatctctcagaatgatgtcttggaggtgatagaggcagatgtgttctccaaccttcccaaattacatgaaattagaattgaaaaggccaacaacctgctctacatcaaccctgaggccttccagaaccttcccaaccttcaatatctgttaatatccaacacaggtattaagcaccttccagatgttcacaagattcattctctccaaaaagttttacttgacattcaagataacataaacatccacacaattgaaagaaattctttcgtggggctgagctttgaaagtgtgattctatggctgaataagaatgggattcaagaaatacacaactgtgcattcaatggaacccaactagatgagctgaatctaagcgataataataatttagaagaattgcctaatgatgttttccacggagcctctggaccagtcattctctctgagcttcatccaatttgcaacaaatctattttaaggcaagaagttgattatatgactcaggctaggggtcagagatcctctctggcagaagacaatgagtccagctacagcagaggatttgacatgacgtacactgagtttgactatgacttatgcaatgaag

SEQ ID NO: 134928 - DNA, 1698 bp, Homo sapiens
  Payload ID: 6348
  Gene Symbol: FSHB
  Gene Name: follicle stimulating hormone, beta polypeptide
  Uniprot ID: P01225
  ENST ID: ENST00000254122
  CDS Start-End: 70-459
acagctcttgccaggcaaggcagccgaccacaggtgagtcttggcatctaccgttttcaagtgaccaggatgaagacactccagtttttcttccttttctgttgctggaaagcaatctgctgcaatagctgtgagctgaccaacatcaccattgcaatagagaaagaagaatgtcgtttctgcataagcatcaacaccacttggtgtgctggctactgctacaccagggatctggtgtataaggacccagccaggcccaaaatccagaaaacatgtaccttcaaggaactggtatacgaaacagtgagagtgcccggctgtgctcaccatgcagattccttgtatacatacccagtggccacccagtgtcactgtggcaagtgtgacagcgacagcactgattgtactgtgcgaggcctggggcccagctactgctcctttggtgaaatgaaagaataaagatcagtggacatttcaggccacatacccttgtcctgaaggaccaagatattcaaaaagtctgtgtgtgtgcaatgtgcccaggggacaaaccactggatcaggggattcagactctactgatccctggtctactggcagagggaactctgggaattgagagtgctgggggccaggactccatcatgattcagctctatattcctaggtctgatttcataaggtttattcagtcttaactcacagacttgtgcctggtttcttctttaaaaatcttagaaatcttctcaggcaatgcctctctcttagggggaaacataagcctagaaggaggaagcagtaatgggagtgagtgaaagaactaactgcagcagtcttctggtagactcttgggccctctagagcaaggtcagcatcttcagcattgtagcgtcaatgcctagcactctgcctggaacttagaaacacaacaatgacttctttagatcagaaaggtcaagggtagaaaatactggaagacgatgtttgaggtaagctgatgaggctgcccgcagccacaccagtcccatgaaagttagtggcatcagttccacctcgccttttctccagcacatggagtattgagacatgatgtatctttctgaattgtttggtacagatggggagtaacagagctcaagatttccaagctattactaccaagcctgttagttaagggcaaaggcaagaaattgtaatttggggctgtggaaattagcctgcctctattcattacttaaacaaattgatcacatgctactaggctcctgcaaaactcctttttgagataaagggaaaaaaccaaactatctcaccctaccctccctaggatccacttctttggaatgacaaaggatttgaaagtaggtttgaaagcagtttcagcaatttaataaatataattaatttgtctacaaatatatttgtataaataaatagctcctttagaaagaattagccatgggggacgaggggaaactgctgttttctaggatcctgtctacatcaatcttctattttatccatccatgttctcccaaatctgtgctttctttcaacaggttatatattaaaactatttcatgagttgatttcttttaaacgtgttaactgtcttagttatgcactcagtttcacactcatattgtttaactaatttatttaaatcttatttttttaataaagatgctagccaccaga

SEQ ID NO: 134929 - DNA, 1890 bp, Homo sapiens
  Payload ID: 6348
  Gene Symbol: FSHB
  Gene Name: follicle stimulating hormone, beta polypeptide
  Uniprot ID: P01225
  ENST ID: ENST00000417547
  CDS Start-End: 40-429
acagctcttgccaggcaaggcagccgaccacagaccaggatgaagacactccagtttttcttccttttctgttgctggaaagcaatctgctgcaatagctgtgagctgaccaacatcaccattgcaatagagaaagaagaatgtcgtttctgcataagcatcaacaccacttggtgtgctggctactgctacaccagggatctggtgtataaggacccagccaggcccaaaatccagaaaacatgtaccttcaaggaactggtatacgaaacagtgagagtgcccggctgtgctcaccatgcagattccttgtatacatacccagtggccacccagtgtcactgtggcaagtgtgacagcgacagcactgattgtactgtgcgaggcctggggcccagctactgctcctttggtgaaatgaaagaataaagatcagtggacatttcaggccacatacccttgtcctgaaggaccaagatattcaaaaagtctgtgtgtgtgcaatgtgcccaggggacaaaccactggatcaggggattcagactctactgatccctggtctactggcagagggaactctgggaattgagagtgctgggggccaggactccatcatgattcagctctatattcctaggtctgatttcataaggtttattcagtcttaactcacagacttgtgcctggtttcttctttaaaaatcttagaaatcttctcaggcaatgcctctctcttagggggaaacataagcctagaaggaggaagcagtaatgggagtgagtgaaagaactaactgcagcagtcttctggtagactcttgggccctctagagcaaggtcagcatcttcagcattgtagcgtcaatgcctagcactctgcctggaacttagaaacacaacaatgacttctttagatcagaaaggtcaagggtagaaaatactggaagacgatgtttgaggtaagctgatgaggctgcccgcagccacaccagtcccatgaaagttagtggcatcagttccacctcgccttttctccagcacatggagtattgagacatgatgtatctttctgaattgtttggtacagatggggagtaacagagctcaagatttccaagctattactaccaagcctgttagttaagggcaaaggcaagaaattgtaatttggggctgtggaaattagcctgcctctattcattacttaaacaaattgatcacatgctactaggctcctgcaaaactcctttttgagataaagggaaaaaaccaaactatctcaccctaccctccctaggatccacttctttggaatgacaaaggatttgaaagtaggtttgaaagcagtttcagcaatttaataaatataattaatttgtctacaaatatatttgtataaataaatagctcctttagaaagaattagccatgggggacgaggggaaactgctgttttctaggatcctgtctacatcaatcttctattttatccatccatgttctcccaaatctgtgctttctttcaacaggttatatattaaaactatttcatgagttgatttcttttaaacgtgttaactgtcttagttatgcactcagtttcacactcatattgtttaactaatttatttaaatcttatttttttaataaagatgctagccaccagagtcacaggcttggattgttttatgtacaaacagatgacttagatattctgtattttataatattagtggaatgaaatcttaaaatataattcccagtgtttctataaatattacctttccttatctttggagatattaaaaataattttgttggatttctgaagtgttttgtcacttaaatttcctgtcattttttgaagacattttctgatgtaatttggg

SEQ ID NO: 134930 - DNA, 1368 bp, Homo sapiens
  Payload ID: 6348
  Gene Symbol: FSHB
  Gene Name: follicle stimulating hormone, beta polypeptide
  Uniprot ID: P01225
  ENST ID: ENST00000533718
  CDS Start-End: 31-420
tgggcttcattgtttgcttcccagaccaggatgaagacactccagtttttcttccttttctgttgctggaaagcaatctgctgcaatagctgtgagctgaccaacatcaccattgcaatagagaaagaagaatgtcgtttctgcataagcatcaacaccacttggtgtgctggctactgctacaccagggatctggtgtataaggacccagccaggcccaaaatccagaaaacatgtaccttcaaggaactggtatacgaaacagtgagagtgcccggctgtgctcaccatgcagattccttgtatacatacccagtggccacccagtgtcactgtggcaagtgtgacagcgacagcactgattgtactgtgcgaggcctggggcccagctactgctcctttggtgaaatgaaagaataaagatcagtggacatttcaggccacatacccttgtcctgaaggaccaagatattcaaaaagtctgtgtgtgtgcaatgtgcccaggggacaaaccactggatcaggggattcagactctactgatccctggtctactggcagagggaactctgggaattgagagtgctgggggccaggactccatcatgattcagctctatattcctaggtctgatttcataaggtttattcagtcttaactcacagacttgtgcctggtttcttctttaaaaatcttagaaatcttctcaggcaatgcctctctcttagggggaaacataagcctagaaggaggaagcagtaatgggagtgagtgaaagaactaactgcagcagtcttctggtagactcttgggccctctagagcaaggtcagcatcttcagcattgtagcgtcaatgcctagcactctgcctggaacttagaaacacaacaatgacttctttagatcagaaaggtcaagggtagaaaatactggaagacgatgtttgaggtaagctgatgaggctgcccgcagccacaccagtcccatgaaagttagtggcatcagttccacctcgccttttctccagcacatggagtattgagacatgatgtatctttctgaattgtttggtacagatggggagtaacagagctcaagatttccaagctattactaccaagcctgttagttaagggcaaaggcaagaaattgtaatttggggctgtggaaattagcctgcctctattcattacttaaacaaattgatcacatgctactaggctcctgcaaaactcctttttgagataaagggaaaaaaccaaactatctcaccctaccctccctaggatccacttctttggaatgacaaaggatttgaaagtaggtttgaaagcagtttcagcaatttaataaatataattaattt

SEQ ID NO: 134931 - DNA, 566 bp, Homo sapiens
  Payload ID: 6349
  Gene Symbol: FDCSP
  Gene Name: follicular dendritic cell secreted protein
  Uniprot ID: Q8NFU4
  ENST ID: ENST00000317987
  CDS Start-End: 113-370
ctccattccattatacctttgagtatataaaacagctacaatattccagggccagtcacttgccatttctcataacagcgtcagagagaaagaactgactgaaacgtttgagatgaagaaagttctcctcctgatcacagccatcttggcagtggctgttggtttcccagtctctcaagaccaggaacgagaaaaaagaagtatcagtgacagcgatgaattagcttcagggttttttgtgttcccttacccatatccatttcgcccacttccaccaattccatttccaagatttccatggtttagacgtaattttcctattccaatacctgaatctgcccctacaactccccttcctagcgaaaagtaaacaagaaggaaaagtcacgataaacctggtcacctgaaattgaaattgagccacttccttgaagaatcaaaattcctgttaataaaagaaaaacaaatgtaattgaaatagcacacagcattctctagtcaatatctttagtgatcttctttaataaacttgaaagcaaagattttggtttcttaatttccacaaa

SEQ ID NO: 134932 - DNA, 3638 bp, Homo sapiens
  Payload ID: 6350
  Gene Symbol: FLCN
  Gene Name: folliculin
  Uniprot ID: Q8NFG4
  ENST ID: ENST00000285071
  CDS Start-End: 456-2195
ggtcgctcctggttctgccagctcccctgagagcctgaacccgggcttgagagcctcgccaccccgggtgacatccctgccgtgggcttgggggctctgggtgtgattccgccggtccgggtcccgcagcgaccacctacccagcgcagtcaggggcggggctgggacccagagcgggaccccggctgccgagtccaggtgtcccgcgggcctcgatttggggagcagaaaacgccaggtcttcaagggtgtctgccaccaccatgcctgacccatttggcagcagcctcgtgtgtggtggtctggtgtggacggtggaagcgtgattctgctgagtgtcagtgtgaccactcgtgctcagccgtatctcagcaggaggacaggtgccggagcagctcgtgcagctaagcagccaactgcagaaacgtcaggcctgttgcagtctccaaggcaccatgaatgccatcgtggctctctgccacttctgcgagctccacggcccccgcactctcttctgcacggaggtgctgcacgccccacttcctcaaggggatgggaatgaggacagtcctggccagggtgagcaggcggaagaagaggaaggtggcattcagatgaacagtcggatgcgtgcgcacagccccgcagagggggccagcgtcgagtccagcagcccggggcccaaaaagtcggacatgtgcgagggctgccggtcacttgctgcagggcacccgggatatatcagccatgataaagagacctccattaaatacgtcagccaccagcaccccagccacccccagctcttcagcattgtccgccaggcctgtgtccggagcctgagctgtgaggtctgccctggccgtgaaggccccatcttcttcggagatgagcagcacggctttgtgttcagccacaccttcttcatcaaggacagcctggccaggggcttccagcgctggtacagcatcatcaccatcatgatggaccggatctacctcatcaactcctggcccttcctgctggggaaggtccggggaatcatcgatgagctccagggcaaggcgctcaaggtgtttgaggcagagcagtttggatgcccacagcgtgctcagaggatgaacacagccttcacgccattcctacaccagaggaacggcaacgccgcccgctcgctgacatcgctgacaagtgatgacaacctgtgggcgtgcctgcacacctcctttgcctggctcctgaaggcgtgtggcagccggctgaccgagaagctcctggaaggtgctccgaccgaggataccttggtccagatggagaagctcgctgatttagaagaggaatcagaaagctgggacaactctgaggctgaagaggaggagaaagcccctgtgttgccagagagtacagaagggcgggagctgacccagggcccggcagagtcctcctctctctcaggctgtgggagctggcagccccggaagctgccagtcttcaagtccctccggcacatgaggcaggtcctgggtgccccttctttccgcatgctggcctggcacgttctcatggggaaccaggtgatctggaaaagcagagacgtggacctcgtccagtcagcttttgaagtacttcggaccatgcttcccgtgggctgcgtccgcatcatcccatacagcagccagtacgaggaggcctatcggtgcaacttcctggggctcagcccgcacgtgcagatccccccccacgtgctctcctcagagtttgctgtcatcgtggaggtccacgcagccgcacgttccaccctccaccctgtggggtgtgaggatgaccagtctctcagcaagtacgagtttgtggtgaccagtgggagccctgtagctgcagaccgagtgggccccaccatcctgaataagattgaagcggctctgaccaaccagaacctgtctgtggatgtggtggaccagtgcctcgtctgcctcaaggaggagtggatgaacaaagtgaaggtgctttttaagttcaccaaggtggacagtcgacccaaagaggacacacagaagctgctgagcatcctgggtgcgtccgaggaggacaatgtcaagctgctgaagttctggatgactggcctgagcaagacctacaagtcacacctcatgtccacggtccgcagccccacagcctcggagtctcggaactgacccgtcacacacacctgcctaaagacagggatggctgtccacaggatcctccagccccgtgagagggactgtcccttgagtttctcaactgctggaaggagctgtgtcccagcaaggaagggaaaccatcagggctgggctcggccctgtcaggtttggggcctgtgtgcttcccagactctccctccagccgttggaatcgctgaagatggcaatgaaaggcggagggatgatgggctctctctgtgttcaaactccttggagagacgactaggaggacagcttgcctcccaggccccttgtggacttagactcaaaacccgcaggagaaacaggtccgactcagtatgcagtcgcaataacatgtctgctcccgaggttaacattcaagcgtttctactttgaaattcagcaagagtttctgggccttatgtttgagggtaccttttgctgcagttgtgaatattcagtacattgccagctcttggtcactgagtgattgagttagggctccgcaagagactttggggagtgaagtggatctcttcctcatcttttggtcctctgaaatgtgtgttctgaagccatggggctcgtcttctggggtgttcccctgcaggtgctggtgaaggtaacctggggcttaatgatggagtccctgatcatttttgcacaagacaggttgctgaggggtcggcaagcatctgacttgcccaatcccctggatatggtgagccccgccatgcttttattctgtatcgcttttgtctttattgctgctttcaacatttacgtttggttacagttaactattttcggagtgtggtgattgaagacaatttcatcatcccactgtacttttttttttgagagggagtttcactcttgttgcccaggctggagtgcaatggcacgatcttggctcactgcaacctctgcctcctgggttcaagcaattctcctgcctcagcctccagagtagctggaactacaggtgcccgccactatgcccagctaatttttgtattttttagtagagacggggtttcaccgtgttggccgggctggtctcaaactcctgacctcaggtgatccacccacctcagcctcccaaagtgctgggattacaagcgtgagccactgtgcctggcccttttttttttttttttttttttttttaaagagatggcatcttgctatgtcgtccaggctggtcttgaactcctgagttcaagcagtcctcctgcttcaacatacagctacaggtaccccccactatacatttttaataaggattcatggctcagagggattttctgatggttttgctgatttgtttctagtttttttgtgtttatatttaacatgaagaccaagtttatataactaggtatctgtataatgcaacaacattggaacacaataaagatgtatttttgtaaa

SEQ ID NO: 134933 - DNA, 1692 bp, Homo sapiens
  Payload ID: 6350
  Gene Symbol: FLCN
  Gene Name: folliculin
  Uniprot ID: Q8NFG4
  ENST ID: ENST00000389169
  CDS Start-End: 456-1484
ggtcgctcctggttctgccagctcccctgagagcctgaacccgggcttgagagcctcgccaccccgggtgacatccctgccgtgggcttgggggctctgggtgtgattccgccggtccgggtcccgcagcgaccacctacccagcgcagtcaggggcggggctgggacccagagcgggaccccggctgccgagtccaggtgtcccgcgggcctcgatttggggagcagaaaacgccaggtcttcaagggtgtctgccaccaccatgcctgacccatttggcagcagcctcgtgtgtggtggtctggtgtggacggtggaagcgtgattctgctgagtgtcagtgtgaccactcgtgctcagccgtatctcagcaggaggacaggtgccggagcagctcgtgcagctaagcagccaactgcagaaacgtcaggcctgttgcagtctccaaggcaccatgaatgccatcgtggctctctgccacttctgcgagctccacggcccccgcactctcttctgcacggaggtgctgcacgccccacttcctcaaggggatgggaatgaggacagtcctggccagggtgagcaggcggaagaagaggaaggtggcattcagatgaacagtcggatgcgtgcgcacagccccgcagagggggccagcgtcgagtccagcagcccggggcccaaaaagtcggacatgtgcgagggctgccggtcacttgctgcagggcacccgggatatatcagccatgataaagagacctccattaaatacgtcagccaccagcaccccagccacccccagctcttcagcattgtccgccaggcctgtgtccggagcctgagctgtgaggtctgccctggccgtgaaggccccatcttcttcggagatgagcagcacggctttgtgttcagccacaccttcttcatcaaggacagcctggccaggggcttccagcgctggtacagcatcatcaccatcatgatggaccggatctacctcatcaactcctggcccttcctgctggggaaggtccggggaatcatcgatgagctccagggcaaggcgctcaaggtgtttgaggcagagcagtttggatgcccacagcgtgctcagaggatgaacacagccttcacgccattcctacaccagaggaacggcaacgccgcccgctcgctgacatcgctgacaagtgatgacaacctgtgggcgtgcctgcacacctcctttgcctggctcctgaaggcgtgtggcagccggctgaccgagaagctcctggaaggtgctccgaccgaggataccttggtccagatggagaagctcgctggtgaggcaggggtgctgttgccggggccttggcccggatggccgtggggcggtaccagctgtctgctctcctggcaggaatcgctgagggagggaaacgcggctctgaatcagcccagaacgagccttcgggaagctcaccctccgatctcggtgtgattgttgtgattgttgtgatttcctgtctcgtttgccttgaccgccatgtgaaagaatctgttccccagctaggtggggaaaattcacaggtgggctgtctgtagagagaactggctgattaaaggcttctcgtcccgattttgtgatagccaagtgcttggcctggtcgacggtctttgctcctttacaaataaagtgttctgtttca

SEQ ID NO: 134934 - DNA, 757 bp, Homo sapiens
  Payload ID: 6350
  Gene Symbol: FLCN
  Gene Name: folliculin
  ENST ID: ENST00000417064
  CDS Start-End: 299-757
cgcgcctgggtgtcggcggggctgcgggaccgcgagtgagtgtggtcgctcctggttctgccagctcccctgagagcctgaacccgggcttgagagcctcgccaccccgggtgacatccctgccgtgggcttgggggctctgggtgtgattccgccggtccgggtcccgcagcgaccacctacccagcgcagtcaggggcggggctgggacccagagcgggaccccggctgccgagtccaggtgtcccgcgggcctcgatttggggagcaggcggaagaagaggaaggtggcattcagatgaacagtcggatgcgtgcgcacagccccgcagagggggccagcgtcgagtccagcagcccggggcccaaaaagtcggacatgtgcgagggctgccggtcacttgctgcagggcacccgggatatatcagccatgataaagagacctccattaaatacgtcagccaccagcaccccagccacccccagctcttcagcattgtccgccaggcctgtgtccggagcctgagctgtgaggtctgccctggccgtgaaggccccatcttcttcggagatgagcagcacggctttgtgttcagccacaccttcttcatcaaggacagcctggccaggggcttccagcgctggtacagcatcatcaccatcatgatggaccggatctacctcatcaactcctggcccttcctgctggggaaggtccggggaatcatcgatgagctccagggcaaggcgctcaag

SEQ ID NO: 134935 - DNA, 243 bp, Homo sapiens
  Payload ID: 6350
  Gene Symbol: FLCN
  Gene Name: folliculin
  ENST ID: ENST00000461699
  CDS Start-End: 132-243
gccccgtaagccagtccttccaggctcctgcctcctctggtcattccctgcgtgggcctctcgcaggaagcagttttcctgtgtcccccgccgaccccctgcaggaggcctgttgcagtctccaaggcaccatgaatgccatcgtggctctctgccacttctgcgagctccacggcccccgcactctcttctgcacggaggtgctgcacgccccacttcctcaaggggatgggaatgaggaca

SEQ ID NO: 134936 - DNA, 6388 bp, Homo sapiens
  Payload ID: 6351
  Gene Symbol: FNIP1
  Gene Name: folliculin interacting protein 1
  Uniprot ID: Q8TF40
  ENST ID: ENST00000307968
  CDS Start-End: 1-3417
atggcccctacgctgttccagaagctcttcagcaagaggaccgggctgggcgcgcccggccgcgacgcccgggacccagattgcgggttcagttggcctttaccagagtttgatccaagccagattcgactgattgtatatcaagactgtgaaagacgagggagaaatgttttgtttgactccagtgttaagagaagaaatgaggacatatcagtatcgaaactcggcagtgatgctcaagttaaagtctttgggaaatgctgccaactgaaacctggaggagacagttcttcctctttagatagttctgtgacttcatcttctgatataaaagaccagtgtcttaagtaccagggttctcggtgctcttctgatgccaatatgcttggagagatgatgtttggctcagtagcaatgagctacaaaggatccaccttaaaaattcatcagattcgttcccctccacagctcatgctcagcaaagtgtttactgctcggactggcagcagtatttgtgggagtctcaatacgctacaagatagtcttgaattcatcaatcaggacaacaatacattaaaggctgataataacacagttattaatggactgcttggaaatatagttcacagcaacccaatggacatgcctggaagagagctcaatgaggacagagacagtggcatagcacggtctgcatctctcagcagcttgctgatcactccatttccttccccaaactcctcacttacccgaagttgtgccagcagctaccagcgacgttggcgacgcagccaaacaacaagtttggaaaatggggtatttcctagatggtctatagaagaaagctttaatctctcagatgaaagctgtggccctaacccaggaattgtgcggaaaaagaagattgcaattggggtaatcttttcattgtccaaagatgaagatgaaaataacaaatttaatgaattctttttttcacattttcctctctttgaaagccacatgaacaaattaaagagtgcaatagaacaggctatgaaaatgagccggagatcagctgatgccagtcagagaagtttggcatataatcgaatagttgatgccctaaatgaattcagaacaacaatttgtaatctttacacgatgccacgaattggagaacctgtctggcttacaatgatgtcggggactccagaaaagaaccacctttgctatcgtttcatgaaggagttcacctttctaatggaaaatgcttccaaaaatcaattcttgccagctctcattactgcagttctgaccaatcatcttgcctgggttccaacagtcatgccaaatggacaaccacctataaaaatatttttagaaaagcattcctctcagagtgtggacatgttggcaaagactcatccatataacccactttgggcacaactgggagacttgtatggcgctattggctctcccgtacggttagcaaggactgtggtagttggcaaacgacaagacatggtccagaggctactttattttcttacttattttataagatgctctgaacttcaagaaacgcatcttttagaaaatggagaagatgaagccatcgttatgccaggcacagtaattactaccactttagagaaaggtgaaatagaagaatcagagtatgtccttgtcacaatgcatagaaacaaaagcagtttgctctttaaagagtcagaagaaattagaactcccaattgtaactgtaaatattgcagtcatccactccttgggcaaaatgtagagaacatttcacaacaagagagagaagatattcaaaacagctctaaggagctgctaggaatttcagatgagtgccagatgatttctccttctgactgccaagaagaaaatgctgttgatgttaaacagtacagagataaattaagaacttgctttgacgccaagttagagacagttgtttgcacaggatctgttccagtagacaaatgtgcattgtcagagtcaggcttagagtcaacagaggaaacatggcagagtgagaagttgctggattcagacagtcacacaggcaaagcaatgagatccacaggaatggttgtggaaaaaaaacctccagataagattgtgcctgcttcattttcttgtgaggctgcccagacaaaggttactttcctgattggggattctatgtcacctgattcagatactgagcttcgaagtcaggcagtggtggatcagattaccagacatcacaccaaaccattgaaggaagaaagaggggctattgatcagcatcaagaaactaaacaaacaaccaaggaccaatctggagagtctgatacacagaacatggtttctgaagagccctgtgaacttccctgttggaatcattcagacccagaaagcatgagcttattcgacgaatattttaatgatgattcaatcgaaaccaggactattgatgatgttccatttaaaacaagtacagatagtaaagaccattgctgtatgttagagttttcaaaaatattgtgtacaaaaaataacaagcagaacaatgaattttgtaaatgtatagaaacagttccccaagattcatgtaaaacctgctttcctcagcaggaccaaagagatacactctccattcttgtcccccatggggataaagagagttcagataaaaaaattgctgtaggaactgaatgggacattccaagaaatgaaagttcagacagtgcccttggggatagtgaaagtgaagatacaggtcatgatatgactagacaagttagcagttattatggaggagagcaagaagattgggcagaagaggatgagataccttttcctgggtcaaagttaatcgaagtgagtgctgttcagcccaacattgccaacttcgggaggtccttgctgggtggctactgctcatcttatgtgcctgactttgttcttcaaggaattgggagtgatgagaggttccgtcagtgtctgatgtcagatttatctcatgctgtgcagcatccagttttggatgaaccaatagcagaagctgtctgtattatagctgacatggataaatggactgttcaagtggccagtagccagagacgagtgacagataataaattgggaaaggaagtattggtttccagtcttgtttccaatctgcttcattccacacttcagctttataagcataacttgtctccaaatttttgtgtaatgcatcttgaagaccggttgcaggagctatacttcaaaagtaaaatgctgtctgaatacctgagggggcagatgcgtgttcatgtcaaggagctgggagtggttctggggattgaatccagtgatcttccacttctggctgctgtagcaagcactcactctccatatgttgcacaaatactcctttaatatacctaaaaattgttagaaattggtgggaaaataggtagaaaccaaggaagcagacacaacatgcatttatggagattctttttcccttttagacttccatctgaatgagtcagtcaccagggtattctgcatagcattgtatattctgtgtatgtcagatggctttttctttttgactggacttttgggtggtggtagatttttaaacaaatgaaattaaagcaacaataattttgaagcatttgaaaaagccaaagtgtacggtagaaatttctacaaaatgaatattatcaagagtttcatgtgatcactgcagtgttgtcacagctcataaatagcaacagtgtctcatgatttaatggctcagaaatagttattcattagtttttaatttttaatttctaaggtacagagatctataaaaccttgattatttgttagttttgcaattcaaaacagctaatgtctggttatttctcaaagtaagtattttaaacagcctgttaattataagaaactcagaataatgagtgtaaatgtgttatgttatccacccaagtgtacatatgtacctatttttttttaaaaagcagaaatagaaatacaagactggtaaacatgcctttaaaaatatatatattttcaactagtattgtctataatgctgaaatattacttattggtgatttttctgtttcacacactctaaaatataagtaaagccaaccttttttttaaggctgagattcccaaaatgagaatactactttataccatttgtttataagtatgaactgttcttataaatattaatatttacatattcactaatttaacataaatgaaaattaggattaaaaattgcaccaaagcatcggcaaaaacaatactatattctttaaaagtgctcaggtagccaaggcccttgcttttggtatcaaccctcatgaacccataggagctgaatatttgtttcactgcttaataatcctcaatttacactattcataactcttaaaattattctctttttttctaagagtccctcccttccaaaagtgtatttttttcaaagattttcacttctcaattgttgcctttgtacatactatagagtgttgcttgtaagaaaggctaatatggaaccaaactcttgtaagtaatgtaaatagaaaggtgggtggataaagttttcaatactttctactacctcagtttacttgagtactacattatagtttattctttgcttatctggtctaagagacttttaatgctagtagtaaagttggtttctgctttcattgactattttcatcataatttcatcattgattaaaaaaagaaaaccacttgtttattcagttattaaatatatttactatataacacatccattcttgctgtttaaattttcaatagttaatggaaagttgtctttgaccttgaatttacagcattgggtcacattttgccttgctgtgtatgtattcaagagacttccaactagacaaagaaaaaattgttgttttaatggaatgtaaacctgaaattggtgtgtctgcaatctgtttggcccatgaccttttacctagtcccagttattacctgagtctcccatggatgacttgctgccaaggagtgtttgtggatatattttctttggcttaattttcttattctgtgcattaacaaaattatccagttgtctgattttggaattctatgagtcaatctttttggcagaattcagaatattaaaaagttcatacatttgcgggccattgtacctttttttttttttttttttttttgacggagtttcactcttgttacccaggctggagtgcaatggtgcgatctcagctcactgcaacctccgcctcccagttcaagtgattctcctgcctcagcccccaagtagctgggattacaagtgtgcgccaccacacccagctaattttttatttttagtagagatgagatttcaccatgtgttggtcaggctggtcttgaactcctgaactcaagtgatccacctgcctcgacctcccaaagtactgggattacaggcgtgagccactgtgcccagccttgtacttttttttttttttattgtagctctgtatagcacttggataatgtctgggtgtctccttaaccatcaaactgttctttatttaaaatgtttaattaccgtttagaaattctagtcctcaataagtgggtggctcatgctattgttgttcctaaagctaagctttgctgggaaggaaatgacctatagtttcttaaagaatcattaatccttataggattcctgagttactgttttgttcctccccactgcttcccattcctgagttttgtaattcctaatccttctataatttctattaccttcaccatagtcattctttccttacgcaaagcccaaggaatgagctgctgctactttaaagtgtggtcattatgatgaatgtgaaaagagttttggcttgttctaaataatttttacaagttatggtacagacagttgttacatatcaaaaaaaacctgtttattgaaacaggaaataaaaaagggatcttttacattatagaattaaaactaattttttcttgtatataaactaattggtttgattttaaatatttctggcttttattaatatgtcttaattttgagtttgaaaatgttaagtgcaataaaaacatactagtacagattttgttttgttccaattggcatactctggggatgatcacttaaaaaaacagattttacataatgcctacttctggtagatgtcttatgagattgttctgctttttctaagttacttagatgttggatatgtacatagctgtttcttgttctgtatacatttctcaaatgtacacttgtattataataacctcccagttctaggggatatttgtgcaataaatacacatgtcaacttga

SEQ ID NO: 134937 - DNA, 6366 bp, Homo sapiens
  Payload ID: 6351
  Gene Symbol: FNIP1
  Gene Name: folliculin interacting protein 1
  ENST ID: ENST00000307954
  CDS Start-End: 30-3395
ggagcgacccctgcctggccgtggctagcatggcccctacgctgttccagaagctcttcagcaagaggaccgggctgggcgcgcccggccgcgacgcccgggacccagattgcgggttcagttggcctttaccagagtttgatccaagccagattcgactgattgtatatcaagactgtgaaagacgagggagaaatgttttgtttgactccagtgttaagagaagaaatgaggacatatcagtatcgggttctcggtgctcttctgatgccaatatgcttggagagatgatgtttggctcagtagcaatgagctacaaaggatccaccttaaaaattcatcagattcgttcccctccacagctcatgctcagcaaagtgtttactgctcggactggcagcagtatttgtgggagtctcaatacgctacaagatagtcttgaattcatcaatcaggacaacaatacattaaaggctgataataacacagttattaatggactgcttggaaatataggtctttcacagttctgcagccccaggcgggcattctctgagcagggtccgctccgcctgatcaggagcgcctctttctttgcagttcacagcaacccaatggacatgcctggaagagagctcaatgaggacagagacagtggcatagcacggtctgcatctctcagcagcttgctgatcactccatttccttccccaaactcctcacttacccgaagttgtgccagcagctaccagcgacgttggcgacgcagccaaacaacaagtttggaaaatggggtatttcctagatggtctatagaagaaagctttaatctctcagatgaaagctgtggccctaacccaggaattgtgcggaaaaagaagattgcaattggggtaatcttttcattgtccaaagatgaagatgaaaataacaaatttaatgaattctttttttcacattttcctctctttgaaagccacatgaacaaattaaagagtgcaatagaacaggctatgaaaatgagccggagatcagctgatgccagtcagagaagtttggcatataatcgaatagttgatgccctaaatgaattcagaacaacaatttgtaatctttacacgatgccacgaattggagaacctgtctggcttacaatgatgtcggggactccagaaaagaaccacctttgctatcgtttcatgaaggagttcacctttctaatggaaaatgcttccaaaaatcaattcttgccagctctcattactgcagttctgaccaatcatcttgcctgggttccaacagtcatgccaaatggacaaccacctataaaaatatttttagaaaagcattcctctcagagtgtggacatgttggcaaagactcatccatataacccactttgggcacaactgggagacttgtatggcgctattggctctcccgtacggttagcaaggactgtggtagttggcaaacgacaagacatggtccagaggctactttattttcttacttattttataagatgctctgaacttcaagaaacgcatcttttagaaaatggagaagatgaagccatcgttatgccaggcacagtaattactaccactttagagaaaggtgaaatagaagaatcagagtatgtccttgtcacaatgcatagaaacaaaagcagtttgctctttaaagagtcagaagaaattagaactcccaattgtaactgtaaatattgcagtcatccactccttgggcaaaatgtagagaacatttcacaacaagagagagaagatattcaaaacagctctaaggagctgctaggaatttcagatgagtgccagatgatttctccttctgactgccaagaagaaaatgctgttgatgttaaacagtacagagataaattaagaacttgctttgacgccaagttagagacagttgtttgcacaggatctgttccagtagacaaatgtgcattgtcagagtcaggcttagagtcaacagaggaaacatggcagagtgagaagttgctggattcagacagtcacacaggcaaagcaatgagatccacaggaatggttgtggaaaaaaaacctccagataagattgtgcctgcttcattttcttgtgaggctgcccagacaaaggttactttcctgattggggattctatgtcacctgattcagatactgagcttcgaagtcaggcagtggtggatcagattaccagacatcacaccaaaccattgaaggaagaaagaggggctattgatcagcatcaagaaactaaacaaacaaccaaggaccaatctggagagtctgatacacagaacatggtttctgaagagccctgtgaacttccctgttggaatcattcagacccagaaagcatgagcttattcgacgaatattttaatgatgattcaatcgaaaccaggactattgatgatgttccatttaaaacaagtacagatagtaaagaccattgctgtatgttagagttttcaaaaatattgtgtacaaaaaataacaagcagaacaatgaattttgtaaatgtatagaaacagttccccaagattcatgtaaaacctgctttcctcagcaggaccaaagagatacactctccattcttgtcccccatggggataaagagagttcagataaaaaaattgctgtaggaactgaatgggacattccaagaaatgaaagttcagacagtgcccttggggatagtgaaagtgaagatacaggtcatgatatgactagacaagttagcagttattatggaggagagcaagaagattgggcagaagaggatgagataccttttcctgggtcaaagttaatcgaagtgagtgctgttcagcccaacattgccaacttcgggaggtccttgctgggtggctactgctcatcttatgtgcctgactttgttcttcaaggaattgggagtgatgagaggttccgtcagtgtctgatgtcagatttatctcatgctgtgcagcatccagttttggatgaaccaatagcagaagctgtctgtattatagctgacatggataaatggactgttcaagtggccagtagccagagacgagtgacagataataaattgggaaaggaagtattggtttccagtcttgtttccaatctgcttcattccacacttcagctttataagcataacttgtctccaaatttttgtgtaatgcatcttgaagaccggttgcaggagctatacttcaaaagtaaaatgctgtctgaatacctgagggggcagatgcgtgttcatgtcaaggagctgggagtggttctggggattgaatccagtgatcttccacttctggctgctgtagcaagcactcactctccatatgttgcacaaatactcctttaatatacctaaaaattgttagaaattggtgggaaaataggtagaaaccaaggaagcagacacaacatgcatttatggagattctttttcccttttagacttccatctgaatgagtcagtcaccagggtattctgcatagcattgtatattctgtgtatgtcagatggctttttctttttgactggacttttgggtggtggtagatttttaaacaaatgaaattaaagcaacaataattttgaagcatttgaaaaagccaaagtgtacggtagaaatttctacaaaatgaatattatcaagagtttcatgtgatcactgcagtgttgtcacagctcataaatagcaacagtgtctcatgatttaatggctcagaaatagttattcattagtttttaatttttaatttctaaggtacagagatctataaaaccttgattatttgttagttttgcaattcaaaacagctaatgtctggttatttctcaaagtaagtattttaaacagcctgttaattataagaaactcagaataatgagtgtaaatgtgttatgttatccacccaagtgtacatatgtacctatttttttttaaaaagcagaaatagaaatacaagactggtaaacatgcctttaaaaatatatatattttcaactagtattgtctataatgctgaaatattacttattggtgatttttctgtttcacacactctaaaatataagtaaagccaaccttttttttaaggctgagattcccaaaatgagaatactactttataccatttgtttataagtatgaactgttcttataaatattaatatttacatattcactaatttaacataaatgaaaattaggattaaaaattgcaccaaagcatcggcaaaaacaatactatattctttaaaagtgctcaggtagccaaggcccttgcttttggtatcaaccctcatgaacccataggagctgaatatttgtttcactgcttaataatcctcaatttacactattcataactcttaaaattattctctttttttctaagagtccctcccttccaaaagtgtatttttttcaaagattttcacttctcaattgttgcctttgtacatactatagagtgttgcttgtaagaaaggctaatatggaaccaaactcttgtaagtaatgtaaatagaaaggtgggtggataaagttttcaatactttctactacctcagtttacttgagtactacattatagtttattctttgcttatctggtctaagagacttttaatgctagtagtaaagttggtttctgctttcattgactattttcatcataatttcatcattgattaaaaaaagaaaaccacttgtttattcagttattaaatatatttactatataacacatccattcttgctgtttaaattttcaatagttaatggaaagttgtctttgaccttgaatttacagcattgggtcacattttgccttgctgtgtatgtattcaagagacttccaactagacaaagaaaaaattgttgttttaatggaatgtaaacctgaaattggtgtgtctgcaatctgtttggcccatgaccttttacctagtcccagttattacctgagtctcccatggatgacttgctgccaaggagtgtttgtggatatattttctttggcttaattttcttattctgtgcattaacaaaattatccagttgtctgattttggaattctatgagtcaatctttttggcagaattcagaatattaaaaagttcatacatttgcgggccattgtacctttttttttttttttttttttttgacggagtttcactcttgttacccaggctggagtgcaatggtgcgatctcagctcactgcaacctccgcctcccagttcaagtgattctcctgcctcagcccccaagtagctgggattacaagtgtgcgccaccacacccagctaattttttatttttagtagagatgagatttcaccatgtgttggtcaggctggtcttgaactcctgaactcaagtgatccacctgcctcgacctcccaaagtactgggattacaggcgtgagccactgtgcccagccttgtacttttttttttttttattgtagctctgtatagcacttggataatgtctgggtgtctccttaaccatcaaactgttctttatttaaaatgtttaattaccgtttagaaattctagtcctcaataagtgggtggctcatgctattgttgttcctaaagctaagctttgctgggaaggaaatgacctatagtttcttaaagaatcattaatccttataggattcctgagttactgttttgttcctccccactgcttcccattcctgagttttgtaattcctaatccttctataatttctattaccttcaccatagtcattctttccttacgcaaagcccaaggaatgagctgctgctactttaaagtgtggtcattatgatgaatgtgaaaagagttttggcttgttctaaataatttttacaagttatggtacagacagttgttacatatcaaaaaaaacctgtttattgaaacaggaaataaaaaagggatcttttacattatagaattaaaactaattttttcttgtatataaactaattggtttgattttaaatatttctggcttttattaatatgtcttaattttgagtttgaaaatgttaagtgcaataaaaacatactagtacagattttgttttgttccaattggcatactctggggatgatcacttaaaaaaacagattttacataatgcctacttctggtagatgtcttatgagattgttctgctttttctaagttacttagatgttggatatgtacatagctgtttcttgttctgtatacatttctcaaatgtacacttgtattataataacctcccagttctaggggatatttgtgcaataaatacacatgtcaacttga

SEQ ID NO: 134938 - DNA, 3845 bp, Homo sapiens
  Payload ID: 6351
  Gene Symbol: FNIP1
  Gene Name: folliculin interacting protein 1
  Uniprot ID: Q8TF40
  ENST ID: ENST00000510461
  CDS Start-End: 97-3597
atatgactgaggcgcccatgggggtggcggggcggctgtaggagcaggggcctagcaagcgcccagcggagcgacccctgcctggccgtggctagcatggcccctacgctgttccagaagctcttcagcaagaggaccgggctgggcgcgcccggccgcgacgcccgggacccagattgcgggttcagttggcctttaccagagtttgatccaagccagattcgactgattgtatatcaagactgtgaaagacgagggagaaatgttttgtttgactccagtgttaagagaagaaatgaggacatatcagtatcgaaactcggcagtgatgctcaagttaaagtctttgggaaatgctgccaactgaaacctggaggagacagttcttcctctttagatagttctgtgacttcatcttctgatataaaagaccagtgtcttaagtaccagggttctcggtgctcttctgatgccaatatgcttggagagatgatgtttggctcagtagcaatgagctacaaaggatccaccttaaaaattcatcagattcgttcccctccacagctcatgctcagcaaagtgtttactgctcggactggcagcagtatttgtgggagtctcaatacgctacaagatagtcttgaattcatcaatcaggacaacaatacattaaaggctgataataacacagttattaatggactgcttggaaatataggtctttcacagttctgcagccccaggcgggcattctctgagcagggtccgctccgcctgatcaggagcgcctctttctttgcagttcacagcaacccaatggacatgcctggaagagagctcaatgaggacagagacagtggcatagcacggtctgcatctctcagcagcttgctgatcactccatttccttccccaaactcctcacttacccgaagttgtgccagcagctaccagcgacgttggcgacgcagccaaacaacaagtttggaaaatggggtatttcctagatggtctatagaagaaagctttaatctctcagatgaaagctgtggccctaacccaggaattgtgcggaaaaagaagattgcaattggggtaatcttttcattgtccaaagatgaagatgaaaataacaaatttaatgaattctttttttcacattttcctctctttgaaagccacatgaacaaattaaagagtgcaatagaacaggctatgaaaatgagccggagatcagctgatgccagtcagagaagtttggcatataatcgaatagttgatgccctaaatgaattcagaacaacaatttgtaatctttacacgatgccacgaattggagaacctgtctggcttacaatgatgtcggggactccagaaaagaaccacctttgctatcgtttcatgaaggagttcacctttctaatggaaaatgcttccaaaaatcaattcttgccagctctcattactgcagttctgaccaatcatcttgcctgggttccaacagtcatgccaaatggacaaccacctataaaaatatttttagaaaagcattcctctcagagtgtggacatgttggcaaagactcatccatataacccactttgggcacaactgggagacttgtatggcgctattggctctcccgtacggttagcaaggactgtggtagttggcaaacgacaagacatggtccagaggctactttattttcttacttattttataagatgctctgaacttcaagaaacgcatcttttagaaaatggagaagatgaagccatcgttatgccaggcacagtaattactaccactttagagaaaggtgaaatagaagaatcagagtatgtccttgtcacaatgcatagaaacaaaagcagtttgctctttaaagagtcagaagaaattagaactcccaattgtaactgtaaatattgcagtcatccactccttgggcaaaatgtagagaacatttcacaacaagagagagaagatattcaaaacagctctaaggagctgctaggaatttcagatgagtgccagatgatttctccttctgactgccaagaagaaaatgctgttgatgttaaacagtacagagataaattaagaacttgctttgacgccaagttagagacagttgtttgcacaggatctgttccagtagacaaatgtgcattgtcagagtcaggcttagagtcaacagaggaaacatggcagagtgagaagttgctggattcagacagtcacacaggcaaagcaatgagatccacaggaatggttgtggaaaaaaaacctccagataagattgtgcctgcttcattttcttgtgaggctgcccagacaaaggttactttcctgattggggattctatgtcacctgattcagatactgagcttcgaagtcaggcagtggtggatcagattaccagacatcacaccaaaccattgaaggaagaaagaggggctattgatcagcatcaagaaactaaacaaacaaccaaggaccaatctggagagtctgatacacagaacatggtttctgaagagccctgtgaacttccctgttggaatcattcagacccagaaagcatgagcttattcgacgaatattttaatgatgattcaatcgaaaccaggactattgatgatgttccatttaaaacaagtacagatagtaaagaccattgctgtatgttagagttttcaaaaatattgtgtacaaaaaataacaagcagaacaatgaattttgtaaatgtatagaaacagttccccaagattcatgtaaaacctgctttcctcagcaggaccaaagagatacactctccattcttgtcccccatggggataaagagagttcagataaaaaaattgctgtaggaactgaatgggacattccaagaaatgaaagttcagacagtgcccttggggatagtgaaagtgaagatacaggtcatgatatgactagacaagttagcagttattatggaggagagcaagaagattgggcagaagaggatgagataccttttcctgggtcaaagttaatcgaagtgagtgctgttcagcccaacattgccaacttcgggaggtccttgctgggtggctactgctcatcttatgtgcctgactttgttcttcaaggaattgggagtgatgagaggttccgtcagtgtctgatgtcagatttatctcatgctgtgcagcatccagttttggatgaaccaatagcagaagctgtctgtattatagctgacatggataaatggactgttcaagtggccagtagccagagacgagtgacagataataaattgggaaaggaagtattggtttccagtcttgtttccaatctgcttcattccacacttcagctttataagcataacttgtctccaaatttttgtgtaatgcatcttgaagaccggttgcaggagctatacttcaaaagtaaaatgctgtctgaatacctgagggggcagatgcgtgttcatgtcaaggagctgggagtggttctggggattgaatccagtgatcttccacttctggctgctgtagcaagcactcactctccatatgttgcacaaatactcctttaatatacctaaaaattgttagaaattggtgggaaaataggtagaaaccaaggaagcagacacaacatgcatttatggagattctttttcccttttagacttccatctgaatgagtcagtcaccagggtattctgcatagcattgtatattctgtgtatgtcagatggctttttctttttgactggacttttgggtggtggtagatttttaaacaaatgaaattaaagcaacaataattttgaagcatttg

SEQ ID NO: 134939 - DNA, 1720 bp, Homo sapiens
  Payload ID: 6351
  Gene Symbol: FNIP1
  Gene Name: folliculin interacting protein 1
  Uniprot ID: Q8TF40
  ENST ID: ENST00000511848
  CDS Start-End: 96-1622
tatgactgaggcgcccatgggggtggcggggcggctgtaggagcaggggcctagcaagcgcccagcggagcgacccctgcctggccgtggctagcatggcccctacgctgttccagaagctcttcagcaagaggaccgggctgggcgcgcccggccgcgacgcccgggacccagattgcgggttcagttggcctttaccagagtttgatccaagccagattcgactgattgtatatcaagactgtgaaagacgagggagaaatgttttgtttgactccagtgttaagagaagaaatgaggacatatcagtatcgaaactcggcagtgatgctcaagttaaagtctttgggaaatgctgccaactgaaacctggaggagacagttcttcctctttagatagttctgtgacttcatcttctgatataaaagaccagtgtcttaagtaccagggttctcggtgctcttctgatgccaatatgcttggagagatgatgtttggctcagtagcaatgagctacaaaggatccaccttaaaaattcatcagattcgttcccctccacagctcatgctcagcaaagtgtttactgctcggactggcagcagtatttgtgggagtctcaatacgctacaagatagtcttgaattcatcaatcaggacaacaatacattaaaggctgataataacacagttattaatggactgcttggaaatataggtctttcacagttctgcagccccaggcgggcattctctgagcagggtccgctccgcctgatcaggagcgcctctttctttgcagttcacagcaacccaatggacatgcctggaagagagctcaatgaggacagagacagtggcatagcacggtctgcatctctcagcagcttgctgatcactccatttccttccccaaactcctcacttacccgaagttgtgccagcagctaccagcgacgttggcgacgcagccaaacaacaagtttggaaaatggggtatttcctagatggtctatagaagaaagctttaatctctcagatgaaagctgtggccctaacccaggaattgtgcggaaaaagaagattgcaattggggtaatcttttcattgtccaaagatgaagatgaaaataacaaatttaatgaattctttttttcacattttcctctctttgaaagccacatgaacaaattaaagagtgcaatagaacaggctatgaaaatgagccggagatcagctgatgccagtcagagaagtttggcatataatcgaatagttgatgccctaaatgaattcagaacaacaatttgtaatctttacacgatgccacgaattggagaacctgtctggcttacaatgatgtcggggactccagaaaagaaccacctttgctatcgtttcatgaaggagttcacctttctaatggaaaatgcttccaaaaatcaattcttgccagctctcattactgcagttctgaccaatcatcttgcctgggttccaacagtcatgccaaatggacaaccacctataaaaatatttttagaaaagcattcctctcagagtgtggacatgttggcaaagactcatccatataacccactttgggcacaactgggtatgtaatctgacaactgttacactatgtattagacttttttgtagctatctgtaattattttatagcaaaaccaaaaataaataaaatgcttttacctcctgca

SEQ ID NO: 134940 - DNA, 6589 bp, Homo sapiens
  Payload ID: 6351
  Gene Symbol: FNIP1
  Gene Name: folliculin interacting protein 1
  ENST ID: ENST00000615660
  CDS Start-End: 863-3619
gccccgccccgcgcgccgtggccgtttgaagtgactaatttctgtcatatgactgaggcgcccatgggggtggcggggcggctgtaggagcaggggcctagcaagcgcccagcggagcgacccctgcctggccgtggctagcatggcccctacgctgttccagaagctcttcagcaagaggaccgggctgggcgcgcccggccgcgacgcccgggacccagattgcgggttcagttggcctttaccagagtttgatccaagccagattcgactgattgtatatcaagactgtgaaagacgagggagaaatgttttgtttgactccagtgttaagagaagaaatgaggacatatcagtatcgaaactcggcagtgatgctcaagttaaagtctttgggaaatgctgccaactgaaacctggaggagacagttcttcctctttagatagttctgtgacttcatcttctgatataaaagaccagtgtcttaagtaccagggttctcggtgctcttctgatgccaatatgcttggagagatgatgtttggctcagtagcaatgagctacaaaggatccaccttaaaaattcatcagattcgttcccctccacagctcatgctcagcaaagtgtttactgctcggactggcagcagtatttgtgggagtctcaatacgctacaagatagtcttgaattcatcaatcaggacaacaatacattaaaggctgataataacacagttattaatggactgcttggaaatataggtctttcacagttctgcagccccaggcgggcattctctgagcagggtccgctccgcctgatcaggagcgcctctttctttgcagttcacagcaacccaatggacatgcctggaagagagctcaatgaggacagagacagtggcatagcacggtctgcatctctcagcagcttgctgatcactccatttccttccccaaactcctcacttacccgaagttgtgccagcagctaccagcgacgttggcgacgcagccaaacaacaagtttggaaaatggggtatttcctagatggtctatagaagaaagctttaatctctcagatgaaagctgtggccctaacccaggaattgtgcggaaaaagaagattgcaattggggtaatcttttcattgtccaaagatgaagatgaaaataacaaatttaatgaattctttttttcacattttcctctctttgaaagccacatgaacaaattaaagagtgcaatagaacaggctatgaaaatgagccggagatcagctgatgccagtcagagaagtttggcatataatcgaatagttgatgccctaaatgaattcagaacaacaatttgtaatctttacacgatgccacgaattggagaacctgtctggcttacaatgatgtcggggactccagaaaagaaccacctttgctatcgtttcatgaaggagttcacctttctaatggaaaatgcttccaaaaatcaattcttgccagctctcattactgcagttctgaccaatcatcttgcctgggttccaacagtcatgccaaatggacaaccacctataaaaatatttttagaaaagcattcctctcagagtgtggacatgttggcaaagactcatccatataacccactttgggcacaactgggagacttgtatggcgctattggctctcccgtacggttagcaaggactgtggtagttggcaaacgacaagacatggtccagaggctactttattttcttacttattttataagatgctctgaacttcaagaaacgcatcttttagaaaatggagaagatgaagccatcgttatgccaggcacagtaattactaccactttagagaaaggtgaaatagaagaatcagagtatgtccttgtcttgctctttaaagagtcagaagaaattagaactcccaattgtaactgtaaatattgcagtcatccactccttgggcaaaatgtagagaacatttcacaacaagagagagaagatattcaaaacagctctaaggagctgctaggaatttcagatgagtgccagatgatttctccttctgactgccaagaagaaaatgctgttgatgttaaacagtacagagataaattaagaacttgctttgacgccaagttagagacagttgtttgcacaggatctgttccagtagacaaatgtgcattgtcagagtcaggcttagagtcaacagaggaaacatggcagagtgagaagttgctggattcagacagtcacacaggcaaagcaatgagatccacaggaatggttgtggaaaaaaaacctccagataagattgtgcctgcttcattttcttgtgaggctgcccagacaaaggttactttcctgattggggattctatgtcacctgattcagatactgagcttcgaagtcaggcagtggtggatcagattaccagacatcacaccaaaccattgaaggaagaaagaggggctattgatcagcatcaagaaactaaacaaacaaccaaggaccaatctggagagtctgatacacagaacatggtttctgaagagccctgtgaacttccctgttggaatcattcagacccagaaagcatgagcttattcgacgaatattttaatgatgattcaatcgaaaccaggactattgatgatgttccatttaaaacaagtacagatagtaaagaccattgctgtatgttagagttttcaaaaatattgtgtacaaaaaataacaagcagaacaatgaattttgtaaatgtatagaaacagttccccaagattcatgtaaaacctgctttcctcagcaggaccaaagagatacactctccattcttgtcccccatggggataaagagagttcagataaaaaaattgctgtaggaactgaatgggacattccaagaaatgaaagttcagacagtgcccttggggatagtgaaagtgaagatacaggtcatgatatgactagacaagttagcagttattatggaggagagcaagaagattgggcagaagaggatgagataccttttcctgggtcaaagttaatcgaagtgagtgctgttcagcccaacattgccaacttcgggaggtccttgctgggtggctactgctcatcttatgtgcctgactttgttcttcaaggaattgggagtgatgagaggttccgtcagtgtctgatgtcagatttatctcatgctgtgcagcatccagttttggatgaaccaatagcagaagctgtctgtattatagctgacatggataaatggactgttcaagtggccagtagccagagacgagtgacagataataaattgggaaaggaagtattggtttccagtcttgtttccaatctgcttcattccacacttcagctttataagcataacttgtctccaaatttttgtgtaatgcatcttgaagaccggttgcaggagctatacttcaaaagtaaaatgctgtctgaatacctgagggggcagatgcgtgttcatgtcaaggagctgggagtggttctggggattgaatccagtgatcttccacttctggctgctgtagcaagcactcactctccatatgttgcacaaatactcctttaatatacctaaaaattgttagaaattggtgggaaaataggtagaaaccaaggaagcagacacaacatgcatttatggagattctttttcccttttagacttccatctgaatgagtcagtcaccagggtattctgcatagcattgtatattctgtgtatgtcagatggctttttctttttgactggacttttgggtggtggtagatttttaaacaaatgaaattaaagcaacaataattttgaagcatttgaaaaagccaaagtgtacggtagaaatttctacaaaatgaatattatcaagagtttcatgtgatcactgcagtgttgtcacagctcataaatagcaacagtgtctcatgatttaatggctcagaaatagttattcattagtttttaatttttaatttctaaggtacagagatctataaaaccttgattatttgttagttttgcaattcaaaacagctaatgtctggttatttctcaaagtaagtattttaaacagcctgttaattataagaaactcagaataatgagtgtaaatgtgttatgttatccacccaagtgtacatatgtacctatttttttttaaaaagcagaaatagaaatacaagactggtaaacatgcctttaaaaatatatatattttcaactagtattgtctataatgctgaaatattacttattggtgatttttctgtttcacacactctaaaatataagtaaagccaaccttttttttaaggctgagattcccaaaatgagaatactactttataccatttgtttataagtatgaactgttcttataaatattaatatttacatattcactaatttaacataaatgaaaattaggattaaaaattgcaccaaagcatcggcaaaaacaatactatattctttaaaagtgctcaggtagccaaggcccttgcttttggtatcaaccctcatgaacccataggagctgaatatttgtttcactgcttaataatcctcaatttacactattcataactcttaaaattattctctttttttctaagagtccctcccttccaaaagtgtatttttttcaaagattttcacttctcaattgttgcctttgtacatactatagagtgttgcttgtaagaaaggctaatatggaaccaaactcttgtaagtaatgtaaatagaaaggtgggtggataaagttttcaatactttctactacctcagtttacttgagtactacattatagtttattctttgcttatctggtctaagagacttttaatgctagtagtaaagttggtttctgctttcattgactattttcatcataatttcatcattgattaaaaaaagaaaaccacttgtttattcagttattaaatatatttactatataacacatccattcttgctgtttaaattttcaatagttaatggaaagttgtctttgaccttgaatttacagcattgggtcacattttgccttgctgtgtatgtattcaagagacttccaactagacaaagaaaaaattgttgttttaatggaatgtaaacctgaaattggtgtgtctgcaatctgtttggcccatgaccttttacctagtcccagttattacctgagtctcccatggatgacttgctgccaaggagtgtttgtggatatattttctttggcttaattttcttattctgtgcattaacaaaattatccagttgtctgattttggaattctatgagtcaatctttttggcagaattcagaatattaaaaagttcatacatttgcgggccattgtacctttttttttttttttttttttttgacggagtttcactcttgttacccaggctggagtgcaatggtgcgatctcagctcactgcaacctccgcctcccagttcaagtgattctcctgcctcagcccccaagtagctgggattacaagtgtgcgccaccacacccagctaattttttatttttagtagagatgagatttcaccatgtgttggtcaggctggtcttgaactcctgaactcaagtgatccacctgcctcgacctcccaaagtactgggattacaggcgtgagccactgtgcccagccttgtacttttttttttttttattgtagctctgtatagcacttggataatgtctgggtgtctccttaaccatcaaactgttctttatttaaaatgtttaattaccgtttagaaattctagtcctcaataagtgggtggctcatgctattgttgttcctaaagctaagctttgctgggaaggaaatgacctatagtttcttaaagaatcattaatccttataggattcctgagttactgttttgttcctccccactgcttcccattcctgagttttgtaattcctaatccttctataatttctattaccttcaccatagtcattctttccttacgcaaagcccaaggaatgagctgctgctactttaaagtgtggtcattatgatgaatgtgaaaagagttttggcttgttctaaataatttttacaagttatggtacagacagttgttacatatcaaaaaaaacctgtttattgaaacaggaaataaaaaagggatcttttacattatagaattaaaactaattttttcttgtatataaactaattggtttgattttaaatatttctggcttttattaatatgtcttaattttgagtttgaaaatgttaagtgcaataaaaacatactagtacagattttgttttgttccaattggcatactctggggatgatcacttaaaaaaacagattttacataatgcctacttctggtagatgtcttatgagattgttctgctttttctaagttacttagatgttggatatgtacatagctgtttcttgttctgtatacatttctcaaatgtacacttgtattataataacctcccagttctaggggatatttgtgcaataaatacacatgtcaacttg

SEQ ID NO: 134941 - DNA, 6925 bp, Homo sapiens
  Payload ID: 6352
  Gene Symbol: FNIP2
  Gene Name: folliculin interacting protein 2
  Uniprot ID: Q9P278
  ENST ID: ENST00000264433
  CDS Start-End: 76-3420
gcggccgccgcccccggctgcgcgctgagccgccggccccccgagcgccacggccggagctgcggcggcggcatcatggccccgaccctgctccagaagctcttcaacaaaaggggcagcagcggcagctccgcggcggcgtctgcccagggcagggctcctaaggaaggacccgcctttagttggtcatgttcggagtttgacctgaatgagattcgcctgatagtttaccaggactgtgacaggagaggcagacaagtcttgtttgactctaaagctgttcaaaagattgaggaggtgacagctcagaaaacagaggatgttcctattaaaatatcagccaagtgctgccagggaagcagcagtgtcagcagcagtagcagcagcagcatctcttcccacagttcttctgggggatcttcacatcatgctaaggaacagcttccaaagtaccagtacacaagaccagcttccgatgtcaacatgttaggggaaatgatgtttggctcagttgccatgagttacaaaggctccaccttaaagatacactacatacgttctcctccacaactgatgattagtaaagtcttctctgctagaatgggcagcttctgtggaagtacaaataacttgcaagacagctttgagtacatcaaccaagatcctaatttgggaaaactgaacacaaatcaaaatagtttgggtccttgtcgtactggaagtaacctagcacacagcacaccagttgatatgccaagcagaggacagaatgaagacagggacagtggcattgctcgatcagcctcactaagcagtcttttgatcacacctttcccatctccaagctcctctacatcttcttccagcagttaccagcgccgctggcttcgaagtcagacaacaagtttggaaaatggcatcatcccaagaaggtcaactgatgagacattcagcttggctgaagaaacctgtagctctaatccagctatggttaggaggaagaaaattgccataagcatcatcttttccctatgtgagaaagaagaagcacaaaggaatttccaggacttcttcttttctcattttcccctgtttgaatctcacatgaacaggctgaagagtgcaattgaaaaggctatgatctcctgtaggaaaatagcagaatcaagtctccgagtccagttttatgtcagccgtttgatggaagctctgggagaattcagaggaactatctggaacttatattctgttccaaggatagctgaacctgtatggcttactatgatgtccggcactttggaaaaaaaccagctctgccagcgctttctcaaggagtttacacttctgatagaacagataaataaaaaccagttttttgctgccttactgactgcggtgttaacctaccacctggcctgggtcccaactgtcatgcctgtggatcaccctcccatcaaagccttctcagagaaacgtacctcccagtcagtgaacatgctggccaaaacacatccgtataatcctctttgggcacagctgggtgatctttacggagccataggctctccagtgagactgactcgcaccgtagtggtagggaagcagaaggacttagtccagcgaatactttatgtcctgacctactttctccgttgctctgagctacaagagaaccagctgacctggagtggcaatcatggtgaaggtgaccaagttttaaatgggagcaagatcataacagccttggagaaaggagaggtggaggagtctgagtatgtggtcattacggtgaggaacgagcccgctcttgtaccccccatcctaccaccaacagcagcagagagacacaacccctggccgacagggtttcctgagtgcccagagggcactgacagtagagacctgggtcttaaacctgacaaagaagctaacaggaggccagagcagggttctgaggcttgcagcgcagggtgcctggggccagcatcagacgcttcctggaaacctcagaatgcattttgtggggatgagaaaaataaagaggcaccgcaagatggctcttcaagacttcccagctgtgaagttttgggggcaggaatgaagatggaccagcaagctgtctgtgagctgttgaaagtggagatgcctacaagactgccagaccggtcagtggcctggccttgccctgacagacatctccgggagaaaccttccttagaaaaggtcactttccagattggaagctttgcatctccagagtctgactttgaaagccgcatgaaaaaaatggaggaacgggtgaaggcctgtggcccctccttggaggccagtgaggctgctgatgtggctcaggacccgcaggtttctaggagcccttttaaacctggctttcaggagaatgtttgctgtcctcagaatcggctttcagagggggatgaaggcgagtctgacaagggttttgcagaggacagaggcagcagaaacgacatggcagcagatattgctgggcagctcagccacgctgctgacttgggcacagcctcccacggtgcaggaggaacgggagggaggaggctggaggccactagaggtttgtatgtgaaggctgcggaaggacctgtgctggagcctgttgcccccaggtgtgtccagcggggccctggcctcgtggctggtgcgaatatcccctgtggggatgacaacaagaaggccaacttcaggactgaaggagacattccccgaaatgaaagctcagatagcgccctgggagacagtgacgacgaagcctgcgcttcagccatgctagatctgggtcacggtggtgacaggactggagggtccttggaagtggagctgcctctgccaaggtctcagagcatcagcacccagaatgtaaggaactttggccgctcacttctggcgggctactgccccacatacatgcctgatcttgtgcttcatgggaccggcagtgatgagaagctgaagcagtgcctggtggccgaccttgtccacacagtccatcatccagtcctggatgagccaatagctgaagctgtctgtattatcgcagacacggataaatggagtgtgcaggtagctacaagtcagaggaaagtgacggacaacatgaaactaggccaggatgtcctggtctctagtcaggtgtccagtttgcttcagtccattttacagctctataagcttcacctccctgctgatttttgcatcatgcatcttgaagatagactacaggagatgtaccttaaaagtaaaatgctatctgaatatctccggggacacacacgagtccatgtgaaagaattaggtgtcgtactggggattgaatccaacgacctgcctctgttgactgctattgccagtactcattctccttatgtggctcaaatactcttataagctaaagctcaggacagttcttccttggaagaaaaaaatcaaattctcaactgaaggagaaaggaataagctctctgtgatgtcaaaagcatgagaagagcaaacagaaacagtcattccacctttttgttttgtgtttttgctgtcaagctgatgcttcattgaagacttaggtttacttgacataatagcatttgtgattgtcgtgaacactttaggccatttgttacccatgaatcaacaaagaaactgacctttttggtaggaggaaacataagcactaaacactaagctgttgcaacagattgccttgtgctgtttgggcagaataaagacaagtgacttgagcggggtggtcagcagtgtacataatattccagtaggaaactgcttccaagtttaagcatgagctccccaaactggagaaaacatattttgctattctgagacaacaatcagaatacagactttggattccaggtcacagtttgctttttagacaaggtaaagcaaagaaagccacattgtgccatcttcagctccagtggctttagcagtgactgtttgacataaaacatgtaagaattgcttgttgggaagagtgctttagggacccactgttttcatttcttcttggagtttaccttgtttcagatgcagccatgggtaggtcagagatggattgttggtgcaataaacccaagaatcaatgtagcctcttaatcccatcaagatgtagtttgtagcagcaaagtgtacagtctgaaaccgtatgttttatccttatattttagagctttcagcagcctttttaagagaggccacttaccaaagttatttctataagctcaagagtgtttcggttggtaagttcttccagctgaagccactttttccttatagttaatacaaatgactatttttactttaaaaggcacagctgtcctggtgggaaatgaaacctgcagcagttcaggatgactaatgaaagcaattagcttgaacatttagaaaaaattcatatatgatctaaatttttatattatcatttctgtgccttctaattcctgcatccttttcaaaacatctttccagacattaacttacacattgtataaaaccgaccaaaatgatttcctaaagttcatgcaaaaaaaaaaaaaaaacaacctaattttctgttaatataaaagaaacttcagtttactgaccgtgaaacagactatgtactgacatccagggtaaagtaaaagacttttaaatattggtcattaaaggacaggagctaagctagcaaagcaaaacatctttagcactttgcagatctcaagcagttaaccaggctctgattcccttccactgttttatgaattaattccagttcttttcatgtatctttgaacctaagattatgaagtaatttccctattagggactagaatgacttcagttttttcatttgataaaaatcagaactgctacctttcccttttttaatgatgcaaaatgtagatgagtgcattaagttttgtaagatctttatcattttatgtcattcattgaaaattgaaatgttcattctttttaatgttttcctatttccttttgcctagcatttgactttggtgttttaagttctgtagttccatgacatcattgtttgctgttgtgttacagagagagaaggaacctcacctgtggctcagctcaccccacatccgtttctcattacgtgtaaataaactgtcagagctgatgttacagcttttacagtttaaagcattcccctcgtctctagttccttttttcttgtttacatgttttgggcactttccctcattcaccaccttccagggtttcatagaaaataacttgttacaaaatcagttcaattctaatgtggacatagtggcatgttcataattagacccatataggggacactgagctttaaatcgttgattctaaactctatacattaaaaaaattcagcccaggcccctcaaagcctgagaaaatttaatttgctcttaatttaatgttccaaaactcactcttggaaaaatgcctgttggaaaactacaggtgggtcacatgtgggggctgtctccgtgacactcaggattccagtcagaacctaatcctcatatctattgcctacaaaaatagaccaagaatgttgctgctcttttataatcctttaaatatttaacattcaagttttctttgtcttaaattcagcctcttcctaaaagcaaaaaagaaaaaaaaaacctcacagaattgtgttgagatccaccgctcacacgccgtacaccacccagtggcttcattctggcttagccgcagaggcaagaaagggaccccacttgctcccatgcccacctcaagaaaaaacataaaacaattttttttaaaaaagaaaagaaatctacctcagttgacaggattccacctttagggtttcttcaacttttaagtcttacctgttgagtgtaacttttgtagcatcttgcttttccaagcaagctagtgaggcatgacagagcagaagtctgtaaatgtccctgtgatggacctctttctagcatgttgcagttttatttttaataaattggtaagtgaaatgaatgtaaaggtaattgtgtacgttttagacatgacaatgaaaatttaaaatgtagcttccatacttgtgcataattccaaagtattttattttttatcaatcagtgttaaatagctttttgtacaggcttcaatccatttttcgaagtgtgctgttttttaatgaaagtaactataatcttttcacatcccatggaactgccgtttacacattgcaactttttaaacttaaccatatttttcaaaattaacgtttttggagggagaaaaatccccgcttgctaaatgatactaaaccgttgtttgggctcttataattaggtcctgagattttataaaaatttagtctgtagctttttaggttcttcactagagttggttgtacataaaaataataaagaatataaagtatcccaaaattcttttaaagtctggatttttccgctaatatgtactttagagaatattttgttcatgcatacttccacgttaaattgaaaatgtcttcagcttctcttggtaaatgtgaaccatttgttttttattgtgcttgggggagagggtattttaatataatttttgcctaaatcaagaagtcccctctgaatgttaatttttaaatgtcaaaatatgatgaacgatatatcttgaaagtgagattgcaatatgcttaaacttaagtggtatttcaaaaacgagaaaattctggaatttgtcatttgaagctccataagagaaattgataggacttcgtttttgatcagtctgaatagataccaatgtcattgtgtgggaattttttttaacttgtttatgtattattttgatccatttttctgtggcatttggtgcaataaaacttttgaatttatcttga

SEQ ID NO: 134942 - DNA, 724 bp, Homo sapiens
  Payload ID: 6352
  Gene Symbol: FNIP2
  Gene Name: folliculin interacting protein 2
  ENST ID: ENST00000504715
  CDS Start-End: 1-724
ctgatgattagtaaagtcttctctgctagaatgggcagcttctgtggaagtacaaataacttgcaagacagctttgagtacatcaaccaagatcctaatttgggaaaactgaacacaaatcaaaatagtttgggtccttgtcgtactggaagtaacctaggtctgctgcaagcatgcagcagcaaactgctgcagggggtagctgaaggaggacctctccggctcacccggagtgcttctttctttgcagcacacagcacaccagttgatatgccaagcagaggacagaatgaagacagggacagtggcattgctcgatcagcctcactaagcagtcttttgatcacacctttcccatctccaagctcctctacatcttcttccagcagttaccagcgccgctggcttcgaagtcagacaacaagtttggaaaatggcatcatcccaagaaggtcaactgatgagacattcagcttggctgaagaaacctgtagctctaatccagctatggttaggaggaagaaaattgccataagcatcatcttttccctatgtgagaaagaagaagcacaaaggaatttccaggacttcttcttttctcattttcccctgtttgaatctcacatgaacaggctgaagagtgcaattgaaaaggctatgatctcctgtaggaaaatagcagaatcaagtctccgagtccagttttatgtcagccgtttgatgg

SEQ ID NO: 134943 - DNA, 2173 bp, Homo sapiens
  Payload ID: 6352
  Gene Symbol: FNIP2
  Gene Name: folliculin interacting protein 2
  ENST ID: ENST00000512986
  CDS Start-End: 155-2173
gcttttctcacatactgtatagggagtgaaatgattgtttagaactgctggtcattacagaatgttcctcacataacaaaggaacttcaggatttgtctccaagtccatgtttatggtcaggataaaccagaagaacattaaaccgttcaggagatgtgcggcggcacagcgaacaccacaaaccagccagagagctggcaagactctgccagatgtgtgagtgatgctgttcctggtgctgggaggatttacagggcgcttttatgcacaaagattaaaaaacacaccggagtagacaggagcactgaccacacggaactcgacaacagttggtcatgttcggagtttgacctgaatgagattcgcctgatagtttaccaggactgtgacaggagaggcagacaagtcttgtttgactctaaagctgttcaaaagattgaggaggtgacagctcagaaaacagaggatgttcctattaaaatatcagccaagtgctgccagggaagcagcagtgtcagcagcagtagcagcagcagcatctcttcccacagttcttctgggggatcttcacatcatgctaaggaacagcttccaaagtaccagtacacaagaccagcttccgatgtcaacatgttaggggaaatgatgtttggctcagttgccatgagttacaaaggctccaccttaaagatacactacatacgttctcctccacaactgatgattagtaaagtcttctctgctagaatgggcagcttctgtggaagtacaaataacttgcaagacagctttgagtacatcaaccaagatcctaatttgggaaaactgaacacaaatcaaaatagtttgggtccttgtcgtactggaagtaacctagcacacagcacaccagttgatatgccaagcagaggacagaatgaagacagggacagtggcattgctcgatcagcctcactaagcagtcttttgatcacacctttcccatctccaagctcctctacatcttcttccagcagttaccagcgccgctggcttcgaagtcagacaacaagtttggaaaatggcatcatcccaagaaggtcaactgatgagacattcagcttggctgaagaaacctgtagctctaatccagctatggttaggaggaagaaaattgccataagcatcatcttttccctatgtgagaaagaagaagcacaaaggaatttccaggacttcttcttttctcattttcccctgtttgaatctcacatgaacaggctgaagagtgcaattgaaaaggctatgatctcctgtaggaaaatagcagaatcaagtctccgagtccagttttatgtcagccgtttgatggaagctctgggagaattcagaggaactatctggaacttatattctgttccaaggatagctgaacctgtatggcttactatgatgtccggcactttggaaaaaaaccagctctgccagcgctttctcaaggagtttacacttctgatagaacagataaataaaaaccagttttttgctgccttactgactgcggtgttaacctaccacctggcctgggtcccaactgtcatgcctgtggatcaccctcccatcaaagccttctcagagaaacgtacctcccagtcagtgaacatgctggccaaaacacatccgtataatcctctttgggcacagctgggtgatctttacggagccataggctctccagtgagactgactcgcaccgtagtggtagggaagcagaaggacttagtccagcgaatactttatgtcctgacctactttctccgttgctctgagctacaagagaaccagctgacctggagtggcaatcatggtgaaggtgaccaagttttaaatgggagcaagatcataacagccttggagaaaggagaggtggaggagtctgagtatgtggtcattacggtgaggaacgagcccgctcttgtaccccccatcctaccaccaacagcagcagagagacacaacccctggccgacagggtttcctgagtgcccagagggcactgacagtagagacctgggtcttaaacctgacaaagaagctaacaggaggccagagcagggttctgaggcttgcagcgcagggtgcctggggccagcatcagacgcttcctggaaacctcagaatgcattttgtggg

SEQ ID NO: 134944 - DNA, 722 bp, Homo sapiens
  Payload ID: 6353
  Gene Symbol: FIGLA
  Gene Name: folliculogenesis specific bHLH transcription factor
  Uniprot ID: Q6QHK4
  ENST ID: ENST00000332372
  CDS Start-End: 6-665
ctgccatggaccccgcgcccggcgtcctagatccccgcgccgcgccgcccgcgctcctgggcaccccgcaagccgaggtgctggaggacgtgttgcgggagcagttcgggccgctgccccagctggccgctgtctgccggctcaagcggctgccctcgggcggctactcgtccactgaaaacctccagttggtgctggagcggcggcgtgtggccaacgccaaggagcgtgagcggataaaaaatctcaaccgtggttttgccagattgaaggcacttgtgccatttcttccccaaagcaggaagcccagcaaagttgatatccttaaaggtgcgactgaatatatacaggttctcagtgatcttttggaaggagccaaagactcaaagaaacaagacccagatgagcagagctatagtaacaacagttctgaatcacatacatcctcggcaagacagctgtcaagaaacatcacccaacatatcagctgtgctttcggcttgaagaatgaagaggaagggccttgggcagatggtggcagtggtgagccagcacacgcttgtcgccacagtgtgatgtctacgactgaaattatctccccaaccagaagtctggatagattcccagaagtagaactgctgagtcacagacttccacaagtatgaaaaatgaaaaggcccagggttaccttctagagacaaataaatgcagtcttgaaagtt

SEQ ID NO: 134945 - DNA, 2519 bp, Homo sapiens
  Payload ID: 6354
  Gene Symbol: FST
  Gene Name: follistatin
  Uniprot ID: P19883
  ENST ID: ENST00000256759
  CDS Start-End: 384-1418
gatttcgggcacctccgaaagataattgggaagggtttccagaaggtgggaaatgtcacctgattcacactgaacttttgaaagctccccacccccaaggagccgcgcacaccctcgctcgcggccgccctcccacagccccacacactgggagaccgcccaccgcaaaccgcggagacccccgtctagatttaaagcgcggctgcgcccggcttctgacgtccattgaatcgcgcgggcggccggcggcgagcgcggggctgcgccgggatcgctgcgccctccgccgctggcctctgcgacgcgcgccgctcgcccgagccacccgccgccgcgccggctccccgcgccgctgcgctcctcgccccgcgcctgcccccaggatggtccgcgcgaggcaccagccgggtgggctttgcctcctgctgctgctgctctgccagttcatggaggaccgcagtgcccaggctgggaactgctggctccgtcaagcgaagaacggccgctgccaggtcctgtacaagaccgaactgagcaaggaggagtgctgcagcaccggccggctgagcacctcgtggaccgaggaggacgtgaatgacaacacactcttcaagtggatgattttcaacgggggcgcccccaactgcatcccctgtaaagaaacgtgtgagaacgtggactgtggacctgggaaaaaatgccgaatgaacaagaagaacaaaccccgctgcgtctgcgccccggattgttccaacatcacctggaagggtccagtctgcgggctggatgggaaaacctaccgcaatgaatgtgcactcctaaaggcaagatgtaaagagcagccagaactggaagtccagtaccaaggcagatgtaaaaagacttgtcgggatgttttctgtccaggcagctccacatgtgtggtggaccagaccaataatgcctactgtgtgacctgtaatcggatttgcccagagcctgcttcctctgagcaatatctctgtgggaatgatggagtcacctactccagtgcctgccacctgagaaaggctacctgcctgctgggcagatctattggattagcctatgagggaaagtgtatcaaagcaaagtcctgtgaagatatccagtgcactggtgggaaaaaatgtttatgggatttcaaggttgggagaggccggtgttccctctgtgatgagctgtgccctgacagtaagtcggatgagcctgtctgtgccagtgacaatgccacttatgccagcgagtgtgccatgaaggaagctgcctgctcctcaggtgtgctactggaagtaaagcactccggatcttgcaactccatttcggaagacaccgaggaagaggaggaagatgaagaccaggactacagctttcctatatcttctattctagagtggtaaactctctataagtgttcagtgttgacatagcctttgtgcaaaaaaaaaaaaaaaaaaaaagaaaaagaaaaaaagaaaaatatattgtccatactgtaaataagtgtatgcttatttatttggggggaaaactatacattaaaggacctttgtcctaaagctctctcccaggccaccttgttactcattggacacggagaggcattcattgtgaggtctactggatgaggcccatagttgagacttgtagacatttatttatactgtgtcatgttttataatttatacataaaatgtctggttgactgtataccttgtttttgaagaaatttattcgtgaaaggaagagcagttgttatttattgtgaggtctcttgcttgtaaagtaaaagctttttttccttgtaaaccatttaagtccattccttactattcactcactcatctgtctcccttcatttcactgttagactcttttccactttcaacaaacttgcatgtcagtttctgtcatgtttatttattggattctctgctgcctgatctgtacatacatgatccctcgggttttgtttacaaggaaccttgactgaccaaaaggcattataactctgactcaaatacaaggtacagaagataagcatctttgaggaaactcctacttcagttcttttgttatgatgaagacatttgtgagagaggagatgattagaattctagtaatgtacttttaagatgttacagatacaaagaaatgatgtgggtgtcaggagactaaaggatgttgaaggctacacattcaaccttttgttaggtgtttcctttaagctactcagctgtaccttttaaattagttctttttcaaccagtatatcactaaaagttatatcaaagctttatcagttcaagtttcttgcttttcataatacttttttctgatgcaattttatattttcaaacatggcaagttaaaatataaattcatttaaatatatagttttgtacttttctaccatgtaaatgtgcaatgtatataaaagttataatgtgtatttgtaaataaatgatgagtgaaaaaataaaaaaattttaaaaagccaa

SEQ ID NO: 134946 - DNA, 2538 bp, Homo sapiens
  Payload ID: 6354
  Gene Symbol: FST
  Gene Name: follistatin
  Uniprot ID: P19883
  ENST ID: ENST00000396947
  CDS Start-End: 167-1120
gacgtccattgaatcgcgcgggcggccggcggcgagcgcggggctgcgccgggatcgctgcgccctccgccgctggcctctgcgacgcgcgccgctcgcccgagccacccgccgccgcgccggctccccgcgccgctgcgctcctcgccccgcgcctgcccccaggatggtccgcgcgaggcaccagccgggtgggctttgcctcctgctgctgctgctctgccagttcatggaggaccgcagtgcccaggctgggaactgctggctccgtcaagcgaagaacggccgctgccaggtcctgtacaagaccgaactgagcaaggaggagtgctgcagcaccggccggctgagcacctcgtggaccgaggaggacgtgaatgacaacacactcttcaagtggatgattttcaacgggggcgcccccaactgcatcccctgtaaagaaacgtgtgagaacgtggactgtggacctgggaaaaaatgccgaatgaacaagaagaacaaaccccgctgcgtctgcgccccggattgttccaacatcacctggaagggtccagtctgcgggctggatgggaaaacctaccgcaatgaatgtgcactcctaaaggcaagatgtaaagagcagccagaactggaagtccagtaccaaggcagatgtaaaaagacttgtcgggatgttttctgtccaggcagctccacatgtgtggtggaccagaccaataatgcctactgtgtgacctgtaatcggatttgcccagagcctgcttcctctgagcaatatctctgtgggaatgatggagtcacctactccagtgcctgccacctgagaaaggctacctgcctgctgggcagatctattggattagcctatgagggaaagtgtatcaaagcaaagtcctgtgaagatatccagtgcactggtgggaaaaaatgtttatgggatttcaaggttgggagaggccggtgttccctctgtgatgagctgtgccctgacagtaagtcggatgagcctgtctgtgccagtgacaatgccacttatgccagcgagtgtgccatgaaggaagctgcctgctcctcaggtgtgctactggaagtaaagcactccggatcttgcaactgaatctgcccgtaaaacctgagccattgattcttcagaactttctgcagtttttgacttcatagattatgctttaaaaaaatttttttaacttattgcataacagcagatgccaaaaacaaaaaaagcatctcactgcaagtcacataaaaatgcaacgctgtaatatggctgtatcagagggctttgaaaacatacactgagctgcttctgcgctgttgttgtccgtatttaaacaacagctcccctgtattcccccatctagccatttcggaagacaccgaggaagaggaggaagatgaagaccaggactacagctttcctatatcttctattctagagtggtaaactctctataagtgttcagtgttgacatagcctttgtgcaaaaaaaaaaaaaaaaaaaaagaaaaagaaaaaaagaaaaatatattgtccatactgtaaataagtgtatgcttatttatttggggggaaaactatacattaaaggacctttgtcctaaagctctctcccaggccaccttgttactcattggacacggagaggcattcattgtgaggtctactggatgaggcccatagttgagacttgtagacatttatttatactgtgtcatgttttataatttatacataaaatgtctggttgactgtataccttgtttttgaagaaatttattcgtgaaaggaagagcagttgttatttattgtgaggtctcttgcttgtaaagtaaaagctttttttccttgtaaaccatttaagtccattccttactattcactcactcatctgtctcccttcatttcactgttagactcttttccactttcaacaaacttgcatgtcagtttctgtcatgtttatttattggattctctgctgcctgatctgtacatacatgatccctcgggttttgtttacaaggaaccttgactgaccaaaaggcattataactctgactcaaatacaaggtacagaagataagcatctttgaggaaactcctacttcagttcttttgttatgatgaagacatttgtgagagaggagatgattagaattctagtaatgtacttttaagatgttacagatacaaagaaatgatgtgggtgtcaggagactaaaggatgttgaaggctacacattcaaccttttgttaggtgtttcctttaagctactcagctgtaccttttaaattagttctttttcaaccagtatatcactaaaagttatatcaaagctttatcagttcaagtttcttgcttttcataatacttttttctgatgcaattttatattttcaaacatggcaagttaaaatataaattcatttaaatatatagttttgtacttttctaccatgtaaatgtgcaatgtatataaaagttataatgtgtatttgtaaataaatgatgagtg

SEQ ID NO: 134947 - DNA, 705 bp, Homo sapiens
  Payload ID: 6354
  Gene Symbol: FST
  Gene Name: follistatin
  ENST ID: ENST00000504226
  CDS Start-End: 1-648
ggtccagtctgcgggctggatgggaaaacctaccgcaatgaatgtgcactcctaaaggcaagatgtaaagagcagccagaactggaagtccagtaccaaggcagatgtaaaaagacttgtcgggatgttttctgtccaggcagctccacatgtgtggtggaccagaccaataatgcctactgtgtgacctgtaatcggatttgcccagagcctgcttcctctgagcaatatctctgtgggaatgatggagtcacctactccagtgcctgccacctgagaaaggctacctgcctgctgggcagatctattggattagcctatgagggaaagtgtatcacaaagtcctgtgaagatatccagtgcactggtgggaaaaaatgtttatgggatttcaaggttgggagaggccggtgttccctctgtgatgagctgtgccctgacagtaagtcggatgagcctgtctgtgccagtgacaatgccacttatgccagcgagtgtgccatgaaggaagctgcctgctcctcaggtgtgctactggaagtaaagcactccggatcttgcaactccatttcggaagacaccgaggaagaggaggaagatgaagaccaggactacagctttcctatatcttctattctagagtggtaaactctctataagtgttcagtgttgacatagcctttgtgcaaaaaaaaaaaaaaaaaa

SEQ ID NO: 134948 - DNA, 712 bp, Homo sapiens
  Payload ID: 6354
  Gene Symbol: FST
  Gene Name: follistatin
  ENST ID: ENST00000497789
  CDS Start-End: 1-308
ccagtgcctgccacctgagaaaggctacctgcctgctgggcagatctattggattagcctatgagggaaagtgtatcacaaagtcctgtgaagatatccagtgcactggtgggaaaaaatgtttatgggatttcaaggttgggagaggccggtgttccctctgtgatgagctgtgccctgacagtaagtcggatgagcctgtctgtgccagtgacaatgccacttatgccagcgagtgtgccatgaaggaagctgcctgctcctcaggtgtgctactggaagtaaagcactccggatcttgcaactgaatctgcccgtaaaacctgagccattgattcttcagaactttctgcagtttttgacttcatagattatgctttaaaaaaatttttttaacttattgcataacagcagatgccaaaaacaaaaaaagcatctcactgcaagtcacataaaaatgcaacgctgtaatatggctgtatcagagggctttgaaaacatacactgagctgcttctgcgctgttgttgtccgtatttaaacaacagctcccctgtattcccccatctagccatttcggaagacaccgaggaagaggaggaagatgaagaccaggactacagctttcctatatcttctattctagagtggtaaactctctataagtgttcagtgttgacatagcctttgtgcaaaaaaaaaaaaaaaaaaaa

SEQ ID NO: 134949 - DNA, 5943 bp, Homo sapiens
  Payload ID: 6355
  Gene Symbol: FSTL1
  Gene Name: follistatin-like 1
  Uniprot ID: Q12841
  ENST ID: ENST00000295633
  CDS Start-End: 358-1284
ggcagggacccacgggacaccccctctgcctccgctccacgtccagggggccgaaggggcgccggacgagggaccgtgcggagagaggggttcggcggcgccaggactcccgcgggctccccggagcaggggtcggaaggagggggagcgggagccgcgggggccgctgcagcagaagggggaggagaatggggaggagctgggggggcaggcaggcggggaaggagaggtcttaaggggcggcgaggggaggtcgcatttcctccgaggctggcgatcggcggagctcccacctccgcttacagctcgctgccgccgtcctgccccgcgcccccaggagacctggaccagaccacgatgtggaaacgctggctcgcgctcgcgctcgcgctggtggcggtcgcctgggtccgcgccgaggaagagctaaggagcaaatccaagatctgtgccaatgtgttttgtggagccggccgggaatgtgcagtcacagagaaaggggaacccacctgtctctgcattgagcaatgcaaacctcacaagaggcctgtgtgtggcagtaatggcaagacctacctcaaccactgtgaactgcatcgagatgcctgcctcactggatccaaaatccaggttgattacgatggacactgcaaagagaagaaatccgtaagtccatctgccagcccagttgtttgctatcagtccaaccgtgatgagctccgacgtcgcatcatccagtggctggaagctgagatcattccagatggctggttctctaaaggcagcaactacagtgaaatcctagacaagtattttaagaactttgataatggtgattctcgcctggactccagtgaattcctgaagtttgtggaacagaatgaaactgccatcaatattacaacgtatccagaccaggagaacaacaagttgcttaggggactctgtgttgatgctctcattgaactgtctgatgaaaatgctgattggaaactcagcttccaagagtttctcaagtgcctcaacccatctttcaaccctcctgagaagaagtgtgccctggaggatgaaacgtatgcagatggagctgagaccgaggtggactgtaaccgctgtgtctgtgcctgtggaaattgggtctgtacagccatgacctgtgacggaaagaatcagaagggggcccagacccagacagaggaggagatgaccagatatgtccaggagctccaaaagcatcaggaaacagctgaaaagaccaagagagtgagcaccaaagagatctaatgaggaggcacagaccagtgtctggatcccagcatcttctccacttcagcgctgagttcagtatacacaagtgtctgctacagtcgccaaatcaccagtatttgcttatatagcaatgagttttattttgtttatttgttttgcaataaaggatatgaaggtggctggctaggaagggaagggccacagccttcatttctaggagtgctttaagagaaactgtaaatggtgctctggggctggaggctagtaaggaaactgcatcacgattgaaagaggaacagacccaaatctgaacctcttttgagtttactgcatctgtcagcaggctgcagggagtgcacacgatgccagagagaacttagcagggtgtccccggaggagaggtttgggaagctccacggagaggaacgctctctgcttccagcctctttccattgccgtcagcatgacagacctccagcatccacgcatctcttggtcccaataactgcctctagatacatagccatactgctagttaacccagtgtccctcagacttggatggagtttctgggagggtacacccaaatgatgcagatacttgtatactttgagccccttagcgacctaaccaaattttaaaaatactttttaccaaaggtgctatttctctgtaaaacacttttttttggcaagttgactttattcttcaattattatcattatattattgttttttaatattttattttcttgactaggtattaagcttttgtaattatttttcagtagtcccaccacttcataggtggaaggagtttggggttcttcctggtgcaggggctgaaataacccagatgcccccaccctgccacatactagatgcagcccatagttggcccccctagcttccagcagtccactatctgccagaggagcaagggtgccttagaccgaagccaggggaagaagcatcttcataaaaaactttcaagatccaaacattaatttgtttttatttattctgagaagttgaggcaaatcagtattcccaaggatggcgacaagggcagccaagcagggcttaggatatcccagcctaccaatatgctcattcgactaactaggagggtgagttggccctgtctcttcttttttctggacctcagtttcctcagtgagctggtaagaatgcactaaccttttgatttgataagttataaattctgtggttctgatcattggtccagaggggagataggttcctgtgatttttccttcttctctatagaataaatgaaatcttgttactagaacaagaaatgtcagatggccaaaaacaagatgaccagatttgatctcagcctgatgaccctacaggtcgtgctatgatatggagtcctcatgggtaaagcaggaagagagtgggaaagagaaccaccccactctgtcttcatatttgcatttcatgtttaacctccggctggaaatagaaagcattcccttagagatgaggataaaagaaagtttcagattcaacagggggaagaaaatggagatttaatcctaaaactgtgacttggggaggtcagtcatttacagttagtcctgtgtctttcgacttctgtgattattaaccccactcactaccctgtttcagatgcatttggaataccaaagattaaatccttgacataagatctcatttgcagaaagcagattaaagaccatcagaaggaaattatttaggttgtaatgcacaggcaactgtgagaaactgttgtgccaaaaatagaattccttctagtttttcttgttctcatttgaaaggagaaaattccactttgtttagcatttcaagcttttatgtatccatcccatctaaaaactcttcaaactccacttgttcagtctgaaatgcagctccctgtccaagtgccttggagaactcacagcagcacgccttaatcaaaggttttaccagcccttggacactatgggaggagggcaagagtacaccaatttgttaaaagcaagaaaccacagtgtctcttcactagtcatttagaacatggttatcatccaagactactctaccctgcaacattgaactcccaagagcaaatccacattcctcttgagttctgcagcttctgtgtaaatagggcagctgtcgtctatgccgtagaatcacatgatctgaggaccattcatggaagctgctaaatagcctagtctggggagtcttccataaagttttgcatggagcaaacaaacaggattaaactaggtttggttccttcagccctctaaaagcatagggcttagcctgcaggcttccttgggctttctctgtgtgtgtagttttgtaaacactatagcatctgttaagatccagtgtccatggaaacattcccacatgccgtgactctggactatatcagtttttggaaagcagggttcctctgcctgctaacaagcccacgtggaccagtctgaatgtctttcctttacacctatgtttttaagtagtcaaacttcaagaaacaatctaaacaagtttctgttgcatatgtgtttgtgaacttgtatttgtatttagtaggcttctatattgcatttaacttgtttttgtaactcctgattcttccttttcggatactattgatgaataaagaaattaaagtgatggttttattggtttcctttcccccaattaaggccaaataaagtcgtgagaacattacccatttacttcctaagagtggatttgagtttcaggagccttaaaaaggactgaagagtttctcctgggactacagcttggatggaaagtttactcggggactggtagaacaagtttctttgaaaggatcatggatagtgggtctggagtagaaggtgatgacaagtcagaaagtgtcttagtcccttcaagttgctataacaaaatgcctcagactgggtaattataggcaacagaaatgtattgctcacagttctgaaggctgggaagcctaagatcaaggtaccagcagattcagtgtctgatgacggcttgttgaagcttgcctgcttcaaagaatgcacctttttgatgcatccccacatggtgaaaagggtgaacaaactcccttaggcctcttttataagggcacttacccattcatgagggttaaactttgatgacctaatcatctcccaagagcctcacctctcaataccattgctttggggattcaattttaacatatgaattttgggggacataaacattcaaaccatagcaggtgcattcctgtattgggaagacattaaattaaatgactcgtaaatcccccatatgatttaggagactaaatggcatccagtgaggctgactgcagtagcctgtgagaaggcaaataaacatgggaaggtagtacagggaacatggaatcattgccagggacaggctaaataaccttaatggcacttccttgatacacacattccatgggggtaaacagttccaagtgggctgaacgttagctggttaaaacctcttttgcttggggacacatgactaacgctttccaacctgccattttcatatgtatcatgcactctccacccacaataattctgcctcccaaaagagcatattatagtcaatgaggtttaaggtttcttcggttcagtcatgtggaagttttgctttcctaaaattatagctggatcactttgattggatttgggatattacccaaatgctaatcaaatattaaaaggcaatcttttttgttatgtgattgctacagattactgctcttacagtttgattcttcaaattttcattctcagaagggaatcttaaacccagtttgaagggtaccttgtccacaaccacttttaaattttggctaacttcccaaccttccaccatgttctgggaaaactttttctgctgttatagtatgtatgtattcaggaagtgcaacattattaaactaagcataattcagaagctaagtttcctttcatcaaaatttaatattacgaattgtgcaaagaagtatgttactttgatcagctttattttagagcttctttatcaagttatcatcagtcctcttgaattatttctgaaataaggggaaggaaggaagggaaaaaatatgaatgcatagatagatctaagcagatgccttcagagccctggaataatcctagctgggatatgggacatgaaaacaactctggcctactgctgctgggggctgttgcatggtgtgacataggaagtaaaatgttgctgtatgaataggaaggagggtcttcctgtcaatgagaattaatgttttcctaatgatttaacttttttactgaaaaaataatatgtgtacatggtaaaaatccaaattgtatcacagaaaatacagtgaataaaaccatcctcttaagagggtgtgtacatttataaatttgcctatgattgcctataaagtcaaagaagttgcaccagtatgcatgactgccaaaagtacataaactgagcatatccatttccctacattcttgcaaacattgtgccttcgaactttttggcctctgatagaggaaaaatggtaactccttgttttattttttatattcattattccttttgtaagattaaatatcatctcatgaataa

SEQ ID NO: 134950 - DNA, 1396 bp, Homo sapiens
  Payload ID: 6355
  Gene Symbol: FSTL1
  Gene Name: follistatin-like 1
  Uniprot ID: Q12841
  ENST ID: ENST00000424703
  CDS Start-End: 96-917
ctccgaggctggcgatcggcggagctcccacctccgcttacagctcgctgccgccgtcctgccccgcgcccccaggagacctggaccagaccacgatgtggaaacgctggctcgcgctcgcgctcgcgctggtggcggtcgcctgggtccgcgccgagcaatgcaaacctcacaagaggcctgtgtgtggcagtaatggcaagacctacctcaaccactgtgaactgcatcgagatgcctgcctcactggatccaaaatccaggttgattacgatggacactgcaaagagaagaaatccgtaagtccatctgccagcccagttgtttgctatcagtccaaccgtgatgagctccgacgtcgcatcatccagtggctggaagctgagatcattccagatggctggttctctaaaggcagcaactacagtgaaatcctagacaagtattttaagaactttgataatggtgattctcgcctggactccagtgaattcctgaagtttgtggaacagaatgaaactgccatcaatattacaacgtatccagaccaggagaacaacaagttgcttaggggactctgtgttgatgctctcattgaactgtctgatgaaaatgctgattggaaactcagcttccaagagtttctcaagtgcctcaacccatctttcaaccctcctgagaagaagtgtgccctggaggatgaaacgtatgcagatggagctgagaccgaggtggactgtaaccgctgtgtctgtgcctgtggaaattgggtctgtacagccatgacctgtgacggaaagaatcagaagggggcccagacccagacagaggaggagatgaccagatatgtccaggagctccaaaagcatcaggaaacagctgaaaagaccaagagagtgagcaccaaagagatctaatgaggaggcacagaccagtgtctggatcccagcatcttctccacttcagcgctgagttcagtatacacaagtgtctgctacagtcgccaaatcaccagtatttgcttatatagcaatgagttttattttgtttatttgttttgcaataaaggatatgaaggtggctggctaggaagggaagggccacagccttcatttctaggagtgctttaagagaaactgtaaatggtgctctggggctggaggctagtaaggaaactgcatcacgattgaaagaggaacagacccaaatctgaacctcttttgagtttactgcatctgtcagcaggctgcagggagtgcacacgatgccagagagaacttagcagggtgtccccggaggagaggtttgggaagctccacggagaggaacgctctctgcttccagcctctttccattgccgtcagcatgacagacctccagcatccacgcatctctt

SEQ ID NO: 134951 - DNA, 807 bp, Homo sapiens
  Payload ID: 6355
  Gene Symbol: FSTL1
  Gene Name: follistatin-like 1
  ENST ID: ENST00000480823
  CDS Start-End: 1-61
cagcttccaagagtttctcaagtgcctcaacccatctttcaaccctcctgagaagaagtgagcaccaaagagatctaatgaggaggcacagaccagtgtctggatcccagcatcttctccacttcagcgctgagttcagtatacacaagtgtctgctacagtcgccaaatcaccagtatttgcttatatagcaatgagttttattttgtttatttgttttgcaataaaggatatgaaggtggctggctaggaagggaagggccacagccttcatttctaggagtgctttaagagaaactgtaaatggtgctctggggctggaggctagtaaggaaactgcatcacgattgaaagaggaacagacccaaatctgaacctcttttgagtttactgcatctgtcagcaggctgcagggagtgcacacgatgccagagagaacttagcagggtgtccccggaggagaggtttgggaagctccacggagaggaacgctctctgcttccagcctctttccattgccgtcagcatgacagacctccagcatccacgcatctcttggtcccaataactgcctctagatacatagccatactgctagttaacccagtgtccctcagacttggatggagtttctgggagggtacacccaaatgatgcagatacttgtatactttgagccccttagcgacctaaccaaattttaaaaatactttttaccaaaggtgctatttctctgtaaaacacttttttttggcaagttgactttattcttcaattattatcattatattattgttttttaatatt

SEQ ID NO: 134952 - DNA, 565 bp, Homo sapiens
  Payload ID: 6355
  Gene Symbol: FSTL1
  Gene Name: follistatin-like 1
  ENST ID: ENST00000469005
  CDS Start-End: 147-565
ctccgaggctggcgatcggcggagctcccacctccgcttacagctcgctgccgccgtcctgccccgcgcccccaggagacctggaccagaccacggtcagcgcggggcccggcgccttcagactcgctctcttctctcttccgcagatgtggaaacgctggctcgcgctcgcgctcgcgctggtggcggtcgcctgggtccgcgccgaggaagagctaaggagcaaatccaagatctgtgccaatgtgttttgtggagccggccgggaatgtgcagtcacagagaaaggggaacccacctgtctctgcattgagcaatgcaaacctcacaagaggcctgtgtgtggcagtaatggcaagacctacctcaaccactgtgaactgcatcgagatgcctgcctcactggatccaaaatccaggttgattacgatggacactgcaaagagaagaaatccgtaagtccatctgccagcccagttgtttgctatcagtccaaccgtgatgagctccgacgtcgcatcatccagtggctggaagctgagatcattccagatggctggttctc

SEQ ID NO: 134953 - DNA, 2542 bp, Homo sapiens
  Payload ID: 6356
  Gene Symbol: FSTL3
  Gene Name: follistatin-like 3 (secreted glycoprotein)
  Uniprot ID: O95633
  ENST ID: ENST00000166139
  CDS Start-End: 60-851
tatagggagcgccggccgcgcgctgggaagtcggtgccgctgccgtctctgcgttcgccatgcgtcccggggcgccagggccactctggcctctgccctggggggccctggcttgggccgtgggcttcgtgagctccatgggctcggggaaccccgcgcccggtggtgtttgctggctccagcagggccaggaggccacctgcagcctggtgctccagactgatgtcacccgggccgagtgctgtgcctccggcaacattgacaccgcctggtccaacctcacccacccggggaacaagatcaacctcctcggcttcttgggccttgtccactgccttccctgcaaagattcgtgcgacggcgtggagtgcggcccgggcaaggcgtgccgcatgctggggggccgcccgcgctgcgagtgcgcgcccgactgctcggggctcccggcgcggctgcaggtctgcggctcagacggcgccacctaccgcgacgagtgcgagctgcgcgccgcgcgctgccgcggccacccggacctgagcgtcatgtaccggggccgctgccgcaagtcctgtgagcacgtggtgtgcccgcggccacagtcgtgcgtcgtggaccagacgggcagcgcccactgcgtggtgtgtcgagcggcgccctgccctgtgccctccagccccggccaggagctttgcggcaacaacaacgtcacctacatctcctcgtgccacatgcgccaggccacctgcttcctgggccgctccatcggcgtgcgccacgcgggcagctgcgcaggcacccctgaggagccgccaggtggtgagtctgcagaagaggaagagaacttcgtgtgagcctgcaggacaggcctgggcctggtgcccgaggccccccatcatcccctgttatttattgccacagcagagtctaatttatatgccacggacactccttagagcccggattcggaccacttggggatcccagaacctccctgacgatatcctggaaggactgaggaagggaggcctgggggccggctggtgggtgggatagacctgcgttccggacactgagcgcctgatttagggcccttctctaggatgccccagcccctaccctaagacctattgccggggaggattccacacttccgctcctttggggataaacctattaattattgctactatcaagagggctgggcattctctgctggtaattcctgaagaggcatgactgcttttctcagccccaagcctctagtctgggtgtgtacggagggtctagcctgggtgtgtacggagggtctagcctgggtgagtacggagggtctagcctgggtgagtacggagggtctagcctgggtgagtacggagggtctagcctgggtgtgtatggaggatctagcctgggtgagtatggagggtctagcctgggtgagtatggagggtctagcctgggtgtgtatggagggtctagcctgggtgagtatggagggtctagcctgggtgtgtatggagggtctagcctgggtgagtatggagggtctagcctgggtgtgtacggagggtctagtctgagtgcgtgtggggacctcagaacactgtgaccttagcccagcaagccaggcccttcatgaaggccaagaaggctgccaccattccctgccagcccaagaactccagcttccccactgcctctgtgtgcccctttgcgtcctgtgaaggccattgagaaatgcccagtgtgccccctgggaaagggcacggcctgtgctcctgacacgggctgtgcttggccacagaaccacccagcgtctcccctgctgctgtccacgtcagttcatgaggcaacgtcgcgtggtctcagacgtggagcagccagcggcagctcagagcagggcactgtgtccggcggagccaagtccactctgggggagctctggcggggaccacgggccactgctcacccactggccccgaggggggtgtagacgccaagactcacgcatgtgtgacatccggagtcctggagccgggtgtcccagtggcaccactaggtgcctgctgcctccacagtggggttcacacccagggctccttggtcccccacaacctgccccggccaggcctgcagacccagactccagccagacctgcctcacccaccaatgcagccggggctggcgacaccagccaggtgctggtcttgggccagttctcccacgacggctcaccctcccctccatctgcgttgatgctcagaatcgcctacctgtgcctgcgtgtaaaccacagcctcagaccagctatggggagaggacaacacggaggatatccagcttccccggtctggggtgaggaatgtggggagcttgggcatcctcctccagcctcctccagcccccaggcagtgccttacctgtggtgcccagaaaagtgcccctaggttggtgggtctacaggagcctcagccaggcagcccaccccaccctggggccctgcctcaccaaggaaataaagactcaagccattttggggtg

SEQ ID NO: 134954 - DNA, 746 bp, Homo sapiens
  Payload ID: 6356
  Gene Symbol: FSTL3
  Gene Name: follistatin-like 3 (secreted glycoprotein)
  ENST ID: ENST00000588773
  CDS Start-End: 225-347
agtgcgtaggggcggggcctccagcccaggacaggtcacatgggtggcggtggggcctgaagtcctgtgagcacgtggtgtgcccgcggccacagtcgtgcgtcgtggaccagacgggcagcgcccactgcgtggtgtgtcgagcggcgccctgccctgtgccctccagccccggccaggagctttgcggcaacaacaacgtcacctacatctcctcgtgccacatgcgccaggccacctgcttcctgggccgctccatcggcgtgcgccacgcgggcagctgcgcaggcacccctgaggagccgccaggtggtgagtctgcagaagaggaagagaacttcgtgtgagcctgcaggacaggcctgggcctggtgcccgaggccccccatcatcccctgttatttattgccacagcagagtctaatttatatgccacggacactccttagagcccggattcggaccacttggggatcccagaacctccctgacgatatcctggaaggactgaggaagggaggcctgggggccggctggtgggtgggatagacctgcgttccggacactgagcgcctgatttagggcccttctctaggatgccccagcccctaccctaagacctattgccggggaggattccacacttccgctcctttggggataaacctattaattattgctactatcaagagggctgggcattctctgctggtaattcctgaagaggcatgactgcttttctcagc

SEQ ID NO: 134955 - DNA, 568 bp, Homo sapiens
  Payload ID: 6356
  Gene Symbol: FSTL3
  Gene Name: follistatin-like 3 (secreted glycoprotein)
  ENST ID: ENST00000591573
  CDS Start-End: 294-568
cacatgggtggcggtggggcctgagtaagggcgtctttatacttccgagggagtatcacggggtagggtcttttgtagggttgggatttggaaaatagtgggcctctgggggctcacactgggcaagagagtcctgtgagcacgtggtgtgcccgcggccacagtcgtgcgtcgtggaccagacgggcagcgcccactgcgtggtgtgtcgagcggcgccctgccctgtgccctccagccccggccaggagctttgcggcaacaacaacgtcacctacatctcctcgtgccacatgcgccaggccacctgcttcctgggccgctccatcggcgtgcgccacgcgggcagctgcgcaggtgcagacgcagggcgggggcacaggcctgtcctgggggccggagaaccccctgccctgcgccctcaatgctcttatcgacccttgcaggcacccctgaggagccgccaggtggtgagtctgcagaagaggaagagaacttcgtgtgagcctgcaggacaggcctgggcctggtgcccgaggccccccatcatcccctgttatttattgcc

SEQ ID NO: 134956 - DNA, 2144 bp, Homo sapiens
  Payload ID: 6356
  Gene Symbol: FSTL3
  Gene Name: follistatin-like 3 (secreted glycoprotein)
  ENST ID: ENST00000592947
  CDS Start-End: 338-460
gctgccgcagtgcgtaggggcggggcctccagcccaggacaggtcacatgggtggcggtggggcctgagtaagggcgtctttatacttccgagggagtatcacggggtagggtcttttgtagggttgggatttggaaaatagtgggcctctgggggctcacactgggcaagagagtcctgtgagcacgtggtgtgcccgcggccacagtcgtgcgtcgtggaccagacgggcagcgcccactgcgtggtgtgtcgagcggcgccctgccctgtgccctccagccccggccaggagctttgcggcaacaacaacgtcacctacatctcctcgtgccacatgcgccaggccacctgcttcctgggccgctccatcggcgtgcgccacgcgggcagctgcgcaggcacccctgaggagccgccaggtggtgagtctgcagaagaggaagagaacttcgtgtgagcctgcaggacaggcctgggcctggtgcccgaggccccccatcatcccctgttatttattgccacagcagagtctaatttatatgccacggacactccttagagcccggattcggaccacttggggatcccagaacctccctgacgatatcctggaaggactgaggaagggaggcctgggggccggctggtgggtgggatagacctgcgttccggacactgagcgcctgatttagggcccttctctaggatgccccagcccctaccctaagacctattgccggggaggattccacacttccgctcctttggggataaacctattaattattgctactatcaagagggctgggcattctctgctggtaattcctgaagaggcatgactgcttttctcagccccaagcctctagtctgggtgtgtacggagggtctagcctgggtgtgtacggagggtctagcctgggtgagtacggagggtctagcctgggtgagtacggagggtctagcctgggtgagtacggagggtctagcctgggtgtgtatggaggatctagcctgggtgagtatggagggtctagcctgggtgagtatggagggtctagcctgggtgtgtatggagggtctagcctgggtgagtatggagggtctagcctgggtgtgtatggagggtctagcctgggtgagtatggagggtctagcctgggtgtgtacggagggtctagtctgagtgcgtgtggggacctcagaacactgtgaccttagcccagcaagccaggcccttcatgaaggccaagaaggctgccaccattccctgccagcccaagaactccagcttccccactgcctctgtgtgcccctttgcgtcctgtgaaggccattgagaaatgcccagtgtgccccctgggaaagggcacggcctgtgctcctgacacgggctgtgcttggccacagaaccacccagcgtctcccctgctgctgtccacgtcagttcatgaggcaacgtcgcgtggtctcagacgtggagcagccagcggcagctcagagcagggcactgtgtccggcggagccaagtccactctgggggagctctggcggggaccacgggccactgctcacccactggccccgaggggggtgtagacgccaagactcacgcatgtgtgacatccggagtcctggagccgggtgtcccagtggcaccactaggtgcctgctgcctccacagtggggttcacacccagggctccttggtcccccacaacctgccccggccaggcctgcagacccagactccagccagacctgcctcacccaccaatgcagccggggctggcgacaccagccaggtgctggtcttgggccagttctcccacgacggctcaccctcccctccatctgcgttgatgctcagaatcgcctacctgtgcctgcgtgtaaaccacagcctcagaccagctatggggagaggacaacacggaggatatccagcttccccggtctggggtgaggaatgtggggagcttgggcatcctcctccagcctcctccagcccccaggcagtgccttacctgtggtgcccagaaaagtgcccctaggttggtgggtctacaggagcctcagccaggcagcccaccccaccctggggccctgcctcaccaaggaaataaagactcaagccattt

SEQ ID NO: 134957 - DNA, 537 bp, Homo sapiens
  Payload ID: 6356
  Gene Symbol: FSTL3
  Gene Name: follistatin-like 3 (secreted glycoprotein)
  ENST ID: ENST00000589185
  CDS Start-End: 285-537
ccagcccccgccccccagcgcaggcgcagcgcggacctcggccccaccggtcccgcgcccggaccctgagccctgcccctgggaacccgagggccccgactccgactgaccctgacctgggacggcgcccccgcctccgccctgcagaaggggcgcagggaggggccccgaggccttcgcgcggccccacgcccgggaccctcccgcgcccggccccacgcgcgtgtcctctgtccgcagattcgtgcgacggcgtggagtgcggcccgggcaaggcgtgccgcatgctggggggccgcccgcgctgcgagtgcgcgcccgactgctcggggctcccggcgcggctgcaggtctgcggctcagacggcgccacctaccgcgacgagtgcgagctgcgcgccgcgcgctgccgcggccacccggacctgagcgtcatgtaccggggccgctgccgcaagtcctgtgagcacgtggtgtgcccgcggccacagtcgtgcgtcgtggaccagacgggcagcgcccactgcgtggtgtgtc

SEQ ID NO: 134958 - DNA, 748 bp, Homo sapiens
  Payload ID: 6356
  Gene Symbol: FSTL3
  Gene Name: follistatin-like 3 (secreted glycoprotein)
  ENST ID: ENST00000605925
  CDS Start-End: 227-349
cacatgggtggcggtggggcctgagtaagggcgtctttatacttccgagggagtatcacgggagtcctgtgagcacgtggtgtgcccgcggccacagtcgtgcgtcgtggaccagacgggcagcgcccactgcgtggtgtgtcgagcggcgccctgccctgtgccctccagccccggccaggagctttgcggcaacaacaacgtcacctacatctcctcgtgccacatgcgccaggccacctgcttcctgggccgctccatcggcgtgcgccacgcgggcagctgcgcaggcacccctgaggagccgccaggtggtgagtctgcagaagaggaagagaacttcgtgtgagcctgcaggacaggcctgggcctggtgcccgaggccccccatcatcccctgttatttattgccacagcagagtctaatttatatgccacggacactccttagagcccggattcggaccacttggggatcccagaacctccctgacgatatcctggaaggactgaggaagggaggcctgggggccggctggtgggtgggatagacctgcgttccggacactgagcgcctgatttagggcccttctctaggatgccccagcccctaccctaagacctattgccggggaggattccacacttccgctcctttggggataaacctattaattattgctactatcaagagggctgggcattctctgctggtaattcctgaagaggcatgactgcttttctcagc

SEQ ID NO: 134959 - DNA, 5419 bp, Homo sapiens
  Payload ID: 6357
  Gene Symbol: FSTL4
  Gene Name: follistatin-like 4
  Uniprot ID: Q6MZW2
  ENST ID: ENST00000265342
  CDS Start-End: 251-2779
tcacgggctccggtcccggcggcagaaatagggcagccgcggcggcggtggcacagcagcgggcagcggcggctcagggagctggagcctcaacagcctccagcgagcccgggacccgccgacagcccgagaaaccagccgaaggacgcggggcggggtcgccgccgccgccacggggtgctccctccctcccgcccaagtccggccacctggtcttcccctcggccccggccgtctcagactcatcaaaatgaaaccaggaggcttttggctgcatctcacactgctcggagcctccctgccggctgcgctgggatggatggacccaggaaccagcagaggcccggatgtgggtgtgggggagtcacaggcagaggagcccagaagctttgaagtcacaagaagagaagggctttccagccacaacgagctgctggcctcctgcgggaagaagttctgcagccgagggagccggtgcgtgctcagcaggaagacaggggagcccgaatgccagtgcctggaggcatgcaggcccagctacgtgcctgtgtgcggctctgatgggaggttttatgaaaaccactgtaagctccaccgtgctgcttgcctcctgggaaagaggatcaccgtcatccacagcaaggactgtttcctcaaaggtgacacgtgcaccatggccggctacgcccgcttgaagaatgtccttctggcactccagacccgtctgcagccactccaagaaggagacagcagacaagaccctgcctcccagaagcgcctcctggtggaatctctgttcagggacttagatgcagatggcaatggccacctcagcagctccgaactggctcagcatgtgctgaagaagcaggacctggatgaagacttacttggttgctcaccaggtgacctcctccgatttgacgattacaacagtgacagctccctgaccctccgcgagttctacatggccttccaagtggttcagctcagcctcgcccccgaggacagggtcagtgtgaccacagtgaccgtggggctgagcacagtgctgacctgcgccgtccatggagacctgaggccaccaatcatctggaagcgcaacgggctcaccctgaacttcctggacttggaagacatcaatgactttggagaggatgattccctgtacatcaccaaggtgaccaccatccacatgggcaattacacctgccatgcttccggccacgagcagctgttccagacccacgtcctgcaggtgaatgtgccgccagtcatccgtgtctatccagagagccaggcacaggagcctggagtggcagccagcctaagatgccatgctgagggcattcccatgcccagaatcacttggctgaaaaacggcgtggatgtctcaactcagatgtccaaacagctctcccttttagccaatgggagcgaactccacatcagcagtgttcggtatgaagacacaggggcatacacctgcattgccaaaaatgaagtgggtgtggatgaagatatctcctcgctcttcattgaagactcagctagaaagacccttgcaaacatcctgtggcgagaggaaggcctcagcgtgggaaacatgttctatgtcttctccgacgacggtatcatcgtcatccatcctgtggactgtgagatccagaggcacctcaaacccacggaaaagattttcatgagctatgaagaaatctgtcctcaaagagaaaaaaatgcaacccagccctgccagtgggtatctgcagtcaatgtccggaaccggtacatctatgtggcccagccagcactgagcagagtccttgtggtcgacatccaagcccagaaagtcctacagtccataggtgtggaccctctgccggctaagctgtcctatgacaagtcacatgaccaagtgtgggtcctgagctggggggacgtgcacaagtcccgaccaagtctccaggtgatcacagaagccagcaccggccagagccagcacctcatccgcacaccctttgcaggagtggatgatttcttcattcccccaacaaacctcatcatcaaccacatcaggtttggcttcatcttcaacaagtctgatcctgcagtccacaaggtggacctggaaacaatgatgcccctcaagaccatcggcctgcaccaccatggctgcgtgccccaggccatggcacacacccacctgggcggctacttcttcatccagtgccgacaggacagccccgcctctgctgcccgacagctgctcgttgacagtgtcacagactctgtgcttggccccaatggtgatgtaacaggcaccccacacacatcccccgacgggcgcttcatagtcagtgctgcagctgacagcccctggctgcacgtgcaggagatcacagtgcggggcgagatccagaccctgtatgacctgcaaataaactcgggcatctcagacttggccttccagcgctccttcactgaaagcaatcaatacaacatctacgcggctctgcacacggagccggacctgctgttcctggagctgtccacggggaaggtgggcatgctgaagaacttaaaggagccacccgcagggccagctcagccctgggggggtacccacagaatcatgagggacagtgggctgtttggacagtacctcctcacaccagcccgagagtcactgttcctcatcaatgggagacaaaacacgctgcggtgtgaggtgtcaggtataaagggggggaccacagtggtgtgggtgggtgaggtatgaagggcccagagcagagccctgggccaaggaacaccccctagtcctgacactgcagcctcaagcaggtacgctgtacatttttacagacaaaagcaaaaacctgtactcgctttgtggttcaacactggtctccttgcaagtttcctagtataaggtatgcgctgctaccaagattggggttttttcgttaggaagtatgatttatgccttgagctacgatgagaacatatgctgctgtgtaaagggatcatttctgtgccaagctgcacaccgagtgacctggggacatcatggaaccaagggatcctgctctccaagcagacacctctgtcagttgccttcacatagtcattgtcccttactgccagacccagccagactttgccctgacggagtggcccggaagcagaggccgaccaggagcaggggcctccctcccgaactgaaagcccatccgtcctcgcgtgggaccgcatcttctccctcgcagctgcttcttgcttttctttccatttgacttgctgtaagcctgagggagagccaacaagacttactgcatcttgggggatggggaaatcactcactttattttggaaatttttgattaaaaaaaaattttataatctcaaatgctagtaagcagaaagatgctctccgaggtccaactatatccttccctgccttaggccgagtctcgggggtggtcacaaccccacatcccacagccagaaagaacaatggtcatctgagaatactggccctgtcgactattgccaccctgcttctccaagagcagaccaggccacctcatccgtaaggactcggttctgtgttgggaccccaaaaaaccagaacaagttctgtgtgcctcctttcagcacagaagggagacatctcattagtcaggtctggtaccccagattcagggcagactgggcttgcctggcaaggtatgggtggcctccaggctcaatgcagaaaccccaaggacacgagtggggccaggtgagttcctgaagctataccttttcaaaacagattttgttttcctacctgtggcccatccactcctctctggtaccccatccccgcatcagcactgcagagagaacacatttcggcgagggttttcttacccacattccccaatcaatacacacacactgcagaacccagaacagaaggccacaggctggcactactgcattctccttatgtgtctcaggctgtggtgactctcacatgggcatcgaagaagtacaacccacatagccctctggagaccgcctagatcagagactcagcaaaaacaggctcgccttccctctcccacatatgagtggaacttacatgtgtcctggtttgaatgatcattttgcaagccacacgggttgggagaggtggtctcaccacagacgtctttgctaatttggccaccttcacctactgacatgaccaggattttcctttgccattaaggaatgaactctttcaaggagaggaaaccctagactctgtgtcactctcaacacacacagctcctttcactcctgcctgactgccaagccacctgcatcccccgccccagatctcatgagatcaatcacttgtatgtctcacgcaacttggtccaccaaacgcctgtcccctgtaactcctaggggtgcgcctagacaggtacgtctgttttttattttaaaagatatgctatgtagatataagttgaggaagctcacctcaaaagcctagaatgcagtttcacagtagctgggatgcatggatgacccatctcacccctttttttttcctgcctcaatatcttgatatgttatgtttactcccaatctcccatttttaccactaaaattctccaactttcataaacttttttttggaaaaatttccattgtatcagcccctgacagaaaaaggatctctgagcctaaaggaggaaaagtcccaccaactaccagaccagaacacgagcccctctgggcagcaggattcctaagtcaaagaccagtttgacccaaactggccttttaaaataatcaggagtgacagagtcaacttctgcagcacctgcttctcccccactgtcccttccatcttggaatgtgtctaaaaaagcatagctgccctttgctgtcctcagagtgcatttcctggagacggcaggcttaggtctcactgacagcatgccagacacaactgaatcgaagcaggcctgaagcctaggtcagggtttcaggagtccagccccaggaggcaaagtcaccaatgcagggaggtaaatgccttttggcaggaaaaccaatagagttggttgggtggggagtcaggggtgggaggagaaggaggaagaggaggaaggccagactggcctgccctttctcccatacttcaccccagcagaggttcatgggacacagttggaaagccactgggaggaaatgcctcactacaggggggcctcctgtagcaagcccagccggtaatcctcctaatgaacccacaaggtcaattcacaactgatatcttagctattaaagaagtactgactttaccaaaagaatcatcaagaaagctatttatataaaccccctcagtcattttgaaataaaattaattttacaaaaa

SEQ ID NO: 134960 - DNA, 716 bp, Homo sapiens
  Payload ID: 6357
  Gene Symbol: FSTL4
  Gene Name: follistatin-like 4
  ENST ID: ENST00000510685
  CDS Start-End: 246-716
ccctctgagccaggtgtgggatatagtctcgtggtgcgccgtttcttaagccggtctgaaaagcgcaatattcgggtgggagtgacccgattttccaggtgcgtccgtcacccctttctttgactcggaaagggaactccctggccccttgcgcttcccaggtgaggcaatgcctcgccctgcttcggctcgcgcacggtgcgcacacactggcctgcgcccactgtctggcactccctagtgagatgaacccggtacctcagatggaaatgcagaaatcacccgtcttctgcgtcgctcacgctgggagctgtagaccggagctgttcctattcggccatcttggctcctcctggggccttgatcttaaggaggaggagcccagaagctttgaagtcacaagaagagaagggctttccagccacaacgagctgctggcctcctgcgggaagaagttctgcagccgagggagccggtgcgtgctcagcaggaagacaggggagcccgaatgccagtgcctggaggcatgcaggcccagctacgtgcctgtgtgcggctctgatgggaggttttatgaaaaccactgtaagctccaccgtgctgcttgcctcctgggaaagaggatcaccgtcatccacagcaaggactgtttcctcaaaggtgacacgtgcaccatggccggctacgcccgcttgaagaatgtccttctggcactc

SEQ ID NO: 134961 - DNA, 2660 bp, Homo sapiens
  Payload ID: 6357
  Gene Symbol: FSTL4
  Gene Name: follistatin-like 4
  Uniprot ID: Q6MZW2
  ENST ID: ENST00000621681
  CDS Start-End: 12-2033
gactcatcaaaatgaaaccaggaggcttttggctgcatctcacactgctcggagcctccctgccggctgcgctgggatggatggacccaggaaccagcagaggcccggatgtgggtgtgggggagtcacaggcagaggagcccagaagctttgaagtcacaagaagagaagggctttccagccacaacgagctgctggcctcctgcgggaagaagttctgcagccgagggagccggtgcgtgctcagcctcgcccccgaggacagggtcagtgtgaccacagtgaccgtggggctgagcacagtgctgacctgcgccgtccatggagacctgaggccaccaatcatctggaagcgcaacgggctcaccctgaacttcctggacttggaagacatcaatgactttggagaggatgattccctgtacatcaccaaggtgaccaccatccacatgggcaattacacctgccatgcttccggccacgagcagctgttccagacccacgtcctgcaggtgaatgtgccgccagtcatccgtgtctatccagagagccaggcacaggagcctggagtggcagccagcctaagatgccatgctgagggcattcccatgcccagaatcacttggctgaaaaacggcgtggatgtctcaactcagatgtccaaacagctctcccttttagccaatgggagcgaactccacatcagcagtgttcggtatgaagacacaggggcatacacctgcattgccaaaaatgaagtgggtgtggatgaagatatctcctcgctcttcattgaagactcagctagaaagacccttgcaaacatcctgtggcgagaggaaggcctcagcgtgggaaacatgttctatgtcttctccgacgacggtatcatcgtcatccatcctgtggactgtgagatccagaggcacctcaaacccacggaaaagattttcatgagctatgaagaaatctgtcctcaaagagaaaaaaatgcaacccagccctgccagtgggtatctgcagtcaatgtccggaaccggtacatctatgtggcccagccagcactgagcagagtccttgtggtcgacatccaagcccagaaagtcctacagtccataggtgtggaccctctgccggctaagctgtcctatgacaagtcacatgaccaagtgtgggtcctgagctggggggacgtgcacaagtcccgaccaagtctccaggtgatcacagaagccagcaccggccagagccagcacctcatccgcacaccctttgcaggagtggatgatttcttcattcccccaacaaacctcatcatcaaccacatcaggtttggcttcatcttcaacaagtctgatcctgcagtccacaaggtggacctggaaacaatgatgcccctcaagaccatcggcctgcaccaccatggctgcgtgccccaggccatggcacacacccacctgggcggctacttcttcatccagtgccgacaggacagccccgcctctgctgcccgacagctgctcgttgacagtgtcacagactctgtgcttggccccaatggtgatgtaacaggcaccccacacacatcccccgacgggcgcttcatagtcagtgctgcagctgacagcccctggctgcacgtgcaggagatcacagtgcggggcgagatccagaccctgtatgacctgcaaataaactcgggcatctcagacttggccttccagcgctccttcactgaaagcaatcaatacaacatctacgcggctctgcacacggagccggacctgctgttcctggagctgtccacggggaaggtgggcatgctgaagaacttaaaggagccacccgcagggccagctcagccctgggggggtacccacagaatcatgagggacagtgggctgtttggacagtacctcctcacaccagcccgagagtcactgttcctcatcaatgggagacaaaacacgctgcggtgtgaggtgtcaggtataaagggggggaccacagtggtgtgggtgggtgaggtatgaagggcccagagcagagccctgggccaaggaacaccccctagtcctgacactgcagcctcaagcaggtacgctgtacatttttacagacaaaagcaaaaacctgtactcgctttgtggttcaacactggtctccttgcaagtttcctagtataaggtatgcgctgctaccaagattggggttttttcgttaggaagtatgatttatgccttgagctacgatgagaacatatgctgctgtgtaaagggatcatttctgtgccaagctgcacaccgagtgacctggggacatcatggaaccaagggatcctgctctccaagcagacacctctgtcagttgccttcacatagtcattgtcccttactgccagacccagccagactttgccctgacggagtggcccggaagcagaggccgaccaggagcaggggcctccctcccgaactgaaagcccatccgtcctcgcgtgggaccgcatcttctccctcgcagctgcttcttgcttttctttccatttgacttgctgtaagcctgagggagagccaacaagacttactgcatcttgggggatggggaaatcactcactttattttggaaatttttgattaaaaaaaaattttataatctc

SEQ ID NO: 134962 - DNA, 4831 bp, Homo sapiens
  Payload ID: 6358
  Gene Symbol: FSTL5
  Gene Name: follistatin-like 5
  Uniprot ID: Q8N475
  ENST ID: ENST00000306100
  CDS Start-End: 438-2981
tgcctagggaggaggagcgagaatcagcctggttcagtgactgagacaaactggaggtgaaaggagctggtactgtccactgtgctgtcggtgctgaacctgagacgcgagcggaccagttgctccagcacctgaaggcaacgccctcttgcaccctctgtgccctgtgggacccgcttcaccaacaggacccatatcaacttgacaaaggagtgtggtatcggacgtgggagagagtcctctgtttgccacctgggcgctcattcaggcgtgactttggagatttctatagttttagaccaaactatttttttttccccagctaagacgatcttttgagagttttttttttttattgtgatttatatttccacagcgtttaggaatctttctgggggacttttgtgactgttaaaataaggtgaaaagcaataaggatgtttaagtgctggtcagttgtcttggttctcggattcatttttctggagtcggaaggaaggccaaccaaagaaggaggatatggccttaaatcctatcagcctctaatgagattgcgacataagcaggaaaaaaatcaagaaagttcaagagtcaaaggatttatgattcaggatggcccttttggatcttgtgaaaataagtactgtggtttgggaagacactgtgttaccagcagagagacagggcaagcagaatgtgcctgtatggacctttgcaaacgtcactacaaacctgtgtgtggatctgacggagaattctatgaaaaccactgtgaagtgcacagagctgcttgcctgaaaaaacaaaagattaccattgttcacaatgaagactgcttctttaaaggagataagtgcaagactactgaatacagcaagatgaaaaatatgctattagatttacaaaatcaaaaatatattatgcaagaaaatgaaaatcctaatggcgacgacatatctcggaagaagctattggtggatcaaatgtttaaatattttgatgcagacagtaatggacttgtagatattaatgaactaactcaggtgataaaacaggaagaacttggcaaggatctctttgattgtactttgtatgttctattgaaatatgatgattttaatgctgacaagcacctggctcttgaagaattttatagagcattccaagtgatccagttgagtctgccagaagatcagaaactaagcatcactgcagcaactgtgggacaaagtgctgttctgagctgtgccattcaaggaaccctgagacctcccattatctggaaaaggaacaatattattctaaataatttagatttggaagacatcaatgactttggagatgatgggtccttgtatattactaaggttaccacaactcacgttggcaattacacctgctatgcagatggctatgaacaagtctatcagactcacatcttccaagtgaatgttcctccagtcatccgggtgtatccagagagtcaggctagagagcctggggtaactgccagtcttaggtgccatgcagagggcataccaaagcctcagcttggctggttgaagaatggaattgatattacaccaaagctttccaaacaactcacgcttcaagcaaatggcagtgaggttcacataagcaatgtgcgctatgaagatactggagcatacacttgtatcgcaaagaatgaagcaggagtggatgaagacatctcttctctttttgtggaagactctgctagaaagaccctagctaacatattatggagagaagaaggtctgggaattgggaacatgttctatgttttttatgaagatggaatcaaagtgatacaacccatagaatgtgaatttcagaggcacattaagcctagtgaaaagctccttggatttcaggatgaagtctgtcccaaagctgagggagatgaagttcagaggtgtgtgtgggcatcagctgttaatgtcaaagacaagttcatttatgttgcacagccaactttggacagagtccttattgttgatgtgcagtcccaaaaagttgttcaggcagtgagcacagaccctgtcccagttaaattacactatgacaaatcacatgatcaggtctgggtgctaagctggggtaccttggagaagacatcaccaacactacaggtaattaccctggccagtgggaatgtgcctcaccacacgatccacacccaaccagtgggaaagcaatttgacagagtggatgattttttcattcccaccacaacactcattatcacccatatgaggtttggatttattcttcataaagatgaagctgcactacaaaaaattgatcttgaaaccatgtcatacatcaagacaattaacttgaaggactataagtgcgttcctcagtcattggcatatacacacttgggaggctactacttcattggctgcaaacctgacagcaccggagcagtttccccacaggtcatggtggacggtgtaactgactcagtcattgggttcaatagtgatgtgacgggcactccatatgtctctccagatggccactaccttgtcagcattaatgatgtgaaaggtcttgtaagggttcagtacattaccatcagaggagaaatacaggaggcttttgatatttacacaaatctgcacatatctgatctggcatttcaaccatcctttactgaagcccaccaatataacatctacggtagttcaagcacacaaactgatgtgctctttgtggagctctcttctgggaaggtcaagatgataaagagtctcaaggaaccactcaaggcagaagaatggccttggaaccggaaaaacaggcaaatccaggacagtggcttgtttggtcaatacctgatgacaccttccaaggactctctcttcatcctagatggacgactcaataaattaaactgtgagatcactgaagttgaaaaaggaaatacagtcatttgggttggagatgcctaaaaaccctacgatacaattattgaatgaagcgttttacaatacattgcacttaatccattgtttaaatttacaacttaactttccaagtttatatcctagtcaaacaaaatttacttggttggtccaaataaaataaattgtttttgactaagtgactaagacatacacaattaattatattggttaattagaaatactcagcacaatatttaatgagaaatcacatcagtcacaagaatcaaatatgtaaattatgctttaaacaataaagtaggatttaaatcatttaaaaaactaaactgcagggaatttcagatgacataaagcattatttcattttgagggtagtttattttttttctctgtccttttggtatgattaaacaagaaataaaaggtgttgtggaaacttaaaattcttaattcaaaatattcggtcctgtccactgtttataatattttgtgccttgaagggaatgtcacaggaggaaaaggaagactaaagcctgcatactaaatgctctcataactataaatctcttgttgttaaaaaacatctcttgcaccaaatcctgtcttcagtcttttgtttaaccctcaatgaactaccaattgaaggcataagttggtcttaggttgtatacaggtgtcaaactccacttgacatttactgtataatctgcagcatgctatagaaagtggggaggaagggaggaaaaataattacagtcaaaatatttgcaatctatctactcattttgctttcaatcactagagtgcattatgtttttaatgcaagtttgtctgggatgtcaactgcctacagatgtttattactagcagaatagattatttattaatagattgtttcttttcatatagtccaatgtttcatcatcaggaactttcggttttaaaaaagaaacattacttttgtctgctaaagtaaaccatatatagggaaattaacacctaggaaaagaaaactggcaagagaattgatgaggtattagtggcttagaagaattagtaatataagttgggaataaaggggtagcccgacagtggtaagtaaaaatgtagtactccattgtttttgctatttaaatataatgtatcaaaaacctttattctaaaatttccacaaatgattccttttatccatcttcttgtaatcctaaaagcatcttctcactatgtgctgtagtttgaaacctaacgaatcctcctacttgagacactgtagaaaagtaaaaattgttgcttctgttttgttttaagaggaaatgagaaggccagcagaagtagattaaaactagagagctggtttattaaaataagcagataattatccaggcttaaagtaatagcttacatgttttgaaaatccttgtacttatttttgtttttattgttgcaaaaaaatgttaatgggctgttgaaatgacctccatttacttaaggtaatccaataaggtcttttttaaatatacaaattttactcaagtttaaattgtataaaactgcttagaaacctgaaattttatagtgtgtaatatcttatgtgtatatagcatcctgagctgtgtgatacagtagatttcttcttagcagaaacatgcgaggtagatttaataaacaacaaaaatcagcttatgtttctacttattgaatctgctttactttttagcaattttcttccttgtgaacatgaaccatataaagtgtctgtgacttaatgatttcatgtaagtctgtcgcatacatccttcttttgtagcttacaccatgtggatgctctgtctgtagacactgcttgataaaaggagaataaacctcttacattttaa

SEQ ID NO: 134963 - DNA, 4757 bp, Homo sapiens
  Payload ID: 6358
  Gene Symbol: FSTL5
  Gene Name: follistatin-like 5
  Uniprot ID: Q8N475
  ENST ID: ENST00000379164
  CDS Start-End: 369-2909
gtactgtccactgtgctgtcggtgctgaacctgagacgcgagcggaccagttgctccagcacctgaaggcaacgccctcttgcaccctctgtgccctgtgggacccgcttcaccaacaggacccatatcaacttgacaaaggagtgtggtatcggacgtgggagagagtcctctgtttgccacctgggcgctcattcaggcgtgactttggagatttctatagttttagaccaaactatttttttttccccagctaagacgatcttttgagagttttttttttttattgtgatttatatttccacagcgtttaggaatctttctgggggacttttgtgactgttaaaataaggtgaaaagcaataaggatgtttaagtgctggtcagttgtcttggttctcggattcatttttctggagtcggaaggaaggccaaccaaagaaggaggatatggccttaaatcctatcagcctctaatgagattgcgacataaggaaaaaaatcaagaaagttcaagagtcaaaggatttatgattcaggatggcccttttggatcttgtgaaaataagtactgtggtttgggaagacactgtgttaccagcagagagacagggcaagcagaatgtgcctgtatggacctttgcaaacgtcactacaaacctgtgtgtggatctgacggagaattctatgaaaaccactgtgaagtgcacagagctgcttgcctgaaaaaacaaaagattaccattgttcacaatgaagactgcttctttaaaggagataagtgcaagactactgaatacagcaagatgaaaaatatgctattagatttacaaaatcaaaaatatattatgcaagaaaatgaaaatcctaatggcgacgacatatctcggaagaagctattggtggatcaaatgtttaaatattttgatgcagacagtaatggacttgtagatattaatgaactaactcaggtgataaaacaggaagaacttggcaaggatctctttgattgtactttgtatgttctattgaaatatgatgattttaatgctgacaagcacctggctcttgaagaattttatagagcattccaagtgatccagttgagtctgccagaagatcagaaactaagcatcactgcagcaactgtgggacaaagtgctgttctgagctgtgccattcaaggaaccctgagacctcccattatctggaaaaggaacaatattattctaaataatttagatttggaagacatcaatgactttggagatgatgggtccttgtatattactaaggttaccacaactcacgttggcaattacacctgctatgcagatggctatgaacaagtctatcagactcacatcttccaagtgaatgttcctccagtcatccgggtgtatccagagagtcaggctagagagcctggggtaactgccagtcttaggtgccatgcagagggcataccaaagcctcagcttggctggttgaagaatggaattgatattacaccaaagctttccaaacaactcacgcttcaagcaaatggcagtgaggttcacataagcaatgtgcgctatgaagatactggagcatacacttgtatcgcaaagaatgaagcaggagtggatgaagacatctcttctctttttgtggaagactctgctagaaagaccctagctaacatattatggagagaagaaggtctgggaattgggaacatgttctatgttttttatgaagatggaatcaaagtgatacaacccatagaatgtgaatttcagaggcacattaagcctagtgaaaagctccttggatttcaggatgaagtctgtcccaaagctgagggagatgaagttcagaggtgtgtgtgggcatcagctgttaatgtcaaagacaagttcatttatgttgcacagccaactttggacagagtccttattgttgatgtgcagtcccaaaaagttgttcaggcagtgagcacagaccctgtcccagttaaattacactatgacaaatcacatgatcaggtctgggtgctaagctggggtaccttggagaagacatcaccaacactacaggtaattaccctggccagtgggaatgtgcctcaccacacgatccacacccaaccagtgggaaagcaatttgacagagtggatgattttttcattcccaccacaacactcattatcacccatatgaggtttggatttattcttcataaagatgaagctgcactacaaaaaattgatcttgaaaccatgtcatacatcaagacaattaacttgaaggactataagtgcgttcctcagtcattggcatatacacacttgggaggctactacttcattggctgcaaacctgacagcaccggagcagtttccccacaggtcatggtggacggtgtaactgactcagtcattgggttcaatagtgatgtgacgggcactccatatgtctctccagatggccactaccttgtcagcattaatgatgtgaaaggtcttgtaagggttcagtacattaccatcagaggagaaatacaggaggcttttgatatttacacaaatctgcacatatctgatctggcatttcaaccatcctttactgaagcccaccaatataacatctacggtagttcaagcacacaaactgatgtgctctttgtggagctctcttctgggaaggtcaagatgataaagagtctcaaggaaccactcaaggcagaagaatggccttggaaccggaaaaacaggcaaatccaggacagtggcttgtttggtcaatacctgatgacaccttccaaggactctctcttcatcctagatggacgactcaataaattaaactgtgagatcactgaagttgaaaaaggaaatacagtcatttgggttggagatgcctaaaaaccctacgatacaattattgaatgaagcgttttacaatacattgcacttaatccattgtttaaatttacaacttaactttccaagtttatatcctagtcaaacaaaatttacttggttggtccaaataaaataaattgtttttgactaagtgactaagacatacacaattaattatattggttaattagaaatactcagcacaatatttaatgagaaatcacatcagtcacaagaatcaaatatgtaaattatgctttaaacaataaagtaggatttaaatcatttaaaaaactaaactgcagggaatttcagatgacataaagcattatttcattttgagggtagtttattttttttctctgtccttttggtatgattaaacaagaaataaaaggtgttgtggaaacttaaaattcttaattcaaaatattcggtcctgtccactgtttataatattttgtgccttgaagggaatgtcacaggaggaaaaggaagactaaagcctgcatactaaatgctctcataactataaatctcttgttgttaaaaaacatctcttgcaccaaatcctgtcttcagtcttttgtttaaccctcaatgaactaccaattgaaggcataagttggtcttaggttgtatacaggtgtcaaactccacttgacatttactgtataatctgcagcatgctatagaaagtggggaggaagggaggaaaaataattacagtcaaaatatttgcaatctatctactcattttgctttcaatcactagagtgcattatgtttttaatgcaagtttgtctgggatgtcaactgcctacagatgtttattactagcagaatagattatttattaatagattgtttcttttcatatagtccaatgtttcatcatcaggaactttcggttttaaaaaagaaacattacttttgtctgctaaagtaaaccatatatagggaaattaacacctaggaaaagaaaactggcaagagaattgatgaggtattagtggcttagaagaattagtaatataagttgggaataaaggggtagcccgacagtggtaagtaaaaatgtagtactccattgtttttgctatttaaatataatgtatcaaaaacctttattctaaaatttccacaaatgattccttttatccatcttcttgtaatcctaaaagcatcttctcactatgtgctgtagtttgaaacctaacgaatcctcctacttgagacactgtagaaaagtaaaaattgttgcttctgttttgttttaagaggaaatgagaaggccagcagaagtagattaaaactagagagctggtttattaaaataagcagataattatccaggcttaaagtaatagcttacatgttttgaaaatccttgtacttatttttgtttttattgttgcaaaaaaatgttaatgggctgttgaaatgacctccatttacttaaggtaatccaataaggtcttttttaaatatacaaattttactcaagtttaaattgtataaaactgcttagaaacctgaaattttatagtgtgtaatatcttatgtgtatatagcatcctgagctgtgtgatacagtagatttcttcttagcagaaacatgcgaggtagatttaataaacaacaaaaatcagcttatgtttctacttattgaatctgctttactttttagcaattttcttccttgtgaacatgaaccatataaagtgtctgtgacttaatgatttcatgtaagtctgtcgcatacatccttcttttgtagcttacaccatgtggatgctctgtctgtagacactgcttgataaaaggagaataaacctcttacatttt

SEQ ID NO: 134964 - DNA, 2920 bp, Homo sapiens
  Payload ID: 6358
  Gene Symbol: FSTL5
  Gene Name: follistatin-like 5
  Uniprot ID: Q8N475
  ENST ID: ENST00000427802
  CDS Start-End: 407-2920
gttcagtgactgagacaaactggaggtgaaaggagctggtactgtccactgtgctgtcggtgctgaacctgagacgcgagcggaccagttgctccagcacctgaaggcaacgccctcttgcaccctctgtgccctgtgggacccgcttcaccaacaggacccatatcaacttgacaaaggagtgtggtatcggacgtgggagagagtcctctgtttgccacctgggcgctcattcaggcgtgactttggagatttctatagttttagaccaaactatttttttttccccagctaagacgatcttttgagagttttttttttttattgtgatttatatttccacagcgtttaggaatctttctgggggacttttgtgactgttaaaataaggtgaaaagcaataaggatgtttaagtgctggtcagttgtcttggttctcggattcatttttctggagtcggaaggaaggccaaccaaagaaggaggatatggccttaaatcctatcagcctctaatgagattgcgacataaggaaaaaaatcaagaaagttcaagagtcaaaggatttatgattcaggatggcccttttggatcttgtgaaaataagtactgtggtttgggaagacactgtgttaccagcagagagacagggcaagcagaatgtgcctgtatggacctttgcaaacgtcactacaaacctgtgtgtggatctgacggagaattctatgaaaaccactgtgaagtgcacagagctgcttgcctgaaaaaacaaaagattaccattgttcacaatgaagactgcttctttaaaggagataagtgcaagactactgaatacagcaagatgaaaaatatgctattagatttacaaaatcaaaaatatattatgcaagaaaatgaaaatcctaatggcgacgacatatctcggaagaagctattggtggatcaaatgtttaaatattttgatgcagacagtaatggacttgtagatattaatgaactaactcaggtgataaaacaggaagaacttggcaaggatctctttgattgtactttgtatgttctattgaaatatgatgattttaatgctgacaagcacctggctcttgaagaattttatagagcattccaagtgatccagttgagtctgccagaagatcagaaactaagcatcactgcagcaactgtgggacaaagtgctgttctgagctgtgccattcaaggaaccctgagacctcccattatctggaaaaggaacaatattattctaaataatttagatttggaagacatcaatgactttggagatgatgggtccttgtatattactaaggttaccacaactcacgttggcaattacacctgctatgcagatggctatgaacaagtctatcagactcacatcttccaagtgaatgttcctccagtcatccgggtgtatccagagagtcaggctagagagcctggggtaactgccagtcttaggtgccatgcagagggcataccaaagcctcagcttggctggttgaagaatggaattgatattacaccaaagctttccaaacaactcacgcttcaagcaaatggcagtgaggttcacataagcaatgtgcgctatgaagatactggagcatacacttgtatcgcaaagaatgaagcaggagtggatgaagacatctcttctctttttgtggaagactctgctagaaagacccgtctgggaattgggaacatgttctatgttttttatgaagatggaatcaaagtgatacaacccatagaatgtgaatttcagaggcacattaagcctagtgaaaagctccttggatttcaggatgaagtctgtcccaaagctgagggagatgaagttcagaggtgtgtgtgggcatcagctgttaatgtcaaagacaagttcatttatgttgcacagccaactttggacagagtccttattgttgatgtgcagtcccaaaaagttgttcaggcagtgagcacagaccctgtcccagttaaattacactatgacaaatcacatgatcaggtctgggtgctaagctggggtaccttggagaagacatcaccaacactacaggtaattaccctggccagtgggaatgtgcctcaccacacgatccacacccaaccagtgggaaagcaatttgacagagtggatgattttttcattcccaccacaacactcattatcacccatatgaggtttggatttattcttcataaagatgaagctgcactacaaaaaattgatcttgaaaccatgtcatacatcaagacaattaacttgaaggactataagtgcgttcctcagtcattggcatatacacacttgggaggctactacttcattggctgcaaacctgacagcaccggagcagtttccccacaggtcatggtggacggtgtaactgactcagtcattgggttcaatagtgatgtgacgggcactccatatgtctctccagatggccactaccttgtcagcattaatgatgtgaaaggtcttgtaagggttcagtacattaccatcagaggagaaatacaggaggcttttgatatttacacaaatctgcacatatctgatctggcatttcaaccatcctttactgaagcccaccaatataacatctacggtagttcaagcacacaaactgatgtgctctttgtggagctctcttctgggaaggtcaagatgataaagagtctcaaggaaccactcaaggcagaagaatggccttggaaccggaaaaacaggcaaatccaggacagtggcttgtttggtcaatacctgatgacaccttccaaggactctctcttcatcctagatggacgactcaataaattaaactgtgagatcactgaagttgaaaaaggaaatacagtcatttgggttggagatgcctaa

SEQ ID NO: 134965 - DNA, 2278 bp, Homo sapiens
  Payload ID: 6359
  Gene Symbol: FPGS
  Gene Name: folylpolyglutamate synthase
  Uniprot ID: Q05932
  ENST ID: ENST00000373225
  CDS Start-End: 210-1823
tgggggtggggacagggaccaggaagttgggcccgggccgccggggctgggaattcggagactatagcgtccccgccccgggttgggaagtgggaagtggcacaggagctaggatccagaagcccagaggctcagcggtgcttctggagttccagtgatcccggagtctgaaccggcagtgagagtggggaaagagggatgccgtgcgcatgctcaataccctgcagaccaatgccggctacctggagcaggtgaagcgccagcggggtgaccctcagacacagttggaagccatggaactgtacctggcacggagtgggctgcaggtggaggacttggaccggctgaacatcatccacgtcactgggacgaaggggaagggctccacctgtgccttcacggaatgtatcctccgaagctatggcctgaagacgggattctttagctctccccacctggtgcaggttcgggagcggatccgcatcaatgggcagcccatcagtcctgagctcttcaccaagtacttctggcgcctctaccaccggctggaggagaccaaggatggcagctgtgtctccatgcccccctacttccgcttcctgacactcatggccttccacgtcttcctccaagagaaggtggacctggcagtggtggaggtgggcattggcggggcttatgactgcaccaacatcatcaggaagcctgtggtgtgcggagtctcctctcttggcatcgaccacaccagcctcctgggggatacggtggagaagatcgcatggcagaaagggggcatctttaagcaaggtgtccctgccttcactgtgctccaacctgaaggtcccctggcagtgctgagggaccgagcccagcagatctcatgtcctctatacctgtgtccgatgctggaggccctcgaggaaggggggccgccgctgaccctgggcctggagggggagcaccagcggtccaacgccgccttggccttgcagctggcccactgctggctgcagcggcaggaccgccatggtgctggggagccaaaggcatccaggccagggctcctgtggcagctgcccctggcacctgtgttccagcccacatcccacatgcggctcgggcttcggaacacggagtggccgggccggacgcaggtgctgcggcgcgggcccctcacctggtacctggacggtgcgcacaccgccagcagcgcgcaggcctgcgtgcgctggttccgccaggcgctgcagggccgcgagaggccgagcggtggccccgaggttcgagtcttgctcttcaatgctaccggggaccgggacccggcggccctgctgaagctgctgcagccctgccagtttgactatgccgtcttctgccctaacctgacagaggtgtcatccacaggcaacgcagaccaacagaacttcacagtgacactggaccaggtcctgctccgctgcctggaacaccagcagcactggaaccacctggacgaagagcaggccagcccggacctctggagtgcccccagcccagagcccggtgggtccgcatccctgcttctggcgccccacccaccccacacctgcagtgccagctccctcgtcttcagctgcatttcacatgccttgcaatggatcagccaaggccgagaccccatcttccagccacctagtcccccaaagggcctcctcacccaccctgtggctcacagtggggccagcatactccgtgaggctgctgccatccatgtgctagtcactggcagcctgcacctggtgggtggtgtcctgaagctgctggagcccgcactgtcccagtagccaaggcccggggttggaggtgggagcttcccacacctgcctgcgttctccccatgaacttacatactaggtgccttttgtttttggctttcctggttctgtctagactggcctaggggccagggctttgggatgggaggccgggagaggatgtcttttttaaggctctgtgccttggtctctccttcctcttggctgagatagcagaggggctccccgggtctctcactgttgcagtggcctggccgttcagcctgtctcccccaacaccccgcctgcctcctggctcaggcccagcttattgtgtgcgctgcctggccaggccctgggtcttgccatgtgctgggtggtagatttcctcctcccagtgccttctgggaagggagagggcctctgcctgggacactgcgggacagagggtggctggagtgaattaaagcctttgttttttaaag

SEQ ID NO: 134966 - DNA, 1383 bp, Homo sapiens
  Payload ID: 6359
  Gene Symbol: FPGS
  Gene Name:: folylpolyglutamate synthase
  ENST ID: ENST00000373228
  CDS Start-End: 15-1142
ggggcgccgggactatgtcgcgggcgcggagccacctgcgcgccgctctattcctggcagcggcgtctgcgcgcggcataacgacccaggtcgcggcgcggcggggcttgagcgcgtggccggtgccgcaggagccgagcatggagtaccaggatgccgtgcgcatgctcaataccctgcagaccaatgccggctacctggagcaggtgaagcgccagcggggtgaccctcagacacagttggaagccatggaactgtacctggcacggagtgggctgcaggtggaggacttggaccggctgaacatcatccacgtcactgggacgaaggggaagggctccacctgtgccttcacggaatgtatcctccgaagctatggcctgaagacgggattctttagctctccccacctggtgcaggttcgggagcggatccgcatcaatgggcagcccatcagtcctgagctcttcaccaagtacttctggcgcctctaccaccggctggaggagaccaaggatggcagctgtgtctccatgcccccctacttccgcttcctgacactcatggccttccacgtcttcctccaagagaaggtggacctggcagtggtggaggtgggcattggcggggcttatgactgcaccaacatcatcaggaagcctgtggtgtgcggagtctcctctcttggcatcgaccacaccagcctcctgggggatacggtggagaagatcgcatggcagaaagggggcatctttaagcaaggtgtccctgccttcactgtgctccaacctgaaggtcccctggcagtgctgagggaccgagcccagcagatctcagtgctggggagccaaaggcatccaggccagggctcctgtggcagctgcccctggcacctgtgttccagcccacatcccacatgcggctcgggcttcggaacacggagtggccgggccggacgcaggtgctgcggcgcgggcccctcacctggtacctggacggtgcgcacaccgccagcagcgcgcaggcctgcgtgcgctggttccgccaggcgctgcagggccgcgagaggccgagcggtggccccgaggttcgagtcttgctcttcaatgctaccggggaccgggacccggcggccctgctgaagctgctgcagaccaacagaacttcacagtgacactggaccaggtcctgctccgctgcctggaacaccagcagcactggaaccacctggacgaagagcaggccagcccggacctctggagtgcccccagcccagagcccggtgggtccgcatccctgcttctggcgccccacccaccccacacctgcagtgccagctccctcgtcttcagctgcatttcacatgccttgcaatggatcagc

SEQ ID NO: 134967 - DNA, 2279 bp, Homo sapiens
  Payload ID: 6359
  Gene Symbol: FPGS
  Gene Name: folylpolyglutamate synthase
  Uniprot ID: Q05932
  ENST ID: ENST00000373247
  CDS Start-End: 51-1814
gcggggcgtctcccgcccgggcctagagcgctgccgggggcgccgggactatgtcgcgggcgcggagccacctgcgcgccgctctattcctggcagcggcgtctgcgcgcggcataacgacccaggtcgcggcgcggcggggcttgagcgcgtggccggtgccgcaggagccgagcatggagtaccaggatgccgtgcgcatgctcaataccctgcagaccaatgccggctacctggagcaggtgaagcgccagcggggtgaccctcagacacagttggaagccatggaactgtacctggcacggagtgggctgcaggtggaggacttggaccggctgaacatcatccacgtcactgggacgaaggggaagggctccacctgtgccttcacggaatgtatcctccgaagctatggcctgaagacgggattctttagctctccccacctggtgcaggttcgggagcggatccgcatcaatgggcagcccatcagtcctgagctcttcaccaagtacttctggcgcctctaccaccggctggaggagaccaaggatggcagctgtgtctccatgcccccctacttccgcttcctgacactcatggccttccacgtcttcctccaagagaaggtggacctggcagtggtggaggtgggcattggcggggcttatgactgcaccaacatcatcaggaagcctgtggtgtgcggagtctcctctcttggcatcgaccacaccagcctcctgggggatacggtggagaagatcgcatggcagaaagggggcatctttaagcaaggtgtccctgccttcactgtgctccaacctgaaggtcccctggcagtgctgagggaccgagcccagcagatctcatgtcctctatacctgtgtccgatgctggaggccctcgaggaaggggggccgccgctgaccctgggcctggagggggagcaccagcggtccaacgccgccttggccttgcagctggcccactgctggctgcagcggcaggaccgccatggtgctggggagccaaaggcatccaggccagggctcctgtggcagctgcccctggcacctgtgttccagcccacatcccacatgcggctcgggcttcggaacacggagtggccgggccggacgcaggtgctgcggcgcgggcccctcacctggtacctggacggtgcgcacaccgccagcagcgcgcaggcctgcgtgcgctggttccgccaggcgctgcagggccgcgagaggccgagcggtggccccgaggttcgagtcttgctcttcaatgctaccggggaccgggacccggcggccctgctgaagctgctgcagccctgccagtttgactatgccgtcttctgccctaacctgacagaggtgtcatccacaggcaacgcagaccaacagaacttcacagtgacactggaccaggtcctgctccgctgcctggaacaccagcagcactggaaccacctggacgaagagcaggccagcccggacctctggagtgcccccagcccagagcccggtgggtccgcatccctgcttctggcgccccacccaccccacacctgcagtgccagctccctcgtcttcagctgcatttcacatgccttgcaatggatcagccaaggccgagaccccatcttccagccacctagtcccccaaagggcctcctcacccaccctgtggctcacagtggggccagcatactccgtgaggctgctgccatccatgtgctagtcactggcagcctgcacctggtgggtggtgtcctgaagctgctggagcccgcactgtcccagtagccaaggcccggggttggaggtgggagcttcccacacctgcctgcgttctccccatgaacttacatactaggtgccttttgtttttggctttcctggttctgtctagactggcctaggggccagggctttgggatgggaggccgggagaggatgtcttttttaaggctctgtgccttggtctctccttcctcttggctgagatagcagaggggctccccgggtctctcactgttgcagtggcctggccgttcagcctgtctcccccaacaccccgcctgcctcctggctcaggcccagcttattgtgtgcgctgcctggccaggccctgggtcttgccatgtgctgggtggtagatttcctcctcccagtgccttctgggaagggagagggcctctgcctgggacactgcgggacagagggtggctggagtgaattaaagcctttgttttttaaagaaatggcaaa

SEQ ID NO: 134968 - DNA, 2230 bp, Homo sapiens
  Payload ID: 6359
  Gene Symbol: FPGS
  Gene Name: folylpolyglutamate synthase
  Uniprot ID: Q05932
  ENST ID: ENST00000393706
  CDS Start-End: 68-1753
gattggctgggggcggggcggggcgtctcccgcccgggcctagagcgctgccgggggcgccgggactatgtcgcgggcgcggagccacctgcgcgccgctctattcctggcagcggcgtctgcgcgcggcataacgacccaggtcgcggcgcggcggggcttgagcgcgtggccggtgccgcaggagccgagcatggagtaccaggatgccgtgcgcatgctcaataccctgcagaccaatgccggctacctggagcaggtgaagcgccagcggggtgaccctcagacacagttggaagccatggaactgtacctggcacggagtgggctgcaggtggaggacttggaccggctgaacatcatccacgtcactgggacgaaggggaagggctccacctgtgccttcacggaatgtatcctccgaagctatggcctgaagacgggattctttagctctccccacctggtgcaggttcgggagcggatccgcatcaatgggcagcccatcagtcctgagctcttcaccaagtacttctggcgcctctaccaccggctggaggagaccaaggtggacctggcagtggtggaggtgggcattggcggggcttatgactgcaccaacatcatcaggaagcctgtggtgtgcggagtctcctctcttggcatcgaccacaccagcctcctgggggatacggtggagaagatcgcatggcagaaagggggcatctttaagcaaggtgtccctgccttcactgtgctccaacctgaaggtcccctggcagtgctgagggaccgagcccagcagatctcatgtcctctatacctgtgtccgatgctggaggccctcgaggaaggggggccgccgctgaccctgggcctggagggggagcaccagcggtccaacgccgccttggccttgcagctggcccactgctggctgcagcggcaggaccgccatggtgctggggagccaaaggcatccaggccagggctcctgtggcagctgcccctggcacctgtgttccagcccacatcccacatgcggctcgggcttcggaacacggagtggccgggccggacgcaggtgctgcggcgcgggcccctcacctggtacctggacggtgcgcacaccgccagcagcgcgcaggcctgcgtgcgctggttccgccaggcgctgcagggccgcgagaggccgagcggtggccccgaggttcgagtcttgctcttcaatgctaccggggaccgggacccggcggccctgctgaagctgctgcagccctgccagtttgactatgccgtcttctgccctaacctgacagaggtgtcatccacaggcaacgcagaccaacagaacttcacagtgacactggaccaggtcctgctccgctgcctggaacaccagcagcactggaaccacctggacgaagagcaggccagcccggacctctggagtgcccccagcccagagcccggtgggtccgcatccctgcttctggcgccccacccaccccacacctgcagtgccagctccctcgtcttcagctgcatttcacatgccttgcaatggatcagccaaggccgagaccccatcttccagccacctagtcccccaaagggcctcctcacccaccctgtggctcacagtggggccagcatactccgtgaggctgctgccatccatgtgctagtcactggcagcctgcacctggtgggtggtgtcctgaagctgctggagcccgcactgtcccagtagccaaggcccggggttggaggtgggagcttcccacacctgcctgcgttctccccatgaacttacatactaggtgccttttgtttttggctttcctggttctgtctagactggcctaggggccagggctttgggatgggaggccgggagaggatgtcttttttaaggctctgtgccttggtctctccttcctcttggctgagatagcagaggggctccccgggtctctcactgttgcagtggcctggccgttcagcctgtctcccccaacaccccgcctgcctcctggctcaggcccagcttattgtgtgcgctgcctggccaggccctgggtcttgccatgtgctgggtggtagatttcctcctcccagtgccttctgggaagggagagggcctctgcctgggacactgcgggacagagggtggctggagtgaattaaagcctttgttttttaaagaaatggcaaagccttcgactga

SEQ ID NO: 134969 - DNA, 959 bp, Homo sapiens
  Payload ID: 6359
  Gene Symbol: FPGS
  Gene Name: folylpolyglutamate synthase
  ENST ID: ENST00000431857
  CDS Start-End: 166-959
ggctgggaattcggagactatagcgtccccgccccgggttgggaagtgggaagtggcacaggagctaggatccagaagcccagaggctcagcggtgcttctggagttccagtgatcccggagtctgaaccggcagtgagagtggggaaagagggatgccgtgcgcatgctcaataccctgcagaccaatgccggctacctggagcaggtgaagcgccagcggggtgaccctcagacacagttggaagccatggaactgtacctggcacggagtgggctgcaggtggaggacttggaccggctgaacatcatccacgtcactgggacgaaggggaagggctccacctgtgccttcacggaatgtatcctccgaagctatggcctgaagacgggattctttagctctccccacctggtgcaggttcgggagcggatccgcatcaatgggcagcccatcagtcctgagctcttcaccaagtacttctggcgcctctaccaccggctggaggagaccaaggatggcagctgtgtctccatgcccccctacttccgcttcctgacactcatggccttccacgtcttcctccaagagaaggtggacctggcagtggtggaggtgggcattggcggggcttatgactgcaccaacatcatcaggaagcctgtggtgtgcggagtctcctctcttggcatcgaccacaccagcctcctgggggatacggtggagaagatcgcatggcagaaagggggcatctttaagcaaggtgtccctgccttcactgtgctccaacctgaaggtcccctggcagtgctgagggaccgagcccagcagatctcagtgctggggagccaaaggcatccaggccagggctcctgtggcagctgcccctggcacctgtgttccagcccacatcccacatgcggctcgggcttcggaacacggagtggccgggccggacg

SEQ ID NO: 134970 - DNA, 677 bp, Homo sapiens
  Payload ID: 6359
  Gene Symbol: FPGS
  Gene Name: folylpolyglutamate synthase
  ENST ID: ENST00000423577
  CDS Start-End: 94-677
cagaagcccagaggctcagcggtgcttctggagttccagtgatcccggagtctgaaccggcagtgagagtggggaaagagggatgccgtgcgcatgctcaataccctgcagaccaatgccggctacctggagcaggtgaagcgccagcggggtgaccctcagacacagttggaagccatggaactgtacctggcacggagtgggctgcaggtggaggacttggaccggctgaacatcatccacgtcactgggacgaaggggaagggctccacctgtgccttcacggaatgtatcctccgaagctatggcctgaagacgggattctttagctctccccacctggtgcaggttcgggagcggatccgcatcaatgggcagcccatcagtcctgagctcttcaccaagtacttctggcgcctctaccaccggctggaggagaccaaggtggacctggcagtggtggaggtgggcattggcggggcttatgactgcaccaacatcatcaggaagcctgtggtgtgcggagtctcctctcttggcatcgaccacaccagcctcctgggggatacggtggagaagatcgcatggcagaaagggggcatctttaagcaaggtgtccctgccttcactgtgctccaacctgaaggtcccctggcagtgctgagggaccgagccca

SEQ ID NO: 134971 - DNA, 2160 bp, Homo sapiens
  Payload ID: 6359
  Gene Symbol: FPGS
  Gene Name: folylpolyglutamate synthase
  ENST ID: ENST00000630236
  CDS Start-End: 68-1195
gattggctgggggcggggcggggcgtctcccgcccgggcctagagcgctgccgggggcgccgggactatgtcgcgggcgcggagccacctgcgcgccgctctattcctggcagcggcgtctgcgcgcggcataacgacccaggtcgcggcgcggcggggcttgagcgcgtggccggtgccgcaggagccgagcatggagtaccaggatgccgtgcgcatgctcaataccctgcagaccaatgccggctacctggagcaggtgaagcgccagcggggtgaccctcagacacagttggaagccatggaactgtacctggcacggagtgggctgcaggtggaggacttggaccggctgaacatcatccacgtcactgggacgaaggggaagggctccacctgtgccttcacggaatgtatcctccgaagctatggcctgaagacgggattctttagctctccccacctggtgcaggttcgggagcggatccgcatcaatgggcagcccatcagtcctgagctcttcaccaagtacttctggcgcctctaccaccggctggaggagaccaaggatggcagctgtgtctccatgcccccctacttccgcttcctgacactcatggccttccacgtcttcctccaagagaaggtggacctggcagtggtggaggtgggcattggcggggcttatgactgcaccaacatcatcaggaagcctgtggtgtgcggagtctcctctcttggcatcgaccacaccagcctcctgggggatacggtggagaagatcgcatggcagaaagggggcatctttaagcaaggtgtccctgccttcactgtgctccaacctgaaggtcccctggcagtgctgagggaccgagcccagcagatctcagtgctggggagccaaaggcatccaggccagggctcctgtggcagctgcccctggcacctgtgttccagcccacatcccacatgcggctcgggcttcggaacacggagtggccgggccggacgcaggtgctgcggcgcgggcccctcacctggtacctggacggtgcgcacaccgccagcagcgcgcaggcctgcgtgcgctggttccgccaggcgctgcagggccgcgagaggccgagcggtggccccgaggttcgagtcttgctcttcaatgctaccggggaccgggacccggcggccctgctgaagctgctgcagccctgccagtttgactatgccgtcttctgccctaacctgacagaggtgtcatccacaggcaacgcagaccaacagaacttcacagtgacactggaccaggtcctgctccgctgcctggaacaccagcagcactggaaccacctggacgaagagcaggccagcccggacctctggagtgcccccagcccagagcccggtgggtccgcatccctgcttctggcgccccacccaccccacacctgcagtgccagctccctcgtcttcagctgcatttcacatgccttgcaatggatcagccaaggccgagaccccatcttccagccacctagtcccccaaagggcctcctcacccaccctgtggctcacagtggggccagcatactccgtgaggctgctgccatccatgtgctagtcactggcagcctgcacctggtgggtggtgtcctgaagctgctggagcccgcactgtcccagtagccaaggcccggggttggaggtgggagcttcccacacctgcctgcgttctccccatgaacttacatactaggtgccttttgtttttggctttcctggttctgtctagactggcctaggggccagggctttgggatgggaggccgggagaggatgtcttttttaaggctctgtgccttggtctctccttcctcttggctgagatagcagaggggctccccgggtctctcactgttgcagtggcctggccgttcagcctgtctcccccaacaccccgcctgcctcctggctcaggcccagcttattgtgtgcgctgcctggccaggccctgggtcttgccatgtgctgggtggtagatttcctcctcccagtgccttctgggaagggagagggcctctgcctgggacactgcgggacagagggtggctggagtgaattaaagcctttgttttttaaagaaatggcaaagccttcgactga

SEQ ID NO: 134972 - DNA, 2862 bp, Homo sapiens
  Payload ID: 6360
  Gene Symbol: FOXA1
  Gene Name: forkhead box A1
  Uniprot ID: P55317
  ENST ID: ENST00000250448
  CDS Start-End: 63-1481
cgcgcggccgcccgtcgcttcgcacagggctggatggttgtattgggcagggtggctccaggatgttaggaactgtgaagatggaagggcatgaaaccagcgactggaacagctactacgcagacacgcaggaggcctactcctccgtcccggtcagcaacatgaactcaggcctgggctccatgaactccatgaacacctacatgaccatgaacaccatgactacgagcggcaacatgaccccggcgtccttcaacatgtcctatgccaacccgggcctaggggccggcctgagtcccggcgcagtagccggcatgccggggggctcggcgggcgccatgaacagcatgactgcggccggcgtgacggccatgggtacggcgctgagcccgagcggcatgggcgccatgggtgcgcagcaggcggcctccatgaatggcctgggcccctacgcggccgccatgaacccgtgcatgagccccatggcgtacgcgccgtccaacctgggccgcagccgcgcgggcggcggcggcgacgccaagacgttcaagcgcagctacccgcacgccaagccgccctactcgtacatctcgctcatcaccatggccatccagcaggcgcccagcaagatgctcacgctgagcgagatctaccagtggatcatggacctcttcccctattaccggcagaaccagcagcgctggcagaactccatccgccactcgctgtccttcaatgactgcttcgtcaaggtggcacgctccccggacaagccgggcaagggctcctactggacgctgcacccggactccggcaacatgttcgagaacggctgctacttgcgccgccagaagcgcttcaagtgcgagaagcagccgggggccggcggcgggggcgggagcggaagcgggggcagcggcgccaagggcggccctgagagccgcaaggacccctctggcgcctctaaccccagcgccgactcgcccctccatcggggtgtgcacgggaagaccggccagctagagggcgcgccggcccccgggcccgccgccagcccccagactctggaccacagtggggcgacggcgacagggggcgcctcggagttgaagactccagcctcctcaactgcgccccccataagctccgggcccggggcgctggcctctgtgcccgcctctcacccggcacacggcttggcaccccacgagtcccagctgcacctgaaaggggacccccactactccttcaaccacccgttctccatcaacaacctcatgtcctcctcggagcagcagcataagctggacttcaaggcatacgaacaggcactgcaatactcgccttacggctctacgttgcccgccagcctgcctctaggcagcgcctcggtgaccaccaggagccccatcgagccctcagccctggagccggcgtactaccaaggtgtgtattccagacccgtcctaaacacttcctagctcccgggactggggggtttgtctggcatagccatgctggtagcaagagagaaaaaatcaacagcaaacaaaaccacacaaaccaaaccgtcaacagcataataaaatcccaacaactatttttatttcatttttcatgcacaacctttcccccagtgcaaaagactgttactttattattgtattcaaaattcattgtgtatattactacaaagacaaccccaaaccaatttttttcctgcgaagtttaatgatccacaagtgtatatatgaaattctcctccttccttgcccccctctctttcttccctctttcccctccagacattctagtttgtggagggttatttaaaaaaacaaaaaaggaagatggtcaagtttgtaaaatatttgtttgtgctttttccccctccttacctgaccccctacgagtttacaggtctgtggcaatactcttaaccataagaattgaaatggtgaagaaacaagtatacactagaggctcttaaaagtattgaaagacaatactgctgttatatagcaagacataaacagattataaacatcagagccatttgcttctcagtttacatttctgatacatgcagatagcagatgtctttaaatgaaatacatgtatattgtgtatggacttaattatgcacatgctcagatgtgtagacatcctccgtatatttacataacatatagaggtaatagataggtgatatacatgatacattctcaagagttgcttgaccgaaagttacaaggaccccaacccctttgtcctctctacccacagatggccctgggaatcaattcctcaggaattgccctcaagaactctgcttcttgctttgcagagtgccatggtcatgtcattctgaggtcacataacacataaaattagtttctatgagtgtataccatttaaagaatttttttttcagtaaaagggaatattacaatgttggaggagagataagttatagggagctggatttcaaaacgtggtccaagattcaaaaatcctattgatagtggccattttaatcattgccatcgtgtgcttgtttcatccagtgttatgcactttccacagttggacatggtgttagtatagccagacgggtttcattattatttctctttgctttctcaatgttaatttattgcatggtttattctttttctttacagctgaaattgctttaaatgatggttaaaattacaaattaaattgttaatttttatcaatgtgattgtaattaaaaatattttgatttaaataacaaaaataataccagattttaagccgtggaaaatgttcttgatcatttgcagttaaggactttaaataaatcaaatgttaacaaaa

SEQ ID NO: 134973 - DNA, 507 bp, Homo sapiens
  Payload ID: 6360
  Gene Symbol: FOXA1
  Gene Name: forkhead box A1
  ENST ID: ENST00000553751
  CDS Start-End: 139-249
ttcgcccgggtggcgttgggcccgcgcgggcgctcgggtgactgcagctgctcagctcccctcccccgccccgcgccgcgcggccgcccgtcgcttcgcacagggctggatggttgtattgggcagggtggctccaggatgttaggaactgtgaagatggaagggcatgaaaccagcgactggaacagctactacgcagacacgcaggagctggcgattaccctccaaaagtttaattaccattattgaaaacgcgtattggaactgccttggataatcttgggaagagggaaagaaaataaagccccaaggcctactcctccgtcccggtcagcaacatgaactcaggcctgggctccatgaactccatgaacacctacatgaccatgaacaccatgactacgagcggcaacatgaccccggcgtccttcaacatgtcctatgccaacccgggcctaggggccggcctgagtcccggcgcagtagccggcatgccggggggctcgg

SEQ ID NO: 134974 - DNA, 2401 bp, Homo sapiens
  Payload ID: 6361
  Gene Symbol: FOXA2
  Gene Name: forkhead box A2
  Uniprot ID: Q9Y261
  ENST ID: ENST00000377115
  CDS Start-End: 183-1556
gctagaggggctgcttgcgccaggcgccggccgccccactgcgggtccctggcggccggtgtctgaggagtcggagagccgaggcggccagaccgtgcgccccgcgcttctcccgaggccgttccgggtctgaactgtaacagggaggggcctcgcaggagcagcagcgggcgagttaaagtatgctgggagcggtgaagatggaagggcacgagccgtccgactggagcagctactatgcagagcccgagggctactcctccgtgagcaacatgaacgccggcctggggatgaacggcatgaacacgtacatgagcatgtcggcggccgccatgggcagcggctcgggcaacatgagcgcgggctccatgaacatgtcgtcgtacgtgggcgctggcatgagcccgtccctggcggggatgtcccccggcgcgggcgccatggcgggcatgggcggctcggccggggcggccggcgtggcgggcatggggccgcacttgagtcccagcctgagcccgctcggggggcaggcggccggggccatgggcggcctggccccctacgccaacatgaactccatgagccccatgtacgggcaggcgggcctgagccgcgcccgcgaccccaagacctacaggcgcagctacacgcacgcaaagccgccctactcgtacatctcgctcatcaccatggccatccagcagagccccaacaagatgctgacgctgagcgagatctaccagtggatcatggacctcttccccttctaccggcagaaccagcagcgctggcagaactccatccgccactcgctctccttcaacgactgtttcctgaaggtgccccgctcgcccgacaagcccggcaagggctccttctggaccctgcaccctgactcgggcaacatgttcgagaacggctgctacctgcgccgccagaagcgcttcaagtgcgagaagcagctggcgctgaaggaggccgcaggcgccgccggcagcggcaagaaggcggccgccggagcccaggcctcacaggctcaactcggggaggccgccgggccggcctccgagactccggcgggcaccgagtcgcctcactcgagcgcctccccgtgccaggagcacaagcgagggggcctgggagagctgaaggggacgccggctgcggcgctgagccccccagagccggcgccctctcccgggcagcagcagcaggccgcggcccacctgctgggcccgccccaccacccgggcctgccgcctgaggcccacctgaagccggaacaccactacgccttcaaccacccgttctccatcaacaacctcatgtcctcggagcagcagcaccaccacagccaccaccaccaccaaccccacaaaatggacctcaaggcctacgaacaggtgatgcactaccccggctacggttcccccatgcctggcagcttggccatgggcccggtcacgaacaaaacgggcctggacgcctcgcccctggccgcagatacctcctactaccagggggtgtactcccggcccattatgaactcctcttaagaagacgacggcttcaggcccggctaactctggcaccccggatcgaggacaagtgagagagcaagtgggggtcgagactttggggagacggtgttgcagagacgcaagggagaagaaatccataacacccccaccccaacacccccaagacagcagtcttcttcacccgctgcagccgttccgtcccaaacagagggccacacagataccccacgttctatataaggaggaaaacgggaaagaatataaagttaaaaaaaagcctccggtttccactactgtgtagactcctgcttcttcaagcacctgcagattctgatttttttgttgttgttgttctcctccattgctgttgttgcagggaagtcttacttaaaaaaaaaaaaaaattttgtgagtgactcggtgtaaaaccatgtagttttaacagaaccagagggttgtactattgtttaaaaacaggaaaaaaaataatgtaagggtctgttgtaaatgaccaagaaaaagaaaaaaaaagcattcccaatcttgacacggtgaaatccaggtctcgggtccgattaatttatggtttctgcgtgctttatttatggcttataaatgtgtattctggctgcaagggccagagttccacaaatctatattaaagtgttatacccggttttatcccttgaatcttttcttccagatttttcttttctttacttggcttacaaaatatacaggcttggaaattatttcaagaaggagggagggataccctgtctggttgcaggttgtattttattttggcccagggagtgttgctgttttcccaacattttattaataaaattttcagacat

SEQ ID NO: 134975 - DNA, 2422 bp, Homo sapiens
  Payload ID: 6361
  Gene Symbol: FOXA2
  Gene Name: forkhead box A2
  Uniprot ID: Q9Y261
  ENST ID: ENST00000419308
  CDS Start-End: 186-1577
cccgcccacttccaactaccgcctccggcctgcccagggagagagagggagtggagcccagggagagggagcgcgagagagggagggaggaggggacggtgctttggctgacttttttttaaaagagggtgggggtggggggtgattgctggtcgtttgttgtggctgttaaattttaaactgccatgcactcggcttccagtatgctgggagcggtgaagatggaagggcacgagccgtccgactggagcagctactatgcagagcccgagggctactcctccgtgagcaacatgaacgccggcctggggatgaacggcatgaacacgtacatgagcatgtcggcggccgccatgggcagcggctcgggcaacatgagcgcgggctccatgaacatgtcgtcgtacgtgggcgctggcatgagcccgtccctggcggggatgtcccccggcgcgggcgccatggcgggcatgggcggctcggccggggcggccggcgtggcgggcatggggccgcacttgagtcccagcctgagcccgctcggggggcaggcggccggggccatgggcggcctggccccctacgccaacatgaactccatgagccccatgtacgggcaggcgggcctgagccgcgcccgcgaccccaagacctacaggcgcagctacacgcacgcaaagccgccctactcgtacatctcgctcatcaccatggccatccagcagagccccaacaagatgctgacgctgagcgagatctaccagtggatcatggacctcttccccttctaccggcagaaccagcagcgctggcagaactccatccgccactcgctctccttcaacgactgtttcctgaaggtgccccgctcgcccgacaagcccggcaagggctccttctggaccctgcaccctgactcgggcaacatgttcgagaacggctgctacctgcgccgccagaagcgcttcaagtgcgagaagcagctggcgctgaaggaggccgcaggcgccgccggcagcggcaagaaggcggccgccggagcccaggcctcacaggctcaactcggggaggccgccgggccggcctccgagactccggcgggcaccgagtcgcctcactcgagcgcctccccgtgccaggagcacaagcgagggggcctgggagagctgaaggggacgccggctgcggcgctgagccccccagagccggcgccctctcccgggcagcagcagcaggccgcggcccacctgctgggcccgccccaccacccgggcctgccgcctgaggcccacctgaagccggaacaccactacgccttcaaccacccgttctccatcaacaacctcatgtcctcggagcagcagcaccaccacagccaccaccaccaccaaccccacaaaatggacctcaaggcctacgaacaggtgatgcactaccccggctacggttcccccatgcctggcagcttggccatgggcccggtcacgaacaaaacgggcctggacgcctcgcccctggccgcagatacctcctactaccagggggtgtactcccggcccattatgaactcctcttaagaagacgacggcttcaggcccggctaactctggcaccccggatcgaggacaagtgagagagcaagtgggggtcgagactttggggagacggtgttgcagagacgcaagggagaagaaatccataacacccccaccccaacacccccaagacagcagtcttcttcacccgctgcagccgttccgtcccaaacagagggccacacagataccccacgttctatataaggaggaaaacgggaaagaatataaagttaaaaaaaagcctccggtttccactactgtgtagactcctgcttcttcaagcacctgcagattctgatttttttgttgttgttgttctcctccattgctgttgttgcagggaagtcttacttaaaaaaaaaaaaaaattttgtgagtgactcggtgtaaaaccatgtagttttaacagaaccagagggttgtactattgtttaaaaacaggaaaaaaaataatgtaagggtctgttgtaaatgaccaagaaaaagaaaaaaaaagcattcccaatcttgacacggtgaaatccaggtctcgggtccgattaatttatggtttctgcgtgctttatttatggcttataaatgtgtattctggctgcaagggccagagttccacaaatctatattaaagtgttatacccggttttatcccttgaatcttttcttccagatttttcttttctttacttggcttacaaaatatacaggcttggaaattatttcaagaaggagggagggataccctgtctggttgcaggttgtattttattttggcccagggagtgttgctgttttcccaacattttattaataaaattttcagacat

SEQ ID NO: 134976 - DNA, 1989 bp, Homo sapiens
  Payload ID: 6362
  Gene Symbol: FOXA3
  Gene Name: forkhead box A3
  Uniprot ID: P55318
  ENST ID: ENST00000302177
  CDS Start-End: 198-1250
ggagcccggggcgggcgagggcgggggtgtcccggctataaagcgtggccgcctcccgcggcgctcgggacagccgtaccccgggcggtcggacgggcgggcgccggtgggagctcgggccgtgcccgctgagagatccagagcgctccgttcccccggggccggagcgggggcgggtgggggcgtaagcccgggggatgctgggctcagtgaagatggaggcccatgacctggccgagtggagctactacccggaggcgggcgaggtctactcgccggtgaccccagtgcccaccatggcccccctcaactcctacatgaccctgaatcctctaagctctccctatccccctggggggctccctgcctccccactgccctcaggacccctggcacccccagcacctgcagcccccctggggcccactttcccaggcctgggtgtcagcggtggcagcagcagctccgggtacggggccccgggtcctgggctggtgcacgggaaggagatgccgaaggggtatcggcggcccctggcacacgccaagccaccgtattcctatatctcactcatcaccatggccatccagcaggcgccgggcaagatgctgaccttgagtgaaatctaccagtggatcatggacctcttcccttactaccgggagaatcagcagcgctggcagaactccattcgccactcgctgtctttcaacgactgcttcgtcaaggtggcgcgttccccagacaagcctggcaagggctcctactgggccctacaccccagctcagggaacatgtttgagaatggctgctacctgcgccgccagaaacgcttcaagctggaggagaaggtgaaaaaagggggcagcggggctgccaccaccaccaggaacgggacagggtctgctgcctcgaccaccacccccgcggccacagtcacctccccgccccagcccccgcctccagcccctgagcctgaggcccagggcggggaagatgtgggggctctggactgtggctcacccgcttcctccacaccctatttcactggcctggagctcccaggggagctgaagctggacgcgccctacaacttcaaccaccctttctccatcaacaacctaatgtcagaacagacaccagcacctcccaaactggacgtggggtttgggggctacggggctgaaggtggggagcctggagtctactaccagggcctctattcccgctctttgcttaatgcatcctagcaggggttgggaacatggtggtgggtatggctggagctcacaccacgaagctcttggggcctgatccttctggtgacacttcacttgtcccattggttaacatctgggtgggtctattacttactgtgatgactgctgtctcagtgggcatggtgttgatccacggggtactgtgataaccaccatggatacattttggtggcccactgggtactgtgaggactgctacattgatggatgttattggctaatccactgcatggtttgatggccaccatctcggttggccctttgggtgtgatggtgatagcatttcagtgacatcttctttggccccccccattaggtgctgtgcccacttcttttttggtgtacttggcacagtaggtgccaagttggccaccattctgtgtaacaccttttttggcccattgggtgctttgatggacatcatactgggtaggtgacaacgtcagtgggccaccatgtgccatgatggctgctgcagccccgtgttggccatgtcgtcaccattctctctggcatgggttgggtaggggatggaggtgagaatactccttggttttctctgaagcccaccctttcccccaactctggtccaggagaaaccagaaaaggctggttagggtgtggggaatttctactgaagtctgattctttcccgggaagcggggtactggctgtgtttaatcattaaaggtaccgtgtccgcctctta

SEQ ID NO: 134977 - DNA, 538 bp, Homo sapiens
  Payload ID: 6362
  Gene Symbol: FOXA3
  Gene Name: forkhead box A3
  ENST ID: ENST00000594297
  CDS Start-End: 234-538
attcccctttcttccgccacggtcatgcagggctctggctcttcgtcctctcctgccgagatgatgaagccccctgaggtagaaaggctccagagttctgacctcggggcccttggtatctgcagcgtcgctgcgggcagctccctcactcctgaatcacccccagctgtcgcgtcctggggctgcggcccccggcgcctgaggtctactcgccggtgaccccagtgcccaccatggcccccctcaactcctacatgaccctgaatcctctaagctctccctatccccctggggggctccctgcctccccactgccctcaggacccctggcacccccagcacctgcagcccccctggggcccactttcccaggcctgggtgtcagcggtggcagcagcagctccgggtacggggccccgggtcctgggctggtgcacgggaaggagatgccgaaggggtatcggcggcccctggcacacgccaagccaccgtattcctatatctcactcatcaccatggccatccagcaggcgccggg

SEQ ID NO: 134978 - DNA, 2957 bp, Homo sapiens
  Payload ID: 6363
  Gene Symbol: FOXB1
  Gene Name: forkhead box B1
  Uniprot ID: Q99853
  ENST ID: ENST00000396057
  CDS Start-End: 480-1457
aaggcgattgtcatatgatagctaagaagtggcacattaatgaagcgccgctacaggggtcttttctgctcctgtcaccgcttaaaactatcagatggttcgagggaggacatggaggcagccacctagctcagcggagacgcggagcccacagcagcgccctccggagccctaacacgtcgctgccaccatccgcgccgggactccgcagccgagctcggccgcccgcaggacgctccaggagcgtcgcggaccgggcggcacgggacgctgcggggctgagctcaagagcccaggttcgcgccgagtccaaccggacccggacgctgcgcgcggagtgcgcgtcgagtgcgcgccgagagagaagcggcgcgcagcggcgtcctcccggatgcggacgcgcaacttgaagcaactttaagatccgagcagtccgccggcccgcgcggacccagagcaagaagagggcgaggaagaagatgcctcggcccggccgcaacacgtacagcgaccagaagccgccctactcgtacatctcgctgaccgctatggccatccagagctctcccgagaagatgctgccgctgagcgagatctacaagttcatcatggaccgcttcccctactacagggagaacacgcagcgctggcagaacagtctgcgccacaacctctccttcaacgactgcttcatcaagatcccgcggcggccggaccagccaggcaagggcagcttctgggcgctgcacccaagctgcggggacatgttcgagaacggcagcttcctgcggcgccgcaagcgcttcaaggtgcttaagtccgaccacctggcgcccagcaagccagccgacgcggcgcagtacctgcagcagcaggccaagctgcggctcagcgcgctggcggcctcgggcacgcacctgccacagatgcccgccgccgcctacaacttgggcggcgtggcgcagccctcgggcttcaagcaccccttcgccatcgagaacatcatcgcgcgggaatacaagatgcctggggggctggccttctccgccatgcagccggtgcccgctgcctacccgctccccaaccagttgactaccatgggcagctcgctgggcaccggctggccacacgtgtatggctccgccggcatgatcgactcggccacccccatctccatggcgagtggcgactacagcgcctacggcgtgccgttgaagccgctgtgccacgcggcgggccaaacgctgcccgccatccccgtgcccattaagcccacgccggccgccgtgcccgcgctgcctgcgctgccagcgcccatccccaccttgctctcgaactcgccgccctcgctcagccccacgtcctcgcaaacagccaccagccaaagcagccccgccacccccagcgaaacgctcaccagcccggcctccgccttgcactcggtggcggtgcactgacccgcaggagcccacgccccctctcgttctcctccccaccacctcactcgccttccctggctcccagtcctgccggcccccacctgggaccgccaccctaacttgttcatttcaccttcggccaacccgccttgccccaagagaactttgttttggacccaggagaccaaacacaaacttgcagatgggccgagaggcgcgtgggagttgtcctcgcccccacatcaaggaaggccggggccacctgagccgaaccatcccctccctgaggccccgaaaccccctcctatttgaccggcgggggaaaccctgtcaccccctcttcgccgagaaaagcgcgtcttccctccgcccagatcggcggagccccgaactctgcgcagtttcaagactagagaaactgcctcagatgtttccaggaacagatcccccccacaccccctccccgcgagggctgcaacagcgcaggggagggccggatctctttacgtcttggaaatctgcagcaaaaaggagccactaatcttcctaccccactcgcctccgcccatccggcaggggctgggccgaccacagcttcccggggttgcggccctgcctcctaggcttctgcggagattttgttgttgtttggggttttgtttccttccagaggctccaggcgctgggagttaggaaagaggctgccaagctgagaaagcgacgctcgtcctcacacagcaaaacaaaactaaaagtaaccttgtattgtttacaaagcgcccagtaatatgtaaacagtgaacttgaatctgtcttgctaggcggacgaacgggcaaagcccacattataagtacctgttgtaatgtgaatgtttactcttcatttctggccaggtttagaaagggagggaagtggggatgggaaagttaattgggatgttaactttccgatgacttagagacctttttagctatttattttattgttgggaaaaaaaaaaaaaaaaaagaaggaaagaaaatgaaataagcccaaaccaagaaagcatcaagggcaacccgggaagaacttagataagctgactggtaacatgaagggatgtcaccggatagctctcccacggacaagtctttctgtttgctaccagaacttttccaagaagctaaagggctgcaaagagatgtaaatacttgtgaataggaatgattatacactgtgtaaaatgcacttttgtttgctgtattcctttagaatcttagataattggctggaaaacgaactgttgttctggtgtgacctgcttaagttaaaaaaaaaaaaagttgtagtgtcatcagagctgtaaaatttttacctttcattttccctccctgtacagaattagcgtggcattttaaatattgatgttcttgttcccagcatgcctgttttaaaacaaaggatttaaaaaaaaagggtgtctacattaaattatgacctagtccaaataatattttctcattaaaatatgtaaattc

SEQ ID NO: 134979 - DNA, 1299 bp, Homo sapiens
  Payload ID: 6364
  Gene Symbol: FOXB2
  Gene Name: forkhead box B2
  Uniprot ID: Q5VYV0
  ENST ID: ENST00000376708
  CDS Start-End: 1-1299
atgccgcggccggggaagagctcgtacagcgaccaaaaaccgccctactcttacatctcgctgaccgccatggcaatccagcactcggccgagaagatgctgccgctgagcgacatctacaagttcatcatggagcgcttcccctactaccgcgagcacacacagcgctggcagaacagcctgcgccacaacctctccttcaacgactgcttcatcaagattccgcggaggcccgaccagcctggcaagggtagcttctgggcgctgcaccccgactgcggggacatgttcgagaacggcagcttcctgcggcgtcgcaagcgcttcaaggtgctgcgcgccgaccatactcacttgcacgcgggaagcaccaagagcgcgccgggcgccggtccgggagggcaccttcacccccatcaccaccaccacccccaccaccaccatcatcaccacgctgccgcacaccaccaccatcaccaccacccaccccagccgccgccgccgccgcccccgccgccgccgcacatggtacactatttccatcagcaaccgcctactgctccgcagccgcctccgcacctcccgtcacagcccccgcagcaaccgccccagcagtcgcagcctcagcagccgtctcaccccggcaagatgcaggaggcggcggccgtggcggcggcggcggcggcggccgcggcagccgcggtgggcagcgtgggacgcctgtctcagttcccaccctacgggctgggctcggccgccgccgctgccgccgcggccgcggcgtccacgtcaggcttcaagcacccctttgccattgagaacattattggccgggactacaagggcgtgctgcaggctggagggctgcccttggcgtccgtcatgcaccacctgggctaccccgtgcccggccagcttggcaacgtcgtcagctccgtgtggccgcacgttggcgtcatggattcggtggccgccgccgcggccgccgcagccgcagccggagtccctgtaggcccggagtatggggccttcggggtcccggtcaagtccctgtgccactcggcaagccagagcctgcctgccatgccggtgcccatcaagcccacgcctgcgctgccgcccgtgtccgcgctgcagccggggctcactgtccccgcggcttcgcagcagcctccggcgccatccaccgtgtgctccgcggccgcggcctcgcccgttgcctctctgctggagcccacagcccctacctcggccgaaagcaagggcggctccttgcactcggtgctagtgcactcctag

SEQ ID NO: 134980 - DNA, 3926 bp, Homo sapiens
  Payload ID: 6365
  Gene Symbol: FOXC1
  Gene Name: forkhead box C1
  Uniprot ID: Q12948
  ENST ID: ENST00000380874
  CDS Start-End: 475-2136
cgagaaaaggtgacgcggggcccgggcaggcggccggcgcgcggccccccccccccccgccctggttatttggccgccttcgccggcagctcagggcagagtctcctggaaggcgcaggcagtgtggcgagaagggcgcctgcttgttctttctttttgtctgctttcccccgtttgcgcctggaagctgcgccgcgagttcctgcaaggcggtctgccgcggccgggcccggccttctcccctcgcagcgaccccgcctcgcggccgcgcgggccccgaggtagcccgaggcgccggaggagccagccccagcgagcgccgggagaggcggcagcgcagccggacgcacagcgcagcgggccggcaccagctcggccgggcccggactcggactcggcggccggcgcggcgcggcccggcccgagcgagggtggggggcggcgggcggcgcggggcggcggcgagcgggggccatgcaggcgcgctactccgtgtccagccccaactccctgggagtggtgccctacctcggcggcgagcagagctactaccgcgcggcggccgcggcggccgggggcggctacaccgccatgccggcccccatgagcgtgtactcgcaccctgcgcacgccgagcagtacccgggcggcatggcccgcgcctacgggccctacacgccgcagccgcagcccaaggacatggtgaagccgccctatagctacatcgcgctcatcaccatggccatccagaacgccccggacaagaagatcaccctgaacggcatctaccagttcatcatggaccgcttccccttctaccgggacaacaagcagggctggcagaacagcatccgccacaacctctcgctcaacgagtgcttcgtcaaggtgccgcgcgacgacaagaagccgggcaagggcagctactggacgctggacccggactcctacaacatgttcgagaacggcagcttcctgcggcggcggcggcgcttcaagaagaaggacgcggtgaaggacaaggaggagaaggacaggctgcacctcaaggagccgcccccgcccggccgccagcccccgcccgcgccgccggagcaggccgacggcaacgcgcccggtccgcagccgccgcccgtgcgcatccaggacatcaagaccgagaacggtacgtgcccctcgccgccccagcccctgtccccggccgccgccctgggcagcggcagcgccgccgcggtgcccaagatcgagagccccgacagcagcagcagcagcctgtccagcgggagcagccccccgggcagcctgccgtcggcgcggccgctcagcctggacggtgcggattccgcgccgccgccgcccgcgccctccgccccgccgccgcaccatagccagggcttcagcgtggacaacatcatgacgtcgctgcgggggtcgccgcagagcgcggccgcggagctcagctccggccttctggcctcggcggccgcgtcctcgcgcgcggggatcgcacccccgctggcgctcggcgcctactcgcccggccagagctccctctacagctccccctgcagccagacctccagcgcgggcagctcgggcggcggcggcggcggcgcgggggccgcggggggcgcgggcggcgccgggacctaccactgcaacctgcaagccatgagcctgtacgcggccggcgagcgcgggggccacttgcagggcgcgcccgggggcgcgggcggctcggccgtggacgaccccctgcccgactactctctgcctccggtcaccagcagcagctcgtcgtccctgagtcacggcggcggcggcggcggcggcgggggaggccaggaggccggccaccaccctgcggcccaccaaggccgcctcacctcgtggtacctgaaccaggcgggcggagacctgggccacttggcgagcgcggcggcggcggcggcggccgcaggctacccgggccagcagcagaacttccactcggtgcgggagatgttcgagtcacagaggatcggcttgaacaactctccagtgaacgggaatagtagctgtcaaatggccttcccttccagccagtctctgtaccgcacgtccggagctttcgtctacgactgtagcaagttttgacacaccctcaaagccgaactaaatcgaaccccaaagcaggaaaagctaaaggaacccatcaaggcaaaatcgaaactaaaaaaaaaaaatccaattaaaaaaaacccctgagaatattcaccacaccagcgaacagaatatccctccaaaaattcagctcaccagcaccagcacgaagaaaactctattttcttaaccgattaattcagagccacctccactttgccttgtctaaataaacaaacccgtaaactgttttatacagagacagcaaaatcttggtttattaaaggacagtgttactccagataacacgtaagtttcttcttgcttttcagagacctgctttcccctcctcccgtctcccctctcttgccttcttccttgcctctcacctgtaagatattattttatcctatgttgaagggagggggaaagtccccgtttatgaaagtcgctttctttttattcatggacttgttttaaaatgtaaattgcaacatagtaatttatttttaatttgtagttggatgtcgtggaccaaacgccagaaagtgttcccaaaacctgacgttaaattgcctgaaactttaaattgtgctttttttctcattataaaaagggaaactgtattaatcttattctatcctcttttctttctttttgttgaacatattcattgtttgtttattaataaattaccattcagtttgaatgagacctatatgtctggatactttaatagagctttaattattacgaaaaaagatttcagagataaaacactagaagttacctattctccacctaaatctctgaaaaatggagaaaccctctgactagtccatgtcaaattttactaaaagtctttttgtttagatttattttcctgcagcatcttctgcaaaatgtactatatagtcagcttgctttgaggctagtaaaaagatatttttctaaacagattggagttggcatataaacaaatacgttttctcactaatgacagtccatgattcggaaattttaagcccatgaatcagccgcggtcttaccacggtgatgcctgtgtgccgagagatgggactgtgcggccagatatgcacagataaatatttggcttgtgtattccatataaaattgcagtgcatattatacatccctgtgagccagatgctgaatagatattttcctattatttcagtcctttataaaaggaaaaataaaccagtttttaaatgtatgtatataattctcccccatttacaatccttcatgtattacatagaaggattgcttttttaaaaatatactgcgggttggaaagggatatttaatctttgagaaactattttagaaaatatgtttgtagaacaattatttttgaaaaagatttaaagcaataacaagaaggaaggcgagaggagcagaacattttggtctagggtggtttctttttaaaccattttttcttgttaatttacagttaaacctaggggacaatccggattggccctcccccttttgtaaataacccaggaaatgtaataaattcattatcttagggtgatctgccctgccaatcagactttggggagatggcgatttgattacagacgttcgggggggtggggggcttgcagtttgttttggagataatacagtttcctgctatctgccgctcctatctagaggcaacacttaagcagtaattgctgttgcttgttgtcaaaatttgatcattgttaaaggattgctgcaaataaatacactttaatttcagtcaaaaa

SEQ ID NO: 134981 - DNA, 2478 bp, Homo sapiens
  Payload ID: 6366
  Gene Symbol: FOXC2
  Gene Name: forkhead box C2
  Uniprot ID: Q99958
  ENST ID: ENST00000320354
  CDS Start-End: 86-1591
cgcgctctctcgctctcagggcccccctcgctcccccggccgcagtccgtgcgcgagggcgccggcgagccgtctcggaagcagcatgcaggcgcgctactccgtgtccgaccccaacgccctgggagtggtgccctacctgagcgagcagaattactaccgggctgcgggcagctacggcggcatggccagccccatgggcgtctattccggccacccggagcagtacagcgcggggatgggccgctcctacgcgccctaccaccaccaccagcccgcggcgcctaaggacctggtgaagccgccctacagctacatcgcgctcatcaccatggccatccagaacgcgcccgagaagaagatcaccttgaacggcatctaccagttcatcatggaccgcttccccttctaccgggagaacaagcagggctggcagaacagcatccgccacaacctctcgctcaacgagtgcttcgtcaaggtgccccgcgacgacaagaagcccggcaagggcagttactggaccctggacccggactcctacaacatgttcgagaacggcagcttcctgcggcgccggcggcgcttcaaaaagaaggacgtgtccaaggagaaggaggagcgggcccacctcaaggagccgcccccggcggcgtccaagggcgccccggccaccccccacctagcggacgcccccaaggaggccgagaagaaggtggtgatcaagagcgaggcggcgtccccggcgctgccggtcatcaccaaggtggagacgctgagccccgagagcgcgctgcagggcagcccgcgcagcgcggcctccacgcccgccggctcccccgacggctcgctgccggagcaccacgccgcggcgcccaacgggctgcctggcttcagcgtggagaacatcatgaccctgcgaacgtcgccgccgggcggagagctgagcccgggggccggacgcgcgggcctggtggtgccgccgctggcgctgccctacgccgccgcgccgcccgccgcctacggccagccgtgcgctcagggcctggaggccggggccgccgggggctaccagtgcagcatgcgagcgatgagcctgtacaccggggccgagcggccggcgcacatgtgcgtcccgcccgccctggacgaggccctctcggaccacccgagcggccccacgtcgcccctgagcgctctcaacctcgccgccggccaggagggcgcgctcgccgccacgggccaccaccaccagcaccacggccaccaccacccgcaggcgccgccgcccccgccggctccccagccccagccgacgccgcagcccggggccgccgcggcgcaggcggcctcctggtatctcaaccacagcggggacctgaaccacctccccggccacacgttcgcggcccagcagcaaactttccccaacgtgcgggagatgttcaactcccaccggctggggattgagaactcgaccctcggggagtcccaggtgagtggcaatgccagctgccagctgccctacagatccacgccgcctctctatcgccacgcagccccctactcctacgactgcacgaaatactgacgtgtcccgggacctcccctccccggcccgctccggcttcgcttcccagccccgacccaaccagacaattaaggggctgcagagacgcaaaaaagaaacaaaacatgtccaccaaccttttctcagacccgggagcagagagcgggcacgctagcccccagccgtctgtgaagagcgcaggtaactttaattcgccgccccgtttctgggatcccaggaaacccctccaaagggacgcagcccaacaaaatgagtattgatcttaaaatccccctcccctaccaggacggctgtgctgtgctcgacctgagctttcaaaagttaagttatggaccaaatcccatagcgagcccctagtgactttctgtaggggtccccataggtgtatgggggtctctatagataatatatgtgctgtgtgtaattttaaatttctccaaccgtgctgtacaaatgtgtggatttgtaatcaggctattttgttgttgttgttgttgttcagagccattaatataatatttaaagttgagttcactggataagtttttcatcttgcccaaccatttctaactgccaaattgaattcaagaaaccgatgtgggttttgtttcctgtacaattatgagatataattctttttcccattgtaggtcttttacaaaacaagaaaataatttatttttttgttggtggataaagaagtcaagtatctgatactttttatttacaaagtgtgatggttttgtatagtaggttccaccctgagtattcctaaaagaaaaaaaaaaaaaaagcttaaaaactctaacttcatctgtgtttgtcttacgtggtcttaatcgttgtacttaccttaaaataaacccatgttgttttttctgcccaaa

SEQ ID NO: 134982 - DNA, 2107 bp, Homo sapiens
  Payload ID: 6367
  Gene Symbol: FOXD1
  Gene Name: forkhead box D1
  Uniprot ID: Q16676
  ENST ID: ENST00000615637
  CDS Start-End: 1-1398
atgaccctgagcactgagatgtccgatgcctctggcctcgccgaggaaacagacatcgacgtggtgggggagggcgaggacgaagaagacgaggaagaggaggacgacgacgagggcggcggtggcgggccccggctggctgtccccgcgcagcggcggcggcggcggcgctcgtacgccggggaggacgagctggaggatctggaggaggaggaggacgacgatgacatcctgctggccccgcctgctgggggctccccggcgcccccgggcccggccccggcggcgggggcaggagccggtgggggcggcggcggcggcggcgcgggcggcggcgggagcgcgggtagcggcgccaagaacccgctggtgaagccgccctactcgtatatcgcgctcatcactatggccatcctgcagagccccaagaagcggctgacgctgagcgagatctgtgagttcatcagcggccgcttcccctactaccgggagaagttccccgcctggcagaacagcatccgccacaacctctcgctcaacgactgcttcgtcaagatcccccgcgagcccggcaacccgggcaagggcaactactggacgctggacccggagtccgccgacatgttcgacaacggcagcttcctgcgccggaggaagcgcttcaagcggcagccgctgctcccacccaacgccgcggccgccgagtctctgctgctgcgcggcgcgggagccgcagggggcgcgggcgacccggcagccgccgccgcgctcttcccgcccgcgcccccgccgcccccgcatgcctacggctacggcccctacggctgcggctacggcctgcagctgccgccttacgcgccgccctcggccctcttcgccgccgcagcggccgccgccgccgccgccgccttccacccgcactcgcccccgccgcccccgccaccgcacggcgcggccgccgagctggcccggaccgccttcggctaccggccgcacccgctcggcgccgccctacccggccccctgccggcctccgcggccaaggcgggcggcccgggcgcctcagcgctggcgcgctcgcccttctccatcgagagcatcatcgggggcagcttgggcccggccgccgctgccgccgccgccgcgcaggccgccgccgccgctcaggcctcgccctcgccctcgccggtggcggcgccgccagctcccggatccagcggaggaggctgcgcggcgcaggcggccgtgggcccggcggccgcgctcacccgatccctcgtggccgccgcggccgccgccgcctcctcagtctcctcgtccgccgccttggggactctgcaccaagggactgccctgtccagtgtcgagaactttactgctaggatttccaattgttaataacgctatgttagcgcgctcgaggaagaaggtaggaatcccggctccttttctcgtcttggtggttcggtgttttgttcgctcctccaggcgcggcccctctcgacctcgcgcgcccattttcgccgctgcgaattctcggacaaaactgtcaacagcccgggcgcgccttttggctctgcgggtccctctatttatgcaaagccgacctatgctacagccccccaacccccgacctggggtagggaggaagagggtgccggggaagggagtccgccctgtccaggcactagaggctcccttgacgtttggcagatgaaaaacaactaagcctttttgaggtgtagagattctcaggtccaggcgttaaaaaataatggtcaaaagaataatacaaaaatagtaaaggtcttgaagaatgccagcgaagcaattcttttttatttgaggacacttgtctggtgtactttttcatgaaaaggaaaaatggttaacatgtttacacaagaaaaaaagtcaaaattatcatttatttcaacctgtgttttgtatcataacagacgtgtggatttttttgtacttactgcgtattctttacaaggagtattgtaaattttactggcaattattattgtactattctaaatgtaagatttttacactttttcagaaataaaaatgcttaattttcaaagaaaattcaccaaaa

SEQ ID NO: 134983 - DNA, 4675 bp, Homo sapiens
  Payload ID: 6368
  Gene Symbol: FOXD2
  Gene Name: forkhead box D2
  Uniprot ID: O60548
  ENST ID: ENST00000334793
  CDS Start-End: 2120-3607
cccttggtcagaggtcccagagggggcccaggcgacttcctctcaaaggacatgagtagtcagacctgccttccatttttttctgcccttaccttggggggatgaagaactctattttgaggattctgtgaaaagggttgcaacccaactctgttctatttctttgcaggagcctgggtgagttctttctccctatcctgggcctctgtagctccatctgtggaatgggagagttggattaacaccaggctatcccgtagattggaggctgctgttagatgaaactgcaaagtgttctcagtaccctttcctaaatggcctagaatatggctacacttatacatcagttctgaggtaggtgttactagcctcatttttacaaaggcagaaacaaagcgcaaagaaccttgcccaaggtgacagatagggtaagtagtgaaggcaggattggaaccccaggagcctgacttaaggtcgctgctcttaactactatgcagaccaggaaactgaggctccgaagcggggaagtcacctaatgagggtcacacagccttgctacagcggaggcagctgggattccggcctcgcacgcccgagctttagccactgtgcggcgctgtcggggcagcagcccaggcatccgctcagttcctgctcacgtccagcgcccatctccccttccgtgccccagaggctgaaatgggcccaatctgtgttgaagctgcttgtttctgggtcctggagggaggccgggggagaaagaggtctaataggatgggcaggaacccggctagcgagaaacaaggcacagggccaaccttagttgcacaagacttttgagagatgaaggcaacacttggtggaggtcagggttcactgagggggtgtcgggcagggggcggaggaggtcctgccgcctgtcggtggggcccagaaccctgggagccaggaaggtggggggtgtccagtcctcagggcaactggggccagggagaggggagggagaaattaagcggattcccagacccatgaacagacatccagacaaatgccgtttccacagagactcacggagagtgagatagtcacagagactgagacaaacggatgccgagatccagagggtcggagaacaggcaaactcggagcagtagaccggcccgcgccccgggaacgcggccacagcggccggcgctctgcccggcctctccgcgcggagaggggtggcgggcccgacagcggagggaggagagggcgccgccgcaatctcacctctcccaggcccaaggctgcgggcgccaagttcgctcctggtgatcactcgaatgcgtctcccctcgggctggaagccgtgcgggctcgggtgggcgccggcgggccgcgctggggcggcgtgggtcccggcgtctcagcctcgcgctcccactgcgcttcggcccggtggcccgggcgccgccttggggagaggacgggtggggaccgccgccacttccctggctgcggctggcgcccgagtgagccttaacatccaggggctgagcgttctgaaggcggcggcttcagggagcacagggtgcaggagcggcggcgaagacaagggcccgcctccggccactcgagcccagctcccgccgcggcggcggtttgttcccgccgggtccctcagcggaggcgctacgcccgcccctgtcgcctcgccccaccccgcccagggagctccgccctagcccgcagctcttccgccttaggcagccgctaggcgggagggacaatcccccaccaccaaccactgccaccccgaggggactaggggctgaggcccgcccaggtaagggaaagcctcagctccttccgttgcgccccagcggcgggtcccagctcggattcccggggtagtggcgggggccgccggcgggtcgtgccctggaaggtgagcgcggccgagctgggccgccagggggcgctgcggagccgggggacacccctccctgcctgcctcagtcccccgccccctccccgcccgcgcgcaaaacgcactcgccccagaggcagcgcggccgagcccgagccgctgccggagcggagccggagagtggcggcggcggcggcagcggcaccatgaccctgggcagctgctgctgcgagatcatgtcctccgagagctccccggccgcgctgtccgaggccgacgcagacatagacgtggtgggcggcggcagcggcgggggggagctcccagctcgctccgggccccgcgccccccgggacgtgctcccccacggccacgagcctcccgcggaggaagccgaggcagacttagccgaggacgaggaggagtctggtggctgctcggacggcgagccccgcgctctggcgtcccggggggcggcggccgcagcggggagcccggggccaggcgccgcggcggcccgcggcgcagcggggcccgggccgggaccgccgtcggggggcgcggcgacgcggagcccgctggtgaagccgccctactcgtacatcgcgctcatcaccatggccatcctgcagagccccaagaagcggctgacgttgagcgagatctgcgagttcatcagcggccgcttcccctactaccgggagaagttccccgcctggcagaacagcatccgccacaacctctctctcaacgactgcttcgtcaagatcccccgcgagccgggcaacccgggcaagggcaactactggacgctggacccggagtcggccgacatgttcgacaacggcagcttcctgcggcgtcgcaagcgcttcaagcggcagcccctgccgccgccgcacccacacccgcaccctcacccggagctgctgctgcgtggcggggccgcggcggcgggggatcccggcgctttcctgcccggcttcgctgcctacggcgcctacggctacggctacgggctggctctcccggcctacggcgcacccccgccggggccggccccgcatccgcacccgcacccgcacgccttcgctttcgccgcggcagccgccgccgctccttgccagctgtcggtacccccaggccgcgccgccgcgcctccacccggacctccgacggcctcggtgttcgcaggcgcgggatcggccccagctcctgcgcctgcctcaggctcgggcccgggcccgggccccgcaggcctgcccgccttcctgggcgcggagctgggctgcgccaaagccttctacgcggcgtccctgagtcctcccgcagccggcaccgcggcgggtctgcccaccgcacttctgcgccagggcctcaagacggacgcgggcggtggtgcaggcggcgggggcgccggggcagggcagaggccttccttctctatagaccacatcatgggccacggtggcggcggggcagcacccccgggcgccggcgagggctctccgggaccgccattcgcggcagccgcgggtcctgggggccaagcccaggtcttggccatgctgactgctccggccctggctcccgttgctggccacattcgcctctcgcatcccggggacgcgctgctgtcctcagggtcccggtttgccagcaaagtcgccggccttagtggctgccacttctgaccgcagcaggcccagggccggttaggtccgcactcctcagcctctcccgggagttcctgcggtcccagcggaactcagggagtctatttatgaagtctccagaccttgggccggcacgcgtgacacggcacttcaggctccacgcacagaatctcgcagatagttgggactaagcgggctctatcgctcagggcgacaggcccggggctacgcgaagaagtcgcaggccaagattctttacagtttgagaaataaaagcaggggggtgggggcttcgtttttttccctgcctctgcgcctctcggggaacacattccgggagagatgcctggccaggctccacggatcccgccagaaacaccaacagagggtctccctttctgcctttcccctctcacttcttccccaacgttgagaccctgcttgtccaatattataatttaaagacatctattatctgctttgtgcttaaaagaaaaattcaacctttttttttttttttttttttttgctgttctccaaggaagttcgtttcctctgaagcctaaaccagtgtctacgcaggcggagctgaacggagaggtgaagcagggggtctttatattccctgcagaaaccctggatcccactccactgaggaaaatcctttctcttttgtgtttgggtgcttttaaaggaatttctttcctttcccttggctggctgggtccagccatctccggccagcaaccctgtcagtgttccaccctgtcccaggccctgtgatatttattgtggctaaaggcaatgagattgggtggaagagaagggtctgggccagggactggagaggtgggggtggagtgggcaagggcacaccctgtggcagggggtcctataattttgtgtaaatatctgtacagcgcgctgctctcggcgttctctgtccactgggtgtgcattgatttaaacttctccactgtggggaagctctgtgaaatcgtctgatggtctgtgtggaagaaaagaaaaatctgtctgccgcctatttcccattggtgtcgattgaataaatgtatgtgaacttca

SEQ ID NO: 134984 - DNA, 2086 bp, Homo sapiens
  Payload ID: 6369
  Gene Symbol: FOXD3
  Gene Name: forkhead box D3
  Uniprot ID: Q9UJU5
  ENST ID: ENST00000371116
  CDS Start-End: 19-1455
taccaaccccgaggagggatgaccctctccggcggcggcagcgccagcgacatgtccggccagacggtgctgacggccgaggacgtggacatcgatgtggtgggcgagggcgacgacgggctggaagagaaggacagcgacgcaggttgcgatagccccgcggggccgccggagctgcgcctggacgaggcggacgaggtgcccccggcggcaccccatcacggacagcctcagccgccccaccagcagcccctgacattgcccaaggaggcggccggagccggggccggaccggggggcgacgtgggcgcgccggaggcggacggctgcaagggcggtgttggcggcgaggagggcggcgcgagcggcggcgggcctggcgcgggcagcggttcggcgggaggcctggccccgagcaagcccaagaacagcctagtgaagccgccttactcgtacatcgcgctcatcaccatggccatcctgcagagcccgcagaagaagctgaccctgagcggcatctgcgagttcatcagcaaccgcttcccctactacagggagaagttccccgcctggcagaacagcatccgccacaacctctcactcaacgactgcttcgtcaagatcccccgcgagccgggcaacccgggcaagggcaactactggaccctggacccgcagtccgaggacatgttcgacaacggcagcttcctgcggcgccggaaacgcttcaagcgccaccagcaggagcacctgcgcgagcagacggcgctcatgatgcagagcttcggcgcttacagcctggcggcggcggccggcgccgcgggaccctacggccgcccctacggcctgcaccctgcggcggcggccggtgcctattcgcacccggcagcggcggcggccgcggctgctgcggcggcgctccagtacccgtacgcgctgccgccggtggcaccggtgctgcctcccgctgtgccgctgctgccctcgggcgagctgggccgcaaagcggccgccttcggctcacagctcggcccgggcctgcagctgcagctcaatagcctgggcgccgccgcggccgctgcgggcacagcgggcgccgcgggcaccaccgcgtcgctcatcaagtccgagccaagcgcgcggccgtcgttcagcatcgagaacatcataggtgggggccccgcggctcctgggggctcggcggtgggcgctggggtcgccggcggcactgggggttcagggggcggcagcacggcgcagtcgtttctgcggccacccgggaccgtgcagtcggcagcgctcatggccacccaccaaccgctgtcgctgagccggacgactgccaccatcgcgcccattcttagcgtgccactctccggacagtttctgcagcccgcagcctcggccgccgccgctgctgcggccgccgctcaagccaaatggccggcgcaatagggacgcgccaatggccgggacccagggtccggcggcggcctcgagcaacaaatgcacctccaggctgcgcgccctgtcccaagcccggtcccggtcccgctgcccaatcctggactctgcctctccccaatttcctttcccctgagcccccaacgcctaccttccgcggcctccatcccctcgcgcacacctaagctggtcgagcaaactcaccgcgcgcccgccggggatagctttccatacaggtaaaaccgaaaaccgaattttccaaaaatgcaccccgacggcgcctgctcttagtaccgtggggatgggagggaaattctttgtatatatttgtaaaaaaattattgactttccttttggggtttttatttttttaagaaaaaacaaattccgtagatttagagctctgaactttcattttttttgaaggttcactctccgaagttttatctgagaaaagaatgtatagagacgttgggagattttaaatataaaaaattttcaaaaaggcaaaaagtgtcattctattataaaagtctgtttatatatgaatgaatatatatggtattctaaatgttattccatcgtgttgtacacaactttgtaaataaatttttaaaatgcc

SEQ ID NO: 134985 - DNA, 1974 bp, Homo sapiens
  Payload ID: 6370
  Gene Symbol: FOXD4
  Gene Name: forkhead box D4
  Uniprot ID: Q12950
  ENST ID: ENST00000382500
  CDS Start-End: 86-1405
cattcatcccgggcttccagctcagcccgccggggccaggtgatccggccgccacatcccctgcgactgaagcacctgctccgccatgaacttgccaagagctgagcgccttcgctccacaccgcagcgcagcctccgggactccgatggggaagacggtaaaatcgatgtcctgggagaggaggaagatgaagacgaggaggaggcggcgagccagcagttcctagagcagtcgctccagccggggctgcaggtggcccggtggggcggggttgcgcttccccgagagcacatcgagggcggcggcggcccgagcgacccctcagagtttggcaccgagttcagggcaccgccaaggtctgcggcggcctctgaagatgcccggcagccggcaaagcccccctcctcgtacatcgcgctcatcaccatggccatcctgcaaagcccgcacaagcgcctcacgctcagcggcatctgcgccttcattagtgaccgcttcccctactaccgccgcaagttccccgcctggcagaacagcatccgccacaacctctcgctgaacgactgcttcgtcaagatcccccgcgagccgggccgcccaggcaagggcaactactggagcctggaccccgcctcccaggacatgttcgacaatggcagctttctccggcgtaggaagcgtttccagcgccaccaaccgaccccgggagcccacctgccccaccccttccctctacctgctgcacacgccgccctgcacaacccccgcccaggccctctgcttggggcccctgccccgccgcagccagtcccgggggcctaccccaacaccggccccgggagacgcccttacgctctgctgcacccgcatcctcctcgctacctactgctctcggcccccgcctatgccggggcaccgaagaaagcagaaggcgcggacctggcgaccccggcacccttcccgtgctgcagccctcacttggtcctcagccttgggaggagggcaagggtctggcgtcgccaccgggaggcggatgcatctctttcagcattgagagtatcatgcaaggggtcaggggagcgggtacaggggctgcgcagagtttgtccccgaccgcgtggagctactgccccctgctccagcgaccgtcaagcctgtcggacaattttgcagcaacagcagcggcatcaggaggaggactgcgccaacggctgcgctcccaccaagggcgcggtgctgggcgggcacctgtcggccgcgtcggcgctgctgcggtatcaggcggtggcagagggctctgggctgacatcgctggccgcccctttgggcggagaggggacctcaccagtttttttagtatcgcccacgcccagttccctggccgagtccgcagggccctcctagagccaggtgggagtggggagcgacccgcagctgctcactccaccttgcgcggcccatactgggcgtgtgcatctgaatcccgctggagagcaaacacgaacttctgttccctgcaaaatggttagaaagaaacagctggattacgttcctctaaaaaccacctgaacgtaaccttcgcagggcgtcaagtcatcttttcttgccttcggttgtggcttctgtggctttcccgatttgcacatgtcctggggtactatgaacgtgagtggggtattttgttctggcattaaaagaaaaacaagcaagcaaacaaaaacacagcctccgatgccaaacatgttcccccttcttcacttccttggaactggaagtattattcctaagtctagtgcaaaatgcttctactctctgtgtcttcctgatagggatgtttaatgtaagtaggatattaatttcagaacattgatttcttatctgtgtgtctgacgtgccatctttaatgttaaaattaaggtgttaaaattaagcctagttatatagacgaaataaaatgctaagtcactacacta

SEQ ID NO: 134986 - DNA, 2491 bp, Homo sapiens
  Payload ID: 6371
  Gene Symbol: FOXD4L1
  Gene Name: forkhead box D4-like 1
  Uniprot ID: Q9NU39
  ENST ID: ENST00000306507
  CDS Start-End: 593-1819
acatacttttacggttacacattcctttacaaacaaccgtgtacatttcagcctcctgccccaccatttcttttctccaggagggaaggctgcatgtcgagatggtcgtagaatgttgagtatcctactttcctacctcgcttttatttgcgcgggtttaaatgcgccttaacagaacccgtgcaaaggcttgcctacttgtctggctgcaccggatgagtagagcatcttccttggtggcaggtgggtgcgaggaggagggggctgggcttttctccggacggtgtttgcccagaagaccatcatccctggactacgttaggaggaagtggcaccgctccgaggtaggggaagaagggttataaaggggggagtccaccacacatggtcttgaagaagcttttataaaaggcaaaggcatctttgccggacgttgttgcaaaggagtagaaacaagcagaggaaaacatcccaaagggtaaccactagcgttcctgcttcttgcaacattcatcccaggcttccagctcagcccgccccgggccaggtgatcggccgccacatcccctgcgactgaagcacctgctccgccatgaacctgccaagagctgagcgccctcgctccacaccgcagcgcagcctccgggactccgatggggaagacggtaaaatcgatgtcctgggagaggaggaagatgaagacgaggtggaagacgaggaggaggaggcgagccagaagttcctagagcagtcgctccagccggggctgcaggtggcccggtggggcggggttgcgcttccccgagagcacatcgagggcggcggcccgagcgacccctcagagtttggcaccgagttcagggcaccgccaaggtctgcggcggcctctgaagatgcccggcagccggcaaagcccccctactcgtacatcgcgctcatcaccatggccatcctgcaaagcccgcacaagcgcctcacgctcagcggcatctgcgccttcattagtggccgcttcccctactaccgccgcaagttccccgcctggcagaacagcatccgccacaacctctcgctgaacgactgcttcgtcaagatcccccgcgagccgggccacccaggcaagggcacctactggagcctggaccccgcctcccaggacatgttcgacaatggcagctttctccggcgtaggaagcgtttcaagcgccaccaactgaccccgggagcccacctgccccaccccttccctctacctgctgcacacgccgccctgcacaacccccgcccaggccctctgcttggggcccctgccctgccgcagccagtcccgggggcctaccccaacaccgcccccgggagacgcccttacgctctgctgcacccgcatcctcctcgctacctactgctctcggcccccgcctatgccggggcaccgaagaaagcagaaggcgcggacctggcgacccccggcacccttcccgtgctgcagccctcacttggtcctcagccttgggaggagggcaagggtctggcgtcgccaccgggaggcggatgcatctctttcagcattgagagtatcatgcaaggggtcaggggagcgggtacaggggctgcgcagagtttgtccccgaccgcgtggagctactgccccctgctccagcgaccgtcaagcctgtcggacaattttgcagcaacagcagcagcatcaggaggaggactgcgccaacggctgcgctcccaccaagggcgcggtgctgggcgggcacctgtcggccgcgtcggcgctgctgcggtatcaggcggtggcagagggctctaggctgacatcgctggctgcccctttgggcggagaggggacctcaccagtttttttagtatcgcccacgcccagttccctggccaagtccgcagggccctcctagagccaggtgggagtggggagcgatccgcagctgctcactccaccttgcgcggcccatactgggcgtgtgcatctgaatcctgctggagagcaaacacgaacttctgttccctgcaaaatggttagaaagaaacagctggattacgttcctctaaaaaccacctgaacgtaaccttcgcagggcgtcaagtcatcttttcttgccttcggctgtggcttctgtggctttccggatttgcacatttcctggggtactatgaacgtgagtggggtattttgttctggcattagaagaaaaacaagcaagcaaacaaaaacacagcctccgatgccaaacatgttcccccttcttcacttccttggaactggaagtgttattcctaagtctagtgcaaaatgcttctactctctgtgtcttcctgatagggatgtttaatgtaagtaggatattaatttcagaacattgatttcttatctgtgtgtctgacgtgccatctttaatgttaaaattaaggtgttaaaattaagcctagttatatagacgaaataaaatgctaagtcactacacta

SEQ ID NO: 134987 - DNA, 2039 bp, Homo sapiens
  Payload ID: 6372
  Gene Symbol: FOXD4L3
  Gene Name: forkhead box D4-like 3
  Uniprot ID: Q6VB84
  ENST ID: ENST00000342833
  CDS Start-End: 86-1339
cattcatcccaggcttccagctcagcccgccccaggccaggtgatcggccgccacatcccctgcgactgaagcacctgctcctccatgaacctgccaagagctgagcgccttcgctccacaccgcagcgcagcctccgggactccgatggggaagacggtaaaatcgatgtcctgggagaggaggaagatgaagacgaggtggaagacgaggaggaggcggcgagccagcagttcctagagcagtcgctccagccggggctgcaggtggcccggtggggcggggttgcgcttccccgagagcacatcgagggcggcggcggcccgagcgacccctcagagtttggcaccaagttcagggcaccgccaaggtctgcggcggcctctgaagatgcccggcagccggcaaagcccccctactcgtacatcgcgctcatcaccatggccatcctgcaaaacccgcacaagcgcctcacgctcagcggcatctgcgccttcattagtggccgcttcccctactaccgccgcaagttccccgcctggcagaacagcatccgccacaacctctcgctgaacgactgcttcgttaagatcccccgcgagccgggccacccaggcaagggcaactactggagcctggaccccgcctcccaagacatgttcgacaatggcagctttctccggcgtaggaagcgtttcaagcgccaccaactgaccccgggagcccacctgccccaccccttccctctacctgctgcacacgccgccctgcacaacccccgcccaggccctctgcttggggcccctgccccgccgcagccagtcccgggggcctaccccaacaccgcccccgggagacgcccttacgctctgctgcacccgcatcctcttcgctacctactgctctcggcccccgtctatgccggggcaccgaagaaagcagaaggcgcggccctggcgaccccggcacccttcccgtgctgcagccctcacttggtcctcagccttgggaggagggcaagggtctggcgtcgccaccgggaggcggatgcatctctttcagcattgagagtattatgcaaggggtcaggggagcgggtacaggggctgcgcagaatttgtccccgaccgcgtggagctactgccacctgctccagcgaccatcaagcctgttgcatccccagaccgctgcccctttgctgcaagtgtccgccgccgccgctgctcggacaattttgcagcaatagcagcagcatcaggaggaggactgcgccaacggctgcgctcccaccaagggcgcggtgctgggcgggcacctgtcggcctcgtcggccctgctgaggtatcaggcagtggcagagggctctaggctgacatcgctggctgcccctttgggcggagaggggacctcaccagtttttttagtatcgcccacgcccagttccctggccaactccgcagggccctcctagagccaggtgggagtggggagcgacccgcagctgctcactccaccttgcgcggcccatactgggcgtgtgcatctgaatcccgctggagagcaaacacgaacttctgttcgctgcaaaatggttagaaagaaacagctggattacgttcctctaaaaaccacctgaacgtaaccttcgcagggcgtcaagtcatcttttcttgccttcggttgtggcttctatggctgtcccgatttgcgcatttcctggggtactatgaacgtgagtggggtattttgttctggcattaaaagaaaaacaagcaagcaaacaaaaacacagcctccgatgccaaacatgttcccccttcttcacttccttggagctggaagtattattcctaagtctagtgcaaaatgcttctactctctgtgtcttcctgatagggatgtttaatgtaagtaggatattaatttcagaacattgatttcttatctgtgtgtctgacgtgccatctttaatgttaaaattaaggtgttaaaattaagcctagttatatagacgaaataaaatgctaagtcactacacta

SEQ ID NO: 134988 - DNA, 2230 bp, Homo sapiens
  Payload ID: 6373
  Gene Symbol: FOXD4L4
  Gene Name: forkhead box D4-like 4
  Uniprot ID: Q8WXT5
  ENST ID: ENST00000377413
  CDS Start-End: 592-1842
acatacttttacggttacacattcctttacaaacaaccgtgtacatttcagcctcctgccccaccatttcttttctccaggagggaaggctgcatgtcgaggtggtcatagaatgttgagtatcatactttcctacctcgcttttatttgcgcgggtttaaatgcgccttaacagaacccgtgcaaaggcttgccaactgtctggctgcaccggatgagtagagcatcttccttggtggcaggtgggtgcgaggaggaggggcctgggcttttctccggacagtgtttgcccagaagaccatcatccctggactacgttaggaggaagtggcaccgctccgaggtaggggaagaagggttataaaggggggagtccaccacacatggtcttgaagaagcttttataaaaggcaaaggcatctttgccggacgttgttgcaaaggagtagaaacaagcagacgaaaacatcccaaagggtaaccactagcgttcctgcttcttgcaacattcatcccaggcttccagctcagcccgccccaggccaggtgatcggccgccacatcccctgcgactgaagcacctgctcctccatgaacctgccaagagctgagcgccctcgctccacaccgcagcgcagcctccgggactccgatggggaagacggtaaaatcgatgtcctgggagaggaggaagatgaagacgaggtggaagacgaggaggaggaggcgagacagcagttcctagagcagtcgctccagccggggctgcaggtggcccggtggggcggggttgcgcttccccgagagcacatcgagggcggcggcggcccgagtgacccttcagagtttggcaccaagttcagggcaccgccaaggtctgcggcggcctctgaagatgcccggcagccggcaaagcccccctactcgtacatcgcgctcatcaccatggccatcctgcaaaacccgcacaagcgcctcacgctcagcggcatctgcgccttcattagtggccgcttcccatactaccgccgcaagttccccgcctggcagaacagcatccgccacaacctctcgctgaacgactgcttcgttaagatcccccgcgagccgggccacccaggcaagggcaactactggagcctggaccccgcctcccaggacatgttcgacaatggcagctttctccggcgtaggaagcgtttcaagcgccaccaactgaccccgggagcccacctgccccaccccttccctctacctgctgcacacgccgccctgcacaacccccacccaggccctctgcttggggcccctgccccgccgcagccagtcccgggggcctaccccaacaccgcccccgggagacgcccttacgctctgctgcacccgcatcctcttcgctacctactgctctcggcccgcgtctatgccggggcaccgaagaaagcagaaggcgcggacctggcgaccccggcacccttcccgtgctgcagccctcacttggtcctcagccttgggaggagggcaagggtctggcgtcgccaccgggaggcggatgcttctctttcagcattgagagtattatgcaaggggtcaggggagcgggtacaggggctgcgcagagtttgtccccgaccgcgtggagctactgccacctgctccagcgaccatcaagcctgttgcatccccaaaccgctgcccctttgctgcaagtgtccgccgccgctgctgctcggacaattttgcagcaatagcagcagcatcaggaggactgcgccaacggctgcgctcccaccaagggcgcggtgctgggcgggcacctgtcggcctcgtcggcgctgctgaggtatcaggcagtggcggagggctctaggctgacatcgctggctgcccctttgggcggagaggggacctcaccagtttttttagtatcgcccacgcccagttccctggccaactccgcagggccctcctagagccaggtgggagtggggagcgacccgcagctgctcactccaccttgcgcggcccatactgggcgtgtgcatctgaatcccgctggagagcaaacacgaacttctgttcgttcgctgcaaaatggttagaaagattacattcctctaagctggattacgttcctctaaaaaccacctgaacgtaaccttcgcagggcgtcaagtcatcttttcttgccttcggttgtggcttctatggctgtcccgatttgcacatt

SEQ ID NO: 134989 - DNA, 3109 bp, Homo sapiens
  Payload ID: 6374
  Gene Symbol: FOXD4L5
  Gene Name: forkhead box D4-like 5
  Uniprot ID: Q5VV16
  ENST ID: ENST00000377420
  CDS Start-End: 833-2083
ctctcctgccttccctgaataaacttacacaatttagtgctgggacatttggaccttttctgaaaatttgagtcagggagagcatcttggggaggtgggaaggaaggtagaaggagcaaagcaacacccccctgaagcctgggaatattgtcagaaccttaaatataattcagctcaccattctgggtaaggacagactctaccaatgaaaatgggtgattaccagctgtgaaacacaaaaacatacttttacggttacacattcctttacaaacaaccgtgtacatttcagcctcctgccccaccatttcttttctccaggagggaaggctgcatgtcgaggtggtcatagaatgttgagtatcatactttcctacctcgcttttatttgcgcgggtttaaatgcgccttaacagaacccgtgcaaaggcttgccaactgtctggctgcaccggatgagtagagcatcttccttggtggcaggtgggtgcgaggaggaggggcctgggcttttctccggacagtgtttgcccagaagaccatcatccctggactacgttaggagtaagtggcaccgctccgaggtgggggaagaagggttataaaggggggagtccaccacacatggtcttgaagaagcttttataaaaggcaaaggcatctttgccggacgttgttgcaaaggagtagaaacaagcagacgaaaacatcccaaagggtaaccactagcattgctgcttcttgcaacattcatcccaggcttccagctcagcccgccccaggccaggtgatcggccgccacatcccctgcgactgaagcacctgctcctccatgaacctgccaagagctgagcgccctcgctccacaccgcagcgcagcctccgggactccgatggggaagacggtaaaatcgatgtcctgggagaggaggaagatgaagacgaggtggaagacgaggaggaggaggcgagacagcagttcctagagcagtcactccagccggggctgcaggtggcccggtggggcggggttgcgcttccccgagagcacatcgagggcggcggcggcccgagtgacccctcagagtttggcaccaagttcagggcaccgccaaggtctgcggcggcctctgaagatgcccggcagccggcaaagcccccctactcgtacatcgcgctcatcaccatggccatcctgcaaaacccgcacaagcgcctcacgctcagcggcatctgcgccttcattagtggccgcttcccatactaccgccgcaagttccccgcctggcagaacagcatccgccacaacctctcgctgaacgactgcttcgttaagatcccccgcgagccgggccacccaggcaagggcaactactggagcctggaccccgcctcccaggacatgttcgacaatggcagctttctccggcgtaggaagcgtttcaagcgccaccaactgaccccgggagcccacctgccccaccccttccctctacctgctgcgcacgccgccctgcacaacccccacccaggccctctgcttggggcccctgccccgccgcagccagtcccgggggcctaccccaacaccgcccccgggagatgcccttacgctctgctgcacccgcatcctcttcgctacctactgctctcggcccccgtctatgccggggcaccgaagaaagcagaaggcgcggacctggcgaccccggcacccttcccgtgctgcagccctcacttggtcctcagccttgggaggagggcaagggtctggcgtcgccaccgggaggcggatgcatctctttcagcattgagagtattatgcaaggggtcaggggagcgggtacaggggctgcgcagagtttgtccccgaccgcgtggagctactgccacctgctccagcgaccatcaagcctgttgcatccccaaaccgctgcccctttgctgcaagtgtccgccgccgctgctgctcggacaattttgcagcaatagcagcagcatcaggaggactgcgccaacggctgcgctcccaccaagggcgcggtgctgggcgggcacctgtcggcctcgtcggcgctgctgaggtatcaggcagtggcggagggctctaggctgacatcgctggctgcccctttgggcggagaggggacctcaccagtttttttagtatcgcccacgcccagttccctggccaactccgcagggccctcctagagccaggtgggagtggggagcgacccgcagctgctcactccaccttgcgcggcccatactgggcgtgtgcatctgaatcccgctggagagcaaacacgaacttctgttcgttcgctgcaaaatggttagaaagattacattcctctaagctggattacgttcctctaaaaaccacctgaacgtaaccttcgcagggcgtcaagtcatcttttcttgccttcggttgtggcttctatggctgtcccgatttgcacattgtcatctttgaaggttagtgacatagcattcatcttctgttgtcaccttttccgtcattccctgtatgcctgatggacaggtttcactgaagttcagagaacagcatgcaaaattagctaccaattaatctttatgaagtgagctgcatttctagccacactgagcttatgttttagcaggaagcatttttgggaaatgtttatgttagagtttgcccttcttgacaaggtgagacataaatgtctactttagagacatgaattaagatgggaagatatttgggggaatcatttactcaaacgctaagtaataaaggtacacaaagggcaaattatactagatttctttcccacttgttttctatgtctcttgcaattcaccttgattcccttcagtttctgtttaatgtagaaagtggcattttcattattttaagcttctagcacaatgaaagaatttctctttttcatgaacaggatcataaatggaagggaggaagagtgtcctatatcatatttattgttcaacaaaacactgctccacggcttcaattcagtttaaaaaagagaatttattgaatatctaacacatacataaaaggcagtaaagacaaatgagaagaggggaggatattgaa

SEQ ID NO: 134990 - DNA, 2034 bp, Homo sapiens
  Payload ID: 6375
  Gene Symbol: FOXD4L6
  Gene Name: forkhead box D4-like 6
  Uniprot ID: Q3SYB3
  ENST ID: ENST00000622588
  CDS Start-End: 81-1334
atcccaggcttccagctcagcccgccccaggctaggtgatcggtcgccacatcccctgcgactgaagcacctgctcctccatgaacctgccaagagctgagcgccttcgctccacaccgcagcgcagcctccgggactccgatggggaagacggtaaaatcgatgtcctgggagaggaggaagatgaagacgaggtggaagacgaggaggaggcggcgagccagcagttcctagagcagtcgctccagccggggctgcaggtggcccggtggggcggggttgcgcttccccgagagcacatcgagggcggcggcggcccgagcgacccctcagagtttggcaccaagttcagggcaccgccaaggtctgcggcggcctctgaagatgcccggcagccggcaaagcccccctactcgtacatcgcgctcatcaccatggccatcctgcaaaacccgcacaagcgcctcacgctcagcggcatctgcgccttcattagtggccgcttcccctactaccgccgcaagttccccgcctggcagaacagcatccgccacaacctctcgctgaacgactgcttcgttaagatcccccgcgagccgggccacccaggcaagggcaactactggagcctggaccccgcctcccaagacatgttcgacaatggcagctttctccggcgtaggaagcgtttcaagcgccaccaactgaccccgggagcccacctgccccaccccttccctctacctgctgcacacgccgccctgcacaacccccacccaggccctctgcttggggcccctgccccgccgcagccagtcccgggggcctaccccaacaccgcccccgggagacgcccttacgctctgctgcacccgcatcctcttcgctacctactgctctcggcccccgtctatgccggggcaccgaagaaagcagaaggcgcggccctggcgaccccggcacccttcccgtgctgcagccctcacttggtcctcagccttgggaggagggcaagggtctggcgtcgccaccgggaggcggatgcatctctttcagcattgagagtattatgcaaggggtcaggggagcgggtacaggggctgcgcagagtttgtccccgaccgcgtggagctactgccacctgctccagcgaccatcaagcctgttgcatccccagaccgctgcccctttgctgcaagtgtccgccgccgccgctgctcggacaattttgcagcaatagcagcagcatcaggaggaggactgcgccaacggctgcgctcccaccaagggcgcggtgctgggcgggcacctgtcggcctcgtcggccctgctgaggtatcaggcagtggcagagggctctaggctgacatcgctggctgcccctttgggcggagaggggacctcaccagtttttttagtatcgcccacgcccagttccctggccaactccgcagggccctcctagagccaggtgggagtggggagcgacccgcagctgctcacttcaccttgcgcggcccattcagggcgtgtgcatctgaatcccgctggagagcaaacacgaacttctgttcgctgcaaaatggttagaaagaaacagctggattacgttcctctaaaaaccacctgaacgtaaccttcgcagggcgtcaagtcatcttttcttgccttcggttgtggcttctatggctgtcccgatttgcgcatttcctggggtactatgaacgtgagtggggtattttgttctggcattaaaagaaaaacaagcaagcaaacaaaaacacagcctccgatgccaaacatgttcccccttcttcacttccttggagctggaagtattattcctaagtctagtgcaaaatgcttctactctctgtgtcttcctgatagggatgtttaatgtaagtaggatattaatttcagaacattgatttcttatctgtgtgtctgacgtgccatctttaatgttaaaattaaggtgttaaaattaagcctagttatatagacgaaataaaatgctaagtcactacacta

SEQ ID NO: 134991 - DNA, 3462 bp, Homo sapiens
  Payload ID: 6376
  Gene Symbol: FOXE1
  Gene Name: forkhead box E1
  Uniprot ID: O00358
  ENST ID: ENST00000375123
  CDS Start-End: 662-1783
cctcgccagcggtccgcagggctggagacccacgccgtggagaggaccagcctcaggtcgccccgcctgggcccgcgccccgacctcgctgcccccgcctcgcctctctgcccgtggcgcttacggccaccttggcctcgggggcagggcatgggcggcccccgccagatcgcccagcgccagtactaactgccctcgctctggccttcgagcccgaagcctcttctgcgcgcacaacctaggcagtaatcctaaactagcgggcaccacagaccagctgcagccaccccaacccagggatcacttccggacccctcgaccgcccggcaccagcgcgcaagggacccttcagccggagaccagagtccagtcccggtcacgaggccaccgccgctgcccgcctcgagaagcaccacgcgggctgagccgtcggctagcgggtcactcccgagcctctgtctgcaccgcgccagccccagaccacggacgctgagcctccagcgcgtgccagcctgggccgctgggctctcggggccagcccgcgacgatcccctgagctctccgcagaagggccgagcgtccgttccggggacgccaggcccgcccccgccccccgacagccgcggggatccagagcccgggggtgcgggacgcccgcgccatgactgccgagagcgggccgccgccgccgcagccggaggtgctggctaccgtgaaggaagagcgcggcgagacggcagcaggggccggggtcccaggggaggccacgggccgcggggcgggcgggcggcgccgcaagcgccccctgcagcgcgggaagccgccctacagctacatcgcgctcatcgccatggccatcgcgcacgcgcccgagcgccgcctcacgctgggcggcatctacaagttcatcaccgagcgcttccccttctaccgcgacaaccccaaaaagtggcagaacagcatccgccacaacctcacactcaacgactgcttcctcaagatcccgcgcgaggccggccgcccgggtaagggcaactactgggcgcttgaccccaacgcggaggacatgttcgagagcggcagcttcctgcgccgccgcaagcgcttcaagcgctcggacctctccacctacccggcttacatgcacgacgcggcggctgccgcagccgccgccgccgccgccgccgccgccgccgccatcttcccaggcgcggtgcccgccgcgcgccccccctacccgggcgccgtctatgcaggctacgcgccgccgtcgctggccgcgccgcctccagtctactaccccgcggcgtcgcccggcccttgccgcgtcttcggcctggttcctgagcggccgctcagcccagagctggggcccgcaccgtcggggcccggcggctcttgcgcctttgcctccgccggcgcccccgctaccaccaccggctaccagcccgcaggctgcaccggggcccggccggccaacccctccgcctatgcggctgcctacgcgggccccgacggcgcgtacccgcagggcgccggcagtgcgatctttgccgctgctggccgcctggcgggacccgcttcgcccccagcgggcggcagcagtggcggcgtggagaccacggtggacttctacgggcgcacgtcgcccggccagttcggagcgctgggagcctgctacaaccctggcgggcagctcggaggggccagtgcaggcgcctaccatgctcgccatgctgccgcttatcccggtgggatagatcggttcgtgtccgccatgtgagccagcgtagggacgaaaactcatagacacatcggctgttcacacgttccccgcaatctgagaacgaacaggaatggagagaggactcaactgggacccacgtggaaaagaccgagcaggccacagaggctcggtctccccgcgcacagcgtaggcacccggtgtactctgtaaacgggaggaggtggggcgaggcagccagagcccttggactggcacagggaccctcgatggagcgaagccctcaaacgggatgctttctggtattctatcggggagggtccttggcggtaaccagagggcagcgtagtgtcaacaccagagaccaggatccaaattgtggggaatcagtttcagccttccatgtgctgccggaactcgggcctttttacgcggttcgtcctctagtgcctttaactgcgttactacaataaaaggctgcggcagcgcctttcttcttaaagtgaggaggacaaatttgcaaaagaaataggcttttcttcttttttaaattggagaaatctctgctctggttgacctgggctggttttccctgtctctgagaacttgagacctagctccgagttgaactgtgcgtcagcactccagtcccatcacctgaaccttcagtctcccccatctgttacactagagggctgcaggactctatccaccgcccccgggttatcattcagggccccatcatcttggatgctgccctgcgtatttggcagcaatggtgggccacccagggcctctgagtagccacccaaagcctagccgctgttctagggaacggaaaagagttcatggccaagcgtctaacctaaagtcccaggattggctccaggcagcaattatatcataacttattgaacttttgagcaggacgtgctggtaatttcatggctgttactgcccagtcataaatctgcttttccattataaggcagagagaagtacattcgttcatttgtccactgtttcttgtcatcacgcagccctggacccaaagggtgaactaaagtttaaggagatgagaggattcaaggagcccgttggtgacgcctttcagtagctggggagggctcttccatccccagcaccccctgctacacctcagcagcctcccccatgcaaaaaggaaagagaaaaattaagttagggcagtcagtaaagtgagctttagaaagaaactggaattttaacttcattttgtatcttgcttaagtagcaggctcactaaaattagagaaagtccaataactctccccctttcccttgagaaatctttaagtttcgattctggagcaaaaactttcagcattaaatatttcagaggctccattcacagctttcagataaactggagtgttcagatggactgttttaataaaaatctttgagcaagtgagttatggcaagagaaactcagcctctttctgtataaacttaacagggaagggctggggtgtgaaaaagaagattgtatgaaaaccattggtaatttttattttttatttttgggactgcactatcctgttcacgaagacatgtgaacttggttcagtccaaatggggatttgtataaaccagtgctctccattagaaatatggtgcaagccacatatgtaattttaaatattctagtagccacattaataaagtaaaaagaaaca

SEQ ID NO: 134992 - DNA, 1981 bp, Homo sapiens
  Payload ID: 6377
  Gene Symbol: FOXE3
  Gene Name: forkhead box E3
  Uniprot ID: Q13461
  ENST ID: ENST00000335071
  CDS Start-End: 245-1204
gggaaggggtgagtctgggtctgggaaaaactgatccaaaggcagaaagggaggggcgaaatggaggagggtaccgtgaacagagtaagggggctgggagaggaaattagaggggaggcgctggccagcaggcaaggcctgagccctctcccccggcggtggttgggggggggccgtgtccatataaagcgggtcggcggcccctgcggtcccggagccgcgcgggcaggggctgccgcagccgatggcggggcgcagcgacatggatccgcccgccgcgttctctggcttccctgccctgccagcggtcgcgccgtcggggccgccgccgtcgccgctcgcaggagccgagccagggcgggagccagaggaggcggcggctggccgcggagaggcggcccccacgcccgcgcccggcccggggcggcggcggcggcggcccctgcagcgcgggaagccgccctactcgtacatcgcgctcatcgccatggctctggcgcacgccccgggccgccgcctcacgctggccgccatctaccgcttcatcaccgaacgctttgccttctaccgcgacagcccgcgcaagtggcagaacagcatccgccacaatctcacgctcaacgactgcttcgtcaaggtgccccgcgagccgggcaacccgggcaagggcaactactggacgctggaccccgcggccgcagacatgttcgacaacggcagcttcctgcggcgccgcaagcgcttcaagcgcgccgagctgcccgcgcacgcggccgcggcgccagggccgccgctccccttcccctacgcgccctacgcgcccgcgcccggccccgcgctgctggtgccgccgccttctgccggaccgggcccctcgccgcccgcgcgtctgttcagcgtcgacagcctggtgaacctgcagccggagctagcggggctgggcgcccccgagccgccctgctgcgccgcgcccgacgccgcagccgcagccttcccgccctgcgctgccgccgcctccccgccactctactcgcaggtccccgaccgcctggtactgcccgcgacgcgccccggccccggcccgctgcccgctgagcccctcctggccttggccgggccggcagccgctctcggcccgctcagccctggggaggcctacctgaggcagccgggcttcgcgtcggggctggagcgctacctgtgagcctgcgccgcgcgggcaggcacctgtgcgacctgtgccccggacctgcggcgccgccctcgagcgccccatctctaccccccaccctggcttggagcacaccctgcgcctctcgtcgtggcctcctggactcaaactcctgctacatccttctccgtcccccatccctggggaggctcccaccatctcgccactggacagaagcgtcccctttgacctgccagcctctcatttcttctccctccacttgtgagcgcccccagctttgcggcgccccccaccccagcgctgtctgtgggtcccttgccccggagctgactcgcctccagtgagtccataccccaggtttcctggtgagttccaagcctttggaagccagatctgtgatcccaagccgcctcctccaccgactgtacttcatcaaccttctctcatgtttttccgacactcctgggtcagactcctgggttcatgacttacttgctagcgtcccttcattttcccacaagtttgccccccacctccacttacctgtctgccctcagcttcttcctgggagagagcccccctttcacgtagacacacctggctgccttcttcacgccctgaggacacttcttggagatttcagacaggcagcaccagggctcctgactgaaaggggagttggtgggcctttaggtctgccccatcccctggaaaacttaggacttattgggttattattatttttaattaaagctggtttaattaaaaagaaagaaacttttttctgga

SEQ ID NO: 134993 - DNA, 3516 bp, Homo sapiens
  Payload ID: 6378
  Gene Symbol: FOXF1
  Gene Name: forkhead box F1
  Uniprot ID: Q12946
  ENST ID: ENST00000262426
  CDS Start-End: 44-1183
gcagagcagcggcggcagcggcggcggcggcagcagccacccgatgtcttcggcgcccgagaagcagcagccaccgcacggcggcggcggcggcggcggcgggggaggcggcgcggccatggaccccgcgtcgtccggcccgtccaaggccaagaagaccaacgccggcatccggcgcccggagaagccgccctattcctacatcgcgctcatcgtcatggccatccagagttcacccaccaagcgcctgacgctgagcgagatctaccagttcctgcagagccgcttccccttcttccggggctcctaccagggctggaagaactccgtgcgccacaacctctcgctcaacgagtgcttcatcaagctacccaagggccttgggcggcccggcaagggccactactggaccatcgacccggccagcgagttcatgttcgaggagggctcctttcggcggcggccgcgcggcttccgaaggaaatgccaggcgctcaagcccatgtacagcatgatgaacgggctcggcttcaaccacctcccggacacctacggcttccagggctcggccggcggcctctcgtgcccgcccaacagcctggcgctggagggcggcctgggcatgatgaacggccacttgccgggcaacgtggacggcatggccctgcccagccactcggtgccccacctgccttccaacggcggccactcgtacatgggcggctgcggcggcgcggcggccggcgagtacccgcaccacgacagctcggtgcccgcctccccgctgctgcccaccggcgccggtggggtcatggagccgcacgccgtctactcgggctcggcggcggcctggccgccctcggcgtccgcggcgctcaacagcggcgcctcttatatcaagcagcagcccctgtccccctgtaaccccgcggccaaccccctgtccggcagcctctccacgcactccctggagcagccgtatctgcaccagaacagccacaacgccccagccgagctgcaaggcatcccgcggtatcactcgcagtcgcccagcatgtgtgaccgaaaggagtttgtcttctctttcaacgccatggcgtcctcttccatgcactcggccggcgggggctcctactaccaccagcaggtcacctaccaagacatcaagccttgcgtgatgtgaggctgccgccgcaggccctcctggtgcaggcaggcgggtcacagggaccctggaccggcacaagaaactgctttcttctcgaggtataaccgtcggcagaagaaaagggttccacctctccccaaccggagtttttggcaaggagtccccaatgcaaagacacagcgctgcggttggcacctccttcctcactccttcaaaattgttaagaaatgttagtggtgggtctgatctgactgcagccatcggtaaataaaagtttttgatcctgttgaacccgcctgagacggtgctgtgcaggggaaagcccccgcacccacacaggaattctgctgaggtcccccctccttccggccaatggcagaagtgggggaaaatttttagaagaaaagcaaacatgtgagaccaatcattatcaaatacttttattttttggttgagtatttatctttttattttttattttttttttgaaagaatgtcttggaatgcgcaagtctccctttagagccgtcttttgcagggagcgggaagtgacaagagctcagatctccctcccgatctccctccccacctccgaagtctcctccgtggaccacaggtggatctttgtgcgaacaacttgcatttcggaagccactgtccgtctttaaacagaaagtcaaaggagccacgaagcaagcggccgtccgggcgtccgcctccgtccccttccatgttcctcctcttccttcgcttcagcctcttctgttatgttttgtcttgaattttatttagactttttcagtgggtatttttctgtctcccaacctctactgtaaactttctggtccgagaacgagccgaacacagcgcgacgcagggactaggacggcccggtgaccgcgcggattcaggattgcggggacgcagaaaggttaaggcacttttaaaaactatagcaaggctcctgtttatttattctactttctttccctaataatcaaaacaccgcgtaggctcctccgtttatcagtattaatggtgtaactttgttggcaatatttgccgtgtagaattttttttagatatccattgtaaatttgaaacaaagaccgatctgtgtaaaaacaaatttccatatgttttatataaatatatatataatatgaaggactaccctccttttttttttttgtattttggctgctagagtgcagcatttgtgacacgtatttgaaatttgaaatttccttctgcactgtataaaaggaccatttgaggatgttttgccttttgtgtattttttcctaaaaaaagaacaaaaataaaaatgtataacatttgtacatggcctttaaaattgtatcaactagaaataaaattgcatgagtattttattgggactgagattgtagaataccttccagactcccaaagatagaggggggaaaaaagaaaaaacaggctttggatctctagacgcttaaaaatttacaatctgggtgattctgagtacttttttcttttttggcaaatcctcctcttttcactcttcattccactttgaagtaaacgctggacaagaggaactatttttcttggcttctgttttttaagaagagccctttgcccctctaaatgtcattgatcgttttaaagaaataaacttttaaagaacactatagacctccttcccctagggaacaccaattaaaccatatatgtgcacatacatatggatatacatatatatgtatatacatatatgtacatatatgtatacgtgtccatgtacataatatatatttttttgccactacaagaccaatgagagttttactttgggtttccgactttcttgttctcttgctgtagctgttataaatcgtgaatcaactttaaggtttttttgtagttgttggtttgtcttgttttgttttggctttttggtgccttgttcttggttttccccgatagaaaatcaagcaaaatctaaatgaggcaaaagggcgcttggtgggccaggtgacaggcacctttccaatcctgtaacatttatctcctaagtcacagttcgtcctctctgggggaaaaatattttttaacacttgtaccttccactgaccaccctctttctattccagttcccggctaccgagaaaaacaaacacagtaagtcacattgttggtgcggtccttccagacccaccgcagtgtcttgcgtcgtggggtcgtgagtctctgaacctggttcttctcagagttgacattttggacgtgggggtaatttctccggtgctctgttacatcaaaattatcaataaactcgcctgggcaattagtgtccccaa

SEQ ID NO: 134994 - DNA, 2187 bp, Homo sapiens
  Payload ID: 6379
  Gene Symbol: FOXF2
  Gene Name: forkhead box F2
  Uniprot ID: Q12947
  ENST ID: ENST00000259806
  CDS Start-End: 115-1449
agcccgggcggcgggctagggcgctcgcagggcttctgggccgaccccgctccggcgcctccgcttcccgcccggggcccgccctcgcggcccggcctcgctcccgggtcccagatgaccaccgagggcgggccgccgccggccccgctccgccgcgcgtgcagcccggtccccggcgcgctccaggccgccctgatgagcccgccgcccgccgccgccgccgccgccgccgccgccccggagaccacctcctcctcctcgtcgtcgtcctccgcctcctgcgcctcgtcctcgtcctcctccaattcggccagcgccccctcggctgcctgcaagagcgcgggcggcggcggcgcgggcgccgggagcgggggcgccaagaaggcgagctcggggctgcggcggcccgagaagccgccctactcgtacatcgcgctcatcgtcatggccatccagagctcgcccagcaagcgcctgacgctcagcgagatctaccagttcctgcaggcgcgcttccccttcttccgcggcgcctaccagggctggaagaactcggtgcgccacaatctctcgctcaacgagtgcttcatcaagctgcctaagggcctcgggcggcccggcaagggccactactggaccatcgacccggccagcgagttcatgttcgaggagggctcgttccgccgccggccgcgcggcttcaggcggaagtgccaggcgctcaagcccatgtaccaccgcgtggtgagcggcttgggcttcggggcgtcgctgctgccccagggcttcgacttccaggcgcccccgtcggcgccgctcggctgccacagccagggcggctacggcggcctcgacatgatgcccgcgggctacgacgccggcgcgggcgcccccagccacgcgcaccctcaccaccaccaccaccaccacgtcccgcacatgtcgcccaacccgggttccacctacatggccagctgcccggtgcccgcgggacccgggggcgtcggtgcggccgggggcggcggcggcggcgactacgggccggacagcagcagcagcccggtaccctcgtccccggccatggcgagcgccatcgaatgccactcgccctacacgagccctgcggcgcactggagctcgcctggcgcctcgccttacctcaagcagccgcctgccctgacgcccagcagcaaccccgccgcctcggcaggcctgcactccagcatgtcctcctactcgctggagcagagctacttgcaccagaacgctcgcgaggacctctcagtgggactgccccgttaccagcatcactctactccagtgtgtgacagaaaagatttcgtcctcaacttcaatgggatttcttctttccatccctcagctagcgggtcgtattatcaccatcaccaccagagcgtctgtcaggatattaagccctgcgtcatgtgaacggaaagaggccaagcgatggccgctctctcctctcccctcctcagagggggcagatagaaactgggacggattcaagtcacatgcacgcggatagcagtaagccacacacctgccacttagccagaatgcccaggatcgcgttggtcactgttatttgcctactgctggaagaaggacaaccgctggcaaggtagcgttccccaatctgaatacctgcaggctcccacatgagggagagggcagactcaggtgggaagatgtgccatgcgtaaggcatcaacgtgtatctgtgggatcttcgttgccttcagtaatcagggtgtgaaaaaagcagacaagttgtgtgtgtgtgtgtgtgtctaagaaaacttgtgtgcttttcaaaaaggcagtgctaagcacaagatttcaagaaagcctcttcttgttgcctagctgagtgggagagtcattttccccagacactacatttggatacaggtgccaaagaacattattaaggaattatttagaaacaatgtgtctagtttaagaaagtggttttcagtattgtgacaatacaacgtttttacaaggttgttttctaccaccatattttaaagatatttttatgaccgtgtatactcacactttgcttgtattttaaaaggaggatatatttgcacttatgtatacttttacagtttgccaaaatattttgttgtaaaattttttttcaataaaatgtatataaca

SEQ ID NO: 134995 - DNA, 4890 bp, Homo sapiens
  Payload ID: 6380
  Gene Symbol: FOXG1
  Gene Name: forkhead box G1
  Uniprot ID: P55316
  ENST ID: ENST00000313071
  CDS Start-End: 1893-3362
ttcaacctccaaccgaaccttcccagttccaaagcccaagaagctgggactgtgagatccacgttcccaaggctccccggtgctttccagcagcactcagggttggcaagagctggcttcagtatactgttatttcaggaatgaggcccgcacaaaataaaagcatttgagaaacggaaaggaaaaaaaaggagtgaaaataggaaggcttaaaaaaaaaaccggaaagaaatagacgcccacccttattttccctccaatgtcaacaagcaaaacgaaaatatttccagggtgatcgctcgcagctacccgcttccaattcggattagaagctgaggctggagcggcgaggagaaaacgacatcgagtcaccccgcgcgtgagcgacgctctggagcaggagagaaggaaaaggaagagacacacgtatatagcatgtgttacctgatttatttcgagattgtttggtactgttttctctctgggcacctctcatttcggaaggccatcagaggcgcccactactgagcggccccggccgccgcagcagcacccggagccccagtcccggtttccccgcggtgccggagcccggagctcgccgccgcccaggcctcaggaatcgagtaagtaacccctgtttggccccgcgctcctctgcccacttcctcctcctcatctcatcgctcccaaagctctcccacaccctcctcccccgaagtaaaggacacccccgcacacacgccagcggtgggccttatctccccccttatccaaagctgcgctagactattacctacaaagggcacaattttcctgctggctcagaaatgccagacactggcctgcaaggccgactcggaaaagtagtgcctcgcctctacctcctccatttcctgccctctcgcatcctctccctgcactcccactcttcccactaccaccaccacccccgctttcaaaaataaaattggatacaaactttaatcactaaggacaaatattgacgcttaaacgaaaatgacccagtacaatgaggaggaagccggaaatgtgagctattggccctaggaggggaatttcggtggagcggagccggcggggtggagggggtggcgggggcgcagggaagggctgcggcaccgcgtgctcccgccggcgtatccctacgcggctccgcgcggcctcggggtccgaggcccgcggagagggggaggcgagcgcccgagggggcggcagccggcgggcggggcgggggtgggtgggcccggcccctccgattggtcgacggcgagagagacgctcccgcacgccgccagctctgattggcccagcggtaggaaaggttaaaccaaaaatttttttacagccctagtgtgcgcctgtagctcggaaaattaattgtggctatagccgcctcgatcgctgtctccccagcctcgccgcggccgctccgggacgcgcccgcccgccgcccggctctccccccctttgggctgctgctgctgctgctgtgactgctgctgcgagaggaggaggaggaggaggaagcagcgggggggggagcggggggtggggggggagaccaagaagtacagttgggagcgagggagcttcacccccggggcggtggttgtttcttttttctttctttcttttttcttttcctttttttttttttttctaattcctgaggggtggttgctgcttttgctacatgacttgccagcgcccgagcctgcggtccaactgcgctgctgccggagcgctcagtgccgccgctgccgcccgcgccccccgcgccccgttcggcacccaccggtcgccgccgcccgccgcgccgctgtcccgctcccgcgccgccgccgccgtttccccccgacgactgggtgatgctggacatgggagataggaaagaggtgaaaatgatccccaagtcctcgttcagcatcaacagcctggtgcccgaggcggtccagaacgacaaccaccacgcgagccacggccaccacaacagccaccacccccagcaccaccaccaccaccaccaccatcaccaccacccgccgccgcccgccccgcaaccgccgccgccgccgcagcagcagcagccgccgccgccgccgcccccggcaccgcagcccccccagacgcggggcgccccggccgccgacgacgacaagggcccccagcagctgctgctcccgccgccgccaccgccaccaccggccgccgccctggacggggctaaagcggacgggctgggcggcaagggcgagccgggcggcgggccgggggagctggcgcccgtcgggccggacgagaaggagaagggcgccggcgccgggggggaggagaagaagggggcgggcgagggcggcaaggacggggaggggggcaaggagggcgagaagaagaacggcaagtacgagaagccgccgttcagctacaacgcgctcatcatgatggccatccggcagagccccgagaagcggctcacgctcaacggcatctacgagttcatcatgaagaacttcccttactaccgcgagaacaagcagggctggcagaactccatccgccacaatctgtccctcaacaagtgcttcgtgaaggtgccgcgccactacgacgacccgggcaagggcaactactggatgctggacccgtcgagcgacgacgtgttcatcggcggcaccacgggcaagctgcggcgccgctccaccacctcgcgggccaagctggccttcaagcgcggtgcgcgcctcacctccaccggcctcaccttcatggaccgcgccggctccctctactggcccatgtcgcccttcctgtccctgcaccacccccgcgccagcagcactttgagttacaacggcaccacgtcggcctaccccagccaccccatgccctacagctccgtgttgactcagaactcgctgggcaacaaccactccttctccaccgccaacggcctgagcgtggaccggctggtcaacggggagatcccgtacgccacgcaccacctcacggccgccgcgctagccgcctcggtgccctgcggcctgtcggtgccctgctctgggacctactccctcaacccctgctccgtcaacctgctcgcgggccagaccagttactttttcccccacgtcccgcacccgtcaatgacttcgcagagcagcacgtccatgagcgccagggccgcgtcctcctccacgtcgccgcaggccccctcgaccctgccctgtgagtctttaagaccctctttgccaagttttacgacgggactgtctgggggactgtctgattatttcacacatcaaaatcaggggtcttcttccaaccctttaatacattaacatccctgggaccagactgtaagtgaacgttttacacacatttgcattgtaaatgataattaaaaaaataagtccaggtattttttattaagcccccccctcccatttctgtacgtttgttcagtctctagggttgtttattattctaacaaggtgtggagtgtcagcgaggtgcaatgtggggagaatacattgtagaatataaggtttggaagtcaaattatagtagaatgtgtatctaaatagtgactgctttgccatttcattcaaacctgacaagtctatctctaagagccgccagatttccatgtgtgcagtattataagttatcatggaactatatggtggacgcagaccttgagaacaacctaaattatggggagaattttaaaatgttaaactgtaatttgtatttaaaaagcattcgtagtaaaggtgcccaagaaattattttggccatttattgttttgtccttttctttaaagaactgtttttttttcttttgtttacttttagaccaaagattgggttctagaaaatgcacttggtatactaagtattaaaacaaacaaaaaggaaagttgtttcagttggcaacactgcccattcaattgaatcagaaggggacaaaattaacgattgccttcagtttgtgttgtgtatattttgatgtatgtggtcactaacaggtcacttttattttttctaaatgtagtgaaatgttaatacctattgtacttataggtaaaccttgcaaatatgtaacctgtgttgcgcaaatgccgcataaatttgagtgattgttaatgttgtcttaaaatttcttgattgtgatactgtggtcatatgcccgtgtttgtcacttacaaaaatgtttactatgaacacacagaaataaaaaataggctaaattcatatatatcttgatacttttgtctcttttattaagtagagctaattttttaaagaccaatcaacttatagggaattcaaaggctttttcagccaaactaaaatttaaactgctcctttaatttgaactgactctaaaaatgaaaatagtatttttccctttgtgaacaaattttacaaggagcagcctatttaataaacactagctttaaacaaagtataggcttttcagctgatacctgtaagtttctgtggatatacagcaaaaagagatataatttaattttctgtgcatagctctttaccctgtgtttatttccaaatccattaatagaatgccatttatatattttgtttcaggtatattgttaatagagcttggcaaattataaataaatatatgtatatggttagatagaagtgactataatgcacacatatgtaatatatatagacacacagagcccttcagttcaggtacaatttgcgctatgaatgctgcaaacatttttgtttaaatatttgtatttatactttctaagtcagcatttatttttgtggctgtttacccacaatgaaagagttctaataaagatgtgctgaagttgcaatata

SEQ ID NO: 134996 - DNA, 2503 bp, Homo sapiens
  Payload ID: 6381
  Gene Symbol: FOXH1
  Gene Name: forkhead box H1
  Uniprot ID: O75593
  ENST ID: ENST00000377317
  CDS Start-End: 580-1677
gttgagtcaatgtgtccccctcttgttcctagggtgcgggcttcatggccttctcctccaggaagctccacctgatcatgtcctgggtggatatccagcccccatagttcagggcctactagcagctgctagatcttgaactccaggagcgccccacgccttgggagcttggcatgggctaaatactcccccatttgttaaatggggtcctgaaacctgaccagggaagacgggataaagtagccatgggtcatcgcagcccctttgaagccgggcctggccacccaaaggcaactcaggggtggagactgaggcctcaggagaagcccccactagaatgctctctgcccctcccttccagattaaccaaaacctgctaattgtggaagccctcggcatgctcccctcccccacagcctcttcctcccttccctcccctcccccttccatccgaatgataaaggccccagcccgcctgccccagcccggcctcaggtcccggccctgccttctacactgccccaccgccctgcaccctccacccggccaggcccctgcccacgctgtctaccgtcccgcatggggccctgcagcggctcccgcctggggcccccagaggcagagtcgccctcccagccccctaagaggaggaagaagaggtacctgcgacatgacaagcccccctacacctacttggccatgatcgccttggtgattcaggccgctccctcccgcagactgaagctggcccagatcatccgtcaggtccaggccgtgttccccttcttcagggaagactacgagggctggaaagactccattcgccacaacctttcctccaaccgatgcttccgcaaggtgcccaaggaccctgcaaagccccaggccaagggcaacttctgggcggtcgacgtgagcctgatcccagctgaggcgctccggctgcagaacaccgccctgtgccggcgctggcagaacggaggtgcgcgtggagccttcgccaaggacctgggcccctacgtgctgcacggccggccataccggccgcccagtcccccgccaccacccagtgagggcttcagcatcaagtccctgctaggagggtccggggagggggcaccctggccggggctagctccacagagcagcccagttcctgcaggcacagggaacagtggggaggaggcggtgcccaccccaccccttccctcttctgagaggcctctgtggcccctctgcccccttcctggccccacgagagtggagggggagactgtgcaggggggagccatcgggccctcaaccctctccccagagcctagggcctggcctctccacttactgcagggcaccgcagttcctgggggacggtccagcgggggacacagggcctccctctgggggcagctgcccacctcctacttgcctatctacactcccaatgtggtaatgcccttggcaccaccacccacctcctgtccccagtgtccgtcaaccagccctgcctactggggggtggcccctgaaacccgagggcccccagggctgctctgcgatctagacgccctcttccaaggggtgccacccaacaaaagcatctacgacgtttgggtcagccaccctcgggacctggcggcccctggcccaggctggctgctctcctggtgcagcctgtgaggctcttaagacaggggccactcctccctcccgctcccacccccaccttgttgacagggagccaaggcgaggcggctgtctgcgaccacagcagcctcgaaacaccaggcagcagccttgctgggagtccacggtgtttattgggccaccccacgcatggccgtggcccagctgggcacaaccctcaccctggtctgtcatgcctgtttttcctacactcagcggcaaagctgcaggagcagggctgagcctggaatagcccttcctagtcccctcttctcagcccactacccatccatcagtcaccagccgtcacctcccctcccgtgctccaggctgggggagggagagcccagtggtggatccagcctgaagtcctgccctctctcatctgtctggaaaggaggtagcacctttttcgggaaacgggttagggagtaaagactgcaccctacatggtcctggtggtgggggggataacagtaaaggaatttgcaacgttttaatgccatgcctgatttttgggtcaggagtggtgacttgggtaaccacttggcgggggggcctgggattccctgctgtgtgccgtgataacagcaaatggtgataaggagaaagccaagacctgtggcctgatgcagggctgggggcggggggtgatcacttcagcaggcacaacacacttcactggctgcggaggtggaggggtgactctgggagctcaggggcaatggatccaaagaggctagggagcttgtgccctgggagacggggtacagggactttactaccgcctctgccagcagagacctggcctgagacccca

SEQ ID NO: 134997 - DNA, 1990 bp, Homo sapiens
  Payload ID: 6382
  Gene Symbol: FOXI1
  Gene Name: forkhead box I1
  Uniprot ID: Q12951
  ENST ID: ENST00000306268
  CDS Start-End: 62-1198
gtcaggggcagctccggggtgcaggtgccaggcaggtggctccggccagcccagccccagcatgagctccttcgacctgccggcgccctccccacctcgctgcagcccccagttccccagcatcggccaggagccccccgagatgaacctctactatgagaacttcttccacccacagggcgtgcccagccctcagcggccctccttcgaggggggcggcgagtatggggccacccccaacccctacctctggttcaacgggcccaccatgaccccgccaccctacctgcccggccccaacgccagccccttcctgccccaggcctatggagtgcagaggccgctgctgcccagcgtgtcggggcttggggggagcgacctgggctggctgcccatcccctcgcaggaggagctgatgaagctggtgcggccaccctattcctactcggctctcatcgccatggccatccacggggcacccgacaagcgcctcactctcagccagatctaccagtacgtggccgacaacttccccttctacaacaagagcaaggccggctggcagaactccatccgccacaacctgtcgctcaacgactgcttcaagaaggtgccccgcgacgaggacgacccgggcaaagggaattactggaccctggaccccaactgtgagaaaatgttcgacaatggaaatttccgcaggaaaaggaagagaaaatcagatgtttcctctagcacagcctccttggccttagagaagacagagagcagtctcccggtggacagccccaagaccacggagcctcaggacatcttggatggagcctcaccagggggcaccaccagctccccagagaagcggccctcccctcccccatcaggcgccccttgccttaacagcttcctttcctctatgacagcctatgtgagcggggggagccccacgagccaccccttggtcacaccaggactgagccctgagcccagtgacaagacggggcagaactcactgaccttcaactccttctccccgctcaccaacctcagcaaccacagcggtgggggtgactgggcgaaccccatgcccaccaacatgctcagctatggaggatctgtgctcagccaattcagccctcacttctacaacagtgtcaacaccagtggtgtcctctaccccagggagggcaccgaggtctaggtacagaacagctcctgagccaggtggacatgccagagagaaaagcagtagaggtcctccatgccagccccacggtggtccatgactgcggaactgcccagacataagcaggagcctccgaggaatccaccctctttctagaacactggttaaggcttctgtttatcacacataggcccacacacagactcaccaactttgcaatagaaatactggtgcctgcagagcagcactaacagtggcaggtgctgtactaggctctgtactggccacacttactattgacagtcaccccgtaaggttcacaaaccaccccattgaacagatgaggaactgaggctcaaggaggttaagtaacatttccagggttatataaactagtaaatggcagagctaagagtcaaatccaggtctatgtgatcctcagagattggaggccgggatggagaattggttgagtagccaaggaaggtcagtgtgaaaagcttgctatggcaaatatagcgaaatctctccactgccttctgtccaccaacatttagtgccagcctaggcacaacttgtcctggtccaagtccttattctgcttgccccaacttacctgcagacactccttttgctaccactcaaggaaggaagtcaccagtggccttagtgcaggaaactcagccctggtggccctgcagaacaatgcatctgacatgtgcgatgcatccccatggagagacagcattgctccccagccctccagaaaccttgagcagatccagggatcagtgagaggagtggtgt

SEQ ID NO: 134998 - DNA, 2011 bp, Homo sapiens
  Payload ID: 6382
  Gene Symbol: FOXI1
  Gene Name: forkhead box I1
  Uniprot ID: Q12951
  ENST ID: ENST00000449804
  CDS Start-End: 46-897
gggtgcaggtgccaggcaggtggctccggccagcccagccccagcatgagctccttcgacctgccggcgccctccccacctcgctgcagcccccagttccccagcatcggccaggagccccccgagatgaacctctactatgagaacttcttccacccacagggcgtgcccagccctcagcggccctccttcgaggggggcggcgagtatggggccacccccaacccctacctctggttcaacgggcccaccatgaccccgccaccctacctgcccggccccaacgccagccccttcctgccccaggcctatggagtgcagaggccgctgctgcccagcgtgtcggggcttggggggagcgacctgggctggctgcccatcccctcgcaggaggagctgatgaagctggtgcggccaccctattcctactcggctctcatcgccatggccatccacggggcacccgacaagcgcctcactctcagccagatctaccagtacgtggccgacaacttccccttctacaacaagagcaaggccggctggcagaactccatccgccacaacctgtcgctcaacgactgcttcaagaaggtgccccgcgacgaggacgacccggcctatgtgagcggggggagccccacgagccaccccttggtcacaccaggactgagccctgagcccagtgacaagacggggcagaactcactgaccttcaactccttctccccgctcaccaacctcagcaaccacagcggtgggggtgactgggcgaaccccatgcccaccaacatgctcagctatggaggatctgtgctcagccaattcagccctcacttctacaacagtgtcaacaccagtggtgtcctctaccccagggagggcaccgaggtctaggtacagaacagctcctgagccaggtggacatgccagagagaaaagcagtagaggtcctccatgccagccccacggtggtccatgactgcggaactgcccagacataagcaggagcctccgaggaatccaccctctttctagaacactggttaaggcttctgtttatcacacataggcccacacacagactcaccaactttgcaatagaaatactggtgcctgcagagcagcactaacagtggcaggtgctgtactaggctctgtactggccacacttactattgacagtcaccccgtaaggttcacaaaccaccccattgaacagatgaggaactgaggctcaaggaggttaagtaacatttccagggttatataaactagtaaatggcagagctaagagtcaaatccaggtctatgtgatcctcagagattggaggccgggatggagaattggttgagtagccaaggaaggtcagtgtgaaaagcttgctatggcaaatatagcgaaatctctccactgccttctgtccaccaacatttagtgccagcctaggcacaacttgtcctggtccaagtccttattctgcttgccccaacttacctgcagacactccttttgctaccactcaaggaaggaagtcaccagtggccttagtgcaggaaactcagccctggtggccctgcagaacaatgcatctgacatgtgcgatgcatccccatggagagacagcattgctccccagccctccagaaaccttgagcagatccagggatcagtgagaggagtggtgtgtacccctaaatcctcccaccccagcactgcccatctgtaaaatcttgtaaagcccagtttcctgtgtgcatgtcatggaccagtgagctggagatggctgaatcttccaagagaaacaaggttggataagcgcttccttttttttagcccaggagaggtggatgtttgtctgagaaaacaatggcctcaagggaggggccttgggcccaccctcacagggggtctctgtgtgatctcttgggatttctccttgtttttgtgagtacctgggaagtgttgtttgttttcttattttctttttaattaaaaaacaaacaaaca

SEQ ID NO: 134999 - DNA, 3217 bp, Homo sapiens
  Payload ID: 6383
  Gene Symbol: FOXI2
  Gene Name: forkhead box I2
  Uniprot ID: Q6ZQN5
  ENST ID: ENST00000388920
  CDS Start-End: 40-996
ggtgcggcaccgctggcccaggcccgggcgcggctggacatggccacctactgcgacgacctgggcccctcctcggccccgcccggccaggcccaggccaccgcgcaccccccgggctatgagccaggggatctgggcgcggtgggcgggggccccctcctgtgggtgaacgcgccagcgctcagccccaagtcctacgcttcgggtcccgggcctgcgccgccctacgcggccccgagctacggggctcccggcccgctcctcggcgccccgggcggcctggcgggcgccgacctcgcctggctgagcctctccggccagcaggagctgctgaggctggtgcggccgccctactcctactcggcgctcatcgccatggccatccagagcgcgccgctgcggaagctgacgctcagccagatctaccagtacgtggctggtaacttccctttctacaagcgcagcaaggcgggctggcagaactccatccgccacaacctgtcgctcaacgactgcttcaagaaggtgccccgcgacgaggacgacccaggtaaaggcaattactggaccctggaccccaactgcgagaagatgtttgacaacgggaacttccgaaggaagaggaagaggagagctgaagccagcgcggccgtgcgctcgggagccaggagcgtgggaggggccgaggcgccagcgctggagcccccgagcgcggcttgcctggacctgcaggcctcgccctctccatccgcacccgaggccgccacctgcttctccggtttcgcttctgctatgagcgctctggctggcggccttggcaccttccccgggggcctggcgggcgacttttctttcgggaggcggccaccgacagtcgccacccacgctccccagacccttaacccctcccctggcttcgcccctggccaccagaccgcggccgccggcttccgcctcagtcacctcctctacagccgggaagggaccgaagtttgaagggaggctggaggctagccgggtgcgggtccagaggtgctgagctcaggcctccggtttcccctggtgacagccccacgtgttggcgttgaaggccttggtgccctgggaggaagcgcagagccgggggcggctcggccagcagggagctgggctgagcggctcttgggctttggggtgggtggcccttctgctgtgcacccctcacccaggcgaccttcggaacctccctgctctgcctctaagtccagccgccctgggcgtctagaacctgtgctctcgagggatttgccttgaaggggcggcgggtcggccctcagctccagcgttttccaaggaggctggctgactccaaagagccttagagcagatgggaagaaggtgggctgccagagcggcccaggtggtgggggccctttccacctccacccagcttggcccacctggctcagggccttcccttctgcttcagggaagctgccgcaggggctgggggacagagctcaggagcagctgcagtgggctccaggtgggccaggagcctgcagtgaggggatctgagacagttggcattgggtcctgtgtaaggaaggtcttgctaatggttggaactgctggtggtgggagggagaagcactgcgtgggcagaaagcgcccttgggataccagctcccttccctgtcactcagccctggtccttgatgacccccctctaggacaaggcaactccccagggccccgccaccactgaccacaggagcggtgcccagcacccaggagttccccaagggtccaggtttgtgccacccacacccacactcacacccacactcacacccacactcacacccacacccacacccacacccacactcacactcacactcacacccacactcacacccacactcacacccacacccacacccacactcacacacactcacacccacacccacactcacacccacacacactcacacccacacacacccacactcatactcacactcacacccacactcacaccacacccacactcacactgacacccacactcacacccacactcacactgacacccacactcacacccacactcatactcacactcacacccacactcacactcacacccacactcacaccacactcacacccacacacacccacactcatactcacacccacacccacactcatactcacacacccacacccacacccacacccacacccacacccacacccacactcacacaggctcatggaaggccacacttgttttggtctctttcccctccaaacccacagtttgagccaaagctgtgcgtgtgttcagagctcctgaacagcagcctcctgtgtaaattgaaccctgccccacccagttccttcttagggatggtatctttgtgaaggacaaggagcccccagtcactgggaagaggaattttttggcctctgtactccttagaggacctaagtgccccagtcagatgccctgagtctttgtggcatctgggactccctggagatggagacgttggtggggggggggtacccaccttgttgttgatgggggtacctatcttccctgcattttgggggagggtgggaggggtccttcccaggaagagagtggagacaggttactgttactttggagtgggacaggctggtttagcaatcctaagccccagccacgcaggtattcctgatctgcctgcagggcccctcactgcagctgccaccagtgctggaaatgagagcagggctcctgactgtccctagagctgactcatcatggccctgctgaagagtgaggtgtgtgtgtgtgtgtgcgtgtgtgcgtaagacagagagggagggagaaggaaggaggcgggggaacatggagagaaggagccaggagttgggataaacctggccctggtcatatgtttcatcagcagtggctcctaactccacgtgccatctctgctgctgccctccacaagcaggtgagcagagtgccagttgtgttgaaggtgatgatgtcgcctaactaaactcacaaccaacccgcaatctctcttggggggacactccccataagcaatacaattaaagaagaccaggaaaggaaaataaattccttagcttatacatttaaaaagtatcccttgaacctattttaatagaatgaaatgctaaaaataaagaccaatataacatacat

SEQ ID NO: 135000 - DNA, 2804 bp, Homo sapiens
  Payload ID: 6384
  Gene Symbol: FOXI3
  Gene Name: forkhead box I3
  Uniprot ID: A8MTJ6
  ENST ID: ENST00000428390
  CDS Start-End: 122-1384
cagcgcgggtgaaggcggagccgcagggttggcccccaaagggatgctctcgcccgagcggcgagaccagccccgctcgcccctcgccgcggccgcgccgcagccgcccacggccgccgacatggccctctactgcggcgacaacttcggagtgtattcgcagcccggcctgcccccgcccgccgccaccgccgccgccccgggcgcccccccggcagccagggcgccttacgggctggccgactacgccgcgccgccggccgccgccgccaacccctacctgtggctcaacgggcccggcgtgggaggcccgccctccgccgccgccgcagccgccgccgcgtacctgggcgctccgccgccgccgccgccccccggggccgcggccgggccctttctgcagccaccgcctgccgccggcaccttcggctgctctcagcggcccttcgcgcagcccgcgcccgccgcgcccgcctcgcccgccgcgcccgcggggcccggggagctgggctggctgtccatggccagccgcgaggacctgatgaagatggtgcggccgccctactcgtattcggcgctcatcgccatggccattcagagcgcgcccgagcgcaaactcactctcagccacatctaccagttcgtcgccgatagcttccccttctaccagcgcagcaaggccggctggcagaactccatccgccacaacctgtcgctcaacgactgcttcaagaaggtgccccgcgacgaggacgacccaggaaagggtaattattggactcttgatccgaactgcgagaaaatgtttgacaatgggaacttccgtcggaagcgaaagcgccgctctgaggccagcaatggctccacagtggctgctgggacatcaaagtccgaagaagggctctcctcaggattggggtctggagtgggtgggaagccagaagaagagagcccctccactctgctgaggccttcccactccccagagcctccggagggcaccaagagtactgcctcatctcctggaggacccatgctcacctccaccccttgtctcaacactttcttcagcagcctcagctccttgagtgtcagcagcagtgtgagtacccagcgggctctccctggcagccgccacctagggatccagggggcccagctgccctccagcggcgtgttctccccgacctccatctcagaggcctcagcagacaccttgcaactgagcaatagcaccagcaatagcaccggccagagatcttcctattacagccctttccctgccagcaccagcggggggcaaagcagccccttcagcagccctttccacaactttagcatggtgaacagcctcatctacccccgagagggctccgaggtgtagagcagactctcagacttgagtatgcacacctgaggcgtgcacacatgctgattagaatgcagattccaagtcagtaggtctggggtaggacctgagttctgcgtttctgtcgagttcctgggtgatctcgtggtcctttgaccacacttggagtaatgagggtgtagtagataactcttgctacaacccagcgagcttttacaggtttctctgcatgtgggcctctccagagagaaatccgtttcactgtcttctgtgataggtagcctgtgagccccgtgagggcggggaccatgtctattttgtttatcactgtatgccaggattgcaagctcaagtgtgtacagatggctaaaaaaacacaagccaacgaagttactgggtgagaaaactaacatcagttggcaactgaagcagtagagggtagttgggactgactagtagaaggctgctgggaacagctggttctttctctcctctggcagcattctgattttgtttttttggttttttttgacacagtctggctctgtcgcccaggctggagtgcagtggtgctgcaacctccgcctcctgggttcaagcaattctcctgccttagtcttccgggtagctgggattacaggtgcctgccaccacatccagctaatgttttgtatttttagtagagatagggtttcgccttgttggccaggctggtctcaaactcctgacctcaggtgatccacccgcctcggcctcccaaagtgctgggattacaggtgtgagccactgcgcccagccagcattctgatttttatagaagagccagatatctgaatttttataggaaacctccaactttgtgtcatttgcctctgaagatttttttttggttgtttatcatactgtcctaggcaacaccacaaatccttgagctatgcataggcagctcacaaatcacctctgtctggtacatggtatattctaatggcaataaaatggcacaagcagccttgtgtgccaggcactgttctcggcacttgtcatgtattcatttaatcctctcagaaaccttgggtggtgggtattgttactaccccccattttccatgtaagggaagtgaaacttcaggatgttaggtcactttgtctattttagtcatcactgtataccaggattgcaagctcaaatgtgcacaggtggctaaaaaaaagttgtgaccactttccaaggtgagactgatagtaaactggagccaggatcagacccagacaatctggttccagagctggtgcttgtaacttctgtattctacttcctgcaaaaccaagaaaccagcctccatagccagttataagtatatagagggaaggaatggagctagatctcatttgaccaaagattctagttgaaaataaaagtcatctggtgtgttcc

SEQ ID NO: 135001 - DNA, 2641 bp, Homo sapiens
  Payload ID: 6385
  Gene Symbol: FOXJ1
  Gene Name: forkhead box J1
  Uniprot ID: Q92949
  ENST ID: ENST00000322957
  CDS Start-End: 356-1621
aggagaagcctttggagcggctacttaatgccggtcccggggccgcggtagctcagagaagcgccgtcgggcgggggggcggcaagaggcgctggcagggcccccgagctgggggcagagagccgcagggggtgggagcaacttcttccagaaccttcctctggcccgggctgcgctctgagccaggcaccacatacttattcggaggaggcgcccccggggtcgcgagatggaagcgcgcgtccgggaggccgtgtaacgggagctgcgggactcagcgggccagagagcgcggcgggccacccccggctcagcccgtggatgctgaccgccccctcggagagtccccgcagacatggcggagagctggctgcgcctctcgggagccgggccggcggaggaggccgggccggagggcggcctggaggagcccgacgccctggatgacagcctgaccagcctgcagtggctgcaggaattctccattctcaacgccaaggcccccgccctgcccccggggggcaccgacccccacggctaccaccaggtgccaggttcagcggcgcccgggtcccccctggcggccgaccccgcctgcctggggcagccacacacgccgggcaagcccacgtcgtcgtgcacgtcgcggagcgcgcccccggggctgcaggccccaccccccgacgacgtggactacgccaccaatccgcacgtgaagcctccctactcgtatgccacgctcatctgcatggccatgcaggccagcaaggccaccaagatcaccctgtcggccatctacaagtggatcacggacaacttctgctacttccgccacgcagatcccacctggcagaattcaatccgccacaacctgtctctgaacaagtgcttcatcaaagtgcctcgggagaaggacgaaccaggcaaggggggcttctggcgcattgacccccagtacgcggagcggctactgagcggcgctttcaagaagcggcgactgccccctgtccacatccacccagcctttgcccgccaggccgcgcaggagcccagcgctgtcccccgggccgggccgctgacggtgaataccgaggcccagcagctgctgcgggagttcgaggaggccaccggggaggcgggctggggtgcaggcgagggcaggctggggcataagcgcaaacagccgctgcccaagcgggtggccaaggtcccgcggccccccagcaccctgctgcccaccccggaggagcagggtgagctggaacccctcaaaggcaactttgactgggaggccatcttcgacgccggcactctgggcggggagctgggtgcactggaggccctggagctgagcccgcctctgagccccgcctcacacgtggacgtggacctcaccatccacggccgccacatcgactgccctgccacctgggggccttcggtggagcaggctgccgacagcctggacttcgatgagaccttcctggccacatccttcctgcagcacccctgggacgagagcggcagtggctgcctgcccccggagcccctctttgaggctggggatgccaccctggcctccgacctgcaggactgggccagcgtgggggccttcttgtaagaggccaggccctgccccacctctggacagtgcccaagtcagggtccagaactgccccccaacacaggtccacagacaccccaccacctaggcaggggctgggccagggctccaaggcttgccccagaggccacatggccaccagccccagctgccatcagattcaagcccaggaggctgaaaacgagggcccaggaccagaatcgctgcctcctctccccagccccaccttgtacacacagtgtttcattgctccgcgtcttcccagccccagaaaccggctaaaggaccctgcaccatgagagccgaggcctggaggagcccgggtcaggctggggaggaacagaactgggccctcccagagcacctccgcttcccccctgcttccccaggtctctatccagagagagtccccaggtacaacaaatgctaattagatgacagcaaattaaccccctggaggcttctcctggcagagcctccctggggccggggcaggctgtggatggggcggagcagggcagaagatggactgggggagggggcagagagaggagaccaaaatgaggtggtggcacagggtggggcaaggagatcctctctaaggcctctggggtctttgcctggccccatccctagggggcggggaggggacgtaaatccctaatctttaagcccgacttgaggctgagagcagctggaagtttgggtttggtggtttgggggccggggcagccaagctgtatggggcaggacagacagactaatgtagtgagtgtagctgtagctgaggcttaactgggagggatgccgagcttgctggaactactgggaccaagaagcggggtaccccacgcccctgcctgcactcctcgggggcgtggggcgtgccttgctccacccggactccctgggctgcgtcccacatccaccctcctgccccgtggggcaatttaacctttttcatgaaagttatttacaatgaaaagtttttaaaaataaaatttttaaaaatctaaa

SEQ ID NO: 135002 - DNA, 5523 bp, Homo sapiens
  Payload ID: 6386
  Gene Symbol: FOXJ2
  Gene Name: forkhead box J2
  Uniprot ID: Q9P0K8
  ENST ID: ENST00000162391
  CDS Start-End: 1146-2870
ggagccggggcctgcagcggagccgagccgagcccgagcccgcgccgagccctgacactgtctgcccgccttctggctccccgggagcccagactggtcggagcccgagcggtggcagcgcggggagccccacgcgccgaagggagcggacccgacaggacggccctagaggaggtgctgccgccacagtagcagggaccggagtctcgagccgcggcctcccggaccgtgctgcccaggccagctcagggacagccgggagtacgaaagccccaccctctggggcaccccgggagcggaggcgggagcggggacgcgagcaacctctccccctgttggagagaaaagacccttaccactcgggtgagggaaagaagagacccctggaggggacgcctctctcctgcctagaggcgaggaagacccctgtactggccggggaggagacccccagaagtggaaagaagggagctttccgtagggaagcagagtgagaccaccctagcgcgcccccgcccctccaaacacacactctcaacagttcaggactttggaggcaaagagagacggggctgtgcctgtggagtaggcaccctcggcccaccactattcacaggagacaggagtccttacgttcagaagccactccagggaaagaagaggaatcggctttcagccttctggagaggggaagacctccccctcaacttcctcgtgcctagacagtggaacggggtggagcccctccgctcctatctccagcagacagaaagagccctccacctcagaaagatccagtttgggggggaggggaactcccccaagggggaggagacaactcctggttgggagaggctcctcccctcctcccccgggtaacaagcagggtgtggggggtgtgccaccttccccaagtaggacctccttctcctccccctccccctcctccaaccttgactcctcatcctcaggggacccagttcccctcaccaacttgggaggctcagcctcgtccaggaagagccactgaggatgagagccgtcacctgcctctgaagaggggaatccctccaaccccaaactccagtaccaggtggttccctccctttgccggaggaaccttggagacagaacccagaagtaccatggcttctgacctagagagtagcctcacctccatagactggctcccccagctgaccctccgagctaccattgagaagcttggaagtgcctcccaggctgggcctcccgggagcagccgcaagtgttcaccagggtcacccacagatcctaatgccaccctgagcaaagacgaggcagcagtgcaccaggacggcaagccacgatacagctatgccactctcatcacctatgccatcaactcctctccagccaagaagatgaccctcagcgagatttaccgctggatctgtgataacttcccctattacaagaatgctggcattggttggaagaattcaatacggcacaacctttctctcaacaagtgtttccggaaggtgcccagacctcgggatgaccctgggaagggttcctattggacaattgacacctgccctgacatttcccgaaagagaagacaccctccagatgatgatctgtcccaagactcaccagaacaggaggcaagcaagagcccacggggaggcgttgcagggagtggagaagcctcactgcctcctgaggggaatccgcagatgtcacttcagagccccacatctatagccagctacagccagggcacaggatctgtggatggtggagcagtggcagcaggggcttcaggccgagaaagtgctgagggtccccctcccctctataacaccaaccatgactttaaattctcctactcagagatcaactttcaggatctaagctggtccttccgcaacctctataagtccatgctggagaagtcctcttcctcctctcagcacggcttttcttctctcctgggggacatcccaccctcgaacaactactacatgtatcagcagcagcagccaccgccacctcaacagcagcagcagcagcagcagccgccacagccacctccccagcagtcccagccacagcagcagcaggcacctgcccagggcccctcagctgtagggggtgctcctccactgcacaccccaagcacagatggttgtaccccaccagggggaaagcaagctggggcggaaggctatgggcctccccctgtaatggccatgcatccacccccgctgcagcatggaggctaccaccctcatcagcaccatccccactcccaccctgcccagcagccaccacctccacagccacaggcacaaggccaggctcccatcaacaacactggctttgcctttccttctgactggtgctctaatattgactctttaaaggaaagcttcaagatggtgaatcggctcaattggtccagcattgagcagtcacaattctcagaactgatggagagtctacgacaggcagagcagaagaactggaccctcgaccagcatcacattgccaatctgtgtgactccctcaaccacttccttactcagactggtcacgtgccccctcaagggggtacccaccgcccaccagcccctgcccgtattgctgactcctgtgccctcaccagtggcaaacaggagtcagccatgagccaagtgaactcttatgggcacccacaagctccccacctctaccctggcccatcaccaatgtacccaatccccacccaggactcagcaggatacaatcgcccagcacaccatatggtccctcggccatcagtgccacctcctggtgccaatgaggagatccctgatgacttcgactgggacttgatcacttagtgcatcacagagtgtggacatcagcccagggccgcgtggtgaaatctggcagtggggaaagagcaaccccagcccgtcccttccccccgtctgtatatagacatatatcctctttttgttctttctctgtcagagaagccactgcaagatgctgccgaagataaccctctctttcctgcctcattcttctctcttccttcctgttttttcctagttcttttattattattcttatattattattattattattggttatatactgtccatagtctcctgtccctacatcatggatcatgtccaccttttgctaatttaaaatcatcaggctggaagatgaagccatgatagctacagagaaaggttttagactccagtttacctttctcttggagaaactcaatgctaatcccaccttttggccctaaattgttttttgttcccatcagtttcaggccaggactggagaggccacattaccaagtagaaagggtctgaaacattacttggcagccaagaatttggaggttttaaaatggtgctaattctgtcctctgaggtcttccttgtccctttataccttcaatccttacttctgccagtctgtatttcctatcaagggtgaaagtgatgatggtggtgcaggagggtgacaataaaatcctagtggaattggagaccattggaagggatggaatataagtcagtgtgaaactgagtatacactgccatgttacatcagtgtccattggcttgttttgagcctgttctctaagaagataggattggttttagcccaaactctgcttctatggtagggcatgaggacaactattcagcatggttttagcttcttggagatgattccaacttaactattttggctttttaaacataattttctctgaaaattaattgtggctcttatttgcatttacgaatgatcttcccatccctttttcccattcagcaaatattagtttgtcctcctttaattgtttgcccaaatcttccacccatcttttttcttccctcattttctgggattctcaagaaagaaaaagtaacccattatcactctgagtttcgtcgtgccctgagacatgatgggaatctcattcccacctctcatagcagagccaaacctttagtgttggtggtaggaggatggggagaggaaaaaagagctggcaaagaaatggatagggaatattttagttctttaaatatataggcagatgcttctcttggaatccagatcatctggctgaagcttttgcaagtaggctttgaggggtgaaggagattggtggaggagagtaaataatctagaggcaagagttcagtgagggccaagggggacccccagaaaaaggtatggagctaactcatctcttttacaaggggtggccatgacttactgttgcaaagtactcagtgtatatttaatgttgattgttgaattttagttacgagagggaagaacaattttacttctgtccttatttcacttgctgaaaagctgtgggacaaaatgtatggaatagacaaggccactttctttgtgatttctgcttttcatgcatattattttatttacccataatttccaagaggtttggcgttccgctctcctgcttttttctttcatccacccctttcctttttttggaagggggttatatatgagagttcattgaagaagtccagtgaggctgaagtaaaggggcaagatagggcagttaactaaagagcactttatttctttgaagcctttctaagaaagaaatgggggtgcgagtggcttgaatctcccatgatgttggagggcacttagtggggttgaagtatgacataatatttcccattggggaaaggagaatttctcttagagggtggcaaaatgcctttgcccagtgtccctattttaggcatcttttccttccttattccttccagtcagggtgtgtcctatacaaaacttcccatcagttctcctcaatattccccatttgtaaatgatcacttctcttttctaaacccttttcctgttcagatccatacaggatttgcaagggtaggatcatacatgcaaatgccccttgttcatctgtgtcttctgcaaactagtctcatgaagaattctggcgtgcagccagggtagctgaagtttgggtctgggactggagattggccattaggcctcctgagattccagctcccttccaccaagcccagtcttgctacgtggcacagggcaaacctgactccctttgggcctcagtttcccctccccttcatgaaatgaaaagaatactactttttcttgttggtctagcattgctggacacaaagtgtagtcattattgttgtattgggtgatgtgtgcaaaactgcagaagctcactgcctataagaggaaataagagagaaagtggaggagagggacaaaaggagtaattatttggtatagatccacccatcccaacctttctctcctcagtccctgctcctcatgtttctggtttggtgagtcctttgtgccaccacccataatgctttgcattgctgcatcctgggaagggggtatatggtctcacaagttgttgtcattgtttttttgcatgctttcttaataaaaaaaaaaaaagaa

SEQ ID NO: 135003 - DNA, 2676 bp, Homo sapiens
  Payload ID: 6386
  Gene Symbol: FOXJ2
  Gene Name: forkhead box J2
  Uniprot ID: Q9P0K8
  ENST ID: ENST00000428177
  CDS Start-End: 489-2069
aagaggaatcggctttcagccttctggagaggggaagacctccccctcaacttcctcgtgcctagacagtggaacggggtggagcccctccgctcctatctccagcagacagaaagagccctccacctcagaaagatccagtttgggggggaggggaactcccccaagggggaggagacaactcctggttgggagaggctcctcccctcctcccccgggtaacaagcagggtgtggggggtgtgccaccttccccaagtaggacctccttctcctccccctccccctcctccaaccttgactcctcatcctcaggggacccagttcccctcaccaacttgggaggctcagcctcgtccaggaagagccactgaggatgagagccgtcacctgcctctgaagaggggaatccctccaaccccaaactccagtaccaggtggttccctccctttgccggaggaaccttggagacagaacccagaagtaccatggcttctgacctagagagtagcctcacctccatagactggctcccccagctgaccctccgagctaccattgagaagcttggaagtgcctcccaggctgggcctcccgggagcagccgcaagtgttcaccagggtcacccacagatcctaatgccaccctgagcaaagacgaggcagcagtgcaccaggacggcaagccacgatacagctatgccactctcatcacctatgccatcaactcctctccagccaagaagatgaccctcagcgagatttaccgctggatctgtgataacttcccctattacaagaatgctggcattggttggaagaattcaatacggcacaacctttctctcaacaagtgtttccggaaggtgcccagacctcgggatgaccctgggaagggttcctattggacaattgacacctgccctgacatttcccgaaagagaagacaccctccagatgatgatctgtcccaagactcaccagaacaggaggcaagcaagagcccacggggaggcgttgcagggagtggagaagcctcactgcctcctgaggggaatccgcagatgtcacttcagagccccacatctatagccagctacagccagggcacaggatctgtggatggtggagcagtggcagcaggggcttcaggccgagaaagtgctgagggtccccctcccctctataacaccaaccatgactttaaattctcctactcagagatcaactttcaggatctaagctggtccttccgcaacctctataagtccatgctggagaagtcctcttcctcctctcagcacggcttttcttctctcctgggggacatcccaccctcgaacaactactacatgtatcagcagcagcagccaccgccacctcaacagcagcagcagcagcagcagccgccacagccacctccccagcagtcccagccacagcagcagcaggcacctgcccagggcccctcagctgtagggggtgctcctccactgcacaccccaagcacagatggttgtaccccaccagggggaaagcaagctggggcggaaggctatgggcctccccctgtaatggccatgcatccacccccgctgcagcatggaggctaccaccctcatcagcaccatccccactcccaccctgcccagcagccaccacctccacagccacaggcacaaggccaggctcccatcaacaacactggctttgcctttccttctgactggtgctctaatattgactctttaaaggaaagcttcaagatggtgaatcggctcaattggtccagcattgagcagtcacaattctcagaactgatggagagtctacgacaggcagagcagaagaactggaccctcgaccagcatcacattgccaatctgtgtgactccctcaaccacttccttactcagactggtcacgtgccccctcaagggggtacccaccgcccaccagcccctgcccgtattgctgactcctgtgccctcaccagtggcaaacaggagtcagccatgagccaaggtactgcaccaagccagttgccatggaggtggagactatgttgaaaaggaagcataggagaaaggcaaaagagaactgagagaaaggattttatggggcagtgacccaaattgagcagtggaactagtttatcagttgactgaatatctgttgaatcagtgaagtcctaaactgaaaaatgcaaaagaaatagactgtatgattcctttttagacctcagtttgggagatcagaattgtttaagaaaagggaggagatttgttagagaaaggctgtattttaaatttgcgtctcagtaatccctaccgcctgggtgataccggatgaaatggtggttctatgcttatgtgatgttcaaactagtgaaatgagagagatgtcatgattatgttcctgtttcttgctttttgtttttgagatggggtctcgctctgtcgcccaggctctggagtgcagtggtgtgatcacggctcactgcaaccttgacccctggagctcaggtgatcctcccactttagcctcctgagtagctgggactacaggtgtgtaccaccatgcccagctaattttttttttgtattttgtgtatagctggggtttcaccgtgtcgcccaggctatcttcaaactcttggactcaagggatctaccc

SEQ ID NO: 135004 - DNA, 5106 bp, Homo sapiens
  Payload ID: 6387
  Gene Symbol: FOXJ3
  Gene Name: forkhead box J3
  Uniprot ID: Q9UPW0
  ENST ID: ENST00000361776
  CDS Start-End: 175-1941
cccggatgttggctgctcttgctgccgccgccgctctcggggctgctcggggcctcgaccgctcgcagtaggcaccgttgggacctttcccgggggggcggagacgcacggagcggccgggggctcggccgggccgtcccggcctgcgcagcctgagattctctttgtggccagatgggtttgtatggacaggcttgtccatctgtaacttcattaaggatgacatctgaactggagagcagcctaacgtctatggactggttaccacagctcaccatgagagcagccatccaaaaatctgatgctacacaaaatgcacatggaacaggaatttctaagaagaatgcactccttgacccaaatacaactctggaccaggaagaagtccaacagcacaaagatgggaaacctccatacagttatgccagcctcattacatttgcaattaatagctcacccaaaaagaaaatgactttaagtgaaatttatcagtggatttgtgataacttcccatattatagagaggctggcagtggttggaagaattccatacgacataatctgtcattgaacaaatgtttccttaaagtgcctcgatctaaggatgaccctggaaaggggtcctactgggcaatagacaccaatccgaaggaagatgtgctgcctactcggccaaagaagagggcacgatctgtagaacgggtaacattgtataacactgatcaggatggtagtgatagcccacgcagtagccttaacaacagtctctcagaccagagtttggcatctgttaatttgaacagtgttggaagtgtgcatagttatacaccggtgacaagccatccagaatcagtctctcaatcattaactcctcagcagcaaccacagtacaaccttccagaaagagacaagcaactacttttctcagaatataattttgaagatcttagtgcctcatttcggagcctttataagtcagtttttgagcagtcacttagtcaacaaggtttgatgaacatcccttctgaatcttcccagcagtcccacacttcatgtacctatcagcactctcccagcagtacagtgagcactcacccacacagcaaccaaagcagcctgtccaacagtcatggcagtggcctcaacaccacaggcagtaattcggttgcacaggtctcactgtctcacccccagatgcacacacagccatctccacatcctccccatcgaccgcatggtttaccgcagcatccgcagcgttccccacacccagcaccacacccacagcaacacagccagctccagtcccctcacccccagcatccctctccacatcaacacatacagcaccatccgaaccatcagcatcagacgttaacacatcaggcacccccacccccacaacaggtatcctgtaattctggtgtttcaaatgattggtatgcgacacttgatatgctaaaagaaagctgtcgaattgccagcagtgttaattggtcagatgtagacctttcacagtttcaaggtctgatggagagtatgagacaggcagatctcaagaactggtctttagaccaggttcagtttgccgatctttgttcttctcttaatcagttctttacacaaactggccttatacattcacagagtaatgttcaacaaaatgtttgtcatggtgccatgcatccaacaaaaccttcccaacacattggaacaggaaatttgtacatagattctaggcaaaatctccctccttcagtgatgccaccccctggttatcctcatatcccacaggcactcagcactccaggaacaacgatggcaggccatcacagagccatgaaccagcagcacatgatgccttcccaagccttccagatgcggcgttccctgcctccagatgacatccaggatgactttgattgggattcaattgtgtagggcttgtttctgcaagacaccagaccctaacgttacctttctgtgcagtgaagggaaaggtttaagagaatccagttgagaaaacaaacttgctaatcactttaccaatgttatcaaaattacttttgaagacaatcagaaggattttagctggataacttactgcttttatctgacccaagcaagtactacatgtttgtctccctgccagctgccctatgtagctcctaactgttgtgtgatttggacggctttttgcatatttgtgtcagtttgatgttaaccacaagtgccagactgatttttcagacggagcctattttgctgcaagcagtttatataaagatacatatgtgtaaatatatgtacaaaaattactgaaaggcttcagttttttctaattggattattatgtcttgaaagttattgtcagtttttattccttgttaggctattttctgcaggatgcttttaactgatgtaggaaactgaaaggaaatagattttttccaaaacccagttccccttatttaatcttttttagaaatgtgggtaatgaattctatctaataagtcaaggaaaccagaatttgacacactccaacaatccgaaggggcatgttgctcctgagcagcatgaagaactgaccaaattggttttgatgcttgggggatcatagagtatttatgtctgcttttctaaatctgcattataatagctctaaaatttgttgattggtaagaaattgggcattgcttggctctttaaacacatcagtgcttccacattcacctatgtatttattattcaaaagtgtcattttaatatttattgctaccttctgtgaatgcttagctcctgtcgggttcattaaggagaaatgtgtctgaaagcacagaactattattatttttttctttttttgagatggagtcttgccctgttgcccaggctggagtgcagtggcacgatctcggctcactgcaacctccgcctcccgggttcaagcaattctcctgcctcagcctcccgagtagctgggagtgcaggtgcacaccgccatgcctggctgattttttgtattttagtagagatggggtttcaccatgttgcctgggctggttgcaaactcttgagctcaggcagtctgcctgcctcagcctcctagagtgctgggattacagacatgagccactgcgcctggcccagcgttacttttcttgataagaatttacagataagacactcagagagacattgtgtcattctctatcatcactccttttaccatgtgaatagatttctctgtcttggcattcttgctgattcagacttattagttaaatcggatttttctggaatttgaatcagatttcatttgggcaacaacagcagggcagggtttctaaagcaggtttccccactcatctaggttgtcttgaaaggaggatagagccacttacagttttatttgcttcagtgtttaatgtagatattatgtggcctgctgtttctgttgtcttgtatgtctgtgtatgcatgacatttggtccctttctttgaaatgcagcccctcttacgggttttttagtggtggtggtttgttttgtttcatatcatatcacagtttgcatggactgattatcttagttttatgataaaactagaagaaatgagggtttttttttaatgaatagattttgaattgattctttagaccccccaaaaagtgtcagttctaatggggaaatatattccatcaagtcaaagagtaataactgctcactagttgctttttagcatctctggtcttatcagccatgctaaatcactttaattagccttagtgattctatggttgagtaatctctacttgaactaaacaaacatcttttgtttctgtgtgtgtgtgctgtgtgtgagagtgtgcgcgcgcgtgtgtgtgtgtgtgttttaatggagtgttgccttgaatgaatcactgggaagccagccatggtaagggctggtgaggttggggagaaaggaagagctttatgtttctctgttgtttggaccctacttggcatgaaaaaggaagctcagttccagccccttggatcaacgaaaatcagaggattctggaaaggcagccaacttgcgcctcttagaaggatcagaggcaagatgagatggcagcctgcagagtaaatgcttgaaaaaagaggggtgattttcaatggtttgcttaagtcactgttttctagacaccaaaatagctgttttgaaactgttttaattgcttgggtagcaatgtgcactttaaacaatttggatattggaatgcagtctcatactgagtgatttgagtagaaccactgatgatgattttataaattgtgtgaagcgaatttcccatttggcaatcatttactgatttgcagtgatgaatatttttatgagaatttaaacttagcaagaatggccatggaggcaaagccttcacccagacccatcccactctcctgtgatccaggtggtccaggagcccaggacaggccttttctgtgggccctggccagacagggttacctggtgaggtgcagagagtccctctagtggccattttgtatggtagttgctaatgcagaacaagttctgtcttgggcttaaattgactgaagactttagggggaaagaatagtaaatgcatgtaaacaaatggggacactctgttcaggagaataatccgactggcatttgtggcagtttttgaaatgtaaatgtattcatgtgtgttcttgtaaatacgtgtcgctcagatgtcctttgaagtgggagggaatcaatccggggataatttcaaatggaatagagtattttgatattgttcattcagagggtgatgtgtacatatctatattgtatatatgtgatgaaaatgcattggctttttgtgcagatacaacctgctctctgtactgctgttggacagtcagtgttttaatgtttctacagttttgctattgcacgatttcatattttgcctctatgatgaacggcaaccattatttgtaactgtttagtgctgtaaagaaatattccaagtgtcattaggattgttgctgccagaactgatatgcatgaatggcacttaaaataaatatattatgttaactctattt

SEQ ID NO: 135005 - DNA, 5225 bp, Homo sapiens
  Payload ID: 6387
  Gene Symbol: FOXJ3
  Gene Name: forkhead box J3
  Uniprot ID: Q9UPW0
  ENST ID: ENST00000361346
  CDS Start-End: 192-2060
agttccgggtgcgcggccccggatgttggctgctcttgctgccgccgccgctctcggggctgctcggggcctcgaccgctcgcagtaggcaccgttgggacctttcccgggggggcggagacgcacggagcggccgggggctcggccgggccgtcccggcctgcgcagcctgagattctctttgtggccagatgggtttgtatggacaggcttgtccatctgtaacttcattaaggatgacatctgaactggagagcagcctaacgtctatggactggttaccacagctcaccatgagagcagccatccaaaaatctgatgctacacaaaatgcacatggaacaggaatttctaagaagaatgcactccttgacccaaatacaactctggaccaggaagaagtccaacagcacaaagatgggaaacctccatacagttatgccagcctcattacatttgcaattaatagctcacccaaaaagaaaatgactttaagtgaaatttatcagtggatttgtgataacttcccatattatagagaggctggcagtggttggaagaattccatacgacataatctgtcattgaacaaatgtttccttaaagtgcctcgatctaaggatgaccctggaaaggggtcctactgggcaatagacaccaatccgaaggaagatgtgctgcctactcggccaaagaagagggcacgatctgtagaacgggcctcaactccatatagcatagattcagattctttgggaatggagtgtattatttcgggaagtgcctctccaactctggcaatcaacactgtgactaacaaagtaacattgtataacactgatcaggatggtagtgatagcccacgcagtagccttaacaacagtctctcagaccagagtttggcatctgttaatttgaacagtgttggaagtgtgcatagttatacaccggtgacaagccatccagaatcagtctctcaatcattaactcctcagcagcaaccacagtacaaccttccagaaagagacaagcaactacttttctcagaatataattttgaagatcttagtgcctcatttcggagcctttataagtcagtttttgagcagtcacttagtcaacaaggtttgatgaacatcccttctgaatcttcccagcagtcccacacttcatgtacctatcagcactctcccagcagtacagtgagcactcacccacacagcaaccaaagcagcctgtccaacagtcatggcagtggcctcaacaccacaggcagtaattcggttgcacaggtctcactgtctcacccccagatgcacacacagccatctccacatcctccccatcgaccgcatggtttaccgcagcatccgcagcgttccccacacccagcaccacacccacagcaacacagccagctccagtcccctcacccccagcatccctctccacatcaacacatacagcaccatccgaaccatcagcatcagacgttaacacatcaggcacccccacccccacaacaggtatcctgtaattctggtgtttcaaatgattggtatgcgacacttgatatgctaaaagaaagctgtcgaattgccagcagtgttaattggtcagatgtagacctttcacagtttcaaggtctgatggagagtatgagacaggcagatctcaagaactggtctttagaccaggttcagtttgccgatctttgttcttctcttaatcagttctttacacaaactggccttatacattcacagagtaatgttcaacaaaatgtttgtcatggtgccatgcatccaacaaaaccttcccaacacattggaacaggaaatttgtacatagattctaggcaaaatctccctccttcagtgatgccaccccctggttatcctcatatcccacaggcactcagcactccaggaacaacgatggcaggccatcacagagccatgaaccagcagcacatgatgccttcccaagccttccagatgcggcgttccctgcctccagatgacatccaggatgactttgattgggattcaattgtgtagggcttgtttctgcaagacaccagaccctaacgttacctttctgtgcagtgaagggaaaggtttaagagaatccagttgagaaaacaaacttgctaatcactttaccaatgttatcaaaattacttttgaagacaatcagaaggattttagctggataacttactgcttttatctgacccaagcaagtactacatgtttgtctccctgccagctgccctatgtagctcctaactgttgtgtgatttggacggctttttgcatatttgtgtcagtttgatgttaaccacaagtgccagactgatttttcagacggagcctattttgctgcaagcagtttatataaagatacatatgtgtaaatatatgtacaaaaattactgaaaggcttcagttttttctaattggattattatgtcttgaaagttattgtcagtttttattccttgttaggctattttctgcaggatgcttttaactgatgtaggaaactgaaaggaaatagattttttccaaaacccagttccccttatttaatcttttttagaaatgtgggtaatgaattctatctaataagtcaaggaaaccagaatttgacacactccaacaatccgaaggggcatgttgctcctgagcagcatgaagaactgaccaaattggttttgatgcttgggggatcatagagtatttatgtctgcttttctaaatctgcattataatagctctaaaatttgttgattggtaagaaattgggcattgcttggctctttaaacacatcagtgcttccacattcacctatgtatttattattcaaaagtgtcattttaatatttattgctaccttctgtgaatgcttagctcctgtcgggttcattaaggagaaatgtgtctgaaagcacagaactattattatttttttctttttttgagatggagtcttgccctgttgcccaggctggagtgcagtggcacgatctcggctcactgcaacctccgcctcccgggttcaagcaattctcctgcctcagcctcccgagtagctgggagtgcaggtgcacaccgccatgcctggctgattttttgtattttagtagagatggggtttcaccatgttgcctgggctggttgcaaactcttgagctcaggcagtctgcctgcctcagcctcctagagtgctgggattacagacatgagccactgcgcctggcccagcgttacttttcttgataagaatttacagataagacactcagagagacattgtgtcattctctatcatcactccttttaccatgtgaatagatttctctgtcttggcattcttgctgattcagacttattagttaaatcggatttttctggaatttgaatcagatttcatttgggcaacaacagcagggcagggtttctaaagcaggtttccccactcatctaggttgtcttgaaaggaggatagagccacttacagttttatttgcttcagtgtttaatgtagatattatgtggcctgctgtttctgttgtcttgtatgtctgtgtatgcatgacatttggtccctttctttgaaatgcagcccctcttacgggttttttagtggtggtggtttgttttgtttcatatcatatcacagtttgcatggactgattatcttagttttatgataaaactagaagaaatgagggtttttttttaatgaatagattttgaattgattctttagaccccccaaaaagtgtcagttctaatggggaaatatattccatcaagtcaaagagtaataactgctcactagttgctttttagcatctctggtcttatcagccatgctaaatcactttaattagccttagtgattctatggttgagtaatctctacttgaactaaacaaacatcttttgtttctgtgtgtgtgtgctgtgtgtgagagtgtgcgcgcgcgtgtgtgtgtgtgtgttttaatggagtgttgccttgaatgaatcactgggaagccagccatggtaagggctggtgaggttggggagaaaggaagagctttatgtttctctgttgtttggaccctacttggcatgaaaaaggaagctcagttccagccccttggatcaacgaaaatcagaggattctggaaaggcagccaacttgcgcctcttagaaggatcagaggcaagatgagatggcagcctgcagagtaaatgcttgaaaaaagaggggtgattttcaatggtttgcttaagtcactgttttctagacaccaaaatagctgttttgaaactgttttaattgcttgggtagcaatgtgcactttaaacaatttggatattggaatgcagtctcatactgagtgatttgagtagaaccactgatgatgattttataaattgtgtgaagcgaatttcccatttggcaatcatttactgatttgcagtgatgaatatttttatgagaatttaaacttagcaagaatggccatggaggcaaagccttcacccagacccatcccactctcctgtgatccaggtggtccaggagcccaggacaggccttttctgtgggccctggccagacagggttacctggtgaggtgcagagagtccctctagtggccattttgtatggtagttgctaatgcagaacaagttctgtcttgggcttaaattgactgaagactttagggggaaagaatagtaaatgcatgtaaacaaatggggacactctgttcaggagaataatccgactggcatttgtggcagtttttgaaatgtaaatgtattcatgtgtgttcttgtaaatacgtgtcgctcagatgtcctttgaagtgggagggaatcaatccggggataatttcaaatggaatagagtattttgatattgttcattcagagggtgatgtgtacatatctatattgtatatatgtgatgaaaatgcattggctttttgtgcagatacaacctgctctctgtactgctgttggacagtcagtgttttaatgtttctacagttttgctattgcacgatttcatattttgcctctatgatgaacggcaaccattatttgtaactgtttagtgctgtaaagaaatattccaagtgtcattaggattgttgctgccagaactgatatgcatgaatggcacttaaaataaatatattatgttaactctattt

SEQ ID NO: 135006 - DNA, 4468 bp, Homo sapiens
  Payload ID: 6387
  Gene Symbol: FOXJ3
  Gene Name: forkhead box J3
  ENST ID: ENST00000372571
  CDS Start-End: 887-1297
gggaaaatacagatttgtgtggcatttcctatctgttcatttattggtactgtaatgtaaagagcagtatcaagtttgatattactaggtgatgtggcaatttggaaactgctagactggaggttagaagacctgggttcaagtcttagattcatcatgataaccttgctaagttatgtcacttctctggttcagtttcttttatttgtaaaatggagagaaataatacctttctgcctgtctcacagagcagattgcccaacacgtgatataatgggtacaaatccccttgtaagacgggacaagaatcagccaatttcaggaataagggcagctcatcgttttcccttaccacacttcaccctttcaccatccaggaattacactgttgtcaatattttataggtgtttcaaatgattggtatgcgacacttgatatgctaaaagaaagctgtcgaattgccagcagtgttaattggtcagatgtagacctttcacagtttcaaggtgagtgttggttctttttgacatataaccaaatacacatgatcctgtttctctgctagattataactttctttgtagtagaaataaacatcatcttatatagcatttcttttgcagttggtaaaattcataataattttggccacttggtatagcagagggtcacagacaagttctgaaagaaatttgaccacatttaaaataattgggctttgaataatttaaaaaggtcattcttcattgcgtggataaatcactaccataaagtggagtgagtggaaattttgagagctgaaaaaaattatgtcttgctattttccttgcaatgtttattgcataacagtgctaacatatttttaatgctttcctcataggtctgatggagagtatgagacaggcagatctcaagaactggtctttagaccaggttcagtttgccgatctttgttcttctcttaatcagttctttacacaaactggccttatacattcacagagtaatgttcaacaaaatgtttgtcatggtgccatgcatccaacaaaaccttcccaacacattggaacaggaaatttgtacatagattctaggcaaaatctccctccttcagtgatgccaccccctggttatcctcatatcccacaggcactcagcactccaggaacaacgatggcaggccatcacagagccatgaaccagcagcacatgatgccttcccaagccttccagatgcggcgttccctgcctccagatgacatccaggatgactttgattgggattcaattgtgtagggcttgtttctgcaagacaccagaccctaacgttacctttctgtgcagtgaagggaaaggtttaagagaatccagttgagaaaacaaacttgctaatcactttaccaatgttatcaaaattacttttgaagacaatcagaaggattttagctggataacttactgcttttatctgacccaagcaagtactacatgtttgtctccctgccagctgccctatgtagctcctaactgttgtgtgatttggacggctttttgcatatttgtgtcagtttgatgttaaccacaagtgccagactgatttttcagacggagcctattttgctgcaagcagtttatataaagatacatatgtgtaaatatatgtacaaaaattactgaaaggcttcagttttttctaattggattattatgtcttgaaagttattgtcagtttttattccttgttaggctattttctgcaggatgcttttaactgatgtaggaaactgaaaggaaatagattttttccaaaacccagttccccttatttaatcttttttagaaatgtgggtaatgaattctatctaataagtcaaggaaaccagaatttgacacactccaacaatccgaaggggcatgttgctcctgagcagcatgaagaactgaccaaattggttttgatgcttgggggatcatagagtatttatgtctgcttttctaaatctgcattataatagctctaaaatttgttgattggtaagaaattgggcattgcttggctctttaaacacatcagtgcttccacattcacctatgtatttattattcaaaagtgtcattttaatatttattgctaccttctgtgaatgcttagctcctgtcgggttcattaaggagaaatgtgtctgaaagcacagaactattattatttttttctttttttgagatggagtcttgccctgttgcccaggctggagtgcagtggcacgatctcggctcactgcaacctccgcctcccgggttcaagcaattctcctgcctcagcctcccgagtagctgggagtgcaggtgcacaccgccatgcctggctgattttttgtattttagtagagatggggtttcaccatgttgcctgggctggttgcaaactcttgagctcaggcagtctgcctgcctcagcctcctagagtgctgggattacagacatgagccactgcgcctggcccagcgttacttttcttgataagaatttacagataagacactcagagagacattgtgtcattctctatcatcactccttttaccatgtgaatagatttctctgtcttggcattcttgctgattcagacttattagttaaatcggatttttctggaatttgaatcagatttcatttgggcaacaacagcagggcagggtttctaaagcaggtttccccactcatctaggttgtcttgaaaggaggatagagccacttacagttttatttgcttcagtgtttaatgtagatattatgtggcctgctgtttctgttgtcttgtatgtctgtgtatgcatgacatttggtccctttctttgaaatgcagcccctcttacgggttttttagtggtggtggtttgttttgtttcatatcatatcacagtttgcatggactgattatcttagttttatgataaaactagaagaaatgagggtttttttttaatgaatagattttgaattgattctttagaccccccaaaaagtgtcagttctaatggggaaatatattccatcaagtcaaagagtaataactgctcactagttgctttttagcatctctggtcttatcagccatgctaaatcactttaattagccttagtgattctatggttgagtaatctctacttgaactaaacaaacatcttttgtttctgtgtgtgtgtgctgtgtgtgagagtgtgcgcgcgcgtgtgtgtgtgtgtgttttaatggagtgttgccttgaatgaatcactgggaagccagccatggtaagggctggtgaggttggggagaaaggaagagctttatgtttctctgttgtttggaccctacttggcatgaaaaaggaagctcagttccagccccttggatcaacgaaaatcagaggattctggaaaggcagccaacttgcgcctcttagaaggatcagaggcaagatgagatggcagcctgcagagtaaatgcttgaaaaaagaggggtgattttcaatggtttgcttaagtcactgttttctagacaccaaaatagctgttttgaaactgttttaattgcttgggtagcaatgtgcactttaaacaatttggatattggaatgcagtctcatactgagtgatttgagtagaaccactgatgatgattttataaattgtgtgaagcgaatttcccatttggcaatcatttactgatttgcagtgatgaatatttttatgagaatttaaacttagcaagaatggccatggaggcaaagccttcacccagacccatcccactctcctgtgatccaggtggtccaggagcccaggacaggccttttctgtgggccctggccagacagggttacctggtgaggtgcagagagtccctctagtggccattttgtatggtagttgctaatgcagaacaagttctgtcttgggcttaaattgactgaagactttagggggaaagaatagtaaatgcatgtaaacaaatggggacactctgttcaggagaataatccgactggcatttgtggcagtttttgaaatgtaaatgtattcatgtgtgttcttgtaaatacgtgtcgctcagatgtcctttgaagtgggagggaatcaatccggggataatttcaaatggaatagagtattttgatattgttcattcagagggtgatgtgtacatatctatattgtatatatgtgatgaaaatgcattggctttttgtgcagatacaacctgctctctgtactgctgttggacagtcagtgttttaatgtttctacagttttgctattgcacgatttcatattttgcctctatgatgaacggcaaccattatttgtaactgtttagtgctgtaaagaaatattccaagtgtcattaggattgttgctgccagaactgatatgcatgaatggcacttaaaataaatatattatgttaactctatttacaaca

SEQ ID NO: 135007 - DNA, 5352 bp, Homo sapiens
  Payload ID: 6387
  Gene Symbol: FOXJ3
  Gene Name: forkhead box J3
  Uniprot ID: Q9UPW0
  ENST ID: ENST00000372572
  CDS Start-End: 313-2181
gcgagacgccctctctcttccagccgcagccgcgttgcgggttcttccctgtggaacagtagagacctagtctgccttctttcacaagataatccttcaattatttgaaggtgattattcagcatatatctcttgagtacctgtgcatgcaagacactgtcctggatattgtgagagatccaaagtttagtatgagatcattttcccttgcctgagttttgagctgattgagaaataagaacctacagatgaagaagcaagacagtacctttaaaaaaattagctttttattcagattctctttgtggccagatgggtttgtatggacaggcttgtccatctgtaacttcattaaggatgacatctgaactggagagcagcctaacgtctatggactggttaccacagctcaccatgagagcagccatccaaaaatctgatgctacacaaaatgcacatggaacaggaatttctaagaagaatgcactccttgacccaaatacaactctggaccaggaagaagtccaacagcacaaagatgggaaacctccatacagttatgccagcctcattacatttgcaattaatagctcacccaaaaagaaaatgactttaagtgaaatttatcagtggatttgtgataacttcccatattatagagaggctggcagtggttggaagaattccatacgacataatctgtcattgaacaaatgtttccttaaagtgcctcgatctaaggatgaccctggaaaggggtcctactgggcaatagacaccaatccgaaggaagatgtgctgcctactcggccaaagaagagggcacgatctgtagaacgggcctcaactccatatagcatagattcagattctttgggaatggagtgtattatttcgggaagtgcctctccaactctggcaatcaacactgtgactaacaaagtaacattgtataacactgatcaggatggtagtgatagcccacgcagtagccttaacaacagtctctcagaccagagtttggcatctgttaatttgaacagtgttggaagtgtgcatagttatacaccggtgacaagccatccagaatcagtctctcaatcattaactcctcagcagcaaccacagtacaaccttccagaaagagacaagcaactacttttctcagaatataattttgaagatcttagtgcctcatttcggagcctttataagtcagtttttgagcagtcacttagtcaacaaggtttgatgaacatcccttctgaatcttcccagcagtcccacacttcatgtacctatcagcactctcccagcagtacagtgagcactcacccacacagcaaccaaagcagcctgtccaacagtcatggcagtggcctcaacaccacaggcagtaattcggttgcacaggtctcactgtctcacccccagatgcacacacagccatctccacatcctccccatcgaccgcatggtttaccgcagcatccgcagcgttccccacacccagcaccacacccacagcaacacagccagctccagtcccctcacccccagcatccctctccacatcaacacatacagcaccatccgaaccatcagcatcagacgttaacacatcaggcacccccacccccacaacaggtatcctgtaattctggtgtttcaaatgattggtatgcgacacttgatatgctaaaagaaagctgtcgaattgccagcagtgttaattggtcagatgtagacctttcacagtttcaaggtctgatggagagtatgagacaggcagatctcaagaactggtctttagaccaggttcagtttgccgatctttgttcttctcttaatcagttctttacacaaactggccttatacattcacagagtaatgttcaacaaaatgtttgtcatggtgccatgcatccaacaaaaccttcccaacacattggaacaggaaatttgtacatagattctaggcaaaatctccctccttcagtgatgccaccccctggttatcctcatatcccacaggcactcagcactccaggaacaacgatggcaggccatcacagagccatgaaccagcagcacatgatgccttcccaagccttccagatgcggcgttccctgcctccagatgacatccaggatgactttgattgggattcaattgtgtagggcttgtttctgcaagacaccagaccctaacgttacctttctgtgcagtgaagggaaaggtttaagagaatccagttgagaaaacaaacttgctaatcactttaccaatgttatcaaaattacttttgaagacaatcagaaggattttagctggataacttactgcttttatctgacccaagcaagtactacatgtttgtctccctgccagctgccctatgtagctcctaactgttgtgtgatttggacggctttttgcatatttgtgtcagtttgatgttaaccacaagtgccagactgatttttcagacggagcctattttgctgcaagcagtttatataaagatacatatgtgtaaatatatgtacaaaaattactgaaaggcttcagttttttctaattggattattatgtcttgaaagttattgtcagtttttattccttgttaggctattttctgcaggatgcttttaactgatgtaggaaactgaaaggaaatagattttttccaaaacccagttccccttatttaatcttttttagaaatgtgggtaatgaattctatctaataagtcaaggaaaccagaatttgacacactccaacaatccgaaggggcatgttgctcctgagcagcatgaagaactgaccaaattggttttgatgcttgggggatcatagagtatttatgtctgcttttctaaatctgcattataatagctctaaaatttgttgattggtaagaaattgggcattgcttggctctttaaacacatcagtgcttccacattcacctatgtatttattattcaaaagtgtcattttaatatttattgctaccttctgtgaatgcttagctcctgtcgggttcattaaggagaaatgtgtctgaaagcacagaactattattatttttttctttttttgagatggagtcttgccctgttgcccaggctggagtgcagtggcacgatctcggctcactgcaacctccgcctcccgggttcaagcaattctcctgcctcagcctcccgagtagctgggagtgcaggtgcacaccgccatgcctggctgattttttgtattttagtagagatggggtttcaccatgttgcctgggctggttgcaaactcttgagctcaggcagtctgcctgcctcagcctcctagagtgctgggattacagacatgagccactgcgcctggcccagcgttacttttcttgataagaatttacagataagacactcagagagacattgtgtcattctctatcatcactccttttaccatgtgaatagatttctctgtcttggcattcttgctgattcagacttattagttaaatcggatttttctggaatttgaatcagatttcatttgggcaacaacagcagggcagggtttctaaagcaggtttccccactcatctaggttgtcttgaaaggaggatagagccacttacagttttatttgcttcagtgtttaatgtagatattatgtggcctgctgtttctgttgtcttgtatgtctgtgtatgcatgacatttggtccctttctttgaaatgcagcccctcttacgggttttttagtggtggtggtttgttttgtttcatatcatatcacagtttgcatggactgattatcttagttttatgataaaactagaagaaatgagggtttttttttaatgaatagattttgaattgattctttagaccccccaaaaagtgtcagttctaatggggaaatatattccatcaagtcaaagagtaataactgctcactagttgctttttagcatctctggtcttatcagccatgctaaatcactttaattagccttagtgattctatggttgagtaatctctacttgaactaaacaaacatcttttgtttctgtgtgtgtgtgctgtgtgtgagagtgtgcgcgcgcgtgtgtgtgtgtgtgttttaatggagtgttgccttgaatgaatcactgggaagccagccatggtaagggctggtgaggttggggagaaaggaagagctttatgtttctctgttgtttggaccctacttggcatgaaaaaggaagctcagttccagccccttggatcaacgaaaatcagaggattctggaaaggcagccaacttgcgcctcttagaaggatcagaggcaagatgagatggcagcctgcagagtaaatgcttgaaaaaagaggggtgattttcaatggtttgcttaagtcactgttttctagacaccaaaatagctgttttgaaactgttttaattgcttgggtagcaatgtgcactttaaacaatttggatattggaatgcagtctcatactgagtgatttgagtagaaccactgatgatgattttataaattgtgtgaagcgaatttcccatttggcaatcatttactgatttgcagtgatgaatatttttatgagaatttaaacttagcaagaatggccatggaggcaaagccttcacccagacccatcccactctcctgtgatccaggtggtccaggagcccaggacaggccttttctgtgggccctggccagacagggttacctggtgaggtgcagagagtccctctagtggccattttgtatggtagttgctaatgcagaacaagttctgtcttgggcttaaattgactgaagactttagggggaaagaatagtaaatgcatgtaaacaaatggggacactctgttcaggagaataatccgactggcatttgtggcagtttttgaaatgtaaatgtattcatgtgtgttcttgtaaatacgtgtcgctcagatgtcctttgaagtgggagggaatcaatccggggataatttcaaatggaatagagtattttgatattgttcattcagagggtgatgtgtacatatctatattgtatatatgtgatgaaaatgcattggctttttgtgcagatacaacctgctctctgtactgctgttggacagtcagtgttttaatgtttctacagttttgctattgcacgatttcatattttgcctctatgatgaacggcaaccattatttgtaactgtttagtgctgtaaagaaatattccaagtgtcattaggattgttgctgccagaactgatatgcatgaatggcacttaaaataaatatattatgttaactctatttacaaca

SEQ ID NO: 135008 - DNA, 5309 bp, Homo sapiens
  Payload ID: 6387
  Gene Symbol: FOXJ3
  Gene Name: forkhead box J3
  Uniprot ID: Q9UPW0
  ENST ID: ENST00000372573
  CDS Start-End: 270-2138
ataacctgggtagctaccttgagaattagaagggcctttagaggtccaactcctttaagaaagaaagaaagaccaggcacgggaaaggcctccgcagacatgagtctagcacctgggactcatgaagttctgaaaagaggggtgtcctgaaggtccaaggcgcctttgttgggggtcccggaatccgcggtgtgccaggtcggaaaaggcgtccgctttcctggagaggaggctaaggtgccgggcgcttcgattctctttgtggccagatgggtttgtatggacaggcttgtccatctgtaacttcattaaggatgacatctgaactggagagcagcctaacgtctatggactggttaccacagctcaccatgagagcagccatccaaaaatctgatgctacacaaaatgcacatggaacaggaatttctaagaagaatgcactccttgacccaaatacaactctggaccaggaagaagtccaacagcacaaagatgggaaacctccatacagttatgccagcctcattacatttgcaattaatagctcacccaaaaagaaaatgactttaagtgaaatttatcagtggatttgtgataacttcccatattatagagaggctggcagtggttggaagaattccatacgacataatctgtcattgaacaaatgtttccttaaagtgcctcgatctaaggatgaccctggaaaggggtcctactgggcaatagacaccaatccgaaggaagatgtgctgcctactcggccaaagaagagggcacgatctgtagaacgggcctcaactccatatagcatagattcagattctttgggaatggagtgtattatttcgggaagtgcctctccaactctggcaatcaacactgtgactaacaaagtaacattgtataacactgatcaggatggtagtgatagcccacgcagtagccttaacaacagtctctcagaccagagtttggcatctgttaatttgaacagtgttggaagtgtgcatagttatacaccggtgacaagccatccagaatcagtctctcaatcattaactcctcagcagcaaccacagtacaaccttccagaaagagacaagcaactacttttctcagaatataattttgaagatcttagtgcctcatttcggagcctttataagtcagtttttgagcagtcacttagtcaacaaggtttgatgaacatcccttctgaatcttcccagcagtcccacacttcatgtacctatcagcactctcccagcagtacagtgagcactcacccacacagcaaccaaagcagcctgtccaacagtcatggcagtggcctcaacaccacaggcagtaattcggttgcacaggtctcactgtctcacccccagatgcacacacagccatctccacatcctccccatcgaccgcatggtttaccgcagcatccgcagcgttccccacacccagcaccacacccacagcaacacagccagctccagtcccctcacccccagcatccctctccacatcaacacatacagcaccatccgaaccatcagcatcagacgttaacacatcaggcacccccacccccacaacaggtatcctgtaattctggtgtttcaaatgattggtatgcgacacttgatatgctaaaagaaagctgtcgaattgccagcagtgttaattggtcagatgtagacctttcacagtttcaaggtctgatggagagtatgagacaggcagatctcaagaactggtctttagaccaggttcagtttgccgatctttgttcttctcttaatcagttctttacacaaactggccttatacattcacagagtaatgttcaacaaaatgtttgtcatggtgccatgcatccaacaaaaccttcccaacacattggaacaggaaatttgtacatagattctaggcaaaatctccctccttcagtgatgccaccccctggttatcctcatatcccacaggcactcagcactccaggaacaacgatggcaggccatcacagagccatgaaccagcagcacatgatgccttcccaagccttccagatgcggcgttccctgcctccagatgacatccaggatgactttgattgggattcaattgtgtagggcttgtttctgcaagacaccagaccctaacgttacctttctgtgcagtgaagggaaaggtttaagagaatccagttgagaaaacaaacttgctaatcactttaccaatgttatcaaaattacttttgaagacaatcagaaggattttagctggataacttactgcttttatctgacccaagcaagtactacatgtttgtctccctgccagctgccctatgtagctcctaactgttgtgtgatttggacggctttttgcatatttgtgtcagtttgatgttaaccacaagtgccagactgatttttcagacggagcctattttgctgcaagcagtttatataaagatacatatgtgtaaatatatgtacaaaaattactgaaaggcttcagttttttctaattggattattatgtcttgaaagttattgtcagtttttattccttgttaggctattttctgcaggatgcttttaactgatgtaggaaactgaaaggaaatagattttttccaaaacccagttccccttatttaatcttttttagaaatgtgggtaatgaattctatctaataagtcaaggaaaccagaatttgacacactccaacaatccgaaggggcatgttgctcctgagcagcatgaagaactgaccaaattggttttgatgcttgggggatcatagagtatttatgtctgcttttctaaatctgcattataatagctctaaaatttgttgattggtaagaaattgggcattgcttggctctttaaacacatcagtgcttccacattcacctatgtatttattattcaaaagtgtcattttaatatttattgctaccttctgtgaatgcttagctcctgtcgggttcattaaggagaaatgtgtctgaaagcacagaactattattatttttttctttttttgagatggagtcttgccctgttgcccaggctggagtgcagtggcacgatctcggctcactgcaacctccgcctcccgggttcaagcaattctcctgcctcagcctcccgagtagctgggagtgcaggtgcacaccgccatgcctggctgattttttgtattttagtagagatggggtttcaccatgttgcctgggctggttgcaaactcttgagctcaggcagtctgcctgcctcagcctcctagagtgctgggattacagacatgagccactgcgcctggcccagcgttacttttcttgataagaatttacagataagacactcagagagacattgtgtcattctctatcatcactccttttaccatgtgaatagatttctctgtcttggcattcttgctgattcagacttattagttaaatcggatttttctggaatttgaatcagatttcatttgggcaacaacagcagggcagggtttctaaagcaggtttccccactcatctaggttgtcttgaaaggaggatagagccacttacagttttatttgcttcagtgtttaatgtagatattatgtggcctgctgtttctgttgtcttgtatgtctgtgtatgcatgacatttggtccctttctttgaaatgcagcccctcttacgggttttttagtggtggtggtttgttttgtttcatatcatatcacagtttgcatggactgattatcttagttttatgataaaactagaagaaatgagggtttttttttaatgaatagattttgaattgattctttagaccccccaaaaagtgtcagttctaatggggaaatatattccatcaagtcaaagagtaataactgctcactagttgctttttagcatctctggtcttatcagccatgctaaatcactttaattagccttagtgattctatggttgagtaatctctacttgaactaaacaaacatcttttgtttctgtgtgtgtgtgctgtgtgtgagagtgtgcgcgcgcgtgtgtgtgtgtgtgttttaatggagtgttgccttgaatgaatcactgggaagccagccatggtaagggctggtgaggttggggagaaaggaagagctttatgtttctctgttgtttggaccctacttggcatgaaaaaggaagctcagttccagccccttggatcaacgaaaatcagaggattctggaaaggcagccaacttgcgcctcttagaaggatcagaggcaagatgagatggcagcctgcagagtaaatgcttgaaaaaagaggggtgattttcaatggtttgcttaagtcactgttttctagacaccaaaatagctgttttgaaactgttttaattgcttgggtagcaatgtgcactttaaacaatttggatattggaatgcagtctcatactgagtgatttgagtagaaccactgatgatgattttataaattgtgtgaagcgaatttcccatttggcaatcatttactgatttgcagtgatgaatatttttatgagaatttaaacttagcaagaatggccatggaggcaaagccttcacccagacccatcccactctcctgtgatccaggtggtccaggagcccaggacaggccttttctgtgggccctggccagacagggttacctggtgaggtgcagagagtccctctagtggccattttgtatggtagttgctaatgcagaacaagttctgtcttgggcttaaattgactgaagactttagggggaaagaatagtaaatgcatgtaaacaaatggggacactctgttcaggagaataatccgactggcatttgtggcagtttttgaaatgtaaatgtattcatgtgtgttcttgtaaatacgtgtcgctcagatgtcctttgaagtgggagggaatcaatccggggataatttcaaatggaatagagtattttgatattgttcattcagagggtgatgtgtacatatctatattgtatatatgtgatgaaaatgcattggctttttgtgcagatacaacctgctctctgtactgctgttggacagtcagtgttttaatgtttctacagttttgctattgcacgatttcatattttgcctctatgatgaacggcaaccattatttgtaactgtttagtgctgtaaagaaatattccaagtgtcattaggattgttgctgccagaactgatatgcatgaatggcacttaaaataaatatattatgttaactctatttacaaca

SEQ ID NO: 135009 - DNA, 447 bp, Homo sapiens
  Payload ID: 6387
  Gene Symbol: FOXJ3
  Gene Name: forkhead box J3
  ENST ID: ENST00000422278
  CDS Start-End: 188-447
tagaagagatttcactagtgatttaaattcattttcagaaacaaagcacaaaactggatgttcaagaatttgatgagatcccttcaaactgtgttaaagttgctggatatatgagctaataattatttattttgttcttgtattttaggcctcaactccatatagcatagattcagattctttgggaatggagtgtattatttcgggaagtgcctctccaactctggcaatcaacactgtgactaacaaagtaacattgtataacactgatcaggatggtagtgatagcccacgcagtagccttaacaacagtctctcagaccagagtttggcatctgttaatttgaacagtgttggaagtgtgcatagttatacaccggtgacaagccatccagaatcagtctctcaatcattaactcctcagcagcaaccacagtacaaccttcc

SEQ ID NO: 135010 - DNA, 1326 bp, Homo sapiens
  Payload ID: 6387
  Gene Symbol: FOXJ3
  Gene Name: forkhead box J3
  ENST ID: ENST00000445886
  CDS Start-End: 181-1326
cgcggccccggatgttggctgctcttgctgccgccgccgctctcggggctgctcggggcctcgaccgctcgcagtaggcaccgttgggacctttcccgggggggcggagacgcacggagcggccgggggctcggccgggccgtcccggcctgcgcagcctgagattctctttgtggccagatgggtttgtatggacaggcttgtccatctgtaacttcattaaggatgacatctgaactggagagcagcctaacgtctatggactggttaccacagctcaccatgagagcagccatccaaaaatctgatgctacacaaaatgcacatggaacaggaatttctaagaagaatgcactccttgacccaaatacaactctggaccaggaagaagtccaacagcacaaagatgggaaacctccatacagttatgccagcctcattacatttgcaattaatagctcacccaaaaagaaaatgactttaagtgaaatttatcagtggatttgtgataacttcccatattatagagaggctggcagtggttggaagaattccatacgacataatctgtcattgaacaaatgtttccttaaagtgcctcgatctaaggatgaccctggaaaggggtcctactgggcaatagacaccaatccgaaggaagatgtgctgcctactcggccaaagaagagggcacgatctgtagaacgggtaacattgtataacactgatcaggatggtagtgatagcccacgcagtagccttaacaacagtctctcagaccagagtttggcatctgttaatttgaacagtgttggaagtgtgcatagttatacaccggtgacaagccatccagaatcagtctctcaatcattaactcctcagcagcaaccacagtacaaccttccagaaagagacaagcaactacttttctcagaatataattttgaagatcttagtgcctcatttcggagcctttataagtcagtttttgagcagtcacttagtcaacaaggtttgatgaacatcccttctgaatcttcccagcagtcccacacttcatgtacctatcagcactctcccagcagtacagtgagcactcacccacacagcaaccaaagcagcctgtccaacagtcatggcagtggcctcaacaccacaggcagtaattcggttgcacaggtctcactgtctcacccccagatgcacacacagccatctccacatcctccccatcgaccgcatggtttaccgcagcatccgcagcgttccccacacccagcaccacacccacagcaacacagccagctccagtcccctcacccccag

SEQ ID NO: 135011 - DNA, 499 bp, Homo sapiens
  Payload ID: 6387
  Gene Symbol: FOXJ3
  Gene Name: forkhead box J3
  ENST ID: ENST00000454417
  CDS Start-End: 1-378
gctacacaaaatgcacatggaacaggaatttctaagaagaatgcactccttgacccaaatacaactctggaccaggaagaagtccaacagcacaaagatgggaaacctccatacagttatgccagcctcattacatttgcaattaatagctcacccaaaaagaaaatgactttaagtgaaatttatcagtggatttgtgataacttcccatattatagagaggctggcagtggttggaagaattccatacgacataatctgtcattgaacaaatgtttccttaaagtgcctcgatctaaggatgaccctggaaaggtaggattcatcttcttaaaacagttgaattcttcagtatgtcacttgtcatgtttgaattaagaacttttccagttcattgaataggaacctctgcaaaatagtaagtcctcccccaccctgctctaaagcttgttagagagttttaagctgtgggaacctaactagtgtatagctgttgcac

SEQ ID NO: 135012 - DNA, 5165 bp, Homo sapiens
  Payload ID: 6387
  Gene Symbol: FOXJ3
  Gene Name: forkhead box J3
  Uniprot ID: Q9UPW0
  ENST ID: ENST00000545068
  CDS Start-End: 132-2000
acagtttagtatgagatcattttcccttgcctgagttttgagctgattgagaaataagaacctacagatgaagaagcaagacagtacctttaaaaaaattagctttttattcagattctctttgtggccagatgggtttgtatggacaggcttgtccatctgtaacttcattaaggatgacatctgaactggagagcagcctaacgtctatggactggttaccacagctcaccatgagagcagccatccaaaaatctgatgctacacaaaatgcacatggaacaggaatttctaagaagaatgcactccttgacccaaatacaactctggaccaggaagaagtccaacagcacaaagatgggaaacctccatacagttatgccagcctcattacatttgcaattaatagctcacccaaaaagaaaatgactttaagtgaaatttatcagtggatttgtgataacttcccatattatagagaggctggcagtggttggaagaattccatacgacataatctgtcattgaacaaatgtttccttaaagtgcctcgatctaaggatgaccctggaaaggggtcctactgggcaatagacaccaatccgaaggaagatgtgctgcctactcggccaaagaagagggcacgatctgtagaacgggcctcaactccatatagcatagattcagattctttgggaatggagtgtattatttcgggaagtgcctctccaactctggcaatcaacactgtgactaacaaagtaacattgtataacactgatcaggatggtagtgatagcccacgcagtagccttaacaacagtctctcagaccagagtttggcatctgttaatttgaacagtgttggaagtgtgcatagttatacaccggtgacaagccatccagaatcagtctctcaatcattaactcctcagcagcaaccacagtacaaccttccagaaagagacaagcaactacttttctcagaatataattttgaagatcttagtgcctcatttcggagcctttataagtcagtttttgagcagtcacttagtcaacaaggtttgatgaacatcccttctgaatcttcccagcagtcccacacttcatgtacctatcagcactctcccagcagtacagtgagcactcacccacacagcaaccaaagcagcctgtccaacagtcatggcagtggcctcaacaccacaggcagtaattcggttgcacaggtctcactgtctcacccccagatgcacacacagccatctccacatcctccccatcgaccgcatggtttaccgcagcatccgcagcgttccccacacccagcaccacacccacagcaacacagccagctccagtcccctcacccccagcatccctctccacatcaacacatacagcaccatccgaaccatcagcatcagacgttaacacatcaggcacccccacccccacaacaggtatcctgtaattctggtgtttcaaatgattggtatgcgacacttgatatgctaaaagaaagctgtcgaattgccagcagtgttaattggtcagatgtagacctttcacagtttcaaggtctgatggagagtatgagacaggcagatctcaagaactggtctttagaccaggttcagtttgccgatctttgttcttctcttaatcagttctttacacaaactggccttatacattcacagagtaatgttcaacaaaatgtttgtcatggtgccatgcatccaacaaaaccttcccaacacattggaacaggaaatttgtacatagattctaggcaaaatctccctccttcagtgatgccaccccctggttatcctcatatcccacaggcactcagcactccaggaacaacgatggcaggccatcacagagccatgaaccagcagcacatgatgccttcccaagccttccagatgcggcgttccctgcctccagatgacatccaggatgactttgattgggattcaattgtgtagggcttgtttctgcaagacaccagaccctaacgttacctttctgtgcagtgaagggaaaggtttaagagaatccagttgagaaaacaaacttgctaatcactttaccaatgttatcaaaattacttttgaagacaatcagaaggattttagctggataacttactgcttttatctgacccaagcaagtactacatgtttgtctccctgccagctgccctatgtagctcctaactgttgtgtgatttggacggctttttgcatatttgtgtcagtttgatgttaaccacaagtgccagactgatttttcagacggagcctattttgctgcaagcagtttatataaagatacatatgtgtaaatatatgtacaaaaattactgaaaggcttcagttttttctaattggattattatgtcttgaaagttattgtcagtttttattccttgttaggctattttctgcaggatgcttttaactgatgtaggaaactgaaaggaaatagattttttccaaaacccagttccccttatttaatcttttttagaaatgtgggtaatgaattctatctaataagtcaaggaaaccagaatttgacacactccaacaatccgaaggggcatgttgctcctgagcagcatgaagaactgaccaaattggttttgatgcttgggggatcatagagtatttatgtctgcttttctaaatctgcattataatagctctaaaatttgttgattggtaagaaattgggcattgcttggctctttaaacacatcagtgcttccacattcacctatgtatttattattcaaaagtgtcattttaatatttattgctaccttctgtgaatgcttagctcctgtcgggttcattaaggagaaatgtgtctgaaagcacagaactattattatttttttctttttttgagatggagtcttgccctgttgcccaggctggagtgcagtggcacgatctcggctcactgcaacctccgcctcccgggttcaagcaattctcctgcctcagcctcccgagtagctgggagtgcaggtgcacaccgccatgcctggctgattttttgtattttagtagagatggggtttcaccatgttgcctgggctggttgcaaactcttgagctcaggcagtctgcctgcctcagcctcctagagtgctgggattacagacatgagccactgcgcctggcccagcgttacttttcttgataagaatttacagataagacactcagagagacattgtgtcattctctatcatcactccttttaccatgtgaatagatttctctgtcttggcattcttgctgattcagacttattagttaaatcggatttttctggaatttgaatcagatttcatttgggcaacaacagcagggcagggtttctaaagcaggtttccccactcatctaggttgtcttgaaaggaggatagagccacttacagttttatttgcttcagtgtttaatgtagatattatgtggcctgctgtttctgttgtcttgtatgtctgtgtatgcatgacatttggtccctttctttgaaatgcagcccctcttacgggttttttagtggtggtggtttgttttgtttcatatcatatcacagtttgcatggactgattatcttagttttatgataaaactagaagaaatgagggtttttttttaatgaatagattttgaattgattctttagaccccccaaaaagtgtcagttctaatggggaaatatattccatcaagtcaaagagtaataactgctcactagttgctttttagcatctctggtcttatcagccatgctaaatcactttaattagccttagtgattctatggttgagtaatctctacttgaactaaacaaacatcttttgtttctgtgtgtgtgtgctgtgtgtgagagtgtgcgcgcgcgtgtgtgtgtgtgtgttttaatggagtgttgccttgaatgaatcactgggaagccagccatggtaagggctggtgaggttggggagaaaggaagagctttatgtttctctgttgtttggaccctacttggcatgaaaaaggaagctcagttccagccccttggatcaacgaaaatcagaggattctggaaaggcagccaacttgcgcctcttagaaggatcagaggcaagatgagatggcagcctgcagagtaaatgcttgaaaaaagaggggtgattttcaatggtttgcttaagtcactgttttctagacaccaaaatagctgttttgaaactgttttaattgcttgggtagcaatgtgcactttaaacaatttggatattggaatgcagtctcatactgagtgatttgagtagaaccactgatgatgattttataaattgtgtgaagcgaatttcccatttggcaatcatttactgatttgcagtgatgaatatttttatgagaatttaaacttagcaagaatggccatggaggcaaagccttcacccagacccatcccactctcctgtgatccaggtggtccaggagcccaggacaggccttttctgtgggccctggccagacagggttacctggtgaggtgcagagagtccctctagtggccattttgtatggtagttgctaatgcagaacaagttctgtcttgggcttaaattgactgaagactttagggggaaagaatagtaaatgcatgtaaacaaatggggacactctgttcaggagaataatccgactggcatttgtggcagtttttgaaatgtaaatgtattcatgtgtgttcttgtaaatacgtgtcgctcagatgtcctttgaagtgggagggaatcaatccggggataatttcaaatggaatagagtattttgatattgttcattcagagggtgatgtgtacatatctatattgtatatatgtgatgaaaatgcattggctttttgtgcagatacaacctgctctctgtactgctgttggacagtcagtgttttaatgtttctacagttttgctattgcacgatttcatattttgcctctatgatgaacggcaaccattatttgtaactgtttagtgctgtaaagaaatattccaagtgtcattaggattgttgctgccagaactgatatgcatgaatggcacttaaaataaatatattatgttaactctattt

SEQ ID NO: 135013 - DNA, 11181 bp, Homo sapiens
  Payload ID: 6388
  Gene Symbol: FOXK1
  Gene Name: forkhead box K1
  Uniprot ID: P85037
  ENST ID: ENST00000328914
  CDS Start-End: 1-2202
atggccgaagtcggcgaggacagcggcgcccgcgccctgctcgcgctgcgctcggcgccctgcagcccagtgctgtgcgccgcagccgccgccgccgccttccccgcggccgcacccccgccggcccccgcgcagccccagcctccgcccgggccgccgccgccgccgccaccgccgctgcctccgggcgcgatcgcgggcgcgggctcctccgggggctcctccggggtatccggggactccgcggtcgcgggcgcggcgccggccctggtggccgcggcggccgcctcggtacggcagagcccggggccggcgctggcgcggctggagggccgcgagttcgagttcctcatgcgccagcccagcgtcaccatcggccgcaactcgtcgcagggctcggtggacttgagcatgggcctgtccagcttcatctcgcggcgccacctgcagctcagcttccaggagccgcacttctacctgcgctgcctcggcaagaacggcgtcttcgtggacggggccttccagagacgcggcgcgcccgccctgcagctgcccaagcagtgtaccttccggtttcccagcacggccatcaagatccagttcacgtcgctctatcacaaagaagaggccccagcctccccgctgcggccactgtacccccagatctcccctctgaagatccacatcccggagccggacctccggagcatggtcagccccgtcccctccccgacgggcaccatcagtgtccccaactcctgcccagccagtccacgcggtgccggctcctccagttaccgctttgtgcagaacgtgacctcggacctgcagctggcagcagagtttgcagcaaaggccgcgtcggagcagcaggcagacacgtctggaggagacagccccaaggatgagtcaaagccgccgttctcctacgcgcagctgatcgtgcaggccatctcctccgcccaggaccggcagctgaccctgagcgggatctacgcccacatcaccaagcattacccctactaccggacggccgacaaaggctggcagaattctatccggcacaacctctctttgaaccgttactttatcaaagtcccacgttcccaggaggagcctgggaaggggtccttttggcgaatagaccctgcctctgaagccaagctcgtggaacaggcattccggaaacggaggcagaggggtgtctcctgcttccgcacccccttcgggcctctgtcctcaaggagcgctccagcttcgcccacacaccccgggctgatgtcccctcgctccggcggcctgcagaccccagagtgcctgtctcgggagggctcccccattccacacgaccctgagtttgggtccaagttagcttctgtcccagagtaccggtattcccaaagcgcacccggctcccccgtcagcgcccagccagtgatcatggccgtgcctccccgaccgtccagcctcgtggccaagcccgtggcctacatgcccgcctccatcgtaacctcacagcagcccgcgggccacgccatccacgtcgtgcagcaggcccccaccgtcaccatggtcagggtggtcaccacatctgccaactcggccaacggatacatcctcaccagccagggcgcggcggggggctcccatgatgcggcgggcgcagccgtgctggacctgggcagcgaggccagaggcctggaggagaaacccaccattgcgtttgccacaatccccgcggctggtggagtcatccagacggtggccagccagatggcccccggggtccccggacacacggtcaccatcctgcagcccgccacacccgtgaccctcgggcagcaccaccttccagtccgggccgtgacccagaacggaaagcatgcggttcccacgaacagtttagccggcaacgcttacgccctcaccagccctttgcagctccttgcgacccaagcgagttcatccgcgccggtggtggtcacccgggtgtgcgaggtggggcccaaggagccagcagcagccgtcgcggccacggccaccaccaccccagccactgccaccaccgcctctgcctccgcctcttccactggagagcccgaggtcaaaaggtcccgggtggaggagcccagtggtgctgtaaccacaccggctggagtgatcgcagctgccggcccccaggggccaggcaccggggagtgaggtcacctgcaacgcgggggagtgggactcacccagcggcgaccccgaagctggacccggcagctcaggcggccgcacccacagacggaggagaacagcccgcggcggcctgtgggcatcggcggcacctggacacacccagccctttccatttgatcgcctgccttcccgtggtttaagacaaaaacacataaacaagttcagacaactgattgtatgattctgggaattctttgctttcctttccttctccctcggcaccacctcctctccccaggcctccctgtcgggcatggggaggaggttggagctcagcatcttgaggaatgtgtcaagacagcccctccgctccgcgctgcacggccagccgcctttgtccgggaggacagacagaaacgcagcaaggcacacaccaaggctgccggggaggcccgggcaccggacagatgcctgttgggaagccaggagctgccgagccacggaccacctaacagcctctccgcccggaacgtgacatagagagtgttggcattaactcggggggtgtccgatttcacttcagaccccaagtttttctttgtttgtttaaacatggaattcagacttcattgtacacctgagacagacacaaaagggatcatgtatttttgaggattttacctgttgacgtctgatgaccggccgtaggtccagggttcccgctgggtttaatcccctcgaagagtaaacctgccgctctgtctgataacttcaagtaagagcagcggcttcctgggttggcgttcgcggtggaaggttcctaggatgaaaggtgagcctggatccgccggccgcagacatcgcgctgctggggacgattggggccgctgctctgcagaccagaccttcccgaattatccgtggctccgatgtcccggtgctgacggccacatggggacctaacagtgccaaacgccatctgctccagctgctttttcacccagttgcagagtcctcaccactcccacattgatctgctgttttcaattggaaccatttctcctgcctgaaactccagggcccctccctgggctgtccgtgagcaggagaccccaccccagcagcagtggtgagcaggcctgtgcctccacgcccagcccccgccaacgcgactggttttgtttgccacacggtgagaaccggaggacgggatgctccagccagttgggtggttctggggtccctgaggaagccccctcctgcacttccattaagacagccagtggttcctggatctttgtcaccaagcagcgttgagccagagctgtctaatgctgagcccagctcaggaaggagagaggagtccttcagtgtgtcttggagatgcgaagtgcgtcctcgtaaaggtcagctgtcagttttgctggccgctccggcgctggctctcctgtccgggaccacaacgagaaacagcgacagattcgacgcagagctccggaagtgcctgaggagcagtggttcttggaaatcgcccgtcctccgcatcacagcctctcaccagcaaagcagcctctgcccaggccctggcgggagagctgcagagggacccaggtgcctggagggcatttgagggaggtggctggacaggtgtctccctgaagaagaagggagaacacttttcaaagtgattccgaggcagtgcgggaggacacacgtgctgtgcagtggagtggggtcgcccgtggcccccatcagagtccccgtcccccaggacaagtgcagaacctctgtgggccccctccttccacctagatagagaaaaccccttgttcggtttccttcccgtgtcccgttgtttttctaagccccccgaattgagtcgtttctatggcactaacctttccatgggaaataagctctttgtggaagtccgtacctgttgccctgggtgaggtttcagagaaacgggggcaggatgaacacagccggctgtcctgggtgcagttacgtccgtggagggtgagagattgcgccccgttccacacttgtgtcgcctgctgttgtctgtgggccttttctttccgtggtgcctggtgtgtgcgtgcatggcgtgagagaacggggggtgggggttggaggtggctccccgacaccggtgcctgtgtggcctgagccggcgccctcccgggagcgcccgtcacggggggcctctgtgattacctgctgctgctctctcccgcgtggtgactatatgtcctcagggctgcctgtggccaccctgatgggagacctctgtttgcttctgggccactgcaggttggcctcctcaatacaagctgatgtctgcagggagcgccgcgtgctgggattgcaccacgtgttggtcacaaatcgaggtcgccttttggcctggtctgctcaggctggccctgacccacgtggtttcctggcttctgagacgcagcgcattcttcctgttagcggtagcgttctctgatttcactgcttcattgccaagggcgtggaaagggggtggtggatggagccgggaggtggcgagcacaggaccccggggctgcattctgccgtgtggggttctgcactgtctagcttctgcggggactgcaaagagggatgaagggacgtggtcctaggggtcggctcagactcggagcagggcagggagaggagggcaaggagaggaggcctgggtcctggatccactgctctgggctcataaccatgagattttgaaagagtttttggtcatctgagcaggtaccatgcctggctcatgccggaacttgtcttggaaccggtagccagaggcccaggaagggacagggcccaaaagggttgcatgtcccggccacaaagccctccctgtgtgccctgagccagcccagcaagcgcctcccagccaggcgctttcgcagaagcaagagcacaggccagggggaccgggagagcctcagcccccagcctgggcggcctgtgaccctgagccgtgtggagccaggacccaagaaccttctctaggttctcaagggtgagctgacccgggcaatgtgcaggaatgtggggagcaaaagtagctgattccagccccgttctggggtcactggggaggcagaggctgagggcctgttctctggtcaccagggactgggggcacggtccacagcggatgagaacagcaggtcacagtagtggctttgggaagggcccctcctgctttgccctgttcggaaaggggctccctcagagcccctgggcccagtaacccgcttctgtctcctgactcctgctggataaattgccaggtttatcaaatacaagaaaacacctgctttggctaggaggtaagtcccaaaaagaacgtcttaagtagagcaaaggcatccaccgaggccatttggtggcccctgggaagtggggaagcagggcctgagcgtccccaggctgctagggcagcagctggctcagggcacactctctcgtgccagcttctgccaccagcccagtgtccacggagccgcggggccagaggagctcagggagacctggctgtctagggcatggtacccagtatcccggtgtgtgcccatcctcagccacttgtgtctttctttccatgtgggagttctcccggtgacacctgccctccgttgagggtggaatctgtcactcatgcctttgagggacccagatggaccatccctcttctgcttgctttctacattcctaaaaacctcaacgttaatccctcaccagtcgggccgagtgtggcctcatggttctgccgcggcccagtcttctcccactggcttcacgctagagggcgccatgcgctctgggtgaaatgagacgctggtgtggggtccccatgtagagaccctcaggtccctatccagagaccctccaggcagtgctgggaagacactggtggcggggaccatgaccaggcgggtggagccatgtgtgtctcacacctgccgcccctcactttccttcccgaggtctggtaggtcctctttgggatttgctgtttatttgtatctcccttttctttgatttaagaacaatgccaagtgaaaaagctgggaatgaatttctgagttgctgagtgttccctgctcctaggtaccacgctctgtgcttctcaggcagggaggagatggattcggtggagttgggccaggacgggggcttcaccctgccccctccagactgccgaagcccccaagaagttttgagcccagctgggcctcgcctccccggctcctgggtccattttctgtactggtttgagatcacaggcatcattcagcgaatgctcttgtgtcctctgcataaagagggccctccctggagcacccccggggagctgggactctccagaaagccccgggtgagggctccgtcttgagagagagagaaatcccttctttgggcgattcagtgagttcaggaggaggaggaagcttttccttggctttgaaatcagtgtttttatggagacaaagaacagacctcagtgggaaaaatgaaaacgtaatggaacacggggaggtgtcggagaagaaaggattttccccttcgctttcagagccggcgggagtgcaggtctgttttgcttcagaagcctcacattctgctttgcccttgagtgacttcatgcgggatgaggaactgttgacccctctagagaggacaccccaagtccatcctgggctcctcctcacccctctgagaaagcccccctaaaaaaaggcttcagagtcaccggcatgccgcctcacgttgcaggacggaatcgcgcgctcctcacgctggagtaagttacgaaacatgatcgtcaggctctttgcaaacgcagagccccagaacgctggatggaggcctcctcggccctgcgggcggcctggctgcggtaggtctgctgcaaggagccaccacggggactgcgccacactcctgatgaaaacgtgtttacccacagcctcgcctcgagcctccttgacaataccgctgcttcaaagcaatattatttaatgagaatactttacattgctcacatgtgctgctatgaagacaggattagtctgtagacgggactcagctccagaggttcctgggtaatgtattgtggctcttggaaatgagggtagaatttgaaatataacaaatggtctctcgcccggttctgtcccttatttttagattgttttcctgcatcttacaatttccttttcttttcaaagttcctttctccaggcctgtttttcagtgctcaggacacggttttcatcacatacttactgtttttttggttgggttttgatacgaaaagctgctacgtttggtgaccagagggagggtttggaatctgtgctttgcaggggatctcggtgggtaccgcggcccctcgcagggtggcgagtggggtccgtgcctcgagaagggggcccttacccacaccgtgcggcttgaattctgtcggagttgaatctgtggaaaggattgtcccattagagctgctgcgtcctttcctctgtcctccctgtcacccaaaccccgaagtcacagctgcttagaagaatgggattttggggatacaaccacacacatttccctctggactgaaattttaaaaacagacccatttcactgacttctttttttttttttttttttttttttttttgagacggagtctcgctctgtcgcccaggctggagtgcagtggcgtgatctcggctcactgcaagctccgcctcccgggttcacgccattctcctgcctcagcctcccgagtagctgggactacaggcgcccgctaccacgcccggctaattttttgtatttttagtagagacggggtttcaccgtgttagccaggatggtctcgatctcctgacctcgtgatccgcccgcctcggcctcccaaagtgctgggattacaggcgtgagccaccgcgcccggcccactgacttctttagggaaaatagtttcagtcttgggttgtcttgtgagcccacgggcatgggaccctgtctctgctgggcttttccggccccgtcccagctcctcctcaggcagaggctgcagccctcagctctgctgctggatggaacatttcaaccccctccgggaaggtgggcagggtggagggcccagggctaggcctgccatgcaccatgagcaggggtgctacctgggtgtgtgaagttgggctggcttttcctggaggtgggtgagaaggctctccgggcaaatcagaaggccacgagagagagaggagcggggagagtggtgaggaggattcgtctctgactgatgaacctcgccgtgcctgtctgtcacatccaagtctgtgccagctgctgggaggtcagactcctgccctgagaaacagcccagtccttggagaatgaaaccctgagggtcagtgagtggaggccttccctcggggccagccattcccgggaggcctgagtgtgacctggaagctctgtgggtcaccaagactggcattttccttgtatttttgtgcagggctgaagtgagcgttcctcctctgaattggtgaggctttggaaattttttgtttcttctactcatcctaatggctggttttggctgcccggagtatcagagaatatcactaagagggcagtcagtttatttttaggcatctttctttctgtccagggagaaacccctcggaagaatcttagtcactctttgcacctgccctgtcattctcgccatggggaaaatgcgttgaaaagaaaaataccggggccagggagaagccgtgaatgtatttatttgctttggtgaagctgctgaacactggctgcggagggccccccgcccccatcccgcttcaggccccagtgacccagttgcgtcttaagttccatcgtccagatttcaggccaccagaggctgccaaaggtgactgaagcggtctccaagtcactctgtcaccactttttttttttttgagatggagtctcgctctatcgcccaggctggagtgcagtggcccaatctcggctcactgcaacctccgcctcccaggttcgagcgaattctcctgcctcaacctcccaagtagctgggattacaggcacctgccaccacacccggctaatttttgtatttctaatagagatgagagtgttaccatgttggtcaggctggtcttgaactcctgacctcaggtgatctgcccacctcaacctcccaaagtgctgggattataggcatgagccaccgcgcctggcctctgtcactttttttgctccttacccagtttttgttttttgttgttttgttttgttttagcgtgatactacaatggaaagactcctagttggttattctttatctcggattcttttttctggaattgtttgctcatttgagtggttggtggtttgccctgtgtcagacacggtgaaaagagtgcaggaaagctggggccaggggaagcgaagtggcttcaatccgggctgacagccaagaagagttttcctcccttcggtgacagggcctgcccctccgagtctagaggtaaaagcagcttctagaactggcccctaagtctccaaatgtgttggctaagctgaaatgagagactctgaattagagtttttgtttgtttgtttgttctctgcatgaagttcacaggcctgtatggatgttaaattgtgtctatagcctctaaatctccaggttaactggtccagattttttttttttaatcagtaacaatgggaatttaaaatcaaatatttggccaggtgcggtggctcatgcccgtaatcccagcactttgggaggccgaggcaggcgcatcacctgaggagtttgagaccagcctgaccaacatggtgaaatcctgtctctactaaaaatacaaaaaattagccaggcgtggtggcgtgtgcctgtaatcccagctaccagggaggctgaggcatgagaatcgcttgaacctgggagatggaggttgcagtgagccgagatcatgccactgcactccagcctgggcaacagagggagactctgtctcaaaaataataatcaaatcaagtattttaagtttggctcttctttttttcaagaaaggctttttggatacctagaataccttcatgtatgtggcttgatttctgtttcaggaaaaggggggcgggaggagagacaacagccgtgttccagagtctgtcctgagatgtcgctgagtccagacacttgggctgcacgtgccctgcagatgacaaaggccggcagctcagcacacgtgcaggaggggttaaagccaatattgagtttttgttcttgttgttttaatctgaacgattattctcctgtaaaaataatttgggaggggcgggtgttgttcggtgtgtgtgtgtgtgtgtgtgtgtgtgtgtgtgtgtgtatttttttttttacagtggcgcctgtctaaagtatttttcacaacatgtttgataatcagtgctttaaaaagcagcagtgtcctatgaagtggaaatgtcagttctagagcattggatgtgaagttctggtcatgtcaccttgcgtgtctcaccctggaggagtgaaggtgggcgcccggcgggggggtgtggctgcaccccagcaccgggagggggcacgcacgacaccagaggaagggacagccccacccatgtcaacagcaggcaacctgtgttttcatttcaagtgggatacagtatttttttaataaggagccatacttttttttaagagtttgagatctgaatgtgatttctaattgtatcagacgttaatgttttaaagctataacaaagtttaaaatttctactttttgtttttcatttattttaactgttcttttatctattaaattgttgtatgtggatggggaagttttgtttctcctcttagcatttgtttctataaccagaaataaaattctatattaaagaaatgac

SEQ ID NO: 135014 - DNA, 758 bp, Homo sapiens
  Payload ID: 6388
  Gene Symbol: FOXK1
  Gene Name: forkhead box K1
  ENST ID: ENST00000460979
  CDS Start-End: 1-328
cacggccatcaagatccagttcacgtcgctctatcacaaagaagaggccccagcctccccgctgcggccactgtacccccagatctcccctctgaagatccacatcccggagccggacctccggagcatggtcagccccgtcccctccccgacgggcaccatcagtgtccccaactcctgcccagccagtccacgcggtgccggctcctccagttaccgctttgtgcagaacgtgacctcggacctgcagctggcagcagagtttgcagcaaaggccgcgtcggagcagcaggcagacacgtctggaggagacagccccaaggtctgagcccacctggcgccgtggtgcacctggtgacccaggatcgggccatagtgacccggcgcgggcggcacagacagcccagggcctgcgggcgtgtgctcgaggtggtctcagcccacagggaatggagccgcagctggcggtagagccgtcggccctttctcgttttcgtgcccaaatcatccccgttggtcatttgctggtgacaggggtggcgccgtcaccgagggcccctcccgccacgctccttgttcatctgccgctggcagcccggcgtcaaagccttcatacagcccttgagcaggatggcgttctccttataactttgtcttagttcatttttgtccaatagctgttttcaaattgatttctggaagaggtgagaaatttcagaattaaattataataaaaccgaagttttccttcccatgag

SEQ ID NO: 135015 - DNA, 5265 bp, Homo sapiens
  Payload ID: 6389
  Gene Symbol: FOXK2
  Gene Name: forkhead box K2
  Uniprot ID: Q01167
  ENST ID: ENST00000335255
  CDS Start-End: 175-2157
cggccgcgcgtgctcccgcccctcgccgccgctcgctcgctcgccggccggcggcctccgctcggccccctccctcagctccggtgcgcggcggccgacgacccgcgcggcctgggcctcggcccgcgccaccggcgcccgcgcggagcggcccgggggccctcacgcaggcccatggcggcggccgcggcggcgctctcgggcgcgggcacgccacccgcgggcggcggggccgggggcggcggggccgggggcggcgggtccccgccgggcggctgggccgtggcgcgcctggagggccgcgagttcgagtatctgatgaagaagcgctcggtgaccatcggccgcaactcgtcgcagggctcggtggacgtgagcatgggccactcgagcttcatctcccggcgccacctcgagatcttcacgcccccgggcggcggcggccatggcggggccgctccggagctgccgcccgcgcagcccaggcccgacgccggcggcgacttctacctgcgctgcttgggcaagaacggggtattcgtggacggcgtgttccagaggcgcggggcgccgccgctgcagctgccgcgcgtgtgcacattcaggttcccgagcacaaacatcaagataacgttcactgccctgtccagcgagaagagagagaagcaggaggcgtctgagtctccagtgaaggccgtacagccacacatctcgcccctgaccatcaacattccagacaccatggcccacctcatcagccctctgccctcccccacgggaaccatcagcgctgcaaactcctgcccctccagcccccggggagcggggtcttcagggtacaaggtgggccgagtgatgccatctgacctcaatttaatggctgacaactcacagcctgaaaatgaaaaggaagcttcaggtggagacagcccgaaggatgattcaaagccgccttactcctacgcgcagctgatagttcaggcgattacgatggctcccgacaaacagctcaccctgaacgggatttatacacacatcactaaaaattatccctactacaggactgcggacaagggctggcagaattcaattcgccacaatctctctctgaatcgttatttcatcaaagtgccgcgttcccaggaagaaccaggcaaaggctcgttctggaggatagacccagcctctgaaagcaaattaatagaacaggcttttaggaaacgacggcctaggggcgtgccctgctttagaacccctctgggaccgctctcttctaggagtgccccagcctctcccaatcacgcgggagtgctgtctgctcactctagtggcgcccagacccctgagagcctgtcgagggaaggttcgccggcccccctggagcctgagcctggcgctgcacagcccaaactcgctgtcatccaggaagcccggtttgcccagagcgccccagggtcacctctgtccagtcagccagtcttaatcaccgtccagcggcagctaccacaggccatcaagcctgtcacctacactgtggccaccccagtgaccacctcgacctcccagccacccgtcgtgcagacggttcacgtcgtccaccagatcccagcggtgtcggtcaccagtgtggccggactggccccagcgaacacgtacactgtctctggacaagctgtggtcaccccggcagccgtgctggcccctcctaaggcagaggcccaggagaatggagaccacagggaagtcaaagtgaaagtagagcctattcccgccattggccacgccacgctcggcactgccagccggatcattcagacggcacagaccaccccggtccagacggtgaccatagtacaacaggcacctctaggtcaacaccagctaccaataaaaactgtaacacaaaacggcactcacgtggcatcagtccccactgcggtccacggccaggtgaacaatgccgcggcgagtcctttgcacatgttggcaacacacgcatccgcatcggcctccctgcccacaaagcgccacaacggtgaccagccggagcagccggagctgaagcggatcaagacagaagacggcgagggcatcgtcattgccctgagcgtggacacgccaccggcagccgtaagggaaaagggtgtccagaactagcgaccgggagagcttttctttaacgatatcaactctgtggtgccaaaaggagacgcggcctcccgccagcactcgggggtgcagggccctgtggttggacttcacctctcagcactgaaaacccaaaacccagctggccttaacactccttaaagacagaagtcacacttgaacaaaacccacacacaacaaaacctgatttgggagacggtgtctccactgagcacctgctgggctgagcttctacctacgagtgaaactctgtcctcccgcgaggaccaggcatcgctgtgtgaggacggcacggccagcgcctgctgtgagtgggtctcccaagactaggcctcaggacgcggggggagccatccccgccgccctcacaggacccaccaggcagcggagacatgtggaattagagtattttgaggtgtcctttctttacaaaataatggggtcttgggcatttcacatcactccatttctactgagactttcagaatcacacaggccctttccgtggatttcatttggggcaaagaaacaacgtagttttgtttttgttttcagcctatggaatgatttccttttgtctgtcttgttcaagttcagacgaagctactctggcatctgcacatttccgtgttacagcagctgcctgatgaattttatccacctccatttcagcatgtggctcgcgtggacaggtggacggacgctgtggccgcatggaaccttgagaacccagggacgagccagtgccgggaaggaactgccgggactcaccgagctgcacttaactgttctctttctggctattttttgttgtttgtttctttgtgttgactttgtccctggcaaaattttccactctgagtaaaacaagtctcctaagtattgtgtatgtttaaaacgacagaaccatttctacttcatttggaaaaagattcagtcttttatcacaggcccttttgaaactcagatcccaggtctctccgtggtatgtttgtatttggggtgtccctccggctctaggcggcctctgacctgctgtctactccccaccttcggtgagcggccgccatggtggagcagggtccgagccacgtcctgcagggcacgtctggggcatttcctgttttgtggtaggaaatgtccctgacctttcagaaccgaacccaatcctgaggctgactcctctacggaaaatgaggacaggacgggggtgagggaatgagagtgggaggtccctgcacctcctcgcccggctcctcaggaagaaaaccgctggcccttcccgagtgtgccggccgagggccgagggccgtgcacatggggagagggcgtcagcctgatggctgagcttttaaatgtcatcatcataacattatttatttaaatgtagttattttggtatttaatttttttttagagaggaaaaaacctgtattttcctggtgggatgaaatagggatgaaatggctcagaatggtatatttaggcaattttaaaacatttattatttacataaagaccaaatatgatgaatctgttccgtgaattgtgtcggccctcagcatggggctggggcagcgtcactgcggtgacgcccattgaaaggtatgaaatgactgcacactagctggattatcactcagccgtttaagaaataaaagcaaaaccatcacgtgactgagaccgtgtgtgtgaccgcagcaaagcgcagcgtgtggatggatcagagcccctcggtgcagctgtctgcatcttccaagcactttacagataccttggaatgtatatttttgtcttcttactcagaaggtttgcagtttgtaaaataatcaggattctgctctgtcctgtgtgtggggtcagctccctccacagagggctccagctctgttggtcacagctgatggggttctctgattgataggagacgagctcttgagctctaaggaacagtgaggtcgccggtggggagcttggctgggacaccaagcaaatgcatcgtatgtccccttggagacgtttttatgcagctgtgtatgttactatccagaaggagtcgggggtagactttcccgtgtaagctcagtccataaactggttacttctgatcctggaacgtggacttcacatgataggtctggatctgtttctgttgggatcacaggtaaggaaaatgtccattcaaatggtaaagaagggaggagggtgttttttttttttttttttgccgtaggcaccattctgcatcttgaacccagactgaagtgtgcctctcacagatggaaggtgcacacgctcctgtctcctcctcactctgccacgttcacttggctttttcattggtacctaggaatttaagaatatcgaagcgagagcagtaacaaaccatagatgagcagactcccacaccgggttttcttgcccgtctttaaggcactgtttctaaattttgaacttagctctgaatccccaagaacttgagcacagcaagggttgctgagctgctgtcgccgcagccctggcccctggtgctggagctgcagcacctttgggagaggtcctgcgtcgtcctcagctgcgtcgctgtgaactcccgctctccactgtgttcctcagtgtctgcttttcaggaagtctgctgtgacctttgcccaacttctgagctcctcagggactaggaacaatttcagtagctttgccctgaaccaaacgagaaaacaaaagggaactcccgtatgacccacgtcacgtggtgcactcagagtgtgtgcggcatgatcctcggttgctcctcctctcactttagtagagtacgcggtggacagctgatctccttcagtcgtctacccacttccgtcattgtcctccgctagaataacagagtagttggtagtcatggccagaaggggggtgggggcagtgtgaggacttggggtttctgtgctgtgtgacacaaggagataagtgacaatcttgaagtcctaacttccactattctagaaagtatagtggtgatttgtgtgcaaagatttgaagttttaaaaaagtaccaagttcctgaaattcaataaaatatttttattaattttaatggaa

SEQ ID NO: 135016 - DNA, 786 bp, Homo sapiens
  Payload ID: 6389
  Gene Symbol: FOXK2
  Gene Name: forkhead box K2
  ENST ID: ENST00000526383
  CDS Start-End: 26-786
gcttcgtgtgcagagcccagcagagatggcggagccacttggcatccaagcaccttgccctgtttgtgtccacctggttctgccgtgcacattcaggttcccgagcacaaacatcaagataacgttcactgccctgtccagcgagaagagagagaagcaggaggcgtctgagtctccagtgaaggccgtacagccacacatctcgcccctgaccatcaacattccagacaccatggcccacctcatcagccctctgccctcccccacgggaaccatcagcgctgcaaactcctgcccctccagcccccggggagcggggtcttcagggtacaaggtgggccgagtgatgccatctgacctcaatttaatggctgacaactcacagcctgaaaatgaaaaggaagcttcaggtggagacagcccgaaggatgattcaaagccgccttactcctacgcgcagctgatagttcaggcgattacgatggctcccgacaaacagctcaccctgaacgggatttatacacacatcactaaaaattatccctactacaggactgcggacaagggctggcagaattcaattcgccacaatctctctctgaatcgttatttcatcaaagtgccgcgttcccaggaagaaccaggcaaaggctcgttctggaggatagacccagcctctgaaagcaaattaatagaacaggcttttaggaaacgacggcctaggggcgtgccctgctttagaacccctctgggaccgctctcttctaggagtgccccagcctctcc

SEQ ID NO: 135017 - DNA, 805 bp, Homo sapiens
  Payload ID: 6389
  Gene Symbol: FOXK2
  Gene Name: forkhead box K2
  ENST ID: ENST00000531030
  CDS Start-End: 290-805
acagctgcgctcagctcagagccagcttcgtgtgcagagcccagcagagatggcggagccacttggcatccaagcaccttgccctgtttgtgtccacctggttctgccgtgagaacccctgggttttaagccgttaggctggtgcacattcaggttcccgagcacaaacatcaagataacgttcactgccctgtccagcgagaagagagagaagcaggaggcgtctgagtctccagtgaaggccgtacagccacacatctcgcccctgaccatcaacattccagacaccatggcccacctcatcagccctctgccctcccccacgggaaccatcagcgctgcaaactcctgcccctccagcccccggggagcggggtcttcagggtacaaggtgggccgagtgatgccatctgacctcaatttaatggctgacaactcacagcctgaaaatgaaaaggaagcttcaggtggagacagcccgaaggatgattcaaagccgccttactcctacgcgcagctgatagttcaggcgattacgatggctcccgacaaacagctcaccctgaacgggatttatacacacatcactaaaaattatccctactacaggactgcggacaagggctggcagaattcaattcgccacaatctctctctgaatcgttatttcatcaaagtgccgcgttcccaggaagaaccaggcaaaggctcgttctggaggatagacccagcctctgaaagcaaattaatagaacaggcttttaggaaacgacggcctaggggcgtgccctgctttagaacccct

SEQ ID NO: 135018 - DNA, 3462 bp, Homo sapiens
  Payload ID: 6389
  Gene Symbol: FOXK2
  Gene Name: forkhead box K2
  Uniprot ID: Q01167
  ENST ID: ENST00000473637
  CDS Start-End: 177-2021
cgcggccgcgcgtgctcccgcccctcgccgccgctcgctcgctcgccggccggcggcctccgctcggccccctccctcagctccggtgcgcggcggccgacgacccgcgcggcctgggcctcggcccgcgccaccggcgcccgcgcggagcggcccgggggccctcacgcaggcccatggcggcggccgcggcggcgctctcgggcgcgggcacgccacccgcgggcggcggggccgggggcggcggggccgggggcggcgggtccccgccgggcggctgggccgtggcgcgcctggagggccgcgagttcgagtatctgatgaagaagcgctcggtgaccatcggccgcaactcgtcgcagggctcggtggacgtgagcatgggccactcgagcttcatctcccggcgccacctcgagatcttcacgcccccgggcggcggcggccatggcggggccgctccggagctgccgcccgcgcagcccaggcccgacgccggcggcgacttctacctgcgctgcttgggcaagaacggggtattcgtggacggcgtgttccagaggcgcggggcgccgccgctgcagctgccgcgcgtgtgcacattcaggttcccgagcacaaacatcaagataacgttcactgccctgtccagcgagaagagagagaagcaggaggcgtctgagtctccagtgaaggccgtacagccacacatctcgcccctgaccatcaacattccagacaccatggcccacctcatcagccctctgccctcccccacgggaaccatcagcgctgcaaactcctgcccctccagcccccggggagcggggtcttcagggtacaaggtgggccgagtgatgccatctgacctcaatttaatggctgacaactcacagcctgaaaatgaaaaggaagcttcaggtggagacagcccgaaggatgattcaaagccgccttactcctacgcgcagctgatagttcaggcgattacgatggctcccgacaaacagctcaccctgaacgggatttatacacacatcactaaaaattatccctactacaggactgcggacaagggctggcagaattcaattcgccacaatctctctctgaatcgttatttcatcaaagtgccgcgttcccaggaagaaccaggcaaaggctcgttctggaggatagacccagcctctgaaagcaaattaatagaacaggcttttaggaaacgacggcctaggggcgtgccctgctttagaacccctctgggaccgctctcttctaggagtgccccagcctctcccaatcacgcgggagtgctgtctgctcactctagtggcgcccagacccctgagagcctgtcgagggaaggttcgccggcccccctggagcctgagcctggcgctgcacagcccaaactcgctgtcatccaggaagcccggtttgcccagagcgccccagggtcacctctgtccagtcagccagtcttaatcaccgtccagcggcagctaccacaggccatcaagcctgtcacctacactgtggccaccccagtgaccacctcgacctcccagccacccgtcgtgcagacggttcacgtcgtccaccagatcccagcggtgtcggtcaccagtgtggccggactggccccagcgaacacgtacactgtctctggacaagctgtggtcaccccggcagccgtgctggcccctcctaaggcagaggcccaggagaatggagaccacagggaagtcaaagtgaaagtagagcctattcccgccattggccacgccacgctcggcactgccagccggatcattcagacggcacagaccaccccggtccagacggtgaccatagtacaacaggcacctctaggtcaacaccagctaccaataaaaactgtaacacaaaacggcactcacgtggcatcagtccccactgcggtccacggccaggtgaacaatgggccccttggcctcagaaggcccccatgtgccagctcagactggagttgcctcagttgacacagcaggccccatccagacagaccagcaggtgcttctggagacaagagcaaagccttttccggcagcccggaacctgggatgagaaacgacaggtggaaggttgtccagagacacctacagcgtggatgctgttccgagtcagcgtaggagaaaggccactggaaaccagagtcacactgcgcgtctgtgcatctctggcctaccgcagtggccccggctgtctgcacattttttgtagacacattagagtcggttgaggccacacctgcggccacagactgcgaccgcgattgcagggaggagcatctgaggtggtcacggggtttgcccagctcacaccaactgcagccgcggcgagtcctttgcacatgttggcaacacacgcatccgcatcggcctccctgcccacaaagcgccacaacggtgaccagccggagcagccggagctgaagcggatcaagacagaagacggcgagggcatcgtcattgccctgagcgtggacacgccaccggcagccgtaagggaaaagggtgtccagaactagcgaccgggagagcttttctttaacgatatcaactctgtggtgccaaaaggagacgcggcctcccgccagcactcgggggtgcagggccctgtggttggacttcacctctcagcactgaaaacccaaaacccagctggccttaacactccttaaagacagaagtcacacttgaacaaaacccacacacaacaaaacctgatttgggagacggtgtctccactgagcacctgctgggctgagcttctacctacgagtgaaactctgtcctcccgcgaggaccaggcatcgctgtgtgaggacggcacggccagcgcctgctgtgagtgggtctcccaagactaggcctcaggacgcggggggagccatccccgccgccctcacaggacccaccaggcagcggagacatgtggaattagagtattttgaggtgtcctttctttacaaaataatggggtcttgggcatttcacatcactccatttctactgagactttcagaatcacacaggccctttccgtggatttcatttggggcaaagaaacaacgtagttttgtttttgttttcagcctatggaatgatttccttttgtctgtcttgttcaagttcagacgaagctactctggcatctgcacatttccgtgttacagcagctgcctgatgaattttatccacctccatttcagcatgtggctcgcgtggacaggtggacggacgctgtggccgcatggaaccttgagaacccagggacgagccagtgccgggaaggaactgccgggactcaccgagctgcacttaactgttctctttctggctattttttgttgtttgtttctttgtgttgactttgtccctggcaaaattttccactctgagtaaaacaagtctcctaagt

SEQ ID NO: 135019 - DNA, 571 bp, Homo sapiens
  Payload ID: 6389
  Gene Symbol: FOXK2
  Gene Name: forkhead box K2
  ENST ID: ENST00000575578
  CDS Start-End: 1-388
caccccggcagccgtgctggcccctcctaaggcagaggcccaggagaatggagaccacagggaagtcaaagtgaaagtagagcctattcccgccattggccacgccacgctcggcactgccagccggatcattcagacggcacagaccaccccggtccagacggtgaccatagtacaacaggcacctctaggtcaacaccagctaccaataaaaactgtaacacaaaacggcactcacgtggcatcagtccccactgcggtccacggccaggtgaacaatggtaagacatgctggtcggtggctccccgtggctgtgggtactgggagcagagccccttctcactcgtggtttcggttctgactgtaacaattttagcttttgtctgaggcaatgtttgcatttcgaagctgcaggaaatctagtcatgctggggaagtggtcgtggagtcggccgtcatgggattcccgtgggaggacctgcctgaaaagagatgagagtttctaatacattgagagggaaaaatactctcgcctcttgtagatttcctgggtgtggcctggaagcggcc

SEQ ID NO: 135020 - DNA, 3450 bp, Homo sapiens
  Payload ID: 6389
  Gene Symbol: FOXK2
  Gene Name: forkhead box K2
  ENST ID: ENST00000622867
  CDS Start-End: 177-2009
cgcggccgcgcgtgctcccgcccctcgccgccgctcgctcgctcgccggccggcggcctccgctcggccccctccctcagctccggtgcgcggcggccgacgacccgcgcggcctgggcctcggcccgcgccaccggcgcccgcgcggagcggcccgggggccctcacgcaggcccatggcggcggcccggcgggctctcggggcgggcacgccgcgggcgcggggccgggggcggggggccgggggcggcgggtcccgccgggcgctgggccgtggcgcgcctggagggccgcgagttcgagtatctgatgaagaagcgctcggtgaccatcggccgcaactcgtcgcagggctcggtggacgtgagcatgggccactcgagcttcatctcccggcgccacctcgagatcttcacgcccccgggcggcggggccatggcggggccgctccggagctgccgcccgcgcagcccaggcccgacgccggcggcgacttctacctgcgctgcttgggcaagaacggggtattcgtggacggcgtgttccagaggcgcggggcgccgccgctgcagctgccgcgcgtgtgcacattcaggttcccgagcacaaacatcaagataacgttcactgccctgtccagcgagaagagagagaagcaggaggcgtctgagtctccagtgaaggccgtacagccacacatctcgcccctgaccatcaacattccagacaccatggcccacctcatcagccctctgccctcccccacgggaaccatcagcgctgcaaactcctgcccctccagcccccggggagcggggtcttcagggtacaaggtgggccgagtgatgccatctgacctcaatttaatggctgacaactcacagcctgaaaatgaaaaggaagcttcaggtggagacagcccgaaggatgattcaaagccgccttactcctacgcgcagctgatagttcaggcgattacgatggctcccgacaaacagctcaccctgaacgggatttatacacacatcactaaaaattatccctactacaggactgcggacaagggctggcagaattcaattcgccacaatctctctctgaatcgttatttcatcaaagtgccgcgttcccaggaagaaccaggcaaaggctcgttctggaggatagacccagcctctgaaagcaaattaatagaacaggcttttaggaaacgacggcctaggggcgtgccctgctttagaacccctctgggaccgctctcttctaggagtgccccagcctctcccaatcacgcgggagtgctgtctgctcactctagtggcgcccagacccctgagagcctgtcgagggaaggttcgccggcccccctggagcctgagcctggcgctgcacagcccaaactcgctgtcatccaggaagcccggtttgcccagagcgccccagggtcacctctgtccagtcagccagtcttaatcaccgtccagcggcagctaccacaggccatcaagcctgtcacctacactgtggccaccccagtgaccacctcgacctcccagccacccgtcgtgcagacggttcacgtcgtccaccagatcccagcggtgtcggtcaccagtgtggccggactggccccagcgaacacgtacactgtctctggacaagctgtggtcaccccggcagccgtgctggcccctcctaaggcagaggcccaggagaatggagaccacagggaagtcaaagtgaaagtagagcctattcccgccattggccacgccacgctcggcactgccagccggatcattcagacggcacagaccaccccggtccagacggtgaccatagtacaacaggcacctctaggtcaacaccagctaccaataaaaactgtaacacaaaacggcactcacgtggcatcagtccccactgcggtccacggccaggtgaacaatgggccccttggcctcagaaggcccccatgtgccagctcagactggagttgcctcagttgacacagcaggccccatccagacagaccagcaggtgcttctggagacaagagcaaagccttttccggcagcccggaacctgggatgagaaacgacaggtggaaggttgtccagagacacctacagcgtggatgctgttccgagtcagcgtaggagaaaggccactggaaaccagagtcacactgcgcgtctgtgcatctctggcctaccgcagtggccccggctgtctgcacattttttgtagacacattagagtcggttgaggccacacctgcggccacagactgcgaccgcgattgcagggaggagcatctgaggtggtcacggggtttgcccagctcacaccaactgcagccgcggcgagtcctttgcacatgttggcaacacacgcatccgcatcggcctccctgcccacaaagcgccacaacggtgaccagccggagcagccggagctgaagcggatcaagacagaagacggcgagggcatcgtcattgccctgagcgtggacacgccaccggcagccgtaagggaaaagggtgtccagaactagcgaccgggagagcttttctttaacgatatcaactctgtggtgccaaaaggagacgcggcctcccgccagcactcgggggtgcagggccctgtggttggacttcacctctcagcactgaaaacccaaaacccagctggccttaacactccttaaagacagaagtcacacttgaacaaaacccacacacaacaaaacctgatttgggagacggtgtctccactgagcacctgctgggctgagcttctacctacgagtgaaactctgtcctcccgcgaggaccaggcatcgctgtgtgaggacggcacggccagcgcctgctgtgagtgggtctcccaagactaggcctcaggacgcggggggagccatccccgccgccctcacaggacccaccaggcagcggagacatgtggaattagagtattttgaggtgtcctttctttacaaaataatggggtcttgggcatttcacatcactccatttctactgagactttcagaatcacacaggccctttccgtggatttcatttggggcaaagaaacaacgtagttttgtttttgttttcagcctatggaatgatttccttttgtctgtcttgttcaagttcagacgaagctactctggcatctgcacatttccgtgttacagcagctgcctgatgaattttatccacctccatttcagcatgtggctcgcgtggacaggtggacggacgctgtggccgcatggaaccttgagaacccagggacgagccagtgccgggaaggaactgccgggactcaccgagctgcacttaactgttctctttctggctattttttgttgtttgtttctttgtgttgactttgtccctggcaaaattttccactctgagtaaaacaagtctcctaagt

SEQ ID NO: 135021 - DNA, 3655 bp, Homo sapiens
  Payload ID: 6390
  Gene Symbol: FOXL1
  Gene Name: forkhead box L1
  Uniprot ID: Q12952
  ENST ID: ENST00000320241
  CDS Start-End: 219-1256
agggctaagtcaacatataacagcaaacttacaacaattatttaacatttttaaagccatgaagaagggacagagcacggagcggccggggagagcggcagagccagaggcagaggcacggctggctccccgggagggcccttgcggcgcggggcgcagtgcctaggccgcccgggtctcctgcgttgcggggagcgcagcgcaggctctcgcttgccatgagtcacctcttcgatccccggctgcctgccctggccgcctcgcccatgctgtatctgtacggtcccgagagacccggcctccctctggccttcgcccccgcggctgctctagctgcctcgggccgggccgagaccccgcagaagcctccctacagctacatcgcgctcatcgccatggcgatccaggacgcgcccgagcagagggtcacgctcaacggcatctaccagttcatcatggaccgcttccccttctaccacgacaaccggcagggctggcagaacagcatccgccacaacctctcgctcaacgactgcttcgtcaaggtgccccgcgagaaagggcggccgggcaagggcagctactggacgctggacccccgctgcctggacatgtttgagaacggcaactaccggcgccggaagaggaagcccaagccgggccccggggccccggaggccaagaggccccgcgccgagacgcaccagcgcagcgcggaggcgcagccggaggcggggagcggggcagggggctcgggccccgcaatctcccgcctgcaggcagcgcccgcgggcccctcgcccctcctggacggcccctctccgccggcgcccctccactggccggggaccgcgtccccgaacgaggacgctggtgacgctgcccagggcgcagcggccgtggcggtcggccaggcagcgcgcacaggggacggcccggggtcccctctgcgccccgcctcccgcagctctccgaagagctccgacaagtccaagagcttcagcatagacagcatcctggcgggaaagcagggccagaagccgccttcaggggacgaactcctagggggtgccaagcctgggcccggcggccgtctgggtgcctcgctcctggccgcctcctccagcctccgtccgcctttcaacgcttccctgatgctcgacccgcatgtccagggcggcttttaccagctcgggatccccttcctctcttatttccccctgcaggttcccgacacggtactccacttccagtaaagcaaacaatggcacggttcttctcccggcccagcctgagcctccgctgagcgaaaggccacagctcccaccggcggaggattttaaaatgatctttgcctgggtcggcctgtgggttcagggaagtgttaccaaccattgcgcgcaggtgggcgcgctcgcctgccttctccgaagcaaacttttcccagcaactgggagcagctacggagacttaaaagatccccgcggggtcgtgggcaccgcacgtgggccctgcagggacctccaccgcgggagattccttgacgtttgacctgtctaatggagtgtggtcttcagccgcccaccgcaggtcctgcgagtcccgggcatgcaagggcccgcagaccacccaaggcaggccttacaggtgcagttgaggtcctttcgaccggggacccccgtatgaccgtcgcctgcttcgctgttgccgtgtggctcaggccttggttttgagcccatctgggtggtgggtggtcacagctgggtttgttcctgacttgaagttgtggaggtgccgggggtgaccccgggttttcaggttttctgagagatgtagggcccgatgaggatttatgaccaatgttcagctatagaagctgataaccacccagagcaataacacttttattttaaacagagactttttctcttaatttctttctgggtagtaaaaagaacatgtttcattctttgcataaatacttgactctaagcattgacctttgaaaacgcttgtattaacaatttttattaagaaagtgcactctatataacatcttcttgcattacgatagctcattagccaatacacatgcagctatgtaagccacaacagcagacgtcctatccttttgcttttgtttttaagggatcaaaatatttcaagggataccatgaggaagggtgtgaggggaaggggatatgccttggacaatgtcagagttttgatttccatgttttttcaagatccaggcttggtggtcgctatatttttcagaaacagataatgaaagactacatttaatttaaaaagttgggtgaaacaaccaaaagcagatgcagagagagagagggatgaatgcgggggaagaataaggggacgtgctggtgtccgctggaaggggcctctctgggccccagaggacctgaggtttgatggcaggaatctcccagacactcctggcccccgcaccccctgcagccgcccgctcttccctcccagccctgccaggcaggcctggaggctgatactaaatcaaaaccttaaagaggtgactggcagtctggggaggggagaagaggtctgcaacgaaaatctaattaagaacattgagatgttcacaaccaagttcagcttgcagcttccggggaaatgcaaccgacctctatgccatctctagctgggtaatcttcgaggccctgaaatgcaattttctgaacctctaagtcacttttattttatgtcatgtgataaagacacaagtagtcacgcactattggaaataggttgggagggaggtctttaagatcgcttttaaaatagtttccaggacttgtctaaaaatgatgacaaactttgaatccagagggcctgttggtcaatgtgttggaaaggacatttcaggccggcagagtaattggataattcacaggcatagaggtgacttttggaaaattcattctcctatccatgctgaaccaggcttccacgactgggttctacccaggccagtgggaagactctgggaaacttcaggccagccttgattggaagaacttccaggaggagccattgctgagatccaggctcactgtgattcactgaaaatgtagcgaaagggctgtcactggatattttgctatcccaaactctcagcctctgtgaataaagttgttttttcattaacctctcagtgactggttcagtggattactggagggaaataaacaaacagtgtaataagaaagaggagactgggattatatctgggagtcgtgttagcatctcaggaggctctggcttctgaggggtaaacacacagatggaggggaaggagtggagaggatgccgggcccaggaagctgcctccatatcagaaagcacgatgagttaattctgccgtattgaatcggtttttaatctttcctttttcttttttgtgtttgtatgttatcttgggaggttttgttaatttgtgatggctatgttttgaagaagcaaataatttgatactgcagttttaaaagggtcgtattttaaagttactattccaaaaagtattgtacgaatgttacttttatgacacagaaaaaatgcagatgtatccactttgtgtgtttatacatgcataaagagaaattctatttaatcccaa

SEQ ID NO: 135022 - DNA, 592 bp, Homo sapiens
  Payload ID: 6390
  Gene Symbol: FOXL1
  Gene Name: forkhead box L1
  ENST ID: ENST00000593625
  CDS Start-End: 250-592
ggcgggagtttcggtagaggcagggatgtgcgtgctggacttcgggtgccgcgtggggagctccaggaggggctgtgggataggaagccatgaagaagggacagagcacggagcggccggggagagcggcagagccagaggcagaggcacggctggctccccgggagggcccttgcggcgcggggcgcagtgcctaggccgcccgggtctcctgcgttgcggggagcgcagcgcaggctctcgcttgccatgagtcacctcttcgatccccggctgcctgccctggccgcctcgcccatgctgtatctgtacggtcccgagagacccggcctccctctggccttcgcccccgcggctgctctagctgcctcgggccgggccgagaccccgcagaagcctccctacagctacatcgcgctcatcgccatggcgatccaggacgcgcccgagcagagggtcacgctcaacggcatctaccagttcatcatggaccgcttccccttctaccacgacaaccggcagggctggcagaacagcatccgccacaacctctcgctcaacgactgcttcgtcaaggtgccccgcgagaaag

SEQ ID NO: 135023 - DNA, 2917 bp, Homo sapiens
  Payload ID: 6391
  Gene Symbol: FOXL2
  Gene Name: forkhead box L2
  Uniprot ID: P58012
  ENST ID: ENST00000330315
  CDS Start-End: 419-1549
atcagaacagagcgaggctcctggcgcactagggactccaggaggcagctccgccagagacgcgggtcgtgcttcgggaaaccggggggcggggggaggggaagagcgcagaaaagaaaacccaccaaggcggggactggcctgagcggggaggggcggcgaggccggagcccctctctgttgggcggactccccatggccagaggctgagctccactcccgccggccgctccctaggggaaggggaaggagaggggagagcagcgacaggcctccagcaagcaagcgcgggcggcatccgcagtctccagaagtttgagacttggccgtaagcggactcgtgcgccccaactctttgccgcgccagcgcctggagcggagagcagaggcggcccggccgcggcgcgccggctttgtcatgatggccagctaccccgagcccgaggacgcggcgggggccctgctggccccagagaccggtcgcacagtcaaggagccagaagggccgccgccgagcccaggcaagggcggtgggggtggcggcgggacagccccggagaagccggacccggcgcagaagcccccgtactcgtacgtggcgctcatcgccatggcgatccgcgagagcgcggagaagaggctcacgctgtccggcatctaccagtacatcatcgcgaagttcccgttctacgagaagaataagaagggctggcaaaatagcatccgccacaacctcagcctcaacgagtgcttcatcaaggtgccgcgcgagggcggcggcgagcgcaagggcaactactggacgctggacccggcctgcgaagacatgttcgagaagggcaactaccggcgccgccgccgcatgaagaggcccttccggccgccgcccgcgcacttccagcccggcaaggggctcttcggggccggaggcgccgcaggcgggtgcggcgtggcgggcgccggggccgacggctacggctacctggcgccccccaagtacctgcagtctggcttcctcaacaactcgtggccgctaccgcagcctccctcacccatgccctatgcctcctgccagatggcggcagccgcagcggctgcagcagctgcggctgcagccgcgggccccggtagccctggcgcggccgctgtggtcaaggggctggcgggcccggccgcctcgtacgggccgtacacacgcgtgcagagcatggcgctgccccccggcgtagtgaactcgtacaatggcctgggaggcccgccggccgcacccccgcctccgccgcacccccacccgcatccgcacgcacaccatctgcacgcggccgccgcaccgccgcctgccccaccgcaccacggggccgccgcgccgccgccgggccagctcagccctgccagcccagccaccgccgcgcccccggcgcccgcgcccaccagtgcgccgggcctgcagttcgcttgtgcccggcagcccgagctcgccatgatgcattgctcttactgggaccacgacagcaagaccggcgcgctgcattcgcgcctcgatctctgagagcccaccgcatgccggtgcagacggatgcgaggatgcagggacgcgcgacgccggccccggtcgcagccgacgacgccgccgccagcctgacctcacaccctctgggcccgcctctggagccagcgcccagggtccctctgtgctttttcgctttcctaagctcctgtcgctcctctttgtcccctcagtttatgtcctcctgtgctcacctccctgacctctgtgaccttgcactcccctggcctgaagctgcctctctgcgcgctttctactgggctcgtctctttccggagccccagcgtctcctgcccaaattcaccgcggaaagggcccggggcggaggtgcgaccgggcgtcggcagcgcagacctcttggccttctctcacaggtcggtgcgctcgctctccgcgttccccgcccgactgccgtgcagtccatggctagacgcgccggacaggactgatggcgggaccgcgctgcccgagaaagggacggaccaatacgtgtgtttgctccgcgaaccctcttgaagctgttcagaagccgcttgccgcggggcccactaggcggggcgggggttgggacccagcgggagccggggcagcctggctccacggcctgtactcggtttacaccgcgggcgggcgcggagggaggctgcgtttcctccgctatcagtcccgtcgcttcgggcacctccgggccccggcggctggctaatgttttgtttgaaagatcggtggaactttttaagagagtatttaaaaaaaaaaaaaggaaaaaaaattcaccgggcaaccggggaagtattgtggccttggagtttgctaaatccaaatatgaaaatcaaaagctttagtattcctcatcttctcttctggaagatttgcgttagagtttttgttgggccttcaaaaagctgtgttcagagttaggagaatatatccaataaaagatggtttcgtctaccaattggggaagtttcaccctctccctatctgaagaaaaaaatcaaaaacaaatgtccccggatctttcgatgcaagtcctggaggcagggagatcactgcctgcctggcccacgctgctgggacggctcgtcctccctgctttttgtttttcaaacctcctgcttctcccaccttgggaaggagaaatgtgaaacccggcagcggccgacctaggcggtcttgtggcccggagccggcccggcccgaaaaccatagacctggttgtactgtagcttgttgtttgggggaccaaattttctagagagaactagagcacttttgttgtgtttttttgttttgtttttgttttttgccttgtcgattcccgaataaattttgtgttccttcttttaa

SEQ ID NO: 135024 - DNA, 3475 bp, Homo sapiens
  Payload ID: 6392
  Gene Symbol: FOXM1
  Gene Name: forkhead box M1
  Uniprot ID: Q08050
  ENST ID: ENST00000342628
  CDS Start-End: 115-2520
ggttggaggagcccggagcccgccttcggagctacggcctaacggcggcggcgactgcagtctggagggtccacacttgtgattctcaatggagagtgaaaacgcagattcataatgaaaactagcccccgtcggccactgattctcaaaagacggaggctgccccttcctgttcaaaatgccccaagtgaaacatcagaggaggaacctaagagatcccctgcccaacaggagtctaatcaagcagaggcctccaaggaagtggcagagtccaactcttgcaagtttccagctgggatcaagattattaaccaccccaccatgcccaacacgcaagtagtggccatccccaacaatgctaatattcacagcatcatcacagcactgactgccaagggaaaagagagtggcagtagtgggcccaacaaattcatcctcatcagctgtgggggagccccaactcagcctccaggactccggcctcaaacccaaaccagctatgatgccaaaaggacagaagtgaccctggagaccttgggaccaaaacctgcagctagggatgtgaatcttcctagaccacctggagccctttgcgagcagaaacgggagacctgtgcagatggtgaggcagcaggctgcactatcaacaatagcctatccaacatccagtggcttcgaaagatgagttctgatggactgggctcccgcagcatcaagcaagagatggaggaaaaggagaattgtcacctggagcagcgacaggttaaggttgaggagccttcgagaccatcagcgtcctggcagaactctgtgtctgagcggccaccctactcttacatggccatgatacaattcgccatcaacagcactgagaggaagcgcatgactttgaaagacatctatacgtggattgaggaccactttccctactttaagcacattgccaagccaggctggaagaactccatccgccacaacctttccctgcacgacatgtttgtccgggagacgtctgccaatggcaaggtctccttctggaccattcaccccagtgccaaccgctacttgacattggaccaggtgtttaagccactggacccagggtctccacaattgcccgagcacttggaatcacagcagaaacgaccgaatccagagctccgccggaacatgaccatcaaaaccgaactccccctgggcgcacggcggaagatgaagccactgctaccacgggtcagctcatacctggtacctatccagttcccggtgaaccagtcactggtgttgcagccctcggtgaaggtgccattgcccctggcggcttccctcatgagctcagagcttgcccgccatagcaagcgagtccgcattgcccccaaggtttttggggaacaggtggtgtttggttacatgagtaagttctttagtggcgatctgcgagattttggtacacccatcaccagcttgtttaattttatctttctttgtttatcagtgctgctagctgaggaggggatagctcctctttcttctgcaggaccagggaaagaggagaaactcctgtttggagaagggttttctcctttgcttccagttcagactatcaaggaggaagaaatccagcctggggaggaaatgccacacttagcgagacccatcaaagtggagagccctcccttggaagagtggccctccccggccccatctttcaaagaggaatcatctcactcctgggaggattcgtcccaatctcccaccccaagacccaagaagtcctacagtgggcttaggtccccaacccggtgtgtctcggaaatgcttgtgattcaacacagggagaggagggagaggagccggtctcggagaaaacagcatctactgcctccctgtgtggatgagccggagctgctcttctcagaggggcccagtacttcccgctgggccgcagagctcccgttcccagcagactcctctgaccctgcctcccagctcagctactcccaggaagtgggaggaccttttaagacacccattaaggaaacgctgcccatctcctccaccccgagcaaatctgtcctccccagaacccctgaatcctggaggctcacgcccccagccaaagtagggggactggatttcagcccagtacaaacctcccagggtgcctctgaccccttgcctgaccccctggggctgatggatctcagcaccactcccttgcaaagtgctcccccccttgaatcaccgcaaaggctcctcagttcagaacccttagacctcatctccgtcccctttggcaactcttctccctcagatatagacgtccccaagccaggctccccggagccacaggtttctggccttgcagccaatcgttctctgacagaaggcctggtcctggacacaatgaatgacagcctcagcaagatcctgctggacatcagctttcctggcctggacgaggacccactgggccctgacaacatcaactggtcccagtttattcctgagctacagtagagccctgcccttgcccctgtgctcaagctgtccaccatcccgggcactccaaggctcagtgcaccccaagcctctgagtgaggacagcaggcagggactgttctgctcctcatagctccctgctgcctgattatgcaaaagtagcagtcacaccctagccactgctgggaccttgtgttccccaagagtatctgattcctctgctgtccctgccaggagctgaagggtgggaacaacaaaggcaatggtgaaaagagattaggaaccccccagcctgtttccattctctgcccagcagtctcttaccttccctgatctttgcagggtggtccgtgtaaatagtataaattctccaaattatcctctaattataaatgtaagcttatttccttagatcattatccagagactgccagaaggtgggtaggatgacctggggtttcaattgacttctgttccttgcttttagttttgatagaagggaagacctgcagtgcacggtttcttccaggctgaggtacctggatcttgggttcttcactgcagggacccagacaagtggatctgcttgccagagtcctttttgcccctccctgccacctccccgtgtttccaagtcagctttcctgcaagaagaaatcctggttaaaaaagtcttttgtattgggtcaggagttgaatttggggtgggaggatggatgcaactgaagcagagtgtgggtgcccagatgtgcgctattagatgtttctctgataatgtccccaatcataccagggagactggcattgacgagaactcaggtggaggcttgagaaggccgaaagggcccctgacctgcctggcttccttagcttgcccctcagctttgcaaagagccaccctaggccccagctgaccgcatgggtgtgagccagcttgagaacactaactactcaataaaagcgaaggtggaca

SEQ ID NO: 135025 - DNA, 3315 bp, Homo sapiens
  Payload ID: 6392
  Gene Symbol: FOXM1
  Gene Name: forkhead box M1
  Uniprot ID: Q08050
  ENST ID: ENST00000359843
  CDS Start-End: 70-2361
cggcggcgactgcagtctggagggtccacacttgtgattctcaatggagagtgaaaacgcagattcataatgaaaactagcccccgtcggccactgattctcaaaagacggaggctgccccttcctgttcaaaatgccccaagtgaaacatcagaggaggaacctaagagatcccctgcccaacaggagtctaatcaagcagaggcctccaaggaagtggcagagtccaactcttgcaagtttccagctgggatcaagattattaaccaccccaccatgcccaacacgcaagtagtggccatccccaacaatgctaatattcacagcatcatcacagcactgactgccaagggaaaagagagtggcagtagtgggcccaacaaattcatcctcatcagctgtgggggagccccaactcagcctccaggactccggcctcaaacccaaaccagctatgatgccaaaaggacagaagtgaccctggagaccttgggaccaaaacctgcagctagggatgtgaatcttcctagaccacctggagccctttgcgagcagaaacgggagacctgtgcagatggtgaggcagcaggctgcactatcaacaatagcctatccaacatccagtggcttcgaaagatgagttctgatggactgggctcccgcagcatcaagcaagagatggaggaaaaggagaattgtcacctggagcagcgacaggttaaggttgaggagccttcgagaccatcagcgtcctggcagaactctgtgtctgagcggccaccctactcttacatggccatgatacaattcgccatcaacagcactgagaggaagcgcatgactttgaaagacatctatacgtggattgaggaccactttccctactttaagcacattgccaagccaggctggaagaactccatccgccacaacctttccctgcacgacatgtttgtccgggagacgtctgccaatggcaaggtctccttctggaccattcaccccagtgccaaccgctacttgacattggaccaggtgtttaagccactggacccagggtctccacaattgcccgagcacttggaatcacagcagaaacgaccgaatccagagctccgccggaacatgaccatcaaaaccgaactccccctgggcgcacggcggaagatgaagccactgctaccacgggtcagctcatacctggtacctatccagttcccggtgaaccagtcactggtgttgcagccctcggtgaaggtgccattgcccctggcggcttccctcatgagctcagagcttgcccgccatagcaagcgagtccgcattgcccccaaggtgctgctagctgaggaggggatagctcctctttcttctgcaggaccagggaaagaggagaaactcctgtttggagaagggttttctcctttgcttccagttcagactatcaaggaggaagaaatccagcctggggaggaaatgccacacttagcgagacccatcaaagtggagagccctcccttggaagagtggccctccccggccccatctttcaaagaggaatcatctcactcctgggaggattcgtcccaatctcccaccccaagacccaagaagtcctacagtgggcttaggtccccaacccggtgtgtctcggaaatgcttgtgattcaacacagggagaggagggagaggagccggtctcggagaaaacagcatctactgcctccctgtgtggatgagccggagctgctcttctcagaggggcccagtacttcccgctgggccgcagagctcccgttcccagcagactcctctgaccctgcctcccagctcagctactcccaggaagtgggaggaccttttaagacacccattaaggaaacgctgcccatctcctccaccccgagcaaatctgtcctccccagaacccctgaatcctggaggctcacgcccccagccaaagtagggggactggatttcagcccagtacaaacctcccagggtgcctctgaccccttgcctgaccccctggggctgatggatctcagcaccactcccttgcaaagtgctcccccccttgaatcaccgcaaaggctcctcagttcagaacccttagacctcatctccgtcccctttggcaactcttctccctcagatatagacgtccccaagccaggctccccggagccacaggtttctggccttgcagccaatcgttctctgacagaaggcctggtcctggacacaatgaatgacagcctcagcaagatcctgctggacatcagctttcctggcctggacgaggacccactgggccctgacaacatcaactggtcccagtttattcctgagctacagtagagccctgcccttgcccctgtgctcaagctgtccaccatcccgggcactccaaggctcagtgcaccccaagcctctgagtgaggacagcaggcagggactgttctgctcctcatagctccctgctgcctgattatgcaaaagtagcagtcacaccctagccactgctgggaccttgtgttccccaagagtatctgattcctctgctgtccctgccaggagctgaagggtgggaacaacaaaggcaatggtgaaaagagattaggaaccccccagcctgtttccattctctgcccagcagtctcttaccttccctgatctttgcagggtggtccgtgtaaatagtataaattctccaaattatcctctaattataaatgtaagcttatttccttagatcattatccagagactgccagaaggtgggtaggatgacctggggtttcaattgacttctgttccttgcttttagttttgatagaagggaagacctgcagtgcacggtttcttccaggctgaggtacctggatcttgggttcttcactgcagggacccagacaagtggatctgcttgccagagtcctttttgcccctccctgccacctccccgtgtttccaagtcagctttcctgcaagaagaaatcctggttaaaaaagtcttttgtattgggtcaggagttgaatttggggtgggaggatggatgcaactgaagcagagtgtgggtgcccagatgtgcgctattagatgtttctctgataatgtccccaatcataccagggagactggcattgacgagaactcaggtggaggcttgagaaggccgaaagggcccctgacctgcctggcttccttagcttgcccctcagctttgcaaagagccaccctaggccccagctgaccgcatgggtgtgagccagcttgagaacactaactactcaataaaagcgaaggtggac

SEQ ID NO: 135026 - DNA, 3370 bp, Homo sapiens
  Payload ID: 6392
  Gene Symbol: FOXM1
  Gene Name: forkhead box M1
  Uniprot ID: Q08050
  ENST ID: ENST00000361953
  CDS Start-End: 169-2415
gggacccggccggtccggcgcgagcccccgtccggggccctggctcggcccccaggttggaggagcccggagcccgccttcggagctacggcctaacggcggcggcgactgcagtctggagggtccacacttgtgattctcaatggagagtgaaaacgcagattcataatgaaaactagcccccgtcggccactgattctcaaaagacggaggctgccccttcctgttcaaaatgccccaagtgaaacatcagaggaggaacctaagagatcccctgcccaacaggagtctaatcaagcagaggcctccaaggaagtggcagagtccaactcttgcaagtttccagctgggatcaagattattaaccaccccaccatgcccaacacgcaagtagtggccatccccaacaatgctaatattcacagcatcatcacagcactgactgccaagggaaaagagagtggcagtagtgggcccaacaaattcatcctcatcagctgtgggggagccccaactcagcctccaggactccggcctcaaacccaaaccagctatgatgccaaaaggacagaagtgaccctggagaccttgggaccaaaacctgcagctagggatgtgaatcttcctagaccacctggagccctttgcgagcagaaacgggagacctgtgcagatggtgaggcagcaggctgcactatcaacaatagcctatccaacatccagtggcttcgaaagatgagttctgatggactgggctcccgcagcatcaagcaagagatggaggaaaaggagaattgtcacctggagcagcgacaggttaaggttgaggagccttcgagaccatcagcgtcctggcagaactctgtgtctgagcggccaccctactcttacatggccatgatacaattcgccatcaacagcactgagaggaagcgcatgactttgaaagacatctatacgtggattgaggaccactttccctactttaagcacattgccaagccaggctggaagaactccatccgccacaacctttccctgcacgacatgtttgtccgggagacgtctgccaatggcaaggtctccttctggaccattcaccccagtgccaaccgctacttgacattggaccaggtgtttaagcagcagaaacgaccgaatccagagctccgccggaacatgaccatcaaaaccgaactccccctgggcgcacggcggaagatgaagccactgctaccacgggtcagctcatacctggtacctatccagttcccggtgaaccagtcactggtgttgcagccctcggtgaaggtgccattgcccctggcggcttccctcatgagctcagagcttgcccgccatagcaagcgagtccgcattgcccccaaggtgctgctagctgaggaggggatagctcctctttcttctgcaggaccagggaaagaggagaaactcctgtttggagaagggttttctcctttgcttccagttcagactatcaaggaggaagaaatccagcctggggaggaaatgccacacttagcgagacccatcaaagtggagagccctcccttggaagagtggccctccccggccccatctttcaaagaggaatcatctcactcctgggaggattcgtcccaatctcccaccccaagacccaagaagtcctacagtgggcttaggtccccaacccggtgtgtctcggaaatgcttgtgattcaacacagggagaggagggagaggagccggtctcggagaaaacagcatctactgcctccctgtgtggatgagccggagctgctcttctcagaggggcccagtacttcccgctgggccgcagagctcccgttcccagcagactcctctgaccctgcctcccagctcagctactcccaggaagtgggaggaccttttaagacacccattaaggaaacgctgcccatctcctccaccccgagcaaatctgtcctccccagaacccctgaatcctggaggctcacgcccccagccaaagtagggggactggatttcagcccagtacaaacctcccagggtgcctctgaccccttgcctgaccccctggggctgatggatctcagcaccactcccttgcaaagtgctcccccccttgaatcaccgcaaaggctcctcagttcagaacccttagacctcatctccgtcccctttggcaactcttctccctcagatatagacgtccccaagccaggctccccggagccacaggtttctggccttgcagccaatcgttctctgacagaaggcctggtcctggacacaatgaatgacagcctcagcaagatcctgctggacatcagctttcctggcctggacgaggacccactgggccctgacaacatcaactggtcccagtttattcctgagctacagtagagccctgcccttgcccctgtgctcaagctgtccaccatcccgggcactccaaggctcagtgcaccccaagcctctgagtgaggacagcaggcagggactgttctgctcctcatagctccctgctgcctgattatgcaaaagtagcagtcacaccctagccactgctgggaccttgtgttccccaagagtatctgattcctctgctgtccctgccaggagctgaagggtgggaacaacaaaggcaatggtgaaaagagattaggaaccccccagcctgtttccattctctgcccagcagtctcttaccttccctgatctttgcagggtggtccgtgtaaatagtataaattctccaaattatcctctaattataaatgtaagcttatttccttagatcattatccagagactgccagaaggtgggtaggatgacctggggtttcaattgacttctgttccttgcttttagttttgatagaagggaagacctgcagtgcacggtttcttccaggctgaggtacctggatcttgggttcttcactgcagggacccagacaagtggatctgcttgccagagtcctttttgcccctccctgccacctccccgtgtttccaagtcagctttcctgcaagaagaaatcctggttaaaaaagtcttttgtattgggtcaggagttgaatttggggtgggaggatggatgcaactgaagcagagtgtgggtgcccagatgtgcgctattagatgtttctctgataatgtccccaatcataccagggagactggcattgacgagaactcaggtggaggcttgagaaggccgaaagggcccctgacctgcctggcttccttagcttgcccctcagctttgcaaagagccaccctaggccccagctgaccgcatgggtgtgagccagcttgagaacactaactactcaataaaagcgaaggtggaca

SEQ ID NO: 135027 - DNA, 618 bp, Homo sapiens
  Payload ID: 6392
  Gene Symbol: FOXM1
  Gene Name: forkhead box M1
  ENST ID: ENST00000535350
  CDS Start-End: 1-618
tgccaagccaggctggaagaactccatccgccacaacctttccctgcacgacatgtttgtccgggagacgtctgccaatggcaaggtctccttctggaccattcaccccagtgccaaccgctacttgacattggaccaggtgtttaagccactggacccagggtctccacaattgcccgagcacttggaatcacagcagcagaaacgaccgaatccagagctccgccggaacatgaccatcaaaaccgaactccccctgggcgcacggcggaagatgaagccactgctaccacgggtcagctcatacctggtacctatccagttcccggtgaaccagtcactggtgttgcagccctcggtgaaggtgccattgcccctggcggcttccctcatgagctcagagcttgcccgccatagcaagcgagtccgcattgcccccaaggtgctgctagctgaggaggggatagctcctctttcttctgcaggaccagggaaagaggagaaactcctgtttggagaagggttttctcctttgcttccagttcagactatcaaggaggaagaaatccagcctggggaggaaatgccacacttagcgagacccatcaaagtggagag

SEQ ID NO: 135028 - DNA, 693 bp, Homo sapiens
  Payload ID: 6392
  Gene Symbol: FOXM1
  Gene Name: forkhead box M1
  ENST ID: ENST00000538564
  CDS Start-End: 1-243
acagcactgactgccaagggaaaagagagtggcagtagtgggcccaacaaattcatcctcatcagctgtgggggagccccaactcagcctccaggactccggcctcaaacccaaaccagctatgatgccaaaaggacagaagtgaccctggagaccttgggaccaaaacctgcagctagggatgtgaatcttcctagaccacctggagccctttgcgagcagaaacgggagacctgtggttgaggagccttcgagaccatcagcgtcctggcagaactctgtgtctgagcggccaccctactcttacatggccatgatacaattcgccatcaacagcactgagaggaagcgcatgactttgaaagacatctatacgtggattgaggaccactttccctactttaagcacattgccaagccaggctggaagaactccatccgccacaacctttccctgcacgacatgtttgtccgggagacgtctgccaatggcaaggtctccttctggaccattcaccccagtgccaaccgctacttgacattggaccaggtgtttaagcagcagaaacgaccgaatccagagctccgccggaacatgaccatcaaaaccgaactccccctgggcgcacggcggaagatgaagccactgctaccacgggtcagctcatacctggtacctatccagttcccggt

SEQ ID NO: 135029 - DNA, 3487 bp, Homo sapiens
  Payload ID: 6392
  Gene Symbol: FOXM1
  Gene Name: forkhead box M1
  ENST ID: ENST00000627656
  CDS Start-End: 284-2530
tttcaaacagcggaacaaactgaaagctccggtgccagaccccacccccggccccggcccgggaccccctcccctcccgggatcccccggggttcccaccccgcccgcaccgccggggacccggccggtccggcgcgagcccccgtccggggccctggctcggcccccaggttggaggagcccggagcccgccttcggagctacggcctaacggcggcggcgactgcagtctggagggtccacacttgtgattctcaatggagagtgaaaacgcagattcataatgaaaactagcccccgtcggccactgattctcaaaagacggaggctgccccttcctgttcaaaatgccccaagtgaaacatcagaggaggaacctaagagatcccctgcccaacaggagtctaatcaagcagaggcctccaaggaagtggcagagtccaactcttgcaagtttccagctgggatcaagattattaaccaccccaccatgcccaacacgcaagtagtggccatccccaacaatgctaatattcacagcatcatcacagcactgactgccaagggaaaagagagtggcagtagtgggcccaacaaattcatcctcatcagctgtgggggagccccaactcagcctccaggactccggcctcaaacccaaaccagctatgatgccaaaaggacagaagtgaccctggagaccttgggaccaaaacctgcagctagggatgtgaatcttcctagaccacctggagccctttgcgagcagaaacgggagacctgtgatggtgaggcagcaggctgcactatcaacaatagcctatccaacatccagtggcttcgaaagatgagttctgatggactgggctcccgcagcatcaagcaagagatggaggaaaaggagaattgtcacctggagcagcgacaggttaaggttgaggagccttcgagaccatcagcgtcctggcagaactctgtgtctgagcggccaccctactcttacatggccatgatacaattcgccatcaacagcactgagaggaagcgcatgactttgaaagacatctatacgtggattgaggaccactttccctactttaagcacattgccaagccaggctggaagaactccatccgccacaacctttccctgcacgacatgtttgtccgggagacgtctgccaatggcaaggtctccttctggaccattcaccccagtgccaaccgctacttgacattggaccaggtgtttaagcagcagcagaaacgaccgaatccagagctccgccggaacatgaccatcaaaaccgaactccccctgggcgcacggcggaagatgaagccactgctaccacgggtcagctcatacctggtacctatccagttcccggtgaaccagtcactggtgttgcagccctcggtgaaggtgccattgcccctggcggcttccctcatgagctcagagcttgcccgccatagcaagcgagtccgcattgcccccaaggtgctgctagctgaggaggggatagctcctctttcttctgcaggaccagggaaagaggagaaactcctgtttggagaagggttttctcctttgcttccagttcagactatcaaggaggaagaaatccagcctggggaggaaatgccacacttagcgagacccatcaaagtggagagccctcccttggaagagtggccctccccggccccatctttcaaagaggaatcatctcactcctgggaggattcgtcccaatctcccaccccaagacccaagaagtcctacagtgggcttaggtccccaacccggtgtgtctcggaaatgcttgtgattcaacacagggagaggagggagaggagccggtctcggagaaaacagcatctactgcctccctgtgtggatgagccggagctgctcttctcagaggggcccagtacttcccgctgggccgcagagctcccgttcccagcagactcctctgaccctgcctcccagctcagctactcccaggaagtgggaggaccttttaagacacccattaaggaaacgctgcccatctcctccaccccgagcaaatctgtcctccccagaacccctgaatcctggaggctcacgcccccagccaaagtagggggactggatttcagcccagtacaaacctcccagggtgcctctgaccccttgcctgaccccctggggctgatggatctcagcaccactcccttgcaaagtgctcccccccttgaatcaccgcaaaggctcctcagttcagaacccttagacctcatctccgtcccctttggcaactcttctccctcagatatagacgtccccaagccaggctccccggagccacaggtttctggccttgcagccaatcgttctctgacagaaggcctggtcctggacacaatgaatgacagcctcagcaagatcctgctggacatcagctttcctggcctggacgaggacccactgggccctgacaacatcaactggtcccagtttattcctgagctacagtagagccctgcccttgcccctgtgctcaagctgtccaccatcccgggcactccaaggctcagtgcaccccaagcctctgagtgaggacagcaggcagggactgttctgctcctcatagctccctgctgcctgattatgcaaaagtagcagtcacaccctagccactgctgggaccttgtgttccccaagagtatctgattcctctgctgtccctgccaggagctgaagggtgggaacaacaaaggcaatggtgaaaagagattaggaaccccccagcctgtttccattctctgcccagcagtctcttaccttccctgatctttgcagggtggtccgtgtaaatagtataaattctccaaattatcctctaattataaatgtaagcttatttccttagatcattatccagagactgccagaaggtgggtaggatgacctggggtttcaattgacttctgttccttgcttttagttttgatagaagggaagacctgcagtgcacggtttcttccaggctgaggtacctggatcttgggttcttcactgcagggacccagacaagtggatctgcttgccagagtcctttttgcccctccctgccacctccccgtgtttccaagtcagctttcctgcaagaagaaatcctggttaaaaaagtcttttgtattgggtcaggagttgaatttggggtgggaggatggatgcaactgaagcagagtgtgggtgcccagatgtgcgctattagatgtttctctgataatgtccccaatcataccagggagactggcattgacgagaactcaggtggaggcttgagaaggccgaaagggcccctgacctgcctggcttccttagcttgcccctcagctttgcaaagagccaccctaggccccagctgaccgcatgggtgtgagccagcttgagaacactaactactcaataaaagcgaaggtggacatg

SEQ ID NO: 135030 - DNA, 3436 bp, Homo sapiens
  Payload ID: 6393
  Gene Symbol: FOXN1
  Gene Name: forkhead box N1
  Uniprot ID: O15353
  ENST ID: ENST00000226247
  CDS Start-End: 30-1976
acggctttctttgaggccaggactgggtgatggtgtcgctacccccgccgcagtctgacgtcacgctgccgggccccaccagactggagggcgagcgccaaggggacctcatgcaggcaccgggcctcccaggctcccctgccccacagagtaagcatgccggcttcagctgctcgtcatttgtgtccgacggccctccagagaggacaccctcactgcccccacacagcccccgcattgcgtcaccagggcccgagcaagtccagggccactgcccagccggccccggccctgggcccttcaggctctcaccctcagacaagtatcctggctttggctttgaggaggccgcagcaagcagccctgggcgattcctcaagggcagccacgcgcccttccacccgtacaagcggcctttccatgaggacgtcttcccagaggccgagaccaccctggccctcaaaggacactcctttaagaccccagggccgctggaggccttcgaggagatcccagtggacgtggcggaggccgaggccttcctgcctggcttctcagcagaggcctggtgtaacgggctcccctaccccagccaggagcatggcccccaagtcctgggttcagaggtcaaagtcaagcccccagttctggagagtggtgctgggatgttctgctaccagcctcccttgcagcatatgtactgctcctcccagccccccttccaccagtactcgccaggtggtggcagctaccccataccctacctgggctcctcacactatcagtaccagcgaatggcaccccaggccagcaccgatgggcaccagcctctcttcccaaaacccatctattcctacagcatcctcatcttcatggcccttaagaacagtaaaactgggagccttcccgtcagcgagatctacaattttatgacggagcactttccttacttcaagacagcacccgatggctggaagaattctgtccggcacaacctatccctcaacaagtgcttcgagaaggtggagaacaaatcaggaagttcctcccgcaagggctgcctgtgggccctcaatccggccaagatcgacaagatgcaagaggagctgcaaaaatggaagaggaaagatcccattgctgtgcgcaaaagcatggccaagccagaagagctggacagcctcattggagacaagagagaaaagctgggctccccactcctgggctgtccgccccctgggctgtccggctcaggccccatccggcccctggcacccccagctggcctctccccaccactgcactcactccacccagctccaggccccattcctggcaagaaccccctgcaggacctacttatggggcacacaccctcctgctatgggcagacatacttgcacctctcaccaggcctggcccctcctggacccccgcagccattgttcccacagccggacgggcaccttgagctgcgggcccagccaggcaccccccaggactcgcctctgcctgcccacaccccacccagccacagtgccaagctactggccgagccttccccagccaggactatgcacgacaccctgctgccagatggagaccttggcactgacctggatgccatcaatccctcactcactgacttcgacttccagggaaacctgtgggaacagttgaaggatgatagcttggccctcgaccccctggtactggtgacctcatccccgacatcatcttcgatgccaccaccccagccaccacctcactgcttcccccctgggccctgtctgacagagacaggcagtggggcaggtgacttggcagccccgggcagtggtggctccggggcactgggtgacctgcacctcaccaccctctactctgcctttatggagctggagcccacgccccccacggcccctgcaggcccctctgtgtacctcagccccagctccaagcccgtggccctggcatgagctgtgcccagcttcgtcagctccagcgtttgcctggtctggaagtcctggccggccgcccacatcgggctcaccttaaaggtcaaggaaggaaaatactacctgtcccctatgccactaagccaacgtgtgtgtcagctggtagctgggggcgcagaggacatcacctggggtgctgcctctcacacatttctgccacgtggtggcccagctcctcacccagggcccccaaagagcaagcgtctgggcaagaggaaaatgccctgtccctagctcacactcatccacacttaagccctcgtgcacacacacaaattattcagatgtacacccacccacatatcttacagccagaggaaccagcactccatcactgagagcccgacttcgtttctggggcaactgagagctgagcgctttgcttaccaaaagctcagggccctgtgccaggccaaagatccccccagacccccattctgacatccacatgctctgcagtcctggccccctcgtcattttctttcccagaagcgccctgtatttattcccccatcttcatcccaacagcccagcaagaaggaggagacagagagctcctccctgggttgtctgtggacccccccaggagctgctaattggcagcacccactcagccattctctacccatccttagtacatgctctgtccagctttccccagggtgacatacagaaggggcaacatctacccgggcaccaaactgagcccaattccgaagcagtgtttggaaaagcccttgccctcggaaacttgaacatgtcctttttccccagtcccgggtgcaggaagggccccctccaggtcaccacaatctcactcctcctccagaaagaaaagttcacatagtttaggtcctggcttaactctacttatgatggttcaacttacactttttcaactttaagatggtgcaaaagcaatacacattcagtatgttcctcgacttaggatgcggttatgtccgataaacccattgtaaattgaaaccaccgaaagtcaaaaaccactttcgacttacgatgtttcccactcacgatgggtttctccggatgtagccccatcataagttgaggagcacctgttagttacttccaactgtctcaggcaacctgggcattcaggagaaaagcctggcacagggtgacagggaagcacccatgcaaagcacccccgctttgactgcttggcagacctagggtgcccgggaagcacaagggatacccttggccctgcggggtgtggcccaggtgcctgccatgagcctgaccccatcgagggggaacctcagcccaccctgggcctgggggtgacaagaacttccacaggttggccccaggcttataggaggcataagcagatcccgcgatggcttgtcattgtcccctgtcctggaacaataaagcaagtgccttgtggtctc

SEQ ID NO: 135031 - DNA, 562 bp, Homo sapiens
  Payload ID: 6393
  Gene Symbol: FOXN1
  Gene Name: forkhead box N1
  ENST ID: ENST00000577936
  CDS Start-End: 211-562
acctttctcttctccccgttttggcgcagcccctccgggcaaggggaagctgatatcataattattggctcacctggcagctgcctcccctcacctgatgtcagcacagacacaggacggccgagctgacggactgacagacggacagagctcctggccccccagacccgggcccccacgccgacctgcttcactgagcaggactgggtgatggtgtcgctacccccgccgcagtctgacgtcacgctgccgggccccaccagactggagggcgagcgccaaggggacctcatgcaggcaccgggcctcccaggctcccctgccccacagagtaagcatgccggcttcagctgctcgtcatttgtgtccgacggccctccagagaggacaccctcactgcccccacacagcccccgcattgcgtcaccagggcccgagcaagtccagggccactgcccagccggccccggccctgggcccttcaggctctcaccctcagacaagtatcctggctttggctttgaggaggccgcagcaagcagccctgggcgattcctcaagg

SEQ ID NO: 135032 - DNA, 2145 bp, Homo sapiens
  Payload ID: 6393
  Gene Symbol: FOXN1
  Gene Name: forkhead box N1
  Uniprot ID: O15353
  ENST ID: ENST00000579795
  CDS Start-End: 199-2145
gttttggcgcagcccctccgggcaaggggaagctgatatcataattattggctcacctggcagctgcctcccctcacctgatgtcagcacagacacaggacggccgagctgacggactgacagacggacagagctcctggccccccagacccgggcccccacgccgacctgcttcactgagcaggccaggactgggtgatggtgtcgctacccccgccgcagtctgacgtcacgctgccgggccccaccagactggagggcgagcgccaaggggacctcatgcaggcaccgggcctcccaggctcccctgccccacagagtaagcatgccggcttcagctgctcgtcatttgtgtccgacggccctccagagaggacaccctcactgcccccacacagcccccgcattgcgtcaccagggcccgagcaagtccagggccactgcccagccggccccggccctgggcccttcaggctctcaccctcagacaagtatcctggctttggctttgaggaggccgcagcaagcagccctgggcgattcctcaagggcagccacgcgcccttccacccgtacaagcggcctttccatgaggacgtcttcccagaggccgagaccaccctggccctcaaaggacactcctttaagaccccagggccgctggaggccttcgaggagatcccagtggacgtggcggaggccgaggccttcctgcctggcttctcagcagaggcctggtgtaacgggctcccctaccccagccaggagcatggcccccaagtcctgggttcagaggtcaaagtcaagcccccagttctggagagtggtgctgggatgttctgctaccagcctcccttgcagcatatgtactgctcctcccagccccccttccaccagtactcgccaggtggtggcagctaccccataccctacctgggctcctcacactatcagtaccagcgaatggcaccccaggccagcaccgatgggcaccagcctctcttcccaaaacccatctattcctacagcatcctcatcttcatggcccttaagaacagtaaaactgggagccttcccgtcagcgagatctacaattttatgacggagcactttccttacttcaagacagcacccgatggctggaagaattctgtccggcacaacctatccctcaacaagtgcttcgagaaggtggagaacaaatcaggaagttcctcccgcaagggctgcctgtgggccctcaatccggccaagatcgacaagatgcaagaggagctgcaaaaatggaagaggaaagatcccattgctgtgcgcaaaagcatggccaagccagaagagctggacagcctcattggagacaagagagaaaagctgggctccccactcctgggctgtccgccccctgggctgtccggctcaggccccatccggcccctggcacccccagctggcctctccccaccactgcactcactccacccagctccaggccccattcctggcaagaaccccctgcaggacctacttatggggcacacaccctcctgctatgggcagacatacttgcacctctcaccaggcctggcccctcctggacccccgcagccattgttcccacagccggacgggcaccttgagctgcgggcccagccaggcaccccccaggactcgcctctgcctgcccacaccccacccagccacagtgccaagctactggccgagccttccccagccaggactatgcacgacaccctgctgccagatggagaccttggcactgacctggatgccatcaatccctcactcactgacttcgacttccagggaaacctgtgggaacagttgaaggatgatagcttggccctcgaccccctggtactggtgacctcatccccgacatcatcttcgatgccaccaccccagccaccacctcactgcttcccccctgggccctgtctgacagagacaggcagtggggcaggtgacttggcagccccgggcagtggtggctccggggcactgggtgacctgcacctcaccaccctctactctgcctttatggagctggagcccacgccccccacggcccctgcaggcccctctgtgtacctcagccccagctccaagcccgtggccctggcatga

SEQ ID NO: 135033 - DNA, 5408 bp, Homo sapiens
  Payload ID: 6394
  Gene Symbol: FOXN2
  Gene Name: forkhead box N2
  Uniprot ID: P32314
  ENST ID: ENST00000340553
  CDS Start-End: 262-1557
cgcgtcttcccggaggcgactgctggaagctgcagggaacagctgcggtgctctgccatattgtgtcttccccggccggtccctcgcctcccggccgagctgacgttggttgaagccatggataacagaacccacagatgcagagggctgactgtacaagtctgtcaaaaaaccaaactgctggttggctaataattggtcactgtatgacttatagtacaggtgatattacttctgattctagatgaactgtaagagtaaatgggtccagtaattggaatgactccagataagagagctgaaaccccaggagctgaaaagattgcaggattaagccagatttacaaaatgggaagcttgcctgaagctgttgatgctgccaggccgaaggccactctagtggacagtgagtcagcagatgatgaactcacaaacttgaactggcttcatgaaagcactaatcttctaacaaacttcagcctcggaagtgagggtcttccaattgttagtccattgtatgacatagagggagatgatgtgccatcctttggaccagcttgctaccagaacccagaaaaaaaatcagcgacttcaaagcccccatactcctttagtcttctcatttatatggccattgagcactctccaaataaatgtttgcctgtcaaagaaatttatagctggattctggaccattttccatattttgctactgcaccaacaggctggaagaattctgttcgacataatctgtccctgaataaatgttttcagaaagtggaaagaagccatggcaaggttaatggaaaaggttccttatggtgtgttgatccggaatataaacccaatcttatccaggcactgaagaagcaacctttttcttcagcatcttcacaaaatggttctttatcacctcactatttaagctctgtaatcaagcagaaccaggtgcgaaacctcaaagaatctgatattgatgctgctgctgcaatgatgcttttaaatacttctatagaacaaggaattttagaatgtgagaagcctcttcctcttaaaacagcattgcaaaaaaagaggagttacggcaatgcatttcatcatcccagtgctgtacgattacaagagagtgattctttagccaccagcattgatccaaaagaagatcacaattacagtgcaagtagcatggcagcacagcgttgtgcatccaggtctagcgtgtcttccctgtcttctgtggatgaggtatatgaatttatcccaaagaatagtcacgtgggaagtgatggcagtgaaggatttcacagtgaagaagatacagacgttgattatgaagatgatcctcttggagacagtggctatgcatcacagccttgtgcaaaaatctctgaaaaagggcagtcaggcaaaaagatgcgaaaacagacatgtcaagaaattgatgaggagctcaaagaggcagctggatctctgctccaccttgctggaattcgtacatgtttaggttccctaataagtactgcaaagacacaaaatcaaaagcaacggaaaaaatagaaatacttaaagtgtggcaatactctttcacttaattctttacaagggatatcaaagccataatggacttcattagttttagggtagggaagggatactaattacttatttctttcaaaacatttttggtttttggtttttaaaatttttattaaacaattgctgttaggatcatgcctgatcagaaatacatgatgtgaagtcctaaaagcataatttttgtgataaatgtgtccaagatttgaaaatttttatataagaaaatccccagcctctgtcttaaacttgtgggacaaaaatcctttcttctgttaatatgtcagaatgtaagatttggcaactcgataaatttttttcattttcttttccaatctgtaactatagttactgaaccagctaaaaattttgctgatgtatttttcatatacttctctcctgacacgcaatccggtaacataagattgaaatttttttactttgtcttaatttgtttctaattttttttttgttgtcgtgtgagcaaagacaaacataaattgaaaaacatcctgatgtttagaaagtttcttttggttacgtaggtagagaatacaacaaagagttctaagacttagaaaagacaattttgtggtgtcatttcatccaagaacactcccaattcctattagaatggtagctttgaagtgtttttacttcagagatcctgcatagcatttattggggccttttattctttcccaaagtgctttgcaaacattaagttttagccactagctgcctttgttgagtataagttatccagtgagaggatatagccaattaagtgtgttatggagtacacccattttgacacacttgtaataagagaatctttcatttgcctgccatgtgtactgtattatgagaatcttataatcggaatggagtgaaatgaaacattttgagtactgatggcatgttatcatacataaagtaggtcatttaggaaaaaacttctgtccaagctttgtatgaattaaattcataagtataccaaattaaatcttaatagatttaatgcaattttacagacacaataccttcatgaatttcaaaattcatataaaatttgatcttatgcaatacacctttttgaggaggcagtgtaacaacctatagtgccattgatccatgagaaaaagattttctggtactactccaaaagtgctttgactaagtatcttaactatttgaacagtctgcttatatgagacagtttttcatagtatcatttgtataatttgattagattattcagaaacaataggatgctaaactaattcattgtatcttttttttacaatggtggaagcaactttctgaaagttcagtcttatgctacatcctaagtcatagacaatgaccttgttttcattattctgatagattgtatacatatgtacacatacatatacacatatgcacagtcaaggtcatgatgttgatttgctttcagctgtttctgtgattataaagcattttttaagagacaaattttaacttttaatttttattttggcaaaactgtcaaatgagaaaaatgattttaaaaacttttttttcaattgacaagactttaagtcagggataacagtattaatgttctctgttctgtttccatgttaaatttaatttaacctggatagccacattaatgaattggtgctgtcaaaatatagtaatttttaaatttgttaataatgaaaacccttaagcatgcaggatgaggtatttgggttttttttttagatcgatcacatctacagaaaatggctaaaccaagttaacttttattatagacagtgaataaaacaccaaaaacccaaaaatgctttaaccacagtataaataatagattatacacatcatcttaataactatttttaagttatttaccatagcctctgtatagaccttaggaacagtgtttcagtgatctggcaccagtttattttgttctgctgaaattctgtatcacaaatgtgctacctggtttttgtccattagataattactctttataaggaaaggaaagagaagcagagttagttccagctctaatagggatcttcaaagttattttgtcttgatgtatgtaacagtaattctttacatcttttgatttttctcttcctttttattcactcttcccacgaatttaaatgtttaagttatattcatcactagcaaggatgataaacacttgtgcactgaaagctaacagggagaggttacacaatattttacagtttcttaaacataatttaatgcatcaccttccacttgctaacataccaagtcagttattttcaagggaagaaccttttaaattatggtcctccatttactacttccactgagagtatgctctcattcctcaggtgttttgagaaacatgactaataaccacacaattaagtagagtcattccaagtcctatggcctggaaattgtattccctataatatacaaattttcctgtaataaagtcaacttagaaactccaaggaggttacatgttttccaacatatcctaaaaactgtgatataagctaacatataatttgccttacgtcaaaagaatatgttttgttgcagctgattccagtttataatagatccctagtaaaaagctttgattcaacacaattgttcatcttcacatcccaaacagaatcactgtttcttgaatatatatttttgaagtttttttgtgcaatatattactaaatcagttattattttacttttccaaattcagagaaagaaaacagattacctgaattcatggaaaaggtggatcacctccctttttccaccttcaagcctttcctgtcctcatagccagcatgacttcttttaacttggattcctttgtatatagtaaagtttagtatatatatatttttttctttttgctactttctgaggcattatgtaaagggctcatactagatgttcagttaaatatactttagcacaaagtcaaactagagaatgtgttaaggagggaatgtatatgtcttggtagaccaggaggcctttgccagcaatttaagcaacagatgtgaatacttcacaaagctgtaaagaccattgtcttaaatactacaacaacttaacacccttttgtgaagatcacagcatttatctaagaaactgtgaggctttctggtttacatatatcttacaggtgtttttttgtatttttttttttttttagtttgaaatgtgtaagctttgatttaaaccaagtttacttcagtatgttaatgatgtagtaaaaatatttattgaaaggtgaattcgagtattttaatgttatacctgccattttttttcttaaagcatattctttgcatctaactgccagtgccattgtcaaaacttattttttaaatcgttgtacatttcttattaaactaagtgcttaattttaaagtattatgttgccatcatatagtgtataaaaatgtataattgccaattgattgtaactattatttatttttaaatgaaagtgtaagaatgctttctgattcaacaaatttgttatcaaactgtttccttatcctcttttctgatgtagcataaaaattgtcccggtttgagttataactgccagtagatgaccagtcacaagtgaaccacttctcagttgccaatctttgctcatattaaaaacaacttacaaatacttagtttttgtatctaatctctgattattaaaatgtttataaagtttatttttaccaaagagatgcaattcattatgagaaagtattgcataataaattttgttttataacttt

SEQ ID NO: 135034 - DNA, 932 bp, Homo sapiens
  Payload ID: 6394
  Gene Symbol: FOXN2
  Gene Name: forkhead box N2
  ENST ID: ENST00000413569
  CDS Start-End: 193-932
gggaggaagcgagcgggagggggatgtggtgctgccggggccgccactgcagctgctgctgcctgctggttgccgcgtcttcccggaggcgactgctggaagctgcagggaacagctgcggtgctctgccatattgtgtcttccccggccggtccctcgcctcccggccgagctgacgaactgtaagagtaaatgggtccagtaattggaatgactccagataagagagctgaaaccccaggagctgaaaagattgcaggattaagccagatttacaaaatgggaagcttgcctgaagctgttgatgctgccaggccgaaggccactctagtggacagtgagtcagcagatgatgaactcacaaacttgaactggcttcatgaaagcactaatcttctaacaaacttcagcctcggaagtgagggtcttccaattgttagtccattgtatgacatagagggagatgatgtgccatcctttggaccagcttgctaccagaacccagaaaaaaaatcagcgacttcaaagcccccatactcctttagtcttctcatttatatggccattgagcactctccaaataaatgtttgcctgtcaaagaaatttatagctggattctggaccattttccatattttgctactgcaccaacaggctggaagaattctgttcgacataatctgtccctgaataaatgttttcagaaagtggaaagaagccatggcaaggttaatggaaaaggttccttatggtgtgttgatccggaatataaacccaatcttatccaggcactgaagaagcaacctttttcttcagcatcttcacaaaatggttctttatcacctcactatttaagctctgtaatcaagcagaaccaggtgcgaaacctcaaagaatctgatattgatgctgctgctgcaatgatgctttt

SEQ ID NO: 135035 - DNA, 1414 bp, Homo sapiens
  Payload ID: 6394
  Gene Symbol: FOXN2
  Gene Name: forkhead box N2
  ENST ID: ENST00000616844
  CDS Start-End: 270-1292
gggtccagtaattggaatgactccagataagagagctgaaaccccaggagctgaaaagattgcaggattaagccagatttacaaaatgggaagcttgcctgaagctgttgatgctgccaggccgaaggccactctagtggacagtgagtcagcagatgatgaactcacaaacttgaactggcttcatgaaagcactaatcttctaacaaacttcagcctcggaagtgagggtcttccaattgttagtccattgtatgacatagagggagatgatgtgccatcctttggaccagcttgctaccagaacccagaaaaaatcagcgacttcaaagcccccatactcctttagtcttctcatttatatggccattgagcactctccaaataaatgtttgcctgtcaaagaaatttatagctggattctggaccattttccatattttgctactgcaccaacaggctggaagaattctgttcgacataatctgtccctgaataaatgttttcagaaagtggaaagaagccatggcaaggttaatggaaaaggttccttatggtgtgttgatccggaatataaacccaatcttatccaggcactgaagaagcaacctttttcttcagcatcttcacaaaatggttctttatcacctcactatttaagctctgtaatcaagcagaaccaggtgcgaaacctcaaagaatctgatattgatgctgctgctgcaatgatgcttttaaatacttctatagaacaaggaattttagaatgtgagaagcctcttcctcttaaaacagcattgcaaaaaaagaggagttacggcaatgcatttcatcatcccagtgctgtacgattacaagagagtgattctttagccaccagcattgatccaaaagaagatcacaattacagtgcaagtagcatggcagcacagcgttgtgcatccaggtctagcgtgtcttccctgtcttctgtggatgaggtatatgaatttatcccaaagaatagtcacgtgggaagtgatggcagtgaaggatttcacagtgaagaagatacagacgttgattatgaagatgatcctcttggagacagtggctatgcatcacagccttgtgcaaaaatctctgaaaaagggcagtcaggcaaaaagatgcgaaaacagacatgtcaagaaattgatgaggagctcaaagaggcagctggatctctgctccaccttgctggaattcgtacatgtttaggttccctaataagtactgcaaagacacaaaatcaaaagcaacggaaaaaatagaaatacttaaagtgtggcaatactctttcacttaattctttacaagggatatcaaagccataatggacttcattagttttagggtagggaagggatactaattacttatttctttcaaaaca

SEQ ID NO: 135036 - DNA, 2542 bp, Homo sapiens
  Payload ID: 6395
  Gene Symbol: FOXN3
  Gene Name: forkhead box N3
  Uniprot ID: O00409
  ENST ID: ENST00000261302
  CDS Start-End: 17-1489
aggagccttcacgtaaatgggtccagtcatgcctcccagtaagaagccagaaagctcaggaattagtgtctccagtggactgagtcagtgttacgggggcagcggtttctccaaggcccttcaggaagacgatgacctcgacttttctctgcctgacatccgattagaagagggggccatggaagatgaagagctgaccaacctgaactggctgcacgagagcaagaacttgctgaagagctttggggagtcggtcctcaggagtgtcagccccgtccaggacctggacgatgacacccccccatcccctgcccactctgacatgccctacgatgccaggcagaaccccaactgcaaacccccctactccttcagctgcctcatatttatggccatcgaggactctccaaccaagcgcctgccagtgaaggatatctacaactggatcttggaacattttccgtattttgcaaatgcacctactgggtggaaaaactcagtgagacacaatttatcattgaataagtgttttaagaaagtggacaaagagaggagtcagagtattgggaaagggtcgttgtggtgcatagacccagagtatagacaaaatctaattcaggctttgaaaaagacaccttatcacccacacccacacgtgttcaatacacctcccacctgtcctcaggcatatcaaagcacatcaggtccacccatctggccgggcagtaccttcttcaagagaaatggagcccttctccaagatcctgacattgatgctgccagtgccatgatgcttttgaatactccccctgagatacaagcaggttttcctccaggagtgatccaaaatggagcgcgggtcctgagccgagggctgtttcctggcgtgcggccgctgccaatcactcccattggggtgacagcggccatgaggaatggcatcaccagctgccggatgcggactgagagtgagccatcttgtggctccccagtggtcagcggagaccccaaggaggatcacaactacagcagtgccaagtcctccaacgcccggagcacctcgcccaccagcgactccatctcctcctcctcctcctcagccgacgaccactatgagtttgccaccaaggggagccaggagggcagcgagggcagcgaggggagcttccggagccacgagagccccagcgacacggaagaggacgacaggaagcacagccagaaggagcccaaggattctctgggggacagcgggtacgcatcccagcacaagaagcgccagcacttcgccaaggccaggaaggtccccagcgacacactgcccctcaaaaagagacgcaccgaaaagccccccgagagcgatgatgaggagatgaaagaagcggcagggtccctcctgcacttagcagggatccggtcctgtttgaataacatcaccaatcggacggcaaaggggcagaaagagcaaaaggaaaccacaaaaaattaaaaacaagtcactgatttgttttgaacttacgaccatttggtttcagcatgtcaggagatttctaatgatttgtggcaatatcagcaattttttttcttttttcttgtttttggtttggttttctttcttttcttttccttttattttgttttaatttgccccctcttctttgttttggacccttaagaattttatttttaaaggagattgaagccatagaactcatattgacactcagctgttttacaaaagcttttcattatctgaagacaaaaccgaaaaagccaaaattaccattgcttcctccagcttgtcagaaacctgtggctgaatccgcagggatgtcaacgtcaatatcacaggaacacacattcggcacctagaaggcacgtgggcaaagtaatcatcgttcaggcccaacccttaggtttaaaaagtcaggttgtccatcccattgggttcactgagtgaaggcacataaagcaattgaggaggaggaggaacccctcgtccccctaggagcagacccaagcttgtggcaccaggcatctgatggtgccaggaaagccactggaattgtcacacggcgagcacagagggccggccaccagtcctcgatgcttctgaaccctgaagcccgatgacatcttacgaggtggacgttggactgttcatgcgcatcgggtgtcagtgactcatggagaagaaatggggtaaatttttagtgatgttgctaatcattgaattctgttctctattaaattaagaaaatgttccaaaagccataagcctgaagattggccctgtgcacgcacgcacacacacacacacacacacacacacacacacacacacacgaaggagagagagagaaaactgatggggaaaacaagctgtgtcttcttaactgcccaagtgaaaagcaaccaagtccaggaaattacaatagctgttaaggaaaggaaataatggtacagatctttttctgtctatcaaaactatttgatccaagtgaaaaaaaaaaaaaaactagaaagctacggaacctgccat

SEQ ID NO: 135037 - DNA, 7832 bp, Homo sapiens
  Payload ID: 6395
  Gene Symbol: FOXN3
  Gene Name: forkhead box N3
  Uniprot ID: O00409
  ENST ID: ENST00000345097
  CDS Start-End: 118-1590
ccgggagacggcgcgacccggcggcggggccacccgcgagtccagcgtcgccgcagccccccaatgcggccgcgagaagcagcgggggggcaggcgatcgaaggagccttcacgtaaatgggtccagtcatgcctcccagtaagaagccagaaagctcaggaattagtgtctccagtggactgagtcagtgttacgggggcagcggtttctccaaggcccttcaggaagacgatgacctcgacttttctctgcctgacatccgattagaagagggggccatggaagatgaagagctgaccaacctgaactggctgcacgagagcaagaacttgctgaagagctttggggagtcggtcctcaggagtgtcagccccgtccaggacctggacgatgacacccccccatcccctgcccactctgacatgccctacgatgccaggcagaaccccaactgcaaacccccctactccttcagctgcctcatatttatggccatcgaggactctccaaccaagcgcctgccagtgaaggatatctacaactggatcttggaacattttccgtattttgcaaatgcacctactgggtggaaaaactcagtgagacacaatttatcattgaataagtgttttaagaaagtggacaaagagaggagtcagagtattgggaaagggtcgttgtggtgcatagacccagagtatagacaaaatctaattcaggctttgaaaaagacaccttatcacccacacccacacgtgttcaatacacctcccacctgtcctcaggcatatcaaagcacatcaggtccacccatctggccgggcagtaccttcttcaagagaaatggagcccttctccaagatcctgacattgatgctgccagtgccatgatgcttttgaatactccccctgagatacaagcaggttttcctccaggagtgatccaaaatggagcgcgggtcctgagccgagggctgtttcctggcgtgcggccgctgccaatcactcccattggggtgacagcggccatgaggaatggcatcaccagctgccggatgcggactgagagtgagccatcttgtggctccccagtggtcagcggagaccccaaggaggatcacaactacagcagtgccaagtcctccaacgcccggagcacctcgcccaccagcgactccatctcctcctcctcctcctcagccgacgaccactatgagtttgccaccaaggggagccaggagggcagcgagggcagcgaggggagcttccggagccacgagagccccagcgacacggaagaggacgacaggaagcacagccagaaggagcccaaggattctctgggggacagcgggtacgcatcccagcacaagaagcgccagcacttcgccaaggccaggaaggtccccagcgacacactgcccctcaaaaagagacgcaccgaaaagccccccgagagcgatgatgaggagatgaaagaagcggcagggtccctcctgcacttagcagggatccggtcctgtttgaataacatcaccaatcggacggcaaaggggcagaaagagcaaaaggaaaccacaaaaaattaaaaacaagtcactgatttgttttgaacttacgaccatttggtttcagcatgtcaggagatttctaatgatttgtggcaatatcagcaattttttttcttttttcttgtttttggtttggttttctttcttttcttttccttttattttgttttaatttgccccctcttctttgttttggacccttaagaattttatttttaaaggagattgaagccatagaactcatattgacactcagctgttttacaaaagcttttcattatctgaagacaaaaccgaaaaagccaaaattaccattgcttcctccagcttgtcagaaacctgtggctgaatccgcagggatgtcaacgtcaatatcacaggaacacacattcggcacctagaaggcacgtgggcaaagtaatcatcgttcaggcccaacccttaggtttaaaaagtcaggttgtccatcccattgggttcactgagtgaaggcacataaagcaattgaggaggaggaggaacccctcgtccccctaggagcagacccaagcttgtggcaccaggcatctgatggtgccaggaaagccactggaattgtcacacggcgagcacagagggccggccaccagtcctcgatgcttctgaaccctgaagcccgatgacatcttacgaggtggacgttggactgttcatgcgcatcgggtgtcagtgactcatggagaagaaatggggtaaatttttagtgatgttgctaatcattgaattctgttctctattaaattaagaaaatgttccaaaagccataagcctgaagattggccctgtgcacgcacgcacacacacacacacacacacacacacacacacacacacacgaaggagagagagagaaaactgatggggaaaacaagctgtgtcttcttaactgcccaagtgaaaagcaaccaagtccaggaaattacaatagctgttaaggaaaggaaataatggtacagatctttttctgtctatcaaaactatttgatccaagtgaaaaaaaaaaaaaaactagaaagctacggaacctgccattagtattgtggtgtatttttaagattaaaggtacactgatggacaaaaaaaaaaagtaaaacatggcaaaaaataaaataactcctatactgccctcaaaatggagtttgcaattaatatcaggatttatctttgcaaaaatcagtgatttccacattcagccagtatagccagcagaaatttctgatccacaatgcatggattcctttgaagaaaaaaaagaaaaagagaaaaaaatcacaaaaacaaactttttttattcaaaagtaacaaagttcttgtaaggtaaataatgtatttagcatgaagcatgaattattttcatataaatatagaaaatagagaaaaggctatgcctgtaatttttaagcccttaggcttagagtttcttttggttttcttcttttttctttccttttctttgctttctttttttcctttttgtttttgtttttgttttttgtttttgtttttttttcgggttattttgttttggttttttgaagcaggtgtttaaggtttaaccttcttcagggacaaattctgactgttggggaacttactctgcaatataaaaatatcttcatgctctggtagggcttggatggttgaactctgtactgccttgtgtgcacttcagccccgaccccctctgattctctgttgaaaagtgtgtcctttctctctgtctgtacatgtttaacatgacgcaataatttgagggcaaacttagtagtgagtgtgtatgatagaatcaagagaattatgggacgcttacttgagaaaatcattaccatgatttggttctaggaaaaaggcagtgaataattatgcaaattagccagaagaaggggaaccgtgctaatgggccttattgggtgaggggacgagatggggttcatgtgaaggaggaagcgatgccgaggtaggaaaggccagccccagacatcctatcgccacaatgccatgtcgcaataggaagcaggggccggccatcgctaccttcagcacactgaccaacctggaattaagaccacctagattgcgagagctgaatttagaaaccagacaacgtcatgcagcccagaaactcctgttgttacctttgcctaagaaattttctttaatggcgggggcggggggcgggggtacaaagagaaatctctaaaagaatatgatcttccatccaagtggagggaaactttaaaacaaaaacacccagtactgtggctcaggatatgatgcgtgaggagagggagggaacagagatgaccttaacttttaaaaaagggactgctgtgggccaaagccaagcccatctgccaggacgaggtaatgtcagagctccatcagcccggacagtgggaactaactggtgcattccccacacttaccttccggtgggttgctgatgagagaacctgaaaaaacctacacctctacagcaggtcgaattcatgacctgaagctgaatacttccagcatatttattcagggtgtaggtgggaataaagtatcttcgcagtgctctgttccctccgtctccccagacatctgacaccctaaaagccatccacagctatggaacctgagcgacaccttgatttgtgttgtcacctgaccaagcctaaagacctccagctcagtcccccaccttcatcccaccccacagatgataaaattcagacctctctcctgaaaggcagaggttcaacattcaggactgtttctggccgaggacttcttccaattaaaacccccaccgtgggctgtctcccctcatttcatttttctaaaggggcagaggcctcttttagaaaataataaaatgcaatgtgtgtgatttacttttctgatctctttgagaaatagagaaatataaaagtgtgttcttaactccagaaccactctttttgcataaatacctcatcgggcagctttctaagtgtgattttcctgagtctcccttcgttggatctgccggaagacttgtcggggaacctttagtgagggtacttcttcctatttttcttctgtttttggaggcatacacattatgcataaccaaaacaatggctcaattgtgtttaactttgtattttgattgttgagaacaaaaacaaaaagtatcaatgtgtatgtggctgtttgtagtgaatttattggagaatgaggttgtccgtgtccttaacaagccaaggggcaggaggcaccctctcttatcccctcctccaagagcagtagagaatttaagcacaagcctatttgtgaaagaatattttgcttaagtgtcattcactttagtcttggaattccttcccaaacgtcaggtgttcttttagcttccaaactagcatatgtatccattagtctgacagatcgcctgaacaccattaagaggtgtggcgtttttgctttcatttctcctgctgggagaagtggcggttcatgtgtcattccagtatctcacatactcacacggggcaggggggagggggaaacggggaactatagcaatatttaaagatgctttggaaaccaaccgtgaacacatcaacaccacgacgtctacgattacttgctattggccctcggatacatttaagagaaagagacagtcactcttttttttcttaaatgatatacatataaacagttatttttatcctattataattgtcttttgtctttatctagtactatgtggaaagggtttgcatcatagatttttcccagccttataatataccataagctcctacttccctgcccctccctaatcagtattctttcaagagttctttggtgaagccatctatctgaaactaaaatgaaccaaacccatatttcactggtggttggagaaaaccatggccaaaacgattgtggcaggtctcaatcttgggagtttttaagaaggaatgtgccagaggccgattcccaagaacagagttttcttttgttttgcagaggcattcaatgtgtctagtgcttgctggccacagcagttactaccacagagccttctgggaggggccgttgtgttgaaggaggctcctgcctgagggacagcatcaggcagtgggctctgtagagtgagaaccaggtggaggccttctgtgcccagctcagagttctgcaccacgccaggactgcccaggccaagggctactgacgcaagttccactcattccactctgtggggggcgccttgggcctctcctggaagggctcttggagaaggaattggagttacgtacaagtgacctaaatgggaagcttttctagatgagattggattaaattccatgtgatttctctttccctttaatccaggttgggactcgtttctttctggtggatcacagctgcccagatgttgcaattgatttttatgtttctgtagagaagtatttttctttcatcttcaggattttttttgccaccaaaagaaaacattggaactctgtgtttcctcttgattgtgacttcccagtgttgacagttaagtccttagtgtcgtaggtcccagcccaccaatactatatcaaacactgttatgcacataatgcagcactgtgatctaatttaaataatacttttttattatttatactactatatataatatacatcaacacttttgctatataacctaagtgataaccctcttttagttacctgccaaactctggacttggtttatattgcagttaacacagttacaaagctgtaatggtgtctttttttcctttgtaacggaatgtgtaaatcaaagtatatacattgtgtggtgttcctgtttctggagtttcatgaggatttacacatggcattcagtgttctgtatagatctgcctacctttgtgaattcatctgttaacccctcttcctttgagagagcaccggcgatggtggttaactccttgtgttttctctctctcctactggttattcttgaattaagcacagactcgtcagctcggttgctttatcatgaataatgtgtgtgaccttgcagttcttccacagttcagcaaacaagtgctagcttcactgaccaaaaattaaggaaggaaaacacagtttttaaaacgatccatcttttaacagccgaaaccgatgtgtctatggtgctgcaccttgctgttgtacttctgaaatcagacgtgtgtgaacgatcatttctgacttaaccgtgagatgctcacgagtacccttcctgttgttttgttagcattgaaatcgagactatttatttggaatatatacaacagtgtttttccactgtatttcatttgcaaaagttgagaactgctttctctaccttttgcaaaataattgatattccatattggattctcaaagacttcgatatggtgaacctattaaacctagaaattgtattcatcctttcatgactgtggcctgagttccccagcccctctcctccttttttttagatgagatttagcacactctcagttatttaaacatgcaacatttcttgagtatgtatgttgaggccatctgagctcatagctgattcagtaaccagtttcatgctgtgtcattcacactcactacttaatactgccatggtgaaaatgtggaggaaaaatgtatccatgtgtgtctgggaagcatatacacttgtacattttttaatactctgattctgtaacatttctgagttttgttttgttttacagaaaaaaaaaaaaagtgataaagcaatcagaagaccaagaggtttactattgatgcttagggtcgtctgaccttggctggccaatagacctacacggccaaattaatttacgagagtaataatttttcaaaagccaattttttttctgtattttctgtatgaaactgccaatatcatgaatagaaagggagaaccataaaggagaaagaacgtgatgttctgttatgttcatgtaaacctaaagaaacagtgtggaggcaggcgcgatcagccgaactctagggacttggtgttgcttggaaggcatccatacctgcattttgcattcttcgtatgtaatcatattgccaaagacaaactatttcatcatttattgtaaataacacttttccccagacctaccataaagtttctgtgatgtattgtcttccagttgcaataaaaattactgagttgcatcaattgaagaaaaacacca

SEQ ID NO: 135038 - DNA, 467 bp, Homo sapiens
  Payload ID: 6395
  Gene Symbol: FOXN3
  Gene Name: forkhead box N3
  ENST ID: ENST00000556916
  CDS Start-End: 1-335
tctacaactggatcttggaacattttccgtattttgcaaatgcacctactgggtggaaaaactcagtgagacacaatttatcattgaataagtgttttaagaaagtggacaaagagaggagtcagagtattgggaaagggtcgttgtggtgcatagacccagagtatagacaaaatctaattcaggctttgaaaaagacaccttatcacccacacccacacgtgttcaatacacctcccacctgtcctcaggcatatcaaagcacatcaggtccacccatctggccgggcagtaccttcttcaagagaaatggagcccttctccaagaaaaatgaaaaccttcatctccattgagaaacaaggctgaacactgtaaggagggttacagaatttaaagcagatgtgacctctactatccaagaatgtttgtttatctatttatttaataaagagtgtgtggcgcctgt

SEQ ID NO: 135039 - DNA, 513 bp, Homo sapiens
  Payload ID: 6395
  Gene Symbol: FOXN3
  Gene Name: forkhead box N3
  ENST ID: ENST00000557572
  CDS Start-End: 1-240
cggccgctgccaatcactcccattggggtgacagcggccatgagacaaagtgtgtataccatgattcatctttgtgactctagcagccaaacatacattgtgccagaactttcagctacaagcattttcctccaccttcctcttttgggagaaagacgcaacagttctgtggagagcatcataattcagaggacatgcaggaacctcagccaacaacacaaacttcaggaccaagcatgatgttaacattttcaatagcagggcttgtagggggcaggaagaagaggagacaagaagtcaagactcctaatctcagctccgcatgaatggaaaaacctctttatgcttctgttattttcttccataaaagtagattggggaaagagtatagttgttcttcaaaaagtaaatataaaactaccatataacctagcaattccactcctaggtatatacacaaaagaattgaaaactgatacttaaacaaacatatatacatgcatgttcatagca

SEQ ID NO: 135040 - DNA, 555 bp, Homo sapiens
  Payload ID: 6395
  Gene Symbol: FOXN3
  Gene Name: forkhead box N3
  ENST ID: ENST00000553840
  CDS Start-End: 1-555
ttgcaaatgcacctactgggtggaaaaactcagtgagacacaatttatcattgaataagtgttttaagaaagtggacaaagagaggagtcagagtattgggaaagggtcgttgtggtgcatagacccagagtatagacaaaatctaattcaggctttgaaaaagacaccttatcacccacacccacacgtgttcaatacacctcccacctgtcctcaggcatatcaaagcacatcaggtccacccatctggccgggcagtaccttcttcaagagaaatggagcccttctccaagatcctgacattgatgctgccagtgccatgatgcttttgaatactccccctgagatacaagcagttcctccaggagtgatccaaaatggagcgcgggtcctgagccgagggctgtttcctggcgtgcggccgctgccaatcactcccattggggtgacagcggccatgaggaatggcatcaccagctgccggatgcggactgagagtgagccatcttgtggctccccagtggtcagcggagaccccaaggaggatcacaact

SEQ ID NO: 135041 - DNA, 450 bp, Homo sapiens
  Payload ID: 6395
  Gene Symbol: FOXN3
  Gene Name: forkhead box N3
  ENST ID: ENST00000554005
  CDS Start-End: 1-276
tttccgtattttgcaaatgcacctactgggtggaaaaactcagtgagacacaatttatcattgaataagtgttttaagaaagtggacaaagagaggagtcagagtattgggaaagggtcgttgtggtgcatagacccagagtatagacaaaatctaattcaggctttgaaaaagacaccttatcacccacacccacacgtgttcaatacacctcccacctgtcctcaggcatatcaaagagacggggtttcaccatcttggccaggctggtcttgaactcctgacctcgtgatccacctgcctcggcttcccaagtgctgggattacaggcgtgagccaccgagcccggcctggtgctgaaccaaattacatttccaccaacaagcacatcaggtccacccatctggccgggcagtaccttcttcaagagaaatggagcccttctccaag

SEQ ID NO: 135042 - DNA, 851 bp, Homo sapiens
  Payload ID: 6395
  Gene Symbol: FOXN3
  Gene Name: forkhead box N3
  ENST ID: ENST00000555855
  CDS Start-End: 228-851
agctcggccgggagacggcgcgacccggcggcggggccacccgcgagtccagcgtcgccgcagccccccaatgcggccgcgagaagcagcgggggggcaggcgatcgaagcagcctctagaagaccagcattctcgtgattatggaggcccctctgtcttttctgtgacgggagcaatgctgacctcggtttcctggacccattccgactcaggagccttcacgtaaatgggtccagtcatgcctcccagtaagaagccagaaagctcaggaattagtgtctccagtggactgagtcagtgttacgggggcagcggtttctccaaggcccttcaggaagacgatgacctcgacttttctctgcctgacatccgattagaagagggggccatggaagatgaagagctgaccaacctgaactggctgcacgagagcaagaacttgctgaagagctttggggagtcggtcctcaggagtgtcagccccgtccaggacctggacgatgacacccccccatcccctgcccactctgacatgccctacgatgccaggcagaaccccaactgcaaacccccctactccttcagctgcctcatatttatggccatcgaggactctccaaccaagcgcctgccagtgaaggatatctacaactggatcttggaacattttccgtattttgcaaatgcacctactgggtggaaaaactcagtgagacacaatttatcattgaataagtgttttaagaaagtggacaaagagaggagtcagagtattgggaaagggtcgttgtggtgcatagacccagagtatagacaaaatctaattcaggctttgaaaaagacaccttat

SEQ ID NO: 135043 - DNA, 398 bp, Homo sapiens
  Payload ID: 6395
  Gene Symbol: FOXN3
  Gene Name: forkhead box N3
  ENST ID: ENST00000557718
  CDS Start-End: 1-231
gcacctactgggtggaaaaactcagtgagacacaatttatcattgaataagtgttttaagaaagtggacaaagagaggagtcagagtattgggaaagggtcgttgtggtgcatagacccagagtatagacaaaatctaattcaggctttgaaaaagacaccttatcacccacacccacacgtgttcaatacacctcccacctgtcctcaggcatatcaaagggaaggatgactaagagtttagtgctggaagagcagaagaggaaagctggaagatcagaaatgaaattggagctgttgatgcgtgtgtctctatgcacatcaggtccacccatctggccgggcagtaccttcttcaagagaaatggagcccttctccaagttcctccaggagtgatc

SEQ ID NO: 135044 - DNA, 337 bp, Homo sapiens
  Payload ID: 6395
  Gene Symbol: FOXN3
  Gene Name: forkhead box N3
  ENST ID: ENST00000553904
  CDS Start-End: 174-337
gtagcttgcaggtttctgatatcgcatcagtggacaggcggcatgcactatattaacagcctctagaagaccagcattctcgtgattatggaggcccctctgtcttttctgtgacgggagcaatgctgacctcggtttcctggacccattccgactcaggagccttcacgtaaatgggtccagtcatgcctcccagtaagaagccagaaagctcaggaattagtgtctccagtggactgagtcagtgttacgggggcagcggtttctccaaggcccttcaggaagacgatgacctcgacttttctctgcctgacatccgattagaagagggggccat

SEQ ID NO: 135045 - DNA, 2692 bp, Homo sapiens
  Payload ID: 6395
  Gene Symbol: FOXN3
  Gene Name:: forkhead box N3
  Uniprot ID: O00409
  ENST ID: ENST00000557258
  CDS Start-End: 257-1663
gcgggaggacgcgcggcgcgcccggcggacgccgcaggtcccatgccgcgccgcgacccccgcgcccctgccgcccgcgcccgcggccgccccccgccgcccgccgccccgggctcgccgcgccgcgcccgcgcgtccttagcggggccaccgagcgatgcccgccgggcgcccgcgaaagtttgtcggctcctgctgaagggcagcggcgcccccgcacccccgtgccccgctccggccaggagccttcacgtaaatgggtccagtcatgcctcccagtaagaagccagaaagctcaggaattagtgtctccagtggactgagtcagtgttacgggggcagcggtttctccaaggcccttcaggaagacgatgacctcgacttttctctgcctgacatccgattagaagagggggccatggaagatgaagagctgaccaacctgaactggctgcacgagagcaagaacttgctgaagagctttggggagtcggtcctcaggagtgtcagccccgtccaggacctggacgatgacacccccccatcccctgcccactctgacatgccctacgatgccaggcagaaccccaactgcaaacccccctactccttcagctgcctcatatttatggccatcgaggactctccaaccaagcgcctgccagtgaaggatatctacaactggatcttggaacattttccgtattttgcaaatgcacctactgggtggaaaaactcagtgagacacaatttatcattgaataagtgttttaagaaagtggacaaagagaggagtcagagtattgggaaagggtcgttgtggtgcatagacccagagtatagacaaaatctaattcaggctttgaaaaagacaccttatcacccacacccacacgtgttcaatacacctcccacctgtcctcaggcatatcaaagcacatcaggtccacccatctggccgggcagtaccttcttcaagagaaatggagcccttctccaagttcctccaggagtgatccaaaatggagcgcgggtcctgagccgagggctgtttcctggcgtgcggccgctgccaatcactcccattggggtgacagcggccatgaggaatggcatcaccagctgccggatgcggactgagagtgagccatcttgtggctccccagtggtcagcggagaccccaaggaggatcacaactacagcagtgccaagtcctccaacgcccggagcacctcgcccaccagcgactccatctcctcctcctcctcctcagccgacgaccactatgagtttgccaccaaggggagccaggagggcagcgagggcagcgaggggagcttccggagccacgagagccccagcgacacggaagaggacgacaggaagcacagccagaaggagcccaaggattctctgggggacagcgggtacgcatcccagcacaagaagcgccagcacttcgccaaggccaggaaggtccccagcgacacactgcccctcaaaaagagacgcaccgaaaagccccccgagagcgatgatgaggagatgaaagaagcggcagggtccctcctgcacttagcagggatccggtcctgtttgaataacatcaccaatcggacggcaaaggggcagaaagagcaaaaggaaaccacaaaaaattaaaaacaagtcactgatttgttttgaacttacgaccatttggtttcagcatgtcaggagatttctaatgatttgtggcaatatcagcaattttttttcttttttcttgtttttggtttggttttctttcttttcttttccttttattttgttttaatttgccccctcttctttgttttggacccttaagaattttatttttaaaggagattgaagccatagaactcatattgacactcagctgttttacaaaagcttttcattatctgaagacaaaaccgaaaaagccaaaattaccattgcttcctccagcttgtcagaaacctgtggctgaatccgcagggatgtcaacgtcaatatcacaggaacacacattcggcacctagaaggcacgtgggcaaagtaatcatcgttcaggcccaacccttaggtttaaaaagtcaggttgtccatcccattgggttcactgagtgaaggcacataaagcaattgaggaggaggaggaacccctcgtccccctaggagcagacccaagcttgtggcaccaggcatctgatggtgccaggaaagccactggaattgtcacacggcgagcacagagggccggccaccagtcctcgatgcttctgaaccctgaagcccgatgacatcttacgaggtggacgttggactgttcatgcgcatcgggtgtcagtgactcatggagaagaaatggggtaaatttttagtgatgttgctaatcattgaattctgttctctattaaattaagaaaatgttccaaaagccataagcctgaagattggccctgtgcacgcacgcacacacacacacacacacacacacacacacacacacacacgaaggagagagagagaaaactgatggggaaaacaagctgtgtcttcttaactgcccaagtgaaaagcaaccaagtccaggaaattacaatagctgttaaggaaaggaaataatggtacagatctttttctgtctatcaaaactatttgatccaagtgaaaaaaaaaaaaaaa

SEQ ID NO: 135046 - DNA, 1595 bp, Homo sapiens
  Payload ID: 6395
  Gene Symbol: FOXN3
  Gene Name: forkhead box N3
  Uniprot ID: O00409
  ENST ID: ENST00000555353
  CDS Start-End: 137-1543
gcgatctgctgcagctcggccgggagacggcgcgacccggcggcggggccacccgcgagtccagcgtcgccgcagccccccaatgcggccgcgagaagcagcgggggggcaggcgatcgaaggagccttcacgtaaatgggtccagtcatgcctcccagtaagaagccagaaagctcaggaattagtgtctccagtggactgagtcagtgttacgggggcagcggtttctccaaggcccttcaggaagacgatgacctcgacttttctctgcctgacatccgattagaagagggggccatggaagatgaagagctgaccaacctgaactggctgcacgagagcaagaacttgctgaagagctttggggagtcggtcctcaggagtgtcagccccgtccaggacctggacgatgacacccccccatcccctgcccactctgacatgccctacgatgccaggcagaaccccaactgcaaacccccctactccttcagctgcctcatatttatggccatcgaggactctccaaccaagcgcctgccagtgaaggatatctacaactggatcttggaacattttccgtattttgcaaatgcacctactgggtggaaaaactcagtgagacacaatttatcattgaataagtgttttaagaaagtggacaaagagaggagtcagagtattgggaaagggtcgttgtggtgcatagacccagagtatagacaaaatctaattcaggctttgaaaaagacaccttatcacccacacccacacgtgttcaatacacctcccacctgtcctcaggcatatcaaagcacatcaggtccacccatctggccgggcagtaccttcttcaagagaaatggagcccttctccaagttcctccaggagtgatccaaaatggagcgcgggtcctgagccgagggctgtttcctggcgtgcggccgctgccaatcactcccattggggtgacagcggccatgaggaatggcatcaccagctgccggatgcggactgagagtgagccatcttgtggctccccagtggtcagcggagaccccaaggaggatcacaactacagcagtgccaagtcctccaacgcccggagcacctcgcccaccagcgactccatctcctcctcctcctcctcagccgacgaccactatgagtttgccaccaaggggagccaggagggcagcgagggcagcgaggggagcttccggagccacgagagccccagcgacacggaagaggacgacaggaagcacagccagaaggagcccaaggattctctgggggacagcgggtacgcatcccagcacaagaagcgccagcacttcgccaaggccaggaaggtccccagcgacacactgcccctcaaaaagagacgcaccgaaaagccccccgagagcgatgatgaggagatgaaagaagcggcagggtccctcctgcacttagcagggatccggtcctgtttgaataacatcaccaatcggacggcaaaggggcagaaagagcaaaaggaaaccacaaaaaattaaaaacaagtcactgatttgttttgaacttacgaccatttggtttcagcatgtc

SEQ ID NO: 135047 - DNA, 505 bp, Homo sapiens
  Payload ID: 6395
  Gene Symbol: FOXN3
  Gene Name: forkhead box N3
  ENST ID: ENST00000555034
  CDS Start-End: 226-505
ggcattccccttctgcacgatggcaaaatctgggcaaagttgaaagttgcaagattccagtcaaacaattgtccttgcttgggtaaatatcctcaaatgaaaaaaaatcagcctctagaagaccagcattctcgtgattatggaggcccctctgtcttttctgtgacgggagcaatgctgacctcggtttcctggacccattccgactcaggagccttcacgtaaatgggtccagtcatgcctcccagtaagaagccagaaagctcaggaattagtgtctccagtggactgagtcagtgttacgggggcagcggtttctccaaggcccttcaggaagacgatgacctcgacttttctctgcctgacatccgattagaagagggggccatggaagatgaagagctgaccaacctgaactggctgcacgagagcaagaacttgctgaagagctttggggagtcggtcctcaggagtgtcagccccgtccaggacctggacgatgaca

SEQ ID NO: 135048 - DNA, 366 bp, Homo sapiens
  Payload ID: 6395
  Gene Symbol: FOXN3
  Gene Name: forkhead box N3
  ENST ID: ENST00000553353
  CDS Start-End: 1-366
agtcatgtgagcgctgactctaatcgtggctatagtagagggggaagaaaagtcccgaatctccaagaatcaaggtacagggagcctggcacagagagtattgggaaagggtcgttgtggtgcatagacccagagtatagacaaaatctaattcaggctttgaaaaagacaccttatcacccacacccacacgtgttcaatacacctcccacctgtcctcaggcatatcaaagcacatcaggtccacccatctggccgggcagtaccttcttcaagagaaatggagcccttctccaagatcctgacattgatgctgccagtgccatgatgcttttgaatactccccctgagatacaagcaggttgt

SEQ ID NO: 135049 - DNA, 2421 bp, Homo sapiens
  Payload ID: 6395
  Gene Symbol: FOXN3
  Gene Name: forkhead box N3
  Uniprot ID: O00409
  ENST ID: ENST00000615335
  CDS Start-End: 1-1407
atgggtccagtcatgcctcccagtaagaagccagaaagctcaggaattagtgtctccagtggactgagtcagtgttacgggggcagcggtttctccaaggcccttcaggaagacgatgacctcgacttttctctgcctgacatccgattagaagagggggccatggaagatgaagagctgaccaacctgaactggctgcacgagagcaagaacttgctgaagagctttggggagtcggtcctcaggagtgtcagccccgtccaggacctggacgatgacacccccccatcccctgcccactctgacatgccctacgatgccaggcagaaccccaactgcaaacccccctactccttcagctgcctcatatttatggccatcgaggactctccaaccaagcgcctgccagtgaaggatatctacaactggatcttggaacattttccgtattttgcaaatgcacctactgggtggaaaaactcagtgagacacaatttatcattgaataagtgttttaagaaagtggacaaagagaggagtcagagtattgggaaagggtcgttgtggtgcatagacccagagtatagacaaaatctaattcaggctttgaaaaagacaccttatcacccacacccacacgtgttcaatacacctcccacctgtcctcaggcatatcaaagcacatcaggtccacccatctggccgggcagtaccttcttcaagagaaatggagcccttctccaagttcctccaggagtgatccaaaatggagcgcgggtcctgagccgagggctgtttcctggcgtgcggccgctgccaatcactcccattggggtgacagcggccatgaggaatggcatcaccagctgccggatgcggactgagagtgagccatcttgtggctccccagtggtcagcggagaccccaaggaggatcacaactacagcagtgccaagtcctccaacgcccggagcacctcgcccaccagcgactccatctcctcctcctcctcctcagccgacgaccactatgagtttgccaccaaggggagccaggagggcagcgagggcagcgaggggagcttccggagccacgagagccccagcgacacggaagaggacgacaggaagcacagccagaaggagcccaaggattctctgggggacagcgggtacgcatcccagcacaagaagcgccagcacttcgccaaggccaggaaggtccccagcgacacactgcccctcaaaaagagacgcaccgaaaagccccccgagagcgatgatgaggagatgaaagaagcggcagggtccctcctgcacttagcagggatccggtcctgtttgaataacatcaccaatcggacggcaaaggggcagaaagagcaaaaggaaaccacaaaaaattaaaaacaagtcactgatttgttttgaacttacgaccatttggtttcagcatgtcaggagatttctaatgatttgtggcaatatcagcaattttttttcttttttcttgtttttggtttggttttctttcttttcttttccttttattttgttttaatttgccccctcttctttgttttggacccttaagaattttatttttaaaggagattgaagccatagaactcatattgacactcagctgttttacaaaagcttttcattatctgaagacaaaaccgaaaaagccaaaattaccattgcttcctccagcttgtcagaaacctgtggctgaatccgcagggatgtcaacgtcaatatcacaggaacacacattcggcacctagaaggcacgtgggcaaagtaatcatcgttcaggcccaacccttaggtttaaaaagtcaggttgtccatcccattgggttcactgagtgaaggcacataaagcaattgaggaggaggaggaacccctcgtccccctaggagcagacccaagcttgtggcaccaggcatctgatggtgccaggaaagccactggaattgtcacacggcgagcacagagggccggccaccagtcctcgatgcttctgaaccctgaagcccgatgacatcttacgaggtggacgttggactgttcatgcgcatcgggtgtcagtgactcatggagaagaaatggggtaaatttttagtgatgttgctaatcattgaattctgttctctattaaattaagaaaatgttccaaaagccataagcctgaagattggccctgtgcacgcacgcacacacacacacacacacacacacacacacacacacacacgaaggagagagagagaaaactgatggggaaaacaagctgtgtcttcttaactgcccaagtgaaaagcaaccaagtccaggaaattacaatagctgttaaggaaaggaaataatggtacagatctttttctgtctatcaaaactatttgatccaagtg

SEQ ID NO: 135050 - DNA, 3350 bp, Homo sapiens
  Payload ID: 6396
  Gene Symbol: FOXN4
  Gene Name: forkhead box N4
  Uniprot ID: Q96NZ1
  ENST ID: ENST00000299162
  CDS Start-End: 106-1659
aaattgcggaacgcgaggggcgagcgcgagggagcccccctccggaacccctgcccacccccggagcgccggcagcggcggccccgcgaggatcggctccaggagatgatagaaagtgacacctcatccataatgtcaggaattattcgaaactcagggcaaaatcaccacccctctccacaggaatacaggcttctagccaccaccagcgatgatgaccttcccggggacctgcagtcgctgtcgtggctcacggcggtggatgtgcctcggctgcagcagatggcaagtggccgcgtggacctgggtggcccctgcgtgccacatccacacccaggtgccttggctggggtggccgacctgcatgtgggagccactccaagtccccttctccatggcccagcaggcatggccccccgaggcatgccaggtctgggccccataactggccacagagacagcatgagccagttccccgtggggggccagccctcatctggcctgcaggacccgccgcatctgtactcacctgccacccaaccacagttcccgctccccccgggtgcccagcagtgccctcctgtgggcctctatggccccccatttggggtgcggcccccctacccccagccccacgtggctgtgcattcatctcaagaactgcaccccaaacactaccccaagcccatctactcgtacagctgtctgatcgccatggccctgaagaacagcaagacaggcagcctgcctgtgagcgagatctacagcttcatgaaggagcacttcccctacttcaagacggcccccgacgggtggaagaactcggtgcggcacaacctgtctctgaacaagtgcttcgagaaggtggagaacaagatgagcggctcctcccgcaagggctgcctgtgggctctgaacctggcccgcatcgacaagatggaggaggagatgcacaagtggaagaggaaggacctggctgccatccaccggagtatggccaaccctgaggagttggacaagctgatctccgaccggcctgaaagctgccggcgccccggcaaaccgggggaaccagaggcccccgtgctgactcacgccaccacagtggccgtggcgcatggctgcctggctgtctcccagctcccaccccagccactgatgaccctgtccctgcagtcagtccccctgcaccaccaggtccagccccaggcacatcttgctccagactctccagcaccagcccagaccccgccactgcacgccctgccggacctcagccccagcccgctcccccaccccgccatgggaagggctcctgtagacttcatcaacatcagcaccgacatgaacactgaggtggatgccctcgacccgagcatcatggacttcgctctgcaggggaacctgtgggaggagatgaaggatgagggattcagcttggacacactgggcgcctttgcagactccccgcttggctgtgacctgggggcctcaggcctaacccctgcctcgggtggcagcgaccagtccttcccagacttgcaggtgacgggtctctacacagcgtactccactccggacagtgtggctgcatcgggcaccagctcctcctcccagtacctgggtgcacaggggaacaagcctatagccctgctttgagctgtcagcctcacctgccctggaaccccggcacccggcttgggcagagaactgactagaacagggtgttcccagaaggcaggtccctcattgtccccgaagcctctcctggacctgtggcgaagttgccggctggacagggaagcggttcccctcagcagcccctctccttctcgtgcctccccctggagcttccggagcagtttctgggggctcttccaagtcagaagaatggaggaaggtggacaagcaacccagcatcccccgaccccttgacactcctccgaggcctgagccgcaatgcctgcccgtgttgagtgagacttctccatcctggatcctggctgcgtgacctcagtgacctgcaccccattttgggacaccttggtgcattaaggaaacaccctggggtgaaagcccttgaattcatcctcatgggaaatggctgagtggatcaaacctcagccgcagcctccgggggacaggcccagggcgggaaatggagccggagaagcttgagcctctctcttggacaggacaagctgaactctgaaatgggagccggtccaggtggccttcagccccacctttccgatagtctgttagaattttattagcgcagattcctgggccatgccgggtaccgtgaccttgtgtaaatttatttatatttattgtggcccatccaccccacttctgcaaacccatcccgaggcctctggaatgggactccttctccctccctacctcccagccatcctaactcctacaggccagagaatgacatctctaactggctcataatcccttggcagcctggggctactttttagaaccagcaagcactgttgatactgtgaaacatcccattttttccgtattagagaccagatatttttctacctgttcatgattcacatctcttcttgcatgtacctaagaggggcggtgccattgtttgggggcttggggggctttcaaaggggaaaatgcgatgggagagggaggaactggaggggggtgcttttgtactgggatttaagacacccctgatggaatgaaagccaactgaaccacgtaaagctcgaaccacgtggcaagtggtggacaaaacttcaacgcatgatatttattggcacttcctcacctccctttgccctgcagctgtttttatgcttctttttctctccttgctaattactgactccccaagtggcaagttccgcagatagctgggttagaagagagacaggggagtgagctagtcaaatgtgaaaaatgctctcccagcaaagctgagacaaaattggagaagctgcagcctcacgcaccatccccctctttccaccagatggatgttgacttggtgtctgggagttcccgaaccctagagccaggatgttctgtttaatcaacagctcagccagctgcctgggagttttggcattaagccccgccttgaagggcgagctttaagtttttcccagttctggaactttctaccgagtatccaccacccttagacacaatcccagtgctacccgtctgacctgcactgctcatctgctttgtgtaacatgacccctgataagatgttgaaactgttattcacaaagactccgtgtttgggcaacatcaagactgtaagtgtagaattgagcaactgtcttctatcaataaaggctgaatgg

SEQ ID NO: 135051 - DNA, 2958 bp, Homo sapiens
  Payload ID: 6396
  Gene Symbol: FOXN4
  Gene Name: forkhead box N4
  Uniprot ID: Q96NZ1
  ENST ID: ENST00000355216
  CDS Start-End: 253-1266
aaattgcggaacgcgaggggcgagcgcgagggagcccccctccggaacccctgcccacccccggagcgccggcagcggcggccccgcgaggatcggctccaggagatgatagaaagtgacacctcatccataatgtcaggaattattcgaaactcagggcaaaatcaccacccctctccacaggaatacagggtcaagcagggcaggcttcctggcagaggcggcattgggctgtcagcctgagaccctttcatgcctggcctgccctgtcctgccctgccctgccctgccccacctcctgcccccagctgtctgatcgccatggccctgaagaacagcaagacaggcagcctgcctgtgagcgagatctacagcttcatgaaggagcacttcccctacttcaagacggcccccgacgggtggaagaactcggtgcggcacaacctgtctctgaacaagtgcttcgagaaggtggagaacaagatgagcggctcctcccgcaagggctgcctgtgggctctgaacctggcccgcatcgacaagatggaggaggagatgcacaagtggaagaggaaggacctggctgccatccaccggagtatggccaaccctgaggagttggacaagctgatctccgaccggcctgaaagctgccggcgccccggcaaaccgggggaaccagaggcccccgtgctgactcacgccaccacagtggccgtggcgcatggctgcctggctgtctcccagctcccaccccagccactgatgaccctgtccctgcagtcagtccccctgcaccaccaggtccagccccaggcacatcttgctccagactctccagcaccagcccagaccccgccactgcacgccctgccggacctcagccccagcccgctcccccaccccgccatgggaagggctcctgtagacttcatcaacatcagcaccgacatgaacactgaggtggatgccctcgacccgagcatcatggacttcgctctgcaggggaacctgtgggaggagatgaaggatgagggattcagcttggacacactgggcgcctttgcagactccccgcttggctgtgacctgggggcctcaggcctaacccctgcctcgggtggcagcgaccagtccttcccagacttgcaggtgacgggtctctacacagcgtactccactccggacagtgtggctgcatcgggcaccagctcctcctcccagtacctgggtgcacaggggaacaagcctatagccctgctttgagctgtcagcctcacctgccctggaaccccggcacccggcttgggcagagaactgactagaacagggtgttcccagaaggcaggtccctcattgtccccgaagcctctcctggacctgtggcgaagttgccggctggacagggaagcggttcccctcagcagcccctctccttctcgtgcctccccctggagcttccggagcagtttctgggggctcttccaagtcagaagaatggaggaaggtggacaagcaacccagcatcccccgaccccttgacactcctccgaggcctgagccgcaatgcctgcccgtgttgagtgagacttctccatcctggatcctggctgcgtgacctcagtgacctgcaccccattttgggacaccttggtgcattaaggaaacaccctggggtgaaagcccttgaattcatcctcatgggaaatggctgagtggatcaaacctcagccgcagcctccgggggacaggcccagggcgggaaatggagccggagaagcttgagcctctctcttggacaggacaagctgaactctgaaatgggagccggtccaggtggccttcagccccacctttccgatagtctgttagaattttattagcgcagattcctgggccatgccgggtaccgtgaccttgtgtaaatttatttatatttattgtggcccatccaccccacttctgcaaacccatcccgaggcctctggaatgggactccttctccctccctacctcccagccatcctaactcctacaggccagagaatgacatctctaactggctcataatcccttggcagcctggggctactttttagaaccagcaagcactgttgatactgtgaaacatcccattttttccgtattagagaccagatatttttctacctgttcatgattcacatctcttcttgcatgtacctaagaggggcggtgccattgtttgggggcttggggggctttcaaaggggaaaatgcgatgggagagggaggaactggaggggggtgcttttgtactgggatttaagacacccctgatggaatgaaagccaactgaaccacgtaaagctcgaaccacgtggcaagtggtggacaaaacttcaacgcatgatatttattggcacttcctcacctccctttgccctgcagctgtttttatgcttctttttctctccttgctaattactgactccccaagtggcaagttccgcagatagctgggttagaagagagacaggggagtgagctagtcaaatgtgaaaaatgctctcccagcaaagctgagacaaaattggagaagctgcagcctcacgcaccatccccctctttccaccagatggatgttgacttggtgtctgggagttcccgaaccctagagccaggatgttctgtttaatcaacagctcagccagctgcctgggagttttggcattaagccccgccttgaagggcgagctttaagtttttcccagttctggaactttctaccgagtatccaccacccttagacacaatcccagtgctacccgtctgacctgcactgctcatctgctttgtgtaacatgacccctgataagatgttgaaactgttattcacaaagactccgtgtttgggcaacatcaagactgtaagtgtagaattgagcaactgtcttctatcaataaaggctgaatggc

SEQ ID NO: 135052 - DNA, 1219 bp, Homo sapiens
  Payload ID: 6396
  Gene Symbol: FOXN4
  Gene Name: forkhead box N4
  ENST ID: ENST00000423960
  CDS Start-End: 1-657
ggggacctgcagtcgctgtcgtggctcacggcggtggatgtgcctcggctgcagcagatggcaagtggccgcgtggacctgggtggcccctgcgtgccacatccacacccaggtgccttggctggggtggccgacctgcatgtgggagccactccaagtccccttctccatggcccagcaggcatggccccccgaggcatgccaggtctgggccccataactggccacagagacagccagatgagccagttccccgtggggggccagccctcatctggcctgcaggacccgccgcatctgtactcacctgccacccaaccacagttcccgctccccccgggtgcccagcagctgtctgatcgccatggccctgaagaacagcaagacaggcagcctgcctgtgagcgagatctacagcttcatgaaggagcacttcccctacttcaagacggcccccgacgggtggaagaactcggtgcggcacaacctgtctctgaacaagtgcttcgagaaggtggagaacaagatgagcggctcctcccgcaagggctgcctgtgggctctgaacctggcccgcatcgacaagatggaggaggagatgcacaagtggaagaggaaggacctggctgccatccaccggagtatggccaaccctgaggagttggacaagctgatctccgaccggcctgaaagctgccggcgccccggcaaaccgggggaaccagaggcccccgtgctgactcacgccaccacagtggccgtggcgcatggctgcctggctgtctcccagctcccaccccagccactgatgaccctgtccctgcagtcagtccccctgcaccaccaggtccagccccaggcacatcttgctccagactctccagcaccagcccagaccccgccactgcacgccctgccggacctcagccccagcccgctcccccaccccgccatgggaagggctcctgtagacttcatcaacatcagcaccgacatgaacactgaggtggatgccctcgacccgagcatcatggacttcgctctgcaggggaacctgtgggaggagatgaaggatgagggattcagcttggacacactgggcgcctttgcagactccccgcttggctgtgacctgggggcctcaggcctaacccctgcctcgggtggcagcgaccagtccttcccagacttgcaggtgacgggtctctacacagcgtac

SEQ ID NO: 135053 - DNA, 1593 bp, Homo sapiens
  Payload ID: 6396
  Gene Symbol: FOXN4
  Gene Name: forkhead box N4
  ENST ID: ENST00000468516
  CDS Start-End: 1-253
gaagaacagcaagacaggcagcctgcctgtgagcgagatctacagcttcatgaaggagcacttcccctacttcaagacggcccccgacgggtggaagaactcggtgcggcacaacctgtctctgaacaagtgcttcgagaaggtggacaagcaacccagcatcccccgaccccttgacactcctccgaggcctgagccgcaatgcctgcccgtgttgagtgagacttctccatcctggatcctggctgcgtgacctcagtgacctgcaccccattttgggacaccttggtgcattaaggaaacaccctggggtgaaagcccttgaattcatcctcatgggaaatggctgagtggatcaaacctcagccgcagcctccgggggacaggcccagggcgggaaatggagccggagaagcttgagcctctctcttggacaggacaagctgaactctgaaatgggagccggtccaggtggccttcagccccacctttccgatagtctgttagaattttattagcgcagattcctgggccatgccgggtaccgtgaccttgtgtaaatttatttatatttattgtggcccatccaccccacttctgcaaacccatcccgaggcctctggaatgggactccttctccctccctacctcccagccatcctaactcctacaggccagagaatgacatctctaactggctcataatcccttggcagcctggggctactttttagaaccagcaagcactgttgatactgtgaaacatcccattttttccgtattagagaccagatatttttctacctgttcatgattcacatctcttcttgcatgtacctaagaggggcggtgccattgtttgggggcttggggggctttcaaaggggaaaatgcgatgggagagggaggaactggaggggggtgcttttgtactgggatttaagacacccctgatggaatgaaagccaactgaaccacgtaaagctcgaaccacgtggcaagtggtggacaaaacttcaacgcatgatatttattggcacttcctcacctccctttgccctgcagctgtttttatgcttctttttctctccttgctaattactgactccccaagtggcaagttccgcagatagctgggttagaagagagacaggggagtgagctagtcaaatgtgaaaaatgctctcccagcaaagctgagacaaaattggagaagctgcagcctcacgcaccatccccctctttccaccagatggatgttgacttggtgtctgggagttcccgaaccctagagccaggatgttctgtttaatcaacagctcagccagctgcctgggagttttggcattaagccccgccttgaagggcgagctttaagtttttcccagttctggaactttctaccgagtatccaccacccttagacacaatcccagtgctacccgtctgacctgcactgctcatctgctttgtgtaacatgacccctgataagatgttgaaactgttattcacaaagactccgtgtttgggcaacatcaagactgtaagtgtagaattgagcaactgtcttctatcaataaaggctgaatggc

SEQ ID NO: 135054 - DNA, 5735 bp, Homo sapiens
  Payload ID: 6397
  Gene Symbol: FOXO1
  Gene Name: forkhead box O1
  Uniprot ID: Q12778
  ENST ID: ENST00000379561
  CDS Start-End: 386-2353
gcagccgccacattcaacaggcagcagcgcagcgggcgcgccgctggggagagcaagcggcccgcggcgtccgtccgtccttccgtccgcggccctgtcagctggagcgcggcgcaggctctgccccggcccggcggctctggccggccgtccagtccgtgcggcggaccccgaggagcctcgatgtggatggccccgcgaagttaagttctgggctcgcgcttccactccgccgcgccttcctcccagtttccgtccgctcgccgcaccggcttcgttcccccaaatctcggaccgtcccttcgcgccccctccccgtccgcccccagtgctgcgttctccccctcttggctctcctgcggctgggggaggggcgggggtcaccatggccgaggcgcctcaggtggtggagatcgacccggacttcgagccgctgccccggccgcgctcgtgcacctggccgctgcccaggccggagtttagccagtccaactcggccacctccagcccggcgccgtcgggcagcgcggctgccaaccccgacgccgcggcgggcctgccctcggcctcggctgccgctgtcagcgccgacttcatgagcaacctgagcttgctggaggagagcgaggacttcccgcaggcgcccggctccgtggcggcggcggtggcggcggcggccgccgcggccgccaccggggggctgtgcggggacttccagggcccggaggcgggctgcctgcacccagcgccaccgcagcccccgccgcccgggccgctgtcgcagcacccgccggtgccccccgccgccgctgggccgctcgcggggcagccgcgcaagagcagctcgtcccgccgcaacgcgtggggcaacctgtcctacgccgacctcatcaccaaggccatcgagagctcggcggagaagcggctcacgctgtcgcagatctacgagtggatggtcaagagcgtgccctacttcaaggataagggtgacagcaacagctcggcgggctggaagaattcaattcgtcataatctgtccctacacagcaagttcattcgtgtgcagaatgaaggaactggaaaaagttcttggtggatgctcaatccagagggtggcaagagcgggaaatctcctaggagaagagctgcatccatggacaacaacagtaaatttgctaagagccgaagccgagctgccaagaagaaagcatctctccagtctggccaggagggtgctggggacagccctggatcacagttttccaaatggcctgcaagccctggctctcacagcaatgatgactttgataactggagtacatttcgccctcgaactagctcaaatgctagtactattagtgggagactctcacccattatgaccgaacaggatgatcttggagaaggggatgtgcattctatggtgtacccgccatctgccgcaaagatggcctctactttacccagtctgtctgagataagcaatcccgaaaacatggaaaatcttttggataatctcaaccttctctcatcaccaacatcattaactgtttcgacccagtcctcacctggcaccatgatgcagcagacgccgtgctactcgtttgcgccaccaaacaccagtttgaattcacccagcccaaactaccaaaaatatacatatggccaatccagcatgagccctttgccccagatgcctatacaaacacttcaggacaataagtcgagttatggaggtatgagtcagtataactgtgcgcctggactcttgaaggagttgctgacttctgactctcctccccataatgacattatgacaccagttgatcctggggtagcccagcccaacagccgggttctgggccagaacgtcatgatgggccctaattcggtcatgtcaacctatggcagccaggcatctcataacaaaatgatgaatcccagctcccatacccaccctggacatgctcagcagacatctgcagttaacgggcgtcccctgccccacacggtaagcaccatgccccacacctcgggtatgaaccgcctgacccaagtgaagacacctgtacaagtgcctctgccccaccccatgcagatgagtgccctggggggctactcctccgtgagcagctgcaatggctatggcagaatgggccttctccaccaggagaagctcccaagtgacttggatggcatgttcattgagcgcttagactgtgacatggaatccatcattcggaatgacctcatggatggagatacattggattttaactttgacaatgtgttgcccaaccaaagcttcccacacagtgtcaagacaacgacacatagctgggtgtcaggctgagggttagtgagcaggttacacttaaaagtacttcagattgtctgacagcaggaactgagagaagcagtccaaagatgtctttcaccaactcccttttagttttcttggttaaaaaaaaaaacaaaaaaaaaaaccctccttttttcctttcgtcagacttggcagcaaagacatttttcctgtacaggatgtttgcccaatgtgtgcaggttatgtgctgctgtagataaggactgtgccattggaaatttcattacaatgaagtgccaaactcactacaccatataattgcagaaaagattttcagatcctggtgtgctttcaagttttgtatataagcagtagatacagattgtatttgtgtgtgtttttggtttttctaaatatccaattggtccaaggaaagtttatactctttttgtaatactgtgatgggcctcatgtcttgataagttaaacttttgtttgtactacctgttttctgcggaactgacggatcacaaagaactgaatctccattctgcatctccattgaacagccttggacctgttcacgttgccacagaattcacatgagaaccaagtagcctgttatcaatctgctaaattaatggacttgttaaacttttggaaaaaaaaagattaaatgccagctttgtacaggtcttttctatttttttttgtttattttgttatttgcaaatttgtacaaacatttaaatggttctaatttccagataaatgatttttgatgttattgttgggacttaagaacatttttggaatagatattgaactgtaataatgttttcttaaaactagagtctactttgttacatagtcagcttgtaaattttgtggaaccacaggtatttggggcagcattcataattttcattttgtattctaactggattagtactaattttatacatgcttaactggtttgtacactttgggatgctacttagtgatgtttctgactaatcttaaatcattgtaattagtacttgcatattcaacgtttcaggccctggttgggcaggaaagtgatgtatagttatggacactttgcgtttcttatttaggataacttaatatgtttttatgtatgtattttaaagaaatttcatctgcttctactgaactatgcgtactgcatagcatcaagtcttctctagagacctctgtagtcctgggaggcctcataatgtttgtagatcagaaaagggagatctgcatctaaagcaatggtcctttgtcaaacgagggattttgatccacttcaccattttgagttgagctttagcaaaagtttcccctcataattctttgctcttgtttcagtccaggtggaggttggttttgtagttctgccttgaggaattatgtcaacactcatacttcatctcattctcccttctgccctgcagattagattacttagcacactgtggaagtttaagtggaaggagggaatttaaaaatgggacttgagtggtttgtagaatttgtgttcataagttcagatgggtagcaaatggaatagaacttacttaaaaattggggagatttatttgaaaaccagctgtaagttgtgcattgagattatgttaaaagccttggcttaagaatttgaaaatttctttagcctgtagcaacctaaactgtaattcctatcattatgttttattactttccaattacctgtaactgacagaccaaattaattggctttgtgtcctatttagtccatcagtattttcaagtcatgtggaaagcccaaagtcatcacaatgaagagaacaggtgcacagcactgttcctcttgtgttcttgagaaggatctaatttttctgtatatagcccacatcacacttgctttgtcttgtatgttaattgcatcttcattggcttggtatttcctaaatgtttaacaagaacacaagtgttcctgataagatttcctacagtaagccagctctattgtaagcttcccactgtgatgatcatttttttgaagattcattgaacagccaccactctatcatcctcattttggggcagtccaagacatagctggttttagaaacccaagttcctctaagcacagcctcccgggtatgtaactgaacttggtgccaaagtacttgtgtactaatttctattactacgtactgtcactttcctcccgtgccattactgcatcataatacaaggaacctcagagcccccatttgttcattaaagaggcaactacagccaaaatcactgttaaaatcttactacttcatggagtagctcttaggaaaatatatcttcctcctgagtctgggtaattatacctctcccaagcccccattgtgtgttgaaatcctgtcatgaatccttggtagctctctgagaacagtgaagtccagggaaaggcatctggtctgtctggaaagcaaacattatgtggcctctggtagtttttttcctgtaagaatactgactttctggagtaatgagtatatatcagttattgtacatgattgctttgtgaaatgtgcaaatgatatcacctatgcagccttgtttgatttattttctctggtttgtactgttattaaaagcatattgtattatagagctattcagatattttaaatataaagatgtattgtttccgtaatatagacgtatggaatatatttaggtaatagatgtattacttggaaagttctgctttgacaaactgacaaagtctaaatgagcacatgtatcccagtgagcagtaaatcaatggaacatcccaagaagaggataaggatgcttaaaatggaaatcattctccaacgatatacaaattggacttgttcaactgctggatatatgctaccaataaccccagccccaacttaaaattcttacattcaagctcctaagagttcttaatttataactaattttaaaagagaagtttcttttctggttttagtttgggaataatcattcattaaaaaaaatgtattgtggtttatgcgaacagaccaacctggcattacagttggcctctccttgaggtgggcacagcctggcagtgtggccaggggtggccatgtaagtcccatcaggacgtagtcatgcctcctgcatttcgctacccgagtttagtaacagtgcagattccacgttcttgttccgatactctgagaagtgcctgatgttgatgtacttacagacacaagaacaatctttgctataattgtataaagccataaatgtacataaattatgtttaaatggcttggtgtctttcttttctaattatgcagaataagctctttattaggaattttttgtgaagctattaaatacttgagttaagtcttgtcagcca

SEQ ID NO: 135055 - DNA, 7308 bp, Homo sapiens
  Payload ID: 6398
  Gene Symbol: FOXO3
  Gene Name: forkhead box O3
  Uniprot ID: O43524
  ENST ID: ENST00000343882
  CDS Start-End: 305-2326
gggaggaggaggaatgtggaaggtggcggcgcgcgagctgacaggcggttcctcgggcgggctgcggcgacggcccgagcgcttctccttcgccgaggttgcgcgccccctcctcgccgtgccccgggcccgcgcgggatcgtgcgtcgtcccgccgcgtccctgaagggaaggaagcgaggcggcggcggcggcgcccgggagccggagccttcgcggcgtccacgtccctcccccgctgcaccccgccccggcgcgagaggagagcgcgagagccccagccgcgggcgggcgggcggcgaagatggcagaggcaccggcttccccggccccgctctctccgctcgaagtggagctggacccggagttcgagccccagagccgtccgcgatcctgtacgtggcccctgcaaaggccggagctccaagcgagccctgccaagccctcgggggagacggccgccgactccatgatccccgaggaggaggacgatgaagacgacgaggacggcgggggacgggccggctcggccatggcgatcggcggcggcggcgggagcggcacgctgggctccgggctgctccttgaggactcggcccgggtgctggcacccggagggcaagaccccgggtctgggccagccaccgcggcgggcgggctgagcgggggtacacaggcgctgctgcagcctcagcaaccgctgccaccgccgcagccgggggcggctgggggctccgggcagccgaggaaatgttcgtcgcggcggaacgcctggggaaacctgtcctacgcggacctgatcacccgcgccatcgagagctccccggacaaacggctcactctgtcccagatctacgagtggatggtgcgttgcgtgccctacttcaaggataagggcgacagcaacagctctgccggctggaagaactccatccggcacaacctgtcactgcatagtcgattcatgcgggtccagaatgagggaactggcaagagctcttggtggatcatcaaccctgatggggggaagagcggaaaagccccccggcggcgggctgtctccatggacaatagcaacaagtataccaagagccgtggccgcgcagccaagaagaaggcagccctgcagacagcccccgaatcagctgacgacagtccctcccagctctccaagtggcctggcagccccacgtcacgcagcagtgatgagctggatgcgtggacggacttccgttcacgcaccaattctaacgccagcacagtcagtggccgcctgtcgcccatcatggcaagcacagagttggatgaagtccaggacgatgatgcgcctctctcgcccatgctctacagcagctcagccagcctgtcaccttcagtaagcaagccgtgcacggtggaactgccacggctgactgatatggcaggcaccatgaatctgaatgatgggctgactgaaaacctcatggacgacctgctggataacatcacgctcccgccatcccagccatcgcccactgggggactcatgcagcggagctctagcttcccgtataccaccaagggctcgggcctgggctccccaaccagctcctttaacagcacggtgttcggaccttcatctctgaactccctacgccagtctcccatgcagaccatccaagagaacaagccagctaccttctcttccatgtcacactatggtaaccagacactccaggacctgctcacttcggactcacttagccacagcgatgtcatgatgacacagtcggaccccttgatgtctcaggccagcaccgctgtgtctgcccagaattcccgccggaacgtgatgcttcgcaatgatccgatgatgtcctttgctgcccagcctaaccagggaagtttggtcaatcagaacttgctccaccaccagcaccaaacccagggcgctcttggtggcagccgtgccttgtcgaattctgtcagcaacatgggcttgagtgagtccagcagccttgggtcagccaaacaccagcagcagtctcctgtcagccagtctatgcaaaccctctcggactctctctcaggctcctccttgtactcaactagtgcaaacctgcccgtcatgggccatgagaagttccccagcgacttggacctggacatgttcaatgggagcttggaatgtgacatggagtccattatccgtagtgaactcatggatgctgatgggttggattttaactttgattccctcatctccacacagaatgttgttggtttgaacgtggggaacttcactggtgctaagcaggcctcatctcagagctgggtgccaggctgaaggatcactgaggaaggggaagtgggcaaagcagaccctcaaactgacacaagacctacagagaaaaccctttgccaaatctgctctcagcaagtggacagtgataccgtttacagcttaacacctttgtgaatcccacgccattttcctaacccagcagagactgttaatggccccttaccctgggtgaagcacttacccttggaacagaactctaaaaagtatgcaaaatcttccttgtacagggtggtgagccgcctgccagtggaggacagcacccctcagcaccacccaccctcattcagagcacaccgtgagcccccgtcggccattctgtggtgttttaatattgcgatggtttatgggacgttttaagtgttgttcttgtgtttgttttcctttgactttctgagtttttcacatgcattaacttgcggtatttttctgttaaaatgttaaccgtccttcccctagcaaatttaaaaacagaaagaaaatgttgtaccagttaccattccgggttcgagcatcacaagcttttgagcgcatggaactccataaactaacaaattacataaactaaagggggattttctttcttcttttgtttggtagaaaattatccttttctaaaaactgaacaatggcacaattgtttgctatgtgcacccgtccaggacagaaccgtgcataggcaaaaggagtggagcacagcgtccggcccagtgtgtttccggttctgagtcagggtgatctgtggacgggaccccagcaccaagtctacgggtgccagatcagtagggcctgtgatttcctgtcagtgtcctcagctaatgtgaacagtgttggtctgctggttagaaactagaatattgatattttcaggaaagaaatcagctcagctctccactcattgccaaatgtcactaaagggtttagttttaaggagaaagaaaaggaaaaaaaaaaaaaacaaaaaagtcctgttttgctttgcagaacaaatgaacttacaggtgagcattaagcttgcagtgagaaatgtgcgaagagtaaaaacccaagtcaatgctgaggcagttctaacttcactgttttcctaaatacacatccttgattattttcagccttgctatataatctgatctgctagaagtgtatgagtgagaggcaatagcatacaaactgattttttaaatataagcttaggttgtaattgtacaagtgactcaatggaagtacaaaatagggcagttttaacttttttttctgcttctatggatttcattttgttgtgttttcaaaaagttatggtgctgtataggtgctttctgtttaacctggaaagtgtgattatattcgttaccttctttggtagacggaatagttgggaccacctttggtacataagaaattggtataacgatgctctgattagcacagtatatgcatacttctccaaagtgatatatgaagactcttttctttgcataaaaagcattaggcatataaatgtataaatatattttatcatgtacagtacaaaaatggaaccttatgcatgggccttaggaatacaggctagtatttcagcacagacttccctgcttgagttcttgctgatgcttgcaccgtgacagtgggcaccaacacagacgtgccacccaaccccctgcacacaccaccggccaccaggggcccccttgtgcgccttggctttataactcctctgggggtgatattggtggtgatcacagctcctagcataatgagagttccatttggtattgtcacacgtctcctgcctcgcttgggttgccatgtttgagcgatggccctgttgatttcaccctgccttttactgaatctgtaaattgttgtgcaattgtggttatagtagactgtagcacattgccttttctaaactgctacatgtttataatcttcatttttaaagtatgtgtaatttttttaagtatgtattctattcatatggtctgcttgtcagtgagccagacttgcttactatattcctttataataatgctagccacttcctggattctttagtaatgtgctgtatgcaagaactttccagtagcagtgaaggagggttgcctctccaagcttcctaagggatgctgccctgtgtggggatgcattgcagaggcactagtagcatgggggctagagtggggagcgagatgtaaaagggtggggggataggagaattccagagtgcttccagcattagggtcctgagaacttctgagttcagagaaacatgcaaagtgactaacaaaatagctacttacctttgcagttttacagaccctgggagctgctttgggagtgagaaaggcaaccctccaatgtgtttcaactttaaaatgttgaattcttttcagacatggtatctcatttattctccttttctagcgtttgttgaatttcaggcagaatgtcttacagaatgtcctagaaccagattatcatttaatctgaaacagctgaggaagggacagagaaggtacaagggcaaggcagcacaaaacagatcaggagaatgaagagggaatgctttggttttttgttttgttttgttttttctttttcaagtaactaaaacagcatctacatgtagagtgttgtggagagctgagaccagggtaaagtcaagtgcagcatcagtactgcgagacccaccagcccctggagagggtcagccgagaatctggtagtgaagcctgtctagggtcccggcaccctcaccctcagccacctgcagagaggccagggccccagagactagcctggttctgaagtgggcaggggtgctgccagagccctctgccccttatgttgagaccctgctttcaggacaggccagccgttggccaccatgtcacattctgagtgagtgtcacaggtccctaacaataattttctgatctggagcatatcagcagaatgcttagcctcaaggggcctggcagctgtaatgtttgatttatgatgagaactatccgaggccacccttggcctctaaataagctgctctagggagccgcctactttttgatgagaaattagaagagtacctaatgttgaaaacatgacatgcgctcttgggatctgctgttctctccagggctccagaacctgatacctgttaccaaagctaggaaagagctttatcacaagccttcactgtcctggcatgagaactggctgccaggctcagtgtaccccattaactgtgaatgaatctgagcttggtttcctttattgcttcctctgcaatatgattgctgaaacacattttaaaaattcagaagcttgtcactcctgttaatgggaggatcagtcacacatgtgtagtacaaggcggactttgtgtttgtttttggtgttaatttttagcattgtgtgtgttgcttccccaccctgaggagaggacaccatggcttactactcaggacaagtatgccccgctcagggtgtgatttcaggtggcttccaaacttgtacgcagtttaaagatggtggggacagactttgcctctacctagtgaaccccacttaaagaataaggagcatttgaatctcttggaaaaggccatgaagaataaagcagtcaaaaagaagtcctccatgttggtgccaaggacttgcgaggggaaataaaaatgttatccagcctgaccaacatggagaaaccccgtctccattaaaaatacaaaattagcctggcatggtggcgcatgcctgtaatcccagctactctggaggctgaggcaggagaatcgcttgaacccaggaggcggaggtcgcagtgagccgagatcatgccagtgcactccagcctgggtaacaagagtgaaactccgtgtcaaaaaaaaaaaaaaaatgttactcatcctctctgaaagcaaaaaggaaaccctaacagctctgaactctggttttatttttcttgctgtatttgggtgaacattgtatgattaggcataatgttaaaaaaaaaaatttttttttggtagaaatgcaatcaccagtaaagaggtacgaaaaagctagcctctctcagagaccggggaggcagagtactactagaggaagtgaagttctgatggaatcatgcctgtcaaatgaggtcttgaagcggatgcccaaataaaagagtatattttatctaaatcttaagtgggtaacattttatgcagtttaaatgaatggaatattttcctcttgtttagttgtatctgtttgtatttttctttgatgaatgattggtcatgaggcctcttgccacactccagaaatacgtgtgcggctgcttttaagaactatgtgtctggtcacttatttctctaaaattatctcattgcctggcaatcagtcttctcttgtatacttgtcctagcacattatgtacatgggaaatgtaaacaaatgtgaaggaggaccagaaaaattagttaatatttaaaaaaatgtattgtgcattttggcttcacatgtttaactttttttaagaaaaaagttgcatgaatggaaaaaaaaatctgtatacagtatctgtaaaaactatcttatctgtttcaattccttgctcatatcccatataatctagaactaaatatggtgtgtggccatatttaaacacctgagagtcaagcagttgagactttgatttgaagcacctcatccttctttcaatgcgaacactatcatatggcattcttactgaggattttgtctaaccatatgttgccatgaattaactctgccgcctttcttaaggatcaaaaccagtttgatttgggaatcttcccctttccaaatgaaatagagatgcagtacttaactttccttggtgtttgtagatattgccttgtgtattccacttaaaaccgtaatctagtttgtaaaagagatggtgacgcatgtaaataaagcatcagtgacactctatctta

SEQ ID NO: 135056 - DNA, 7341 bp, Homo sapiens
  Payload ID: 6398
  Gene Symbol: FOXO3
  Gene Name: forkhead box O3
  Uniprot ID: O43524
  ENST ID: ENST00000406360
  CDS Start-End: 344-2365
gcgcgaggccgtcgattcgctcgcggctccatcgcggcctggccggggggcggtgtctgctgcgccaggttcgctggccgcacgtcttcaggtcctcctgttcctgggaggcgggcgcggcaggactgggaggtggcggcagcgggcgaggactcgccgaggacggggctccggcccgggataaccaactctccttctctcttctttggtgcttccccaggcggcggcggcggcgcccgggagccggagccttcgcggcgtccacgtccctcccccgctgcaccccgccccggcgcgagaggagagcgcgagagccccagccgcgggcgggcgggcggcgaagatggcagaggcaccggcttccccggccccgctctctccgctcgaagtggagctggacccggagttcgagccccagagccgtccgcgatcctgtacgtggcccctgcaaaggccggagctccaagcgagccctgccaagccctcgggggagacggccgccgactccatgatccccgaggaggaggacgatgaagacgacgaggacggcgggggacgggccggctcggccatggcgatcggcggcggcggcgggagcggcacgctgggctccgggctgctccttgaggactcggcccgggtgctggcacccggagggcaagaccccgggtctgggccagccaccgcggcgggcgggctgagcgggggtacacaggcgctgctgcagcctcagcaaccgctgccaccgccgcagccgggggcggctgggggctccgggcagccgaggaaatgttcgtcgcggcggaacgcctggggaaacctgtcctacgcggacctgatcacccgcgccatcgagagctccccggacaaacggctcactctgtcccagatctacgagtggatggtgcgttgcgtgccctacttcaaggataagggcgacagcaacagctctgccggctggaagaactccatccggcacaacctgtcactgcatagtcgattcatgcgggtccagaatgagggaactggcaagagctcttggtggatcatcaaccctgatggggggaagagcggaaaagccccccggcggcgggctgtctccatggacaatagcaacaagtataccaagagccgtggccgcgcagccaagaagaaggcagccctgcagacagcccccgaatcagctgacgacagtccctcccagctctccaagtggcctggcagccccacgtcacgcagcagtgatgagctggatgcgtggacggacttccgttcacgcaccaattctaacgccagcacagtcagtggccgcctgtcgcccatcatggcaagcacagagttggatgaagtccaggacgatgatgcgcctctctcgcccatgctctacagcagctcagccagcctgtcaccttcagtaagcaagccgtgcacggtggaactgccacggctgactgatatggcaggcaccatgaatctgaatgatgggctgactgaaaacctcatggacgacctgctggataacatcacgctcccgccatcccagccatcgcccactgggggactcatgcagcggagctctagcttcccgtataccaccaagggctcgggcctgggctccccaaccagctcctttaacagcacggtgttcggaccttcatctctgaactccctacgccagtctcccatgcagaccatccaagagaacaagccagctaccttctcttccatgtcacactatggtaaccagacactccaggacctgctcacttcggactcacttagccacagcgatgtcatgatgacacagtcggaccccttgatgtctcaggccagcaccgctgtgtctgcccagaattcccgccggaacgtgatgcttcgcaatgatccgatgatgtcctttgctgcccagcctaaccagggaagtttggtcaatcagaacttgctccaccaccagcaccaaacccagggcgctcttggtggcagccgtgccttgtcgaattctgtcagcaacatgggcttgagtgagtccagcagccttgggtcagccaaacaccagcagcagtctcctgtcagccagtctatgcaaaccctctcggactctctctcaggctcctccttgtactcaactagtgcaaacctgcccgtcatgggccatgagaagttccccagcgacttggacctggacatgttcaatgggagcttggaatgtgacatggagtccattatccgtagtgaactcatggatgctgatgggttggattttaactttgattccctcatctccacacagaatgttgttggtttgaacgtggggaacttcactggtgctaagcaggcctcatctcagagctgggtgccaggctgaaggatcactgaggaaggggaagtgggcaaagcagaccctcaaactgacacaagacctacagagaaaaccctttgccaaatctgctctcagcaagtggacagtgataccgtttacagcttaacacctttgtgaatcccacgccattttcctaacccagcagagactgttaatggccccttaccctgggtgaagcacttacccttggaacagaactctaaaaagtatgcaaaatcttccttgtacagggtggtgagccgcctgccagtggaggacagcacccctcagcaccacccaccctcattcagagcacaccgtgagcccccgtcggccattctgtggtgttttaatattgcgatggtttatgggacgttttaagtgttgttcttgtgtttgttttcctttgactttctgagtttttcacatgcattaacttgcggtatttttctgttaaaatgttaaccgtccttcccctagcaaatttaaaaacagaaagaaaatgttgtaccagttaccattccgggttcgagcatcacaagcttttgagcgcatggaactccataaactaacaaattacataaactaaagggggattttctttcttcttttgtttggtagaaaattatccttttctaaaaactgaacaatggcacaattgtttgctatgtgcacccgtccaggacagaaccgtgcataggcaaaaggagtggagcacagcgtccggcccagtgtgtttccggttctgagtcagggtgatctgtggacgggaccccagcaccaagtctacgggtgccagatcagtagggcctgtgatttcctgtcagtgtcctcagctaatgtgaacagtgttggtctgctggttagaaactagaatattgatattttcaggaaagaaatcagctcagctctccactcattgccaaatgtcactaaagggtttagttttaaggagaaagaaaaggaaaaaaaaaaaaaacaaaaaagtcctgttttgctttgcagaacaaatgaacttacaggtgagcattaagcttgcagtgagaaatgtgcgaagagtaaaaacccaagtcaatgctgaggcagttctaacttcactgttttcctaaatacacatccttgattattttcagccttgctatataatctgatctgctagaagtgtatgagtgagaggcaatagcatacaaactgattttttaaatataagcttaggttgtaattgtacaagtgactcaatggaagtacaaaatagggcagttttaacttttttttctgcttctatggatttcattttgttgtgttttcaaaaagttatggtgctgtataggtgctttctgtttaacctggaaagtgtgattatattcgttaccttctttggtagacggaatagttgggaccacctttggtacataagaaattggtataacgatgctctgattagcacagtatatgcatacttctccaaagtgatatatgaagactcttttctttgcataaaaagcattaggcatataaatgtataaatatattttatcatgtacagtacaaaaatggaaccttatgcatgggccttaggaatacaggctagtatttcagcacagacttccctgcttgagttcttgctgatgcttgcaccgtgacagtgggcaccaacacagacgtgccacccaaccccctgcacacaccaccggccaccaggggcccccttgtgcgccttggctttataactcctctgggggtgatattggtggtgatcacagctcctagcataatgagagttccatttggtattgtcacacgtctcctgcctcgcttgggttgccatgtttgagcgatggccctgttgatttcaccctgccttttactgaatctgtaaattgttgtgcaattgtggttatagtagactgtagcacattgccttttctaaactgctacatgtttataatcttcatttttaaagtatgtgtaatttttttaagtatgtattctattcatatggtctgcttgtcagtgagccagacttgcttactatattcctttataataatgctagccacttcctggattctttagtaatgtgctgtatgcaagaactttccagtagcagtgaaggagggttgcctctccaagcttcctaagggatgctgccctgtgtggggatgcattgcagaggcactagtagcatgggggctagagtggggagcgagatgtaaaagggtggggggataggagaattccagagtgcttccagcattagggtcctgagaacttctgagttcagagaaacatgcaaagtgactaacaaaatagctacttacctttgcagttttacagaccctgggagctgctttgggagtgagaaaggcaaccctccaatgtgtttcaactttaaaatgttgaattcttttcagacatggtatctcatttattctccttttctagcgtttgttgaatttcaggcagaatgtcttacagaatgtcctagaaccagattatcatttaatctgaaacagctgaggaagggacagagaaggtacaagggcaaggcagcacaaaacagatcaggagaatgaagagggaatgctttggttttttgttttgttttgttttttctttttcaagtaactaaaacagcatctacatgtagagtgttgtggagagctgagaccagggtaaagtcaagtgcagcatcagtactgcgagacccaccagcccctggagagggtcagccgagaatctggtagtgaagcctgtctagggtcccggcaccctcaccctcagccacctgcagagaggccagggccccagagactagcctggttctgaagtgggcaggggtgctgccagagccctctgccccttatgttgagaccctgctttcaggacaggccagccgttggccaccatgtcacattctgagtgagtgtcacaggtccctaacaataattttctgatctggagcatatcagcagaatgcttagcctcaaggggcctggcagctgtaatgtttgatttatgatgagaactatccgaggccacccttggcctctaaataagctgctctagggagccgcctactttttgatgagaaattagaagagtacctaatgttgaaaacatgacatgcgctcttgggatctgctgttctctccagggctccagaacctgatacctgttaccaaagctaggaaagagctttatcacaagccttcactgtcctggcatgagaactggctgccaggctcagtgtaccccattaactgtgaatgaatctgagcttggtttcctttattgcttcctctgcaatatgattgctgaaacacattttaaaaattcagaagcttgtcactcctgttaatgggaggatcagtcacacatgtgtagtacaaggcggactttgtgtttgtttttggtgttaatttttagcattgtgtgtgttgcttccccaccctgaggagaggacaccatggcttactactcaggacaagtatgccccgctcagggtgtgatttcaggtggcttccaaacttgtacgcagtttaaagatggtggggacagactttgcctctacctagtgaaccccacttaaagaataaggagcatttgaatctcttggaaaaggccatgaagaataaagcagtcaaaaagaagtcctccatgttggtgccaaggacttgcgaggggaaataaaaatgttatccagcctgaccaacatggagaaaccccgtctccattaaaaatacaaaattagcctggcatggtggcgcatgcctgtaatcccagctactctggaggctgaggcaggagaatcgcttgaacccaggaggcggaggtcgcagtgagccgagatcatgccagtgcactccagcctgggtaacaagagtgaaactccgtgtcaaaaaaaaaaaaaaaatgttactcatcctctctgaaagcaaaaaggaaaccctaacagctctgaactctggttttatttttcttgctgtatttgggtgaacattgtatgattaggcataatgttaaaaaaaaaaatttttttttggtagaaatgcaatcaccagtaaagaggtacgaaaaagctagcctctctcagagaccggggaggcagagtactactagaggaagtgaagttctgatggaatcatgcctgtcaaatgaggtcttgaagcggatgcccaaataaaagagtatattttatctaaatcttaagtgggtaacattttatgcagtttaaatgaatggaatattttcctcttgtttagttgtatctgtttgtatttttctttgatgaatgattggtcatgaggcctcttgccacactccagaaatacgtgtgcggctgcttttaagaactatgtgtctggtcacttatttctctaaaattatctcattgcctggcaatcagtcttctcttgtatacttgtcctagcacattatgtacatgggaaatgtaaacaaatgtgaaggaggaccagaaaaattagttaatatttaaaaaaatgtattgtgcattttggcttcacatgtttaactttttttaagaaaaaagttgcatgaatggaaaaaaaaatctgtatacagtatctgtaaaaactatcttatctgtttcaattccttgctcatatcccatataatctagaactaaatatggtgtgtggccatatttaaacacctgagagtcaagcagttgagactttgatttgaagcacctcatccttctttcaatgcgaacactatcatatggcattcttactgaggattttgtctaaccatatgttgccatgaattaactctgccgcctttcttaaggatcaaaaccagtttgatttgggaatcttcccctttccaaatgaaatagagatgcagtacttaactttccttggtgtttgtagatattgccttgtgtattccacttaaaaccgtaatctagtttgtaaaagagatggtgacgcatgtaaataaagcatcagtgacactct

SEQ ID NO: 135057 - DNA, 2553 bp, Homo sapiens
  Payload ID: 6398
  Gene Symbol: FOXO3
  Gene Name: forkhead box O3
  Uniprot ID: O43524
  ENST ID: ENST00000540898
  CDS Start-End: 233-1594
gagtggacagtctccacaaggtaaacatggtttggaagggctgaagcggacgtagggtacaaaatttaagaaattaccagttacttctgactggcacggcacctctgaaatacttttttaaagtttgaaatcctttcctggaaggggccgccctggaaccttttggcttaaagtatatgatgctcggaaaacaaactccatccggcacaacctgtcactgcatagtcgattcatgcgggtccagaatgagggaactggcaagagctcttggtggatcatcaaccctgatggggggaagagcggaaaagccccccggcggcgggctgtctccatggacaatagcaacaagtataccaagagccgtggccgcgcagccaagaagaaggcagccctgcagacagcccccgaatcagctgacgacagtccctcccagctctccaagtggcctggcagccccacgtcacgcagcagtgatgagctggatgcgtggacggacttccgttcacgcaccaattctaacgccagcacagtcagtggccgcctgtcgcccatcatggcaagcacagagttggatgaagtccaggacgatgatgcgcctctctcgcccatgctctacagcagctcagccagcctgtcaccttcagtaagcaagccgtgcacggtggaactgccacggctgactgatatggcaggcaccatgaatctgaatgatgggctgactgaaaacctcatggacgacctgctggataacatcacgctcccgccatcccagccatcgcccactgggggactcatgcagcggagctctagcttcccgtataccaccaagggctcgggcctgggctccccaaccagctcctttaacagcacggtgttcggaccttcatctctgaactccctacgccagtctcccatgcagaccatccaagagaacaagccagctaccttctcttccatgtcacactatggtaaccagacactccaggacctgctcacttcggactcacttagccacagcgatgtcatgatgacacagtcggaccccttgatgtctcaggccagcaccgctgtgtctgcccagaattcccgccggaacgtgatgcttcgcaatgatccgatgatgtcctttgctgcccagcctaaccagggaagtttggtcaatcagaacttgctccaccaccagcaccaaacccagggcgctcttggtggcagccgtgccttgtcgaattctgtcagcaacatgggcttgagtgagtccagcagccttgggtcagccaaacaccagcagcagtctcctgtcagccagtctatgcaaaccctctcggactctctctcaggctcctccttgtactcaactagtgcaaacctgcccgtcatgggccatgagaagttccccagcgacttggacctggacatgttcaatgggagcttggaatgtgacatggagtccattatccgtagtgaactcatggatgctgatgggttggattttaactttgattccctcatctccacacagaatgttgttggtttgaacgtggggaacttcactggtgctaagcaggcctcatctcagagctgggtgccaggctgaaggatcactgaggaaggggaagtgggcaaagcagaccctcaaactgacacaagacctacagagaaaaccctttgccaaatctgctctcagcaagtggacagtgataccgtttacagcttaacacctttgtgaatcccacgccattttcctaacccagcagagactgttaatggccccttaccctgggtgaagcacttacccttggaacagaactctaaaaagtatgcaaaatcttccttgtacagggtggtgagccgcctgccagtggaggacagcacccctcagcaccacccaccctcattcagagcacaccgtgagcccccgtcggccattctgtggtgttttaatattgcgatggtttatgggacgttttaagtgttgttcttgtgtttgttttcctttgactttctgagtttttcacatgcattaacttgcggtatttttctgttaaaatgttaaccgtccttcccctagcaaatttaaaaacagaaagaaaatgttgtaccagttaccattccgggttcgagcatcacaagcttttgagcgcatggaactccataaactaacaaattacataaactaaagggggattttctttcttcttttgtttggtagaaaattatccttttctaaaaactgaacaatggcacaattgtttgctatgtgcacccgtccaggacagaaccgtgcataggcaaaaggagtggagcacagcgtccggcccagtgtgtttccggttctgagtcagggtgatctgtggacgggaccccagcaccaagtctacgggtgccagatcagtagggcctgtgatttcctgtcagtgtcctcagctaatgtgaacagtgttggtctgctggttagaaactagaatattgatattttcaggaaagaaatcagctcagctctccactcattgccaaatgtcactaaagggtttagttttaaggagaaagaaaagg

SEQ ID NO: 135058 - DNA, 1353 bp, Homo sapiens
  Payload ID: 6399
  Gene Symbol: FOXO4
  Gene Name: forkhead box O4
  Uniprot ID: P98177
  ENST ID: ENST00000341558
  CDS Start-End: 1-1353
atggatccggggaatgagaattcagccacagaggctgccgcgatcatagacctagatcccgacttcgaaccccagagccgtccccgctcctgcacctggccccttccccgaccagagatcgctaaccagccgtccgagccgcccgaggtggagccagatctgggggaaaaggccattgaaagcgccccggagaagcgactgacacttgcccagatctacgagtggatggtccgtactgtaccctacttcaaggacaagggtgacagcaacagctcagcaggatggaagaactcgatccgccacaacctgtccctgcacagcaagttcatcaaggttcacaacgaggccaccggcaaaagctcttggtggatgctgaaccctgagggaggcaagagcggcaaagccccccgccgccgggccgcctccatggatagcagcagcaagctgctccggggccgcagtaaagcccccaagaagaaaccatctgtgctgccagctccacccgaaggtgccactccaacgagccctgtcggccactttgccaagtggtcaggcagcccttgctctcgaaaccgtgaagaagccgatatgtggaccaccttccgtccacgaagcagttcaaatgccagcagtgtcagcacccggctgtcccccttgaggccagagtctgaggtgctggcggaggaaataccagcttcagtcagcagttatgcagggggtgtccctcccaccctcaatgaaggtctagagctgttagatgggctcaatctcacctcttcccattccctgctatctcggagtggtctctctggcttctctttgcagcatcctggggttaccggccccttacacacctacagcagctcccttttcagcccagcagaggggcccctgtcagcaggagaagggtgcttctccagctcccaggctctggaggccctgctcacctctgatacgccaccaccccctgctgacgtcctcatgacccaggtagatcccattctgtcccaggctccgactcttctgttgctgggggggcttccttcctccagtaagctggccacgggcgtcggcctgtgtcccaagcccctagaggctccaggccccagcagtctggttcccaccctttctatgatagcaccacctccagtcatggcaagtgcccccatccccaaggctctggggactcctgtgctcacaccccctactgaagctgcaagccaagacagaatgcctcaggatctagatcttgatatgtatatggagaacctggagtgtgacatggataacatcatcagtgacctcatggatgagggcgagggactggacttcaactttgagccagatccctga

SEQ ID NO: 135059 - DNA, 3301 bp, Homo sapiens
  Payload ID: 6399
  Gene Symbol: FOXO4
  Gene Name: forkhead box O4
  Uniprot ID: P98177
  ENST ID: ENST00000374259
  CDS Start-End: 333-1850
caatatatgaggggatacagtgcctcaggtttaaaagagcaggaagctgagtgagaggttgcagaaaaagtgtcttcgctcggcagaggttacaggtggcatctcagaaagagctttgaggctacaggctgtagtcgggaaggggatcggagaactgtgtgaagggacagcttagggactagcgtcctgggactagggggaagttcgcgactttctgaagactggcaggaatgtgcctcctggccctcgatgcttcccccctgaggggaggcatcgtgagggactgtggcaggcttcactgaacgctgagccggggaggtccaactccacgtatggatccggggaatgagaattcagccacagaggctgccgcgatcatagacctagatcccgacttcgaaccccagagccgtccccgctcctgcacctggccccttccccgaccagagatcgctaaccagccgtccgagccgcccgaggtggagccagatctgggggaaaaggtacacacggaggggcgctcagagccgatcctgttgccctctcggctcccagagccggccgggggcccccagcccggaatcctgggggctgtaacaggtcctcggaagggaggctcccgccggaatgcctggggaaatcagtcatatgcagaactcatcagccaggccattgaaagcgccccggagaagcgactgacacttgcccagatctacgagtggatggtccgtactgtaccctacttcaaggacaagggtgacagcaacagctcagcaggatggaagaactcgatccgccacaacctgtccctgcacagcaagttcatcaaggttcacaacgaggccaccggcaaaagctcttggtggatgctgaaccctgagggaggcaagagcggcaaagccccccgccgccgggccgcctccatggatagcagcagcaagctgctccggggccgcagtaaagcccccaagaagaaaccatctgtgctgccagctccacccgaaggtgccactccaacgagccctgtcggccactttgccaagtggtcaggcagcccttgctctcgaaaccgtgaagaagccgatatgtggaccaccttccgtccacgaagcagttcaaatgccagcagtgtcagcacccggctgtcccccttgaggccagagtctgaggtgctggcggaggaaataccagcttcagtcagcagttatgcagggggtgtccctcccaccctcaatgaaggtctagagctgttagatgggctcaatctcacctcttcccattccctgctatctcggagtggtctctctggcttctctttgcagcatcctggggttaccggccccttacacacctacagcagctcccttttcagcccagcagaggggcccctgtcagcaggagaagggtgcttctccagctcccaggctctggaggccctgctcacctctgatacgccaccaccccctgctgacgtcctcatgacccaggtagatcccattctgtcccaggctccgactcttctgttgctgggggggcttccttcctccagtaagctggccacgggcgtcggcctgtgtcccaagcccctagaggctccaggccccagcagtctggttcccaccctttctatgatagcaccacctccagtcatggcaagtgcccccatccccaaggctctggggactcctgtgctcacaccccctactgaagctgcaagccaagacagaatgcctcaggatctagatcttgatatgtatatggagaacctggagtgtgacatggataacatcatcagtgacctcatggatgagggcgagggactggacttcaactttgagccagatccctgagtcatgcctggaagctttgtcccctgcttcagatgtggagccaggcgtgttcatatctactctttacccttgagccctccccaggaatttgggaccctgctttagagctagggtggggtctggtcacacacaggtgttgaagaaattataaagataaagctgccccatctggggacgatatggggagggagatgggaggggaaaggggagagggtttttctcactgtgccaattagggggtaaggccccctctcaggagccatcatcggctttccccattcctacccacttaggctttgtagcaagatgagcaatgctgttggaaatgtgaagtcaccagtggccttacccctgcctttgggagcaggatttttttgtagagagtcttatctgagctgagccaggctagctggagcctgggatttctatgcagtggccccttaggccagtgatgtgcggtgggtgggctgtttaggggatctggaagggccaaggtctgagcactggagtggctcgccaggccaaatcacccttagaaggctgcagataacagaaaggctttttataaacttttaaagaaatataaacacaaatatagagattttttaaccatggcagggtgctagtggtgggcagaatgcttttttttctttctgaaggctttgtgatagtgacatgatacaaacactacagacaataaatattaggagacacagggaagtggggagaggtggggagtaatagtaaacacagggaagagctcccctacggaccaggtatagagaaaggtctatgcagaaataggttagagtttccctaacaaaaaagctaacccaggtcccctcattccttcaacttgtgcctgggagtgtgtggtgttagggtgcagccacactcttctatgacccagcatgggttagtgctatggtgggagagtacattgaaggcctggaattagcttggggccagggaagggactgggaggggagagaagagaaggagggaaggatttaggatggtaaagttaggtacagagacctccctgttcaaggcccctgacagctgtccctgcccttcttccccttccctgactgcaggggttatgtggaagtgtgtgtggcagcaggcagcggggaggggaggaacagggaagggggagctggggagcttggctgagggtctgggaaatgagcagggatggggggggatgtggatcaggtttactagcacctgccagggaggccatctggggctccttctccaccccagcccccaaagcagcccttcccccagtgccctttgcatcgtcccctcccccacccctgctgtgggttcccatcatttcctgtgtcagcgcctggcctacccagattgtatcatgtgctagattggagtggggaagtgtgtcaaatcaataaatgaataaattcaataaatgcctataaccagct

SEQ ID NO: 135060 - DNA, 2398 bp, Homo sapiens
  Payload ID: 6400
  Gene Symbol: FOXO6
  Gene Name: forkhead box O6
  ENST ID: ENST00000372591
  CDS Start-End: 10-1689
ggcgggaccatggctgcgaagctgcgagcgcatcaggtggacgtggacccggacttcgcgccgcagagccggccgcgctcgtgtacctggcccctgccgcagcctgacttggccggcgacgaggacggagcgctgggcgcaggggtggccgagggcgccgaggactgcgggccggagcgccgggctacggccccggcgatggccccagcgccgcccctgggcgcggaggtcggaccgctgcggaaagcgaagagctctcggcggaacgcgtgggggaacctgtcctacgccgacctcatcaccaaagccatcgagagcgccccggacaagcggctcacgctctcgcagatctacgactggatggtccgttacgtgccctacttcaaggataaaggcgacagcaacagctcggccggctggaagaactccatccggcacaacctgtcgctgcacacccgtttcatccgcgtgcagaacgagggcaccggcaagagttcgtggtggatgctgaaccccgagggcggaaagacagggaagaccccgcggcgcagggccgtgtccatggacaacggggccaagttcctgcgcatcaagggcaaggcgagcaagaagaagcagctgcaggcgcccgagcgaagcccggacgacagctccccgagtgcgcccgccccggggccggtgcctgccgcagccaagtgggccgccagccccgcctcgcacgccagcgacgactacgaggcttgggccgacttccgcggcggcgggagacccctgctcggggaggcggccgagctggaggacgacgaggccctggaggccctggcgccatcatcgccgctcatgtacccaagccccgccagcgcgctgtcgccggcgctgggctcgcgctgtccgggtgagctgccccgcctggccgagctgggaggcccgctgggcctgcacggcggcggcggcgcggggctgcccgagggcctgctggacggcgcgcaggacgcgtacgggccgcgggcccgcgcccaggcccggcccggtgctgggtgcgccgggggagctggcgctggcgggcgcagccgccgcctaccccggcaaaggggcggccccgtacgcgccgcccgcgccctcgcgcagtgccttagcccaccccatcagccttatgacgctgcccggcgaggcgggcgccgcgggcctggcaccgccgggccacgccgccgccttcgggggcccgcccggcggcctcctgctggacgctctgccggggccctacgctgccgccgccgccgggccgctgggcgccgcgcccgaccgcttcccggccgacctggacctcgacatgttcagcgggagcctcgagtgcgacgtggagtccatcatcctcaacgacttcatggacagcgacgaaatggacttcaacttcgattcggccctgcctccgccgccgccgggcctggccggggccccgccccccaaccagagctgggtgccgggctgagggccgcctcccgcctccgggcgccccgtcccgtccccagggggcctctgtcttcccatcctgattcccgggtccctgcccccgactctagctccccaggaggcggccccagcccagctagggacccctctcggaggccggccgccggggaaggggagggaggggccggggcaccccactgctcctgcccacactcctgagatccacccccttctcctgggcaggaagcctgggagaggaggctgaattccaggctggctgggagtagggaggagcggggtgggccgcctggtgtggacggtggtcggggaagccaactaggagatgggccagggagcgtttacaaatcttcagtttcatttgcggaggcctagccgtgaccccgcgcccaccccaaacacggatctgattcccacttgacacactttcccactggtcttagtctcacccacccgaagccagcaaccctctgcggaaaactcacacctacctatatccatccaccctgagcagccctccacccccaaatcgccctccgacgaccgccacccccacagttcagtctccccctcccatccctgccggccctcgcttctcccctcccccgtcggagtcagtccctctcttcaaccgcccccaccccctagtactggtctcagcttctgcagcgggcctcagccccgtccacccccaaccccgacgcccctttctccgcgccagttctggcccttctcccatatttataagtgtccggccgggacgggcggtgggcgcggcgtccccggcgcgtatcgtaggcagtgtaccgtggccgtgccgtcagagtgtgcgtgtgcgtgtgtgccgtgtcgaggctgtgtagagtgcattgtacagcatattttcatgaataaaattgttttaaatatt

SEQ ID NO: 135061 - DNA, 1476 bp, Homo sapiens
  Payload ID: 6400
  Gene Symbol: FOXO6
  Gene Name: forkhead box O6
  Uniprot ID: A8MYZ6
  ENST ID: ENST00000615371
  CDS Start-End: 1-1476
atggctgcgaagctgcgagcgcatcaggtggacgtggacccggacttcgcgccgcagagccggccgcgctcgtgtacctggcccctgccgcagcctgacttggccggcgacgaggacggagcgctgggcgcaggggtggccgagggcgccgaggactgcgggccggagcgccgggctacggccccggcgatggccccagcgccgcccctgggcgcggaggtcggaccgctgcggaaagcgaagagctctcggcggaacgcgtgggggaacctgtcctacgccgacctcatcaccaaagccatcgagagcgccccggacaagcggctcacgctctcgcagatctacgactggatggtccgttacgtgccctacttcaaggataaaggcgacagcaacagctcggccggctggaagaactccatccggcacaacctgtcgctgcacacccgtttcatccgcgtgcagaacgagggcaccggcaagagttcgtggtggatgctgaaccccgagggcggaaagacagggaagaccccgcggcgcagggccgtgtccatggacaacggggccaagttcctgcgcatcaagggcaaggcgagcaagaagaagcagctgcaggcgcccgagcgaagcccggacgacagctccccgagtgcgcccgccccggggccggtgcctgccgcagccaagtgggccgccagccccgcctcgcacgccagcgacgactacgaggcttgggccgacttccgcggcggcgggagacccctgctcggggaggcggccgagctggaggacgacgaggccctggaggccctggcgccatcatcgccgctcatgtacccaagccccgccagcgcgctgtcgccggcgctgggctcgcgctgtccgggtgagctgccccgcctggccgagctgggaggcccgctgggcctgcacggcggcggcggcgcggggctgcccgagggcctgctggacggcgcgcaggacgcgtacgggccgcggcccgcgcccaggcccggcccggtgctgggtgcgccgggggagctggcgctggcgggcgcagccgccgcctaccccggcaaaggggcggccccgtacgcgccgcccgcgccctcgcgcagtgccttagcccaccccatcagccttatgacgctgcccggcgaggcgggcgccgcgggcctggcaccgccgggccacgccgccgccttcgggggcccgcccggcggcctcctgctggacgctctgccggggccctacgctgccgccgccgccgggccgctgggcgccgcgcccgaccgcttcccggccgacctggacctcgacatgttcagcgggagcctcgagtgcgacgtggagtccatcatcctcaacgacttcatggacagcgacgaaatggacttcaacttcgattcggccctgcctccgccgccgccgggcctggccggggccccgccccccaaccagagctgggtgccgggc

SEQ ID NO: 135062 - DNA, 1680 bp, Homo sapiens
  Payload ID: 6400
  Gene Symbol: FOXO6
  Gene Name: Forkhead box O6
  ENST ID: ENST00000630406
  CDS Start-End: 1-1680
atggctgcgaagctgcgagcgcatcaggtggacgtggacccggacttcgcgccgcagagccggccgcgctcgtgtacctggcccctgccgcagcctgacttggccggcgacgaggacggagcgctgggcgcaggggtggccgagggcgccgaggactgcgggccggagcgccgggctacggccccggcgatggccccagcgccgcccctgggcgcggaggtcggaccgctgcggaaagcgaagagctctcggcggaacgcgtgggggaacctgtcctacgccgacctcatcaccaaagccatcgagagcgccccggacaagcggctcacgctctcgcagatctacgactggatggtccgttacgtgccctacttcaaggataaaggcgacagcaacagctcggccggctggaagaactccatccggcacaacctgtcgctgcacacccgtttcatccgcgtgcagaacgagggcaccggcaagagttcgtggtggatgctgaaccccgagggcggaaagacagggaagaccccgcggcgcagggccgtgtccatggacaacggggccaagttcctgcgcatcaagggcaaggcgagcaagaagaagcagctgcaggcgcccgagcgaagcccggacgacagctccccgagtgcgcccgccccggggccggtgcctgccgcagccaagtgggccgccagccccgcctcgcacgccagcgacgactacgaggcttgggccgacttccgcggcggcgggagacccctgctcggggaggcggccgagctggaggacgacgaggccctggaggccctggcgccatcatcgccgctcatgtacccaagccccgccagcgcgctgtcgccggcgctgggctcgcgctgtccgggtgagctgccccgcctggccgagctgggaggcccgctgggcctgcacggcggcggcggcgcggggctgcccgagggcctgctggacggcgcgcaggacgcgtacgggccgcgggcccgcgccggggcccggcccggtgctgggtgcgccgggggagctggcgctggcgggcgcagccgccgcctaccccggcaaaggggcggccccgtacgcgccgcccgcgccctcgcgcagtgccttagcccaccccatcagccttatgacgctgcccggcgaggcgggcgccgcgggcctggcaccgtcgggccacgccgccgccttcgggggcccgcccggcggcctcctgctggacgctctgccggggccctacgctgccgccgccgccgggccgctgggcgccgcgcccgaccgcttcccggccgacctggacctcgacatgttcagcgggagcctcgagtgcgacgtggagtccatcatcctcaacgacttcatggacagcgacgaaatggacttcaacttcgattcggccctgcctccaccgccgccgggcctggccggggccccgccccccaaccagagctgggtgccgggctgagggccgcctcccgcctccgggcgccccgtcccgtccccagggggcctctgtcttcccatcctgattcccgggtccctgcccccgactctagctccccaggaggcggccccagcccagctagggacccctctcggaggccggccgccggggaaggggagggaggggccggggcaccccactgctcctgcccacactcctga

SEQ ID NO: 135063 - DNA, 2590 bp, Homo sapiens
  Payload ID: 6400
  Gene Symbol: FOXO6
  Gene Name: Forkhead box O6
  ENST ID: ENST00000627423
  CDS Start-End: 1-1680
atggctgcgaagctgcgagcgcatcaggtggacgtggacccggacttcgcgccgcagagccggccgcgctcgtgtacctggcccctgccgcagcctgacttggccggcgacgaggacggagcgctgggcgcaggggtggccgagggcgccgaggactgcgggccggagcgccgggctacggccccggcgatggccccagcgccgcccctgggcgcggaggtcggaccgctgcggaaagcgaagagctctcggcggaacgcgtgggggaacctgtcctacgccgacctcatcaccaaagccatcgagagcgccccggacaagcggctcacgctctcgcagatctacgactggatggtccgttacgtgccctacttcaaggataaaggcgacagcaacagctcggccggctggaagaactccatccggcacaacctgtcgctgcacacccgtttcatccgcgtgcagaacgagggcaccggcaagagttcgtggtggatgctgaaccccgagggcggaaagacagggaagaccccgcggcgcagggccgtgtccatggacaacggggccaagttcctgcgcatcaagggcaaggcgagcaagaagaagcagctgcaggcgcccgagcgaagcccggacgacagctccccgagtgcgcccgccccggggccggtgcctgccgcagccaagtgggccgccagccccgcctcgcacgccagcgacgactacgaggcttgggccgacttccgcggcggcgggagacccctgctcggggaggcggccgagctggaggacgacgaggccctggaggccctggcgccatcatcgccgctcatgtacccaagccccgccagcgcgctgtcgccggcgctgggctcgcgctgtccgggtgagctgccccgcctggccgagctgggaggcccgctgggcctgcacggcggcggcggcgcggggctgcccgagggcctgctggacggcgcgcaggacgcgtacgggccgcgggcccgcgccgggacgcccgcctacttcggcggctgcaagggcggcgcctacggcgggggcgggggcttcgggccgccggcgatgggcgctctgcgccgtctgcccatgcagaccatccaggagaacaagcaggccagcttcgtgccggccgcggcgcccttccgccctggggcgctgcccgcgctgctgccgccgccgccgcccgcgcccaggcccggcccggtgctgggtgcgccgggggagctggcgctggcgggcgcagccgccgcctaccccggcaaaggggcggccccgtacgcgccgcccgcgccctcgcgcagtgccttagcccaccccatcagccttatgacgctgcccggcgaggcgggcgccgcgggcctggcaccgtcgggccacgccgccgccttcgggggcccgcccggcggcctcctgctggacgctctgccggggccctacgctgccgccgccgccgggccgctgggcgccgcgcccgaccgcttcccggccgacctggacctcgacatgttcagcgggagcctcgagtgcgacgtggagtccatcatcctcaacgacttcatggacagcgacgaaatggacttcaacttcgattcggccctgcctccaccgccgccgggcctggccggggccccgccccccaaccagagctgggtgccgggctgagggccgcctcccgcctccgggcgccccgtcccgtccccagggggcctctgtcttcccatcctgattcccgggtccctgcccccgactctagctccccaggaggcggccccagcccagctagggacccctctcggaggccggccgccggggaaggggagggaggggccggggcaccccactgctcctgcccacactcctgagatccacccccttctcctgggcaggaagcctgggagaggaggctgaattccaggctggctgggagtagggaggagcggggtgggccgcctggtgtggacggtggtcggggaagccaactaggagatgggccagggagcgtttacaaatcttcagtttcatttgcggaggcctagccgtgaccccgcgcccaccccaaacacggatctgattcccacttgacacactttcccactggtcttagtctcacccacccgaagccagcaaccctctgcggaaaactcacacctacctatatccatccaccctgagcagccctccacccccaaatcgccctccgacgaccgccacccccacagttcagtctccccctcccatccctgccggccctcgcttctcccctcccccgtcggagtcagtccctctcttcaaccgcccccaccccctagtactggtctcagcttctccagcgggcctcagccccgtccacccccaaccccgacgcccctttctccgcgccagttctggcccttctcccatatttataagtgtccggccgggacgggcggtgggcgcggcgtccccggcgcgtatcgtaggcagtgtaccgtggccgtgccgtcagagtgtgcgtgtgcgtgtgtgccgtgtcgaggctgtgtagagtgcattgtacagcatattttcatgaataaaattgttttaaatattt

SEQ ID NO: 135064 - DNA, 843 bp, Homo sapiens
  Payload ID: 6401
  Gene Symbol: FOXP1
  Gene Name: forkhead box P1
  Uniprot ID: Q9H334
  ENST ID: ENST00000318779
  CDS Start-End: 477-821
gctcggggggccgctggagtgcccagcgggaacccgaaagtttgtaagaggaagagagcgcgcggcgagcgagcgagcgggccgggggcagcggcagcggcgccggggaccatggtgctgccggcgcctcctccgcgggcgtgaaggcggcgctcctactccctccccggactccgcggtgtcccagaagcttttgttgacaattccagtttccgaacaaaacatttcggcaatggtgagggcttcgatcccttctctgatttgctgtcagccatgaacggatggatgtgatgcctgctagccaaaaggcttccctctgtgtgttgcagtcctgtggcattatgcatgccccctcccagtgaccccaggctttttatggctgtgagacacgttaaaatttcaggggtaagacgtgaccttttgaggtgactataactgaagattgctttacagaagccaaaaaaggtttttgagtcatgatgcaagaatctgggactgagacaaaaagtaacggttcagccatccagaatgggtcgggcggcagcaaccacttactagagtgcggcggtcttcgggaggggcggtccaacggagagacgccggccgtggacatcggggcagctgacctcgcccacgcccagcagcagcagcaacagtggcatctcataaaccatcagccctctaggagtcccagcagttggcttaagagactaatttcaagcccttgggagttggaagtcctgcaggtccccttgtggggagcagttgctgagacgaagatgagtggacctgtgtgtcagcctaacccttccccattttgaataaaattattctttggagaaa

SEQ ID NO: 135065 - DNA, 7114 bp, Homo sapiens
  Payload ID: 6401
  Gene Symbol: FOXP1
  Gene Name: forkhead box P1
  Uniprot ID: Q9H334
  ENST ID: ENST00000318789
  CDS Start-End: 527-2560
ggggggtgggcgccagcgccccggcgaacggcaaagagggagccgctcccgctcggggggccgctggagtgcccagcgggaacccgaaagtttgtaagaggaagagagcgcgcggcgagcgagcgagcgggccgggggcagcggcagcggcgccggggaccatggtgctgccggcgcctcctccgcgggcgtgaaggcggcgctcctactccctccccggactccgcggtgtcccagaagcttttgttgacaattccagtttccgaacaaaacatttcggcaatggtgagggcttcgatcccttctctgatttgctgtcagccatgaacggatggatgtgatgcctgctagccaaaaggcttccctctgtgtgttgcagtcctgtggcattatgcatgccccctcccagtgaccccaggctttttatggctgtgagacacgttaaaatttcaggggtaagacgtgaccttttgaggtgactataactgaagattgctttacagaagccaaaaaaggtttttgagtcatgatgcaagaatctgggactgagacaaaaagtaacggttcagccatccagaatgggtcgggcggcagcaaccacttactagagtgcggcggtcttcgggaggggcggtccaacggagagacgccggccgtggacatcggggcagctgacctcgcccacgcccagcagcagcagcaacaggcacttcaggtggcaagacagctccttcttcagcagcaacagcagcagcaagttagtggattaaaatctcccaagaggaatgacaaacaaccagctcttcaggttcccgtgtcagtggctatgatgacacctcaagttatcactccccagcaaatgcagcagatcctccagcaacaagtgctgagccctcagcagctccaggttctcctccagcagcagcaggccctcatgcttcaacagcagcagcttcaagagttttataaaaaacaacaggaacagttgcagcttcaacttttacaacaacaacatgctggaaaacagcctaaagagcaacagcaggtggctacccagcagttggcttttcagcagcagcttttacagatgcagcagttacagcagcagcacctcctgtctttgcagcgccaaggccttctgacaattcagcccgggcagcctgcccttccccttcaacctcttgctcaaggcatgattccaacagaactgcagcagctctggaaagaagtgacaagtgctcatactgcagaagaaaccacaggcaacaatcacagcagtttggatctgaccacgacatgtgtctcctcctctgcaccttccaagacctccttaataatgaacccacatgcctctaccaatggacagctctcagtccacactcccaaaagggaaagtttgtcccatgaggagcacccccatagccatcctctctatggacatggtgtatgcaagtggccaggctgtgaagcagtgtgcgaagatttccaatcatttctaaaacatctcaacagtgagcatgcgctggacgatagaagtacagcccaatgtagagtacaaatgcaggttgtacagcagttagagctacagcttgcaaaagacaaagaacgcctgcaagccatgatgacccacctgcatgtgaagtctacagaacccaaagccgcccctcagcccttgaatctggtatcaagtgtcactctctccaagtccgcatcggaggcttctccacagagcttacctcatactccaacgaccccaaccgcccccctgactcccgtcacccaaggcccctctgtcatcacaaccaccagcatgcacacggtgggacccatccgcaggcggtactcagacaaatacaacgtgcccatttcgtcagcagatattgcgcagaaccaagaattttataagaacgcagaagttagaccaccatttacatatgcatctttaattaggcaggccattctcgaatctccagaaaagcagctaacactaaatgagatctataactggttcacacgaatgtttgcttacttccgacgcaacgcggccacgtggaagaatgcagtgcgtcataatcttagtcttcacaagtgttttgtgcgagtagaaaacgttaaaggggcagtatggacagtggatgaagtagaattccaaaaacgaaggccacaaaagatcagtggtaacccttcccttattaaaaacatgcagagcagccacgcctactgcacacctctcaatgcagctttacaggcttcaatggctgagaatagtatacctctatacactaccgcttccatgggaaatcccactctgggcaacttagccagcgcaatacgggaagagctgaacggggcaatggagcataccaacagcaacgagagtgacagcagtccaggcagatctcctatgcaagccgtgcatcctgtacacgtcaaagaagagcccctcgatccagaggaagctgaagggcccctgtccttagtgacaacagccaaccacagtccagattttgaccatgacagagattacgaagatgaaccagtaaacgaggacatggagtgactatcggggcgggccaaccccgagaatgaagattggaaaaaggaaaaaaaaaaaaacacgtcaaaagttagcagtgaaattgttctccatttgttgtacagtctggaggattttcactacgttttgacaactctgaaatgtgttaactcttagtgccatcaagaaccccatttgggagtatttttgatttttctactttttgttgaaaaaaggaatttgtactctgtgcattggatggacttgtttggtacttgggattttcctctcttaaccgtcaacatcagtgttgtaaatttgctaaactgattcacttttagcagcagactttgaactgcagtcctgccaacgttggacactgaggacgcccgacagagcttgtgcacctaagctgcagaccaagcctttgcccagaatttaaggattccaatggacgacctatttgcacagtactgcatgttgattatcactgcctttactccttttttttttttttttttttttttttttttgcttccagttgggatggggaaggcctttgtgtgtgtattggggggaggggttaaaaaataattatcccaaactttttaatgtattgctttttttttttttttttttccttctactataccattttaagttctgacctcaggcctccatttgggccgatggcctcttggaggcttaaagttttctgtaccttgtgatgaatgttaataggtgtttttattatacaaagctgaatgtcatttctcgtttgtagctttctgtcactcattccatcttccttcagacatcaccacgtttctctaaagtcagaaaacattccgttttggtctttttcaaaaaggtcccaaatgctgcactctacacatgaaggccctctcacacagacgtgacgtcctgccagaaagagaatgaatgacagaaaaaaaaaagagagacaaactctaggaacaatgccgattcattccacgcagcagtattgggggtggttcgggggaggggtgtttcggattttctttttttcttttcttttctttttttttttttgcagcaaccattaataaatgccaccacattctaccagcacaaggaaacataggcagcactgaaaaaaaaaaaaaagctcatattaattagactgacaatatggccttggaaggctctcccttgtggaaccaagttgccatgggccttgggtgctctgcgataacgggtgtgggttggttttgtttgcaaaatggccaaaaaaaaaaaccggcttccccgagcagctgccctgaaagtaggggtggcggcggcggcgctgagtttatacattagttcagacctacttggtggcattaaactgtttgaatgcaaattcgatttcagattgaacttgttaagggagttaacgagggctgagttcagcaaatgctaaagtgttaatttcaaatatgcaaatttggtactgcagtttgttatgcaatattatatcaccaacccagtatcacaaaaactcatagaagatatcatgtaggccctgggctttgggggggtcccaaacatggtatgcagaaatgtgatggttacaggtcagtacaacctcagtccttagaacccctccacacttcagctctgcacccactttcctgtcatttatttatataggactgtagttttttttagttcgagagcctttcgaagcttaatttatattctttctttgtaccttttttctaaaattaccaaagatattacacaaaggtaaattatgttctctgttttatgctttatctgatgaagccaaatatcctcttattgttgatcaaaggaggcaaaagaatttagaggcaaatgacaagcgataggctattgcaacctgagaaagagaactgctccttcatcgtaaatttagaagaccaagtagataatggaaccaaagttgttacttttttctagtagttatttttcctttttctttttgtgtacctctacagagaccaaaactcattctcttaaagagattttatggggctactgcagataaaaataggacacaatattaaaggagctacagaaggaagggagtcccatctcaaaaaaaaaatgaatgtatgccactgcaattagagtatccaataaaggagacagtttagagtcaggacagaaaagcttccataattgaactagattacataatagtatttctagaaaaagagatatttttagattgtatgccacttttgtttaagaactgtgctgtgatcactgtattaattttggtttatcttggcatatatccttcagtttgtttttatttttaatttttcctttttttccgattaggctttggtcagcatttttcatttaaagaaaagtaacactcccatccactcataagcttggtacaaaaacttctctggcagttacttttgaagcttcactctgctttctgtataaagggcagtctgtggtcacgcaagactttaaaaaaaaaaaaaaaaaaaaaaaaaaaaaaaaaaaaaaaaacttttccaggcagcttcatgatgtgcaggcagtagccagacagggtcatgggaagggggccctgtgcttctaaactgagtggttgctggttagtttggtattcaaaagaggataaaaatctggtagattagttcattctcagcatgtgtagctagacatgagtaaagataacagcatgagaaactgttagtacgcatacctcagttcaaacctttagggaatgattaaaatttaaaaaaaaaacatttcactcagttgcacttagtcgtatgtcttgcatgcttagtctaaagactgtagcaaaaaaaaaaaaaaaagaaaaattagattttacatatctttgcaggtatcacagccttgcagaagaaccaactgaaaaaaaaattctcaggctttacagcaagcaaacttcactatgatttttacaattctgattctgtatcccctgggggttatcccagttgcttctttaggatggggtttattacgttgtacatatatcccgatgtgtctgtgtgaatctttgtcttttttgggggagggcagagggcggttctttttttagatattgttcctaaaaaggaataaatgcatacacctgtttgtcaaaacacctttgctttttgtgcaactgctttatattaacgatactaaaaaaaaatagctttggaaaaaaaactactgtatgtaacggaattgcagaatatgctgcacatgtattttatttagttatccttgctttaagaatattggatgacatttcctgacatgtgggagggagaaactccctaactttttttttctgcttttaaactgtaacatagttgaagatttcttttttctgttctcattgattggagcattttgtacaggttttgtgtgtgtgtgtgtgtgtgtgtgcgcgcgtgcgtgtgtgttaatctgttttttgatacattcctatcccttgtgtttatcctaccactgccttcctggctatcttaaacaagttcatacatttgaaaagaaaaaaaaatgttgtttaaaaaatgttttctcctgctgcagtaaatattttgcatgatgaaattccagggtcacacttttccaagtttatcagtgaagtagtgattaacaatggggagtgtcaaaactattgaacttttgtataaaaaaaaaaaaactttacaaggtgccaagatgtaaagaaaatctgttactttttttttctcaaagaaaagcatacattagggaggtagtcccgtgtgtcagacaaatgcactgtcaggaatgaggatccaacctacctgtccctagagtccgtcttgtaagatgagttaggctgccccttggaccagccacaaaatggaatatcaaggcttatgtacatacgtgaagagttaccaccagtcctgccacctttggacagctctaacaccatccccagcatccagtcagacctagtaaagaaaaccttggattcttaacccaagataggctgtaaatcactagcttttttttcctcatgaaaaaaaatagagttaaaaaatatttcctctcttttccatattccagctgaactccgtttccaaaggcacaaagaagagtgtgcttattcagattttgaatctttttggtaccttttggttaatgacatagcctcctgaaattctggatgtcttcaaagtcagttttgcttctttatcctgaaaatcagatttacaatgctgaaggcatttcttgggcccagtgtagctcacgcaatctctgctacccataagccttgatgaagatgatacagtccggactgtgagcatggtgcttcatgtatatgtgctgccagtaacaagaatttttttgttttgttttgttttgttttgataaggcataaaagaaactcattccttgacatcaactgtaattccatcattccatgtctgcggatacagacaataaaaaaaatgttgtgtagtcagtactaattactgacattataagcattctcaaatgcaataaaaatgctggttgttcacgctggtagtaaaagttgccacagcctaa

SEQ ID NO: 135066 - DNA, 5685 bp, Homo sapiens
  Payload ID: 6401
  Gene Symbol: FOXP1
  Gene Name: forkhead box P1
  ENST ID: ENST00000327590
  CDS Start-End: 3426-5126
tgtcccagaagcttttgttgacaattccagtttccgaacaaaacatttcggcaatggtgagggcttcgatcccttctctgatttgctgtcagccatgaacggatggatgtgatgcctgctagccaaaaggcttccctctgtgtgttgcagtcctgtggcattatgcatgccccctcccagtgaccccaggctttttatggctgtgagacacgttaaaatttcaggacaggatattgctgtgttgcccaggctggagcgccgtggcacgattatagctcactgtaatttcgaactcctgggctcaagtgatcctcccacctcagcctctgttgtagctgggactacaggtatgtgccaccatgcctggctaatgatttttaatttttaatttaatttaatttaatttttttgtagaggtggggtctcactaggtttcccaggctgatcttgaactcctggccccaagtgatcctcccaccttggctgcccaaagtgctaggattacaagtgtgagccactcactctttgcattattttttgatagttgtattagatttgcattttcaggacatttagccatttatatgatactctcccccttttaactctaaccctattgtactttttagtaatacaggtatgttcagtgctcagtaccagttcttcagtccttatgtcaatgtctgtagtcattttgtctaaacttcatttctgttagattttttggaaaaggctcatgggtactgtattccctgaattcttgaattttcgtaacagtttgctgtgttctttatacttaaaccacaatctttactgaattaaaaatgttgcctcacattttttctttgcatatcttaaatatgttactcctttttcttctggcataataagtcttaagtccagtaattttattagattatatcttagtgtcggtcatttggagcaaatatgcttcagtgtccagggtccttttgcaatatgtagtttcagaatatttttttaatttcaggaatgtttctttgaattatagttttaggtatttggacaattttcttcctttgctttcctctccagggattcctacttttttttctttcttcttttagttttgagctttgtcacccaggctggagtacagtagcatgatcttggctcgctgcaacctgtgcctcccaggttcaaacgattctcatgcctcagcctcctgagtagctgggactacaggcatgtgccaccacgcctggctaatttttgtctttttagtagagacagaatttcgccatgttgaccaggctggtcttgaactcctgggctcaagcagtcctcccaccttggcctcacaaagtggtgggataacaggcgtgagccaccacacctgacccagggattcctattttctatatgttggatctcctttacctgtcttcagtattcgatactttcccttaaatccttctctctctcttaatttctgtttgattttgtttttcattttaaccttctagttttttttaaagcgttatttgttgtatctatttgctatctgtccctctagtgtattttcttatttctagaatgatttttctttttttcaagtttattctttcttcccccatttctcagccagtcgaattcttatttatgtaattcttttttgtttattttcttttgttttgtttttttaagatagggtctcactctgtcattcaggctgaagtgcagtggtgccatttcagctcactgcaacctgtgcccccaggctcaagcgatcctcccacctcagcctcctaaatagctgggatcacaggcacgcaccaccacacccagctatttctttgtatttttttgtggggacagcgtctcgccatcttgccctggctggcttcaaactcgtgagtgcaagtgatcctcccacctcggcctcccaaagtgctgggattacaggtgtgagccactgtacgtggcttgatttatgtaattctttcaggccgtatatcttattcttaatgtcttttagctcattttgaagtaataggttacagacaagtaatgacatgtctgataaatgctttcattttgtgtaagatgttattctgttcctttttttttatcactttgtatagaattttacctcaaaatttttatattgctcatttttacgtgaaagtgatttttctgaacttttagcagggtggctgtattaagagagatcttctaattccttagagctctctctcttttgggttactttctactacttggctactggcatgctttctaaaatatctttactgtattcttctctactttggggaggcctttctcttatctttcctcttggttttctctgtcctttttgattttgattctgttgccaggagtttttcctcagtgtggagtcctatgctagaatggagacctcacagcccagttttgagagttcataagcactagactcctcccagctctgcagacttttcttaatacgggccctttgctctgaccctttgttggaacgggaaataccccacagccctaagttcagctgctattttaaacttggctcaccatactgtccatttagtacttattggcaatactggggttctttttctcagttctttccgttgctgcattgccgccctctgcttcttcccacctaggtgctactattctgtaggacttgaggctagtcttagcttttccacatctgttgtattacagtgttcaaagtgacactggtcacttgattttattttttacttttttgagatagagtcttgccctgttgcccaggctggagtgcagtggcatgatctcagcacactgcaacctccacctcccaggttcaagtgattcccctgcctcagcctcccgagtagctgtgattaattacaggcacgtgccaccatgcctggccaatttttatatttttagtcaagacagagtttcactattttggccaggctagtctcaaactcctgacctcaagtgatccacccacctcagcctcctaaagtgctggtgtgtccggaattggtgggttcttggtctcactgacttcaagaatgaagccgcggaccctcgctgtgagtgttacagttcttcaaggcggcatgtccggagtttcttctttctgatgttcggatgtgtttggagtttcttccttctggtgggttcgtggtctcgctggctcaggcgtgaagctgcagaccttcgcggtgagcgttacagctcttaaggcggcgcgtctggagttgttcattcctcccggtgggttcgtagtctcgctggcttcaggagtgaagctgcgatactgttttggaacatgtatgctgcgaattcttccagcgggtaagacgtgaccttttgaggtgactataactgaagattgctttacagaagccaaaaaaggtttttgagtcatgatgcaagaatctgggactgagacaaaaagtaacggttcagccatccagaatgggtcgggcggcagcaaccacttactagagtgcggcggtcttcgggaggggcggtccaacggagagacgccggccgtggacatcggggcagctgacctcgcccacgcccagcagcagcagcaacaggcacttcaggtggcaagacagctccttcttcagcagcaacagcagcagcaagttagtggattaaaatctcccaagaggaatgacaaacaaccagctcttcaggttcccgtgtcagtggctatgatgacacctcaagttatcactccccagcaaatgcagcagatcctccagcaacaagtgctgagccctcagcagctccaggttctcctccagcagcagcaggccctcatgcttcaacagcagcagcttcaagagttttataaaaaacaacaggaacagttgcagcttcaacttttacaacaacaacatgctggaaaacagcctaaagagcaacagcaggtggctacccagcagttggcttttcagcagcagcttttacagatgcagcagttacagcagcagcacctcctgtctttgcagcgccaaggccttctgacaattcagcccgggcagcctgcccttccccttcaacctcttgctcaaggcatgattccaacagaactgcagcagctctggaaagaagtgacaagtgctcatactgcagaagaaaccacaggcaacaatcacagcagtttggatctgaccacgacatgtgtctcctcctctgcaccttccaagacctccttaataatgaacccacatgcctctaccaatggacagctctcagtccacactcccaaaagggaaagtttgtcccatgaggagcacccccatagccatcctctctatggacatggtgtatgcaagtggccaggctgtgaagcagtgtgcgaagatttccaatcatttctaaaacatctcaacagtgagcatgcgctggacgatagaagtacagcccaatgtagagtacaaatgcaggttgtacagcagttagagctacagcttgcaaaagacaaagaacgcctgcaagccatgatgacccacctgcatgtgaagtctacagaacccaaagccgcccctcagcccttgaatctggtatcaagtgtcactctctccaagtccgcatcggaggcttctccacagagcttacctcatactccaacgaccccaaccgcccccctgactcccgtcacccaaggcccctctgtcatcacaaccaccagcatgcacacggtgggacccatccgcaggcggtactcagacaaatacaacgtgcccatttcgtcagcagatattgcgcagaaccaagaattttataagaacgcagaagttagaccaccatttacatatgcatctttaattaggcaggccattctcgaatctccagaaaagcagctaacactaaatgagatctataactggttcacacgaatgtttgcttacttccgacgcaacgcggccacgtggaagaatgcagtgcgtcataatcttagtcttcacaagtgttttgtgcgagtagaaaacgttaaaggggcagtatggacagtggatgaagtagaattccaaaaacgaaggccacaaaagatcagtggggtgccattcgcaccaacctctcactgcataagtgctttatcagagtagaggatgagtttgggtccttttggacagttgatgatgaagagtttaaacgtggccgccatattcaacgaggccgtcctcgcaaatactgccccgatgaaaactttgacgagcttgtcgcacataacccttcccttattaaaaacatgcagagcagccacgcctactgcacacctctcaatgcagctttacaggcttcaatggctgagaatagtatacctctatacactaccgcttccatgggaaatcccactctgggcaacttagccagcgcaatacgggaagagctgaacggggcaatggagcataccaacagcaacgagagtgacagcagtccaggcagatctcctatgcaagccgtgcatcctgtacacgtcaaagaagagcccctcgatccagaggaagctgaagggcccctgtccttagtgacaacagccaaccacagtccagattttgaccatgacagagattacgaagatgaaccagtaaacgaggacatggagtgactatcggggcgggccaaccccgagaatgaagattggaaaaaggaaaaaaaaaaaaa

SEQ ID NO: 135067 - DNA, 1996 bp, Homo sapiens
  Payload ID: 6401
  Gene Symbol: FOXP1
  Gene Name: forkhead box P1
  Uniprot ID: Q9H334
  ENST ID: ENST00000484350
  CDS Start-End: 155-1960
agtctagagacttagaagcatttattaacagtgaggctgctgaaggtttttaataacaaaattacaaatactctatctaattggtaagacgtgaccttttgaggtgactataactgaagattgctttacagaagccaaaaaaggtttttgagtcatgatgcaagaatctgggactgagacaaaaagtaacggttcagccatccagaatgggtcgggcggcagcaaccacttactagagtgcggcggtcttcgggaggggcggtccaacggagagacgccggccgtggacatcggggcagctgacctcgcccacgcccagcagcagcagcaacaggcacttcaggtggcaagacagctccttcttcagcagcaacagcagcagcaagttagtggattaaaatctcccaagaggaatgacaaacaaccagctcttcagcaacagcaggtggctacccagcagttggcttttcagcagcagcttttacagatgcagcagttacagcagcagcacctcctgtctttgcagcgccaaggccttctgacaattcagcccgggcagcctgcccttccccttcaacctcttgctcaaggcatgattccaacagaactgcagcagctctggaaagaagtgacaagtgctcatactgcagaagaaaccacaggcaacaatcacagcagtttggatctgaccacgacatgtgtctcctcctctgcaccttccaagacctccttaataatgaacccacatgcctctaccaatggacagctctcagtccacactcccaaaagggaaagtttgtcccatgaggagcacccccatagccatcctctctatggacatggtgtatgcaagtggccaggctgtgaagcagtgtgcgaagatttccaatcatttctaaaacatctcaacagtgagcatgcgctggacgatagaagtacagcccaatgtagagtacaaatgcaggttgtacagcagttagagctacagcttgcaaaagacaaagaacgcctgcaagccatgatgacccacctgcatgtgaagtctacagaacccaaagccgcccctcagcccttgaatctggtatcaagtgtcactctctccaagtccgcatcggaggcttctccacagagcttacctcatactccaacgaccccaaccgcccccctgactcccgtcacccaaggcccctctgtcatcacaaccaccagcatgcacacggtgggacccatccgcaggcggtactcagacaaatacaacgtgcccatttcgtcagcagatattgcgcagaaccaagaattttataagaacgcagaagttagaccaccatttacatatgcatctttaattaggcaggccattctcgaatctccagaaaagcagctaacactaaatgagatctataactggttcacacgaatgtttgcttacttccgacgcaacgcggccacgtggaagaatgcagtgcgtcataatcttagtcttcacaagtgttttgtgcgagtagaaaacgttaaaggggcagtatggacagtggatgaagtagaattccaaaaacgaaggccacaaaagatcagtggtaacccttcccttattaaaaacatgcagagcagccacgcctactgcacacctctcaatgcagctttacaggcttcaatggctgagaatagtatacctctatacactaccgcttccatgggaaatcccactctgggcaacttagccagcgcaatacgggaagagctgaacggggcaatggagcataccaacagcaacgagagtgacagcagtccaggcagatctcctatgcaagccgtgcatcctgtacacgtcaaagaagagcccctcgatccagaggaagctgaagggcccctgtccttagtgacaacagccaaccacagtccagattttgaccatgacagagattacgaagatgaaccagtaaacgaggacatggagtgactatcggggcgggccaaccccgagaatgaagattgg

SEQ ID NO: 135068 - DNA, 795 bp, Homo sapiens
  Payload ID: 6401
  Gene Symbol: FOXP1
  Gene Name: forkhead box P1
  ENST ID: ENST00000485326
  CDS Start-End: 122-795
gtgcagtccgcctgcacgccgaggccgccggaccccacgcccggcccgcgcgggcgccccgagcccggctccgcgcgcctggcggctacatggagagtgtcaggttcccgtgtcagtggctatgatgacacctcaagttatcactccccagcaaatgcagcagatcctccagcaacaagtgctgagccctcagcagctccaggttctcctccagcagcagcaggccctcatgcttcaacagcagcagcttcaagagttttataaaaaacaacaggaacagttgcagcttcaacttttacaacaacaacatgctggaaaacagcctaaagagcaacagcaggtggctacccagcagttggcttttcagcagcagcttttacagatgcagcagttacagcagcagcacctcctgtctttgcagcgccaaggccttctgacaattcagcccgggcagcctgcccttccccttcaacctcttgctcaaggcatgattccaacagaactgcagcagctctggaaagaagtgacaagtgctcatactgcagaagaaaccacaggcaacaatcacagcagtttggatctgaccacgacatgtgtctcctcctctgcaccttccaagacctccttaataatgaacccacatgcctctaccaatggacagctctcagtccacactcccaaaagggaaagtttgtcccatgaggagcacccccatagccatcctctctatggacatggtgtatgcaagtggccaggctgtgaagcagtgtgcgaagatttccaatcatttctaaa

SEQ ID NO: 135069 - DNA, 2400 bp, Homo sapiens
  Payload ID: 6401
  Gene Symbol: FOXP1
  Gene Name: forkhead box P1
  Uniprot ID: Q9H334
  ENST ID: ENST00000498215
  CDS Start-End: 324-2357
agacaataagaaacaaacggtacaactccacaaaaggcttcccggaaaataagtgtcaaataaatcctacggaactctcgcttctgccactgagctctgtatatgcaaacctgtttttatgccatcgcttccccaggctgagctgcgtttgtttggaaatgtaagccactgccttttctttttttcttttttccttttttttttttcccccctcacttcatctgagggctctggattaattccttgagacatatctttgcatacatatctcatgagttatgtttcctggagccttttactaggaacattaaggtttttgagtcatgatgcaagaatctgggactgagacaaaaagtaacggttcagccatccagaatgggtcgggcggcagcaaccacttactagagtgcggcggtcttcgggaggggcggtccaacggagagacgccggccgtggacatcggggcagctgacctcgcccacgcccagcagcagcagcaacaggcacttcaggtggcaagacagctccttcttcagcagcaacagcagcagcaagttagtggattaaaatctcccaagaggaatgacaaacaaccagctcttcaggttcccgtgtcagtggctatgatgacacctcaagttatcactccccagcaaatgcagcagatcctccagcaacaagtgctgagccctcagcagctccaggttctcctccagcagcagcaggccctcatgcttcaacagcagcagcttcaagagttttataaaaaacaacaggaacagttgcagcttcaacttttacaacaacaacatgctggaaaacagcctaaagagcaacagcaggtggctacccagcagttggcttttcagcagcagcttttacagatgcagcagttacagcagcagcacctcctgtctttgcagcgccaaggccttctgacaattcagcccgggcagcctgcccttccccttcaacctcttgctcaaggcatgattccaacagaactgcagcagctctggaaagaagtgacaagtgctcatactgcagaagaaaccacaggcaacaatcacagcagtttggatctgaccacgacatgtgtctcctcctctgcaccttccaagacctccttaataatgaacccacatgcctctaccaatggacagctctcagtccacactcccaaaagggaaagtttgtcccatgaggagcacccccatagccatcctctctatggacatggtgtatgcaagtggccaggctgtgaagcagtgtgcgaagatttccaatcatttctaaaacatctcaacagtgagcatgcgctggacgatagaagtacagcccaatgtagagtacaaatgcaggttgtacagcagttagagctacagcttgcaaaagacaaagaacgcctgcaagccatgatgacccacctgcatgtgaagtctacagaacccaaagccgcccctcagcccttgaatctggtatcaagtgtcactctctccaagtccgcatcggaggcttctccacagagcttacctcatactccaacgaccccaaccgcccccctgactcccgtcacccaaggcccctctgtcatcacaaccaccagcatgcacacggtgggacccatccgcaggcggtactcagacaaatacaacgtgcccatttcgtcagcagatattgcgcagaaccaagaattttataagaacgcagaagttagaccaccatttacatatgcatctttaattaggcaggccattctcgaatctccagaaaagcagctaacactaaatgagatctataactggttcacacgaatgtttgcttacttccgacgcaacgcggccacgtggaagaatgcagtgcgtcataatcttagtcttcacaagtgttttgtgcgagtagaaaacgttaaaggggcagtatggacagtggatgaagtagaattccaaaaacgaaggccacaaaagatcagtggtaacccttcccttattaaaaacatgcagagcagccacgcctactgcacacctctcaatgcagctttacaggcttcaatggctgagaatagtatacctctatacactaccgcttccatgggaaatcccactctgggcaacttagccagcgcaatacgggaagagctgaacggggcaatggagcataccaacagcaacgagagtgacagcagtccaggcagatctcctatgcaagccgtgcatcctgtacacgtcaaagaagagcccctcgatccagaggaagctgaagggcccctgtccttagtgacaacagccaaccacagtccagattttgaccatgacagagattacgaagatgaaccagtaaacgaggacatggagtgactatcggggcgggccaaccccgagaatgaagattggaaaaagg

SEQ ID NO: 135070 - DNA, 1778 bp, Homo sapiens
  Payload ID: 6401
  Gene Symbol: FOXP1
  Gene Name: forkhead box P1
  ENST ID: ENST00000497355
  CDS Start-End: 1-1722
gcttcgcagaaacagccagaacccatctacagcaagaagacggaaatccaaaggcagacagtacgggctcccttcgccaaactcttcattttctctgcacttcaggtggcaagacagctccttcttcagcagcaacagcagcagcaagttagtggattaaaatctcccaagaggaatgacaaacaaccagctcttcagcaacagcaggtggctacccagcagttggcttttcagcagcagcttttacagatgcagcagttacagcagcagcacctcctgtctttgcagcgccaaggccttctgacaattcagcccgggcagcctgcccttccccttcaacctcttgctcaaggcatgattccaacagaactgcagcagctctggaaagaagtgacaagtgctcatactgcagaagaaaccacaggcaacaatcacagcagtttggatctgaccacgacatgtgtctcctcctctgcaccttccaagacctccttaataatgaacccacatgcctctaccaatggacagctctcagtccacactcccaaaagggaaagtttgtcccatgaggagcacccccatagccatcctctctatggacatggtgtatgcaagtggccaggctgtgaagcagtgtgcgaagatttccaatcatttctaaaacatctcaacagtgagcatgcgctggacgatagaagtacagcccaatgtagagtacaaatgcaggttgtacagcagttagagctacagcttgcaaaagacaaagaacgcctgcaagccatgatgacccacctgcatgtgaagtctacagaacccaaagccgcccctcagcccttgaatctggtatcaagtgtcactctctccaagtccgcatcggaggcttctccacagagcttacctcatactccaacgaccccaaccgcccccctgactcccgtcacccaaggcccctctgtcatcacaaccaccagcatgcacacggtgggacccatccgcaggcggtactcagacaaatacaacgtgcccatttcgtcagcagatattgcgcagaaccaagaattttataagaacgcagaagttagaccaccatttacatatgcatctttaattaggcaggccattctcgaatctccagaaaagcagctaacactaaatgagatctataactggttcacacgaatgtttgcttacttccgacgcaacgcggccacgtggaagaatgcagtgcgtcataatcttagtcttcacaagtgttttgtgcgagtagaaaacgttaaaggggcagtatggacagtggatgaagtagaattccaaaaacgaaggccacaaaagatcagtggtaacccttcccttattaaaaacatgcagagcagccacgcctactgcacacctctcaatgcagctttacaggcttcaatggctgagaatagtatacctctatacactaccgcttccatgggaaatcccactctgggcaacttagccagcgcaatacgggaagagctgaacggggcaatggagcataccaacagcaacgagagtgacagcagtccaggcagatctcctatgcaagccgtgcatcctgtacacgtcaaagaagagcccctcgatccagaggaagctgaagggcccctgtccttagtgacaacagccaaccacagtccagattttgaccatgacagagattacgaagatgaaccagtaaacgaggacatggagtgactatcggggcgggccaaccccgagaatgaagattggaaaaaggaaaaaaaaaaaaa

SEQ ID NO: 135071 - DNA, 2703 bp, Homo sapiens
  Payload ID: 6401
  Gene Symbol: FOXP1
  Gene Name: forkhead box P1
  Uniprot ID: Q9H334
  ENST ID: ENST00000493089
  CDS Start-End: 630-2660
atttattgtgtggcggttgcacgctgtactcgcggcggcccggccctcgcccgggagtgcgtgtgtgcgcgcgtgtgtgcgcgagtgagtgtgtgcgcggggtgcgcgcgcgggcgggagtgggcgcgcgcggggaaaggcccgaaaacaccttagtttgcaccgagagaccatttgcagcggaacccgaaagtttgtaagaggaagagagcgcgcggcgagcgagcgagcgggccgggggcagcggcagcggcgccggggaccatggtgctgccggcgcctcctccgcgggcgtgaaggcggcgctcctactccctccccggactccgcggtgtcccagaagcttttgttgacaattccagtttccgaacaaaacatttcggcaatggtgagggcttcgatcccttctctgatttgctgtcagccatgaacggatggatgtgatgcctgctagccaaaaggcttccctctgtgtgttgcagtcctgtggcattatgcatgccccctcccagtgaccccaggctttttatggctgtgagacacgttaaaatttcaggggtaagacgtgaccttttgaggtgactataactgaagattgctttacagaagccaaaaaaggtttttgagtcatgatgcaagaatctgggactgagacaaaaagtaacggttcagccatccagaatgggtcgggcggcagcaaccacttactagagtgcggcggtcttcgggaggggcggtccaacggagagacgccggccgtggacatcggggcagctgacctcgcccacgcccagcagcagcagcaacaggcacttcaggtggcaagacagctccttcttcagcagcaacagcagcagcaagttagtggattaaaatctcccaagaggaatgacaaacaaccagctcttcaggttcccgtgtcagtggctatgatgacacctcaagttatcactccccagcaaatgcagcagatcctccagcaacaagtgctgagccctcagcagctccaggttctcctccagcagcagcaggccctcatgcttcaacagcagcagcttcaagagttttataaaaaacaacaggaacagttgcagcttcaacttttacaacaacaacatgctggaaaacagcctaaagagcaacagcaggtggctacccagcagttggcttttcagcagcagcttttacagatgcagcagttacagcagcagcacctcctgtctttgcagcgccaaggccttctgacaattcagcccgggcagcctgcccttccccttcaacctcttgctcaaggcatgattccaacagaactgcagcagctctggaaagaagtgacaagtgctcatactgcagaagaaaccacaggcaacaatcacagcagtttggatctgaccacgacatgtgtctcctcctctgcaccttccaagacctccttaataatgaacccacatgcctctaccaatggacagctctcagtccacactcccaaaagggaaagtttgtcccatgaggagcacccccatagccatcctctctatggacatggtgtatgcaagtggccaggctgtgaagcagtgtgcgaagatttccaatcatttctaaaacatctcaacagtgagcatgcgctggacgatagaagtacagcccaatgtagagtacaaatgcaggttgtacagcagttagagctacagcttgcaaaagacaaagaacgcctgcaagccatgatgacccacctgcatgtgaagtctacagaacccaaagccgcccctcagcccttgaatctggtatcaagtgtcactctctccaagtccgcatcggaggcttctccacagagcttacctcatactccaacgaccccaaccgcccccctgactcccgtcacccaaggcccctctgtcatcacaaccaccagcatgcacacggtgggacccatccgcaggcggtactcagacaaatacaacgtgcccatttcgtcagatattgcgcagaaccaagaattttataagaacgcagaagttagaccaccatttacatatgcatctttaattaggcaggccattctcgaatctccagaaaagcagctaacactaaatgagatctataactggttcacacgaatgtttgcttacttccgacgcaacgcggccacgtggaagaatgcagtgcgtcataatcttagtcttcacaagtgttttgtgcgagtagaaaacgttaaaggggcagtatggacagtggatgaagtagaattccaaaaacgaaggccacaaaagatcagtggtaacccttcccttattaaaaacatgcagagcagccacgcctactgcacacctctcaatgcagctttacaggcttcaatggctgagaatagtatacctctatacactaccgcttccatgggaaatcccactctgggcaacttagccagcgcaatacgggaagagctgaacggggcaatggagcataccaacagcaacgagagtgacagcagtccaggcagatctcctatgcaagccgtgcatcctgtacacgtcaaagaagagcccctcgatccagaggaagctgaagggcccctgtccttagtgacaacagccaaccacagtccagattttgaccatgacagagattacgaagatgaaccagtaaacgaggacatggagtgactatcggggcgggccaaccccgagaatgaagattggaaaaagg

SEQ ID NO: 135072 - DNA, 530 bp, Homo sapiens
  Payload ID: 6401
  Gene Symbol: FOXP1
  Gene Name: forkhead box P1
  ENST ID: ENST00000497553
  CDS Start-End: 162-530
gcttattgagagtagcttttgttgttgctattgttgtataaataagaaaggaatttaaagaattatttcttagcaaacgtgtggcagatgctttcttcggcagctgtcgttctagaggggaagtcgcctggttcagcgacgaggttcccgtgtcagtggctatgatgacacctcaagttatcactccccagcaaatgcagcagatcctccagcaacaagtgctgagccctcagcagctccaggttctcctccagcagcagcaggccctcatgcttcaacagcagcagcttcaagagttttataaaaaacaacaggaacagttgcagcttcaacttttacaacaacaacatgctggaaaacagcctaaagagcaacagcaggtggctacccagcagttggcttttcagcagcagcttttacagatgcagcagttacagcagcagcacctcctgtctttgcagcgccaaggccttctgacaattcagcccgggcagcctgcccttccccttcaacctcttgctcaaggtatg

SEQ ID NO: 135073 - DNA, 1842 bp, Homo sapiens
  Payload ID: 6401
  Gene Symbol: FOXP1
  Gene Name: forkhead box P1
  ENST ID: ENST00000468577
  CDS Start-End: 1-1842
atgatgcaagaatctgggactgagacaaaaagtaacggttcagccatccagaatgggtcgggcggcagcaaccacttactagagtgcggcggtcttcgggaggggcggtccaacggagagacgccggccgtggacatcggggcagctgacctcgcccacgcccagcagcagcagcaacaggcacttcaggtggcaagacagctccttcttcagcagcaacagcagcagcaagttagtggattaaaatctcccaagaggaatgacaaacaaccagctcttcaggttcccgtgtcagtggctatgatgacacctcaagttatcactccccagcaaatgcagcagatcctccagcaacaagtgctgagccctcagcagctccaggttctcctccagcagcagcaggccctcatgcttcaacagcagcagcttcaagagttttataaaaaacaacaggaacagttgcagcttcaacttttacaacaacaacatgctggaaaacagcctaaagagcaacagcaggtggctacccagcagttggcttttcagcagcagcttttacagatgcagcagttacagcagcagcacctcctgtctttgcagcgccaaggccttctgacaattcagcccgggcagcctgcccttccccttcaacctcttgctcaaggcatgattccaacagaactgcagcagctctggaaagaagtgacaagtgctcatactgcagaagaaaccacaggcaacaatcacagcagtttggatctgaccacgacatgtgtctcctcctctgcaccttccaagacctccttaataatgaacccacatgcctctaccaatggacagctctcagtccacactcccaaaagggaaagtttgtcccatgaggagcacccccatagccatcctctctatggacatggtgtatgcaagtggccaggctgtgaagcagtgtgcgaagatttccaatcatttctaaaacatctcaacagtgagcatgcgctggacgatagaagtacagcccaatgtagagtacaaatgcaggttgtacagcagttagagctacagcttgcaaaagacaaagaacgcctgcaagccatgatgacccacctgcatgtgaagtctacagaacccaaagccgcccctcagcccttgaatctggtatcaagtgtcactctctccaagtccgcatcggaggcttctccacagagcttacctcatactccaacgaccccaaccgcccccctgactcccgtcacccaaggcccctctgtcatcacaaccaccagcatgcacacggtgggacccatccgcaggcggtactcagacaaatacaacgtgcccatttcgtcagcagatattgcgcagaaccaagaattttataagaacgcagaagttagaccaccatttacatatgcatctttaattaggcaggccattctcgaatctccagaaaagcagctaacactaaatgagatctataactggttcacacgaatgtttgcttacttccgacgcaacgcggccacgtggaaggcttcaatggctgagaatagtatacctctatacactaccgcttccatgggaaatcccactctgggcaacttagccagcgcaatacgggaagagctgaacggggcaatggagcataccaacagcaacgagagtgacagcagtccaggcagatctcctatgcaagccgtgcatcctgtacacgtcaaagaagagcccctcgatccagaggaagctgaagggcccctgtccttagtgacaacagccaaccacagtccagattttgaccatgacagagattacgaagatgaaccagtaaacgaggacatggagtga

SEQ ID NO: 135074 - DNA, 4967 bp, Homo sapiens
  Payload ID: 6401
  Gene Symbol: FOXP1
  Gene Name: forkhead box P1
  Uniprot ID: Q9H334
  ENST ID: ENST00000475937
  CDS Start-End: 432-2465
atcacagcttggtgctggggctcagcatggccaggtggctaaccagggcttggtgtcaactacatttgggatgatgacacttggaggacacagagccactgtgcagcaggagtcgccactgctaacagccagagtgtcccagaagcttttgttgacaattccagtttccgaacaaaacatttcggcaatggtgagggcttcgatcccttctctgatttgctgtcagccatgaacggatggatgtgatgcctgctagccaaaaggcttccctctgtgtgttgcagtcctgtggcattatgcatgccccctcccagtgaccccaggctttttatggctgtgagacacgttaaaatttcaggggtaagacgtgaccttttgaggtgactataactgaagattgctttacagaagccaaaaaaggtttttgagtcatgatgcaagaatctgggactgagacaaaaagtaacggttcagccatccagaatgggtcgggcggcagcaaccacttactagagtgcggcggtcttcgggaggggcggtccaacggagagacgccggccgtggacatcggggcagctgacctcgcccacgcccagcagcagcagcaacaggcacttcaggtggcaagacagctccttcttcagcagcaacagcagcagcaagttagtggattaaaatctcccaagaggaatgacaaacaaccagctcttcaggttcccgtgtcagtggctatgatgacacctcaagttatcactccccagcaaatgcagcagatcctccagcaacaagtgctgagccctcagcagctccaggttctcctccagcagcagcaggccctcatgcttcaacagcagcagcttcaagagttttataaaaaacaacaggaacagttgcagcttcaacttttacaacaacaacatgctggaaaacagcctaaagagcaacagcaggtggctacccagcagttggcttttcagcagcagcttttacagatgcagcagttacagcagcagcacctcctgtctttgcagcgccaaggccttctgacaattcagcccgggcagcctgcccttccccttcaacctcttgctcaaggcatgattccaacagaactgcagcagctctggaaagaagtgacaagtgctcatactgcagaagaaaccacaggcaacaatcacagcagtttggatctgaccacgacatgtgtctcctcctctgcaccttccaagacctccttaataatgaacccacatgcctctaccaatggacagctctcagtccacactcccaaaagggaaagtttgtcccatgaggagcacccccatagccatcctctctatggacatggtgtatgcaagtggccaggctgtgaagcagtgtgcgaagatttccaatcatttctaaaacatctcaacagtgagcatgcgctggacgatagaagtacagcccaatgtagagtacaaatgcaggttgtacagcagttagagctacagcttgcaaaagacaaagaacgcctgcaagccatgatgacccacctgcatgtgaagtctacagaacccaaagccgcccctcagcccttgaatctggtatcaagtgtcactctctccaagtccgcatcggaggcttctccacagagcttacctcatactccaacgaccccaaccgcccccctgactcccgtcacccaaggcccctctgtcatcacaaccaccagcatgcacacggtgggacccatccgcaggcggtactcagacaaatacaacgtgcccatttcgtcagcagatattgcgcagaaccaagaattttataagaacgcagaagttagaccaccatttacatatgcatctttaattaggcaggccattctcgaatctccagaaaagcagctaacactaaatgagatctataactggttcacacgaatgtttgcttacttccgacgcaacgcggccacgtggaagaatgcagtgcgtcataatcttagtcttcacaagtgttttgtgcgagtagaaaacgttaaaggggcagtatggacagtggatgaagtagaattccaaaaacgaaggccacaaaagatcagtggtaacccttcccttattaaaaacatgcagagcagccacgcctactgcacacctctcaatgcagctttacaggcttcaatggctgagaatagtatacctctatacactaccgcttccatgggaaatcccactctgggcaacttagccagcgcaatacgggaagagctgaacggggcaatggagcataccaacagcaacgagagtgacagcagtccaggcagatctcctatgcaagccgtgcatcctgtacacgtcaaagaagagcccctcgatccagaggaagctgaagggcccctgtccttagtgacaacagccaaccacagtccagattttgaccatgacagagattacgaagatgaaccagtaaacgaggacatggagtgactatcggggcgggccaaccccgagaatgaagattggaaaaaggaaaaaaaaaaaaacacgtcaaaagttagcagtgaaattgttctccatttgttgtacagtctggaggattttcactacgttttgacaactctgaaatgtgttaactcttagtgccatcaagaaccccatttgggagtatttttgatttttctactttttgttgaaaaaaggaatttgtactctgtgcattggatggacttgtttggtacttgggattttcctctcttaaccgtcaacatcagtgttgtaaatttgctaaactgattcacttttagcagcagactttgaactgcagtcctgccaacgttggacactgaggacgcccgacagagcttgtgcacctaagctgcagaccaagcctttgcccagaatttaaggattccaatggacgacctatttgcacagtactgcatgttgattatcactgcctttactccttttttttttttttttttttttttttttttgcttccagttgggatggggaaggcctttgtgtgtgtattggggggaggggttaaaaaataattatcccaaactttttaatgtattgctttttttttttttttttttccttctactataccattttaagttctgacctcaggcctccatttgggccgatggcctcttggaggcttaaagttttctgtaccttgtgatgaatgttaataggtgtttttattatacaaagctgaatgtcatttctcgtttgtagctttctgtcactcattccatcttccttcagacatcaccacgtttctctaaagtcagaaaacattccgttttggtctttttcaaaaaggtcccaaatgctgcactctacacatgaaggccctctcacacagacgtgacgtcctgccagaaagagaatgaatgacagaaaaaaaaaagagagacaaactctaggaacaatgccgattcattccacgcagcagtattgggggtggttcgggggaggggtgtttcggattttctttttttcttttcttttctttttttttttttgcagcaaccattaataaatgccaccacattctaccagcacaaggaaacataggcagcactgaaaaaaaaaaaaaagctcatattaattagactgacaatatggccttggaaggctctcccttgtggaaccaagttgccatgggccttgggtgctctgcgataacgggtgtgggttggttttgtttgcaaaatggccaaaaaaaaaaaccggcttccccgagcagctgccctgaaagtaggggtggcggcggcggcgctgagtttatacattagttcagacctacttggtggcattaaactgtttgaatgcaaattcgatttcagattgaacttgttaagggagttaacgagggctgagttcagcaaatgctaaagtgttaatttcaaatatgcaaatttggtactgcagtttgttatgcaatattatatcaccaacccagtatcacaaaaactcatagaagatatcatgtaggccctgggctttgggggggtcccaaacatggtatgcagaaatgtgatggttacaggtcagtacaacctcagtccttagaacccctccacacttcagctctgcacccactttcctgtcatttatttatataggactgtagttttttttagttcgagagcctttcgaagcttaatttatattctttctttgtaccttttttctaaaattaccaaagatattacacaaaggtaaattatgttctctgttttatgctttatctgatgaagccaaatatcctcttattgttgatcaaaggaggcaaaagaatttagaggcaaatgacaagcgataggctattgcaacctgagaaagagaactgctccttcatcgtaaatttagaagaccaagtagataatggaaccaaagttgttacttttttctagtagttatttttcctttttctttttgtgtacctctacagagaccaaaactcattctcttaaagagattttatggggctactgcagataaaaataggacacaatattaaaggagctacagaaggaagggagtcccatctcaaaaaaaaaatgaatgtatgccactgcaattagagtatccaataaaggagacagtttagagtcaggacagaaaagcttccataattgaactagattacataatagtatttctagaaaaagagatatttttagattgtatgccacttttgtttaagaactgtgctgtgatcactgtattaattttggtttatcttggcatatatccttcagtttgtttttatttttaatttttcctttttttccgattaggctttggtcagcatttttcatttaaagaaaagtaacactcccatccactcataagcttggtacaaaaacttctctggcagttacttttgaagcttcactctgctttctgtataaagggcagtctgtggtcacgcaagactttaaaaaaaaaaaaaaaaaaaaaaaaaaaaa

SEQ ID NO: 135075 - DNA, 2250 bp, Homo sapiens
  Payload ID: 6401
  Gene Symbol: FOXP1
  Gene Name: forkhead box P1
  ENST ID: ENST00000491238
  CDS Start-End: 155-2194
tgcaactttgaaaattacctgcaagctccaactgatctttcaactttgaaagtgaagaattacttgaggaattcttgtggtttctttgtcatttagtgagagcccagccagctactgtggaggcaaacctccctgaggttgcctacaaagggcaatgttccagtgtgttttctcttcgagtgtgcttcagccgcacagtacttcctgtttattcaaacatcttttttaccactcggcaacccccgcttcgcagaaacagccagaacccatctacagcaagaagacggaaatccaaaggcagacagtacgggctcccttcgccaaactcttcattttctctgcacttcaggtggcaagacagctccttcttcagcagcaacagcagcagcaagttagtggattaaaatctcccaagaggaatgacaaacaaccagctcttcaggttcccgtgtcagtggctatgatgacacctcaagttatcactccccagcaaatgcagcagatcctccagcaacaagtgctgagccctcagcagctccaggttctcctccagcagcagcaggccctcatgcttcaacagcagcagcttcaagagttttataaaaaacaacaggaacagttgcagcttcaacttttacaacaacaacatgctggaaaacagcctaaagagcaacagcaggtggctacccagcagttggcttttcagcagcagcttttacagatgcagcagttacagcagcagcacctcctgtctttgcagcgccaaggccttctgacaattcagcccgggcagcctgcccttccccttcaacctcttgctcaaggcatgattccaacagaactgcagcagctctggaaagaagtgacaagtgctcatactgcagaagaaaccacaggcaacaatcacagcagtttggatctgaccacgacatgtgtctcctcctctgcaccttccaagacctccttaataatgaacccacatgcctctaccaatggacagctctcagtccacactcccaaaagggaaagtttgtcccatgaggagcacccccatagccatcctctctatggacatggtgtatgcaagtggccaggctgtgaagcagtgtgcgaagatttccaatcatttctaaaacatctcaacagtgagcatgcgctggacgatagaagtacagcccaatgtagagtacaaatgcaggttgtacagcagttagagctacagcttgcaaaagacaaagaacgcctgcaagccatgatgacccacctgcatgtgaagtctacagaacccaaagccgcccctcagcccttgaatctggtatcaagtgtcactctctccaagtccgcatcggaggcttctccacagagcttacctcatactccaacgaccccaaccgcccccctgactcccgtcacccaaggcccctctgtcatcacaaccaccagcatgcacacggtgggacccatccgcaggcggtactcagacaaatacaacgtgcccatttcgtcagcagatattgcgcagaaccaagaattttataagaacgcagaagttagaccaccatttacatatgcatctttaattaggcaggccattctcgaatctccagaaaagcagctaacactaaatgagatctataactggttcacacgaatgtttgcttacttccgacgcaacgcggccacgtggaagaatgcagtgcgtcataatcttagtcttcacaagtgttttgtgcgagtagaaaacgttaaaggggcagtatggacagtggatgaagtagaattccaaaaacgaaggccacaaaagatcagtggtaacccttcccttattaaaaacatgcagagcagccacgcctactgcacacctctcaatgcagctttacaggcttcaatggctgagaatagtatacctctatacactaccgcttccatgggaaatcccactctgggcaacttagccagcgcaatacgggaagagctgaacggggcaatggagcataccaacagcaacgagagtgacagcagtccaggcagatctcctatgcaagccgtgcatcctgtacacgtcaaagaagagcccctcgatccagaggaagctgaagggcccctgtccttagtgacaacagccaaccacagtccagattttgaccatgacagagattacgaagatgaaccagtaaacgaggacatggagtgactatcggggcgggccaaccccgagaatgaagattggaaaaaggaaaaaaaaaaaaa

SEQ ID NO: 135076 - DNA, 429 bp, Homo sapiens
  Payload ID: 6401
  Gene Symbol: FOXP1
  Gene Name: forkhead box P1
  Uniprot ID: Q9H334
  ENST ID: ENST00000622151
  CDS Start-End: 63-407
agctgaagtgcagagagtgaatcatcagcattttctcctgaagacaggacagtttttgagtcatgatgcaagaatctgggactgagacaaaaagtaacggttcagccatccagaatgggtcgggcggcagcaaccacttactagagtgcggcggtcttcgggaggggcggtccaacggagagacgccggccgtggacatcggggcagctgacctcgcccacgcccagcagcagcagcaacagtggcatctcataaaccatcagccctctaggagtcccagcagttggcttaagagactaatttcaagcccttgggagttggaagtcctgcaggtccccttgtggggagcagttgctgagacgaagatgagtggacctgtgtgtcagcctaacccttccccattttgaataaaattattctttggagaaa

SEQ ID NO: 135077 - DNA, 577 bp, Homo sapiens
  Payload ID: 6401
  Gene Symbol: FOXP1
  Gene Name: forkhead box P1
  ENST ID: ENST00000610810
  CDS Start-End: 225-577
agtccttcctcacactgccgccagcctgggagccctgagagccagcaggcttccaagcgcctgtagtttctcccttacaaactctcaactttcttccgttgtgtgaaaattgcctctcccgccccaaagctttgcctcctcaccatgaacggggtaagacgtgaccttttgaggtgactataactgaagattgctttacagaagccaaaaaaggtttttgagtcatgatgcaagaatctgggactgagacaaaaagtaacggttcagccatccagaatgggtcgggcggcagcaaccacttactagagtgcggcggtcttcgggaggggcggtccaacggagagacgccggccgtggacatcggggcagctgacctcgcccacgcccagcagcagcagcaacaggcacttcaggtggcaagacagctccttcttcagcagcaacagcagcagcaagttagtggattaaaatctcccaagaggaatgacaaacaaccagctcttcaggttcccgtgtcagtggctatgatgacacctcaagttatcactccccagcaaatgcagcagatcctccagca

SEQ ID NO: 135078 - DNA, 6384 bp, Homo sapiens
  Payload ID: 6401
  Gene Symbol: FOXP1
  Gene Name: forkhead box P1
  ENST ID: ENST00000614176
  CDS Start-End: 119-1852
cagtccgcctgcacgccgaggccgccggaccccacgcccggcccgcgcgggcgccccgagcccggctccgcgcgcctggcggctacatggagagtgtcaggttcccgtgtcagtggctatgatgacacctcaagttatcactccccagcaaatgcagcagatcctccagcaacaagtgctgagccctcagcagctccaggttctcctccagcagcagcaggccctcatgcttcaacagcagcagcttcaagagttttataaaaaacaacaggaacagttgcagcttcaacttttacaacaacaacatgctggaaaacagcctaaagagcaacagcaggtggctacccagcagttggcttttcagcagcagcttttacagatgcagcagttacagcagcagcacctcctgtctttgcagcgccaaggccttctgacaattcagcccgggcagcctgcccttccccttcaacctcttgctcaaggcatgattccaacagaactgcagcagctctggaaagaagtgacaagtgctcatactgcagaagaaaccacaggcaacaatcacagcagtttggatctgaccacgacatgtgtctcctcctctgcaccttccaagacctccttaataatgaacccacatgcctctaccaatggacagctctcagtccacactcccaaaagggaaagtttgtcccatgaggagcacccccatagccatcctctctatggacatggtgtatgcaagtggccaggctgtgaagcagtgtgcgaagatttccaatcatttctaaaacatctcaacagtgagcatgcgctggacgatagaagtacagcccaatgtagagtacaaatgcaggttgtacagcagttagagctacagcttgcaaaagacaaagaacgcctgcaagccatgatgacccacctgcatgtgaagtctacagaacccaaagccgcccctcagcccttgaatctggtatcaagtgtcactctctccaagtccgcatcggaggcttctccacagagcttacctcatactccaacgaccccaaccgcccccctgactcccgtcacccaaggcccctctgtcatcacaaccaccagcatgcacacggtgggacccatccgcaggcggtactcagacaaatacaacgtgcccatttcgtcagcagatattgcgcagaaccaagaattttataagaacgcagaagttagaccaccatttacatatgcatctttaattaggcaggccattctcgaatctccagaaaagcagctaacactaaatgagatctataactggttcacacgaatgtttgcttacttccgacgcaacgcggccacgtggaagaatgcagtgcgtcataatcttagtcttcacaagtgttttgtgcgagtagaaaacgttaaaggggcagtatggacagtggatgaagtagaattccaaaaacgaaggccacaaaagatcagtggtaacccttcccttattaaaaacatgcagagcagccacgcctactgcacacctctcaatgcagctttacaggcttcaatggctgagaatagtatacctctatacactaccgcttccatgggaaatcccactctgggcaacttagccagcgcaatacgggaagagctgaacggggcaatggagcataccaacagcaacgagagtgacagcagtccaggcagatctcctatgcaagccgtgcatcctgtacacgtcaaagaagagcccctcgatccagaggaagctgaagggcccctgtccttagtgacaacagccaaccacagtccagattttgaccatgacagagattacgaagatgaaccagtaaacgaggacatggagtgactatcggggcgggccaaccccgagaatgaagattggaaaaaggaaaaaaaaaaaaacacgtcaaaagttagcagtgaaattgttctccatttgttgtacagtctggaggattttcactacgttttgacaactctgaaatgtgttaactcttagtgccatcaagaaccccatttgggagtatttttgatttttctactttttgttgaaaaaaggaatttgtactctgtgcattggatggacttgtttggtacttgggattttcctctcttaaccgtcaacatcagtgttgtaaatttgctaaactgattcacttttagcagcagactttgaactgcagtcctgccaacgttggacactgaggacgcccgacagagcttgtgcacctaagctgcagaccaagcctttgcccagaatttaaggattccaatggacgacctatttgcacagtactgcatgttgattatcactgcctttactccttttttttttttttttttttttttttttttgcttccagttgggatggggaaggcctttgtgtgtgtattggggggaggggttaaaaaataattatcccaaactttttaatgtattgctttttttttttttttttttccttctactataccattttaagttctgacctcaggcctccatttgggccgatggcctcttggaggcttaaagttttctgtaccttgtgatgaatgttaataggtgtttttattatacaaagctgaatgtcatttctcgtttgtagctttctgtcactcattccatcttccttcagacatcaccacgtttctctaaagtcagaaaacattccgttttggtctttttcaaaaaggtcccaaatgctgcactctacacatgaaggccctctcacacagacgtgacgtcctgccagaaagagaatgaatgacagaaaaaaaaaagagagacaaactctaggaacaatgccgattcattccacgcagcagtattgggggtggttcgggggaggggtgtttcggattttctttttttcttttcttttctttttttttttttgcagcaaccattaataaatgccaccacattctaccagcacaaggaaacataggcagcactgaaaaaaaaaaaaaagctcatattaattagactgacaatatggccttggaaggctctcccttgtggaaccaagttgccatgggccttgggtgctctgcgataacgggtgtgggttggttttgtttgcaaaatggccaaaaaaaaaaaccggcttccccgagcagctgccctgaaagtaggggtggcggcggcggcgctgagtttatacattagttcagacctacttggtggcattaaactgtttgaatgcaaattcgatttcagattgaacttgttaagggagttaacgagggctgagttcagcaaatgctaaagtgttaatttcaaatatgcaaatttggtactgcagtttgttatgcaatattatatcaccaacccagtatcacaaaaactcatagaagatatcatgtaggccctgggctttgggggggtcccaaacatggtatgcagaaatgtgatggttacaggtcagtacaacctcagtccttagaacccctccacacttcagctctgcacccactttcctgtcatttatttatataggactgtagttttttttagttcgagagcctttcgaagcttaatttatattctttctttgtaccttttttctaaaattaccaaagatattacacaaaggtaaattatgttctctgttttatgctttatctgatgaagccaaatatcctcttattgttgatcaaaggaggcaaaagaatttagaggcaaatgacaagcgataggctattgcaacctgagaaagagaactgctccttcatcgtaaatttagaagaccaagtagataatggaaccaaagttgttacttttttctagtagttatttttcctttttctttttgtgtacctctacagagaccaaaactcattctcttaaagagattttatggggctactgcagataaaaataggacacaatattaaaggagctacagaaggaagggagtcccatctcaaaaaaaaaatgaatgtatgccactgcaattagagtatccaataaaggagacagtttagagtcaggacagaaaagcttccataattgaactagattacataatagtatttctagaaaaagagatatttttagattgtatgccacttttgtttaagaactgtgctgtgatcactgtattaattttggtttatcttggcatatatccttcagtttgtttttatttttaatttttcctttttttccgattaggctttggtcagcatttttcatttaaagaaaagtaacactcccatccactcataagcttggtacaaaaacttctctggcagttacttttgaagcttcactctgctttctgtataaagggcagtctgtggtcacgcaagactttaaaaaaaaaaaaaaaaaaaaaaaaaaaaaaaaaaaaaaaaacttttccaggcagcttcatgatgtgcaggcagtagccagacagggtcatgggaagggggccctgtgcttctaaactgagtggttgctggttagtttggtattcaaaagaggataaaaatctggtagattagttcattctcagcatgtgtagctagacatgagtaaagataacagcatgagaaactgttagtacgcatacctcagttcaaacctttagggaatgattaaaatttaaaaaaaaaacatttcactcagttgcacttagtcgtatgtcttgcatgcttagtctaaagactgtagcaaaaaaaaaaaaaaaagaaaaattagattttacatatctttgcaggtatcacagccttgcagaagaaccaactgaaaaaaaaattctcaggctttacagcaagcaaacttcactatgatttttacaattctgattctgtatcccctgggggttatcccagttgcttctttaggatggggtttattacgttgtacatatatcccgatgtgtctgtgtgaatctttgtcttttttgggggagggcagagggcggttctttttttagatattgttcctaaaaaggaataaatgcatacacctgtttgtcaaaacacctttgctttttgtgcaactgctttatattaacgatactaaaaaaaaatagctttggaaaaaaaactactgtatgtaacggaattgcagaatatgctgcacatgtattttatttagttatccttgctttaagaatattggatgacatttcctgacatgtgggagggagaaactccctaactttttttttctgcttttaaactgtaacatagttgaagatttcttttttctgttctcattgattggagcattttgtacaggttttgtgtgtgtgtgtgtgtgtgtgtgcgcgcgtgcgtgtgtgttaatctgttttttgatacattcctatcccttgtgtttatcctaccactgccttcctggctatcttaaacaagttcatacatttgaaaagaaaaaaaaatgttgtttaaaaaatgttttctcctgctgcagtaaatattttgcatgatgaaattccagggtcacacttttccaagtttatcagtgaagtagtgattaacaatggggagtgtcaaaactattgaacttttgtataaaaaaaaaaaaactttacaaggtgccaagatgtaaagaaaatctgttactttttttttctcaaagaaaagcatacattagggaggtagtcccgtgtgtcagacaaatgcactgtcaggaatgaggatccaacctacctgtccctagagtccgtcttgtaagatgagttaggctgccccttggaccagccacaaaatggaatatcaaggcttatgtacatacgtgaagagttaccaccagtcctgccacctttggacagctctaacaccatccccagcatccagtcagacctagtaaagaaaaccttggattcttaacccaagataggctgtaaatcactagcttttttttcctcatgaaaaaaaatagagttaaaaaatatttcctctcttttccatattccagctgaactccgtttccaaaggcacaaagaagagtgtgcttattcagattttgaatctttttggtaccttttggttaatgacatagcctcctgaaattctggatgtcttcaaagtcagttttgcttctttatcctgaaaatcagatttacaatgctgaaggcatttcttgggcccagtgtagctcacgcaatctctgctacccataagccttgatgaagatgatacagtccggactgtgagcatggtgcttcatgtatatgtgctgccagtaacaagaatttttttgttttgttttgttttgttttgataaggcataaaagaaactcattccttgacatcaactgtaattccatcattccatgtctgcggatacagacaataaaaaaaatgttgtgtagtcagtactaattactgacattataagcattctcaaatgcaataaaaatgctggttgttcacgctggt

SEQ ID NO: 135079 - DNA, 7140 bp, Homo sapiens
  Payload ID: 6401
  Gene Symbol: FOXP1
  Gene Name: forkhead box P1
  ENST ID: ENST00000615603
  CDS Start-End: 527-2608
ggggggtgggcgccagcgccccggcgaacggcaaagagggagccgctcccgctcggggggccgctggagtgcccagcgggaacccgaaagtttgtaagaggaagagagcgcgcggcgagcgagcgagcgggccgggggcagcggcagcggcgccggggaccatggtgctgccggcgcctcctccgcgggcgtgaaggcggcgctcctactccctccccggactccgcggtgtcccagaagcttttgttgacaattccagtttccgaacaaaacatttcggcaatggtgagggcttcgatcccttctctgatttgctgtcagccatgaacggatggatgtgatgcctgctagccaaaaggcttccctctgtgtgttgcagtcctgtggcattatgcatgccccctcccagtgaccccaggctttttatggctgtgagacacgttaaaatttcaggggtaagacgtgaccttttgaggtgactataactgaagattgctttacagaagccaaaaaaggtttttgagtcatgatgcaagaatctgggactgagacaaaaagtaacggttcagccatccagaatgggtcgggcggcagcaaccacttactagagtgcggcggtcttcgggaggggcggtccaacggagagacgccggccgtggacatcggggcagctgacctcgcccacgcccagcagcagcagcaacaggcacttcaggtggcaagacagctccttcttcagcagcaacagcagcagcaagttagtggattaaaatctcccaagaggaatgacaaacaaccagctcttcaggttcccgtgtcagtggctatgatgacacctcaagttatcactccccagcaaatgcagcagatcctccagcaacaagtgctgagccctcagcagctccaggttctcctccagcagcagcaggccctcatgcttcaacagcagcagcttcaagagttttataaaaaacaacaggaacagttgcagcttcaacttttacaacaacaacatgctggaaaacagcctaaagagcaacagcaggtggctacccagcagttggcttttcagcagcagcttttacagatgcagcagttacagcagcagcacctcctgtctttgcagcgccaaggccttctgacaattcagcccgggcagcctgcccttccccttcaacctcttgctcaaggcatgattccaacagaactgcagcagctctggaaagaagtgacaagtgctcatactgcagaagaaaccacaggcaacaatcacagcagtttggatctgaccacgacatgtgtctcctcctctgcaccttccaagacctccttaataatgaacccacatgcctctaccaatggacagctctcagtccacactcccaaaagggaaagtttgtcccatgaggagcacccccatagccatcctctctatggacatggtgtatgcaagtggccaggctgtgaagcagtgtgcgaagatttccaatcatttctaaaacatctcaacagtgagcatgcgctggacgatagaagtacagcccaatgtagagtacaaatgcaggttgtacagcagttagagctacagcttgcaaaagacaaagaacgcctgcaagccatgatgacccacctgcatgtgaagtctacagaacccaaagccgcccctcagcccttgaatctggtatcaagtgtcactctctccaagtccgcatcggaggcttctccacagagcttacctcatactccaacgaccccaaccgcccccctgactcccgtcacccaaggcccctctgtcatcacaaccaccagcatgcacacggtgggacccatccgcaggcggtactcagacaaatacaacgtgcccatttcgtcagcagatattgcgcagaaccaagaattttataagaacgcagaagttagaccaccatttacatatgcatctttaattaggcaggccattctcgaatctccagaaaagcagctaacactaaatgagatctataactggttcacacgaatgtttgcttacttccgacgcaacgcggccacgtggaagggtgccattcgcaccaacctctcactgcataagtgctttatcagagtagaggatgagtttgggtccttttggacagttgatgatgaagagtttaaacgtggccgccatattcaacgaggccgtcctcgcaaatactgccccgatgaaaactttgacgagcttgtcgcacataacccttcccttattaaaaacatgcagagcagccacgcctactgcacacctctcaatgcagctttacaggcttcaatggctgagaatagtatacctctatacactaccgcttccatgggaaatcccactctgggcaacttagccagcgcaatacgggaagagctgaacggggcaatggagcataccaacagcaacgagagtgacagcagtccaggcagatctcctatgcaagccgtgcatcctgtacacgtcaaagaagagcccctcgatccagaggaagctgaagggcccctgtccttagtgacaacagccaaccacagtccagattttgaccatgacagagattacgaagatgaaccagtaaacgaggacatggagtgactatcggggcgggccaaccccgagaatgaagattggaaaaaggaaaaaaaaaaaaacacgtcaaaagttagcagtgaaattgttctccatttgttgtacagtctggaggattttcactacgttttgacaactctgaaatgtgttaactcttagtgccatcaagaaccccatttgggagtatttttgatttttctactttttgttgaaaaaaggaatttgtactctgtgcattggatggacttgtttggtacttgggattttcctctcttaaccgtcaacatcagtgttgtaaatttgctaaactgattcacttttagcagcagactttgaactgcagtcctgccaacgttggacactgaggacgcccgacagagcttgtgcacctaagctgcagaccaagcctttgcccagaatttaaggattccaatggacgacctatttgcacagtactgcatgttgattatcactgcctttactccttttttttttttttttttttttttttttttgcttccagttgggatggggaaggcctttgtgtgtgtattggggggaggggttaaaaaataattatcccaaactttttaatgtattgctttttttttttttttttttccttctactataccattttaagttctgacctcaggcctccatttgggccgatggcctcttggaggcttaaagttttctgtaccttgtgatgaatgttaataggtgtttttattatacaaagctgaatgtcatttctcgtttgtagctttctgtcactcattccatcttccttcagacatcaccacgtttctctaaagtcagaaaacattccgttttggtctttttcaaaaaggtcccaaatgctgcactctacacatgaaggccctctcacacagacgtgacgtcctgccagaaagagaatgaatgacagaaaaaaaaaagagagacaaactctaggaacaatgccgattcattccacgcagcagtattgggggtggttcgggggaggggtgtttcggattttctttttttcttttcttttctttttttttttttgcagcaaccattaataaatgccaccacattctaccagcacaaggaaacataggcagcactgaaaaaaaaaaaaaagctcatattaattagactgacaatatggccttggaaggctctcccttgtggaaccaagttgccatgggccttgggtgctctgcgataacgggtgtgggttggttttgtttgcaaaatggccaaaaaaaaaaaccggcttccccgagcagctgccctgaaagtaggggtggcggcggcggcgctgagtttatacattagttcagacctacttggtggcattaaactgtttgaatgcaaattcgatttcagattgaacttgttaagggagttaacgagggctgagttcagcaaatgctaaagtgttaatttcaaatatgcaaatttggtactgcagtttgttatgcaatattatatcaccaacccagtatcacaaaaactcatagaagatatcatgtaggccctgggctttgggggggtcccaaacatggtatgcagaaatgtgatggttacaggtcagtacaacctcagtccttagaacccctccacacttcagctctgcacccactttcctgtcatttatttatataggactgtagttttttttagttcgagagcctttcgaagcttaatttatattctttctttgtaccttttttctaaaattaccaaagatattacacaaaggtaaattatgttctctgttttatgctttatctgatgaagccaaatatcctcttattgttgatcaaaggaggcaaaagaatttagaggcaaatgacaagcgataggctattgcaacctgagaaagagaactgctccttcatcgtaaatttagaagaccaagtagataatggaaccaaagttgttacttttttctagtagttatttttcctttttctttttgtgtacctctacagagaccaaaactcattctcttaaagagattttatggggctactgcagataaaaataggacacaatattaaaggagctacagaaggaagggagtcccatctcaaaaaaaaaatgaatgtatgccactgcaattagagtatccaataaaggagacagtttagagtcaggacagaaaagcttccataattgaactagattacataatagtatttctagaaaaagagatatttttagattgtatgccacttttgtttaagaactgtgctgtgatcactgtattaattttggtttatcttggcatatatccttcagtttgtttttatttttaatttttcctttttttccgattaggctttggtcagcatttttcatttaaagaaaagtaacactcccatccactcataagcttggtacaaaaacttctctggcagttacttttgaagcttcactctgctttctgtataaagggcagtctgtggtcacgcaagactttaaaaaaaaaaaaaaaaaaaaaaaaaaaaaaaaaaaaaaaaacttttccaggcagcttcatgatgtgcaggcagtagccagacagggtcatgggaagggggccctgtgcttctaaactgagtggttgctggttagtttggtattcaaaagaggataaaaatctggtagattagttcattctcagcatgtgtagctagacatgagtaaagataacagcatgagaaactgttagtacgcatacctcagttcaaacctttagggaatgattaaaatttaaaaaaaaaacatttcactcagttgcacttagtcgtatgtcttgcatgcttagtctaaagactgtagcaaaaaaaaaaaaaaaagaaaaattagattttacatatctttgcaggtatcacagccttgcagaagaaccaactgaaaaaaaaattctcaggctttacagcaagcaaacttcactatgatttttacaattctgattctgtatcccctgggggttatcccagttgcttctttaggatggggtttattacgttgtacatatatcccgatgtgtctgtgtgaatctttgtcttttttgggggagggcagagggcggttctttttttagatattgttcctaaaaaggaataaatgcatacacctgtttgtcaaaacacctttgctttttgtgcaactgctttatattaacgatactaaaaaaaaatagctttggaaaaaaaactactgtatgtaacggaattgcagaatatgctgcacatgtattttatttagttatccttgctttaagaatattggatgacatttcctgacatgtgggagggagaaactccctaactttttttttctgcttttaaactgtaacatagttgaagatttcttttttctgttctcattgattggagcattttgtacaggttttgtgtgtgtgtgtgtgtgtgtgtgcgcgcgtgcgtgtgtgttaatctgttttttgatacattcctatcccttgtgtttatcctaccactgccttcctggctatcttaaacaagttcatacatttgaaaagaaaaaaaaatgttgtttaaaaaatgttttctcctgctgcagtaaatattttgcatgatgaaattccagggtcacacttttccaagtttatcagtgaagtagtgattaacaatggggagtgtcaaaactattgaacttttgtataaaaaaaaaaaaactttacaaggtgccaagatgtaaagaaaatctgttactttttttttctcaaagaaaagcatacattagggaggtagtcccgtgtgtcagacaaatgcactgtcaggaatgaggatccaacctacctgtccctagagtccgtcttgtaagatgagttaggctgccccttggaccagccacaaaatggaatatcaaggcttatgtacatacgtgaagagttaccaccagtcctgccacctttggacagctctaacaccatccccagcatccagtcagacctagtaaagaaaaccttggattcttaacccaagataggctgtaaatcactagcttttttttcctcatgaaaaaaaatagagttaaaaaatatttcctctcttttccatattccagctgaactccgtttccaaaggcacaaagaagagtgtgcttattcagattttgaatctttttggtaccttttggttaatgacatagcctcctgaaattctggatgtcttcaaagtcagttttgcttctttatcctgaaaatcagatttacaatgctgaaggcatttcttgggcccagtgtagctcacgcaatctctgctacccataagccttgatgaagatgatacagtccggactgtgagcatggtgcttcatgtatatgtgctgccagtaacaagaatttttttgttttgttttgttttgttttgataaggcataaaagaaactcattccttgacatcaactgtaattccatcattccatgtctgcggatacagacaataaaaaaaatgttgtgtagtcagtactaattactgacattataagcattctcaaatgcaataaaaatgctggttgttcacgctggt

SEQ ID NO: 135080 - DNA, 713 bp, Homo sapiens
  Payload ID: 6401
  Gene Symbol: FOXP1
  Gene Name: forkhead box P1
  ENST ID: ENST00000472382
  CDS Start-End: 1-612
gttcccgtgtcagtggctatgatgacacctcaagttatcactccccagcaaatgcagcagatcctccagcaacaagtgctgagccctcagcagctccaggttctcctccagcagcagcaggccctcatgcttcaacagcagcagcttcaagagttttataaaaaacaacaggaacagttgcagcttcaacttttacaacaacaacatgctggaaaacagcctaaagagcaacagcaggtggctacccagcagttggcttttcagcagcagcttttacagatgcagcagttacagcagcagcacctcctgtctttgcagcgccaaggccttctgacaattcagcccgggcagcctgcccttccccttcaacctcttgctcaaggcatgattccaacagaactgcagcagctctggaaagaagtgacaagtgctcatactgcagaagaaaccacaggcaacaatcacagcagtttggatctgaccacgacatgtgtctcctcctctgcaccttccaagacctccttaataatgaacccacatgcctctaccaatggacagctctcagtccacactcccaaaagggaaaggcagagcttccacacacagaggtaaagaaaccgtaaaagtagtatgtgacagtaaatgccatttctctcaggagaaagcaaattctgtattgtgttttttaataaaaatggctcagtgaaaaaaca

SEQ ID NO: 135081 - DNA, 2638 bp, Homo sapiens
  Payload ID: 6402
  Gene Symbol: FOXP2
  Gene Name: forkhead box P2
  Uniprot ID: O15409
  ENST ID: ENST00000350908
  CDS Start-End: 317-2464
ctgattttgtgtacgattgtccacggacgccaaaacaatcacagagctgcttgatttgttttaattaccagcacaaaatgccatcagtctgggacgtgatcgggcagaggtgtactcacagtagtgtaaatactgctgtaaatagttgtctgatggtggctttgacagtgagctagcttctgagttttcccttctttttatactgttttctgtgctggcttttttgaatcttcctaatttttcatctctttaacaaactcctatgaagttgaaaccgggaagtttgctctaacatttccagagaaggtattaagtcatgatgcaggaatctgcgacagagacaataagcaacagttcaatgaatcaaaatggaatgagcactctaagcagccaattagatgctggcagcagagatggaagatcaagtggtgacaccagctctgaagtaagcacagtagaactgctgcatctgcaacaacagcaggctctccaggcagcaagacaacttcttttacagcagcaaacaagtggattgaaatctcctaagagcagtgataaacagagaccactgcaggtgcctgtgtcagtggccatgatgactccccaggtgatcacccctcagcaaatgcagcagatccttcagcaacaagtcctgtctcctcagcagctacaagcccttctccaacaacagcaggctgtcatgctgcagcagcaacaactacaagagttttacaagaaacagcaagagcagttacatcttcagcttttgcagcagcagcagcaacagcagcagcagcaacaacagcagcaacaacagcagcagcaacaacaacaacaacagcagcaacaacagcagcagcagcagcaacagcagcagcagcagcaacagcatcctggaaagcaagcgaaagagcagcagcagcagcagcagcagcaacagcaattggcagcccagcagcttgtcttccagcagcagcttctccagatgcaacaactccagcagcagcagcatctgctcagccttcagcgtcagggactcatctccattccacctggccaggcagcacttcctgtccaatcgctgcctcaagctggcttaagtcctgctgagattcagcagttatggaaagaagtgactggagttcacagtatggaagacaatggcattaaacatggagggctagacctcactactaacaattcctcctcgactacctcctccaacacttccaaagcatcaccaccaataactcatcattccatagtgaatggacagtcttcagttctaagtgcaagacgagacagctcgtcacatgaggagactggggcctctcacactctctatggccatggagtttgcaaatggccaggctgtgaaagcatttgtgaagattttggacagtttttaaagcaccttaacaatgaacacgcattggatgaccgaagcactgctcagtgtcgagtgcaaatgcaggtggtgcaacagttagaaatacagctttctaaagaacgcgaacgtcttcaagcaatgatgacccacttgcacatgcgaccctcagagcccaaaccatctcccaaacctctaaatctggtgtctagtgtcaccatgtcgaagaatatgttggagacatccccacagagcttacctcaaacccctaccacaccaacggccccagtcaccccgattacccagggaccctcagtaatcaccccagccagtgtgcccaatgtgggagccatacgaaggcgacattcagacaaatacaacattcccatgtcatcagaaattgccccaaactatgaattttataaaaatgcagatgtcagacctccatttacttatgcaactctcataaggcaggctatcatggagtcatctgacaggcagttaacacttaatgaaatttacagctggtttacacggacatttgcttacttcaggcgtaatgcagcaacttggaagaatgcagtacgtcataatcttagcctgcacaagtgttttgttcgagtagaaaatgttaaaggagcagtatggactgtggatgaagtagaataccagaagcgaaggtcacaaaagataacaggaagtccaaccttagtaaaaaatatacctaccagtttaggctatggagcagctcttaatgccagtttgcaggctgccttggcagagagcagtttacctttgctaagtaatcctggactgataaataatgcatccagtggcctactgcaggccgtccacgaagacctcaatggttctctggatcacattgacagcaatggaaacagtagtccgggctgctcacctcagccgcacatacattcaatccacgtcaaggaagagccagtgattgcagaggatgaagactgcccaatgtccttagtgacaacagctaatcacagtccagaattagaagacgacagagagattgaagaagagcctttatctgaagatctggaatgagaactgacttgtgaaacctcagcgtgaagggacatatcactgaccttcataaccactccacaaccatgaatatttgacaaatttttactgtgactatttattaagcatggataaaggagacagccctaaaggaacttactaagccagccctttgggattcagtaccaacaggca

SEQ ID NO: 135082 - DNA, 1412 bp, Homo sapiens
  Payload ID: 6402
  Gene Symbol: FOXP2
  Gene Name: forkhead box P2
  Uniprot ID: O15409
  ENST ID: ENST00000360232
  CDS Start-End: 13-1311
aggtattaagtcatgatgcaggaatctgcgacagagacaataagcaacagttcaatgaatcaaaatggaatgagcactctaagcagccaattagatgctggcagcagagatggaagatcaagtggtgacaccagctctgaagtaagcacagtagaactgctgcatctgcaacaacagcaggctctccaggcagcaagacaacttcttttacagcagcaaacaagtggattgaaatctcctaagagcagtgataaacagagaccactgcaggtgcctgtgtcagtggccatgatgactccccaggtgatcacccctcagcaaatgcagcagatccttcagcaacaagtcctgtctcctcagcagctacaagcccttctccaacaacagcaggctgtcatgctgcagcagcaacaactacaagagttttacaagaaacagcaagagcagttacatcttcagcttttgcagcagcagcagcaacagcagcagcagcaacaacagcagcaacaacagcagcagcaacaacaacaacaacagcagcaacaacagcagcagcagcagcaacagcagcagcagcagcaacagcatcctggaaagcaagcgaaagagcagcagcagcagcagcagcagcaacagcaattggcagcccagcagcttgtcttccagcagcagcttctccagatgcaacaactccagcagcagcagcatctgctcagccttcagcgtcagggactcatctccattccacctggccaggcagcacttcctgtccaatcgctgcctcaagctggcttaagtcctgctgagattcagcagttatggaaagaagtgactggagttcacagtatggaagacaatggcattaaacatggagggctagacctcactactaacaattcctcctcgactacctcctccaacacttccaaagcatcaccaccaataactcatcattccatagtgaatggacagtcttcagttctaagtgcaagacgagacagctcgtcacatgaggagactggggcctctcacactctctatggccatggagtttgcaaatggccaggctgtgaaagcatttgtgaagattttggacagtttttaaagcaccttaacaatgaacacgcattggatgaccgaagcactgctcagtgtcgagtgcaaatgcaggtggtgcaacagttagaaatacagctttctaaagaacgcgaacgtcttcaagcaatgatgacccacttgcacatgcgaccctcagagcccaaaccatctcccaaacctgtaagtgcatattgctttataaacagtaaatagctctaccaatgtaacagactaagaaaatgaacaatttagtgacagttagaaaacaatgagtgtgatgaaaaatacggcaataaaatgaaagtaaaatgtaa

SEQ ID NO: 135083 - DNA, 2187 bp, Homo sapiens
  Payload ID: 6402
  Gene Symbol: FOXP2
  Gene Name: forkhead box P2
  Uniprot ID: O15409
  ENST ID: ENST00000378237
  CDS Start-End: 53-1150
gaagttgaaaccgggaagtttgctctaacatttccagagaaggtattaagtcatgatgcaggaatctgcgacagagacaataagcaacagttcaatgaatcaaaatggaatgagcactctaagcagccaattagatgctggcagcagagatggaagatcaagtggtgacaccagctctgaagtaagcacagtagaactgctgcatctgcaacaacagcaggctctccaggcagcaagacaacttcttttacagcagcaaacaagtggattgaaatctcctaagagcagtgataaacagagaccactgcaggtgcctgtgtcagtggccatgatgactccccaggtgatcacccctcagcaaatgcagcagatccttcagcaacaagtcctgtctcctcagcagctacaagcccttctccaacaacagcaggctgtcatgctgcagcagcaacaactacaagagttttacaagaaacagcaagagcagttacatcttcagcttttgcagcagcagcagcaacagcagcagcagcaacaacagcagcaacaacagcagcagcaacaacaacaacaacagcagcaacaacagcagcagcagcagcaacagcagcagcagcagcaacagcatcctggaaagcaagcgaaagagcagcagcagcagcagcagcagcaacagcaattggcagcccagcagcttgtcttccagcagcagcttctccagatgcaacaactccagcagcagcagcatctgctcagccttcagcgtcagggactcatctccattccacctggccaggcagcacttcctgtccaatcgctgcctcaagctggcttaagtcctgctgagattcagcagttatggaaagaagtgactggagttcacagtatggaagacaatggcattaaacatggagggctagacctcactactaacaattcctcctcgactacctcctccaacacttccaaagcatcaccaccaataactcatcattccatagtgaatggacagtcttcagttctaagtgcaagacgagacagctcgtcacatgaggagactggggcctctcacactctctatggccatggagtttgcaaatggccaggctgtgaaagcatttgtgaagattttggacagtttttaaagtaggttttttacttttttttggtggggggcgggggctggattatatgggcattttaggcacattgtaaataaacaaaagatgaaggaggaatgtaaaagtccattataagtcatacttcaagatttttgtgggttccaacaagtggattagtaagatcaggcttcatcttttcattaagatattttacaaatcatttagtaaagatttttgaatgaatgaaaaatattagcctacaataatatgtcattaatcactggagacatttataacagaactatttataaaatagaattctcttaagttttaagtttctaattaatattatgtgagtcatcctaatatatatatatatatatatatatatatatatatatatatatatatatatttcagtaaacatattttgaaagttcgttttttaattacaggctttatatattttttaaaatagtagtatttagtatatacatgtaactacaagaattaaaagtgaaagtttatactggctaaaattaaaaaaactacatttcatttacattgttactttttgcccttagaaacatcaagaaacacacatggctatatgtttgtataacagattacatggcttctctagcttaaaaccaaaactttgtgtattcttaatttttaatagaaaattttatttttaaaaaaatcataaggggttctttttcaagtgaaaatcttcatctttcatgaaatgttttccttacacaattctggtgtacaagagatctaaacagagagctacagataggcttatggagatgagtaacttcacaggctgagactcttatgttgtcatggtgcagctaacagggtgagtgaactgtttcatgcttcatcaacaattaagttaattagctcatttgaaattgcactgctttgttgccaggatgttggcagaaacatcaaaaagatgtgtttacaaatggaagactgactacagggtatagagcaaaagcaccttaacaaccaggcacaagtacttggcatcacaataactttataaatgaat

SEQ ID NO: 135084 - DNA, 1472 bp, Homo sapiens
  Payload ID: 6402
  Gene Symbol: FOXP2
  Gene Name: forkhead box P2
  ENST ID: ENST00000390668
  CDS Start-End: 1-1371
atgcaggaatctgcgacagagacaataagcaacagttcaatgaatcaaaatggaatgagcactctaagcagccaattagatgctggcagcagagatggaagatcaagtggtgacaccagctctgaagtaagcacagtagaactgctgcatctgcaacaacagcaggctctccaggcagcaagacaacttcttttacagcagcaaacaagtggattgaaatctcctaagagcagtgataaacagagaccactgcaggaattgcttccagaaacaaaattatgtatctgtggccactcttctggtgatgggcatcctcacaacacatttgcagtgcctgtgtcagtggccatgatgactccccaggtgatcacccctcagcaaatgcagcagatccttcagcaacaagtcctgtctcctcagcagctacaagcccttctccaacaacagcaggctgtcatgctgcagcagcaacaactacaagagttttacaagaaacagcaagagcagttacatcttcagcttttgcagcagcagcagcaacagcagcagcagcaacaacagcagcaacaacagcagcagcaacaacaacaacaacagcagcaacaacagcagcagcagcagcaacagcagcagcagcagcaacagcatcctggaaagcaagcgaaagagcagcagcagcagcagcagcagcaacagcaattggcagcccagcagcttgtcttccagcagcagcttctccagatgcaacaactccagcagcagcagcatctgctcagccttcagcgtcagggactcatctccattccacctggccaggcagcacttcctgtccaatcgctgcctcaagctggcttaagtcctgctgagattcagcagttatggaaagaagtgactggagttcacagtatggaagacaatggcattaaacatggagggctagacctcactactaacaattcctcctcgactacctcctccaacacttccaaagcatcaccaccaataactcatcattccatagtgaatggacagtcttcagttctaagtgcaagacgagacagctcgtcacatgaggagactggggcctctcacactctctatggccatggagtttgcaaatggccaggctgtgaaagcatttgtgaagattttggacagtttttaaagcaccttaacaatgaacacgcattggatgaccgaagcactgctcagtgtcgagtgcaaatgcaggtggtgcaacagttagaaatacagctttctaaagaacgcgaacgtcttcaagcaatgatgacccacttgcacatgcgaccctcagagcccaaaccatctcccaaacctgtaagtgcatattgctttataaacagtaaatagctctaccaatgtaacagactaagaaaatgaacaatttagtgacagttagaaaacaatgagtgtgatgaaaaatacggcaataaaatgaaagtaaaatgtaa

SEQ ID NO: 135085 - DNA, 2285 bp, Homo sapiens
  Payload ID: 6402
  Gene Symbol: FOXP2
  Gene Name: forkhead box P2
  Uniprot ID: O15409
  ENST ID: ENST00000393489
  CDS Start-End: 383-2254
ttgaaaccgggaagtttgctctaacatttccagagaaggtattaagtcatgatgcaggaatctgcgacagagacaataagcaacagttcaatgaatcaaaatggaatgagcactctaagcagccaattagatgctggcagcagagatggaagatcaagtggtgacaccagctctgaagtaagcacagtagaactgctgcatctgcaacaacagcaggctctccaggcagcaagacaacttcttttacagcagcaaacaagtggattgaaatctcctaagagcagtgataaacagagaccactgcagccatgagacagacttgtggttcttcaacagctgtgcagagcagagacgtaaatttaaggtgcctgtgtcagtggccatgatgactccccaggtgatcacccctcagcaaatgcagcagatccttcagcaacaagtcctgtctcctcagcagctacaagcccttctccaacaacagcaggctgtcatgctgcagcagcaacaactacaagagttttacaagaaacagcaagagcagttacatcttcagcttttgcagcagcagcagcaacagcagcagcagcaacaacagcagcaacaacagcagcagcaacaacaacaacaacagcagcaacaacagcagcagcagcagcaacagcagcagcagcagcaacagcatcctggaaagcaagcgaaagagcagcagcagcagcagcagcagcaacagcaattggcagcccagcagcttgtcttccagcagcagcttctccagatgcaacaactccagcagcagcagcatctgctcagccttcagcgtcagggactcatctccattccacctggccaggcagcacttcctgtccaatcgctgcctcaagctggcttaagtcctgctgagattcagcagttatggaaagaagtgactggagttcacagtatggaagacaatggcattaaacatggagggctagacctcactactaacaattcctcctcgactacctcctccaacacttccaaagcatcaccaccaataactcatcattccatagtgaatggacagtcttcagttctaagtgcaagacgagacagctcgtcacatgaggagactggggcctctcacactctctatggccatggagtttgcaaatggccaggctgtgaaagcatttgtgaagattttggacagtttttaaagcaccttaacaatgaacacgcattggatgaccgaagcactgctcagtgtcgagtgcaaatgcaggtggtgcaacagttagaaatacagctttctaaagaacgcgaacgtcttcaagcaatgatgacccacttgcacatgcgaccctcagagcccaaaccatctcccaaacctctaaatctggtgtctagtgtcaccatgtcgaagaatatgttggagacatccccacagagcttacctcaaacccctaccacaccaacggccccagtcaccccgattacccagggaccctcagtaatcaccccagccagtgtgcccaatgtgggagccatacgaaggcgacattcagacaaatacaacattcccatgtcatcagaaattgccccaaactatgaattttataaaaatgcagatgtcagacctccatttacttatgcaactctcataaggcaggctatcatggagtcatctgacaggcagttaacacttaatgaaatttacagctggtttacacggacatttgcttacttcaggcgtaatgcagcaacttggaagaatgcagtacgtcataatcttagcctgcacaagtgttttgttcgagtagaaaatgttaaaggagcagtatggactgtggatgaagtagaataccagaagcgaaggtcacaaaagataacaggaagtccaaccttagtaaaaaatatacctaccagtttaggctatggagcagctcttaatgccagtttgcaggctgccttggcagagagcagtttacctttgctaagtaatcctggactgataaataatgcatccagtggcctactgcaggccgtccacgaagacctcaatggttctctggatcacattgacagcaatggaaacagtagtccgggctgctcacctcagccgcacatacattcaatccacgtcaaggaagagccagtgattgcagaggatgaagactgcccaatgtccttagtgacaacagctaatcacagtccagaattagaagacgacagagagattgaagaagagcctttatctgaagatctggaatgagaactgacttgtgaaacctcagcgtgaaggg

SEQ ID NO: 135086 - DNA, 6085 bp, Homo sapiens
  Payload ID: 6402
  Gene Symbol: FOXP2
  Gene Name: forkhead box P2
  ENST ID: ENST00000393491
  CDS Start-End: 651-2243
cttgaacctttgtcacccctcacgttgcacaccaaagacataccctagtgattaaatgctgattttgtgtacgattgtccacggacgccaaaacaatcacagagctgcttgatttgttttaattaccagcacaaaatgccatcagtctgggacgtgatcgggcagaggtgtactcacagtagtgtaaatactgctgtaaatagttgtctgatggtggctttgacagtgagctagcttctgagttttcccttctttttatactgttttctgtgctggcttttttgaatcttcctaatttttcatctctttaacaaactcctatgaagttgaaaccgggaagtttgctctaacatttccagagaaggtattaagtcatgatgcaggaatctgcgacagagacaataagcaacagttcaatgaatcaaaatggaatgagcactctaagcagccaattagatgctggcagcagagatggaagatcaagtggtgacaccagctctgaagtaagcacagtagaactgctgcatctgcaacaacagcaggctctccaggcagcaagacaacttcttttacagcagcaaacaagtggattgaaatctcctaagagcagtgataaacagagaccactgcaggtgcctgtgtcagtggccatgatgactccccaggtgatcacccctcagcaaatgcagcagatccttcagcaacaagtcctgtctcctcagcagctacaagcccttctccaacaacagcaggctgtcatgctgcagcagcaacaactacaagagttttacaagaaacagcaagagcagttacatcttcagcttttgcagcagcagcagcaacagcagcagcagcaacaacagcagcaacaacagcagcagcaacaacaacaacaacagcagcaacaacagcagcagcagcagcaacagcagcagcagcagcaacagcatcctggaaagcaagcgaaagagcagcagcagcagcagcagcagcaacagcaattggcagcccagcagcttgtcttccagcagcagcttctccagatgcaacaactccagcagcagcagcatctgctcagccttcagcgtcagggactcatctccattccacctggccaggcagcacttcctgtccaatcgctgcctcaagctggcttaagtcctgctgagattcagcagttatggaaagaagtgactggagttcacagtatggaagacaatggcattaaacatggagggctagacctcactactaacaattcctcctcgactacctcctccaacacttccaaagcatcaccaccaataactcatcattccatagtgaatggacagtcttcagttctaagtgcaagacgagacagctcgtcacatgaggagactggggcctctcacactctctatggccatggagtttgcaaatggccaggctgtgaaagcatttgtgaagattttggacagtttttaaagcaccttaacaatgaacacgcattggatgaccgaagcactgctcagtgtcgagtgcaaatgcaggtggtgcaacagttagaaatacagctttctaaagaacgcgaacgtcttcaagcaatgatgacccacttgcacatgcgaccctcagagcccaaaccatctcccaaacctgctatcatggagtcatctgacaggcagttaacacttaatgaaatttacagctggtttacacggacatttgcttacttcaggcgtaatgcagcaacttggaagaatgcagtacgtcataatcttagcctgcacaagtgttttgttcgagtagaaaatgttaaaggagcagtatggactgtggatgaagtagaataccagaagcgaaggtcacaaaagataacaggaagtccaaccttagtaaaaaatatacctaccagtttaggctatggagcagctcttaatgccagtttgcaggctgccttggcagagagcagtttacctttgctaagtaatcctggactgataaataatgcatccagtggcctactgcaggccgtccacgaagacctcaatggttctctggatcacattgacagcaatggaaacagtagtccgggctgctcacctcagccgcacatacattcaatccacgtcaaggaagagccagtgattgcagaggatgaagactgcccaatgtccttagtgacaacagctaatcacagtccagaattagaagacgacagagagattgaagaagagcctttatctgaagatctggaatgagaactgacttgtgaaacctcagcgtgaagggacatatcactgaccttcataaccactccacaaccatgaatatttgacaaatttttactgtgactatttattaagcatggataaaggagacagccctaaaggaacttactaagccagccctttgggattcagtaccaacaggcaaattgcttgttttcttcttcttcttcttctttttttttttttttttagaaaaaaagacaaaaactgattttcttgaaaaaaaaaaatgaactgttctttctataatggctttgcccatttaaaaaatgtggctcttaagggttcatgaaatgactgaatatgaggatacatgtcctgtagaaagcaaatgcgcctcatatactgccaaaaatagtgttagtttcattaatgtgaattttccagcattcagtagttgtaatgttagaaacaattgctggtcaagttcaacttgttgctattgtttttaatttgcacaggagtagtatcagaaattagtgtcactgcttgtatctagctgaattttaaacaacagaacattagttttttatgttggtgccaccaactgtaaatgacataagttagttattacaaaacacagtaattagactgttgcaaccatctaaaaccttaggcttccagtctgtgctgttagtgttaagatgtaaagtgcaatcctaagctaacattatctgtgcaagcaccatagaaacatttgcatatctgcatagatcttacaactgtactctttacctccttgtgataaagctttgtctacctgcaaacacagtcaaaggctacagctgcaaaccaaagccaactctaaccatggccaagagctcaaggacagaagcagccacatgctttggtcagccttctgtaacttcaattagtacaaaggaaccttttccatgaactacctgctgttttctgatgacctctgggatcttttcatttagccctaaacaaagaaacaaatatgacaaaaaccacaactaaaaaatgttaattcagtcacagagtaatcttctgaggccaaaagtccatctaaatgcaatgaagatttgctttcattaaagacagaggtgaggacaaaatccgcagtggaagttatgatatgctagaaagcaacaaatgtggatcactgaccaaaacgattatgtacttgatgcaaatgcagattgcatattgttatatatatagtactttgtgtttttgttttccctcattcagtcagttattttcagtggtgaatacatgttgttagaagatgtcttgtatggtcttaatctttgttgtgtactatttttttatagtcttaagttataatgaaaaaacaaaaagtaggaaccaaacataaaaggtctagtaaagccaaaaattaatttcatattgattttaaagtgatctagctgagtttttacactgaaagcaaagattatagcaattgtagtccatggtatttattttcagtcaaaccaaagttacatataattctgcctctgcttatacgggatattaacactaacaatacactcccttcaaagacttgcacaggccaaattgttggaatgctggttttcttgacaattccaaaccccaaaactatgataatgagttatgatgtagttgaaaatagcatagtcagatgtttgcttaaaacctagaaacttaacatgttgcttttcatgtgctgtgccaagtcttgataatactttttcccccaaccaagggacctcataacctgattatggttattgctttacaaacagttttgacagaaggtggctgctagagcttaacatacgttcccgttccatgtgatggaaccggttcttgcaaactaagctcatcattgattctttgctgaagtcagcaaatagagttagagagatacccagtcatctatcacaccaaataaaaggacataacggctttcaaaagggttttcccacttacccaaaaggctttctgaaagcttctacctctgcaaaaaaaaaaaaagaaaaaaaaaaaaagaaaaacattagaacaattatggcagattgcatgaaacgtgagaacgtcacagtaactgctacttttcattatgtttgtctttgggtcatgatcaacgaaccggaagtttacaatatggtattaaaagaaagatgggtatggtgaaagatggttttcagtcatctaggatcctactgtaaggattatctgaaaggaaaaatgggtctttcaggtgcatgttcaaaaggctttgagggactggaagtaactgcgagagttgtaccatcagaagggtggcctaagactacaatgctaaagtatgcatacctcagttagaaaacttttgaaaggaagtctcagccacagaatgcatatacctgtagagttttgcatgggttttatatgaatacaattttaaaaaatagctgcttgcacattataccagaaaaacctccaaaactgcaattgctttgaaaatagattttaggttttttggagtttcctgaaatgcttggtctgtattttgataattgtgcatattatgtaaaaatgttggtggacccataaatgaccagactttttctaagaaaaatgttgctttaatgcatttcatgaatttttactcttatatcattgcttgctagtaatagcaaatctgcttttctgcatctgctttgcgtagctattgtaaggctttgaactaatgtatgtatttattgcttgaacttctgtgcataccttataaagcataatgtctgacaatttaaatggctcatgtattcttgcttctatcataagctgattatggggactatgatcttttgtatacagcaaattttaaactgtagcacaaacatctgtttatgtattggtggaatatacctgttttatttatcttttttgaggtaaactaatttttgatacttttcattactgtgtactatgttcatactttgaattctctgacgttagaagtcatggttgagaattgtaacagctgttattcgttctgtattcatggctttcactgctgaataaaataaaggaccaaacctaggatttgaaagaaaactgtctacctctaacaccagggagttatcagattttattttacatagttttagtctacaaagacacaattgcttaaacctagtgggcttaaggcttatattctatgtggttggattcgtggcacagttgtactatttgaaaatcaattaaaattttatgtgaatgttacaagtatttggtagaattaccactaactgggttttctttagataactcagatatggagaaaatgtcatcagcattctgtgtctacagctgcttaacttcataagaatgcatttctttgtgattagggaatcgaagaatagtcagctaggaatagagctacagaagtacacttacataaaccatcctggactttaatgtccctgggcagattcagtcgcaaaatccaatatgatattttgtaaagttttcaagttggacatttacatttttgagaattttgagacttcatcttacacatgccagtattaacacacatttggacaatagctttattaagtctataaagctattgaaaggaacatggcttacccttgttatttcactagttcaggttgcaacgaaaggtttttttgtccatgaacacttggcatatcttacttagcaaaaaagaaggatgtacattttactatagaattaatgtatgaacagtgtgtcactgctgttggatgtaaaaatgtatatgaaaccatttcattcacttgattacatttctgaagtataaataaaaaaatctaattctttttgacccattt

SEQ ID NO: 135087 - DNA, 2664 bp, Homo sapiens
  Payload ID: 6402
  Gene Symbol: FOXP2
  Gene Name: forkhead box P2
  Uniprot ID: O15409
  ENST ID: ENST00000393494
  CDS Start-End: 280-2427
tgcatctgctgtgtacagacttggctttgtactcttttcctgggggagagaaagtctttcttctctgctagttgattcctgtttttgtgaaacagctaagaaaacatctgtggcaggcagaaaaattgacaaaggattgacaaacaccattagctgaaaattttccatttcattgcaactatgcattgtttactttactgtaaatatcttaatacatcatcctctgaatatgctggcagagaagctggagaactgtgatttcaattaaggtattaagtcatgatgcaggaatctgcgacagagacaataagcaacagttcaatgaatcaaaatggaatgagcactctaagcagccaattagatgctggcagcagagatggaagatcaagtggtgacaccagctctgaagtaagcacagtagaactgctgcatctgcaacaacagcaggctctccaggcagcaagacaacttcttttacagcagcaaacaagtggattgaaatctcctaagagcagtgataaacagagaccactgcaggtgcctgtgtcagtggccatgatgactccccaggtgatcacccctcagcaaatgcagcagatccttcagcaacaagtcctgtctcctcagcagctacaagcccttctccaacaacagcaggctgtcatgctgcagcagcaacaactacaagagttttacaagaaacagcaagagcagttacatcttcagcttttgcagcagcagcagcaacagcagcagcagcaacaacagcagcaacaacagcagcagcaacaacaacaacaacagcagcaacaacagcagcagcagcagcaacagcagcagcagcagcaacagcatcctggaaagcaagcgaaagagcagcagcagcagcagcagcagcaacagcaattggcagcccagcagcttgtcttccagcagcagcttctccagatgcaacaactccagcagcagcagcatctgctcagccttcagcgtcagggactcatctccattccacctggccaggcagcacttcctgtccaatcgctgcctcaagctggcttaagtcctgctgagattcagcagttatggaaagaagtgactggagttcacagtatggaagacaatggcattaaacatggagggctagacctcactactaacaattcctcctcgactacctcctccaacacttccaaagcatcaccaccaataactcatcattccatagtgaatggacagtcttcagttctaagtgcaagacgagacagctcgtcacatgaggagactggggcctctcacactctctatggccatggagtttgcaaatggccaggctgtgaaagcatttgtgaagattttggacagtttttaaagcaccttaacaatgaacacgcattggatgaccgaagcactgctcagtgtcgagtgcaaatgcaggtggtgcaacagttagaaatacagctttctaaagaacgcgaacgtcttcaagcaatgatgacccacttgcacatgcgaccctcagagcccaaaccatctcccaaacctctaaatctggtgtctagtgtcaccatgtcgaagaatatgttggagacatccccacagagcttacctcaaacccctaccacaccaacggccccagtcaccccgattacccagggaccctcagtaatcaccccagccagtgtgcccaatgtgggagccatacgaaggcgacattcagacaaatacaacattcccatgtcatcagaaattgccccaaactatgaattttataaaaatgcagatgtcagacctccatttacttatgcaactctcataaggcaggctatcatggagtcatctgacaggcagttaacacttaatgaaatttacagctggtttacacggacatttgcttacttcaggcgtaatgcagcaacttggaagaatgcagtacgtcataatcttagcctgcacaagtgttttgttcgagtagaaaatgttaaaggagcagtatggactgtggatgaagtagaataccagaagcgaaggtcacaaaagataacaggaagtccaaccttagtaaaaaatatacctaccagtttaggctatggagcagctcttaatgccagtttgcaggctgccttggcagagagcagtttacctttgctaagtaatcctggactgataaataatgcatccagtggcctactgcaggccgtccacgaagacctcaatggttctctggatcacattgacagcaatggaaacagtagtccgggctgctcacctcagccgcacatacattcaatccacgtcaaggaagagccagtgattgcagaggatgaagactgcccaatgtccttagtgacaacagctaatcacagtccagaattagaagacgacagagagattgaagaagagcctttatctgaagatctggaatgagaactgacttgtgaaacctcagcgtgaagggacatatcactgaccttcataaccactccacaaccatgaatatttgacaaatttttactgtgactatttattaagcatggataaaggagacagccctaaaggaacttactaagccagccctttgggattcagtaccaacaggcaaattgcttgttttcttcttcttcttcttctttttttttttttttttagaaaaaaagacaaaaa

SEQ ID NO: 135088 - DNA, 772 bp, Homo sapiens
  Payload ID: 6402
  Gene Symbol: FOXP2
  Gene Name: forkhead box P2
  ENST ID: ENST00000393495
  CDS Start-End: 260-772
gttttaattaccagcacaaaatgccatcagtctgggacgtgatcgggcagaggtgtactcacagtagtgtaaatactgctgtaaatagttgtctgatggtggctttgacagtgagctagcttctgagttttcccttctttttatactgttttctgtgctggcttttttgaatcttcctaatttttcatctctttaacaaactcctatgaagttgaaaccgggaagtttgctctaacatttccagagaaggtattaagtcatgatgcaggaatctgcgacagagacaataagcaacagttcaatgaatcaaaatggaatgagcactctaagcagccaattagatgctggcagcagagatggaagatcaagtggtgacaccagctctgaagtaagcacagtagaactgctgcatctgcaacaacagcagcagcagcagcagcaacagcaattggcagcccagcagcttgtcttccagcagcagcttctccagatgcaacaactccagcagcagcagcatctgctcagccttcagcgtcagggactcatctccattccacctggccaggcagcacttcctgtccaatcgctgcctcaagctggcttaagtcctgctgagattcagcagttatggaaagaagtgactggagttcacagtatggaagacaatggcattaaacatggagggctagacctcactactaacaattcctcctcgactacctcctccaacacttccaaagcatcaccaccaataactcatcattccatagtg

SEQ ID NO: 135089 - DNA, 2617 bp, Homo sapiens
  Payload ID: 6402
  Gene Symbol: FOXP2
  Gene Name: forkhead box P2
  ENST ID: ENST00000393498
  CDS Start-End: 314-2398
attttgtgtacgattgtccacggacgccaaaacaatcacagagctgcttgatttgttttaattaccagcacaaaatgccatcagtctgggacgtgatcgggcagaggtgtactcacagtagtgtaaatactgctgtaaatagttgtctgatggtggctttgacagtgagctagcttctgagttttcccttctttttatactgttttctgtgctggcttttttgaatcttcctaatttttcatctctttaacaaactcctatgaagttgaaaccgggaagtttgctctaacatttccagagaaggtattaagtcatgatgcaggaatctgcgacagagacaataagcaacagttcaatgaatcaaaatggaatgagcactctaagcagccaattagatgctggcagcagagatggaagatcaagtggtgacaccagctctgaagtaagcacagtagaactgctgcatctgcaacaacagcaggctctccaggcagcaagacaacttcttttacagcagcaaacaagtggattgaaatctcctaagagcagtgataaacagagaccactgcaggtgcctgtgtcagtggccatgatgactccccaggtgatcacccctcagcaaatgcagcagatccttcagcaacaagtcctgtctcctcagcagctacaagcccttctccaacaacagcaggctgtcatgctgcagcagcagcagcagcaacagcagcagcagcaacaacagcagcaacaacagcagcagcaacaacaacaacaacagcagcaacaacagcagcagcagcagcaacagcagcagcagcagcaacagcatcctggaaagcaagcgaaagagcagcagcagcagcagcagcaacagcaattggcagcccagcagcttgtcttccagcagcagcttctccagatgcaacaactccagcagcagcagcatctgctcagccttcagcgtcagggactcatctccattccacctggccaggcagcacttcctgtccaatcgctgcctcaagctggcttaagtcctgctgagattcagcagttatggaaagaagtgactggagttcacagtatggaagacaatggcattaaacatggagggctagacctcactactaacaattcctcctcgactacctcctccaacacttccaaagcatcaccaccaataactcatcattccatagtgaatggacagtcttcagttctaagtgcaagacgagacagctcgtcacatgaggagactggggcctctcacactctctatggccatggagtttgcaaatggccaggctgtgaaagcatttgtgaagattttggacagtttttaaagcaccttaacaatgaacacgcattggatgaccgaagcactgctcagtgtcgagtgcaaatgcaggtggtgcaacagttagaaatacagctttctaaagaacgcgaacgtcttcaagcaatgatgacccacttgcacatgcgaccctcagagcccaaaccatctcccaaacctctaaatctggtgtctagtgtcaccatgtcgaagaatatgttggagacatccccacagagcttacctcaaacccctaccacaccaacggccccagtcaccccgattacccagggaccctcagtaatcaccccagccagtgtgcccaatgtgggagccatacgaaggcgacattcagacaaatacaacattcccatgtcatcagaaattgccccaaactatgaattttataaaaatgcagatgtcagacctccatttacttatgcaactctcataaggcaggctatcatggagtcatctgacaggcagttaacacttaatgaaatttacagctggtttacacggacatttgcttacttcaggcgtaatgcagcaacttggaagaatgcagtacgtcataatcttagcctgcacaagtgttttgttcgagtagaaaatgttaaaggagcagtatggactgtggatgaagtagaataccagaagcgaaggtcacaaaagataacaggaagtccaaccttagtaaaaaatatacctaccagtttaggctatggagcagctcttaatgccagtttgcaggctgccttggcagagagcagtttacctttgctaagtaatcctggactgataaataatgcatccagtggcctactgcaggccgtccacgaagacctcaatggttctctggatcacattgacagcaatggaaacagtagtccgggctgctcacctcagccgcacatacattcaatccacgtcaaggaagagccagtgattgcagaggatgaagactgcccaatgtccttagtgacaacagctaatcacagtccagaattagaagacgacagagagattgaagaagagcctttatctgaagatctggaatgagaactgacttgtgaaacctcagcgtgaagggacatatcactgaccttcataaccactccacaaccatgaatatttgacaaatttttactgtgactatttattaagcatggataaaggagacagccctaaaggaacttactaagccagccctttgggattcagtaccaacaggcaaattgcttgttttcttcttcttcttcttctttttttttttttttt

SEQ ID NO: 135090 - DNA, 6415 bp, Homo sapiens
  Payload ID: 6402
  Gene Symbol: FOXP2
  Gene Name: forkhead box P2
  Uniprot ID: O15409
  ENST ID: ENST00000403559
  CDS Start-End: 375-2573
cttgaacctttgtcacccctcacgttgcacaccaaagacataccctagtgattaaatgctgattttgtgtacgattgtccacggacgccaaaacaatcacagagctgcttgatttgttttaattaccagcacaaaatgccatcagtctgggacgtgatcgggcagaggtgtactcacagtagtgtaaatactgctgtaaatagttgtctgatggtggctttgacagtgagctagcttctgagttttcccttctttttatactgttttctgtgctggcttttttgaatcttcctaatttttcatctctttaacaaactcctatgaagttgaaaccgggaagtttgctctaacatttccagagaaggtattaagtcatgatgcaggaatctgcgacagagacaataagcaacagttcaatgaatcaaaatggaatgagcactctaagcagccaattagatgctggcagcagagatggaagatcaagtggtgacaccagctctgaagtaagcacagtagaactgctgcatctgcaacaacagcaggctctccaggcagcaagacaacttcttttacagcagcaaacaagtggattgaaatctcctaagagcagtgataaacagagaccactgcaggtgcctgtgtcagtggccatgatgactccccaggtgatcacccctcagcaaatgcagcagatccttcagcaacaagtcctgtctcctcagcagctacaagcccttctccaacaacagcaggctgtcatgctgcagcaggattttttggattctggattggaaaatttcagagctgccttggaaaaaaatcaacaactacaagagttttacaagaaacagcaagagcagttacatcttcagcttttgcagcagcagcagcaacagcagcagcagcaacaacagcagcaacaacagcagcagcaacaacaacaacaacagcagcaacaacagcagcagcagcagcaacagcagcagcagcagcaacagcatcctggaaagcaagcgaaagagcagcagcagcagcagcagcagcaacagcaattggcagcccagcagcttgtcttccagcagcagcttctccagatgcaacaactccagcagcagcagcatctgctcagccttcagcgtcagggactcatctccattccacctggccaggcagcacttcctgtccaatcgctgcctcaagctggcttaagtcctgctgagattcagcagttatggaaagaagtgactggagttcacagtatggaagacaatggcattaaacatggagggctagacctcactactaacaattcctcctcgactacctcctccaacacttccaaagcatcaccaccaataactcatcattccatagtgaatggacagtcttcagttctaagtgcaagacgagacagctcgtcacatgaggagactggggcctctcacactctctatggccatggagtttgcaaatggccaggctgtgaaagcatttgtgaagattttggacagtttttaaagcaccttaacaatgaacacgcattggatgaccgaagcactgctcagtgtcgagtgcaaatgcaggtggtgcaacagttagaaatacagctttctaaagaacgcgaacgtcttcaagcaatgatgacccacttgcacatgcgaccctcagagcccaaaccatctcccaaacctctaaatctggtgtctagtgtcaccatgtcgaagaatatgttggagacatccccacagagcttacctcaaacccctaccacaccaacggccccagtcaccccgattacccagggaccctcagtaatcaccccagccagtgtgcccaatgtgggagccatacgaaggcgacattcagacaaatacaacattcccatgtcatcagaaattgccccaaactatgaattttataaaaatgcagatgtcagacctccatttacttatgcaactctcataaggcaggctatcatggagtcatctgacaggcagttaacacttaatgaaatttacagctggtttacacggacatttgcttacttcaggcgtaatgcagcaacttggaagaatgcagtacgtcataatcttagcctgcacaagtgttttgttcgagtagaaaatgttaaaggagcagtatggactgtggatgaagtagaataccagaagcgaaggtcacaaaagataacaggaagtccaaccttagtaaaaaatatacctaccagtttaggctatggagcagctcttaatgccagtttgcaggctgccttggcagagagcagtttacctttgctaagtaatcctggactgataaataatgcatccagtggcctactgcaggccgtccacgaagacctcaatggttctctggatcacattgacagcaatggaaacagtagtccgggctgctcacctcagccgcacatacattcaatccacgtcaaggaagagccagtgattgcagaggatgaagactgcccaatgtccttagtgacaacagctaatcacagtccagaattagaagacgacagagagattgaagaagagcctttatctgaagatctggaatgagaactgacttgtgaaacctcagcgtgaagggacatatcactgaccttcataaccactccacaaccatgaatatttgacaaatttttactgtgactatttattaagcatggataaaggagacagccctaaaggaacttactaagccagccctttgggattcagtaccaacaggcaaattgcttgttttcttcttcttcttcttctttttttttttttttttagaaaaaaagacaaaaactgattttcttgaaaaaaaaaaatgaactgttctttctataatggctttgcccatttaaaaaatgtggctcttaagggttcatgaaatgactgaatatgaggatacatgtcctgtagaaagcaaatgcgcctcatatactgccaaaaatagtgttagtttcattaatgtgaattttccagcattcagtagttgtaatgttagaaacaattgctggtcaagttcaacttgttgctattgtttttaatttgcacaggagtagtatcagaaattagtgtcactgcttgtatctagctgaattttaaacaacagaacattagttttttatgttggtgccaccaactgtaaatgacataagttagttattacaaaacacagtaattagactgttgcaaccatctaaaaccttaggcttccagtctgtgctgttagtgttaagatgtaaagtgcaatcctaagctaacattatctgtgcaagcaccatagaaacatttgcatatctgcatagatcttacaactgtactctttacctccttgtgataaagctttgtctacctgcaaacacagtcaaaggctacagctgcaaaccaaagccaactctaaccatggccaagagctcaaggacagaagcagccacatgctttggtcagccttctgtaacttcaattagtacaaaggaaccttttccatgaactacctgctgttttctgatgacctctgggatcttttcatttagccctaaacaaagaaacaaatatgacaaaaaccacaactaaaaaatgttaattcagtcacagagtaatcttctgaggccaaaagtccatctaaatgcaatgaagatttgctttcattaaagacagaggtgaggacaaaatccgcagtggaagttatgatatgctagaaagcaacaaatgtggatcactgaccaaaacgattatgtacttgatgcaaatgcagattgcatattgttatatatatagtactttgtgtttttgttttccctcattcagtcagttattttcagtggtgaatacatgttgttagaagatgtcttgtatggtcttaatctttgttgtgtactatttttttatagtcttaagttataatgaaaaaacaaaaagtaggaaccaaacataaaaggtctagtaaagccaaaaattaatttcatattgattttaaagtgatctagctgagtttttacactgaaagcaaagattatagcaattgtagtccatggtatttattttcagtcaaaccaaagttacatataattctgcctctgcttatacgggatattaacactaacaatacactcccttcaaagacttgcacaggccaaattgttggaatgctggttttcttgacaattccaaaccccaaaactatgataatgagttatgatgtagttgaaaatagcatagtcagatgtttgcttaaaacctagaaacttaacatgttgcttttcatgtgctgtgccaagtcttgataatactttttcccccaaccaagggacctcataacctgattatggttattgctttacaaacagttttgacagaaggtggctgctagagcttaacatacgttcccgttccatgtgatggaaccggttcttgcaaactaagctcatcattgattctttgctgaagtcagcaaatagagttagagagatacccagtcatctatcacaccaaataaaaggacataacggctttcaaaagggttttcccacttacccaaaaggctttctgaaagcttctacctctgcaaaaaaaaaaaaagaaaaaaaaaaaaagaaaaacattagaacaattatggcagattgcatgaaacgtgagaacgtcacagtaactgctacttttcattatgtttgtctttgggtcatgatcaacgaaccggaagtttacaatatggtattaaaagaaagatgggtatggtgaaagatggttttcagtcatctaggatcctactgtaaggattatctgaaaggaaaaatgggtctttcaggtgcatgttcaaaaggctttgagggactggaagtaactgcgagagttgtaccatcagaagggtggcctaagactacaatgctaaagtatgcatacctcagttagaaaacttttgaaaggaagtctcagccacagaatgcatatacctgtagagttttgcatgggttttatatgaatacaattttaaaaaatagctgcttgcacattataccagaaaaacctccaaaactgcaattgctttgaaaatagattttaggttttttggagtttcctgaaatgcttggtctgtattttgataattgtgcatattatgtaaaaatgttggtggacccataaatgaccagactttttctaagaaaaatgttgctttaatgcatttcatgaatttttactcttatatcattgcttgctagtaatagcaaatctgcttttctgcatctgctttgcgtagctattgtaaggctttgaactaatgtatgtatttattgcttgaacttctgtgcataccttataaagcataatgtctgacaatttaaatggctcatgtattcttgcttctatcataagctgattatggggactatgatcttttgtatacagcaaattttaaactgtagcacaaacatctgtttatgtattggtggaatatacctgttttatttatcttttttgaggtaaactaatttttgatacttttcattactgtgtactatgttcatactttgaattctctgacgttagaagtcatggttgagaattgtaacagctgttattcgttctgtattcatggctttcactgctgaataaaataaaggaccaaacctaggatttgaaagaaaactgtctacctctaacaccagggagttatcagattttattttacatagttttagtctacaaagacacaattgcttaaacctagtgggcttaaggcttatattctatgtggttggattcgtggcacagttgtactatttgaaaatcaattaaaattttatgtgaatgttacaagtatttggtagaattaccactaactgggttttctttagataactcagatatggagaaaatgtcatcagcattctgtgtctacagctgcttaacttcataagaatgcatttctttgtgattagggaatcgaagaatagtcagctaggaatagagctacagaagtacacttacataaaccatcctggactttaatgtccctgggcagattcagtcgcaaaatccaatatgatattttgtaaagttttcaagttggacatttacatttttgagaattttgagacttcatcttacacatgccagtattaacacacatttggacaatagctttattaagtctataaagctattgaaaggaacatggcttacccttgttatttcactagttcaggttgcaacgaaaggtttttttgtccatgaacacttggcatatcttacttagcaaaaaagaaggatgtacattttactatagaattaatgtatgaacagtgtgtcactgctgttggatgtaaaaatgtatatgaaaccatttcattcacttgattacatttctgaagtataaataaaaaaatctaattctttttgacccattt

SEQ ID NO: 135091 - DNA, 6443 bp, Homo sapiens
  Payload ID: 6402
  Gene Symbol: FOXP2
  Gene Name: forkhead box P2
  Uniprot ID: O15409
  ENST ID: ENST00000408937
  CDS Start-End: 375-2597
cttgaacctttgtcacccctcacgttgcacaccaaagacataccctagtgattaaatgctgattttgtgtacgattgtccacggacgccaaaacaatcacagagctgcttgatttgttttaattaccagcacaaaatgccatcagtctgggacgtgatcgggcagaggtgtactcacagtagtgtaaatactgctgtaaatagttgtctgatggtggctttgacagtgagctagcttctgagttttcccttctttttatactgttttctgtgctggcttttttgaatcttcctaatttttcatctctttaacaaactcctatgaagttgaaaccgggaagtttgctctaacatttccagagaaggtattaagtcatgatgcaggaatctgcgacagagacaataagcaacagttcaatgaatcaaaatggaatgagcactctaagcagccaattagatgctggcagcagagatggaagatcaagtggtgacaccagctctgaagtaagcacagtagaactgctgcatctgcaacaacagcaggctctccaggcagcaagacaacttcttttacagcagcaaacaagtggattgaaatctcctaagagcagtgataaacagagaccactgcaggaattgcttccagaaacaaaattatgtatctgtggccactcttctggtgatgggcatcctcacaacacatttgcagtgcctgtgtcagtggccatgatgactccccaggtgatcacccctcagcaaatgcagcagatccttcagcaacaagtcctgtctcctcagcagctacaagcccttctccaacaacagcaggctgtcatgctgcagcagcaacaactacaagagttttacaagaaacagcaagagcagttacatcttcagcttttgcagcagcagcagcaacagcagcagcagcaacaacagcagcaacaacagcagcagcaacaacaacaacaacagcagcaacaacagcagcagcagcagcaacagcagcagcagcagcaacagcatcctggaaagcaagcgaaagagcagcagcagcagcagcagcagcaacagcaattggcagcccagcagcttgtcttccagcagcagcttctccagatgcaacaactccagcagcagcagcatctgctcagccttcagcgtcagggactcatctccattccacctggccaggcagcacttcctgtccaatcgctgcctcaagctggcttaagtcctgctgagattcagcagttatggaaagaagtgactggagttcacagtatggaagacaatggcattaaacatggagggctagacctcactactaacaattcctcctcgactacctcctccaacacttccaaagcatcaccaccaataactcatcattccatagtgaatggacagtcttcagttctaagtgcaagacgagacagctcgtcacatgaggagactggggcctctcacactctctatggccatggagtttgcaaatggccaggctgtgaaagcatttgtgaagattttggacagtttttaaagcaccttaacaatgaacacgcattggatgaccgaagcactgctcagtgtcgagtgcaaatgcaggtggtgcaacagttagaaatacagctttctaaagaacgcgaacgtcttcaagcaatgatgacccacttgcacatgcgaccctcagagcccaaaccatctcccaaacctctaaatctggtgtctagtgtcaccatgtcgaagaatatgttggagacatccccacagagcttacctcaaacccctaccacaccaacggccccagtcaccccgattacccagggaccctcagtaatcaccccagccagtgtgcccaatgtgggagccatacgaaggcgacattcagacaaatacaacattcccatgtcatcagaaattgccccaaactatgaattttataaaaatgcagatgtcagacctccatttacttatgcaactctcataaggcaggctatcatggagtcatctgacaggcagttaacacttaatgaaatttacagctggtttacacggacatttgcttacttcaggcgtaatgcagcaacttggaagaatgcagtacgtcataatcttagcctgcacaagtgttttgttcgagtagaaaatgttaaaggagcagtatggactgtggatgaagtagaataccagaagcgaaggtcacaaaagataacaggaagtccaaccttagtaaaaaatatacctaccagtttaggctatggagcagctcttaatgccagtttgcaggctgccttggcagagagcagtttacctttgctaagtaatcctggactgataaataatgcatccagtggcctactgcaggccgtccacgaagacctcaatggttctctggatcacattgacagcaatggaaacagtagtccgggctgctcacctcagccgcacatacattcaatccacgtcaaggaagagccagtgattgcagaggatgaagactgcccaatgtccttagtgacaacagctaatcacagtccagaattagaagacgacagagagattgaagaagagcctttatctgaagatctggaatgagaactgacttgtgaaacctcagcgtgaagggacatatcactgaccttcataaccactccacaaccatgaatatttgacaaatttttactgtgactatttattaagcatggataaaggagacagccctaaaggaacttactaagccagccctttgggattcagtaccaacaggcaaattgcttgttttcttcttcttcttcttctttttttttttttttttagaaaaaaagacaaaaactgattttcttgaaaaaaaaaaatgaactgttctttctataatggctttgcccatttaaaaaatgtggctcttaagggttcatgaaatgactgaatatgaggatacatgtcctgtagaaagcaaatgcgcctcatatactgccaaaaatagtgttagtttcattaatgtgaattttccagcattcagtagttgtaatgttagaaacaattgctggtcaagttcaacttgttgctattgtttttaatttgcacaggagtagtatcagaaattagtgtcactgcttgtatctagctgaattttaaacaacagaacattagttttttatgttggtgccaccaactgtaaatgacataagttagttattacaaaacacagtaattagactgttgcaaccatctaaaaccttaggcttccagtctgtgctgttagtgttaagatgtaaagtgcaatcctaagctaacattatctgtgcaagcaccatagaaacatttgcatatctgcatagatcttacaactgtactctttacctccttgtgataaagctttgtctacctgcaaacacagtcaaaggctacagctgcaaaccaaagccaactctaaccatggccaagagctcaaggacagaagcagccacatgctttggtcagccttctgtaacttcaattagtacaaaggaaccttttccatgaactacctgctgttttctgatgacctctgggatcttttcatttagccctaaacaaagaaacaaatatgacaaaaaccacaactaaaaaatgttaattcagtcacagagtaatcttctgaggccaaaagtccatctaaatgcaatgaagatttgctttcattaaagacagaggtgaggacaaaatccgcagtggaagttatgatatgctagaaagcaacaaatgtggatcactgaccaaaacgattatgtacttgatgcaaatgcagattgcatattgttatatatatagtactttgtgtttttgttttccctcattcagtcagttattttcagtggtgaatacatgttgttagaagatgtcttgtatggtcttaatctttgttgtgtactatttttttatagtcttaagttataatgaaaaaacaaaaagtaggaaccaaacataaaaggtctagtaaagccaaaaattaatttcatattgattttaaagtgatctagctgagtttttacactgaaagcaaagattatagcaattgtagtccatggtatttattttcagtcaaaccaaagttacatataattctgcctctgcttatacgggatattaacactaacaatacactcccttcaaagacttgcacaggccaaattgttggaatgctggttttcttgacaattccaaaccccaaaactatgataatgagttatgatgtagttgaaaatagcatagtcagatgtttgcttaaaacctagaaacttaacatgttgcttttcatgtgctgtgccaagtcttgataatactttttcccccaaccaagggacctcataacctgattatggttattgctttacaaacagttttgacagaaggtggctgctagagcttaacatacgttcccgttccatgtgatggaaccggttcttgcaaactaagctcatcattgattctttgctgaagtcagcaaatagagttagagagatacccagtcatctatcacaccaaataaaaggacataacggctttcaaaagggttttcccacttacccaaaaggctttctgaaagcttctacctctgcaaaaaaaaaaaaagaaaaaaaaaaaaagaaaaacattagaacaattatggcagattgcatgaaacgtgagaacgtcacagtaactgctacttttcattatgtttgtctttgggtcatgatcaacgaaccggaagtttacaatatggtattaaaagaaagatgggtatggtgaaagatggttttcagtcatctaggatcctactgtaaggattatctgaaaggaaaaatgggtctttcaggtgcatgttcaaaaggctttgagggactggaagtaactgcgagagttgtaccatcagaagggtggcctaagactacaatgctaaagtatgcatacctcagttagaaaacttttgaaaggaagtctcagccacagaatgcatatacctgtagagttttgcatgggttttatatgaatacaattttaaaaaatagctgcttgcacattataccagaaaaacctccaaaactgcaattgctttgaaaatagattttaggttttttggagtttcctgaaatgcttggtctgtattttgataattgtgcatattatgtaaaaatgttggtggacccataaatgaccagactttttctaagaaaaatgttgctttaatgcatttcatgaatttttactcttatatcattgcttgctagtaatagcaaatctgcttttctgcatctgctttgcgtagctattgtaaggctttgaactaatgtatgtatttattgcttgaacttctgtgcataccttataaagcataatgtctgacaatttaaatggctcatgtattcttgcttctatcataagctgattatggggactatgatcttttgtatacagcaaattttaaactgtagcacaaacatctgtttatgtattggtggaatatacctgttttatttatcttttttgaggtaaactaatttttgatacttttcattactgtgtactatgttcatactttgaattctctgacgttagaagtcatggttgagaattgtaacagctgttattcgttctgtattcatggctttcactgctgaataaaataaaggaccaaacctaggatttgaaagaaaactgtctacctctaacaccagggagttatcagattttattttacatagttttagtctacaaagacacaattgcttaaacctagtgggcttaaggcttatattctatgtggttggattcgtggcacagttgtactatttgaaaatcaattaaaattttatgtgaatgttacaagtatttggtagaattaccactaactgggttttctttagataactcagatatggagaaaatgtcatcagcattctgtgtctacagctgcttaacttcataagaatgcatttctttgtgattagggaatcgaagaatagtcagctaggaatagagctacagaagtacacttacataaaccatcctggactttaatgtccctgggcagattcagtcgcaaaatccaatatgatattttgtaaagttttcaagttggacatttacatttttgagaattttgagacttcatcttacacatgccagtattaacacacatttggacaatagctttattaagtctataaagctattgaaaggaacatggcttacccttgttatttcactagttcaggttgcaacgaaaggtttttttgtccatgaacacttggcatatcttacttagcaaaaaagaaggatgtacattttactatagaattaatgtatgaacagtgtgtcactgctgttggatgtaaaaatgtatatgaaaccatttcattcacttgattacatttctgaagtataaataaaaaaatctaattctttttgacccatttataa

SEQ ID NO: 135092 - DNA, 1509 bp, Homo sapiens
  Payload ID: 6402
  Gene Symbol: FOXP2
  Gene Name: forkhead box P2
  ENST ID: ENST00000440349
  CDS Start-End: 420-668
cggcggccgcgtccgctggctgcggcttcctcggccccccccctccccgggcgcgccccccactcgcggcagcagctgcccggactcgcgcgtgggtgtgttgtttgggggcttctgcctcgccgccgcgggtgccacctcccgggacgctgcccacggcgtccccggtcgcgatcaaacaaataatagaagtctgttgaagctttgtcctgacctatcctggaagtagaagaatactctggagaaaggagcattgtaagcacaaagaataagattcctcaatcctgagagagagaattaaagtctaactctccaaatgtctactctaatgtgatgctgggattgaattttcctaggactccgtttcaaggttaattcgaaagtcttgtggaagatctggaagaaacaggtattaagtcatgatgcaggaatctgcgacagagacaataagcaacagttcaatgaatcaaaatggaatgagcactctaagcagccaattagatgctggcagcagagatggaagatcaagtggtgacaccagctctgaagtaagcacagtagaactgctgcatctgcaacaacagcaggctggagtgcagtggtgcaatcataactcactgcaacctggaactcctgggctcaagcagtcctccgacctcagcctctgaagtagctaggactacaggaggatgttgtctcttacacccaggttatttgttaaagtctttggatctatacttaactgatgacctagaagagcgattctcaaaagtgtgagtcctggaccagcagcaacagcatcaccgggaacttgttagaaatgcacattctcaggccactccctagacctactgaatcagaaaccctggggttggagctcagcaattaccctgcaggctctccaggcagcaagacaacttcttttacagcagcaaacaagtggattgaaatctcctaagagcagtgataaacagagaccactgcagccatgagacagacttgtggttcttcaacagctgtgcagagcagagacgtaaatttaaggtgcctgtgtcagtggccatgatgactccccaggtgatcacccctcagcaaatgcagcagatccttcagcaacaagtcctgtctcctcagcagctacaagcccttctccaacaacagcaggctgtcatgctgcagcaggattttttggattctggattggaaaatttcagagctgccttggaaaaaaattcaaaatggtttattcagcaacaactacaagagttttacaagaaacagcaagagcagttacatcttcagcttttgcagcagcagcagcaacagcagcagcagcaacaacagcagcaacaacagcagcagcaacaacaacaacaacagcagcaacaacagcagcagcagcagcaacagcagcagcagcagcaacagcatcctggaaagcaagcgaaagagcagcagcagcagcagcagcagcaacagcaattggcagcccagcagcttgtcttccag

SEQ ID NO: 135093 - DNA, 3495 bp, Homo sapiens
  Payload ID: 6402
  Gene Symbol: FOXP2
  Gene Name: forkhead box P2
  Uniprot ID: O15409
  ENST ID: ENST00000412402
  CDS Start-End: 387-650
gagaaagcgcgagacacgccggcgcgtgcagctccgcggccgccgcttcgccctagctctagccccgcgccacccgcagcccgcccgcgaacgcccgccccggttatttatgcggcggccgcgtccgctggctgcggcttcctcggccccccccctccccgggcgcgccccccactcgcggcagcagctgcccggactcgcgcgtgggtgtgttgtttgggggcttctgcctcgccgccgcgggtgccacctcccgggacgctgcccacggcgtccccggtcgcggtctactctaatgtgatgctgggattgaattttcctaggactccgtttcaaggttaattcgaaagtcttgtggaagatctggaagaaacaggtattaagtcatgatgcaggaatctgcgacagagacaataagcaacagttcaatgaatcaaaatggaatgagcactctaagcagccaattagatgctggcagcagagatggaagatcaagtggtgacaccagctctgaagtaagcacagtagaactgctgcatctgcaacaacagcaggctctccaggcagcaagacaacttcttttacagcagcaaacaagtggattgaaatctcctaagagcagtgataaacagagaccactgcagccatgagacagacttgtggttcttcaacagctgtgcagagcagagacgtaaatttaaggaattgcttccagaaacaaaattatgtatctgtggccactcttctggtgatgggcatcctcacaacacatttgcagtgcctgtgtcagtggccatgatgactccccaggtgatcacccctcagcaaatgcagcagatccttcagcaacaagtcctgtctcctcagcagctacaagcccttctccaacaacagcaggctgtcatgctgcagcaggattttttggattctggattggaaaatttcagagctgccttggaaaaaaatcaacaactacaagagttttacaagaaacagcaagagcagttacatcttcagcttttgcagcagcagcagcaacagcagcagcagcaacaacagcagcaacaacagcagcagcaacaacaacaacaacagcagcaacaacagcagcagcagcagcaacagcagcagcagcagcaacagcatcctggaaagcaagcgaaagagcagcagcagcagcagcagcagcaacagcaattggcagcccagcagcttgtcttccagcagcagcttctccagatgcaacaactccagcagcagcagcatctgctcagccttcagcgtcagggactcatctccattccacctggccaggcagcacttcctgtccaatcgctgcctcaagctggcttaagtcctgctgagattcagcagttatggaaagaagtgactggagttcacagtatggaagacaatggcattaaacatggagggctagacctcactactaacaattcctcctcgactacctcctccaacacttccaaagcatcaccaccaataactcatcattccatagtgaatggacagtcttcagttctaagtgcaagacgagacagctcgtcacatgaggagactggggcctctcacactctctatggccatggagtttgcaaatggccaggctgtgaaagcatttgtgaagattttggacagtttttaaagcaccttaacaatgaacacgcattggatgaccgaagcactgctcagtgtcgagtgcaaatgcaggtggtgcaacagttagaaatacagctttctaaagaacgcgaacgtcttcaagcaatgatgacccacttgcacatgcgaccctcagagcccaaaccatctcccaaacctaaattgccccaaactatgaattttataaaaatgcagatgtcagacctccatttacttatgcaactctcataaggcaggctatcatggagtcatctgacaggcagttaacacttaatgaaatttacagctggtttacacggacatttgcttacttcaggcgtaatgcagcaacttggaagaatgcagtacgtcataatcttagcctgcacaagtgttttgttcgagtagaaaatgttaaaggagcagtatggactgtggatgaagtagaataccagaagcgaaggtcacaaaagataacaggaagtccaaccttagtaaaaaatatacctaccagtttaggctatggagcagctcttaatgccagtttgcaggctgccttggcagagagcagtttacctttgctaagtaatcctggactgataaataatgcatccagtggcctactgcaggccgtccacgaagacctcaatggttctctggatcacattgacagcaatggaaacagtagtccgggctgctcacctcagccgcacatacattcaatccacgtcaaggaagagccagtgattgcagaggatgaagactgcccaatgtccttagtgacaacagctaatcacagtccagaattagaagacgacagagagattgaagaagagcctttatctgaagatctggaatgagaactgacttgtgaaacctcagcgtgaagggacatatcactgaccttcataaccactccacaaccatgaatatttgacaaatttttactgtgactatttattaagcatggataaaggagacagccctaaaggaacttactaagccagccctttgggattcagtaccaacaggcaaattgcttgttttcttcttcttcttcttctttttttttttttttttagaaaaaaagacaaaaactgattttcttgaaaaaaaaaaatgaactgttctttctataatggctttgcccatttaaaaaatgtggctcttaagggttcatgaaatgactgaatatgaggatacatgtcctgtagaaagcaaatgcgcctcatatactgccaaaaatagtgttagtttcattaatgtgaattttccagcattcagtagttgtaatgttagaaacaattgctggtcaagttcaacttgttgctattgtttttaatttgcacaggagtagtatcagaaattagtgtcactgcttgtatctagctgaattttaaacaacagaacattagttttttatgttggtgccaccaactgtaaatgacataagttagttattacaaaacacagtaattagactgttgcaaccatctaaaaccttaggcttccagtctgtgctgttagtgttaagatgtaaagtgcaatcctaagctaacattatctgtgcaagcaccatagaaacatttgcatatctgcatagatcttacaactgtactctttacctccttgtgataaagctttgtctacctgcaaacacagtcaaaggctacagctgcaaaccaaagccaactctaaccatggccaagagctcaaggacagaagcagccacatgctttggtcagccttctgtaacttcaattagtacaaaggaaccttttccatgaactacctgctgttttctgatgacctctgggatcttttcatttagccctaaac

SEQ ID NO: 135094 - DNA, 625 bp, Homo sapiens
  Payload ID: 6402
  Gene Symbol: FOXP2
  Gene Name: forkhead box P2
  ENST ID: ENST00000452963
  CDS Start-End: 11-625
gtattaagtcatgatgcaggaatctgcgacagagacaataagcaacagttcaatgaatcaaaatggaatgagcactctaagcagccaattagatgctggcagcagagatggaagatcaagtggtgacaccagctctgaagtaagcacagtagaactgctgcatctgcaacaacagcaggctctccaggcagcaagacaacttcttttacagcagcaaacaagtggattgaaatctcctaagagcagtgataaacagagaccactgcaggtgcctgtgtcagtggccatgatgactccccaggtgatcacccctcagcaaatgcagcagatccttcagcaacaagtcctgtctcctcagcagctacaagcccttctccaacaacagcaggctgtcatgctgcagcagtcaaaatggtttattcagcaacaactacaagagttttacaagaaacagcaagagcagttacatcttcagcttttgcagcagcagcagcaacagcagcagcagcaacaacagcagcaacaacagcagcagcaacaacaacaacaacagcagcaacaacagcagcagcagcagcaacagcagcagcagcagcaacagcatcctggaaagcaagcgaaagag

SEQ ID NO: 135095 - DNA, 8301 bp, Homo sapiens
  Payload ID: 6402
  Gene Symbol: FOXP2
  Gene Name: forkhead box P2
  Uniprot ID: O15409
  ENST ID: ENST00000441290
  CDS Start-End: 487-750
gccgccgcgggtgccacctcccgggacgctgcccacggcgtccccggtcgcgatcaaacaaataatagaagtctgttgaagctttgtcctgacctatcctggaagtagaagaatactctggagaaaggagcattgtaagcacaaagaataagattcctcaatcctgagagagagaattaaagtctaactctccaaattttcaacaggagttttgagtaaagaaaatggagaagtttgtgggagagaaaggtctactctaatgtgatgctgggattgaattttcctaggactccgtttcaaggttaattcgaaagtcttgtggaagatctggaagaaacagccagtactcatatatatagaaagaggagttggatgtttgtcaataaactcatctggctttaaataaatcaaaacaaaaagaataatttgctactagtcttccaacatgtttgaagaacagcctgctgtttggggaggtattaagtcatgatgcaggaatctgcgacagagacaataagcaacagttcaatgaatcaaaatggaatgagcactctaagcagccaattagatgctggcagcagagatggaagatcaagtggtgacaccagctctgaagtaagcacagtagaactgctgcatctgcaacaacagcaggctctccaggcagcaagacaacttcttttacagcagcaaacaagtggattgaaatctcctaagagcagtgataaacagagaccactgcagccatgagacagacttgtggttcttcaacagctgtgcagagcagagacgtaaatttaaggtgcctgtgtcagtggccatgatgactccccaggtgatcacccctcagcaaatgcagcagatccttcagcaacaagtcctgtctcctcagcagctacaagcccttctccaacaacagcaggctgtcatgctgcagcaggattttttggattctggattggaaaatttcagagctgccttggaaaaaaatcaacaactacaagagttttacaagaaacagcaagagcagttacatcttcagcttttgcagcagcagcagcaacagcagcagcagcaacaacagcagcaacaacagcagcagcaacaacaacaacaacagcagcaacaacagcagcagcagcagcaacagcagcagcagcagcaacagcatcctggaaagcaagcgaaagagcagcagcagcagcagcagcagcaacagcaattggcagcccagcagcttgtcttccagcagcagcttctccagatgcaacaactccagcagcagcagcatctgctcagccttcagcgtcagggactcatctccattccacctggccaggcagcacttcctgtccaatcgctgcctcaagctggcttaagtcctgctgagattcagcagttatggaaagaagtgactggagttcacagtatggaagacaatggcattaaacatggagggctagacctcactactaacaattcctcctcgactacctcctccaacacttccaaagcatcaccaccaataactcatcattccatagtgaatggacagtcttcagttctaagtgcaagacgagacagctcgtcacatgaggagactggggcctctcacactctctatggccatggagtttgcaaatggccaggctgtgaaagcatttgtgaagattttggacagtttttaaagcaccttaacaatgaacacgcattggatgaccgaagcactgctcagtgtcgagtgcaaatgcaggtggtgcaacagttagaaatacagctttctaaagaacgcgaacgtcttcaagcaatgatgacccacttgcacatgcgaccctcagagcccaaaccatctcccaaacctaatatttgcaaagtcacatacagatgcatatggatgtttctgcgtttctcaaactatgcagaggtgctcttgtacatcccagagaagcttacaccagtggctttgtaaatgtattaaatgcagcatttaggagcattatctcagctttcatttatctaaatctggtgtctagtgtcaccatgtcgaagaatatgttggagacatccccacagagcttacctcaaacccctaccacaccaacggccccagtcaccccgattacccagggaccctcagtaatcaccccagccagtgtgcccaatgtgggagccatacgaaggcgacattcagacaaatacaacattcccatgtcatcagaaattgccccaaactatgaattttataaaaatgcagatgtcagacctccatttacttatgcaactctcataaggcaggctatcatggagtcatctgacaggcagttaacacttaatgaaatttacagctggtttacacggacatttgcttacttcaggcgtaatgcagcaacttggaagaatgcagtacgtcataatcttagcctgcacaagtgttttgttcgagtagaaaatgttaaaggagcagtatggactgtggatgaagtagaataccagaagcgaaggtcacaaaagataacaggaagtccaaccttagtaaaaaatatacctaccagtttaggctatggagcagctcttaatgccagtttgcaggctgccttggcagagagcagtttacctttgctaagtaatcctggactgataaataatgcatccagtggcctactgcaggccgtccacgaagacctcaatggttctctggatcacattgacagcaatggaaacagtagtccgggctgctcacctcagccgcacatgtaagtgtggttaacagactctctaaagggaagaatctatattaatatgcttcttaaatttagaatttttccgaagtttttactgttgtataagttgaaaatacaaatttaagtggagttaaattataccacgttcataatatgacaaagtttatcaaaatcggttttaatacattttttagatgatctcaaatgccatatcattattgttccagcagtcctctacagattcttagtactactaatgttctcttgggcataaagcagtgtctaagatgaatctacatcttatgggtcattatcacaggttggtttgtatggtgcaataagaatattcatgatggaataagttgttataatttttactactgttacaggtctctaaaccatttatgaactgtagtcaagatattgcccgtttttataaaccgtaaaatgcaaagtttaactgttacccacagtttacatagaagctagtaaagtgtaactttttgcctgtcttataaatcagtgtaattatatattcaactttaattactggtgcgtctgtattggcaaggtttataagttatattttatgcaagactacgattcctattaatatttagcagctaactatatcattaattactctaaaatctttcccctaccatctttttaatggagctgagagagtagaagtattaaaaattgatgtattgtggatttcagaaatgtgtatgacactttaaaaaatgcctggcttttttcaatagtgtcaagcatattagtgtcttgtttactaaaatgtattgaccgtggtagaactcagaattcagaggaaaaaaatttgaatctgaataatgaagtgtgtacaccatttagctgtcaggatgagttgtaactcatgtctatacttcctagaattaaacgtcacatacttctaattacaagttattgaggtaagattagtcctttctcttatttttatattgtcttcctttatttttccattcaatatctagtaaaaggtctgaaagagaaatatactctttatatgtacccattttcacttgacctttcacagggtattatttttgttgtctttttaaacattttattctgtttgacatattaatgtctttaagagcatatgtctaattgctttatagcacttttactctatcacctttgcaaaaaaacacactgtgaacattaatgtgttttatcaggttccgaaccattacttcttcaaaatggaaaaatttgtcttttggaagtgtctttagatgtattaaataatacaaaagaagtaataaaactcaaagtagaaagaacatgaatatatgctcttgagagtagcagtattctaaaacaaggaaagtgagcaatcagacaaaagtttttatatccccgctttatcctatcagccatgcagtgggtagcttgcggccttttactttcagcagttctcctgagtatgctaaatagtttattaaacattatatttcagaacctgaaataataattgggctaaattgtagcattgttagatgggtattggttttcgtttggcaattgctacttcagatttttcattttattattaaagtttatgaaatatttcagagaaatattagtatgtattagataacacctaaaaattatacatataatgtccagtatattgctgctatgggtttataaagttaaaatgttcatagttaatatataacacattttatgcttatatgaattagtgcatttgaaaaatacttatgtttattttccatagataaaaggaaagcttgttgaaaatagatttcagaaaaaataaaaattaaaaggggtgtaaattgtccctttttctaagttacatcaattataatcaaaattttaattatcttgcagaatattgagtcaatattcattcttaaatctgtttctgctgctgtcattaggtttttgcataatagatgtcaaatatttatgaaatatttcagtattctctatcttcacctttataaagttctaagatgcttgtacttaaaccatgttatgtattttattaggcaaaggaagaaatattgatataattctctcagtcaaaatttggttgtatataattgagtgcatttcaaaatactttggaaattaaacagaagtgaaataatttttataagacatttacacagcatacttatatctcctaaaatgaagtcatgttacttgttgttttagaggggggtagttgtgctgatgcaattgtaaacaagaggaaatagggcctagtggtatcagaacataggttgtaatgccagactgtcagggttccaattccagattcaatagttaatagccaagtgggattgagcacgttacttaatatttctttcctcagctttctcagctgaaaatgaggtaagtaataatataatgcttcttatttcataagattcttgcaaagaaatgagtgcctggaacataataattgctccttgtgtctctcatagtgctgtgtaaataggtactgatttatattacttcctgtaatacctcactgttactaaaaatgagtctataaacaatatgaaaatatttttgtattttgcattttaaggcactctgtaagtttgtggttagtcattgacaatccattttcttctccttctttcttctcttataattcataaagtaagcagatccataaaactgaaacaacatgaggccaggcatggtggcttatgccagtaatcccagcattttgggaggggagggcaggaggattgcttgaggccaggagttcaagaccagcctggacaacatagtgagaccctgtatctacaaaaataattttaaaaattagttgggtgtggtgtgtgcctgtatacagtcctagctactcaggaggctcaggcaggaggaaagcttgagcctagggatttcgaggttacagtaagctatgatcatggcatggaactccagcctgcaccacagagtgagactctatctgtctctaaaaataaaaagtgaaacaatatgacacaaggacttattataggtagcacattacctatatttaggtatctgaagttacctagttatctgaagttttaggcaatgaacaactcaaatagaacaacaccaacccagaatcagggacatatcatatatgtcttgaaaacattgagtattagttttgaaaggaatttagaatacataagggaatacagaatttagaatataggaagtgggaccagactgctgagtgacttaaatatcaagctatggtgtttgtttcagtcagtatacagcttgttactgttatcagcttgactttgacacgatcagagctatgcattagaaacagtaatctaaaagtgtactgaatgaaccatgacttaatgaaactcatgtataggagaatattctgaaattgggagagactggaagcagaaaattaattcttgcagtatgtaatatctaacataaatacaagactaggagtggagagcaaagaatccgtataagaagtgctgtgaaaagaaatactggaacaagacaaccaactgaatgctagggacaaagatgaaaattgggaaaattcatagccactttaaaagtctgcaaagagaaatagaggacacaagaagcaggttcaaaagggaagatgaagaattcagcattttacttggggaatctaagaacctaaatatcattagattcaggagaaaacactgatgatttttttgattagtcttttaattcaactccattatagtaaaattctacgtggtagaatatgaatatatacctgaggttgatagagaagatgttttttgaagcattagaagagtgaaatagatatggtctggtgcttcttataaattgtggagaacaagagatgccaaattatcatttatattccatactccatattttaacccttttcttccactccagttttcgctttattcagtgtcctgaataaaggcctcttccaaattaatgcatttatttcgctcacactatttgaatttctgccctttcccttttctggttcccctctactctcttacctaaattctacctttccttacaggactagtcctatttttttccaagagggtttcccaaggaattttactatcaggaccatgcactctgctccacacttctaaagagcttgcttcttataccactattttggactaatactttgtgtacatgtgtgagtgtgtgtgcacacacacatgcacgtgtgtttatgcatacatctgtgttcattttgcagatatccctaccttaatgacaagtcccttaaagacagattatgttttagacaaattatagtataagaaacccctagcacattctactatgtcaagtaagcattcagtaaaagtatgatactgattatgaagaatcaaattggagattacagttaattagaaatggtttgacttcacaaagtcatacttacaggagtataaaatccagggttctcctagaatcttgaagaaggagaacaaaagagattttaggaagaacagatgagtaaatataatgttcatttttatgtgggagctaggaaaattttctaaatattggtagactatactttttaagttttatttttagttttaattatttaattaatatgtattttataaccattccaatttacgtgagtaaaaagtggctttccactttgagtagaatgaggccccttcacctcattcatgattatcatctcaaccttgttaaattttatttacattgttgaaagattgaaaacaattatcaaaatttaggcaatataaatcagatgaatgtttaaggggatttcagcaaaaagtaggaaaggttaaagccaggcgacattgtatagattctacataataattttttgaaacttctttgactgttttgactcaactacttattgattcaaagcaagtacttcacttttaaaacatttttattttctattgctgttcaaagagtcctagaaacatccatggtatgaataaaggaaaacgatactttaagtgtccgagctgagtatcattacaatttataatattgttcccttatgcacctgaatgccaatattccctttttcagagttatatagaatatgaattaaaaatgactagcttcctattttatatagacatttacctctagaaatgtttaaaaggttaggattgatgctgtctttaagcagaaataatttgaacttactgtcttctctcatgtgttggacttaagtgaatgacaagagaagaaaacatgtagactagacttggaagatgaacgcatactgatacaatcaatccatttcctgtctacttcccaacctaaggcaagaagtggaatttaatgatgtacccaccatgtttagttctactcagttgtttctttttgtattaagtaattgtttctcctcattctcaataagttggttcagatttgctgttcttcctcgtataaaatgttaaatgagattcccatttttatattttcaaatgttgtgtctagagatcaaaataaatattcttcccta

SEQ ID NO: 135096 - DNA, 1388 bp, Homo sapiens
  Payload ID: 6402
  Gene Symbol: FOXP2
  Gene Name:: forkhead box P2
  ENST ID: ENST00000462331
  CDS Start-End: 375-578
cttgaacctttgtcacccctcacgttgcacaccaaagacataccctagtgattaaatgctgattttgtgtacgattgtccacggacgccaaaacaatcacagagctgcttgatttgttttaattaccagcacaaaatgccatcagtctgggacgtgatcgggcagaggtgtactcacagtagtgtaaatactgctgtaaatagttgtctgatggtggctttgacagtgagctagcttctgagttttcccttctttttatactgttttctgtgctggcttttttgaatcttcctaatttttcatctctttaacaaactcctatgaagttgaaaccgggaagtttgctctaacatttccagagaaggtattaagtcatgatgcaggaatctgcgacagagacaataagcaacagttcaatgaatcaaaatggaatgagcactctaagcagccaattagatgctggcagcagagatggaagatcaagtggtgacaccagctctgaagtaagcacagtagaactgctgcatctgcaacaacagcaggaggatgttgtctcttacacccaggttatttgttaaagtctttggatctatacttaactgatgacctagaagagcgattctcaaaagtgtgagtcctggaccagcagcaacagcatcaccgggaacttgttagaaatgcacattctcaggccactccctagacctactgaatcagaaaccctggggttggagctcagcaattaccctgcaggtaattctgatgcatgctcaagtttgagaaccactggcctagaagaaatgaactactgcaacttatgaggaatcatgagatccagctcacttttgctcaatacctatcaaaagcttgtcccagagtgattatggaggattgcatgcaggatacacacttcattaaatcctctaaaatctaactttgattaattaagtacagggttattgctgatagcctcataactctaccaccattataatggatctatataaaattgcttaatatcagtagcctaaatttaggagcactatagttttaaaaatacttaattggctactttatttaacaatgttttagggatgtcgttcagtatcttttccagtgtttgctacctaagatcccattggggtaaaaatataactcagatttcactgttaggaatagttctgtttgtgagcaacttacttcctttcatcttacacaatgaaccttgtaatttaattatgattttctcttcatacgagctgttagaaagctcagcattaaatttgtggctcacctctagcaaatatataacacttaatgatgtgactgtcctgattctaaaactttttctcttggttttttactttttaaataaaaacacatttaac

SEQ ID NO: 135097 - DNA, 1858 bp, Homo sapiens
  Payload ID: 6402
  Gene Symbol: FOXP2
  Gene Name: forkhead box P2
  ENST ID: ENST00000634623
  CDS Start-End: 90-1858
gtgatgctgggattgaattttcctaggactccgtttcaaggttaattcgaaagtcttgtggaagatctggaagaaacaggtattaagtcatgatgcaggaatctgcgacagagacaataagcaacagttcaatgaatcaaaatggaatgagcactctaagcagccaattagatgctggcagcagagatggaagatcaagtggtgacaccagctctgaagtaagcacagtagaactgctgcatctgcaacaacagcaggctctccaggcagcaagacaacttcttttacagcagcaaacaagtggattgaaatctcctaagagcagtgataaacagagaccactgcaggtgcctgtgtcagtggccatgatgactccccaggtgatcacccctcagcaaatgcagcagatccttcagcaacaagtcctgtctcctcagcagctacaagcccttctccaacaacagcaggctgtcatgctgcagcagcagcagcaacagcagcagcagcaacaacagcagcaacaacagcagcagcaacaacaacaacaacagcagcaacaacagcagcagcagcagcaacagcagcagcagcagcaacagcatcctggaaagcaagcgaaagagcagcagcagcagcagcagcagcagcaacagcaattggcagcccagcagcttgtcttccagcagcagcttctccagatgcaacaactccagcagcagcagcatctgctcagccttcagcgtcagggactcatctccattccacctggccaggcagcacttcctgtccaatcgctgcctcaagctggcttaagtcctgctgagattcagcagttatggaaagaagtgactggagttcacagtatggaagacaatggcattaaacatggagggctagacctcactactaacaattcctcctcgactacctcctccaacacttccaaagcatcaccaccaataactcatcattccatagtgaatggacagtcttcagttctaagtgcaagacgagacagctcgtcacatgaggagactggggcctctcacactctctatggccatggagtttgcaaatggccaggctgtgaaagcatttgtgaagattttggacagtttttaaagcaccttaacaatgaacacgcattggatgaccgaagcactgctcagtgtcgagtgcaaatgcaggtggtgcaacagttagaaatacagctttctaaagaacgcgaacgtcttcaagcaatgatgacccacttgcacatgcgaccctcagagcccaaaccatctcccaaacctctaaatctggtgtctagtgtcaccatgtcgaagaatatgttggagacatccccacagagcttacctcaaacccctaccacaccaacggccccagtcaccccgattacccagggaccctcagtaatcaccccagccagtgtgcccaatgtgggagccatacgaaggcgacattcagacaaatacaacattcccatgtcatcagaaattgccccaaactatgaattttataaaaatgcagatgtcagacctccatttacttatgcaactctcataaggcaggctatcatggagtcatctgacaggcagttaacacttaatgaaatttacagctggtttacacggacatttgcttacttcaggcgtaatgcagcaacttggaagaatgcagtacgtcataatcttagcctgcacaagtgttttgttcgagtagaaaatgttaaaggagcagtatggactgtggatgaagtagaataccagaagcgaaggtcacaaaagataacaggaagtccaaccttagtaaaaaatatacctaccagtttaggctatggagcagctcttaatgc

SEQ ID NO: 135098 - DNA, 685 bp, Homo sapiens
  Payload ID: 6402
  Gene Symbol: FOXP2
  Gene Name: forkhead box P2
  ENST ID: ENST00000635563
  CDS Start-End: 1-685
agcttttgcagcagcagcagcaacagcagcagcagcaacaacagcagcaacaacagcagcagcaacaacaacaacaacagcagcaacaacagcagcagcagcagcaacagcagcagcagcagcaacagcatcctggaaagcaagcgaaagagcagcagcaacagcaattggcagcccagcagcttgtcttccagcagcagcttctccagatgcaacaactccagcagcagcagcatctgctcagccttcagcgtcagggactcatctccattccacctggccaggcagcacttcctgtccaatcgctgcctcaagctggcttaagtcctgctgagattcagcagttatggaaagaagtgactggagttcacagtatggaagacaatggcattaaacatggagggctagacctcactactaacaattcctcctcgactacctcctccaacacttccaaagcatcaccaccaataactcatcattccatagtgaatggacagtcttcagttctaagtgcaagacgagacagctcgtcacatgaggagactggggcctctcacactctctatggccatggagtttgcaaatggccaggctgtgaaagcatttgtgaagattttggacagtttttaaagcaccttaacaatgaacacgcattggatgaccgaagcactgctcagtgtcg

SEQ ID NO: 135099 - DNA, 2598 bp, Homo sapiens
  Payload ID: 6402
  Gene Symbol: FOXP2
  Gene Name: forkhead box P2
  ENST ID: ENST00000635638
  CDS Start-End: 339-2489
gtgtggaccctcacttgctgtgggtgttggggcctctctagagcagggaggaaaagttaccctcactattctcagactctggaatctcttagatcaaacaaataatagaagtctgttgaagctttgtcctgacctatcctggaagtagaagaatactctggagaaaggagcattgtaagcacaaagaataagattcctcaatcctgagagagagaattaaagtctaactctccaaatgtctactctaatgtgatgctgggattgaattttcctaggactccgtttcaaggttaattcgaaagtcttgtggaagatctggaagaaacaggtattaagtcatgatgcaggaatctgcgacagagacaataagcaacagttcaatgaatcaaaatggaatgagcactctaagcagccaattagatgctggcagcagagatggaagatcaagtggtgacaccagctctgaagtaagcacagtagaactgctgcatctgcaacaacagcaggctctccaggcagcaagacaacttcttttacagcagcaaacaagtggattgaaatctcctaagagcagtgataaacagagaccactgcaggtgcctgtgtcagtggccatgatgactccccaggtgatcacccctcagcaaatgcagcagatccttcagcaacaagtcctgtctcctcagcagctacaagcccttctccaacaacagcaggctgtcatgctgcagcagcaacaactacaagagttttacaagaaacagcaagagcagttacatcttcagcttttgcagcagcagcagcaacagcagcagcagcaacaacagcagcaacaacagcagcagcaacaacaacaacaacagcagcaacaacagcagcagcagcagcaacagcagcagcagcagcaacagcatcctggaaagcaagcgaaagagcagcagcagcagcagcagcagcagcaacagcaattggcagcccagcagcttgtcttccagcagcagcttctccagatgcaacaactccagcagcagcagcatctgctcagccttcagcgtcagggactcatctccattccacctggccaggcagcacttcctgtccaatcgctgcctcaagctggcttaagtcctgctgagattcagcagttatggaaagaagtgactggagttcacagtatggaagacaatggcattaaacatggagggctagacctcactactaacaattcctcctcgactacctcctccaacacttccaaagcatcaccaccaataactcatcattccatagtgaatggacagtcttcagttctaagtgcaagacgagacagctcgtcacatgaggagactggggcctctcacactctctatggccatggagtttgcaaatggccaggctgtgaaagcatttgtgaagattttggacagtttttaaagcaccttaacaatgaacacgcattggatgaccgaagcactgctcagtgtcgagtgcaaatgcaggtggtgcaacagttagaaatacagctttctaaagaacgcgaacgtcttcaagcaatgatgacccacttgcacatgcgaccctcagagcccaaaccatctcccaaacctctaaatctggtgtctagtgtcaccatgtcgaagaatatgttggagacatccccacagagcttacctcaaacccctaccacaccaacggccccagtcaccccgattacccagggaccctcagtaatcaccccagccagtgtgcccaatgtgggagccatacgaaggcgacattcagacaaatacaacattcccatgtcatcagaaattgccccaaactatgaattttataaaaatgcagatgtcagacctccatttacttatgcaactctcataaggcaggctatcatggagtcatctgacaggcagttaacacttaatgaaatttacagctggtttacacggacatttgcttacttcaggcgtaatgcagcaacttggaagaatgcagtacgtcataatcttagcctgcacaagtgttttgttcgagtagaaaatgttaaaggagcagtatggactgtggatgaagtagaataccagaagcgaaggtcacaaaagataacaggaagtccaaccttagtaaaaaatatacctaccagtttaggctatggagcagctcttaatgccagtttgcaggctgccttggcagagagcagtttacctttgctaagtaatcctggactgataaataatgcatccagtggcctactgcaggccgtccacgaagacctcaatggttctctggatcacattgacagcaatggaaacagtagtccgggctgctcacctcagccgcacatacattcaatccacgtcaaggaagagccagtgattgcagaggatgaagactgcccaatgtccttagtgacaacagctaatcacagtccagaattagaagacgacagagagattgaagaagagcctttatctgaagatctggaatgagaactgacttgtgaaacctcagcgtgaagggacatatcactgaccttcataaccactccacaaccatgaatatttgacaaatttttactgtgactatttattaagcatg

SEQ ID NO: 135100 - DNA, 4065 bp, Homo sapiens
  Payload ID: 6402
  Gene Symbol: FOXP2
  Gene Name: forkhead box P2
  ENST ID: ENST00000634411
  CDS Start-End: 150-2246
aagattcctcaatcctgagagagagaattaaagtctaactctccaaatgtctactctaatgtgatgctgggattgaattttcctaggactccgtttcaaggttaattcgaaagtcttgtggaagatctggaagaaacaggtattaagtcatgatgcaggaatctgcgacagagacaataagcaacagttcaatgaatcaaaatggaatgagcactctaagcagccaattagatgctggcagcagagatggaagatcaagtggtgacaccagctctgaagtaagcacagtagaactgctgcatctgcaacaacagcaggctctccaggcagcaagacaacttcttttacagcagcaaacaagtggattgaaatctcctaagagcagtgataaacagagaccactgcaggtgcctgtgtcagtggccatgatgactccccaggtgatcacccctcagcaaatgcagcagatccttcagcaacaagtcctgtctcctcagcagctacaagcccttctccaacaacagcaggctgtcatgctgcagcagcttttgcagcagcagcagcaacagcagcagcagcaacaacagcagcaacaacagcagcagcaacaacaacaacaacagcagcaacaacagcagcagcagcagcaacagcagcagcagcagcaacagcatcctggaaagcaagcgaaagagcagcagcagcagcagcagcagcaacagcaattggcagcccagcagcttgtcttccagcagcagcttctccagatgcaacaactccagcagcagcagcatctgctcagccttcagcgtcagggactcatctccattccacctggccaggcagcacttcctgtccaatcgctgcctcaagctggcttaagtcctgctgagattcagcagttatggaaagaagtgactggagttcacagtatggaagacaatggcattaaacatggagggctagacctcactactaacaattcctcctcgactacctcctccaacacttccaaagcatcaccaccaataactcatcattccatagtgaatggacagtcttcagttctaagtgcaagacgagacagctcgtcacatgaggagactggggcctctcacactctctatggccatggagtttgcaaatggccaggctgtgaaagcatttgtgaagattttggacagtttttaaagcaccttaacaatgaacacgcattggatgaccgaagcactgctcagtgtcgagtgcaaatgcaggtggtgcaacagttagaaatacagctttctaaagaacgcgaacgtcttcaagcaatgatgacccacttgcacatgcgaccctcagagcccaaaccatctcccaaacctctaaatctggtgtctagtgtcaccatgtcgaagaatatgttggagacatccccacagagcttacctcaaacccctaccacaccaacggccccagtcaccccgattacccagggaccctcagtaatcaccccagccagtgtgcccaatgtgggagccatacgaaggcgacattcagacaaatacaacattcccatgtcatcagaaattgccccaaactatgaattttataaaaatgcagatgtcagacctccatttacttatgcaactctcataaggcaggctatcatggagtcatctgacaggcagttaacacttaatgaaatttacagctggtttacacggacatttgcttacttcaggcgtaatgcagcaacttggaagaatgcagtacgtcataatcttagcctgcacaagtgttttgttcgagtagaaaatgttaaaggagcagtatggactgtggatgaagtagaataccagaagcgaaggtcacaaaagataacaggaagtccaaccttagtaaaaaatatacctaccagtttaggctatggagcagctcttaatgccagtttgcaggctgccttggcagagagcagtttacctttgctaagtaatcctggactgataaataatgcatccagtggcctactgcaggccgtccacgaagacctcaatggttctctggatcacattgacagcaatggaaacagtagtccgggctgctcacctcagccgcacatacattcaatccacgtcaaggaagagccagtgattgcagaggatgaagactgcccaatgtccttagtgacaacagctaatcacagtccagaattagaagacgacagagagattgaagaagagcctttatctgaagatctggaatgagaactgacttgtgaaacctcagcgtgaagggacatatcactgaccttcataaccactccacaaccatgaatatttgacaaatttttactgtgactatttattaagcatggataaaggagacagccctaaaggaacttactaagccagccctttgggattcagtaccaacaggcaaattgcttgttttcttcttcttcttcttctttttttttttttttttagaaaaaaagacaaaaactgattttcttgaaaaaaaaaaatgaactgttctttctataatggctttgcccatttaaaaaatgtggctcttaagggttcatgaaatgactgaatatgaggatacatgtcctgtagaaagcaaatgcgcctcatatactgccaaaaatagtgttagtttcattaatgtgaattttccagcattcagtagttgtaatgttagaaacaattgctggtcaagttcaacttgttgctattgtttttaatttgcacaggagtagtatcagaaattagtgtcactgcttgtatctagctgaattttaaacaacagaacattagttttttatgttggtgccaccaactgtaaatgacataagttagttattacaaaacacagtaattagactgttgcaaccatctaaaaccttaggcttccagtctgtgctgttagtgttaagatgtaaagtgcaatcctaagctaacattatctgtgcaagcaccatagaaacatttgcatatctgcatagatcttacaactgtactctttacctccttgtgataaagctttgtctacctgcaaacacagtcaaaggctacagctgcaaaccaaagccaactctaaccatggccaagagctcaaggacagaagcagccacatgctttggtcagccttctgtaacttcaattagtacaaaggaaccttttccatgaactacctgctgttttctgatgacctctgggatcttttcatttagccctaaacaaagaaacaaatatgacaaaaaccacaactaaaaaatgttaattcagtcacagagtaatcttctgaggccaaaagtccatctaaatgcaatgaagatttgctttcattaaagacagaggtgaggacaaaatccgcagtggaagttatgatatgctagaaagcaacaaatgtggatcactgaccaaaacgattatgtacttgatgcaaatgcagattgcatattgttatatatatagtactttgtgtttttgttttccctcattcagtcagttattttcagtggtgaatacatgttgttagaagatgtcttgtatggtcttaatctttgttgtgtactatttttttatagtcttaagttataatgaaaaaacaaaaagtaggaaccaaacataaaaggtctagtaaagccaaaaattaatttcatattgattttaaagtgatctagctgagtttttacactgaaagcaaagattatagcaattgtagtccatggtatttattttcagtcaaaccaaagttacatataattctgcctctgcttatacgggatattaacactaacaatacactcccttcaaagacttgcacaggccaaattgttggaatgctggttttcttgacaattccaaaccccaaaactatgataatgagttatgatgtagttgaaaatagcatagtcagatgtttgcttaaaacctagaaacttaacatgttgcttttcatgtgctgtgccaagtcttgataatactttttcccccaaccaagggacctcataacctgattatggttattgctttacaaacagttttgacagaaggtggctgctagagcttaacatac

SEQ ID NO: 135101 - DNA, 4290 bp, Homo sapiens
  Payload ID: 6402
  Gene Symbol: FOXP2
  Gene Name: forkhead box P2
  ENST ID: ENST00000635534
  CDS Start-End: 153-2291
gagcttgtttatgatgcaagccagtataaacacagtcggaggatgacacagatagctgcacttttcccagtgacatgagcaagttcttactgcaacaccaacagctttttcctctgaccagtttgacattcttcaccttcaggtattaagtcatgatgcaggaatctgcgacagagacaataagcaacagttcaatgaatcaaaatggaatgagcactctaagcagccaattagatgctggcagcagagatggaagatcaagtggtgacaccagctctgaagtaagcacagtagaactgctgcatctgcaacaacagcaggctctccaggcagcaagacaacttcttttacagcagcaaacaagtggattgaaatctcctaagagcagtgataaacagagaccactgcaggtgcctgtgtcagtggccatgatgactccccaggtgatcacccctcagcaaatgcagcagatccttcagcaacaagtcctgtctcctcagcagctacaagcccttctccaacaacagcaggctgtcatgctgcagcaggattttttggattctggattggaaaatttcagagctgccttggaaaaaaatcagcagcagcaacagcagcagcagcaacaacagcagcaacaacagcagcagcaacaacaacaacaacagcagcaacaacagcagcagcagcagcaacagcagcagcagcagcaacagcatcctggaaagcaagcgaaagagcagcagcagcagcagcagcagcaacagcaattggcagcccagcagcttgtcttccagcagcagcttctccagatgcaacaactccagcagcagcagcatctgctcagccttcagcgtcagggactcatctccattccacctggccaggcagcacttcctgtccaatcgctgcctcaagctggcttaagtcctgctgagattcagcagttatggaaagaagtgactggagttcacagtatggaagacaatggcattaaacatggagggctagacctcactactaacaattcctcctcgactacctcctccaacacttccaaagcatcaccaccaataactcatcattccatagtgaatggacagtcttcagttctaagtgcaagacgagacagctcgtcacatgaggagactggggcctctcacactctctatggccatggagtttgcaaatggccaggctgtgaaagcatttgtgaagattttggacagtttttaaagcaccttaacaatgaacacgcattggatgaccgaagcactgctcagtgtcgagtgcaaatgcaggtggtgcaacagttagaaatacagctttctaaagaacgcgaacgtcttcaagcaatgatgacccacttgcacatgcgaccctcagagcccaaaccatctcccaaacctctaaatctggtgtctagtgtcaccatgtcgaagaatatgttggagacatccccacagagcttacctcaaacccctaccacaccaacggccccagtcaccccgattacccagggaccctcagtaatcaccccagccagtgtgcccaatgtgggagccatacgaaggcgacattcagacaaatacaacattcccatgtcatcagaaattgccccaaactatgaattttataaaaatgcagatgtcagacctccatttacttatgcaactctcataaggcaggctatcatggagtcatctgacaggcagttaacacttaatgaaatttacagctggtttacacggacatttgcttacttcaggcgtaatgcagcaacttggaagaatgcagtacgtcataatcttagcctgcacaagtgttttgttcgagtagaaaatgttaaaggagcagtatggactgtggatgaagtagaataccagaagcgaaggtcacaaaagataacaggaagtccaaccttagtaaaaaatatacctaccagtttaggctatggagcagctcttaatgccagtttgcaggctgccttggcagagagcagtttacctttgctaagtaatcctggactgataaataatgcatccagtggcctactgcaggccgtccacgaagacctcaatggttctctggatcacattgacagcaatggaaacagtagtccgggctgctcacctcagccgcacatacattcaatccacgtcaaggaagagccagtgattgcagaggatgaagactgcccaatgtccttagtgacaacagctaatcacagtccagaattagaagacgacagagagattgaagaagagcctttatctgaagatctggaatgagaactgacttgtgaaacctcagcgtgaagggacatatcactgaccttcataaccactccacaaccatgaatatttgacaaatttttactgtgactatttattaagcatggataaaggagacagccctaaaggaacttactaagccagccctttgggattcagtaccaacaggcaaattgcttgttttcttcttcttcttcttctttttttttttttttttagaaaaaaagacaaaaactgattttcttgaaaaaaaaaaatgaactgttctttctataatggctttgcccatttaaaaaatgtggctcttaagggttcatgaaatgactgaatatgaggatacatgtcctgtagaaagcaaatgcgcctcatatactgccaaaaatagtgttagtttcattaatgtgaattttccagcattcagtagttgtaatgttagaaacaattgctggtcaagttcaacttgttgctattgtttttaatttgcacaggagtagtatcagaaattagtgtcactgcttgtatctagctgaattttaaacaacagaacattagttttttatgttggtgccaccaactgtaaatgacataagttagttattacaaaacacagtaattagactgttgcaaccatctaaaaccttaggcttccagtctgtgctgttagtgttaagatgtaaagtgcaatcctaagctaacattatctgtgcaagcaccatagaaacatttgcatatctgcatagatcttacaactgtactctttacctccttgtgataaagctttgtctacctgcaaacacagtcaaaggctacagctgcaaaccaaagccaactctaaccatggccaagagctcaaggacagaagcagccacatgctttggtcagccttctgtaacttcaattagtacaaaggaaccttttccatgaactacctgctgttttctgatgacctctgggatcttttcatttagccctaaacaaagaaacaaatatgacaaaaaccacaactaaaaaatgttaattcagtcacagagtaatcttctgaggccaaaagtccatctaaatgcaatgaagatttgctttcattaaagacagaggtgaggacaaaatccgcagtggaagttatgatatgctagaaagcaacaaatgtggatcactgaccaaaacgattatgtacttgatgcaaatgcagattgcatattgttatatatatagtactttgtgtttttgttttccctcattcagtcagttattttcagtggtgaatacatgttgttagaagatgtcttgtatggtcttaatctttgttgtgtactatttttttatagtcttaagttataatgaaaaaacaaaaagtaggaaccaaacataaaaggtctagtaaagccaaaaattaatttcatattgattttaaagtgatctagctgagtttttacactgaaagcaaagattatagcaattgtagtccatggtatttattttcagtcaaaccaaagttacatataattctgcctctgcttatacgggatattaacactaacaatacactcccttcaaagacttgcacaggccaaattgttggaatgctggttttcttgacaattccaaaccccaaaactatgataatgagttatgatgtagttgaaaatagcatagtcagatgtttgcttaaaacctagaaacttaacatgttgcttttcatgtgctgtgccaagtcttgataatactttttcccccaaccaagggacctcataacctgattatggttattgctttacaaacagttttgacagaaggtggctgctagagcttaacatacgttcccgttccatgtgatggaaccggttcttgcaaactaagctcatcattgattctttgctgaagtcagcaaatagagttagagagatacccagtcatctatcacaccaaataaaaggacataacggctttcaaaagggttttcccacttacccaaaaggctttctgaaagcttctacct

SEQ ID NO: 135102 - DNA, 2504 bp, Homo sapiens
  Payload ID: 6402
  Gene Symbol: FOXP2
  Gene Name: forkhead box P2
  ENST ID: ENST00000635109
  CDS Start-End: 102-365
gtctactctaatgtgatgctgggattgaattttcctaggactccgtttcaaggttaattcgaaagtcttgtggaagatctggaagaaacaggtattaagtcatgatgcaggaatctgcgacagagacaataagcaacagttcaatgaatcaaaatggaatgagcactctaagcagccaattagatgctggcagcagagatggaagatcaagtggtgacaccagctctgaagtaagcacagtagaactgctgcatctgcaacaacagcaggctctccaggcagcaagacaacttcttttacagcagcaaacaagtggattgaaatctcctaagagcagtgataaacagagaccactgcagccatgagacagacttgtggttcttcaacagctgtgcagagcagagacgtaaatttaaggtgcctgtgtcagtggccatgatgactccccaggtgatcacccctcagcaaatgcagcagatccttcagcaacaagtcctgtctcctcagcagctacaagcccttctccaacaacagcaggctgtcatgctgcagcagcaacaactacaagagttttacaagaaacagcaagagcagttacatcttcagcttttgcagcagcagcagcaacagcagcagcagcaacaacagcagcaacaacagcagcagcaacaacaacaacaacagcagcaacaacagcagcagcagcagcaacagcagcagcagcagcaacagcatcctggaaagcaagcgaaagagcagcagcagcagcagcagcagcagcaacagcaattggcagcccagcagcttgtcttccagcagcagcttctccagatgcaacaactccagcagcagcagcatctgctcagccttcagcgtcagggactcatctccattccacctggccaggcagcacttcctgtccaatcgctgcctcaagctggcttaagtcctgctgagattcagcagttatggaaagaagtgactggagttcacagtatggaagacaatggcattaaacatggagggctagacctcactactaacaattcctcctcgactacctcctccaacacttccaaagcatcaccaccaataactcatcattccatagtgaatggacagtcttcagttctaagtgcaagacgagacagctcgtcacatgaggagactggggcctctcacactctctatggccatggagtttgcaaatggccaggctgtgaaagcatttgtgaagattttggacagtttttaaagcaccttaacaatgaacacgcattggatgaccgaagcactgctcagtgtcgagtgcaaatgcaggtggtgcaacagttagaaatacagctttctaaagaacgcgaacgtcttcaagcaatgatgacccacttgcacatgcgaccctcagagcccaaaccatctcccaaacctctaaatctggtgtctagtgtcaccatgtcgaagaatatgttggagacatccccacagagcttacctcaaacccctaccacaccaacggccccagtcaccccgattacccagggaccctcagtaatcaccccagccagtgtgcccaatgtgggagccatacgaaggcgacattcagacaaatacaacattcccatgtcatcagaaattgccccaaactatgaattttataaaaatgcagatgtcagacctccatttacttatgcaactctcataaggcaggctatcatggagtcatctgacaggcagttaacacttaatgaaatttacagctggtttacacggacatttgcttacttcaggcgtaatgcagcaacttggaagaatgcagtacgtcataatcttagcctgcacaagtgttttgttcgagtagaaaatgttaaaggagcagtatggactgtggatgaagtagaataccagaagcgaaggtcacaaaagataacaggaagtccaaccttagtaaaaaatatacctaccagtttaggctatggagcagctcttaatgccagtttgcaggctgccttggcagagagcagtttacctttgctaagtaatcctggactgataaataatgcatccagtggcctactgcaggccgtccacgaagacctcaatggttctctggatcacattgacagcaatggaaacagtagtccgggctgctcacctcagccgcacatacattcaatccacgtcaaggaagagccagtgattgcagaggatgaagactgcccaatgtccttagtgacaacagctaatcacagtccagaattagaagacgacagagagattgaagaagagcctttatctgaagatctggaatgagaactgacttgtgaaacctcagcgtgaagggacatatcactgaccttcataaccactccacaaccatgaatatttgacaaatttttactgtgactatttattaagcatggataaaggagacagccctaaaggaacttactaagccagccctttgggattcagtaccaacaggcaaattgcttgttttcttcttc

SEQ ID NO: 135103 - DNA, 1326 bp, Homo sapiens
  Payload ID: 6403
  Gene Symbol: FOXP3
  Gene Name: forkhead box P3
  ENST ID: ENST00000376197
  CDS Start-End: 1-1326
atgtcccccatctcaggagcctcgcccagctggagggctgcacccaaagcctcagacctgctgggggcccggggcccagggggaaccttccagggccgagatcttcgaggcggggcccatgcctcctcttcttccttgaaccccatgccaccatcgcagctgcagctctcaacggtggatgcccacgcccggacccctgtgctgcaggtgcaccccctggagagcccagccatgatcagcctcacaccacccaccaccgccactggggtcttctccctcaaggcccggcctggcctcccacctgggatcaacgtggccagcctggaatgggtgtccagggagccggcactgctctgcaccttcccaaatcccagtgcacccaggaaggacagcaccctttcggctgtgccccagagctcctacccactgctggcaaatggtgtctgcaagtggcccggatgtgagaaggtcttcgaagagccagaggacttcctcaagcactgccaggcggaccatcttctggatgagaagggcagggcacaatgtctcctccagagagagatggtacagtctctggagcagcagctggtgctggagaaggagaagctgagtgccatgcaggcccacctggctgggaaaatggcactgaccaaggcttcatctgtggcatcatccgacaagggctcctgctgcatcgtagctgctggcagccaaggccctgtcgtcccagcctggtctggcccccgggaggcccctgacagcctgtttgctgtccggaggcacctgtggggtagccatggaaacagcacattcccagagttcctccacaacatggactacttcaagttccacaacatgcgaccccctttcacctacgccacgctcatccgctgggccatcctggaggctccagagaagcagcggacactcaatgagatctaccactggttcacacgcatgtttgccttcttcagaaaccatcctgccacctggaaggtgagctcctctgaggtggcggtgactgggatggcctcaagtgccatcgcagctcaaagtgggcaggcctgggtctgggctcataggcacattggggaggaacgggatgtgggttgttggtggtggctgctggcctcagaggttgacgcccacctgctccctgtccccggccttccacagaacgccatccgccacaacctgagtctgcacaagtgctttgtgcgggtggagagcgagaagggggctgtgtggaccgtggatgagctggagttccgcaagaaacggagccagaggcccagcaggtgttccaaccctacacctggcccctga

SEQ ID NO: 135104 - DNA, 2274 bp, Homo sapiens
  Payload ID: 6403
  Gene Symbol: FOXP3
  Gene Name: forkhead box P3
  Uniprot ID: Q9BZS1
  ENST ID: ENST00000376199
  CDS Start-End: 189-1379
gcacacactcatcgaaaaaaatttggattattagaagagagaggtctgcggcttccacaccgtacagcgtggtttttcttctcggtataaaagcaaagttgtttttgatacgtgacagtttcccacaagccaggctgatccttttctgtcagtccacttcaccaagcctgcccttggacaaggacccgatgcccaaccccaggcctggcaagccctcggccccttccttggcccttggcccatccccaggagcctcgcccagctggagggctgcacccaaagcctcagacctgctgggggcccggggcccagggggaaccttccagggccgagatcttcgaggcggggcccatgcctcctcttcttccttgaaccccatgccaccatcgcagctgcagctctcaacggtggatgcccacgcccggacccctgtgctgcaggtgcaccccctggagagcccagccatgatcagcctcacaccacccaccaccgccactggggtcttctccctcaaggcccggcctggcctcccacctgggatcaacgtggccagcctggaatgggtgtccagggagccggcactgctctgcaccttcccaaatcccagtgcacccaggaaggacagcaccctttcggctgtgccccagagctcctacccactgctggcaaatggtgtctgcaagtggcccggatgtgagaaggtcttcgaagagccagaggacttcctcaagcactgccaggcggaccatcttctggatgagaagggcagggcacaatgtctcctccagagagagatggtacagtctctggagcagcagctggtgctggagaaggagaagctgagtgccatgcaggcccacctggctgggaaaatggcactgaccaaggcttcatctgtggcatcatccgacaagggctcctgctgcatcgtagctgctggcagccaaggccctgtcgtcccagcctggtctggcccccgggaggcccctgacagcctgtttgctgtccggaggcacctgtggggtagccatggaaacagcacattcccagagttcctccacaacatggactacttcaagttccacaacatgcgaccccctttcacctacgccacgctcatccgctgggccatcctggaggctccagagaagcagcggacactcaatgagatctaccactggttcacacgcatgtttgccttcttcagaaaccatcctgccacctggaagaacgccatccgccacaacctgagtctgcacaagtgctttgtgcgggtggagagcgagaagggggctgtgtggaccgtggatgagctggagttccgcaagaaacggagccagaggcccagcaggtgttccaaccctacacctggcccctgacctcaagatcaaggaaaggaggatggacgaacaggggccaaactggtgggaggcagaggtggtgggggcagggatgataggccctggatgtgcccacagggaccaagaagtgaggtttccactgtcttgcctgccagggcccctgttcccccgctggcagccaccccctcccccatcatatcctttgccccaaggctgctcagaggggccccggtcctggccccagcccccacctccgccccagacacaccccccagtcgagccctgcagccaaacagagccttcacaaccagccacacagagcctgcctcagctgctcgcacagattacttcagggctggaaaagtcacacagacacacaaaatgtcacaatcctgtccctcactcaacacaaaccccaaaacacagagagcctgcctcagtacactcaaacaacctcaaagctgcatcatcacacaatcacacacaagcacagccctgacaacccacacaccccaaggcacgcacccacagccagcctcagggcccacaggggcactgtcaacacaggggtgtgcccagaggcctacacagaagcagcgtcagtaccctcaggatctgaggtcccaacacgtgctcgctcacacacacggcctgttagaattcacctgtgtatctcacgcatatgcacacgcacagccccccagtgggtctcttgagtcccgtgcagacacacacagccacacacactgccttgccaaaaataccccgtgtctcccctgccactcacctcactcccattccctgagccctgatccatgcctcagcttagactgcagaggaactactcatttatttgggatccaaggcccccaacccacagtaccgtccccaataaactgcagccgagctcccc

SEQ ID NO: 135105 - DNA, 2382 bp, Homo sapiens
  Payload ID: 6403
  Gene Symbol: FOXP3
  Gene Name: forkhead box P3
  Uniprot ID: Q9BZS1
  ENST ID: ENST00000376207
  CDS Start-End: 189-1484
gcacacactcatcgaaaaaaatttggattattagaagagagaggtctgcggcttccacaccgtacagcgtggtttttcttctcggtataaaagcaaagttgtttttgatacgtgacagtttcccacaagccaggctgatccttttctgtcagtccacttcaccaagcctgcccttggacaaggacccgatgcccaaccccaggcctggcaagccctcggccccttccttggcccttggcccatccccaggagcctcgcccagctggagggctgcacccaaagcctcagacctgctgggggcccggggcccagggggaaccttccagggccgagatcttcgaggcggggcccatgcctcctcttcttccttgaaccccatgccaccatcgcagctgcagctgcccacactgcccctagtcatggtggcaccctccggggcacggctgggccccttgccccacttacaggcactcctccaggacaggccacatttcatgcaccagctctcaacggtggatgcccacgcccggacccctgtgctgcaggtgcaccccctggagagcccagccatgatcagcctcacaccacccaccaccgccactggggtcttctccctcaaggcccggcctggcctcccacctgggatcaacgtggccagcctggaatgggtgtccagggagccggcactgctctgcaccttcccaaatcccagtgcacccaggaaggacagcaccctttcggctgtgccccagagctcctacccactgctggcaaatggtgtctgcaagtggcccggatgtgagaaggtcttcgaagagccagaggacttcctcaagcactgccaggcggaccatcttctggatgagaagggcagggcacaatgtctcctccagagagagatggtacagtctctggagcagcagctggtgctggagaaggagaagctgagtgccatgcaggcccacctggctgggaaaatggcactgaccaaggcttcatctgtggcatcatccgacaagggctcctgctgcatcgtagctgctggcagccaaggccctgtcgtcccagcctggtctggcccccgggaggcccctgacagcctgtttgctgtccggaggcacctgtggggtagccatggaaacagcacattcccagagttcctccacaacatggactacttcaagttccacaacatgcgaccccctttcacctacgccacgctcatccgctgggccatcctggaggctccagagaagcagcggacactcaatgagatctaccactggttcacacgcatgtttgccttcttcagaaaccatcctgccacctggaagaacgccatccgccacaacctgagtctgcacaagtgctttgtgcgggtggagagcgagaagggggctgtgtggaccgtggatgagctggagttccgcaagaaacggagccagaggcccagcaggtgttccaaccctacacctggcccctgacctcaagatcaaggaaaggaggatggacgaacaggggccaaactggtgggaggcagaggtggtgggggcagggatgataggccctggatgtgcccacagggaccaagaagtgaggtttccactgtcttgcctgccagggcccctgttcccccgctggcagccaccccctcccccatcatatcctttgccccaaggctgctcagaggggccccggtcctggccccagcccccacctccgccccagacacaccccccagtcgagccctgcagccaaacagagccttcacaaccagccacacagagcctgcctcagctgctcgcacagattacttcagggctggaaaagtcacacagacacacaaaatgtcacaatcctgtccctcactcaacacaaaccccaaaacacagagagcctgcctcagtacactcaaacaacctcaaagctgcatcatcacacaatcacacacaagcacagccctgacaacccacacaccccaaggcacgcacccacagccagcctcagggcccacaggggcactgtcaacacaggggtgtgcccagaggcctacacagaagcagcgtcagtaccctcaggatctgaggtcccaacacgtgctcgctcacacacacggcctgttagaattcacctgtgtatctcacgcatatgcacacgcacagccccccagtgggtctcttgagtcccgtgcagacacacacagccacacacactgccttgccaaaaataccccgtgtctcccctgccactcacctcactcccattccctgagccctgatccatgcctcagcttagactgcagaggaactactcatttatttgggatccaaggcccccaacccacagtaccgtccccaataaactgcagccgagctccccaca

SEQ ID NO: 135106 - DNA, 2448 bp, Homo sapiens
  Payload ID: 6403
  Gene Symbol: FOXP3
  Gene Name: forkhead box P3
  ENST ID: ENST00000455775
  CDS Start-End: 189-1553
gcacacactcatcgaaaaaaatttggattattagaagagagaggtctgcggcttccacaccgtacagcgtggtttttcttctcggtataaaagcaaagttgtttttgatacgtgacagtttcccacaagccaggctgatccttttctgtcagtccacttcaccaagcctgcccttggacaaggacccgatgcccaaccccaggcctggcaagccctcggccccttccttggcccttggcccatccccaggagcctcgcccagctggagggctgcacccaaagcctcagacctgctgggggcccggggcccagggggaaccttccagggccgagatcttcgaggcggggcccatgcctcctcttcttccttgaaccccatgccaccatcgcagctgcagctgcccacactgcccctagtcatggtggcaccctccggggcacggctgggccccttgccccacttacaggcactcctccaggacaggccacatttcatgcaccagctctcaacggtggatgcccacgcccggacccctgtgctgcaggtgcaccccctggagagcccagccatgatcagcctcacaccacccaccaccgccactggggtcttctccctcaaggcccggcctggcctcccacctgggatcaacgtggccagcctggaatgggtgtccagggagccggcactgctctgcaccttcccaaatcccagtgcacccaggaaggacaggtcagtggacagggctgggaaggatcctcgccctcctatcccctcccctgacaccctctgtccccccagcaccctttcggctgtgccccagagctcctacccactgctggcaaatggtgtctgcaagtggcccggatgtgagaaggtcttcgaagagccagaggacttcctcaagcactgccaggcggaccatcttctggatgagaagggcagggcacaatgtctcctccagagagagatggtacagtctctggagcagcagctggtgctggagaaggagaagctgagtgccatgcaggcccacctggctgggaaaatggcactgaccaaggcttcatctgtggcatcatccgacaagggctcctgctgcatcgtagctgctggcagccaaggccctgtcgtcccagcctggtctggcccccgggaggcccctgacagcctgtttgctgtccggaggcacctgtggggtagccatggaaacagcacattcccagagttcctccacaacatggactacttcaagttccacaacatgcgaccccctttcacctacgccacgctcatccgctgggccatcctggaggctccagagaagcagcggacactcaatgagatctaccactggttcacacgcatgtttgccttcttcagaaaccatcctgccacctggaagaacgccatccgccacaacctgagtctgcacaagtgctttgtgcgggtggagagcgagaagggggctgtgtggaccgtggatgagctggagttccgcaagaaacggagccagaggcccagcaggtgttccaaccctacacctggcccctgacctcaagatcaaggaaaggaggatggacgaacaggggccaaactggtgggaggcagaggtggtgggggcagggatgataggccctggatgtgcccacagggaccaagaagtgaggtttccactgtcttgcctgccagggcccctgttcccccgctggcagccaccccctcccccatcatatcctttgccccaaggctgctcagaggggccccggtcctggccccagcccccacctccgccccagacacaccccccagtcgagccctgcagccaaacagagccttcacaaccagccacacagagcctgcctcagctgctcgcacagattacttcagggctggaaaagtcacacagacacacaaaatgtcacaatcctgtccctcactcaacacaaaccccaaaacacagagagcctgcctcagtacactcaaacaacctcaaagctgcatcatcacacaatcacacacaagcacagccctgacaacccacacaccccaaggcacgcacccacagccagcctcagggcccacaggggcactgtcaacacaggggtgtgcccagaggcctacacagaagcagcgtcagtaccctcaggatctgaggtcccaacacgtgctcgctcacacacacggcctgttagaattcacctgtgtatctcacgcatatgcacacgcacagccccccagtgggtctcttgagtcccgtgcagacacacacagccacacacactgccttgccaaaaataccccgtgtctcccctgccactcacctcactcccattccctgagccctgatccatgcctcagcttagactgcagaggaactactcatttatttgggatccaaggcccccaacccacagtaccgtccccaataaactgcagccgagctcccc

SEQ ID NO: 135107 - DNA, 1213 bp, Homo sapiens
  Payload ID: 6403
  Gene Symbol: FOXP3
  Gene Name: forkhead box P3
  Uniprot ID: Q9BZS1
  ENST ID: ENST00000518685
  CDS Start-End: 23-1213
cctgcccttggacaaggacccgatgcccaaccccaggcctggcaagccctcggccccttccttggcccttggcccatccccaggagcctcgcccagctggagggctgcacccaaagcctcagacctgctgggggcccggggcccagggggaaccttccagggccgagatcttcgaggcggggcccatgcctcctcttcttccttgaaccccatgccaccatcgcagctgcagctctcaacggtggatgcccacgcccggacccctgtgctgcaggtgcaccccctggagagcccagccatgatcagcctcacaccacccaccaccgccactggggtcttctccctcaaggcccggcctggcctcccacctgggatcaacgtggccagcctggaatgggtgtccagggagccggcactgctctgcaccttcccaaatcccagtgcacccaggaaggacagcaccctttcggctgtgccccagagctcctacccactgctggcaaatggtgtctgcaagtggcccggatgtgagaaggtcttcgaagagccagaggacttcctcaagcactgccaggcggaccatcttctggatgagaagggcagggcacaatgtctcctccagagagagatggtacagtctctggagcagcagctggtgctggagaaggagaagctgagtgccatgcaggcccacctggctgggaaaatggcactgaccaaggcttcatctgtggcatcatccgacaagggctcctgctgcatcgtagctgctggcagccaaggccctgtcgtcccagcctggtctggcccccgggaggcccctgacagcctgtttgctgtccggaggcacctgtggggtagccatggaaacagcacattcccagagttcctccacaacatggactacttcaagttccacaacatgcgaccccctttcacctacgccacgctcatccgctgggccatcctggaggctccagagaagcagcggacactcaatgagatctaccactggttcacacgcatgtttgccttcttcagaaaccatcctgccacctggaagaacgccatccgccacaacctgagtctgcacaagtgctttgtgcgggtggagagcgagaagggggctgtgtggaccgtggatgagctggagttccgcaagaaacggagccagaggcccagcaggtgttccaaccctacacctggcccctga

SEQ ID NO: 135108 - DNA, 1371 bp, Homo sapiens
  Payload ID: 6403
  Gene Symbol: FOXP3
  Gene Name: forkhead box P3
  Uniprot ID: Q9BZS1
  ENST ID: ENST00000557224
  CDS Start-End: 1-1371
atgcccaaccccaggcctggcaagccctcggccccttccttggcccttggcccatccccaggagcctcgcccagctggagggctgcacccaaagcctcagacctgctgggggcccggggcccagggggaaccttccagggccgagatcttcgaggcggggcccatgcctcctcttcttccttgaaccccatgccaccatcgcagctgcagctctcaacggtggatgcccacgcccggacccctgtgctgcaggtgcaccccctggagagcccagccatgatcagcctcacaccacccaccaccgccactggggtcttctccctcaaggcccggcctggcctcccacctgggatcaacgtggccagcctggaatgggtgtccagggagccggcactgctctgcaccttcccaaatcccagtgcacccaggaaggacagcaccctttcggctgtgccccagagctcctacccactgctggcaaatggtgtctgcaagtggcccggatgtgagaaggtcttcgaagagccagaggacttcctcaagcactgccaggcggaccatcttctggatgagaagggcagggcacaatgtctcctccagagagagatggtacagtctctggagcagcagctggtgctggagaaggagaagctgagtgccatgcaggcccacctggctgggaaaatggcactgaccaaggcttcatctgtggcatcatccgacaagggctcctgctgcatcgtagctgctggcagccaaggccctgtcgtcccagcctggtctggcccccgggaggcccctgacagcctgtttgctgtccggaggcacctgtggggtagccatggaaacagcacattcccagagttcctccacaacatggactacttcaagttccacaacatgcgaccccctttcacctacgccacgctcatccgctgggccatcctggaggctccagagaagcagcggacactcaatgagatctaccactggttcacacgcatgtttgccttcttcagaaaccatcctgccacctggaaggtgagctcctctgaggtggcggtgactgggatggcctcaagtgccatcgcagctcaaagtgggcaggcctgggtctgggctcataggcacattggggaggaacgggatgtgggttgttggtggtggctgctggcctcagaggttgacgcccacctgctccctgtccccggccttccacagaacgccatccgccacaacctgagtctgcacaagtgctttgtgcgggtggagagcgagaagggggctgtgtggaccgtggatgagctggagttccgcaagaaacggagccagaggcccagcaggtgttccaaccctacacctggcccctga

SEQ ID NO: 135109 - DNA, 3745 bp, Homo sapiens
  Payload ID: 6404
  Gene Symbol: FOXP4
  Gene Name: forkhead box P4
  Uniprot ID: Q8IVH2
  ENST ID: ENST00000307972
  CDS Start-End: 13-2055
cgctagagcgacatgatggtggaatctgcctcggagacaatcaggtcggctccatctggtcagaatggcgtgggcagcctctctgggcaagccgatggcagcagcggcggggccacagggacaactgcaagtggcacgggcagggaagtgaccacgggtgcagacagcaatggtgagatgagtcccgcagagctgctgcacttccagcagcaacaggctctccaagtggcccggcagttcctgctgcagcaggcctcaggcctgagctccccagggaacaatgacagcaaacagtctgcctctgctgtgcaggtgcctgtgtcggtggccatgatgtcgccgcagatgcttaccccgcaacagatgcagcagatcctgtcgcccccgcagctgcaggccttgctccagcagcagcaagccctcatgctccagcagctacaggagtactacaagaagcagcaggagcagctccacctgcagctcctcacccagcagcaggctgggaaaccgcagcccaaagaggcactggggaacaagcagctggccttccagcagcagctcctgcaaatgcaacagttgcagcagcagcacctgctcaacctgcagaggcaggggctggtcagcctgcagcccaaccaagcctcggggcccctccagacccttccgcaagcagctgtttgcccaacagacctgccccagctgtggaagggcgagggtgcccccgggcagcctgccgaggacagcgtcaagcaggaggggctggacctcactggcacggccgccaccgctacctcgtttgccgctccccccaaggtctcaccccccctctcccaccataccctgcccaacggacagcctactgtgctcacatctcggagagacagctcttcccacgaggagacccccggctcccaccccctgtacggacacggagagtgcaagtggccaggctgtgagaccctgtgtgaagacctgggccagtttatcaaacacctcaacacagagcacgccctggatgaccggagtacagcccagtgccgggtacagatgcaggtggtgcagcagctggagatccagctcgccaaggagagcgagcggctgcaggccatgatggcccacctgcacatgcggccctcggagcccaagcccttcagccagccactgaacccggtccccggctcctcctcattctccaaggtgaccgtctctgcagcagactcattcccagatggtctcgtgcaccccccgacctcggccgcagcccctgtcacccctctacggccccctggcctgggctctgcctccctgcatggtgggggcccagcccgtcggagaagcagtgacaagttctgctcccccatctcctcagagctggcccagaatcatgagttctacaagaacgccgacgtccggccccccttcacctacgcctccctcatccgccaggccatcctggaaacccctgacaggcagctgaccctgaatgagatctataactggttcaccaggatgttcgcctatttccgcagaaacactgccacctggaagaacgccgtgcgccacaacctcagcctgcacaagtgcttcgtccgcgtggagaacgtcaagggtgccgtgtggactgtggacgagcgggagtatcagaagcggagaccgccaaagatgacagggagccccaccctggtgaagaacatgatctctggcctcagctatggagcacttaatgccagctaccaggccgccctggccgagagcagcttccccctcctcaacagccctggcatgctgaaccctggctccgccagcagcctgctgcccctcagccacgatgacgtgggtgcccccgtggagccgctgcccagcaacggcagcagcagccctcctcgcctctccccgccccagtacagccaccaggtgcaggtgaaggaggagccagcagaggcagaggaagacaggcagcccgggcctcccctgggcgcccctaaccccagcgcctcggggcctccggaagacagggacctggaggaggagctgccgggagaagaactgtcctaagggcctgtagtgaccggcagggctggggtgagacccctcccttccagaatccaggccccatctcccccaactccacagcccctcccgagcctcaaggcaagtccaggactcagaccggggaggcccgggccagcagctcccagtgtgacctgacaaaaacacgtaggggcagggacggtccccacccccagggacacaacccctggtcttggaccagtagaggacacggagggttcagacccctcctcagaccctccccacatctgaaactgcctccccccaaccaccagcagcagcagggccctcctcccccaccagctctccccacagggcccctcagcatcatggagacccgcaggcggggcttagccacccctcaaacccagggccccctggcacctggctctggccgtgttttctggccagaggcccccactttcctaactcgtgctcccttccgccttcttttccgtactgtgaagaaagaactctccaccccagctcccaccctgccctggcctgggtggaggaactgtgcctccatccccagaagaaacagccccctctgctgctggggtgggactgtctgtgtgccctgtgggggtccgtgtgagcaggcccacctggctccagacccgcccccaacctgagacagaaccaggctgagccaggcctccacccccacccccgtttgctgggggctcctccagccgcccccatgggaagaggcctggtaccgcctcacccacagaggtctgtgccaggtgcgcttctgcaggtggagccaagctctccctgaggccagaggcggggcctgggccgggagcccaggggaaggccaggctggaccccggctccacacccacatccagcctgcaggcctctctgcagtcctctcaccctccctcagctccccttcctctgcagtcaccctcagctccccttccttgcccgcctctccccccgccgccccaccagttaaacggatgaccaaagacctttcttatgccggaagcaaaaaccaaaactttttgttggctttttcctttgtcgcctccccagcacctgccctcccagtctcccaccccggccccaggctggaagccctccctccacttaagttattgttttaaaccaaagtttacagtgtctgttggtggccaagaccttctctctccacccctcctccatccaccctgaggaccctggggctcagtggaggcagggccctgcccccctcccttccgctcctgcccagcctgggggaaggagaaaggaggggagaaagcgggctctcaccccctcaggagtgggcacgggagcccttctccctgaccctgggctgcttcctgggggctctccagacccctctctaggaccaagtcacccgtcgtgctgggagtgtggattctagcaaaagagctggaaaaaagtcagactctccacagaccccctatgggggacccccaactcaaggccaaggactgggcgtatcggatgctcataacacccctggcctggcccctttactgagaagactccttggatatttcccaagaaccccccacatacacccctcacaagccacccctcctgagaggcagggggccctccgccccctccccatgtattccccacctgtgttccgtttgaccagcacagaaatattaaacgtcctctattcaccggg

SEQ ID NO: 135110 - DNA, 3300 bp, Homo sapiens
  Payload ID: 6404
  Gene Symbol: FOXP4
  Gene Name: forkhead box P4
  Uniprot ID: Q8IVH2
  ENST ID: ENST00000373057
  CDS Start-End: 237-2273
gcgagccaagcagcccacaaagtgccatgccccggcggggttgaggcgcgcggcggtcggcccggcgcgctgggaggacgcccgggagctgcgcgacgcggggcggcgcggaagggcagccccggcgggcggcggcgggcccgggctgcgaccggagcgagccccatgccccgcgcgggctgacgggccggagcccgcacggagcggccgggcgggacaggtaccgctagagcgacatgatggtggaatctgcctcggagacaatcaggtcggctccatctggtcagaatggcgtgggcagcctctctgggcaagccgatggcagcagcggcggggccacagggacaactgcaagtggcacgggcagggaagtgaccacgggtgcagacagcaatggtgagatgagtcccgcagagctgctgcacttccagcagcaacaggctctccaagtggcccggcagttcctgctgcagcaggcctcaggcctgagctccccagggaacaatgacagcaaacagtctgcctctgctgtgcaggtgcctgtgtcggtggccatgatgtcgccgcagatgcttaccccgcaacagatgcagcagatcctgtcgcccccgcagctgcaggccttgctccagcagcagcaagccctcatgctccagcaggagtactacaagaagcagcaggagcagctccacctgcagctcctcacccagcagcaggctgggaaaccgcagcccaaagaggcactggggaacaagcagctggccttccagcagcagctcctgcaaatgcaacagttgcagcagcagcacctgctcaacctgcagaggcaggggctggtcagcctgcagcccaaccaagcctcggggcccctccagacccttccgcaagcagctgtttgcccaacagacctgccccagctgtggaagggcgagggtgcccccgggcagcctgccgaggacagcgtcaagcaggaggggctggacctcactggcacggccgccaccgctacctcgtttgccgctccccccaaggtctcaccccccctctcccaccataccctgcccaacggacagcctactgtgctcacatctcggagagacagctcttcccacgaggagacccccggctcccaccccctgtacggacacggagagtgcaagtggccaggctgtgagaccctgtgtgaagacctgggccagtttatcaaacacctcaacacagagcacgccctggatgaccggagtacagcccagtgccgggtacagatgcaggtggtgcagcagctggagatccagctcgccaaggagagcgagcggctgcaggccatgatggcccacctgcacatgcggccctcggagcccaagcccttcagccagccactgaacccggtccccggctcctcctcattctccaaggtgaccgtctctgcagcagactcattcccagatggtctcgtgcaccccccgacctcggccgcagcccctgtcacccctctacggccccctggcctgggctctgcctccctgcatggtgggggcccagcccgtcggagaagcagtgacaagttctgctcccccatctcctcagagctggcccagaatcatgagttctacaagaacgccgacgtccggccccccttcacctacgcctccctcatccgccaggccatcctggaaacccctgacaggcagctgaccctgaatgagatctataactggttcaccaggatgttcgcctatttccgcagaaacactgccacctggaagaacgccgtgcgccacaacctcagcctgcacaagtgcttcgtccgcgtggagaacgtcaagggtgccgtgtggactgtggacgagcgggagtatcagaagcggagaccgccaaagatgacagggagccccaccctggtgaagaacatgatctctggcctcagctatggagcacttaatgccagctaccaggccgccctggccgagagcagcttccccctcctcaacagccctggcatgctgaaccctggctccgccagcagcctgctgcccctcagccacgatgacgtgggtgcccccgtggagccgctgcccagcaacggcagcagcagccctcctcgcctctccccgccccagtacagccaccaggtgcaggtgaaggaggagccagcagaggcagaggaagacaggcagcccgggcctcccctgggcgcccctaaccccagcgcctcggggcctccggaagacagggacctggaggaggagctgccgggagaagaactgtcctaagggcctgtagtgaccggcagggctggggtgagacccctcccttccagaatccaggccccatctcccccaactccacagcccctcccgagcctcaaggcaagtccaggactcagaccggggaggcccgggccagcagctcccagtgtgacctgacaaaaacacgtaggggcagggacggtccccacccccagggacacaacccctggtcttggaccagtagaggacacggagggttcagacccctcctcagaccctccccacatctgaaactgcctccccccaaccaccagcagcagcagggccctcctcccccaccagctctccccacagggcccctcagcatcatggagacccgcaggcggggcttagccacccctcaaacccagggccccctggcacctggctctggccgtgttttctggccagaggcccccactttcctaactcgtgctcccttccgccttcttttccgtactgtgaagaaagaactctccaccccagctcccaccctgccctggcctgggtggaggaactgtgcctccatccccagaagaaacagccccctctgctgctggggtgggactgtctgtgtgccctgtgggggtccgtgtgagcaggcccacctggctccagacccgcccccaacctgagacagaaccaggctgagccaggcctccacccccacccccgtttgctgggggctcctccagccgcccccatgggaagaggcctggtaccgcctcacccacagaggtctgtgccaggtgcgcttctgcaggtggagccaagctctccctgaggccagaggcggggcctgggccgggagcccaggggaaggccaggctggaccccggctccacacccacatccagcctgcaggcctctctgcagtcctctcaccctccctcagctccccttcctctgcagtcaccctcagctccccttccttgcccgcctctccccccgccgccccaccagttaaacggatgaccaaagacctttcttatgccggaagcaaaaaccaaaa

SEQ ID NO: 135111 - DNA, 5948 bp, Homo sapiens
  Payload ID: 6404
  Gene Symbol: FOXP4
  Gene Name: forkhead box P4
  Uniprot ID: Q8IVH2
  ENST ID: ENST00000373060
  CDS Start-End: 459-2501
gccgtccctgcggaccggacagtgcggccggcggccggcggccgggacggagcccccagcccgcgaggagggcgcggcgcaggcggcggcggcgcggcggggaggagcccgggccggaaccagggctgggccgggggcggggacgccggggtccgggagcccgggagccggagcgagctgacgagcgtcgcggaaggaccgggaaggaagagcggagccggagcgagccaagcagcccacaaagtgccatgccccggcggggttgaggcgcgcggcggtcggcccggcgcgctgggaggacgcccgggagctgcgcgacgcggggcggcgcggaagggcagccccggcgggcggcggcgggcccgggctgcgaccggagcgagccccatgccccgcgcgggctgacgggccggagcccgcacggagcggccgggcgggacaggtaccgctagagcgacatgatggtggaatctgcctcggagacaatcaggtcggctccatctggtcagaatggcgtgggcagcctctctgggcaagccgatggcagcagcggcggggccacagggacaactgcaagtggcacgggcagggaagtgaccacgggtgcagacagcaatggtgagatgagtcccgcagagctgctgcacttccagcagcaacaggctctccaagtggcccggcagttcctgctgcagcaggcctcaggcctgagctccccagggaacaatgacagcaaacagtctgcctctgctgtgcaggtgcctgtgtcggtggccatgatgtcgccgcagatgcttaccccgcaacagatgcagcagatcctgtcgcccccgcagctgcaggccttgctccagcagcagcaagccctcatgctccagcagctacaggagtactacaagaagcagcaggagcagctccacctgcagctcctcacccagcagcaggctgggaaaccgcagcccaaagaggcactggggaacaagcagctggccttccagcagcagctcctgcaaatgcaacagttgcagcagcagcacctgctcaacctgcagaggcaggggctggtcagcctgcagcccaaccaagcctcggggcccctccagacccttccgcaagcagctgtttgcccaacagacctgccccagctgtggaagggcgagggtgcccccgggcagcctgccgaggacagcgtcaagcaggaggggctggacctcactggcacggccgccaccgctacctcgtttgccgctccccccaaggtctcaccccccctctcccaccataccctgcccaacggacagcctactgtgctcacatctcggagagacagctcttcccacgaggagacccccggctcccaccccctgtacggacacggagagtgcaagtggccaggctgtgagaccctgtgtgaagacctgggccagtttatcaaacacctcaacacagagcacgccctggatgaccggagtacagcccagtgccgggtacagatgcaggtggtgcagcagctggagatccagctcgccaaggagagcgagcggctgcaggccatgatggcccacctgcacatgcggccctcggagcccaagcccttcagccagccactgaacccggtccccggctcctcctcattctccaaggtgaccgtctctgcagcagactcattcccagatggtctcgtgcaccccccgacctcggccgcagcccctgtcacccctctacggccccctggcctgggctctgcctccctgcatggtgggggcccagcccgtcggagaagcagtgacaagttctgctcccccatctcctcagagctggcccagaatcatgagttctacaagaacgccgacgtccggccccccttcacctacgcctccctcatccgccaggccatcctggaaacccctgacaggcagctgaccctgaatgagatctataactggttcaccaggatgttcgcctatttccgcagaaacactgccacctggaagaacgccgtgcgccacaacctcagcctgcacaagtgcttcgtccgcgtggagaacgtcaagggtgccgtgtggactgtggacgagcgggagtatcagaagcggagaccgccaaagatgacagggagccccaccctggtgaagaacatgatctctggcctcagctatggagcacttaatgccagctaccaggccgccctggccgagagcagcttccccctcctcaacagccctggcatgctgaaccctggctccgccagcagcctgctgcccctcagccacgatgacgtgggtgcccccgtggagccgctgcccagcaacggcagcagcagccctcctcgcctctccccgccccagtacagccaccaggtgcaggtgaaggaggagccagcagaggcagaggaagacaggcagcccgggcctcccctgggcgcccctaaccccagcgcctcggggcctccggaagacagggacctggaggaggagctgccgggagaagaactgtcctaagggcctgtagtgaccggcagggctggggtgagacccctcccttccagaatccaggccccatctcccccaactccacagcccctcccgagcctcaaggcaagtccaggactcagaccggggaggcccgggccagcagctcccagtgtgacctgacaaaaacacgtaggggcagggacggtccccacccccagggacacaacccctggtcttggaccagtagaggacacggagggttcagacccctcctcagaccctccccacatctgaaactgcctccccccaaccaccagcagcagcagggccctcctcccccaccagctctccccacagggcccctcagcatcatggagacccgcaggcggggcttagccacccctcaaacccagggccccctggcacctggctctggccgtgttttctggccagaggcccccactttcctaactcgtgctcccttccgccttcttttccgtactgtgaagaaagaactctccaccccagctcccaccctgccctggcctgggtggaggaactgtgcctccatccccagaagaaacagccccctctgctgctggggtgggactgtctgtgtgccctgtgggggtccgtgtgagcaggcccacctggctccagacccgcccccaacctgagacagaaccaggctgagccaggcctccacccccacccccgtttgctgggggctcctccagccgcccccatgggaagaggcctggtaccgcctcacccacagaggtctgtgccaggtgcgcttctgcaggtggagccaagctctccctgaggccagaggcggggcctgggccgggagcccaggggaaggccaggctggaccccggctccacacccacatccagcctgcaggcctctctgcagtcctctcaccctccctcagctccccttcctctgcagtcaccctcagctccccttccttgcccgcctctccccccgccgccccaccagttaaacggatgaccaaagacctttcttatgccggaagcaaaaaccaaaactttttgttggctttttcctttgtcgcctccccagcacctgccctcccagtctcccaccccggccccaggctggaagccctccctccacttaagttattgttttaaaccaaagtttacagtgtctgttggtggccaagaccttctctctccacccctcctccatccaccctgaggaccctggggctcagtggaggcagggccctgcccccctcccttccgctcctgcccagcctgggggaaggagaaaggaggggagaaagcgggctctcaccccctcaggagtgggcacgggagcccttctccctgaccctgggctgcttcctgggggctctccagacccctctctaggaccaagtcacccgtcgtgctgggagtgtggattctagcaaaagagctggaaaaaagtcagactctccacagaccccctatgggggacccccaactcaaggccaaggactgggcgtatcggatgctcataacacccctggcctggcccctttactgagaagactccttggatatttcccaagaaccccccacatacacccctcacaagccacccctcctgagaggcagggggccctccgccccctccccatgtattccccacctgtgttccgtttgaccagcacagaaatattaaacgtcctctattcaccgggccctgtgtgtgtcaccgaggtgcgggaggggaggagcattaaagctgaaagatcgctctgctcggggagcctgggcagagcagcagcaacgtgagggtcgctgtggtggtggtttctgtgagtggatggaatgagcagccctgcaggggcgctgggcatgtgccctcactgtggacagggcccacccacctccggttcccctgtgcctcctgtcccttccacgcttaaacagggttctctgtcattttcctgttttcttccagagtcccaatcctttgccctagttctttcactagtttgaaatccaagttcttgccagagtgttggagcaaggcagctgatttgctgcagggatggagaggaccaccgccgcagggttcttttacctgtgccaccagctctggagacatccacacccattcccaggtgtccttccaggcccattgtccacgtcttcaagggggctgcctggataggcgtgtgtgtgtgtagtgcccaggtgtggtggtggcatcctgaagcagtaggaccattagtgtgcgtgcacacccacgtggcacactgtgtggtgaccatggtcatcatagtgggctcacggcggaaacgggatcattcaacctatacaaaggggaccctggataggctgcaaggaaagaggccaagggccaagctgctaagccaaagatggcccctgacacctcccccagccccagcacaccagcctgcacctcttatcccgtgttaagtcctggttccccacctgctgcccctcctcaacacagagcccctcccgccgcctcagacccctgtgcacatccccagggcctcagccgtctcattggtctttattttttattttttttaagatggagtttcgctcttattgcccagactggagtgcagtgatgctatctcggctcactgcaacctttgcctcccaggttcaagtgattctcctgcctcagcctcccaagtagctgggattacaggcgtgcaccaccacgccgggctaaatttttttgtatttttagtagagacggggtttctctatgttggtcaggctgatctcgaactcccgacctcaggtgatccgccagcctcagcctcccaaagtgctgggattacaggcgtgagccactgcacccggctctcactggtcttacgccaccttctggacactccctccttgagggcagaaaggagtcccaggcctgtccctagggacaaggcccagggaagagtgtatttggggagcaggggaggggagggtgttgagaaagctgaactggagtcaatcacccttcccacaaatcaccaaactgctggaactctccagccaaatgctgggagaaggacctggagggtgagtctttgctgacctctctctactctcaggcatgtcttttgtccttttcgtccatctatttctgtctgtcgctcactcgccccgctttctctgtctcaccttcatccactctgcaggcctgctccaccacagccctaatcctctggacgcttgtgtagggcctggggtgaattccctgtcccccatggtacctcgagaggggctggggagctcagcttggtctcagagtctccccaccagatactgtttaaaaaagtagcactgatgtgttttgtaatctgcccctcccagccctccgtggaggctgccagggccttgtacggtaaacctagctgcatgtaatctgtggacaatggcattctctacaatgcaataaaaacaattacccatg

SEQ ID NO: 135112 - DNA, 5910 bp, Homo sapiens
  Payload ID: 6404
  Gene Symbol: FOXP4
  Gene Name: forkhead box P4
  Uniprot ID: Q8IVH2
  ENST ID: ENST00000373063
  CDS Start-End: 459-2462
gccgtccctgcggaccggacagtgcggccggcggccggcggccgggacggagcccccagcccgcgaggagggcgcggcgcaggcggcggcggcgcggcggggaggagcccgggccggaaccagggctgggccgggggcggggacgccggggtccgggagcccgggagccggagcgagctgacgagcgtcgcggaaggaccgggaaggaagagcggagccggagcgagccaagcagcccacaaagtgccatgccccggcggggttgaggcgcgcggcggtcggcccggcgcgctgggaggacgcccgggagctgcgcgacgcggggcggcgcggaagggcagccccggcgggcggcggcgggcccgggctgcgaccggagcgagccccatgccccgcgcgggctgacgggccggagcccgcacggagcggccgggcgggacaggtaccgctagagcgacatgatggtggaatctgcctcggagacaatcaggtcggctccatctggtcagaatggcgtgggcagcctctctgggcaagccgatggcagcagcggcggggccacagggacaactgcaagtggcacgggcagggaagtgaccacgggtgcagacagcaatggtgagatgagtcccgcagagctgctgcacttccagcagcaacaggctctccaagtggcccggcagttcctgctgcagcaggcctcaggcctgagctccccagggaacaatgacagcaaacagtctgcctctgctgtgcaggtgcctgtgtcggtggccatgatgtcgccgcagatgcttaccccgcaacagatgcagcagatcctgtcgcccccgcagctgcaggccttgctccagcagcagcaagccctcatgctccagcagctacaggagtactacaagaagcagcaggagcagctccacctgcagctcctcacccagcagcaggctgggaaaccgcagcccaaagaggcactggggaacaagcagctggccttccagcagcagctcctgcaaatgcaacagttgcagcagcagcacctgctcaacctgcagaggcaggggctggtcagcctgcagcccaaccaagcctcggggcccctccagacccttccgcaagctgtttgcccaacagacctgccccagctgtggaagggcgagggtgcccccgggcagcctgccgaggacagcgtcaagcaggaggggctggacctcactggcacggccgccaccgctacctcgtttgccgctccccccaaggtctcaccccccctctcccaccataccctgcccaacggacagcctactgtgctcacatctcggagagacagctcttcccacgaggagacccccggctcccaccccctgtacggacacggagagtgcaagtggccaggctgtgagaccctgtgtgaagacctgggccagtttatcaaacacctcaacacagagcacgccctggatgaccggagtacagcccagtgccgggtacagatgcaggtggtgcagcagctggagatccagctcgccaaggagagcgagcggctgcaggccatgatggcccacctgcacatgcggccctcggagcccaagcccttcagccagccagtgaccgtctctgcagcagactcattcccagatggtctcgtgcaccccccgacctcggccgcagcccctgtcacccctctacggccccctggcctgggctctgcctccctgcatggtgggggcccagcccgtcggagaagcagtgacaagttctgctcccccatctcctcagagctggcccagaatcatgagttctacaagaacgccgacgtccggccccccttcacctacgcctccctcatccgccaggccatcctggaaacccctgacaggcagctgaccctgaatgagatctataactggttcaccaggatgttcgcctatttccgcagaaacactgccacctggaagaacgccgtgcgccacaacctcagcctgcacaagtgcttcgtccgcgtggagaacgtcaagggtgccgtgtggactgtggacgagcgggagtatcagaagcggagaccgccaaagatgacagggagccccaccctggtgaagaacatgatctctggcctcagctatggagcacttaatgccagctaccaggccgccctggccgagagcagcttccccctcctcaacagccctggcatgctgaaccctggctccgccagcagcctgctgcccctcagccacgatgacgtgggtgcccccgtggagccgctgcccagcaacggcagcagcagccctcctcgcctctccccgccccagtacagccaccaggtgcaggtgaaggaggagccagcagaggcagaggaagacaggcagcccgggcctcccctgggcgcccctaaccccagcgcctcggggcctccggaagacagggacctggaggaggagctgccgggagaagaactgtcctaagggcctgtagtgaccggcagggctggggtgagacccctcccttccagaatccaggccccatctcccccaactccacagcccctcccgagcctcaaggcaagtccaggactcagaccggggaggcccgggccagcagctcccagtgtgacctgacaaaaacacgtaggggcagggacggtccccacccccagggacacaacccctggtcttggaccagtagaggacacggagggttcagacccctcctcagaccctccccacatctgaaactgcctccccccaaccaccagcagcagcagggccctcctcccccaccagctctccccacagggcccctcagcatcatggagacccgcaggcggggcttagccacccctcaaacccagggccccctggcacctggctctggccgtgttttctggccagaggcccccactttcctaactcgtgctcccttccgccttcttttccgtactgtgaagaaagaactctccaccccagctcccaccctgccctggcctgggtggaggaactgtgcctccatccccagaagaaacagccccctctgctgctggggtgggactgtctgtgtgccctgtgggggtccgtgtgagcaggcccacctggctccagacccgcccccaacctgagacagaaccaggctgagccaggcctccacccccacccccgtttgctgggggctcctccagccgcccccatgggaagaggcctggtaccgcctcacccacagaggtctgtgccaggtgcgcttctgcaggtggagccaagctctccctgaggccagaggcggggcctgggccgggagcccaggggaaggccaggctggaccccggctccacacccacatccagcctgcaggcctctctgcagtcctctcaccctccctcagctccccttcctctgcagtcaccctcagctccccttccttgcccgcctctccccccgccgccccaccagttaaacggatgaccaaagacctttcttatgccggaagcaaaaaccaaaactttttgttggctttttcctttgtcgcctccccagcacctgccctcccagtctcccaccccggccccaggctggaagccctccctccacttaagttattgttttaaaccaaagtttacagtgtctgttggtggccaagaccttctctctccacccctcctccatccaccctgaggaccctggggctcagtggaggcagggccctgcccccctcccttccgctcctgcccagcctgggggaaggagaaaggaggggagaaagcgggctctcaccccctcaggagtgggcacgggagcccttctccctgaccctgggctgcttcctgggggctctccagacccctctctaggaccaagtcacccgtcgtgctgggagtgtggattctagcaaaagagctggaaaaaagtcagactctccacagaccccctatgggggacccccaactcaaggccaaggactgggcgtatcggatgctcataacacccctggcctggcccctttactgagaagactccttggatatttcccaagaaccccccacatacacccctcacaagccacccctcctgagaggcagggggccctccgccccctccccatgtattccccacctgtgttccgtttgaccagcacagaaatattaaacgtcctctattcaccgggccctgtgtgtgtcaccgaggtgcgggaggggaggagcattaaagctgaaagatcgctctgctcggggagcctgggcagagcagcagcaacgtgagggtcgctgtggtggtggtttctgtgagtggatggaatgagcagccctgcaggggcgctgggcatgtgccctcactgtggacagggcccacccacctccggttcccctgtgcctcctgtcccttccacgcttaaacagggttctctgtcattttcctgttttcttccagagtcccaatcctttgccctagttctttcactagtttgaaatccaagttcttgccagagtgttggagcaaggcagctgatttgctgcagggatggagaggaccaccgccgcagggttcttttacctgtgccaccagctctggagacatccacacccattcccaggtgtccttccaggcccattgtccacgtcttcaagggggctgcctggataggcgtgtgtgtgtgtagtgcccaggtgtggtggtggcatcctgaagcagtaggaccattagtgtgcgtgcacacccacgtggcacactgtgtggtgaccatggtcatcatagtgggctcacggcggaaacgggatcattcaacctatacaaaggggaccctggataggctgcaaggaaagaggccaagggccaagctgctaagccaaagatggcccctgacacctcccccagccccagcacaccagcctgcacctcttatcccgtgttaagtcctggttccccacctgctgcccctcctcaacacagagcccctcccgccgcctcagacccctgtgcacatccccagggcctcagccgtctcattggtctttattttttattttttttaagatggagtttcgctcttattgcccagactggagtgcagtgatgctatctcggctcactgcaacctttgcctcccaggttcaagtgattctcctgcctcagcctcccaagtagctgggattacaggcgtgcaccaccacgccgggctaaatttttttgtatttttagtagagacggggtttctctatgttggtcaggctgatctcgaactcccgacctcaggtgatccgccagcctcagcctcccaaagtgctgggattacaggcgtgagccactgcacccggctctcactggtcttacgccaccttctggacactccctccttgagggcagaaaggagtcccaggcctgtccctagggacaaggcccagggaagagtgtatttggggagcaggggaggggagggtgttgagaaagctgaactggagtcaatcacccttcccacaaatcaccaaactgctggaactctccagccaaatgctgggagaaggacctggagggtgagtctttgctgacctctctctactctcaggcatgtcttttgtccttttcgtccatctatttctgtctgtcgctcactcgccccgctttctctgtctcaccttcatccactctgcaggcctgctccaccacagccctaatcctctggacgcttgtgtagggcctggggtgaattccctgtcccccatggtacctcgagaggggctggggagctcagcttggtctcagagtctccccaccagatactgtttaaaaaagtagcactgatgtgttttgtaatctgcccctcccagccctccgtggaggctgccagggccttgtacggtaaacctagctgcatgtaatctgtggacaatggcattctctacaatgcaataaaaacaattacccatga

SEQ ID NO: 135113 - DNA, 3341 bp, Homo sapiens
  Payload ID: 6404
  Gene Symbol: FOXP4
  Gene Name: forkhead box P4
  ENST ID: ENST00000409208
  CDS Start-End: 312-2318
ggggtccgggagcccgggagccggagcgagctgacgagcgtcgcggaaggaccgggaaggaagagcggagccggagcgagccaagcagcccacaaagtgccatgccccggcggggttgaggcgcgcggcggtcggcccggcgcgctgggaggacgcccgggagctgcgcgacgcggggcggcgcggaagggcagccccggcgggcggcggcgggcccgggctgcgaccggagcgagccccatgccccgcgcgggctgacgggccggagcccgcacggagcggccgggcgggacaggtaccgctagagcgacatgatggtggaatctgcctcggagacaatcaggtcggctccatctggtcagaatggcgtgggcagcctctctgggcaagccgatggcagcagcggcggggccacagggacaactgcaagtggcacgggcagggaagtgaccacgggtgcagacagcaatggtgagatgagtcccgcagagctgctgcacttccagcagcaacaggctctccaagtggcccggcagttcctgctgcagcaggcctcaggcctgagctccccagggaacaatgacagcaaacagtctgcctctgctgtgcaggtgcctgtgtcggtggccatgatgtcgccgcagatgcttaccccgcaacagatgcagcagatcctgtcgcccccgcagctgcaggccttgctccagcagcagcaagccctcatgctccagcagctacaggagtactacaagaagcagcaggagcagctccacctgcagctcctcacccagcagcaggctgggaaaccgcagcccaaagaggcactggggaacaagcagctggccttccagcagcagctcctgcaaatgcaacagttgcagcagcagcacctgctcaacctgcagaggcaggggctggtcagcctgcagcccaaccaagcctcggggcccctccagacccttccgcaagcagctgtttgcccaacagacctgccccagctgtggaagggcgagggtgcccccgggcagcctgccgaggacagcgtcaagcaggaggggctggacctcactggcacggccgccaccgctacctcgtttgccgctccccccaaggtctcaccccccctctcccaccataccctgcccaacggacagcctactgtgctcacatctcggagagacagctcttcccacgaggagacccccggctcccaccccctgtacggacacggagagtgcaagtggccaggctgtgagaccctgtgtgaagacctgggccagtttatcaaacacctcaacacagagcacgccctggatgaccggagtacagcccagtgccgggtacagatgcaggtggtgcagcagctggagatccagctcgccaaggagagcgagcggctgcaggccatgatggcccacctgcacatgcggccctcggagcccaagcccttcagccagccagtgaccgtctctgcagcagactcattcccagatggtctcgtgcaccccccgacctcggccgcagcccctgtcacccctctacggccccctggcctgggctctgcctccctgcatggtgggggcccagcccgtcggagaagcagtgacaagttctgctcccccatctcctcagagctggcccagaatcatgagttctacaagaacgccgacgtccggccccccttcacctacgcctccctcatccgccaggccatcctggaaacccctgacaggcagctgaccctgaatgagatctataactggttcaccaggatgttcgcctatttccgcagaaacactgccacctggaagaacgccgtgcgccacaacctcagcctgcacaagtgcttcgtccgcgtggagaacgtcaagggtgccgtgtggactgtggacgagcgggagtatcagaagcggagaccgccaaagatgacagggagccccaccctggtgaagaacatgatctctggcctcagctatggagcacttaatgccagctaccaggccgccctggccgagagcagcttccccctcctcaacagccctggcatgctgaaccctggctccgccagcagcctgctgcccctcagccacgatgacgtgggtgcccccgtggagccgctgcccagcaacggcagcagcagccctcctcgcctctccccgccccagtacagccaccaggtgcaggtgaaggaggagccagcagaggcagaggaagacaggcagcccgggcctcccctgggcgcccctaaccccagcgcctcggggcctccggaagacagggacctggaggaggagctgccgggagaagaactgtcctaagggcctgtagtgaccggcagggctggggtgagacccctcccttccagaatccaggccccatctcccccaactccacagcccctcccgagcctcaaggcaagtccaggactcagaccggggaggcccgggccagcagctcccagtgtgacctgacaaaaacacgtaggggcagggacggtccccacccccagggacacaacccctggtcttggaccagtagaggacacggagggttcagacccctcctcagaccctccccacatctgaaactgcctccccccaaccaccagcagcagcagggccctcctcccccaccagctctccccacagggcccctcagcatcatggagacccgcaggcggggcttagccacccctcaaacccagggccccctggcacctggctctggccgtgttttctggccagaggcccccactttcctaactcgtgctcccttccgccttcttttccgtactgtgaagaaagaactctccaccccagctcccaccctgccctggcctgggtggaggaactgtgcctccatccccagaagaaacagccccctctgctgctggggtgggactgtctgtgtgccctgtgggggtccgtgtgagcaggcccacctggctccagacccgcccccaacctgagacagaaccaggctgagccaggcctccacccccacccccgtttgctgggggctcctccagccgcccccatgggaagaggcctggtaccgcctcacccacagaggtctgtgccaggtgcgcttctgcaggtggagccaagctctccctgaggccagaggcggggcctgggccgggagcccaggggaaggccaggctggaccccggctccacacccacatccagcctgcaggcctctctgcagtcctctcaccctccctcagctccccttcctctgcagtcaccctcagctccccttccttgcccgcctctccccccgccgccccaccagttaaacggatgaccaaagacctttcttatgccggaagcaaaaacc

SEQ ID NO: 135114 - DNA, 367 bp, Homo sapiens
  Payload ID: 6404
  Gene Symbol: FOXP4
  Gene Name: forkhead box P4
  ENST ID: ENST00000451305
  CDS Start-End: 105-367
ctggctgtgtgccccagattctactgtttcctgtctgatcccacaccttctgcattctcctttttcttctggagaatgagcccctcccgtggaggagccatggcatggagggagagttggggcccgcactctccagaggggaggcttacggacatcacaccagttcataccagctgctggggaatgctcagaaactgccctttcctccttggcctgacacagctctccaagtggcccggcagttcctgctgcagcaggcctcaggcctgagctccccagggaacaatgacagcaaacagtctgcctctgctgtgcaggtgcctgtgtcggtggccatgatgtcgccgcagatgcttaccccgcaaca

SEQ ID NO: 135115 - DNA, 1715 bp, Homo sapiens
  Payload ID: 6405
  Gene Symbol: FOXQ1
  Gene Name: forkhead box Q1
  Uniprot ID: Q9C009
  ENST ID: ENST00000296839
  CDS Start-End: 233-1444
ctcctccctctccgccccatagtccacccaacacttgcagcccctccagagaaaaagcccagcggaagaggactccggaaaagtgactatctcggaagaccagggtagagctcccgggagaaaaaggcgaagatccccggccccggatcgccatccccttccctggcaccagcttctctaggctgcgcgaaggaagagggtacgacgccggggagggactgggtgcgcgggcatgaagttggaggtgttcgtccctcgcgcggcccacggggacaagcagggcagtgacctggagggcgcgggcggcagcgacgcgccgtccccgctgtcggcggcgggagacgactccctgggctcagatggggactgcgcggccaacagcccggccgcgggcggcggcgccagagatacgcagggcgacggcgaacagagtgcgggaggcgggccgggcgcggaggaggcgatcccggcagcagctgctgcagcggtggtggcggagggcgcggaggccggggcggcggggccaggcgcgggcggcgcggggagcggcgagggtgcacgcagcaagccatatacgcggcggcccaagcccccctactcgtacatcgcgctcatcgccatggccatccgcgactcggcgggcgggcgcttgacgctggcggagatcaacgagtacctcatgggcaagttcccctttttccgcggcagctacacgggctggcgcaactccgtgcgccacaacctttcgctcaacgactgcttcgtcaaggtgctgcgcgacccctcgcggccctggggcaaggacaactactggatgctcaaccccaacagcgagtacaccttcgccgacggggtcttccgccgccgccgcaagcgcctcagccaccgcgcgccggtccccgcgcccgggctgcggcccgaggaggccccgggcctccccgccgccccgccgcccgcgcccgccgccccggcctcgccccgcatgcgctcgcccgcccgccaggaggagcgcgccagccccgcgggcaagttctccagctccttcgccatcgacagcatcctgcgcaagcccttccgcagccgccgcctcagggacacggcccccgggacgacgcttcagtggggcgccgcgccctgcccgccgctgcccgcgttccccgcgctcctccccgcggcgccctgcagggccctgctgccgctctgcgcgtacggcgcgggcgagccggcgcggctgggcgcgcgcgaggccgaggtgccaccgaccgcgccgcccctcctgcttgcacctctcccggcggcggcccccgccaagccactccgaggcccggcggccggcggcgcgcacctgtactgccccctgcggctgcccgcagccctgcaggcggcctcagtccgccgccctggcccgcacctgccgtacccggtggagacgctcctagcctgagtagcgccgcggggcccgggaacgccgagtgcgcgccgtcggggaggcgggaacgcgggcccgcgcgcggactttgcactttgaatccagaggaagatgaatttttaaaatctccatcaaacgtgccttaaagctaaagcattttgacaggagtatttaaacttagtccaggatattttcctttgtgttttataactttacagaggaccaaagcaattcttgttttagtttctttgcgaagcctgctcctccttcccttcataaggacttt

SEQ ID NO: 135116 - DNA, 1159 bp, Homo sapiens
  Payload ID: 6406
  Gene Symbol: FOXR1
  Gene Name: forkhead box R1
  Uniprot ID: Q6PIV2
  ENST ID: ENST00000317011
  CDS Start-End: 226-1104
aaatggaccgctccacacctgagctgccgccaagctaactcaatccgagccggcgcatttgagaaggcgcctgtgagggtcgctcctcagccgccgcgctcccactccgcgtccccactccgcgccgccgcgcctctgccagccccgaaggtggacgtgaagctccaacacctcgacttctgggcccgcctccatggccaggtcccgggactgctggactgggacatggggaacgagctctttctggccttcaccacatctcacctccccttagcggagcagaaacttgccaggtataaactccgaattgttaagccaccaaaattacccctagagaaaaaacccaaccctgataaggatggtccagattatgagcccaacctctggatgtgggtaaatcccaacattgtgtatccccctggaaagctggaggtctcaggacgtaggaagagggaggacctgacaagcacactcccctcctctcagccaccccagaaggaggaagatgccagctgctcagaggccgcaggggtggaatcactgtcccagtcctccagcaagcggtctccccctcggaagcggtttgccttttcccccagcacctgggagctcacagaagaggaggaggctgaggaccaggaagacagctcctctatggctctcccatcccctcacaaaagggcccccctccagagtcggaggcttcggcaagccagcagccaggcggggaggctctggtcccggccccctctcaattacttccacctaattgccctggcattaagaaacagttccccctgtggcctcaacgtgcaacagatctacagtttcactcgaaagcacttcccctttttccggacggccccggaaggctggaagaatactgtccgtcacaatctctgttttcgagacagctttgagaaagtgcctgtcagcatgcagggcggggccagcacacggcctcgatcttgcctctggaagttgaccgaggagggacaccgccgctttgcggaggaggcccgcgccttggcttccactcggctagaaagtatccaacagtgcatgagccagccagatgtgatgcccttcctctttgatctttaaccccaagaagcaacagccagctaatgctttattaaaattaccctcactagccttc

SEQ ID NO: 135117 - DNA, 409 bp, Homo sapiens
  Payload ID: 6406
  Gene Symbol: FOXR1
  Gene Name: forkhead box R1
  ENST ID: ENST00000533282
  CDS Start-End: 1-409
cagttgccaggtataaactccgaattgttaagccaccaaaattacccctagagaaaaaacccaaccctgataaggatggtccagattatgagcccaacctctggatgtgggtaaatcccaacattgtgtatccccctggaaagctggaggtctcaggacgtaggaagagggaggacctgacaagcacactcccctcctctcagccaccccagaaggaggaagatgccagctgctcagaggccgcaggggtggaatcactgtcccagtcctccagcaagcggtctccccctcggaagcggtttgccttttcccccagcacctgggagaaagcacttcccctttttccggacggccccggaaggctggaagaatactgtccgtcacaatctctgttttcgagacagctttg

SEQ ID NO: 135118 - DNA, 1053 bp, Homo sapiens
  Payload ID: 6406
  Gene Symbol: FOXR1
  Gene Name: forkhead box R1
  Uniprot ID: Q6PIV2
  ENST ID: ENST00000531539
  CDS Start-End: 221-841
gaccgctccacacctgagctgccgccaagctaactcaatccgagccggcgcatttgagaaggcgcctgtgagggtcgctcctcagccgccgcgctcccactccgcgtccccactccgcgccgccgcgcctctgccagccccgaaggtggacgtgaagctccaacacctcgacttctgggcccgcctccatggccaggtcccgggactgctggactgggacatggggaacgagctctttctggccttcaccacatctcacctccccttagcggagcagaaacttgccaggtataaactccgaattgttaagccaccaaaattacccctagagaaaaaacccaaccctgataaggatggtccagattatgagcccaacctctggatgtgggtaaatcccaacattgtgtatccccctggaaagctggaggtctcaggacgtaggaagagggaggacctgacaagcacactcccctcctctcagccaccccagaaggaggaagatgccagctgctcagaggccgcaggggtggaatcactgtcccagtcctccagcaagcggtctccccctcggaagcggtttgccttttcccccagcacctgggagggcccccctccagagtcggaggcttcggcaagccagcagccaggcggggaggctctggtcccggccccctctcaattacttccacctaattgccctggcattaagaaacagttccccctgtggcctcaacgtgcaacagatctacagtttcactcggagctgcttggcctgattctgctttgttcatgctgtggtccaagccctgggccctcagagggagggagggttcagctttgagaaagtgcctgtcagcatgcagggcggggccagcacacggcctcgatcttgcctctggaagttgaccgaggagggacaccgccgctttgcggaggaggcccgcgccttggcttccactcggctagaaagtatccaacagtgcatgagccagccagatgtgatgcccttcctctttgatctttaaccccaagaagcaacagccagctaatgct

SEQ ID NO: 135119 - DNA, 1159 bp, Homo sapiens; identical to SEQ ID NO: 135116
  Payload ID: 6406
  Gene Symbol: FOXR1
  Gene Name: forkhead box R1
  ENST ID: ENST00000626640
  CDS Start-End: 226-1104

SEQ ID NO: 135120 - DNA, 409 bp, Homo sapiens; identical to SEQ ID NO: 135117
  Payload ID: 6406
  Gene Symbol: FOXR1
  Gene Name: forkhead box R1
  ENST ID: ENST00000634385
  CDS Start-End: 1-409

SEQ ID NO: 135121 - DNA, 1053 bp, Homo sapiens; identical to SEQ ID NO: 135118
  Payload ID: 6406
  Gene Symbol: FOXR1
  Gene Name: forkhead box R1
  ENST ID: ENST00000634955
  CDS Start-End: 221-841

SEQ ID NO: 135122 - DNA, 1926 bp, Homo sapiens
  Payload ID: 6407
  Gene Symbol: FOXR2
  Gene Name: forkhead box R2
  Uniprot ID: Q6PJQ5
  ENST ID: ENST00000339140
  CDS Start-End: 313-1248
ttcctcttgaagtgactttctgcttccaatcaaagctcaagaattccacctaaaaatgtttttctgctcaaaagctcttttttattacttccatgttttgagccttgttccagaaagctgaggtttctccaggtctgaccactaatcagtgagacattggtgcctctttcttcagtgcttctagcaggcctactgataagctccctagatgagatacactgcataaaaaaatgatgcccaaaggacagctttaagtgcctgctagatatctgttctttcagaagtctctctccacctatctctccagtaaagatggacttaaaactaaaagactgtgaattttggtatagtctccatggccaggtcccagggctgctggactgggacatgaggaatgagttatttctgccttgtaccacagaccagtgctctttagctgagcaaatccttgccaaatacagagtcggagtaatgaagcccccagaaatgcctcagaagaggagacccagtcctgatggagatggtcctccctgtgaacccaatctgtggatgtgggtggaccccaatatcctgtgcccccttggcagccaggaggccccaaagcccagtggaaaagaggatctgacaaacatttctcctttccctcagcccccacaaaaagacgaagggtctaactgctcagaggacaaagtggtagagtctctgccatcttcctccagtgagcagtctcctttacagaagcagggtatccattcccccagtgactttgagctcacagaagaggaggctgaggaaccagacgacaactccctccagtcccctgaaatgaaatgttaccagagccagaaactatggcaaatcaacaaccaagagaagtcctggcaaaggccccctctcaattgtagccaccttattgccctagcattaagaaacaacccccactgtggcctcagtgtgcaggagatctacaatttcacccgacagcatttcccctttttctggacagctccggatggctggaagagcaccattcattacaacctctgcttcctggacagctttgagaaggtgccagacagccttaaggatgaagataatgcaagacctcgctcttgcctttggaagctcactaaggaggggcaccgccgcttttgggaggagactcgtgtcttagcctttgctcaaagggagagaatccaagagtgcatgagtcagccagagttgttgacctctctctttgatctttgaaatgccattgctcccttttggaacactgccttccttactgtgcctacttatcccctgacattcattaatctctaaacttacccagcctggttggtgccaagtctgtctttagctactgttacaataatggtgttaagtaaagttagaggtgggtacaggggagacagaacttaaatccaggtggagagtcatggaaagtcgcacgaggagagtggctgttgttccaaattttgagcaaaggaaaagaaatcctagaaacaatggcatagaaactaaggaaagaagggtgtgttttgtgaaagaaaggaattttgtttatagagagtattttcacacatgaaagtgaacagtggaatataaagcataaaaggcaggatggagccgagccatggagaacctcgagtgccatgtgaagagaatttgacttgtgatgaagaatcaagtttccccttctaccattcatcagctacatctcctttttaagtaacccattttatccttcagaacctcacttttctatttctggccctggacttctaagccttgtttctttgtcatccaattccaatattgacaaataattctaaacagctacttttagtttgtatgtttaacgtcctgtgaaatattcctgtattaaccccaagccttttgatgataaagctttattttctatta

SEQ ID NO: 135123 - DNA, 1319 bp, Homo sapiens
  Payload ID: 6408
  Gene Symbol: FOXS1
  Gene Name: forkhead box S1
  Uniprot ID: O43638
  ENST ID: ENST00000375978
  CDS Start-End: 78-1070
ggcaggctattccggacgccagccctggaagctgagcctgacccagcaggtcccagcagcctggcagcccggccagcatgcagcagcagcctctgcccgggcctggcgcccccacaactgagccaaccaagcctccctacagctacatcgcccttattgctatggccatccagagctcaccggggcagcgggccaccctcagtggcatctaccgctacatcatgggccgattcgccttctaccgccacaaccggcccggctggcagaacagcatccgccacaacctgtcactcaacgagtgctttgtcaaggtgccccgcgatgaccgcaagccaggcaagggcagctactggacgctggaccctgactgccacgacatgtttgagcacggcagcttcctacgccgccgccgccgcttcacccggcagacaggtgctgagggcacccggggccccgccaaggcacgccgtggacccctcagggcgaccagccaggacccaggagtccccaacgccacgaccggcaggcagtgctcattcccaccagagctgccagatcccaagggcctaagctttgggggtctggtgggggccatgccagccagtatgtgcccagcaaccactgatggcaggcctcggccacccatggagcccaaagagatttccacgcccaagcctgcatgcccaggggagctccccgtggccacctcatcttcctcatgcccagcgtttggctttcctgccggcttctcagaggctgagagttttaataaggcccctacgcccgtcttgtccccggaatcaggcatcgggagcagctaccagtgtcggctgcaggcactgaatttttgcatgggggctgacccaggccttgagcacctcttggcctcagcagccccctcccctgcaccacccacccctccaggctcactccgggccccactgcccctgccaactgaccacaaggaaccctgggttgcaggtggcttccctgtccagggaggctccggctacccattggggctgaccccctgcctataccggacgccaggaatgttcttctttgagtaaaggcagcctcacctcgggcagtccctgcaggtccctcaccctccgggctgagcctggctctaggacctgaagaactctcgaaggacccagccctggtgagccaaggacaaccacacagaaagccaggattgaagcggtgctcagccaggcccctggggcctccggacaaacttgggggtgaggggaagcagggcctcttgggatttactctgtggctctcagggccaataaagccatgtgatgatgagg

SEQ ID NO: 135124 - DNA, 2657 bp, Homo sapiens
  Payload ID: 6409
  Gene Symbol: FHAD1
  Gene Name: forkhead-associated (FHA) phosphopeptide binding domain 1
  ENST ID: ENST00000314668
  CDS Start-End: 1-1944
attacccaggagaagaacagagtgaaggaagcattagaggaagagcagacaagagtccaagagctggaggaacgcttggcccgccagaaggagatctcagagagcaacattgcgtacgagaaacgcaaagcaaaggaggccatggagaaggaaaagaaaaaggtgcaagacctggagaatcgcttaaccaagcagaaagaggaattagaattaaaagagcaaaaagaggacgttttaaataataaattaagtgacgcactggccatggttgaagagactcagaaaacaaaggcaactgaaagtctaaaagcagagagcctcgccttgaaattaaatgaaacattagccgaactggaaactaccaagacaaaaatgatcatggtggaagagcggctaatcctgcagcagaagatggtaaaggccctccaggatgagcaggaatcacagagacacgggtttgaagaagagatcatggaatataaggagcaaatcaaacagcacgcccagacaattgtgagcctcgaagagaaactccagaaagtcactcagcaccataaaaaaatagaaggcgagattgcaacattgaaggacaatgacccagccccaaaggaggaaaggccgcaagaccctctggtggctcccatgacagagagcagtgccaaagacatggcgtacgaacatctgatagatgacttattggctgctcagaaggaaattctgtctcagcaggaagtcatcatgaagttaaggaaagaccttaccgaagcccacagcagaatgtcggatttgagaggggagctaaacgagaagcagaagatggaactggagcagaacgtggtgctggtccagcagcagagcaaggagctgagtgtgctcaaggagaagatggcccagatgagcagcctggtagaaaagaaagatcgggagctgaaggcccttgaggaggcactcagggcttcccaagagaaacacagactccagctgaacacagagaaggaacagaagccccggaagaagacccagacgtgtgacacctctgtgcagatagaacccgtccacactgaggccttctccagcagccaagagcagcaatccttcagcgatctaggggtcaggtgcaaagggtcccggcacgaggaggtcattcagcgtcagaaaaaggccttatctgaacttcgagcgcgaattaaagaactcgagaaggcgcgctcaccagatcataaagaccaccagaatgaatcatttctagatttaaagaacctcagaatggaaaacaatgtccagaaaatactactggatgcaaaaccggatttgccaactctctcaagaatagagatcctagcgcctcagaatggcctttgcaacgcaaggttcggctcagccatggagaagtcagggaagatggatgtggctgaggctttagagctcagtgaaaagctgtacctggatatgagcaaaaccctcggaagtctcatgaacatcaagaatatgtcaggccacgtgtccatgaaatacctctcccgccaggagagggagaaggtcaaccagcttcgacaaagggacctcgacctggtgtttgataagatcacccaactcaagaaccagctggggaggaaagaggagctgttgagaggatatgaaaaggacgttgaacagctcaggcggagcaaagtgtccattgagatgtaccagtcgcaggtggcaaagctggaggatgatatctacaaagaggccgaagagaaggccctgctgaaggaggccctggagcgcatggagcaccagctgtgccaggagaagaggatcaacagggccatccggcagcagaaggttggaaccagaaaagcctccctaaagatggaccaagaaagagagatgctgaggaaagagacctccagcaagtccagccagagccttttgcattctaagcccagtggaaagtactagagaaacctcgtcccaccaggcctcatgtgatcctctgtgagttcatgtgactcttctgtgtcatctgtgtcaaaatactgagttgcttttgtaagtctttaaagattgttaccctagtgtttcatttcctagaccagtattttgaacaatattatattttggagactgtggggagaagggttcttctttaaaaatacctatgaatgtacacgaactcaggtatatgaagaatagaagtgtgtaacccagatgtccaggcctggtagatataattatgtggtccacgttgggtcatgatgttcccaaatatcaaacctcctaagacttccaacagactcacacttgagaaaacctaagacttgtactggagcctcagggcagaattgtaaccttggagctctcagggccttgggatagtgaattcaagtctccgttatggcctggcaggatggctcatgcctgtaatctcagcactttgggaggccgaggcaggcggattataagatcaggagtttgagaccagcctggcaaacatagtgaatacctgtctctactaaaaatacaaaaattagccaggtgtggtggcacatgcctgtagtcccagctacacaggaggctgaggtgggagaatcacttgaacctaggaggcagaggttgcagtgagccaagaccacgccattgcacgccagcctaacagagtgagactctgtctt

SEQ ID NO: 135125 - DNA, 5090 bp, Homo sapiens
  Payload ID: 6409
  Gene Symbol: FHAD1
  Gene Name: forkhead-associated (FHA) phosphopeptide binding domain 1
  Uniprot ID: B1AJZ9
  ENST ID: ENST00000358897
  CDS Start-End: 139-4377
gggtgcgagctggagactccgcgggagcgcggccgggaggcttcgccccggagctggcccgacgcctcccgagctggcagggctctcggcggaggtcggagcgtgggcttcctcctcccgccagggaaaacagagaggatgaaggcctatctaaagagcgcagaaggcttttttgtcctaaataaaagtaccacaattggaaggcatgaaaattcagaccttgttttacagtctcctgacatcgacaaccaccatgcactcattgaatataacgaggcggagtgcagctttgttctccaggacttcaattcccgcaacggcacgtttgtcaacgagtgccacattcaaaacgtggctgtgaagctcatccctggagacatcctgagatttgggtctgcagggctgacctatgaactggtcattgaaaatccacctccggtctctttcccatggatgaggggcccagcaccatggccagggccacagccacctcgtgccacacagcagccaaaccaggcccccccaccatcacatatccccttccaccaaggtgtccagccagcaccgatgcaaaggagctggtcccaggcctttcccagacccaccgtggtcctgccggcctcccacaggcggcctgtgagcgccaacaaggagatgttctcgttcgtggtggacgacgcccgcaagccacccgtcatcaagcaagtgtggaccaatgccatgaaactgtcagaaaaatcagtggccgaggggattcctggggcagttccccctgcggagatttatgtggaggaggacttggcccagcaggacaaggatgaaataattctgctgctgggaaaagaggtcagccgtctctcagattatgaaattgaatccaaatacaaagacgtcataatagcaaacctgcagaatgaagtggctgagctgagtcagaaggtgtcagagaccaccacctccaggcagaatgagaaggagatctcgcagaagtgtcaggttctggatgaagacatcgatgccaaacagaaagagatccagagcttgaaaagccagatcagtgccctacagaaaggctacagcaaggtgctgtgccagaccctgtcagagcggaactcagaaatcacatccctgaagaatgagggcgagaacttaaagagagacaacgctatcacatcagggatggtgtcatctttgcaaaaagacatattagcaaaggatgagcaagttcaacaactaaaggaagaggtcagtcacctaaaaagtcagaacaaggacaaggaccaccagctggaagcccttggctctagatgctcggtgctaaaggaagagttaaaacaggaagatgctcacagggagctcagggaagcccaggagaaagagttaaaactctgcaaaacccaaatccaagacatggagaaagaaatgaagaagcttagggcagagctgaggaagagttgtactgaacaaagcgtgatctctaggactctgagagaaaaaagcaaggttgaagagaagcttcaggaggattccagaaggaaattgcttcagctgcaagaaatggggaacagagagagcgtcattaaaatcaatttggagagggcagtaggtcagctggagcacttcagaagtcaagtcatcaaggccacctatggacgggcgaagccgttccgggacaagcccgtcaccgaccaacagttaatagagaaaattacccaggtcactgaggacaacatcaattttcagcagaaaaagtggaccctccagaaagagacccagctgagcaactccaagcaggaggagaccaccgagaacatcgagaagctgaggacgtcgctggacagctgccaggcttgcatgaaaatatcctgttgcagccatgacctgaagaaggaggtcgaccttcttcagcacctccaggtgagcccacctgtctcggggctccagaaggtggtgctggacgtcctgaggcacgcgctgtcctggctggaggaggtggagcagctcctccgggacctcgggatcctgccctccagccccaacaaagatcaagttcaacagttctcaggaaactcagcagtctttactgcaggaaaagctgcgggagcatctggcagagaaggagaagctgaacgaggagaggctagagcaagaggagaagctcaaagccaaaatcaggcaactgacggaagagaaggcggtaaggctttggaggagtacattactcaagagagaaacagagcgaaagagactttagaggaagaacggaagagaatgcaagaactggagagcctcctggcccagcagaagaaggctttggcgaaaagcattacccaggagaagaacagagtgaaggaagcattagaggaagagcagacaagagtccaagagctggaggaacgcttggcccgccagaaggaggttttggagagcagcatagcccatgaaaaaagaaaagcaaaggaagccttggagtcggaaaagagaaaagttcaggatctggagaaccatttaacccaacagaaggagatctcagagagcaacattgcgtacgagaaacgcaaagcaaaggaggccatggagaaggaaaagaaaaaggtgcaagacctggagaatcgcttaaccaagcagaaagaggaattagaattaaaagagcaaaaagaggacgttttaaataataaattaagtgacgcactggccatggttgaagagactcagaaaacaaaggcaactgaaagtctaaaagcagagagcctcgccttgaaattaaatgaaacattagccgaactggaaactaccaagacaaaaatgatcatggtggaagagcggctaatcctgcagcagaagatggtaaaggccctccaggatgagcaggaatcacagagacacgggtttgaagaagagatcatggaatataaggagcaaatcaaacagcacgcccagacaattgtgagcctcgaagagaaactccagaaagtcactcagcaccataaaaaaatagaaggcgagattgcaacattgaaggacaatgacccagccccaaaggaggaaaggccgcaagaccctctggtggctcccatgacagagagcagtgccaaagacatggcgtacgaacatctgatagatgacttattggctgctcagaaggaaattctgtctcagcaggaagtcatcatgaagttaaggaaagaccttaccgaagcccacagcagaatgtcggatttgagaggggagctaaacgagaagcagaagatggaactggagcagaacgtggtgctggtccagcagcagagcaaggagctgagtgtgctcaaggagaagatggcccagatgagcagcctggtagaaaagaaagatcgggagctgaaggcccttgaggaggcactcagggcttcccaagagaaacacagactccagctgaacacagagaaggaacagaagccccggaagaagacccagacgtgtgacacctctgtgcagatagaacccgtccacactgaggccttctccagcagccaagagcagcaatccttcagcgatctaggggtcaggtgcaaagggtcccggcacgaggaggtcattcagcgtcagaaaaaggccttatctgaacttcgagcgcgaattaaagaactcgagaaggcgcgctcaccagatcataaagaccaccagaatgaatcatttctagatttaaagaacctcagaatggaaaacaatgtccagaaaatactactggatgcaaaaccggatttgccaactctctcaagaatagagatcctagcgcctcagaatggcctttgcaacgcaaggttcggctcagccatggagaagtcagggaagatggatgtggctgaggctttagagctcagtgaaaagctgtacctggatatgagcaaaaccctcggaagtctcatgaacatcaagaatatgtcaggccacgtgtccatgaaatacctctcccgccaggagagggagaaggtcaaccagcttcgacaaagggacctcgacctggtgtttgataagatcacccaactcaagaaccagctggggaggaaagaggagctgttgagaggatatgaaaaggacgttgaacagctcaggcggagcaaagtgtccattgagatgtaccagtcgcaggtggcaaagctggaggatgatatctacaaagaggccgaagagaaggccctgctgaaggaggccctggagcgcatggagcaccagctgtgccaggagaagaggatcaacagggccatccggcagcagaaggttggaaccagaaaagcctccctaaagatggaccaagaaagagagatgctgaggaaagagacctccagcaagtccagccagagccttttgcattctaagcccagtggaaagtactagagaaacctcgtcccaccaggcctcatgtgatcctctgtgagttcatgtgactcttctgtgtcatctgtgtcaaaatactgagttgcttttgtaagtctttaaagattgttaccctagtgtttcatttcctagaccagtattttgaacaatattatattttggagactgtggggagaagggttcttctttaaaaatacctatgaatgtacacgaactcaggtatatgaagaatagaagtgtgtaacccagatgtccaggcctggtagatataattatgtggtccacgttgggtcatgatgttcccaaatatcaaacctcctaagacttccaacagactcacacttgagaaaacctaagacttgtactggagcctcagggcagaattgtaaccttggagctctcagggccttgggatagtgaattcaagtctccgttatggcctggcaggatggctcatgcctgtaatctcagcactttgggaggccgaggcaggcggattataagatcaggagtttgagaccagcctggcaaacatagtgaatacctgtctctactaaaaatacaaaaattagccaggtgtggtggcacatgcctgtagtcccagctacacaggaggctgaggtgggagaatcacttgaacctaggaggcagaggttgcagtgagccaagaccacgccattgcacgccagcctaacagagtgagactctgtctt

SEQ ID NO: 135126 - DNA, 785 bp, Homo sapiens
  Payload ID: 6409
  Gene Symbol: FHAD1
  Gene Name: forkhead-associated (FHA) phosphopeptide binding domain 1
  ENST ID: ENST00000375995
  CDS Start-End: 8-763
tcccaccatgattctgaggcctccccggccatgtggaactatcagtgccctacagaaaggctacagcaaggtgctgtgccagaccctgtcagagcggaactcagaaatcacatccctgaagaatgagggcgagaacttaaagagagacaacgctatcacatcagggatggtgtcatctttgcaaaaagacatattagcaaaggatgagcaagttcaacaactaaaggaagaggtcagtcacctaaaaagtcagaacaaggacaaggaccaccagctggaagcccttggctctagactggagcacttcagaagtcaagtcatcaaggccacctatggacgggcgaagccgttccgggacaagcccgtcaccgaccaacagttaatagagaaaattacccaggtcactgaggacaacatcaattttcagcagaaaaagtggaccctccagaaagagacccagctgagcaactccaagcaggaggagaccaccgagaacatcgagaagctgaggacgtcgctggacagctgccaggcttgcatgaaaatatcctgttgcagccatgacctgaagaaggaggtcgaccttcttcagcacctccaggtgagcccacctgtctcggggctccagaaggtggtgctggacgtcctgaggcacgcgctgtcctggctggaggaggtggagcagctcctccgggacctcgggatcctgccctccagccccaacaaaggttactgggactttttttctcacatggttgcatgactctaaaatgtcgcgttgaatc

SEQ ID NO: 135127 - DNA, 1459 bp, Homo sapiens
  Payload ID: 6409
  Gene Symbol: FHAD1
  Gene Name: forkhead-associated (FHA) phosphopeptide binding domain 1
  ENST ID: ENST00000375997
  CDS Start-End: 26-976
taagaagtgcttttcgcctcccaccatgattctgaggcctccccggccatgtggaactatcagtgccctacagaaaggctacagcaaggtgctgtgccagaccctgtcagagcggaactcagaaatcacatccctgaagaatgagggcgagaacttaaagagagacaacgctatcacatcagggatggtgtcatctttgcaaaaagacatattagcaaaggatgagcaagttcaacaactaaaggaagaggtcagtcacctaaaaagtcagaacaaggacaaggaccaccagctggaagcccttggctctagatgctcggtgctaaaggaagagttaaaacaggaagatgctcacagggagctcagggaagcccaggagaaagagttaaaactctgcaaaacccaaatccaagacatggagaaagaaatgaagaagcttagggcagagctgaggaagagttgtactgaacaaagcgtgatctctaggactctgagagaaaaaagcaagctggagcacttcagaagtcaagtcatcaaggccacctatggacgggcgaagccgttccgggacaagcccgtcaccgaccaacagttaatagagaaaattacccaggtcactgaggacaacatcaattttcagcagaaaaagtggaccctccagaaagagacccagctgagcaactccaagcaggaggagaccaccgagaacatcgagaagctgaggacgtcgctggacagctgccaggcttgcatgaaaatatcctgttgcagccatgacctgaagaaggaggtcgaccttcttcagcacctccaggtgagcccacctgtctcggggctccagaaggtggtgctggacgtcctgaggcacgcgctgtcctggctggaggaggtggagcagctcctccgggacctcgggatcctgccctccagccccaacaaaggttactgggactttttttctcacatggttgcatgactctaaaatgtcgcgttgaatctcagcatgatgggacatctgttgaggaagtcttcctgggtatctggccaagtctattcccttctccagaaccccctgcttctctgcttgaggcgtaattttccattaaaaaaaaaaacacacacatacaagtgagacacgataactgaagaaaaatgaaacaaaacagaggcaaaaggaaaattaaatcgaaattatgcaaagtctaattacgctgtttaacctccaaggcattttcccatggaaataaccgcgtgattccaggcaagtgacttaccctgtctatgcctcagtttccctatctgtaaaatgaggctaatagggagtacccaccctttagggctgttgtgatcattaaaatgcatgaatatatggaaagtacttggaatagtacctggcacacaataggcattactgaatgtttattgacttttaatttgacaaaaaaatagtgtcacgtta

SEQ ID NO: 135128 - DNA, 4355 bp, Homo sapiens
  Payload ID: 6409
  Gene Symbol: FHAD1
  Gene Name: forkhead-associated (FHA) phosphopeptide binding domain 1
  Uniprot ID: B1AJZ9
  ENST ID: ENST00000375998
  CDS Start-End: 1-4239
atgaaggcctatctaaagagcgcagaaggcttttttgtcctaaataaaagtaccacaattggaaggcatgaaaattcagaccttgttttacagtctcctgacatcgacaaccaccatgcactcattgaatataacgaggcggagtgcagctttgttctccaggacttcaattcccgcaacggcacgtttgtcaacgagtgccacattcaaaacgtggctgtgaagctcatccctggagacatcctgagatttgggtctgcagggctgacctatgaactggtcattgaaaatccacctccggtctctttcccatggatgaggggcccagcaccatggccagggccacagccacctcgtgccacacagcagccaaaccaggcccccccaccatcacatatccccttccaccaaggtgtccagccagcaccgatgcaaaggagctggtcccaggcctttcccagacccaccgtggtcctgccggcctcccacaggcggcctgtgagcgccaacaaggagatgttctcgttcgtggtggacgacgcccgcaagccacccgtcatcaagcaagtgtggaccaatgccatgaaactgtcagaaaaatcagtggccgaggggattcctggggcagttccccctgcggagatttatgtggaggaggacttggcccagcaggacaaggatgaaataattctgctgctgggaaaagaggtcagccgtctctcagattatgaaattgaatccaaatacaaagacgtcataatagcaaacctgcagaatgaagtggctgagctgagtcagaaggtgtcagagaccaccacctccaggcagaatgagaaggagatctcgcagaagtgtcaggttctggatgaagacatcgatgccaaacagaaagagatccagagcttgaaaagccagatcagtgccctacagaaaggctacagcaaggtgctgtgccagaccctgtcagagcggaactcagaaatcacatccctgaagaatgagggcgagaacttaaagagagacaacgctatcacatcagggatggtgtcatctttgcaaaaagacatattagcaaaggatgagcaagttcaacaactaaaggaagaggtcagtcacctaaaaagtcagaacaaggacaaggaccaccagctggaagcccttggctctagatgctcggtgctaaaggaagagttaaaacaggaagatgctcacagggagctcagggaagcccaggagaaagagttaaaactctgcaaaacccaaatccaagacatggagaaagaaatgaagaagcttagggcagagctgaggaagagttgtactgaacaaagcgtgatctctaggactctgagagaaaaaagcaaggttgaagagaagcttcaggaggattccagaaggaaattgcttcagctgcaagaaatggggaacagagagagcgtcattaaaatcaatttggagagggcagtaggtcagctggagcacttcagaagtcaagtcatcaaggccacctatggacgggcgaagccgttccgggacaagcccgtcaccgaccaacagttaatagagaaaattacccaggtcactgaggacaacatcaattttcagcagaaaaagtggaccctccagaaagagacccagctgagcaactccaagcaggaggagaccaccgagaacatcgagaagctgaggacgtcgctggacagctgccaggcttgcatgaaaatatcctgttgcagccatgacctgaagaaggaggtcgaccttcttcagcacctccaggtgagcccacctgtctcggggctccagaaggtggtgctggacgtcctgaggcacgcgctgtcctggctggaggaggtggagcagctcctccgggacctcgggatcctgccctccagccccaacaaagatcaagttcaacagttctcaggaaactcagcagtctttactgcaggaaaagctgcgggagcatctggcagagaaggagaagctgaacgaggagaggctagagcaagaggagaagctcaaagccaaaatcaggcaactgacggaagagaaggcggtaaggctttggaggagtacattactcaagagagaaacagagcgaaagagactttagaggaagaacggaagagaatgcaagaactggagagcctcctggcccagcagaagaaggctttggcgaaaagcattacccaggagaagaacagagtgaaggaagcattagaggaagagcagacaagagtccaagagctggaggaacgcttggcccgccagaaggaggttttggagagcagcatagcccatgaaaaaagaaaagcaaaggaagccttggagtcggaaaagagaaaagttcaggatctggagaaccatttaacccaacagaaggagatctcagagagcaacattgcgtacgagaaacgcaaagcaaaggaggccatggagaaggaaaagaaaaaggtgcaagacctggagaatcgcttaaccaagcagaaagaggaattagaattaaaagagcaaaaagaggacgttttaaataataaattaagtgacgcactggccatggttgaagagactcagaaaacaaaggcaactgaaagtctaaaagcagagagcctcgccttgaaattaaatgaaacattagccgaactggaaactaccaagacaaaaatgatcatggtggaagagcggctaatcctgcagcagaagatggtaaaggccctccaggatgagcaggaatcacagagacacgggtttgaagaagagatcatggaatataaggagcaaatcaaacagcacgcccagacaattgtgagcctcgaagagaaactccagaaagtcactcagcaccataaaaaaatagaaggcgagattgcaacattgaaggacaatgacccagccccaaaggaggaaaggccgcaagaccctctggtggctcccatgacagagagcagtgccaaagacatggcgtacgaacatctgatagatgacttattggctgctcagaaggaaattctgtctcagcaggaagtcatcatgaagttaaggaaagaccttaccgaagcccacagcagaatgtcggatttgagaggggagctaaacgagaagcagaagatggaactggagcagaacgtggtgctggtccagcagcagagcaaggagctgagtgtgctcaaggagaagatggcccagatgagcagcctggtagaaaagaaagatcgggagctgaaggcccttgaggaggcactcagggcttcccaagagaaacacagactccagctgaacacagagaaggaacagaagccccggaagaagacccagacgtgtgacacctctgtgcagatagaacccgtccacactgaggccttctccagcagccaagagcagcaatccttcagcgatctaggggtcaggtgcaaagggtcccggcacgaggaggtcattcagcgtcagaaaaaggccttatctgaacttcgagcgcgaattaaagaactcgagaaggcgcgctcaccagatcataaagaccaccagaatgaatcatttctagatttaaagaacctcagaatggaaaacaatgtccagaaaatactactggatgcaaaaccggatttgccaactctctcaagaatagagatcctagcgcctcagaatggcctttgcaacgcaaggttcggctcagccatggagaagtcagggaagatggatgtggctgaggctttagagctcagtgaaaagctgtacctggatatgagcaaaaccctcggaagtctcatgaacatcaagaatatgtcaggccacgtgtccatgaaatacctctcccgccaggagagggagaaggtcaaccagcttcgacaaagggacctcgacctggtgtttgataagatcacccaactcaagaaccagctggggaggaaagaggagctgttgagaggatatgaaaaggacgttgaacagctcaggcggagcaaagtgtccattgagatgtaccagtcgcaggtggcaaagctggaggatgatatctacaaagaggccgaagagaaggccctgctgaaggaggccctggagcgcatggagcaccagctgtgccaggagaagaggatcaacagggccatccggcagcagaaggttggaaccagaaaagcctccctaaagatggaccaagaaagagagatgctgaggaaagagacctccagcaagtccagccagagccttttgcattctaagcccagtggaaagtactagagaaacctcgtcccaccaggcctcatgtgatcctctgtgagttcatgtgactcttctgtgtcatctgtgtcaaaatactgagttgcttttgtaagtctttaaagattgttacccta

SEQ ID NO: 135129 - DNA, 3481 bp, Homo sapiens
  Payload ID: 6409
  Gene Symbol: FHAD1
  Gene Name: forkhead-associated (FHA) phosphopeptide binding domain 1
  ENST ID: ENST00000444385
  CDS Start-End: 1-2081
ctcagcagtctttactgcaggaaaagctgcgggagcatctggcagagaaggagaagctgaacgaggagaggctagagcaagaggagaagctcaaagccaaaatcaggcaactgacggaagagaaggcggctttggaggagtacattactcaagagagaaacagagcgaaagagactttagaggaagaacggaagagaatgcaagaactggagagcctcctggcccagcagaagaaggctttggcgaaaagcattacccaggagaagaacagagtgaaggaagcattagaggaagagcagacaagagtccaagagctggaggaacgcttggcccgccagaaggagatctcagagagcaacattgcgtacgagaaacgcaaagcaaaggaggccatggagaaggaaaagaaaaaggtgcaagacctggagaatcgcttaaccaagcagaaagaggaattagaattaaaagagcaaaaagaggacgttttaaataataaattaagtgacgcactggccatggttgaagagactcagaaaacaaaggcaactgaaagtctaaaagcagagagcctcgccttgaaattaaatgaaacattagccgaactggaaactaccaagacaaaaatgatcatggtggaagagcggctaatcctgcagcagaagatggtaaaggccctccaggatgagcaggaatcacagagacacgggtttgaagaagagatcatggaatataaggagcaaatcaaacagcacgcccagacaattgtgagcctcgaagagaaactccagaaagtcactcagcaccataaaaaaatagaaggcgagattgcaacattgaaggacaatgacccagccccaaaggaggaaaggccgcaagaccctctggtggctcccatgacagagagcagtgccaaagacatggcgtacgaacatctgatagatgacttattggctgctcagaaggaaattctgtctcagcaggaagtcatcatgaagttaaggaaagaccttaccgaagcccacagcagaatgtcggatttgagaggggagctaaacgagaagcagaagatggaactggagcagaacgtggtgctggtccagcagcagagcaaggagctgagtgtgctcaaggagaagatggcccagatgagcagcctggtagaaaagaaagatcgggagctgaaggcccttgaggaggcactcagggcttcccaagagaaacacagactccagctgaacacagagaaggaacagaagccccggaagaagacccagacgtgtgacacctctgtgcagatagaacccgtccacactgaggccttctccagcagccaagagcagcaatccttcagcgatctaggggtcaggtgcaaagggtcccggcacgaggaggtcattcagcgtcagaaaaaggccttatctgaacttcgagcgcgaattaaagaactcgagaaggcgcgctcaccagatcataaagaccaccagaatgaatcatttctagatttaaagaacctcagaatggaaaacaatgtccagaaaatactactggatgcaaaaccggatttgccaactctctcaagaatagagatcctagcgcctcagaatggcctttgcaacgcaaggttcggctcagccatggagaagtcagggaagatggatgtggctgaggctttagagctcagtgaaaagctgtacctggatatgagcaaaaccctcggaagtctcatgaacatcaagaatatgtcaggccacgtgtccatgaaatacctctcccgccaggagagggagaaggtcaaccagcttcgacaaagggacctcgacctggtgtttgataagatcacccaactcaagaaccagctggggaggaaagaggagctgttgagaggatatgaaaaggacgttgaacagctcaggcggagcaaagtgtccattgagatgtaccagtcgcaggtggcaaagctggaggatgatatctacaaagaggccgaagagaaggccctgctgaaggaggccctggagcgcatggagcaccagctgtgccaggagaagaggatcaacagggccatccggcagcagaagtagatgggagcttccagcccctgcctcgcagacagatggtgaggatgaaagaatgcaggcatccctcgctatctgctgtccactctcgctgtcgtcatacctcaggagccaagtgcttttggatggtgagggtgcttgtcccgtctctgaagcacctgcccagggcctggcaccagccggcggacactgccttccccatgctgcccatgacccatgctgcccgtgacccatgcaggtggtctcctgggtgagtcctgcctcagacccggtagggtctacacactggaaagtttccccaaagcaagtcacacatgagcagcacccgggcggcttccaaagctccctgaaagctggcagaggggctttcctgtctgctttgcagttgacatattcatcatccactcctgcagtccacaaggcactggaacagtgacctctaaatagagccagactctccctttccttcactcttgcctaaggtggagcagatcccaaggctggggttaggcaagtcagggaaagaaccacagtcactgtttcttcatgaccgtctccaggccagggactgggctcacctgagctttgcagccgtgatagggcttattaatgcctctaatagccctgcctggtacgatgatccctattttacagatgaggaaactgcgcctcagagagttaagaggcgcccaagtgcacacagcggctggtaaggacagctgggacctgaccccagatccctctgaccctggttctcctgctgtctgcagggttggccgtgagtcccctccttgtaactgtcagcttttatgtgtgtgtgcattctcgtgtgtgtgtacattctcatgtgtgtgtgtgtgtgcacatgtgtaccatgtgcatgagggtttggctgtgtgtgacactatgtgtgtgtgtttgtgtgtgttgcctgcctgagctcagagagagccaaacccccagagaagggtgccccctccaccaaccaggtgagctccttgcagaggcctggccttcatcccacaaaccttgcagaccacaggctccctggcttgcagcccccaaaaatgaaggcagcgctctgctctggacgtggcctttccagcactcaccactctgaattaaacatcacaggcccccatctgcacatgtcgtggggctgcctcgggcagaggaccgtttccttttacgctgtgccatgccagggagatctgggcagcagcagagtcctgagatgtcctttgatgtacccacaggagagttcgctccttcccgaggcagtgtcccccagggcttggcaggccaggcccacagcagagacaccaaaccacagaatgggacggcagagggccctaaaaagcccattgtcatgcactggctgaaaatgaaagaaaacctgcagattt

SEQ ID NO: 135130 - DNA, 570 bp, Homo sapiens
  Payload ID: 6409
  Gene Symbol: FHAD1
  Gene Name: forkhead-associated (FHA) phosphopeptide binding domain 1
  ENST ID: ENST00000433640
  CDS Start-End: 1-570
gctggagactccgcgggagcgcggccgggaggcttcgccccggagctggcccgacgcctcccgagctggcagggctctcggcggaggtcggagcgtgggcttcctcctcccgccagggaaaacagagaggatgaaggcctatctaaagagcgcagaaggcttttttgtcctaaataaaagtaccacaattggaaggcatgaaaattcagaccttgttttacaggtctctttcccatggatgaggggcccagcaccatggccagggccacagccacctcgtgccacacagcagccaaaccaggcccccccaccatcacatatccccttccaccaaggtgtccagccagcaccgatgcaaaggagctggtcccaggcctttcccagacccaccgtggtcctgccggcctcccacaggcggcctgtgagcgccaacaaggagatgttctcgttcgtggtggacgacgcccgcaagccacccgtcatcaagcaagtgtggaccaatgccatgaaactgtcagaaaaatcagtggccgaggggattcctggggcagttccccctgcggagattta

SEQ ID NO: 135131 - DNA, 2338 bp, Homo sapiens
  Payload ID: 6409
  Gene Symbol: FHAD1
  Gene Name: forkhead-associated (FHA) phosphopeptide binding domain 1
  ENST ID: ENST00000481324
  CDS Start-End: 1-1411
tgccaaagacatggcgtacgaacatctgatagatgacttattggctgctcagaaggaaattctgtctcagcaggaagtcatcatgaagttaaggaaagaccttaccgaagcccacagcagaatgtcggatttgagaggggagctaaacgagaagcagaagatggaactggagcagaacgtggtgctggtccagcagcagagcaaggagctgagtgtgctcaaggagaagatggcccagatgagcagcctggtagaaaagaaagatcgggagctgaaggcccttgaggaggcactcagggcttcccaagagaaacacagactccagctgaacacagagaaggaacagaagccccggaagaagacccagacgtgtgacacctctgtgcagatagaacccgtccacactgaggccttctccagcagccaagagcagcaatccttcagcgatctaggggtcaggtgcaaagggtcccggcacgaggaggtcattcagcgtcagaaaaaggccttatctgaacttcgagcgcgaattaaagaactcgagaaggcgcgctcaccagatcataaagaccaccagaatgaatcatttctagatttaaagaacctcagaatggaaaacaatgtccagaaaatactactggatgcaaaaccggatttgccaactctctcaagaatagagatcctagcgcctcagaatggcctttgcaacgcaaggttcggctcagccatggagaagtcagggaagatggatgtggctgaggctttagagctcagtgaaaagctgtacctggatatgagcaaaaccctcggaagtctcatgaacatcaagaatatgtcaggccacgtgtccatgaaatacctctcccgccaggagagggagaaggtcaaccagcttcgacaaagggacctcgacctggtgtttgataagatcacccaactcaagaaccagctggggaggaaagaggagctgttgagaggatatgaaaaggacgttgaacagctcaggcggagcaaagtgtccattgagatgtaccagtcgcaggtggcaaagctggaggatgatatctacaaagaggccgaagagaaggccctgctgaaggaggccctggagcgcatggagcaccagctgtgccaggagaagaggatcaacagggccatccggcagcagaagatgaggaaactgcgcctcagagagttaagaggcgcccaagtgcacacagcggctggtaaggacagctgggacctgaccccagatccctctgaccctggttctcctgctgtctgcagggttggccgaaagtgtagaggagcacgaactgagaaacgcaaaagaatcgacaccttgcaactgtgccttcaaagagaaagacaggcaggccctgccccacctgcctgcagtttgaacggatgacctaagagacaagcacgcgtccagccccgtctgtccattaagagacgagtatttgtagagatggtgaagaacaggatgcagaactcaaattcccaggttggaaccagaaaagcctccctaaagatggaccaagaaagagagatgctgaggaaagagacctccagcaagtccagccagagccttttgcattctaagcccagtggaaagtactagagaaacctcgtcccaccaggcctcatgtgatcctctgtgagttcatgtgactcttctgtgtcatctgtgtcaaaatactgagttgcttttgtaagtctttaaagattgttaccctagtgtttcatttcctagaccagtattttgaacaatattatattttggagactgtggggagaagggttcttctttaaaaatacctatgaatgtacacgaactcaggtatatgaagaatagaagtgtgtaacccagatgtccaggcctggtagatataattatgtggtccacgttgggtcatgatgttcccaaatatcaaacctcctaagacttccaacagactcacacttgagaaaacctaagacttgtactggagcctcagggcagaattgtaaccttggagctctcagggccttgggatagtgaattcaagtctccgttatggcctggcaggatggctcatgcctgtaatctcagcactttgggaggccgaggcaggcggattataagatcaggagtttgagaccagcctggcaaacatagtgaatacctgtctctactaaaaatacaaaaattagccaggtgtggtggcacatgcctgtagtcccagctacacaggaggctgaggtgggagaatcacttgaacctaggaggcagaggttgcagtgagccaagaccacgccattgcacgccagcctaacagagtgagactctgtcttt

SEQ ID NO: 135132 - DNA, 2434 bp, Homo sapiens
  Payload ID: 6409
  Gene Symbol: FHAD1
  Gene Name: forkhead-associated (FHA) phosphopeptide binding domain 1
  ENST ID: ENST00000529606
  CDS Start-End: 1-2106
attactcaagagagaaacagagcgaaagagactttagaggaagaacggaagagaatgcaagaactggagagcctcctggcccagcagaagaaggctttggcgaaaagcattacccaggagaagaacagagtgaaggaagcattagaggaagagcagacaagagtccaagagctggaggaacgcttggcccgccagaaggagatctcagagagcaacattgcgtacgagaaacgcaaagcaaaggaggccatggagaaggaaaagaaaaaggtgcaagacctggagaatcgcttaaccaagcagaaagaggaattagaattaaaagagcaaaaagaggacgttttaaataataaattaagtgacgcactggccatggttgaagagactcagaaaacaaaggcaactgaaagtctaaaagcagagagcctcgccttgaaattaaatgaaacattagccgaactggaaactaccaagacaaaaatgatcatggtggaagagcggctaatcctgcagcagaagatggtaaaggccctccaggatgagcaggaatcacagagacacgggtttgaagaagagatcatggaatataaggagcaaatcaaacagcacgcccagacaattgtgagcctcgaagagaaactccagaaagtcactcagcaccataaaaaaatagaaggcgagattgcaacattgaaggacaatgacccagccccaaaggaggaaaggccgcaagaccctctggtggctcccatgacagagagcagtgccaaagacatggcgtacgaacatctgatagatgacttattggctgctcagaaggaaattctgtctcagcaggaagtcatcatgaagttaaggaaagaccttaccgaagcccacagcagaatgtcggatttgagaggggagctaaacgagaagcagaagatggaactggagcagaacgtggtgctggtccagcagcagagcaaggagctgagtgtgctcaaggagaagatggcccagatgagcagcctggtagaaaagaaagatcgggagctgaaggcccttgaggaggcactcagggcttcccaagagaaacacagactccagctgaacacagagaaggaacagaagccccggaagaagacccagacgtgtgacacctctgtgcagatagaacccgtccacactgaggccttctccagcagccaagagcagcaatccttcagcgatctaggggtcaggtgcaaagggtcccggcacgaggaggtcattcagcgtcagaaaaaggccttatctgaacttcgagcgcgaattaaagaactcgagaaggcgcgctcaccagatcataaagaccaccagaatgaatcatttctagatttaaagaacctcagaatggaaaacaatgtccagaaaatactactggatgcaaaaccggatttgccaactctctcaagaatagagatcctagcgcctcagaatggcctttgcaacgcaaggttcggctcagccatggagaagtcagggaagatggatgtggctgaggctttagagctcagtgaaaagctgtacctggatatgagcaaaaccctcggaagtctcatgaacatcaagaatatgtcaggccacgtgtccatgaaatacctctcccgccaggagagggagaaggtcaaccagcttcgacaaagggacctcgacctggtgtttgataagatcacccaactcaagaaccagctggggaggaaagaggagctgttgagaggatatgaaaaggacgttgaacagctcaggcggagcaaagtgtccattgagatgtaccagtcgcaggtggcaaagctggaggatgatatctacaaagaggccgaagagaaggccctgctgaaggaggccctggagcgcatggagcaccagctgtgccaggagaagaggatcaacagggccatccggcagcagaagagacgagtatttgtagagatggtgaagaacaggatgcagaactcaaattcccaggttggaaccagaaaagcctccctaaagatggaccaagaaagagagatgctgaggaaagagacctccagcaagtccagccagagccttttgcattctaagcccagtggaaagtactagagaaacctcgtcccaccaggcctcatgtgatcctctgtgagttcatgtgactcttctgtgtcatctgtgtcaaaatactgagttgcttttgtaagtctttaaagattgttaccctagtgtttcatttcctagaccagtattttgaacaatattatattttggagactgtggggagaagggttcttctttaaaaatacctatgaatgtacacgaactcaggtatatgaagaatagaagtgtgtaacccagatgtccaggcctggtagatataattatgtggtccacgttgggtcatgatgttcccaaatatcaaacctcctaagacttc

SEQ ID NO: 135133 - DNA, 378 bp, Homo sapiens
  Payload ID: 6409
  Gene Symbol: FHAD1
  Gene Name: forkhead-associated (FHA) phosphopeptide binding domain 1
  ENST ID: ENST00000524761
  CDS Start-End: 19-378
tgcttttcgcctcccaccatgattctgaggcctccccggccatgtggaacttgctcggtgctaaaggaagagttaaaacaggaagatgctcacagggagctcagggaagcccaggagaaagagttaaaactctgcaaaaccctggagcacttcagaagtcaagtcatcaaggccacctatggacgggcgaagccgttccgggacaagcccgtcaccgaccaacagttaatagagaaaattacccaggtcactgaggacaacatcaattttcagcagaaaaagtggaccctccagaaagagacccagctgagcaactccaagcaggaggagaccaccgagaacatcgagaagctgaggacgtcgctggacagctgccag

SEQ ID NO: 135134 - DNA, 1905 bp, Homo sapiens
  Payload ID: 6410
  Gene Symbol: FTCD
  Gene Name: formimidoyltransferase cyclodeaminase
  Uniprot ID: O95954
  ENST ID: ENST00000291670
  CDS Start-End: 45-1670
cttccatctgcccagagaggagcatctggatcaaggtgctggccatgtcccagctggtggaatgcgtccccaacttttcggaggggaagaaccaggaggtgatcgacgccatctctggagccatcacacagaccccgggctgcgtgctgctggatgtggacgcaggcccttccaccaaccgcaccgtgtacaccttcgtggggccgccggagtgcgtggtggagggggccctcaacgctgcccgggtagcttcccgacttatcgacatgagcaggcaccaaggagagcacccccgcatgggggccctagacgtctgccccttcatccccgtgaggggcgtcagcgtggatgagtgtgtgctctgcgcccaggcctttggccagaggctggcagaggagctggacgtgccagtttacctgtacggcgaggcagccaggatggacagtcgccggaccctgccggccatccgggccggggagtacgaggccctccctaagaagctccagcaggccgactgggcgcccgactttggtcccagctcctttgtccccagttggggggccacggccacgggggcgaggaagttcctcattgcttttaacatcaacctgctcggcacaaaggagcaagcccaccgcatcgcgctcaacctgcgggagcagggccgcgggaaggaccagccaggacgtctgaagaaagttcagggcattggctggtacctggatgagaagaacctggctcaggtgtccaccaatcttctggactttgaggtcacggcactgcacacggtctacgaggagacctgccgagaagcacaggagctgagcctcccagtggtgggctcacagctggtgggcctggtgcccctgaaggctctgctggatgcggccgccttctactgcgagaaggagaacctcttcatcctggaggaggagcagcggatcaggctggtggtgagccggctgggcctggactccctgtgccccttcagccctaaggagcggatcatcgagtacctggtccctgagcgcgggcctgagcgaggcctgggcagcaagtccctgcgcgccttcgtgggggaggtgggtgcccgctctgcggcccccgggggcggctcggtggcggcggccgctgcggccatgggtgcggcgctgggctccatggtgggcctcatgacctacgggcggcgccaattccagtccctggacacgacgatgcggcgcctgatcccgcccttccgcgaggcttcggccaagctaaccacgctggtggatgccgacgccgaggccttcaccgcctacctggaagcaatgaggctccccaagaacacacctgaggaaaaggacaggcgcacggcggccctacaggagggtctgaggcgggcagtctctgtgccgctgacgctggcggagacggtggcctcgctgtggccggccctgcaggaactggcccggtgtgggaacctggcctgccggtcagacctccaggtggcggccaaagccctggagatgggcgtgtttggcgcatatttcaacgtgctcatcaacctgagggacatcacagacgaggcatttaaggaccagatccaccatcgtgtttccagcctcctgcaggaagccaagacccaggctgcactggtgctggactgcttggagacccggcaggagtgacgaaaccccagggacagcaggaccttcgacgctggaaggatagcctcgcttcccaggtgcagctcccggcaggtctggacagttccacagagcacggtactggccctgtcctcagttcccgtccacccttcaaccagtggctcctgggagacttttcctccctgcctcagctccctgcccagccagcctcctgtctccagagaagttctccattaaaaaataatttagcaaatca

SEQ ID NO: 135135 - DNA, 1834 bp, Homo sapiens
  Payload ID: 6410
  Gene Symbol: FTCD
  Gene Name: formimidoyltransferase cyclodeaminase
  ENST ID: ENST00000397743
  CDS Start-End: 45-1532
cttccatctgcccagagaggagcatctggatcaaggtgctggccatgtcccagctggtggaatgcgtccccaacttttcggaggggaagaaccaggaggtgatcgacgccatctctggagccatcacacagaccccgggctgcgtgctgctggatgtggacgcaggcccttccaccaaccgcaccgtgtacaccttcgtggggccgccggagtgcgtggtggagggggccctcaacgctgcccgggtagcttcccgacttatcgacatgagcaggcaccaaggagagcacccccgcatgggggccctagacgtctgccccttcatccccgtgaggggcgtcagcgtggatgagtgtgtgctctgcgcccaggcctttggccagaggctggcagaggagctggacgtgccagtttacctgtacggcgaggcagccaggatggacagtcgccggaccctgccggccatccgggccggggagtacgaggccctccctaagaagctccagcaggccgactgggcgcccgactttggtcccagctcctttgtccccagttggggggccacggccacgggggcgaggaagttcctcattgcttttaacatcaacctgctcggcacaaaggagcaagcccaccgcatcgcgctcaacctgcgggagcagggccgcgggaaggaccagccaggacgtctgaagaaagttcagggcattggctggtacctggatgagaagaacctggctcaggtgtccaccaatcttctggactttgaggtcacggcactgcacacggtctacgaggagacctgccgagaagcacaggagctgagcctcccagtggtgggctcacagctggtgggcctggtgcccctgaaggctctgctggatgcggccgccttctactgcgagaaggagaacctcttcatcctggaggaggagcagcggatcaggctggtggtgagccggctgggcctggactccctgtgccccttcagccctaaggagcggatcatcgagtacctggtccctgagcgcgggcctgagcgaggcctgggcagcaagtccctgcgcgccttcgtgggggaggtgggtgcccgctctgcggcccccgggggcggctcggtggcggcggccgctgcggccatgggtgcggcgctgggctccatggtgggcctcatgacctacgggcggcgccaattccagtccctggacacgacgatgcggcgcctgatcccgcccttccgcgaggcttcggccaagctaaccacgctggtggatgccgacgccgaggccttcaccgcctacctggcgcacggcggccctacaggagggtctgaggcgggcagtctctgtgccgctgacgctggcggagacggtggcctcgctgtggccggccctgcaggaactggcccggtgtgggaacctggcctgccggtcagacctccaggtggcggccaaagccctggagatgggcgtgtttggcgcatatttcaacgtgctcatcaacctgagggacatcacagacgaggcatttaaggaccagatccaccatcgtgtttccagcctcctgcaggaagccaagacccaggctgcactggtgctggactgcttggagacccggcaggagtgacggtgcgggaggcctctccgggctctgtggcccctccctcgcccatccccagagggcagagctgtgacctcggtggggacacagcttgttcgtgtggggcccggagggtaggtgggcaggcagcggggcatcgcctgggaatggaggcgctggcagggacagaaggcccctagtcccatgtgacctccagtaaagttttggcaccaaa

SEQ ID NO: 135136 - DNA, 1878 bp, Homo sapiens
  Payload ID: 6410
  Gene Symbol: FTCD
  Gene Name: formimidoyltransferase cyclodeaminase
  Uniprot ID: O95954
  ENST ID: ENST00000397746
  CDS Start-End: 45-1670
cttccatctgcccagagaggagcatctggatcaaggtgctggccatgtcccagctggtggaatgcgtccccaacttttcggaggggaagaaccaggaggtgatcgacgccatctctggagccatcacacagaccccgggctgcgtgctgctggatgtggacgcaggcccttccaccaaccgcaccgtgtacaccttcgtggggccgccggagtgcgtggtggagggggccctcaacgctgcccgggtagcttcccgacttatcgacatgagcaggcaccaaggagagcacccccgcatgggggccctagacgtctgccccttcatccccgtgaggggcgtcagcgtggatgagtgtgtgctctgcgcccaggcctttggccagaggctggcagaggagctggacgtgccagtttacctgtacggcgaggcagccaggatggacagtcgccggaccctgccggccatccgggccggggagtacgaggccctccctaagaagctccagcaggccgactgggcgcccgactttggtcccagctcctttgtccccagttggggggccacggccacgggggcgaggaagttcctcattgcttttaacatcaacctgctcggcacaaaggagcaagcccaccgcatcgcgctcaacctgcgggagcagggccgcgggaaggaccagccaggacgtctgaagaaagttcagggcattggctggtacctggatgagaagaacctggctcaggtgtccaccaatcttctggactttgaggtcacggcactgcacacggtctacgaggagacctgccgagaagcacaggagctgagcctcccagtggtgggctcacagctggtgggcctggtgcccctgaaggctctgctggatgcggccgccttctactgcgagaaggagaacctcttcatcctggaggaggagcagcggatcaggctggtggtgagccggctgggcctggactccctgtgccccttcagccctaaggagcggatcatcgagtacctggtccctgagcgcgggcctgagcgaggcctgggcagcaagtccctgcgcgccttcgtgggggaggtgggtgcccgctctgcggcccccgggggcggctcggtggcggcggccgctgcggccatgggtgcggcgctgggctccatggtgggcctcatgacctacgggcggcgccaattccagtccctggacacgacgatgcggcgcctgatcccgcccttccgcgaggcttcggccaagctaaccacgctggtggatgccgacgccgaggccttcaccgcctacctggaagcaatgaggctccccaagaacacacctgaggaaaaggacaggcgcacggcggccctacaggagggtctgaggcgggcagtctctgtgccgctgacgctggcggagacggtggcctcgctgtggccggccctgcaggaactggcccggtgtgggaacctggcctgccggtcagacctccaggtggcggccaaagccctggagatgggcgtgtttggcgcatatttcaacgtgctcatcaacctgagggacatcacagacgaggcatttaaggaccagatccaccatcgtgtttccagcctcctgcaggaagccaagacccaggctgcactggtgctggactgcttggagacccggcaggagtgacggtgcgggaggcctctccgggctctgtggcccctccctcgcccatccccagagggcagagctgtgacctcggtggggacacagcttgttcgtgtggggcccggagggtaggtgggcaggcagcggggcatcgcctgggaatggaggcgctggcagggacagaaggcccctagtcccatgtgacctccagtaaagttttggcaccaaa

SEQ ID NO: 135137 - DNA, 1955 bp, Homo sapiens
  Payload ID: 6410
  Gene Symbol: FTCD
  Gene Name:: formimidoyltransferase cyclodeaminase
  Uniprot ID: O95954
  ENST ID: ENST00000397748
  CDS Start-End: 45-1763
cttccatctgcccagagaggagcatctggatcaaggtgctggccatgtcccagctggtggaatgcgtccccaacttttcggaggggaagaaccaggaggtgatcgacgccatctctggagccatcacacagaccccgggctgcgtgctgctggatgtggacgcaggcccttccaccaaccgcaccgtgtacaccttcgtggggccgccggagtgcgtggtggagggggccctcaacgctgcccgggtagcttcccgacttatcgacatgagcaggcaccaaggagagcacccccgcatgggggccctagacgtctgccccttcatccccgtgaggggcgtcagcgtggatgagtgtgtgctctgcgcccaggcctttggccagaggctggcagaggagctggacgtgccagtttacctgtacggcgaggcagccaggatggacagtcgccggaccctgccggccatccgggccggggagtacgaggccctccctaagaagctccagcaggccgactgggcgcccgactttggtcccagctcctttgtccccagttggggggccacggccacgggggcgaggaagttcctcattgcttttaacatcaacctgctcggcacaaaggagcaagcccaccgcatcgcgctcaacctgcgggagcagggccgcgggaaggaccagccaggacgtctgaagaaagttcagggcattggctggtacctggatgagaagaacctggctcaggtgtccaccaatcttctggactttgaggtcacggcactgcacacggtctacgaggagacctgccgagaagcacaggagctgagcctcccagtggtgggctcacagctggtgggcctggtgcccctgaaggctctgctggatgcggccgccttctactgcgagaaggagaacctcttcatcctggaggaggagcagcggatcaggctggtggtgagccggctgggcctggactccctgtgccccttcagccctaaggagcggatcatcgagtacctggtccctgagcgcgggcctgagcgaggcctgggcagcaagtccctgcgcgccttcgtgggggaggtgggtgcccgctctgcggcccccgggggcggctcggtggcggcggccgctgcggccatgggtgcggcgctgggctccatggtgggcctcatgacctacgggcggcgccaattccagtccctggacacgacgatgcggcgcctgatcccgcccttccgcgaggcttcggccaagctaaccacgctggtggatgccgacgccgaggccttcaccgcctacctggaagcaatgaggctccccaagaacacacctgaggaaaaggacaggcgcacggcggccctacaggagggtctgaggcgggcagtctctgtgccgctgacgctggcggagacggtggcctcgctgtggccggccctgcaggaactggcccggtgtgggaacctggcctgccggtcagacctccaggtggcggccaaagccctggagatgggcgtgtttggcgcatatttcaacgtgctcatcaacctgagggacatcacagacgaggcatttaaggaccagcctcctgcaggaagccaagacccaggctgcactggtgctggactgcttggagacccggcaggagtgacggtgcgggaggcctctccgggctctgtggcccctccctcgcccatccccagagggcagagctgtgacctcgaaaccccagggacagcaggaccttcgacgctggaaggatagcctcgcttcccaggtgcagctcccggcaggtctggacagttccacagagcacggtactggccctgtcctcagttcccgtccacccttcaaccagtggctcctgggagacttttcctccctgcctcagctccctgcccagccagcctcctgtctccagagaagttctccattaaaaaataatttagcaaatca

SEQ ID NO: 135138 - DNA, 436 bp, Homo sapiens
  Payload ID: 6410
  Gene Symbol: FTCD
  Gene Name: formimidoyltransferase cyclodeaminase
  ENST ID: ENST00000446405
  CDS Start-End: 1-401
cgctgtggccggccctgcaggaactggcccggtgtgggaacctggcctgccggtcagacctccaggtggcggccaaagccctggagatgggcgtgtttggcgcatatttcaacgtgctcatcaacctgagggacatcacagacgaggcatttaaggaccagcctcctgcaggaagccaagacccaggctgcactggtgctggactgcttggagacccggcaggagtgacggtgcgggaggcctctccgggctctgtggcccctccctcgcccatccccagagggcagagctgtgacctcggtggggacacagcttgttcgtgtggggcccggagggtaggtgggcaggcagcggggcatcgcctgggaatggaggcgctggcagggacagaaggcccctagtcccatgtgacctccagtaaagttttggcaccaaa

SEQ ID NO: 135139 - DNA, 1304 bp, Homo sapiens
  Payload ID: 6410
  Gene Symbol: FTCD
  Gene Name: formimidoyltransferase cyclodeaminase
  ENST ID: ENST00000625428
  CDS Start-End: 45-1304
cttccatctgcccagagaggagcatctggatcaaggtgctggccatgtcccagctggtggaatgcgtccccaacttttcggaggggaagaaccaggaggtgatcgacgccatctctggagccatcacacagaccccgggctgcgtgctgctggatgtggacgcaggcccttccaccaaccgcaccgtgtacaccttcgtggggccgccggagtgcgtggtggagggggccctcaacgctgcccgggtagcttcccgacttatcgacatgagcaggcaccaaggagagcacccccgcatgggggccctagacgtctgccccttcatccccgtgaggggcgtcagcgtggatgagtgtgtgctctgcgcccaggcctttggccagaggctggcagaggagctggacgtgccagtttacctgtacggcgaggcagccaggatggacagtcgccggaccctgccggccatccgggccggggagtacgaggccctccctaagaagctccagcaggccgactgggcgcccgactttggtcccagctcctttgtccccagttggggggccacggccacgggggcgaggaagttcctcattgcttttaacatcaacctgctcggcacaaaggagcaagcccaccgcatcgcgctcaacctgcgggagcagggccgcgggaaggaccagccaggacgtctgaagaaagttcagggcattggctggtacctggatgagaagaacctggctcaggtgtccaccaatcttctggactttgaggtcacggcactgcacacggtctacgaggagacctgccgagaagcacaggagctgagcctcccagtggtgggctcacagctggtgggcctggtgcccctgaaggctctgctggatgcggccgccttctactgcgagaaggagaacctcttcatcctggaggaggagcagcggatcaggctggtggtgagccggctgggcctggactccctgtgccccttcagccctaaggagcggatcatcgagtacctggtccctgagcgcgggcctgagcgaggcctgggcagcaagtccctgcgcgccttcgtgggggaggtgggtgcccgctctgcggcccccgggggcggctcggtggcggcggccgctgcggccatgggtgcggcgctgggctccatggtgggcctcatgacctacgggcggcgccaattccagtccctggacacgacgatgcggcgcctgatcccgcccttccgcgaggcttcggccaagctaaccacgctggtggatgccgacgccgaggccttcaccgcctacctg

SEQ ID NO: 135140 - DNA, 1304 bp, Homo sapiens; identical to SEQ ID NO: 135139
  Payload ID: 6410
  Gene Symbol: FTCD
  Gene Name: formimidoyltransferase cyclodeaminase
  ENST ID: ENST00000625846
  CDS Start-End: 45-1304

SEQ ID NO: 135141 - DNA, 1304 bp, Homo sapiens; identical to SEQ ID NO: 135139
  Payload ID: 6410
  Gene Symbol: FTCD
  Gene Name: formimidoyltransferase cyclodeaminase
  ENST ID: ENST00000629394
  CDS Start-End: 45-1304

SEQ ID NO: 135142 - DNA, 1304 bp, Homo sapiens; identical to SEQ ID NO: 135139
  Payload ID: 6410
  Gene Symbol: FTCD
  Gene Name: formimidoyltransferase cyclodeaminase
  ENST ID: ENST00000625714
  CDS Start-End: 45-1304

SEQ ID NO: 135143 - DNA, 944 bp, Homo sapiens
  Payload ID: 6411
  Gene Symbol: FTCDNL1
  Gene Name: formiminotransferase cyclodeaminase N-terminal like
  ENST ID: ENST00000416668
  CDS Start-End: 442-675
gcgcgcgggccacgcgcggcggcggaggctgcgcgcgggccacgcgcggcggcgacttgggctgggcggtcgccctgccccaccgcccttcggcgctcgcaggtccgctcccctcccaaaccgcagagcggcaggcgcggccgctggttcgagagctcggccggggcagcgcagccgccggctgcccctcgctcccaggcgccacaaccccgcgccctcgccgctgctgcgtcccgcgagacctgtggggaggccgggagtcacttcgggttccctttcagcccacgtggtcctgggacactccacccaggaacctagtcggcaccgcgcagggaatcccagcagcggggttctggccccagcacgcgttgcggcagcctggcgagcgtccttgcggcctccaagtgccggtggggtgcgtgcgcagggggcagaaaaatcatgtcttcttccagagtggggctccgtttggctgcctgtttactaaacgtttcagaagccggaagaaaatacattgttgagaacatagcaaaagcagctcttcttgacaaaaatggaaagaaacatcctcaagtttcagtgctcaatatattttccgatcaagactacaagagatcagtcattacaatagcaacttctgttgataagttggtggacaagcgcaaccaagcctaaaggcaagtgctgttgcgaggtcgacatccaggaaccagaggagggcagagcaatccacagaatggatctggggtgactcatggaggaaaaccaacacacagtaccatttaattctttttaaaaagatggaaaattataccatacccagaattactaaattctaaatagagggtatattgcatttacatttgtaaaagaatgtttccccatgtatcttttaaaaattcattttaaagatatacaataaaaagtgtttaactctgtttttc

SEQ ID NO: 135144 - DNA, 772 bp, Homo sapiens
  Payload ID: 6411
  Gene Symbol: FTCDNL1
  Gene Name: formiminotransferase cyclodeaminase N-terminal like
  ENST ID: ENST00000420922
  CDS Start-End: 123-467
ctccacccaggaacctagtcggcaccgcgcagggaatcccagcagcggggttctggccccagcacgcgttgcggcagcctggcgagcgtccttgcggcctccaagtgccggtgggaaaaatcatgtcttcttccagagtggggctccgtttggctgcctgtttactaaacgtttcagaagccggaagaaaatacattgttgagaacatagcaaaagcagctcttcttgacaaaaatggaaagaaacatcctcaagtttcagtgctcaatatattttccgatcaagactacaagagatcagtcattacaatagcaacttctgttgataagttgggcagttctgttctggctgcctgcctagaggccttccaggctatcgatatggaagttcaagagggaatccacccttgcctgggagcagtggacttgattccgatttaccctctctctggtgtcacagtggaatagtgtggagtggtggccagaatggacaagcgcaaccaagcctaaaggcaagtgctgttgcgaggtcgacatccaggaaccagaggagggcagagcaatccacagaatggatctggggtgactcatggaggaaaaccaacacacagtaccatttaattctttttaaaaagatggaaaattataccatacccagaattactaaattctaaatagagggtatattgcatttacatttgtaaaagaatgtttccccatgtatcttttaaaaattcattttaaagatatacaataaaaagtgtttaactctg

SEQ ID NO: 135145 - DNA, 1021 bp, Homo sapiens
  Payload ID: 6411
  Gene Symbol: FTCDNL1
  Gene Name: formiminotransferase cyclodeaminase N-terminal like
  ENST ID: ENST00000420128
  CDS Start-End: 412-828
gcgcgcgggccacgcgcggcggcgacttgggctgggcggtcgccctgccccaccgcccttcggcgctcgcaggtccgctcccctcccaaaccgcagagcggcaggcgcggccgctggttcgagagctcggccggggcagcgcagccgccggctgcccctcgctcccaggcgccacaaccccgcgccctcgccgctgctgcgtcccgcgagacctgtggggaggccgggagtcacttcgggttccctttcagcccacgtggtcctgggacactccacccaggaacctagtcggcaccgcgcagggaatcccagcagcggggttctggccccagcacgcgttgcggcagcctggcgagcgtccttgcggcctccaagtgccggtggggtgcgtgcgcagggggcagaaaaatcatgtcttcttccagagtggggctccgtttggctgcctgtttactaaacgtttcagaagccggaagaaaatacattgttgagaacatagcaaaagcagctcttcttgacaaaaatggaaagaaacatcctcaagtttcagtgctcaatatattttccgatcaagactacaagagatcagtcattacaatagcaacttctgttgataagttgggccttgctgaggatctggtgctgcatgttcctggctgcagcgtgtttctctttggcgaagctgacctgcctgagaagcgcagtcttgtgcagagaaggaagcagctgggctggttcacgaggagggatttcagtgctcttcagcctgacctgggagctgccccttcccaaagatgtggtttaacagcttgcttcagggcgttgtgacagttgtgttggaagaaaattggaatttcagccttgcagtgaggggatccgtgctgccaccagagcagctgagtgccaatctgcgggaggcgggagtggagcgaaactgcaaactgagaaacaaactttcacatcaggtttctaattttagagcaaaaagtggaattactttaattatatgacatttaactag

SEQ ID NO: 135146 - DNA, 1997 bp, Homo sapiens
  Payload ID: 6411
  Gene Symbol: FTCDNL1
  Gene Name: formiminotransferase cyclodeaminase N-terminal like
  Uniprot ID: E5RQL4
  ENST ID: ENST00000622774
  CDS Start-End: 389-832
gacttgggctgggcggtcgccctgccccaccgcccttcggcgctcgcaggtccgctcccctcccaaaccgcagagcggcaggcgcggccgctggttcgagagctcggccggggcagcgcagccgccggctgcccctcgctcccaggcgccacaaccccgcgccctcgccgctgctgcgtcccgcgagacctgtggggaggccgggagtcacttcgggttccctttcagcccacgtggtcctgggacactccacccaggaacctagtcggcaccgcgcagggaatcccagcagcggggttctggccccagcacgcgttgcggcagcctggcgagcgtccttgcggcctccaagtgccggtggggtgcgtgcgcagggggcagaaaaatcatgtcttcttccagagtggggctccgtttggctgcctgtttactaaacgtttcagaagccggaagaaaatacattgttgagaacatagcaaaagcagctcttcttgacaaaaatggaaagaaacatcctcaagtttcagtgctcaatatattttccgatcaagactacaagagatcagtcattacaatagcaacttctgttgataagttgggccttgctgaggatctggtgctgcatgttcctggctgcagcgtgtttctctttggcgaagctgacctgcctgagaagcgcagtcttgtgcagagaaggaagcagctgggctggttcacgaggagggatttcagtgctcttcagcctgacctgggagctgccccttcccaaagatgtggtttaacaggttctgagcatggtttttgctttgctctgttttttttttttttttaaacttgaggtcccctttatgagccacaccctgttaatgcaggaagagttataggggtggctgcttcttgaaatgggtgaggctctcctttctgctgttactctcacccaggcccttttaagctaacctgtgagcctagaagctcccgtcaagtatttgatgagggcccccagaagtgatattcaagatatatcattagccctgcaacgtgatcactgatgaaaagaatgctcgtagctcctggcactggggcagggtcctggaggcccctgtctgtgaatggtgtggggtgtgtcctagggtgtgatggagacacctggagagggaggacttagggagagatcacttctagctggtaggaaggtctttcaatacttaaacatcagtgtagccaagttggtgcttacagctggaaatcagttctagaggaaccctggaaaaaagctgttctagataacggacttctagaatgcagagaccaaagactggaaaaagaaactattccttcccctggcttttatcaacttttgcctctctgtgctgctcctgccctcactccctgccccaccctaagggatgtgtcaggaaaaggtggaactcctctctgttgtctgtacttccaccatcctagtgtcacttatttgagtcttaattgttccattttcagactctgttggggccacaaattaaaccatgtaaggtcacattttgatggtcagtcaataacttaagcagttaccaaaatactaggtatccaaggagcgagaggtgggcgagcataagaaacacatttctcatggcacagctctgccaaagccctgcagaatcatttacacataggtctttggttagtagcccctggcacagaattctgatcttaaacaaatattgtctataatcaagtagagcaatgcaattaaaaaaaaaaagcacaggttttggggccatgctgaaatcccagccttgctatttgctggctgtgtgaccgtggttccttggtctcattatgctttggttcccgtatctataaaacggacgtaataatgtctccctctcattattgtgaagtcgaaatgatgtctgtaaagtgcccaacacagtactaaagggctatttttttcttccctatgaagatgagatttaataaaagtgatattacaaatgtat

SEQ ID NO: 135147 - DNA, 3930 bp, Homo sapiens; identical to SEQ ID NO: 134851
  Payload ID: 6412
  Gene Symbol: FMN1
  Gene Name: formin 1
  Uniprot ID: Q68DA7
  ENST ID: ENST00000320930
  CDS Start-End: 468-2456

SEQ ID NO: 135148 - DNA, 12355 bp, Homo sapiens; identical to SEQ ID NO: 134853
  Payload ID: 6412
  Gene Symbol: FMN1
  Gene Name: formin 1
  Uniprot ID: Q68DA7
  ENST ID: ENST00000334528
  CDS Start-End: 1-3591

SEQ ID NO: 135149 - DNA, 4060 bp, Homo sapiens; identical to SEQ ID NO: 134859
  Payload ID: 6412
  Gene Symbol: FMN1
  Gene Name: formin 1
  Uniprot ID: Q68DA7
  ENST ID: ENST00000558197
  CDS Start-End: 279-1790

SEQ ID NO: 135150 - DNA, 393 bp, Homo sapiens; identical to SEQ ID NO: 134858
  Payload ID: 6412
  Gene Symbol: FMN1
  Gene Name: formin 1
  ENST ID: ENST00000559610
  CDS Start-End: 1-343

SEQ ID NO: 135151 - DNA, 699 bp, Homo sapiens; identical to SEQ ID NO: 134857
  Payload ID: 6412
  Gene Symbol: FMN1
  Gene Name: formin 1
  ENST ID: ENST00000560317
  CDS Start-End: 1-545

SEQ ID NO: 135152 - DNA, 4251 bp, Homo sapiens; identical to SEQ ID NO: 134852
  Payload ID: 6412
  Gene Symbol: FMN1
  Gene Name:: formin 1
  ENST ID: ENST00000561249
  CDS Start-End: 127-4092

SEQ ID NO: 135153 - DNA, 576 bp, Homo sapiens; identical to SEQ ID NO: 134855
  Payload ID: 6412
  Gene Symbol: FMN1
  Gene Name: formin 1
  ENST ID: ENST00000558711
  CDS Start-End: 1-175

SEQ ID NO: 135154 - DNA, 4260 bp, Homo sapiens; identical to SEQ ID NO: 134854
  Payload ID: 6412
  Gene Symbol: FMN1
  Gene Name: formin 1
  Uniprot ID: Q68DA7
  ENST ID: ENST00000559047
  CDS Start-End: 1-4260

SEQ ID NO: 135155 - DNA, 13529 bp, Homo sapiens; identical to SEQ ID NO: 134856
  Payload ID: 6412
  Gene Symbol: FMN1
  Gene Name: formin 1
  Uniprot ID: Q68DA7
  ENST ID: ENST00000616417
  CDS Start-End: 505-4764

SEQ ID NO: 135156 - DNA, 6434 bp, Homo sapiens
  Payload ID: 6413
  Gene Symbol: FMN2
  Gene Name: formin 2
  Uniprot ID: Q9NZ56
  ENST ID: ENST00000319653
  CDS Start-End: 231-5399
gccgcagccgcagccgcagcgacggcagccacgggagccgccgcgcattatgcaaagcggcggcagatgcgagcggggccagccgggcgcgcgtcggcctcccctcccagcggctccccccgccgccgcctgactctcccgggagactccctaggcccggacctggggccgaggagggccgggatggcctgagtgcccgcggcgcggcggcgcagcagcgggattgcaccatggggaaccaggatgggaagctgaagaggagcgcaggtgatgctttgcacgaaggcggcggtggcgccgaggatgcgctggggcccagggatgtggaagccacaaagaaggggagcgggggcaagaaggcgctaggcaagcacggcaaggggggagggggcggcggcggcggcggggagtcgggcaagaagaagagcaagtccgactccagagcctcggtgttttccaacctgcggatcaggaagaatctgtccaaggggaaaggcgccggcggctcccgcgaagatgtactggattcccaggccctgcagaccggggagctggacagcgctcactccctgctcaccaagactccagacctcagcctctcggcggacgaggccggcctgtcggataccgagtgtgcggacccttttgaggtgaccggtccagggggtcctgggcctgccgaggctagggtcgggggccggccgatcgccgaggatgtggaaactgcagcaggggcgcaggatggacaaaggaccagctcgggctcggacacggacatctatagcttccattcggctacggagcaagaggatttgctttcagacatccagcaggcgatccgcctgcagcagcagcagcagcagcagctccagctccagctccagcaacagcagcagcagcagcagctccagggcgccgaggagcctgcagcgccccccactgccgtctcccctcagcccggggccttcctgggcctggaccggttcctgctggggccgagcggcggggctggggaggccccgggcagtccggacaccgagcaggcgctgtccgcgctctccgacctgcccgagagcctggccgccgagccccgggagccccagcaaccgccgtcccccggcggcctcccggtctccgaggcgcccagtctcccggcagcgcaacccgcggccaaagactcgccctcctccacggctttcccatttcccgaggccgggccgggggaggaagcggccggagcccccgtgcgaggggctggggacacggatgaggagggtgaggaggatgcttttgaggatgcgccccggggctctccgggggaggagtgggccccggaggtgggagaggacgccccgcagaggctgggggaagagccggaggaggaggcgcaaggacctgacgcccccgcggccgcttccctgcccggcagccccgcgcctagccagcgctgtttcaagccctacccgctcatcaccccctgctacatcaagaccaccacccggcagctcagctcgcccaatcactccccgtctcagtcccctaatcagagccccaggatcaagaggcggccggaaccctccctgagccgagggtccagaactgccctggcctccgtagccgccccggccaagaagcaccgggccgacggcggccttgcggccggcctgagccgctcggctgactggacggaggagctaggcgcccgcacgccccgggtgggaggctccgcgcacctgctggagcgcggggtggcgagtgacagcggcggtggggtgtccccagcactggccgccaaggcgtctggggcccccgcggctgcggatggcttccagaacgtgttcacagggcgaacgctgttggagaagctgttcagccagcaggagaacgggcctccagaagaagcagagaagttttgctcccggatcattgccatgggtcttctccttccttttagtgattgcttcagggaaccgtgtaatcagaatgcccagacgaatgcagcttcgtttgatcaagatcaactttatacctgggctgcagttagtcaacccacacactcattggactattcagaagggcagtttcctaggcgagttccatccatggggccaccatccaaacctcccgatgaggaacacaggctcgaggatgctgaaacagaatctcaatctgctgtttcagaaactccccaaaaacgctcagatgctgtccagaaggaagttgttgacatgaagtctgagggacaggccactgtaattcagcagctggaacagactattgaggatctgagaaccaaaatagctgaactagagaggcagtatcctgccctggacacagaggtggccagtggtcatcaagggcttgagaatggagtgacagcctcaggcgatgtctgtctcgaagctctcaggttagaagaaaaggaagtacggcatcataggattttagaggcgaaatcgatacagacttcccccacggaagagggcggggtgctgacactgcctcctgtggatgggctgccagggcgtcctccatgcccccctggggctgaaagtggacctcagacaaagttctgttcagagatttctttgattgtgtctccaaggcgaatatcagtccagctcgacagccatcagcccacacagagcatctcacagcctccaccacctccatcccttctgtggtctgctgggcaaggacagcctgggtcacagccgccccattctatttctaccgagtttcaaaccagccacgaacactctgtttcctctgcctttaaaaacagctgtaacatcccatctccaccacctctgccttgcacagagtcctccagctccatgcctggcctgggcatggtgcctcccccacctccccctctccctggcatgacagtgcctactctgcccagtacagccattccccaacctcctcctctgcagggtacagaaatgctgccaccccctccccctcctcttcccggagcgggcatacctcctccgccgcctctacccggagcaggcatactccctctgccccctctacccggagcgggaatacctcctccgccccctctacccggagcggcaataccccctccgccccctcttcccggggcaggcataccccttcctccccctcttcccggagcaggaatacctcctccaccccctctacccggagcgggcataccccctcctcccccacttcccggagcgggcataccccctccgcccccacttcccggagcgggcataccccctcctccccctcttcccggagcgggcatacctcctccaccccctctacccggagcgggcataccccctccgcccccacttcccggagcgggcataccccctccgcccccacttcccggagcgggcataccccctcctccccctcttcccggagcgggcatacctcctccaccccctctacccggagcgggcataccccctccgcccccacttcccggagcgggcatacccccacctccccctctacccggagcgggcataccccctccgccccctctacccggagtgggcatacctcctccgccccctctacccggagcgggcataccccctcctccccctctacccggagcgggcataccccctcctccccctcttcccggagcgggcatacctcctccaccccctctacccagagtgggcataccccctccgcccccacttcccggagcgggcatacccccacctccccctctacccggagcgggcataccccctccgccccctctacctggagtgggaatacctcctccgccccctctacctggagtgggaatacctcctccgccccctctacctggtgctgggattcccccacctcctcccttgccaggtatggggattccacctgctccagctcccccactccctccacctgggacaggaatcccaccgccccctctgcttcctgtatcaggccctccactcctcccacaagttgggagtagcactttaccaaccccacaggtgtgtggatttcttcctcctccattgccaagtggcttgtttggattagggatgaatcaggacaaagggagtaggaagcagcccatagagccttgtcgaccaatgaagcctctttactggaccaggattcaactacatagtaaaagagactccagtacttcacttatttgggaaaaaattgaagagccatccatagattgtcatgaatttgaggaattattttctaaaactgctgtaaaggagagaaagaaacctatctctgatactatctcaaagacgaaggctaaacaagttgtcaagttattaagcaacaaaagatcacaagcagttggaatactaatgtctagccttcatttagatatgaaagacatacaacatgctgttgtgaacttggataattctgtggttgacctggagacccttcaagctctctatgagaatagagcacagtcagacgaactcgaaaaaatagaaaagcatggccgatcttccaaagacaaggaaaatgccaagtctctggacaaacctgaacagttcctttatgaactgtcactaatccccaacttttcagagcgagtcttttgcatcctgttccagtccacattttcagaaagcatttgctcaattcgtcgcaaactggaattactacagaaattgtgtgagacattaaaaaatggcccaggggttatgcaggttctaggtttggttcttgcctttggcaactacatgaatggaggaaataagactcgaggacaggcagatggctttggattagacattcttccaaaactgaaagatgtcaagagcagtgacaatagcagaagccttttgtcatatattgtttcgtattatctccgaaattttgatgaggatgctggaaaagaacagtgcctctttccactgccagaaccccaggacctttttcaggcctcacagatgaagtttgaagattttcaaaaagatctcagaaaactgaagaaagacttgaaagcctgtgaagttgaagcagggaaagtataccaggtctcctcaaaagagcatatgcagcctttcaaggaaaacatggaacaatttattattcaagccaaaattgaccaagaggcagaggaaaattcactgacagagactcataaatgctttttggagaccacggcatatttcttcatgaaaccaaaacttggagagaaggaggtgtccccaaatgctttcttcagtatctggcatgaattcagctctgactttaaagacttctggaagaaagagaacaaacttcttctacaagagagagtaaaagaagccgaagaggtgtgtagacagaagaaaggaaaatcactttataaaataaaaccaagacatgactctggaattaaagcaaagataagcatgaaaacttgaacaatgaaaagcagaatgaaaatgagtcattgcaacgactttcacaaaattcagctgacctgagagtgggagggaaactaccgtcattctgctcatgtttcttcttgacctcttgcataatctttttgttttctagacagttcactaattgttgaattttactgtatattcatataaaaatgcaaacgtactagaccagtggagaatttgacaccttttctttttgtaaaagtttatggtattataccgatagaccaaaacagcatgtgtaagaggcagtatctgcactaattctcaacatgctaaacattaactacaattcactgttgtgagaatattcctcgtcacagcaaaaacactttcctttctactgacaaccagtcctccacatcacagcatttagacatatgggtaaaatgttatttctagtgaattgtttgtatcagtttcatgtctaagtataaattttctattttaaaatttaagaaccgtttataatcagtgctttcccaactcttgggttgctctccataactatgtatttgtgaaagaaaatggtcattttttttactgaagtcatataatgacttgggtcagctcgtaatgcattgtgatggttttgtatgagctgggtgtttttttccattacttttaatgatcttcgttgcaagttatagttgtggataaaggggagaatttattgctcttgcaaaccaattatggaaagcaacttaagaaaaccaatgttctaaatcataattgtttgtatttatgtaaagtatggtctcttactttttagtttgtagtttaagtgcaaagaaacagtagtggttttttttctattgttttgtagtcttcctgtccccttcagtccctccagtgtgtatattaccattctccaatgaaataatagggcatttaacaaagatcgctatgtgcaatactgtatttagtgtttctatttcaatttttctaggatgttaatttatatgaaaataaaatgaataataaaagaataaagatacttgcaaaaga

SEQ ID NO: 135157 - DNA, 602 bp, Homo sapiens
  Payload ID: 6413
  Gene Symbol: FMN2
  Gene Name: formin 2
  ENST ID: ENST00000441342
  CDS Start-End: 304-602
gttaaaaggggactgacaggatgaaggcagtacagaatgctgggctgagagcaggactgagatcctagaggcagaatcccagtctacccgtactctctgggaggaagtgatgagaacttgcagcagggtggtggtagtgaaagagaagaatgaaagacaaggaagcatcagtggaacttgatgtgtggctggataccagaaatgcagaggaagttagtcaaaggttcccgtcctgatgactggagatcatggtatcactgactgagctctaggggttgtgaaatagagctcattaggcagaggatggttgtcaagttattaagcaacaaaagatcacaagcagttggaatactaatgtctagccttcatttagatatgaaagacatacaacatgctgttgtgaacttggataattctgtggttgacctggagacccttcaagctctctatgagaatagagcacagtcagacgaactcgaaaaaatagaaaagcatggccgatcttccaaagacaaggaaaatgccaagtctctggacaaacctgaacagttcctttatgaactgtcactaatccccaacttttcagagcgagtcttttgcat

SEQ ID NO: 135158 - DNA, 906 bp, Homo sapiens
  Payload ID: 6413
  Gene Symbol: FMN2
  Gene Name: formin 2
  ENST ID: ENST00000447095
  CDS Start-End: 221-906
atcgccagaatggctgaacccaggcgctttctacggctctctttcctcttggtcagctccaagtatgagatttatgaacgttgaagaggttcattgattcaccattgtggtacaggatgttgacagcaaagaagggcgaacgctgttggagaagctgttcagccagcaggagaacgggcctccagaagaagcagagaagttttgctcccggatcattgccatgggtcttctccttccttttagtgattgcttcagggaaccgtgtaatcagaatgcccagacgaatgcagcttcgtttgatcaagatcaactttatacctgggctgcagttagtcaacccacacactcattggactattcagaagggcagtttcctaggcgagttccatccatggggccaccatccaaacctcccgatgaggaacacaggctcgaggatgctgaaacagaggatgatggagaatctcaatctgctgtttcagaaactccccaaaaacgctcagatgctgtccagaaggaagttgttgacatgaagtctgagggacaggccactgtaattcagcagctggaacagactattgaggatctgagaaccaaaatagctgaactagagaggcagtatcctgccctggacacagaggtggccagtggtcatcaagggcttgagaatggagtgacagcctcaggcgatgtctgtctcgaagctctcaggttagaagaaaaggaagtacggcatcataggattttagaggcgaaatcgatacagacttcccccacggaagagggcggggtgctgacactgcctcctgtggatgggctgccagggcgtcctccatgcccccctggggctgaaagtggacctcagacaaagttctgttcagagatttctttgattgtgtctccaag

SEQ ID NO: 135159 - DNA, 1913 bp, Homo sapiens
  Payload ID: 6413
  Gene Symbol: FMN2
  Gene Name: formin 2
  ENST ID: ENST00000545751
  CDS Start-End: 288-884
caagtctctggacaaacctgaacagttcctttatgaactgtcactaatccccaacttttcagagcgagtcttttgcatcctgttccagtccacattttcagaaagcatttgctcaattcgtcgcaaactggaattactacagaaattgtgtgagacattaaaaaatggcccaggggttatgcaggttctaggtttggttcttgcctttggcaactacatgaatggaggaaataagactcgaggacaggcagatggctttggattagacattcttccaaaactgaaagatgtcaagagcagtgacaatagcagaagccttttgtcatatattgtttcgtattatctccgaaattttgatgaggatgctggaagaacagtgcctctttccactgccagaaccccaggacctttttcaggcctcacagatgaagtttgaagattttcaaaaagatctcagaaaactgaagaaagacttgaaagcctgtgaagttgaagcagggaaagtataccaggtctcctcaaaagagcatatgcagcctttcaaggaaaacatggaacaatttattattcaagccaaaattgaccaagaggcagaggaaaattcactgacagagactcataaatgctttttggagaccacggcatatttcttcatgaaaccaaaacttggagagaaggaggtgtccccaaatgctttcttcagtatctggcatgaattcagctctgactttaaagacttctggaagaaagagaacaaacttcttctacaagagagagtaaaagaagccgaagaggtgtgtagacagaagaaaggaaaatcactttataaaataaaaccaagacatgactctggaattaaagcaaagataagcatgaaaacttgaacaatgaaaagcagaatgaaaatgagtcattgcaacgactttcacaaaattcagctgacctgagagtgggagggaaactaccgtcattctgctcatgtttcttcttgacctcttgcataatctttttgttttctagacagttcactaattgttgaattttactgtatattcatataaaaatgcaaacgtactagaccagtggagaatttgacaccttttctttttgtaaaagtttatggtattataccgatagaccaaaacagcatgtgtaagaggcagtatctgcactaattctcaacatgctaaacattaactacaattcactgttgtgagaatattcctcgtcacagcaaaaacactttcctttctactgacaaccagtcctccacatcacagcatttagacatatgggtaaaatgttatttctagtgaattgtttgtatcagtttcatgtctaagtataaattttctattttaaaatttaagaaccgtttataatcagtgctttcccaactcttgggttgctctccataactatgtatttgtgaaagaaaatggtcattttttttactgaagtcatataatgacttgggtcagctcgtaatgcattgtgatggttttgtatgagctgggtgtttttttccattacttttaatgatcttcgttgcaagttatagttgtggataaaggggagaatttattgctcttgcaaaccaattatggaaagcaacttaagaaaaccaatgttctaaatcataattgtttgtatttatgtaaagtatggtctcttactttttagtttgtagtttaagtgcaaagaaacagtagtggttttttttctattgttttgtagtcttcctgtccccttcagtccctccagtgtgtatattaccattctccaatgaaataatagggcatttaacaaagatcgctatgtgcaatactgtatttagtgtttctatttcaatttttctaggatgttaatttatatgaaaataaaatgaataataaaagaataaagatacttgc

SEQ ID NO: 135160 - DNA, 2902 bp, Homo sapiens
  Payload ID: 6413
  Gene Symbol: FMN2
  Gene Name: formin 2
  ENST ID: ENST00000543681
  CDS Start-End: 2661-2789
attcctgccctggtggagcttacattatagaagggaggtccagaccatcaataaatatacagcgaagctccaaggaaaaacagagcagggcaaagagaagacagctatgggaggtggtttattttatataaattagccagacagtgcctctgagaggtgatgtctaagcagggactcggagatgagggaataagctaatggatatctgaagaaagaaccttccacatggatgaagcatcgcatgcaaagctcaaggaaggagcatgtttagtcaagtgcctaaagtggctggagcagagtgagtgagagttgagaggtagaagatgaattcggagagggagcattggggccagactatgtagcctagtgggccaagtgaggtcaggcctttaagaaggagcgtattgaggaagaaccatgcacactactgctagtgctagggtgagaaagatgaggactgagaactgacctggatttgggatcttgggtgaatgagtgacatccgcaagagtagtctctgttgactggttagggacagatgtctgattaactgggagcacaggaagctggggcagtgactctaggtaacacgctcttgaggcattggtatatgtaaagggtcacaatggaaaggaaagctagcaggagggcaagggaattagggttttgtttttgtgtttatttttggtgctgggataaacagcgtatgtgtcactgggtagaaatgatccagtaaaggaaaaattgtgaactttgttctctcttaatatgtgtgtttcgttgattcattcctgacttgtatctcccacatcttatcccttaattaagccattcttcctcttgcataattgcaaattattatgatataaatagctttgttgtactcttttatgagttttacagggaggaaattgcataaactctctataaagtaatttctatgtttaaaagcccttaagttctcccgccccatagcctgaccaaaaaagtcttactaaacaaaaataggatacaaatgatccatacacatcatcctggctagagaagggtcagaaactacagtgttgttagaaccaatagagcttaactttatatctcactggctttaataaaaaacttttctgagctatttgacacaaaaatcactaagattaagaaaatatcttaacacaggtggaaatagtaaaaggatgtttgcatgaaaaccgtcaaatgtaataaacagcactattctctgataataaaagatgaatctggctgtcagatgcaattttataatagcttcgaccatcatgtacggcaggagtatttttttttatttactatcgttaagtttgtggaaccagtgattgttgttttactattttgttaaggaaacctaaaacattcttagaatgtacagaaagaatatggtcattcttataggaccaaagggcgtatcaagtgagctgcttttgtaaataccatgaaaatccaagtctgacatggaattaaaatcatctctactacaagatgcagaaaaaaaccaaactcttttttttctatatcagagacttaaaaatattagtgatgaccaatgtgattagaagctttaaaatcctaacatttatgtgaacaaaaatcttcctgttttcagagacttaagcatatcatctgagcattgaaaaaagctcttaatagtacctttcagatttctcatctgttttcagatcccatattaaactccttgtggaagaatgagaaagaaagctactctaaattttacagaatagaattcaggctctttatttacaaaatggagtgtgaaccttgctgtttactcatctaccccctcaagcaattgtgttttccttccttatcagcacagaccatcacagttccaggatttgtctgagatgctagccacctctgattgctattcactggacactcttgtgattgtgatttaagattgtaggccaggcatgagccaccgcgcccagccggcatgtaaatttttatgtgacactttttttttggtggggggtggcaggggagagggtctcactgttgcccaggctagagtgcagaggtgctgatcacagctcactgcagggcacgcaccaccatgcccggctaagtttttgtattttttgtggagtcagggtctcactctgttgcccatgctggtctggaactcctgggctcaagcaattcacccgccttggcatcccaaagtgctgggattgcaggcatgagctactccgccctggctgtgatactctttaattattctaatgcttctaacttacgtcatggtgccaatcctatttatataatagaatcaatctcatactctcagctgacaatgaggggtatttcattttttacttgtatataagattccttttatataggatgaaatgcatacacactctgcatagaaattcttatgtgtttgtatattactccattcaatcatactatgattccaagttaagaactcctagataaattagcgtctgtagctgtaacagttgaggctttcaattcaaatgtcagataacattcttctgtgtattgtattattttctgcagtaattcaaatctttattgagttgaggtttgctcacttactataaggtagaatgaggtgatctaagtaggttttgtttaaatacatgtgtcttctccccatcagagtaaaagaagccgaagaggtgtgtagacagaagaaaggaaaatcactttataaaataaaaccaagacatgactctggaattaaagcaaagataagcatgaaaacttgaacaatgaaaagcagaatgaaaatgagtcattgcaacgactttcacaaaattcagctgacctgagagtgggagggaaactaccgtcattctgctcatgtttcttcttgacctct

SEQ ID NO: 135161 - DNA, 1977 bp, Homo sapiens
  Payload ID: 6414
  Gene Symbol: FNBP1
  Gene Name: formin binding protein 1
  Uniprot ID: Q96RU3
  ENST ID: ENST00000355681
  CDS Start-End: 193-1971
attttgctgtggagcggcggggaggaggagccgccgaggagaccccgggcgaggagctgcgagccggaggaggccgcgcggactccgggctttccgccgtcgcggggatctcggggggcaaagggatcgccggggagggggaccagagagccgcgcccgccgcgcggagcgccccttcgcgtcccctgcaccatgagctggggcaccgagctctgggatcagtttgacaacttagaaaaacacacacagtggggaattgatattcttgagaaatatatcaagtttgtgaaagaaaggacagagattgaactcagctatgcaaagcaactcaggaatctttcaaagaagtaccaacctaaaaagaactcgaaggaggaagaagaatacaagtatacgtcatgtaaagctttcatttccaacctgaacgaaatgaatgattacgcagggcagcatgaagttatctccgagaacatggcatcacagatcattgtggacttggcacgctatgttcaggaactgaaacaggagaggaaatcaaactttcacgatggccgtaaagcacagcagcacatcgagacttgctggaagcagcttgaatctagtaaaaggcgatttgaacgcgattgcaaagaggcggacagggcgcagcagtactttgagaaaatggacgctgacatcaatgtcacaaaagcggatgttgaaaaggcccgacaacaagctcaaatacgtcaccaaatggcagaggacagcaaagcagattactcatccattctccagaaattcaaccatgagcagcatgaatattaccatactcacatccccaacatcttccagaaaatacaagagatggaggaaaggaggattgtgagaatgggagagtccatgaagacatatgcagaggttgatcggcaggtgatcccaatcattgggaagtgcctggatggaatagtaaaagcagccgaatcaattgatcagaaaaatgattcacagctggtaatagaagcttataaatcagggtttgagcctcctggagacattgaatttgaggattacactcagccaatgaagcgcactgtgtcagataacagcctttcaaattccagaggagaaggcaaaccagacctcaaatttggtggcaaatccaaaggaaagttatggccgttcatcaaaaaaaataagtctcccaagcagcaaaaggaacccctctcccatcgcttcaacgagttcatgacctccaaacccaaaatccactgcttcaggagcctaaagcgtgggctttctctcaagctgggtgcaacaccggaggatttcagcaacctcccacctgaacaaagaaggaaaaagctgcagcagaaagtcgatgagttaaataaagaaattcagaaggagatggatcaaagagatgccataacaaaaatgaaagatgtctacctaaagaatcctcagatgggagacccagccagtttggatcacaaattagcagaagtcagccaaaatatagagaaactgcgagtagagacccagaaatttgaggcctggctggctgaggttgaaggccggctcccagcacgcagcgagcaggcgcgccggcagagcggactgtacgacagccagaacccacccacagtcaacaactgcgcccaggaccgtgagagcccagatggcagttacacagaggagcagagtcaggagagtgagatgaaggtgctggccacggattttgacgacgagtttgatgatgaggagcccctccctgccatagggacgtgcaaagctctctacacatttgaaggtcagaatgaaggaacgatttccgtagttgaaggagaaacattgtatgtcatagaggaagacaaaggcgatggctggacccgcattcggagaaatgaagatgaagagggttatgtccccacttcatatgtcgaagtctgtttggacaaaaatgccaaaggtgctaagacttatatttaataccat

SEQ ID NO: 135162 - DNA, 5227 bp, Homo sapiens
  Payload ID: 6414
  Gene Symbol: FNBP1
  Gene Name: formin binding protein 1
  ENST ID: ENST00000443566
  CDS Start-End: 220-1875
cggccgcggctgctgcttcctcgggccattttgctgtggagcggcggggaggaggagccgccgaggagaccccgggcgaggagctgcgagccggaggaggccgcgcggactccgggctttccgccgtcgcggggatctcggggggcaaagggatcgccggggagggggaccagagagccgcgcccgccgcgcggagcgccccttcgcgtcccctgcaccatgagctggggcaccgagctctgggatcagtttgacaacttagaaaaacacacacagtggggaattgatattcttgagaaatatatcaagtttgtgaaagaaaggacagagattgaactcagctatgcaaagcaactcaggaatctttcaaagaagtaccaacctaaaaagaactcgaaggaggaagaagaatacaagtatacgtcatgtaaagctttcatttccaacctgaacgaaatgaatgattacgcagggcagcatgaagttatctccgagaacatggcatcacagatcattgtggacttggcacgctatgttcaggaactgaaacaggagaggaaatcaaactttcacgatggccgtaaagcacagcagcacatcgagacttgctggaagcagcttgaatctagtaaaaggcgatttgaacgcgattgcaaagaggcggacagggcgcagcagtactttgagaaaatggacgctgacatcaatgtcacaaaagcggatgttgaaaaggcccgacaacaagctcaaatacgtcaccaaatggcagaggacagcaaagcagattactcatccattctccagaaattcaaccatgagcagcatgaatattaccatactcacatccccaacatcttccagaaaatacaagagatggaggaaaggaggattgtgagaatgggagagtccatgaagacatatgcagaggttgatcggcaggtgatcccaatcattgggaagtgcctggatggaatagtaaaagcagccgaatcaattgatcagaaaaatgattcacagctggtaatagaagcttataaatcagggtttgagcctcctggagacattgaatttgaggattacactcagccaatgaagcgcactgtgtcagataacagcctttcaaattccagaggagaaggcaaaccagacctcaaatttggtggcaaatccaaaggaaagttatggccgttcatcaaaaaaaataagggtgcaacaccggaggatttcagcaacctcccacctgaacaaagaaggaaaaagctgcagcagaaagtcgatgagttaaataaagaaattcagaaggagatggatcaaagagatgccataacaaaaatgaaagatgtctacctaaagaatcctcagatgggagacccagccagtttggatcacaaattagcagaagtcagccaaaatatagagaaactgcgagtagagacccagaaatttgaggcctggctggctgaggttgaaggccggctcccagcacgcagcgagcaggcgcgccggcagagcggactgtacgacagccagaacccacccacagtcaacaactgcgcccaggaccgtgagagcccagatggcagttacacagaggagcagagtcaggagagtgagatgaaggtgctggccacggattttgacgacgagtttgatgatgaggagcccctccctgccatagggacgtgcaaagctctctacacatttgaaggtcagaatgaaggaacgatttccgtagttgaaggagaaacattgtatgtcatagaggaagacaaaggcgatggctggacccgcattcggagaaatgaagatgaagagggttatgtccccacttcatatgtcgaagtctgtttggacaaaaatgccaaagattcctagaggggagtgcctgcgagcctcgggtgagccttcctggaggagcctccgtctgcttgttcccacaggcctccagcgccctgccctgtggacagcccacccctccgcagccccatccctgcggggcggtctctctctctctccagcatgctccctgcggccctgccctcccgcccagcccgggccacctcgtgggggacaagtctcgccagcgcccacccccatggctcgggtcagtcctcatcgctccccctccccaccccgcgcaggccactgagacggtgggacacacgcccctacctgctccttcctgggccctcagtccacccgggctcgtcctggcagcccttccgcgcttcacacagtgccttttgtgaaagtgtcatcacgggtcccctgaggagacaaggcaggtccagcgcacatcaggcggactgagcactcgatgtcatccgtgtcgatgtcatccgtgtgtcccagactgtctgctgtagaaaacacttcctcctctcctgagtctgtgaagtcctcagtggtcctttttggattctaggcttgcacctcatactaaacattgaccctttcactatgccctcaacctgggagcatctggcaggcaggggggcaggtacacacacacccacaggcacacccaccagtacacacgcgtgcgcatacacacattttggtttgacgccctgttttcagtggcctggggaggtccacactggaagtcgaattccagctcgccttgttgactcgcctgtgtccaccggccatgaggagcccacgcctgtcctccccatcactttcctgtccctgagaactgtagatcatgcgcttgtgagcgaggccctcccctctgcaccagctcattgcaaagcgaacatcctctcctttccaggagccccaggattagcatctgaaaagggtagcacttccttttttgttgttgttttttttttttttttgagacgggagtctcgctctattgttcagactggagtgcagtggcatgatctcggctcactacaacctccacctcctgggttccagcgattctcctgcctcagcctcccaaatagctgtgattacaggcgtgcaccaccacgcccggctaatgtttgtatttttagtagagacagggtttcaccgtgttggtcaggctggtctcaaactcctgacctcaggtgatccgcccgcctcagcctcccaaagtgctgagattacaggtgtgagctaccgcaccccgccgaggttagcactttcatcaccaaagaccccgtgcctctcgtggtcctttgagggatcccgccgccaccacccttgtattttatcacgtgctcttcagggcatgtggaattcgttgagtttgcttttagagccaagtttctttccctgtgtgggtttttgaggaaaacctgaggtcccctaatctgtggccaccaccccccccccccgccacgccttagagcagagcagcccctcctctcatttggtgcagaaacagtcaagaggaaccattggcctagagctcctgtgaccgagagcgccacggaagcctggggatgacgtcgggcagctttattctttgcttggctttggtaactaggtggtcccctcaagcatcctcagttcctcttgctgtttatgaatctaagacaaggaagtcctatagaagccaaagggacagggacggaaaggacaggtcccaagggatggggctgtctttacttgtggaaaccaggaaattgctcctctcagccaaccaaggttgaccacacaccacccttccggagcagctcagtcagccctcggggacgagaaaccacaagcgcagagacgctgaggcccaggcaggtgaagaggaagtggctttgggtttttaaagtaggtgagcgtgagcctctctgactgcttcttccccgggggggactgcaaaccgctcagggttgcggcagagccatggacttccggtccctgcaacgggtgacctaagcgtggtgcacccatcagtcacgcaggaggactgacttgacagacgaaagacaagcccggatgacacagggtgagaagagtcagggccgcacctctgtccctgcaaaccaacaggtgcatggtgagtgtggcagtccccacagctccacaatgggctcccccgccaacggggacgacagggatcttcaggaacttctgacctcaccaagtcaagtggaccactctccactccacgaggatgtgaaacggttctttaaaatgggattttagagcctcgggaatgcatgtgcgtcacatctttcatattatgggtcaggatagattcatttcttgcaacatagtggaaaagatataagctgcagtaatttgctctttgaatgaccgtcacccccagtataggatatgcttgtatccccccgtcactcctccgcctgttttttaaacttttccaccacctgcgtccaaaaagaatgttatagcgagtgctcttaaatgttgaacctgggtgttgcttccgggccagtctgcgtggctccatgaaaagctcactgctgccccagccgggcttcttagaggaggtcagttgtcctatgtatcatcatttactctgggaatcctactgtgaaatcatgtctgtatttttctggagcagttcacatagagtagaatgtggaatttcccgtgaacgtctccttcctcccccgtatctgccgcctgtcacttcgccaccgtgctagaatactgttgtgttgtaagatgactaattttaaaagaacctgccctgaaaagttcttagaaacgcagtgaaagggaggaacttgtcctttacccagtttttcctttgtaggatgggaaagtataaaaaggcacagaaggttgtcatgggctgttccttgggggtttttatcctgctcaccgtggagataagcctgcggcttgtctaaccagcgcagcgcaaaggtctcgatgccttttggtaacatccgtcattgcagaagaaagtttacacgacgtcaaaaagtgacgttcatgctaagtgtttttccagaaatattggtttcatgtttcttattggctctgcctcctgtgcttatatcatccaaaaactttttaaaaaggtccagaattctattttaacctgatgttgagcacctttaaaatgttcgtatgtgtgttgcactaattctaaactttggaggcattttgctgtgtgaggccgatcgccactgtaaaggtcctagagttgcctgtttgtctctggagatggaattaaaccaaataaagagcttccactggaggcttgtattgaccttgtaactatatgttaatctcgtgttaaaataaaatataacttgtg

SEQ ID NO: 135163 - DNA, 5410 bp, Homo sapiens
  Payload ID: 6414
  Gene Symbol: FNBP1
  Gene Name: formin binding protein 1
  Uniprot ID: Q96RU3
  ENST ID: ENST00000420781
  CDS Start-End: 220-2058
cggccgcggctgctgcttcctcgggccattttgctgtggagcggcggggaggaggagccgccgaggagaccccgggcgaggagctgcgagccggaggaggccgcgcggactccgggctttccgccgtcgcggggatctcggggggcaaagggatcgccggggagggggaccagagagccgcgcccgccgcgcggagcgccccttcgcgtcccctgcaccatgagctggggcaccgagctctgggatcagtttgacaacttagaaaaacacacacagtggggaattgatattcttgagaaatatatcaagtttgtgaaagaaaggacagagattgaactcagctatgcaaagcaactcaggaatctttcaaagaagtaccaacctaaaaagaactcgaaggaggaagaagaatacaagtatacgtcatgtaaagctttcatttccaacctgaacgaaatgaatgattacgcagggcagcatgaagttatctccgagaacatggcatcacagatcattgtggacttggcacgctatgttcaggaactgaaacaggagaggaaatcaaactttcacgatggccgtaaagcacagcagcacatcgagacttgctggaagcagcttgaatctagtaaaaggcgatttgaacgcgattgcaaagaggcggacagggcgcagcagtactttgagaaaatggacgctgacatcaatgtcacaaaagcggatgttgaaaaggcccgacaacaagctcaaatacgtcaccaaatggcagaggacagcaaagcagattactcatccattctccagaaattcaaccatgagcagcatgaatattaccatactcacatccccaacatcttccagaaaatacaagagatggaggaaaggaggattgtgagaatgggagagtccatgaagacatatgcagaggttgatcggcaggtgatcccaatcattgggaagtgcctggatggaatagtaaaagcagccgaatcaattgatcagaaaaatgattcacagctggtaatagaagcttataaatcagggtttgagcctcctggagacattgaatttgaggattacactcagccaatgaagcgcactgtgtcagataacagcctttcaaattccagaggagaaggcaaaccagacctcaaatttggtggcaaatccaaaggaaagttatggccgttcatcaaaaaaaataagcttatgtcccttttaacatccccccatcagcctccccctccccctcctgcctctgcctcaccctctgctgttcccaacggcccccagtctcccaagcagcaaaaggaacccctctcccatcgcttcaacgagttcatgacctccaaacccaaaatccactgcttcaggagcctaaagcgtgggggtgcaacaccggaggatttcagcaacctcccacctgaacaaagaaggaaaaagctgcagcagaaagtcgatgagttaaataaagaaattcagaaggagatggatcaaagagatgccataacaaaaatgaaagatgtctacctaaagaatcctcagatgggagacccagccagtttggatcacaaattagcagaagtcagccaaaatatagagaaactgcgagtagagacccagaaatttgaggcctggctggctgaggttgaaggccggctcccagcacgcagcgagcaggcgcgccggcagagcggactgtacgacagccagaacccacccacagtcaacaactgcgcccaggaccgtgagagcccagatggcagttacacagaggagcagagtcaggagagtgagatgaaggtgctggccacggattttgacgacgagtttgatgatgaggagcccctccctgccatagggacgtgcaaagctctctacacatttgaaggtcagaatgaaggaacgatttccgtagttgaaggagaaacattgtatgtcatagaggaagacaaaggcgatggctggacccgcattcggagaaatgaagatgaagagggttatgtccccacttcatatgtcgaagtctgtttggacaaaaatgccaaagattcctagaggggagtgcctgcgagcctcgggtgagccttcctggaggagcctccgtctgcttgttcccacaggcctccagcgccctgccctgtggacagcccacccctccgcagccccatccctgcggggcggtctctctctctctccagcatgctccctgcggccctgccctcccgcccagcccgggccacctcgtgggggacaagtctcgccagcgcccacccccatggctcgggtcagtcctcatcgctccccctccccaccccgcgcaggccactgagacggtgggacacacgcccctacctgctccttcctgggccctcagtccacccgggctcgtcctggcagcccttccgcgcttcacacagtgccttttgtgaaagtgtcatcacgggtcccctgaggagacaaggcaggtccagcgcacatcaggcggactgagcactcgatgtcatccgtgtcgatgtcatccgtgtgtcccagactgtctgctgtagaaaacacttcctcctctcctgagtctgtgaagtcctcagtggtcctttttggattctaggcttgcacctcatactaaacattgaccctttcactatgccctcaacctgggagcatctggcaggcaggggggcaggtacacacacacccacaggcacacccaccagtacacacgcgtgcgcatacacacattttggtttgacgccctgttttcagtggcctggggaggtccacactggaagtcgaattccagctcgccttgttgactcgcctgtgtccaccggccatgaggagcccacgcctgtcctccccatcactttcctgtccctgagaactgtagatcatgcgcttgtgagcgaggccctcccctctgcaccagctcattgcaaagcgaacatcctctcctttccaggagccccaggattagcatctgaaaagggtagcacttccttttttgttgttgttttttttttttttttgagacgggagtctcgctctattgttcagactggagtgcagtggcatgatctcggctcactacaacctccacctcctgggttccagcgattctcctgcctcagcctcccaaatagctgtgattacaggcgtgcaccaccacgcccggctaatgtttgtatttttagtagagacagggtttcaccgtgttggtcaggctggtctcaaactcctgacctcaggtgatccgcccgcctcagcctcccaaagtgctgagattacaggtgtgagctaccgcaccccgccgaggttagcactttcatcaccaaagaccccgtgcctctcgtggtcctttgagggatcccgccgccaccacccttgtattttatcacgtgctcttcagggcatgtggaattcgttgagtttgcttttagagccaagtttctttccctgtgtgggtttttgaggaaaacctgaggtcccctaatctgtggccaccaccccccccccccgccacgccttagagcagagcagcccctcctctcatttggtgcagaaacagtcaagaggaaccattggcctagagctcctgtgaccgagagcgccacggaagcctggggatgacgtcgggcagctttattctttgcttggctttggtaactaggtggtcccctcaagcatcctcagttcctcttgctgtttatgaatctaagacaaggaagtcctatagaagccaaagggacagggacggaaaggacaggtcccaagggatggggctgtctttacttgtggaaaccaggaaattgctcctctcagccaaccaaggttgaccacacaccacccttccggagcagctcagtcagccctcggggacgagaaaccacaagcgcagagacgctgaggcccaggcaggtgaagaggaagtggctttgggtttttaaagtaggtgagcgtgagcctctctgactgcttcttccccgggggggactgcaaaccgctcagggttgcggcagagccatggacttccggtccctgcaacgggtgacctaagcgtggtgcacccatcagtcacgcaggaggactgacttgacagacgaaagacaagcccggatgacacagggtgagaagagtcagggccgcacctctgtccctgcaaaccaacaggtgcatggtgagtgtggcagtccccacagctccacaatgggctcccccgccaacggggacgacagggatcttcaggaacttctgacctcaccaagtcaagtggaccactctccactccacgaggatgtgaaacggttctttaaaatgggattttagagcctcgggaatgcatgtgcgtcacatctttcatattatgggtcaggatagattcatttcttgcaacatagtggaaaagatataagctgcagtaatttgctctttgaatgaccgtcacccccagtataggatatgcttgtatccccccgtcactcctccgcctgttttttaaacttttccaccacctgcgtccaaaaagaatgttatagcgagtgctcttaaatgttgaacctgggtgttgcttccgggccagtctgcgtggctccatgaaaagctcactgctgccccagccgggcttcttagaggaggtcagttgtcctatgtatcatcatttactctgggaatcctactgtgaaatcatgtctgtatttttctggagcagttcacatagagtagaatgtggaatttcccgtgaacgtctccttcctcccccgtatctgccgcctgtcacttcgccaccgtgctagaatactgttgtgttgtaagatgactaattttaaaagaacctgccctgaaaagttcttagaaacgcagtgaaagggaggaacttgtcctttacccagtttttcctttgtaggatgggaaagtataaaaaggcacagaaggttgtcatgggctgttccttgggggtttttatcctgctcaccgtggagataagcctgcggcttgtctaaccagcgcagcgcaaaggtctcgatgccttttggtaacatccgtcattgcagaagaaagtttacacgacgtcaaaaagtgacgttcatgctaagtgtttttccagaaatattggtttcatgtttcttattggctctgcctcctgtgcttatatcatccaaaaactttttaaaaaggtccagaattctattttaacctgatgttgagcacctttaaaatgttcgtatgtgtgttgcactaattctaaactttggaggcattttgctgtgtgaggccgatcgccactgtaaaggtcctagagttgcctgtttgtctctggagatggaattaaaccaaataaagagcttccactggaggcttgtattgaccttgtaactatatgttaatctcgtgttaaaataaaatataacttgtg

SEQ ID NO: 135164 - DNA, 5393 bp, Homo sapiens
  Payload ID: 6414
  Gene Symbol: FNBP1
  Gene Name: formin binding protein 1
  Uniprot ID: Q96RU3
  ENST ID: ENST00000446176
  CDS Start-End: 188-2041
gctgtggagcggcggggaggaggagccgccgaggagaccccgggcgaggagctgcgagccggaggaggccgcgcggactccgggctttccgccgtcgcggggatctcggggggcaaagggatcgccggggagggggaccagagagccgcgcccgccgcgcggagcgccccttcgcgtcccctgcaccatgagctggggcaccgagctctgggatcagtttgacaacttagaaaaacacacacagtggggaattgatattcttgagaaatatatcaagtttgtgaaagaaaggacagagattgaactcagctatgcaaagcaactcaggaatctttcaaagaagtaccaacctaaaaagaactcgaaggaggaagaagaatacaagtatacgtcatgtaaagctttcatttccaacctgaacgaaatgaatgattacgcagggcagcatgaagttatctccgagaacatggcatcacagatcattgtggacttggcacgctatgttcaggaactgaaacaggagaggaaatcaaactttcacgatggccgtaaagcacagcagcacatcgagacttgctggaagcagcttgaatctagtaaaaggcgatttgaacgcgattgcaaagaggcggacagggcgcagcagtactttgagaaaatggacgctgacatcaatgtcacaaaagcggatgttgaaaaggcccgacaacaagctcaaatacgtcaccaaatggcagaggacagcaaagcagattactcatccattctccagaaattcaaccatgagcagcatgaatattaccatactcacatccccaacatcttccagaaaatacaagagatggaggaaaggaggattgtgagaatgggagagtccatgaagacatatgcagaggttgatcggcaggtgatcccaatcattgggaagtgcctggatggaatagtaaaagcagccgaatcaattgatcagaaaaatgattcacagctggtaatagaagcttataaatcagggtttgagcctcctggagacattgaatttgaggattacactcagccaatgaagcgcactgtgtcagataacagcctttcaaattccagaggagaaggcaaaccagacctcaaatttggtggcaaatccaaaggaaagttatggccgttcatcaaaaaaaataagcttatgtcccttttaacatccccccatcagcctccccctccccctcctgcctctgcctcaccctctgctgttcccaacggcccccagtctcccaagcagcaaaaggaacccctctcccatcgcttcaacgagttcatgacctccaaacccaaaatccactgcttcaggagcctaaagcgtgggctttctctcaagctgggtgcaacaccggaggatttcagcaacctcccacctgaacaaagaaggaaaaagctgcagcagaaagtcgatgagttaaataaagaaattcagaaggagatggatcaaagagatgccataacaaaaatgaaagatgtctacctaaagaatcctcagatgggagacccagccagtttggatcacaaattagcagaagtcagccaaaatatagagaaactgcgagtagagacccagaaatttgaggcctggctggctgaggttgaaggccggctcccagcacgcagcgagcaggcgcgccggcagagcggactgtacgacagccagaacccacccacagtcaacaactgcgcccaggaccgtgagagcccagatggcagttacacagaggagcagagtcaggagagtgagatgaaggtgctggccacggattttgacgacgagtttgatgatgaggagcccctccctgccatagggacgtgcaaagctctctacacatttgaaggtcagaatgaaggaacgatttccgtagttgaaggagaaacattgtatgtcatagaggaagacaaaggcgatggctggacccgcattcggagaaatgaagatgaagagggttatgtccccacttcatatgtcgaagtctgtttggacaaaaatgccaaagattcctagaggggagtgcctgcgagcctcgggtgagccttcctggaggagcctccgtctgcttgttcccacaggcctccagcgccctgccctgtggacagcccacccctccgcagccccatccctgcggggcggtctctctctctctccagcatgctccctgcggccctgccctcccgcccagcccgggccacctcgtgggggacaagtctcgccagcgcccacccccatggctcgggtcagtcctcatcgctccccctccccaccccgcgcaggccactgagacggtgggacacacgcccctacctgctccttcctgggccctcagtccacccgggctcgtcctggcagcccttccgcgcttcacacagtgccttttgtgaaagtgtcatcacgggtcccctgaggagacaaggcaggtccagcgcacatcaggcggactgagcactcgatgtcatccgtgtcgatgtcatccgtgtgtcccagactgtctgctgtagaaaacacttcctcctctcctgagtctgtgaagtcctcagtggtcctttttggattctaggcttgcacctcatactaaacattgaccctttcactatgccctcaacctgggagcatctggcaggcaggggggcaggtacacacacacccacaggcacacccaccagtacacacgcgtgcgcatacacacattttggtttgacgccctgttttcagtggcctggggaggtccacactggaagtcgaattccagctcgccttgttgactcgcctgtgtccaccggccatgaggagcccacgcctgtcctccccatcactttcctgtccctgagaactgtagatcatgcgcttgtgagcgaggccctcccctctgcaccagctcattgcaaagcgaacatcctctcctttccaggagccccaggattagcatctgaaaagggtagcacttccttttttgttgttgttttttttttttttttgagacgggagtctcgctctattgttcagactggagtgcagtggcatgatctcggctcactacaacctccacctcctgggttccagcgattctcctgcctcagcctcccaaatagctgtgattacaggcgtgcaccaccacgcccggctaatgtttgtatttttagtagagacagggtttcaccgtgttggtcaggctggtctcaaactcctgacctcaggtgatccgcccgcctcagcctcccaaagtgctgagattacaggtgtgagctaccgcaccccgccgaggttagcactttcatcaccaaagaccccgtgcctctcgtggtcctttgagggatcccgccgccaccacccttgtattttatcacgtgctcttcagggcatgtggaattcgttgagtttgcttttagagccaagtttctttccctgtgtgggtttttgaggaaaacctgaggtcccctaatctgtggccaccaccccccccccccgccacgccttagagcagagcagcccctcctctcatttggtgcagaaacagtcaagaggaaccattggcctagagctcctgtgaccgagagcgccacggaagcctggggatgacgtcgggcagctttattctttgcttggctttggtaactaggtggtcccctcaagcatcctcagttcctcttgctgtttatgaatctaagacaaggaagtcctatagaagccaaagggacagggacggaaaggacaggtcccaagggatggggctgtctttacttgtggaaaccaggaaattgctcctctcagccaaccaaggttgaccacacaccacccttccggagcagctcagtcagccctcggggacgagaaaccacaagcgcagagacgctgaggcccaggcaggtgaagaggaagtggctttgggtttttaaagtaggtgagcgtgagcctctctgactgcttcttccccgggggggactgcaaaccgctcagggttgcggcagagccatggacttccggtccctgcaacgggtgacctaagcgtggtgcacccatcagtcacgcaggaggactgacttgacagacgaaagacaagcccggatgacacagggtgagaagagtcagggccgcacctctgtccctgcaaaccaacaggtgcatggtgagtgtggcagtccccacagctccacaatgggctcccccgccaacggggacgacagggatcttcaggaacttctgacctcaccaagtcaagtggaccactctccactccacgaggatgtgaaacggttctttaaaatgggattttagagcctcgggaatgcatgtgcgtcacatctttcatattatgggtcaggatagattcatttcttgcaacatagtggaaaagatataagctgcagtaatttgctctttgaatgaccgtcacccccagtataggatatgcttgtatccccccgtcactcctccgcctgttttttaaacttttccaccacctgcgtccaaaaagaatgttatagcgagtgctcttaaatgttgaacctgggtgttgcttccgggccagtctgcgtggctccatgaaaagctcactgctgccccagccgggcttcttagaggaggtcagttgtcctatgtatcatcatttactctgggaatcctactgtgaaatcatgtctgtatttttctggagcagttcacatagagtagaatgtggaatttcccgtgaacgtctccttcctcccccgtatctgccgcctgtcacttcgccaccgtgctagaatactgttgtgttgtaagatgactaattttaaaagaacctgccctgaaaagttcttagaaacgcagtgaaagggaggaacttgtcctttacccagtttttcctttgtaggatgggaaagtataaaaaggcacagaaggttgtcatgggctgttccttgggggtttttatcctgctcaccgtggagataagcctgcggcttgtctaaccagcgcagcgcaaaggtctcgatgccttttggtaacatccgtcattgcagaagaaagtttacacgacgtcaaaaagtgacgttcatgctaagtgtttttccagaaatattggtttcatgtttcttattggctctgcctcctgtgcttatatcatccaaaaactttttaaaaaggtccagaattctattttaacctgatgttgagcacctttaaaatgttcgtatgtgtgttgcactaattctaaactttggaggcattttgctgtgtgaggccgatcgccactgtaaaggtcctagagttgcctgtttgtctctggagatggaattaaaccaaataaagagcttccactggaggcttgtattgaccttgtaactatatgttaatctcgtgttaaaataaaatataacttgtg

SEQ ID NO: 135165 - DNA, 2256 bp, Homo sapiens
  Payload ID: 6414
  Gene Symbol: FNBP1
  Gene Name: formin binding protein 1
  ENST ID: ENST00000449089
  CDS Start-End: 1-1706
aactcagctatgcaaagcaactcaggaatctttcaaagaagtaccaacctaaaaagaactcgaaggaggaagaagaatacaagtatacgtcatgtaaagctttcatttccaacctgaacgaaatgaatgattacgcagggcagcatgaagttatctccgagaacatggcatcacagatcattgtggacttggcacgctatgttcaggaactgaaacaggagaggaaatcaaactttcacgatggccgtaaagcacagcagcacatcgagacttgctggaagcagcttgaatctagtaaaaggcgatttgaacgcgattgcaaagaggcggacagggcgcagcagtactttgagaaaatggacgctgacatcaatgtcacaaaagcggatgttgaaaaggcccgacaacaagctcaaatacgtcaccaaatggcagaggacagcaaagcagattactcatccattctccagaaattcaaccatgagcagcatgaatattaccatactcacatccccaacatcttccagaaaatacaagagatggaggaaaggaggattgtgagaatgggagagtccatgaagacatatgcagaggttgatcggcaggtgatcccaatcattgggaagtgcctggatggaatagtaaaagcagccgaatcaattgatcagaaaaatgattcacagctggtaatagaagcttataaatcagggtttgagcctcctggagacattgaatttgaggattacactcagccaatgaagcgcactgtgtcagataacagcctttcaaattccagaggagaaggcaaaccagacctcaaatttggtggcaaatccaaaggaaagttatggccgttcatcaaaaaaaataagcctccccctccccctcctgcctctgcctcaccctctgctgttcccaacggcccccagtctcccaagcagcaaaaggaacccctctcccatcgcttcaacgagttcatgacctccaaacccaaaatccactgcttcaggagcctaaagcgtgggggtgcaacaccggaggatttcagcaacctcccacctgaacaaagaaggaaaaagctgcagcagaaagtcgatgagttaaataaagaaattcagaaggagatggatcaaagagatgccataacaaaaatgaaagatgtctacctaaagaatcctcagatgggagacccagccagtttggatcacaaattagcagaagtcagccaaaatatagagaaactgcgagtagagacccagaaatttgaggcctggctggctgaggttgaaggccggctcccagcacgcagcgagcaggcgcgccggcagagcggactgtacgacagccagaacccacccacagtcaacaactgcgcccaggaccgtgagagcccagatggcagttacacagaggagcagagtcaggagagtgagatgaaggtgctggccacggattttgacgacgagtttgatgatgaggagcccctccctgccatagggacgtgcaaagctctctacacatttgaaggtcagaatgaaggaacgatttccgtagttgaaggagaaacattgtatgtcatagaggaagacaaaggcgatggctggacccgcattcggagaaatgaagatgaagagggttatgtccccacttcatatgtcgaagtctgtttggacaaaaatgccaaaggtgctaagacttatatttaataccataaaaaaaaaaaacttaaaaaaaatggagttgtttctccccacaaccatgactgttacaggcagttcctcaagagactggctggcaagcaccataatgcacgttctcctgtagtctcacgtggacttcagggtctgggcacctgaattgccttgtctagtttgggctgtaatcaagtttcacttgctgatgaaattttatgtggaaagctgccaaccgccaacttacagctatgtcattcaaaatctgataaacatttcttcttttggcggtatctgtagattaaaaaaaaagttgcattgtagcttctcatctttctgaatttaaaagccggcacgcatcatgcaggtgccaaagacttccctactcttgtttatatctagtatccaccatacactgagctacattaggtggttacagattgtaacttaataaactgaactgtgttagtttgttaaattgtatactcattcacttgggaggaagtcacaagtgaaataacatctccttcttgactaaagcagtaaataagattcttatattggc

SEQ ID NO: 135166 - DNA, 5341 bp, Homo sapiens
  Payload ID: 6415
  Gene Symbol: FNBP1L
  Gene Name: formin binding protein 1-like
  Uniprot ID: Q5T0N5
  ENST ID: ENST00000260506
  CDS Start-End: 152-1807
tcactcactggggagcccggcggtggcggcacctttcgaggtagacccgctgagctgctagcccgccggccagcgagtgagaggtcggacagactgtggagccgacagactgaaggacagcggcaccgccagacggccagaaagttccgccatgagctggggcacggagctgtgggatcagttcgacagcttagacaagcatacacaatggggaattgacttcttggaaagatatgccaaatttgttaaagagaggatagaaattgaacagaactatgcgaaacaattgagaaatctggttaagaagtactgccccaaacgttcatccaaagatgaagagccacggtttacctcgtgtgtagccttttttaatatccttaatgagttaaatgactatgcaggacagcgagaagttgtagcagaagaaatggcgcacagagtgtatggtgaattaatgagatatgctcatgatctgaaaactgaaagaaaaatgcatctgcaagaaggacgaaaagctcaacaatatcttgacatgtgctggaaacagatggataatagtaaaaagaagtttgaaagagaatgtagagaggcagaaaaggcacaacagagttatgaaagattggataatgatactaatgcaaccaaggcagatgttgaaaaggccaaacagcagttgaatctgcgtacgcatatggccgatgaaaataaaaatgaatatgctgcacaattacaaaactttaatggagaacaacataaacatttttatgtagtgattcctcagatttacaagcaactacaagaaatggacgaacgaaggactattaaactcagtgagtgttacagaggatttgctgactcagaacgcaaagttattcccatcatttcaaaatgtttggaaggaatgattcttgcagcaaaatcagttgatgaaagaagagactctcaaatggtggtagactccttcaaatctggttttgaacctccaggagactttccatttgaagattacagtcaacatatatatagaaccatttctgatgggactatcagtgcatccaaacaggagagtgggaagatggatgccaaaaccacagtaggaaaggccaagggcaaattgtggctctttggaaagaagccaaagggcccagcactagaagatttcagtcatctgccaccagaacagagacgtaaaaaactacagcagcgcattgatgaacttaacagagaactacagaaagaatcagaccaaaaagatgcactcaacaaaatgaaagatgtatatgagaagaatccacaaatgggggatccagggagtttgcagcctaaattagcagagaccatgaataacattgaccgcctacgaatggaaatccataagaatgaggcttggctctctgaagtcgaaggcaaaacaggtgggagaggagacagaagacatagcagtgacataaatcatcttgtaacacagggacgagaaagtcctgagggaagttacactgatgatgcaaaccaggaagtccgtgggccaccccagcagcatggtcaccacaatgagtttgatgatgaatttgaggatgatgatcccttgcctgctattggacactgcaaagctatctacccttttgatggacataatgaaggtactctagcaatgaaagaaggtgaagttctctacattatagaggaggacaaaggtgacggatggacaagagctcggagacagaacggtgaagaaggctacgttcccacgtcatacatagatgtaactctagagaaaaacagtaaaggtgcagtaacttatatctaaactaaccaggcacctttgtgccatgtgtgacataggaagagtaacataaaatgaaaacacattcaacaggttgaaaaaaataaggaaacttaaagggcatccaagattaattgttcactatgtgagctgagtgtaggcttgatcttgtgaatattaccacaagaaacattttgtggcactttactgtttgagtaacgttggtgtgaagcttaattgatgccttttgctttatgtcccgcttaagtctgtgtgaaggatttgtgtttttctgccttacaaatagaatttgatttattgggcaggaattcatggatagtaatgctctctgccccctttacttcagaaaacacagtgactttagtgaatttgaatagtgaaactgctctgaaatgctatggaaagccgactccccaaagagtggtttcttctagaagtttgaatttgtagctacagtttccaagaagaaaaatagtagttggataatttagtaaaataataacatcattttcattttcttacctattcttaactttggtttcctaaaggaagaaaatgagcaggtagcacataatctatttaagtagatttaaagagagtttcaaaataaatctcctggtctagctcttaggtgaataaaatagattttgtttgagacctcaaaatattttgaggttagctggtaattttcaataatttacaagcttccttccaaactaatctcatacttttgtatgtttcatcttgaaaatatcttttgggaaataccactttagtgattatttagcatttagcagttacacataggaaaatacacagttacatagaaaaatacacatttgaagatagaggaaaccttgaatggaggggaagtgttgacaaattttaatttttaaaggagaaactttttgactatctgggttagaggaagatatgtgtaccgcctttagggcattttgttatttccgctgaatcattagttattaggatagataaatttttccaattagtttcagcaagcgttgttggaaacactgtgcagtcaaggattgtgcagtgctggttgtgtgaccacaccctgagtcagtggtgtggggaagtaaagtgtgaagaagcagtaagattggtttttaattttgcccatgttttaaattttcctggtgttttcggtagctgactataaaatgatagagacatttgggacaggcactttaaactgaacaccccttttggttttaccaaaggtcttcagtaattgttcttttctttttcctcctggactgcaggttcctgaagagggtttctgaggaaatgggcaagatgttgaaggaggttacatgcagctgcttttgggggagggtattagagttgtcaggctcaaagagagtgagagaagcaagttgcatgagtgcatgcagacatgattttttttttactaacttcattagcatttccatacattgtttttaaaaatcataataccaacccttaagttcctagttcacagttattcccacaaaagaaaaagccaacaatagtgtaccatttttctatttattttattgctgtctaatcaataaagaatgcagagctgtcaaaaaatgtgtcttacattagctgtcccaacaggattgtcttccctcccagctctgttttaattggcttttagacccactatctgtcagatccttgccatctgtcagtgtctgcctgcgccacctccgtgcttgcttaacatcctgttgcatgtctagcgtgattgagctagatttttcaggcatgtctttagattcccttgttcttgtcaaagccttgttttgttttacatttgtagtgcaaatcactttgtcaaacatctccagcactaatgtttccatcttagtatttgtgcacactgctataacttccccactgcaaacattccagttttggcattacgaagaagtagctgtgaacctgaagtatttatgataagaaaaagaaaacatctctgctgtagcctacagcccagttgaaagaactctttgaaacgtgatacatcttcagcacctcagtctgggaagaatctagtcagcactgaaatcctggcataataaacacagaagatattcaccacctcaagacaaaggactattgtcaaaagtcagctgcttccattcaaatgctgccttaaacttgagtgcctaaatctgttgattgccaacactaccactacagtatcccacaaagggctttatgtgtcagctcagtgcgacctgctttaactctgcagcaccgctgcagctgccgatgtagcctcggtaggtggctattagagctctaccatatacagtggtgcatcttcaaatttatgcatcaaactaaagacatgtccaagtccattttaatttcctcagtggttttatgagaagttttatgggcctcccccaattgtctttttattttgggttatgacgatcatgtttgataattacaatgatagtctctttccacgtgatgcttttgtttgaacctgataaaatttagtgaaactttgtaatgatctatgtgcacttttacttgtaaaatggaatttctgtatgtttatacttgtaaatatgattgttgttagtgctcctgttgctcatggtgtcctgcctcgcatttgtgattctgttaatgacatgtatcttaactaatttcttagtggtgttgtaatagggagatggggcaggtggggggttatttgtaccactgaatcttcattaatttggttctttactgttttgaggggagaaagaacgtgaaatggtttgtgtattattgaattttaagcaatattttagaagctgtgtgactgctttaataactttttcccagtgttatttgaatcatactacccgttatactaaagctgaatgacaattgtgtgaaagttactgccttcataagatcaagtcaccactgttacacagctgacatatagtgtattacctttgcagctagtaaactataaagtttagatattgaatctcgttacagggttatttatataatgtgacattattcagtactgacagactacatgaagtagttttaaaatctagtgctatttttattttaaaggttagcaatgaggaggaaatgtgatctggctgtgtttgtcttctgtacaaagcctgaagtgcttatggttttttggctaacagccacagagggcaaagtttaagactttcttgtaaggactaactgttcttttcaagctactgtttgtttttctaaaagcaggatttgcttccgtaggaggcaagttccttgatgtggaatagtgcaacctgtatatgggttattataataggaaagacatttgtacttgcacagtttaaatcattcttaaattttgaacatgtgaattgtcccaaaaaatctttaattttttggtaatttttactctttttgtgcacatgttgatttcttaatggtaaatccttcatttaaagatagtgttctctgttgagaatatttacatggaataaaacaatcttttcatggcctgtt

SEQ ID NO: 135167 - DNA, 4212 bp, Homo sapiens
  Payload ID: 6415
  Gene Symbol: FNBP1L
  Gene Name: formin binding protein 1-like
  Uniprot ID: Q5T0N5
  ENST ID: ENST00000271234
  CDS Start-End: 152-1969
tcactcactggggagcccggcggtggcggcacctttcgaggtagacccgctgagctgctagcccgccggccagcgagtgagaggtcggacagactgtggagccgacagactgaaggacagcggcaccgccagacggccagaaagttccgccatgagctggggcacggagctgtgggatcagttcgacagcttagacaagcatacacaatggggaattgacttcttggaaagatatgccaaatttgttaaagagaggatagaaattgaacagaactatgcgaaacaattgagaaatctggttaagaagtactgccccaaacgttcatccaaagatgaagagccacggtttacctcgtgtgtagccttttttaatatccttaatgagttaaatgactatgcaggacagcgagaagttgtagcagaagaaatggcgcacagagtgtatggtgaattaatgagatatgctcatgatctgaaaactgaaagaaaaatgcatctgcaagaaggacgaaaagctcaacaatatcttgacatgtgctggaaacagatggataatagtaaaaagaagtttgaaagagaatgtagagaggcagaaaaggcacaacagagttatgaaagattggataatgatactaatgcaaccaaggcagatgttgaaaaggccaaacagcagttgaatctgcgtacgcatatggccgatgaaaataaaaatgaatatgctgcacaattacaaaactttaatggagaacaacataaacatttttatgtagtgattcctcagatttacaagcaactacaagaaatggacgaacgaaggactattaaactcagtgagtgttacagaggatttgctgactcagaacgcaaagttattcccatcatttcaaaatgtttggaaggaatgattcttgcagcaaaatcagttgatgaaagaagagactctcaaatggtggtagactccttcaaatctggttttgaacctccaggagactttccatttgaagattacagtcaacatatatatagaaccatttctgatgggactatcagtgcatccaaacaggagagtgggaagatggatgccaaaaccacagtaggaaaggccaagggcaaattgtggctctttggaaagaagccaaagccacagtccccacccttaacccctactagtttattcacatccagtactcctaatgggtcccagtttctcacattctccattgagcccgtgcattattgtatgaatgaaataaaaacagggaagcccagaattccttctttcagaagcctcaaaagagggtggtcggtgaagatgggcccagcactagaagatttcagtcatctgccaccagaacagagacgtaaaaaactacagcagcgcattgatgaacttaacagagaactacagaaagaatcagaccaaaaagatgcactcaacaaaatgaaagatgtatatgagaagaatccacaaatgggggatccagggagtttgcagcctaaattagcagagaccatgaataacattgaccgcctacgaatggaaatccataagaatgaggcttggctctctgaagtcgaaggcaaaacaggtgggagaggagacagaagacatagcagtgacataaatcatcttgtaacacagggacgagaaagtcctgagggaagttacactgatgatgcaaaccaggaagtccgtgggccaccccagcagcatggtcaccacaatgagtttgatgatgaatttgaggatgatgatcccttgcctgctattggacactgcaaagctatctacccttttgatggacataatgaaggtactctagcaatgaaagaaggtgaagttctctacattatagaggaggacaaaggtgacggatggacaagagctcggagacagaacggtgaagaaggctacgttcccacgtcatacatagatgtaactctagagaaaaacagtaaaggttcctgaagagggtttctgaggaaatgggcaagatgttgaaggaggttacatgcagctgcttttgggggagggtattagagttgtcaggctcaaagagagtgagagaagcaagttgcatgagtgcatgcagacatgattttttttttactaacttcattagcatttccatacattgtttttaaaaatcataataccaacccttaagttcctagttcacagttattcccacaaaagaaaaagccaacaatagtgtaccatttttctatttattttattgctgtctaatcaataaagaatgcagagctgtcaaaaaatgtgtcttacattagctgtcccaacaggattgtcttccctcccagctctgttttaattggcttttagacccactatctgtcagatccttgccatctgtcagtgtctgcctgcgccacctccgtgcttgcttaacatcctgttgcatgtctagcgtgattgagctagatttttcaggcatgtctttagattcccttgttcttgtcaaagccttgttttgttttacatttgtagtgcaaatcactttgtcaaacatctccagcactaatgtttccatcttagtatttgtgcacactgctataacttccccactgcaaacattccagttttggcattacgaagaagtagctgtgaacctgaagtatttatgataagaaaaagaaaacatctctgctgtagcctacagcccagttgaaagaactctttgaaacgtgatacatcttcagcacctcagtctgggaagaatctagtcagcactgaaatcctggcataataaacacagaagatattcaccacctcaagacaaaggactattgtcaaaagtcagctgcttccattcaaatgctgccttaaacttgagtgcctaaatctgttgattgccaacactaccactacagtatcccacaaagggctttatgtgtcagctcagtgcgacctgctttaactctgcagcaccgctgcagctgccgatgtagcctcggtaggtggctattagagctctaccatatacagtggtgcatcttcaaatttatgcatcaaactaaagacatgtccaagtccattttaatttcctcagtggttttatgagaagttttatgggcctcccccaattgtctttttattttgggttatgacgatcatgtttgataattacaatgatagtctctttccacgtgatgcttttgtttgaacctgataaaatttagtgaaactttgtaatgatctatgtgcacttttacttgtaaaatggaatttctgtatgtttatacttgtaaatatgattgttgttagtgctcctgttgctcatggtgtcctgcctcgcatttgtgattctgttaatgacatgtatcttaactaatttcttagtggtgttgtaatagggagatggggcaggtggggggttatttgtaccactgaatcttcattaatttggttctttactgttttgaggggagaaagaacgtgaaatggtttgtgtattattgaattttaagcaatattttagaagctgtgtgactgctttaataactttttcccagtgttatttgaatcatactacccgttatactaaagctgaatgacaattgtgtgaaagttactgccttcataagatcaagtcaccactgttacacagctgacatatagtgtattacctttgcagctagtaaactataaagtttagatattgaatctcgttacagggttatttatataatgtgacattattcagtactgacagactacatgaagtagttttaaaatctagtgctatttttattttaaaggttagcaatgaggaggaaatgtgatctggctgtgtttgtcttctgtacaaagcctgaagtgcttatggttttttggctaacagccacagagggcaaagtttaagactttcttgtaaggactaactgttcttttcaagctactgtttgtttttctaaaagcaggatttgcttccgtaggaggcaagttccttgatgtggaatagtgcaacctgtatatgggttattataataggaaagacatttgtacttgcacagtttaaatcattcttaaattttgaacatgtgaattgtcccaaaaaatctttaattttttggtaatttttactctttttgtgcacatgttgatttcttaatggtaaatccttcatttaaagatagtgttctctgttgagaatatttacatggaataaaacaatcttttcatggcctgtt

SEQ ID NO: 135168 - DNA, 3889 bp, Homo sapiens
  Payload ID: 6415
  Gene Symbol: FNBP1L
  Gene Name: formin binding protein 1-like
  Uniprot ID: Q5T0N5
  ENST ID: ENST00000370253
  CDS Start-End: 1-1644
atgagctggggcacggagctgtgggatcagttcgacagcttagacaagcatacacaatggggaattgacttcttggaaagatatgccaaatttgttaaagagaggatagaaattgaacagaactatgcgaaacaattgagaaatctggttaagaagtactgccccaaacgttcatccaaagatgaagagccacggtttacctcgtgtgtagccttttttaatatccttaatgagttaaatgactatgcaggacagcgagaagttgtagcagaagaaatggcgcacagagtgtatggtgaattaatgagatatgctcatgatctgaaaactgaaagaaaaatgcatctgcaagaaggacgaaaagctcaacaatatcttgacatgtgctggaaacagatggataatagtaaaaagaagtttgaaagagaatgtagagaggcagaaaaggcacaacagagttatgaaagattggataatgatactaatgcaaccaaggcagatgttgaaaaggccaaacagcagttgaatctgcgtacgcatatggccgatgaaaataaaaatgaatatgctgcacaattacaaaactttaatggagaacaacataaacatttttatgtagtgattcctcagatttacaagcaactacaagaaatggacgaacgaaggactattaaactcagtgagtgttacagaggatttgctgactcagaacgcaaagttattcccatcatttcaaaatgtttggaaggaatgattcttgcagcaaaatcagttgatgaaagaagagactctcaaatggtggtagactccttcaaatctggttttgaacctccaggagactttccatttgaagattacagtcaacatatatatagaaccatttctgatgggactatcagtgcatccaaacaggagagtgggaagatggatgccaaaaccacagtaggaaaggccaagggcaaattgtggctctttggaaagaagccaaagggcccagcactagaagatttcagtcatctgccaccagaacagagacgtaaaaaactacagcagcgcattgatgaacttaacagagaactacagaaagaatcagaccaaaaagatgcactcaacaaaatgaaagatgtatatgagaagaatccacaaatgggggatccagggagtttgcagcctaaattagcagagaccatgaataacattgaccgcctacgaatggaaatccataagaatgaggcttggctctctgaagtcgaaggcaaaacaggtgggagaggagacagaagacatagcagtgacataaatcatcttgtaacacagggacgagaaagtcctgagggaagttacactgatgatgcaaaccaggaagtccgtgggccaccccagcagcatggtcaccacaatgagtttgatgatgaatttgaggatgatgatcccttgcctgctattggacactgcaaagctatctacccttttgatggacataatgaaggtactctagcaatgaaagaaggtgaagttctctacattatagaggaggacaaaggtgacggatggacaagagctcggagacagaacggtgaagaaggctacgttcccacgtcatacatagatgtaactctagagaaaaacagtaaaggttcctgaagagggtttctgaggaaatgggcaagatgttgaaggaggttacatgcagctgcttttgggggagggtattagagttgtcaggctcaaagagagtgagagaagcaagttgcatgagtgcatgcagacatgattttttttttactaacttcattagcatttccatacattgtttttaaaaatcataataccaacccttaagttcctagttcacagttattcccacaaaagaaaaagccaacaatagtgtaccatttttctatttattttattgctgtctaatcaataaagaatgcagagctgtcaaaaaatgtgtcttacattagctgtcccaacaggattgtcttccctcccagctctgttttaattggcttttagacccactatctgtcagatccttgccatctgtcagtgtctgcctgcgccacctccgtgcttgcttaacatcctgttgcatgtctagcgtgattgagctagatttttcaggcatgtctttagattcccttgttcttgtcaaagccttgttttgttttacatttgtagtgcaaatcactttgtcaaacatctccagcactaatgtttccatcttagtatttgtgcacactgctataacttccccactgcaaacattccagttttggcattacgaagaagtagctgtgaacctgaagtatttatgataagaaaaagaaaacatctctgctgtagcctacagcccagttgaaagaactctttgaaacgtgatacatcttcagcacctcagtctgggaagaatctagtcagcactgaaatcctggcataataaacacagaagatattcaccacctcaagacaaaggactattgtcaaaagtcagctgcttccattcaaatgctgccttaaacttgagtgcctaaatctgttgattgccaacactaccactacagtatcccacaaagggctttatgtgtcagctcagtgcgacctgctttaactctgcagcaccgctgcagctgccgatgtagcctcggtaggtggctattagagctctaccatatacagtggtgcatcttcaaatttatgcatcaaactaaagacatgtccaagtccattttaatttcctcagtggttttatgagaagttttatgggcctcccccaattgtctttttattttgggttatgacgatcatgtttgataattacaatgatagtctctttccacgtgatgcttttgtttgaacctgataaaatttagtgaaactttgtaatgatctatgtgcacttttacttgtaaaatggaatttctgtatgtttatacttgtaaatatgattgttgttagtgctcctgttgctcatggtgtcctgcctcgcatttgtgattctgttaatgacatgtatcttaactaatttcttagtggtgttgtaatagggagatggggcaggtggggggttatttgtaccactgaatcttcattaatttggttctttactgttttgaggggagaaagaacgtgaaatggtttgtgtattattgaattttaagcaatattttagaagctgtgtgactgctttaataactttttcccagtgttatttgaatcatactacccgttatactaaagctgaatgacaattgtgtgaaagttactgccttcataagatcaagtcaccactgttacacagctgacatatagtgtattacctttgcagctagtaaactataaagtttagatattgaatctcgttacagggttatttatataatgtgacattattcagtactgacagactacatgaagtagttttaaaatctagtgctatttttattttaaaggttagcaatgaggaggaaatgtgatctggctgtgtttgtcttctgtacaaagcctgaagtgcttatggttttttggctaacagccacagagggcaaagtttaagactttcttgtaaggactaactgttcttttcaagctactgtttgtttttctaaaagcaggatttgcttccgtaggaggcaagttccttgatgtggaatagtgcaacctgtatatgggttattataataggaaagacatttgtacttgcacagtttaaatcattcttaaattttgaacatgtgaattgtcccaaaaaatctttaattttttggtaatttttactctttttgtgcacatgttgatttcttaatggtaaatccttcatttaaagatagtgttctctgttgagaatatttacatggaataaaacaatcttttcatggcctgttaa

SEQ ID NO: 135169 - DNA, 1518 bp, Homo sapiens
  Payload ID: 6415
  Gene Symbol: FNBP1L
  Gene Name: formin binding protein 1-like
  ENST ID: ENST00000424449
  CDS Start-End: 1-1355
aaagattggataatgatactaatgcaaccaaggcagatgttgaaaaggccaaacagcagttgaatctgcgtacgcatatggccgatgaaaataaaaatgaatatgctgcacaattacaaaactttaatggagaacaacataaacatttttatgtagtgattcctcagatttacaagcaactacaagaaatggacgaacgaaggactattaaactcagtgagtgttacagaggatttgctgactcagaacgcaaagttattcccatcatttcaaaatgtttggaaggaatgattcttgcagcaaaatcagttgatgaaagaagagactctcaaatggtggtagactccttcaaatctggttttgaacctccaggagactttccatttgaagattacagtcaacatatatatagaaccatttctgatgggactatcagtgcatccaaacaggagagtgggaagatggatgccaaaaccacagtaggaaaggccaagggcaaattgtggctctttggaaagaagccaaagccacagtccccacccttaacccctactagtttattcacatccagtactcctaatgggtcccagtttctcacattctccattgagcccgtgcattattgtatgaatgaaataaaaacagggaagcccagaattccttctttcagaagcctcaaaagagggtggtcggtgaagatgggcccagcactagaagatttcagtcatctgccaccagaacagagacgtaaaaaactacagcagcgcattgatgaacttaacagagaactacagaaagaatcagaccaaaaagatgcactcaacaaaatgaaagatgtatatgagaagaatccacaaatgggggatccagggagtttgcagcctaaattagcagagaccatgaataacattgaccgcctacgaatggaaatccataagaatgaggcttggctctctgaagtcgaaggcaaaacaggtgggagaggagacagaagacatagcagtgacataaatcatcttgtaacacagggacgagaaagtcctgagggaagttacactgatgatgcaaaccaggaagtccgtgggccaccccagcagcatggtcaccacaatgagtttgatgatgaatttgaggatgatgatcccttgcctgctattggacactgcaaagctatctacccttttgatggacataatgaaggtactctagcaatgaaagaaggtgaagttctctacattatagaggaggacaaaggtgacggatggacaagagctcggagacagaacggtgaagaaggctacgttcccacgtcatacatagatgtaactctagagaaaaacagtaaaggttcctgaagagggtttctgaggaaatgggcaagatgttgaaggaggttacatgcagctgcttttgggggagggtattagagttgtcaggctcaaagagagtgagagaagcaagttgcatgagtgcatgcagacatgattttttttttactaacttcattagcatttccat

SEQ ID NO: 135170 - DNA, 1830 bp, Homo sapiens
  Payload ID: 6415
  Gene Symbol: FNBP1L
  Gene Name: formin binding protein 1-like
  ENST ID: ENST00000604705
  CDS Start-End: 1-1830
atgagctggggcacggagctgtgggatcagttcgacagcttagacaagcatacacaatggggaattgacttcttggaaagatatgccaaatttgttaaagagaggatagaaattgaacagaactatgcgaaacaattgagaaatctggttaagaagtactgccccaaacgttcatccaaagatgaagagccacggtttacctcgtgtgtagccttttttaatatccttaatgagttaaatgactatgcaggacagcgagaagttgtagcagaagaaatggcgcacagagtgtatggtgaattaatgagatatgctcatgatctgaaaactgaaagaaaaatgcatctgcaagaaggacgaaaagctcaacaatatcttgacatgtgctggaaacagatggataatagtaaaaagaagtttgaaagagaatgtagagaggcagaaaaggcacaacagagttatgaaagattggataatgatactaatgcaaccaaggcagatgttgaaaaggccaaacagcagttgaatctgcgtacgcatatggccgatgaaaataaaaatgaatatgctgcacaattacaaaactttaatggagaacaacataaacatttttatgtagtgattcctcagatttacaagcaactacaagaaatggacgaacgaaggactattaaactcagtgagtgttacagaggatttgctgactcagaacgcaaagttattcccatcatttcaaaatgtttggaaggaatgattcttgcagcaaaatcagttgatgaaagaagagactctcaaatggtggtagactccttcaaatctggttttgaacctccaggagactttccatttgaagattacagtcaacatatatatagaaccatttctgatgggactatcagtgcatccaaacaggagagtgggaagatggatgccaaaaccacagtaggaaaggccaagggcaaattgtggctctttggaaagaagccaaagccacagtccccacccttaacccctactagtttattcacatccagtactcctaatgggtcccagtttctcacattctccattgagcccgtgcattattgtatgaatgaaataaaaacagggaagcccagaattccttctttcagaagcctcaaaagagggtggtcggtgaagatgggcccagcactagaagatttcagtcatctgccaccagaacagagacgtaaaaaactacagcagcgcattgatgaacttaacagagaactacagaaagaatcagaccaaaaagatgcactcaacaaaatgaaagatgtatatgagaagaatccacaaatgggggatccagggagtttgcagcctaaattagcagagaccatgaataacattgaccgcctacgaatggaaatccataagaatgaggcttggctctctgaagtcgaaggcaaaacaggtgggagaggagacagaagacatagcagtgacataaatcatcttgtaacacagggacgagaaagtcctgagggaagttacactgatgatgcaaaccaggaagtccgtgggccaccccagcagcatggtcaccacaatgagtttgatgatgaatttgaggatgatgatcccttgcctgctattggacactgcaaagctatctacccttttgatggacataatgaaggtactctagcaatgaaagaaggtgaagttctctacattatagaggaggacaaaggtgacggatggacaagagctcggagacagaacggtgaagaaggctacgttcccacgtcatacatagatgtaactctagagaaaaacagtaaaggtgcagtaacttatatctaa

SEQ ID NO: 135171 - DNA, 3972 bp, Homo sapiens
  Payload ID: 6416
  Gene Symbol: FNBP4
  Gene Name: formin binding protein 4
  Uniprot ID: Q8N3X1
  ENST ID: ENST00000263773
  CDS Start-End: 14-3067
gcttgggctcgcgatggggaagaagtcccgggcggtacccggccgtaggcccatcctgcaactctctccgccgggtcctcggggcagcacgccgggccgggacccggagccggaacccgacactgagccggactcaaccgcggcggtccccagccagcccgccccgtcggcggcgacgaccaccaccaccgcggtgactgccgccgcggcctcggacgactcgccttcagaagatgaacaggaagcggtgcaggaggttcctagagttgttcagaatcctccaaaaccagtcatgaccactagacccacagctgttaaagcaacaggcggtctatgcttgcttggtgcttatgctgacagtgatgacgatgacaatgatgtttccgaaaaactagcacaatccaaagagacaaatggaaaccagtcaactgatattgatagtacattggccaacttcctagcggagatcgatgccataacagctcctcagcctgcagctcctgtaggagcttctgctccacctccaactccacctcgaccagagccaaaggaagcagcaacatctaccctttcttcttctacttcaaatggaacagactccacccaaacatctggttggcaatatgatactcagtgttcactggcaggagtcggaattgagatgggcgattggcaggaagtctgggatgagaacacgggatgttattattattggaatacacaaacaaatgaagtgacttgggagttaccccaatatcttgccacacaggtacagggattacagcattaccagcccagttctgtgccaggtgctgaaactagttttgtggtaaatacagacatatattctaaggagaaaacgatttctgtttccagtagtaaaagtggaccagtcatagccaagcgagaagttaaaaaggaagtaaatgaaggaattcaggctctctcaaatagtgaggaggagaagaaaggggtggcagcatcgctgcttgctcctttattgcctgagggaataaaagaagaagaagagagatggagaagaaaagtaatttgtaaagaggagccagtttcagaagtaaaagaaacaagtacaacagtagaagaagcaacaacaatagtaaagccacaggaaattatgttggacaatatagaagacccttctcaggaggatctttgcagtgttgtccaatctggagaaagtgaggaggaagaggaacaagatacccttgaactggagctagttttggaaaggaaaaaagcagagttgcgagccttggaggaaggagatggtagtgtgtcagggtctagtccacgttctgatatcagccagccagcatctcaagatggaatgcgtaggcttatgtctaaaagaggaaaatggaagatgtttgttcgagctaccagtccagaatctaccagtaggagttctagtaaaactggacgagatactccagaaaatggagaaactgcaattggtgctgaaaattcagaaaaaatagatgagaattcagataaagagatggaagtagaagaatctccagagaaaataaaagtacagacaacaccaaaagtagaagaagaacaggatttgaaatttcagattggagaactggcaaataccctgacaagtaaattcgagtttctaggcattaatagacaatccatctccaactttcatgtgctgctcttacagactgagactcgaattgcagactggcgggaaggggctcttaatggaaactaccttaaacgaaaacttcaggatgcagcagaacaactaaaacagtatgaaataaacgccactcctaaaggctggtcctgccactgggacagggatcatagacggtatttctatgtaaacgaacagtcgggcgagtctcagtgggagtttccagatggtgaagaggaagaagaagaaagccaagcacaagaaaatagagatgagactcttgccaaacagaccttgaaagacaaaactggcactgattcaaattcaacagaatcctctgaaacttccacaggttctctttgtaaagaatccttttctggtcaagtttcttcttcatcactcatgccacttactccattctggaccctccttcagtcaaatgttcctgtgcttcaacctccattacccttggaaatgccaccacccccacctccacctccagaatcacctccaccccctcctccaccacctcctcctgcggaagatggtgagatccaggaggtagagatggaggatgagggaagtgaggagccccctgccccaggaacagaggaagatacccctttgaaaccttcagcacaaaccacagttgtaactagccagagttcagttgattccaccatctctagttcttcttccactaaaggaataaagaggaaagctacagaaattagcactgcagtggttcagaggtcagctaccattggcagttctccagttctctatagccagtcagctatagctacaggtcaccaggcagcagggattggaaaccaggcaacaggaattggacatcagacaataccagttagccttccagcagcaggaatgggtcatcaggccagaggaatgagcctgcagtcaaattaccttggactagcggcagcacctgcaattatgagttatgcagaatgttctgtcccaattggagtgactgctccctcattgcagccagttcaggcccgaggtgctgtgcctaccgctaccattatagaaccaccaccaccacctcctcctcctcctcctccaccaccaccagctcccaaaatgccaccacctgaaaagacaaaaaaaggaaggaaagacaaggcaaagaagagtaagaccaaaatgccatctttggtaaaaaagtggcagagtatccagcgtgagttagatgaagaggacaattctagttccagtgaagaggatcgggaatcaactgcacagaagcgaattgaagagtggaaacagcagcagctggttagtggcatggcagagagaaatgctaattttgaagcccttcctgaggattggagagcaaggctgaagagaaggaaaatggctccaaacacatagtttttaagtttttaaaacttttttgtattattgtttgttttgtgttcagttcaaagtcttaaccagttttattgtcaaataaactataaatgttatgggggagatcttataaatttcctgggcaagagtgtatgcatacaaagttttcacttttgtgaaatgtaatttttctgtttttgcaaagggatgaggtgattggaattgctttgaccatgctgcctttattctcaaactggcaaacttagcatgttaggtgtattaacctcatcagtcttgaagaacatgtggctcatgagtataacacttctgtagaggactccctgacaaaagtgaagaattaacttctcctccagaacaagtgcaattcagaaggcagctctgcattctaccttgcttgactggaattgtctgaagctttttctggcctcttttctctagtcggccacccctgaagtgctgaggtctaagtggtttacctcgtgctgatagatggccacactctttagagtagttctcataagttctagaactggtagctcggtcgtttcgcacactaggtggcatacaggcagcagcaggtgttcatatccttgattttgagaatttcccctcaagtatgtggcagtaaatacaacaagacactctatgtattaatgtctccattgtcttaaccctgttccaaaacaaaattcacctcctttctttatgtgaatgtattctccataaaattccagtatttaaaaagcagtttactgttctgtactttctgttgtatcacaatcaggtaaaagtcactttaaactgaggaaacggcaaattgtgttttaaagctctttgtatttctccagtttctgaccttgtaaatttgtatatatgcactaataaagctttttttataatcctga

SEQ ID NO: 135172 - DNA, 582 bp, Homo sapiens
  Payload ID: 6416
  Gene Symbol: FNBP4
  Gene Name: formin binding protein 4
  ENST ID: ENST00000540172
  CDS Start-End: 154-582
gtgctccgctggttgaaagcggatccgggctggaggcggtgtcacggtgtatgaatattgattacgcgtcgcagcgcccagggcccagcgcccagcctccagtgcccgcccctctcggccgcccgacgctctctgctcgcgcttgggctcgcgatggggaagaagtcccgggcggtacccggccgtaggcccatcctgcaactctctccgccgggtcctcggggcagcacgccgggccgggacccggagccggaacccgacactgagccggactcaaccgcggcggtccccagccagcccgccccgtcggcggcgacgaccaccaccaccgcggtgactgccgccgcggcctcggacgactcgccttcagaagatgaacaggaagcggtgcaggaggttcctagagttgttcagaatcctccaaaaccagtcatgaccactagacccacagctgttaaagcaacaggagatcgatgccataacagctcctcagcctgcagctcctgtaggagcttctgctccacctccaactccacctcgaccagagccaaaggaagcagcaacatctaccctttcttcttc

SEQ ID NO: 135173 - DNA, 3990 bp, Homo sapiens
  Payload ID: 6417
  Gene Symbol: FHOD1
  Gene Name: formin homology 2 domain containing 1
  Uniprot ID: Q9Y613
  ENST ID: ENST00000258201
  CDS Start-End: 249-3743
cgggattcccattgggccctgtgagtggctagcggcggccccgcctccggcagtggttacctcctggcgcgcactcggggactaatcttggctccacccccttcctcggccccgcctccgtctggccccgcccctccagccgcgtccggtccggccgggcccgaaccgcggagctacagtgtgctttgagtagaagctgcactggggccgggactcggaggcgcgctgcgtgagccggccgcagagccatggcgggcggggaagaccgcggggacggagagccggtatcagtggtgaccgtgagggtgcagtacctggaagacaccgaccccttcgcatgtgccaactttccggagccgcgccgggcccccacctgcagcctggacggggcgctgcccttgggcgcgcagatacccgcggtgcaccgcctgctgggagcgccgctcaagttggaggattgtgctctgcaagtgtctccctccggatactacctggacaccgagctgtccctggaagagcagcgggagatgctggagggcttctatgaagagatcagcaaagggcggaagcccacgctgatccttcggacccagctctctgtgagggtcaacgctatcttggaaaagctgtatagctccagtggtcctgagctccgccgctccctcttctcactgaagcagatcttccaggaggacaaagacctggtgcctgaatttgtgcattcagaggggctgagctgcctgatccgtgtgggtgctgctgccgaccacaactaccagagctacatccttagagcgctcggccagctgatgctctttgtggatggaatgctgggggtggtggcccacagtgacactattcagtggctgtacacattgtgtgccagcctgtcccgcttggtggtgaagacagccctgaagctgctgttggtgtttgtagaatactccgaaaacaacgcaccgctgttcatccgtgcagtgaactctgtggccagcaccaccggtgctcctccctgggccaatctggtgtccatcctggaggagaagaatggcgctgaccctgagttgttggtgtacacggtcaccctcatcaacaagacgctggcggcgctcccggaccaggactccttctacgatgtgacggatgcactggagcagcagggcatggaagcgctggtccagcgccacctgggcactgcgggcactgacgtcgacctgcgcacgcagcttgtgctctacgagaacgccctgaaattggaggatggagacatcgaagaagccccaggcgctggtgggcggcgggaacgacgaaagccttcttctgaggagggcaagaggagccgccgttctctggaaggcgggggctgccccgcgcgtgccccggaacctggccccacaggccccgcctcaccggtaggccccacctcttccaccggccccgccctgctgacaggccccgcctccagccctgtgggccctccctccggtctccaagcttcagtgaacctttttcctaccatctctgtggcaccctcagctgacacctccagcgagaggagcatctacaaagcccggttcctggagaatgtggcggcagcagaaacagagaagcaggttgcgctggcccagggccgggcagagacacttgccggggccatgcccaatgaggcgggtggacacccagatgcccggcaactctgggactccccagagacagcccctgcagccagaacaccccagagccctgccccctgtgtcctgctccgggcccagcgaagccttgcaccagagcccaaggagccactgataccagcaagccccaaggctgagcccatctgggagctccctacccgtgcacccaggctctctattggggacctggacttttcagatctaggggaggatgaagaccaggacatgctgaatgtagagtctgtggaggctgggaaagacatcccagctccctcacccccactgcccctgctctcgggagtacccccccctcccccacttccacctcccccacccatcaaaggccccttcccaccacctccacctctacctctggctgcccctcttccccattcagtgcctgacagctcagccctccccactaagaggaagacagtaaaacttttctggcgtgagctgaagctggctgggggccatggagtctctgcaagccgctttgggccctgcgccaccctctgggcttcactggaccctgtctcagtggacacggcccgactggaacacctctttgagtctcgtgccaaagaggtgctgccctccaagaaagctggagagggccgccggacaatgaccacagtgctggaccccaagcgcagcaacgccatcaacatcggcctaaccacactgccacctgtgcatgtcattaaggctgctctgctcaactttgatgagtttgctgtcagcaaggatggcattgagaagctactgaccatgatgcccacggaggaagagcggcagaagattgaggaagcccagctggccaaccctgacatacccctgggcccagccgagaacttcctgatgactcttgcctccattggcggcctcgctgctcgtctacaactctgggccttcaagctggactatgacagcatggagcgggaaattgctgagccactgtttgacctgaaagtgggtatggaacagctggtacagaatgccaccttccgctgcatcctggctaccctcctagcggtgggcaacttcctcaatggctcccagagcagcggctttgagctgagctacctggagaaggtgtcagaggtgaaggacacggtgcgtcgacagtcactgctacaccatctctgctccctagtgctccagacccggcctgagtcctctgacctctattcagaaatccctgccctgacccgctgtgccaaggtggactttgaacagctgactgagaacctggggcagctggagcgccggagccgggcagccgaggagagcctgcggagcttggccaagcatgagctggccccagccctgcgtgcccgcctcacccacttcctggaccagtgtgcccgccgtgttgccatgctaaggatagtgcaccgccgtgtctgcaataggttccatgccttcctgctctacctgggctacaccccgcaggcggcccgtgaagtgcgcatcatgcagttctgccacacgctgcgggaatttgcgcttgagtatcggacttgccgggaacgagtgctacagcagcagcagaagcaggccacataccgtgagcgcaacaagacccggggacgcatgatcaccgagacagagaagttctcaggtgtggctggggaagcccccagcaacccctctgtcccagtagcagtgagcagcgggccaggccggggagatgctgacagtcatgctagtatgaagagtctgctgaccagcaggcctgaggacaccacacacaatcgccgcagcagaggcatggtccagagcagctccccaatcatgcccacagtggggccctccactgcatccccagaagaacccccaggctccagtttacccagtgatacatcagatgagatcatggaccttctggtgcagtcagtgaccaagagcagtcctcgtgccttagctgctagggaacgcaagcgttcccgcggcaaccgcaagtctttgagaaggacgttgaagagtgggctcggagatgacctggtgcaggcactgggactaagcaagggtcctggcctggaggtgtgaaggtgctgtatcccggaaatctatctggaccctggactgcagtgcaggagatgacagagtgaggagggcccagagcagaattctggccccagaactctgtgcccaggagccatgccttgagcagtattagccgtgtgtgtatgcatgtgagtgtgtgtgtatgtgtgtgtgtgcatgcatatgcatgtgcatgtgtgtgagctccttgaacgcacggagcaaaataaaattttcttagctaatccaa

SEQ ID NO: 135174 - DNA, 2069 bp, Homo sapiens
  Payload ID: 6417
  Gene Symbol: FHOD1
  Gene Name: formin homology 2 domain containing 1
  ENST ID: ENST00000561922
  CDS Start-End: 69-542
gtgctttgagtagaagctgcactggggccgggactcggaggcgcgctgcgtgagccggccgcagagccatggcgggcggggaagaccgcggggacggagagccggtatcagtggtgaccgtgagggtgcagtacctggaagacaccgaccccttcgcatgtgccaactttccggagccgcgccgggcccccacctgcagcctggacggggcgctgcccttgggcgcgcagatacccgcggtgcaccgcctgctgggagcgccgctcaagttggaggattgtgctctgcaagtgtctccctccggatactacctggacaccgagctgtccctggaagagcagcgggagatgctggagggcttctatgaagagatcagcaaagggcggaagcccacgctgatccttcggacccagctctctgtgagggtcaacgctatcttggggttttataccctaccttttgcagaaaagctgtatagctccagtggtcctgagctccgccgctccctcttctcactgaagcagatcttccagaggggctgagctgcctgatccgtgtgggtgctgctgccgaccacaactaccagagctacatccttagagcgctcggccagctgatgctctttgtggatggaatgctgggggtggtggcccacagtgacactattcagtggctgtacacattgtgtgccagcctgtcccgcttggtggtgaagacagccctgaagctgctgttggtgtttgtagaatactccgaaaacaacgcaccgctgttcatccgtgcagtgaactctgtggccagcaccaccggtgctcctccctgggccaatctggtgtccatcctggaggagaagaatggcgctgaccctgagttgttggtgtacacggtcaccctcatcaacaagacgctggcggcgctcccggaccaggactccttctacgatgtgacggatgcactggagcagcagggcatggaagcgctggtccagcgccacctgggcactgcgggcactgacgtcgacctgcgcacgcagcttgtgctctacgagaacgccctgaaattggaggatggagacatcgaagaagccccaggcgctggtgggcggcgggaacgacgaaagccttcttctgaggagggcaagaggagccgccgttctctggaaggcgggggctgccccgcgcgtgccccggaacctgggccccgcctcaccggtaggccccacctcttccaccggccccgccctgctgacaggccccgcctccagccctgtgggccctccctccggtctccaagcttcagtgaacctttttcctaccatctctgtggcaccctcagctgacacctccagcgagaggagcatctacaaagcccggttcctggagaatgtggcggcagcagaaacagagaagcaggttgcgctggcccagggccgggcagagacacttgccggggccatgcccaatgaggcgggtggacacccagatgcccggcaactctgggactccccagagacagcccctgcagccagaacaccccagagccctgccccctgtgtcctgctccgggcccagcgaagccttgcaccagagcccaaggagccactgataccagcaagccccaaggctgagcccatctgggagctccctacccgtgcacccaggctctctattggggacctggacttttcagatctaggggaggatgaagaccaggacatgctgaatgtagagtctgtggaggctgggaaagacatcccagctccctcacccccactgcccctgctctcgggagtacccccccctcccccacttccacctcccccacccatcaaaggccccttcccaccacctccacctctacctctggctgcccctcttccccattcagtgcctgacagctcagccctccccactaagaggaagacagtaaaacttttctggcgtgagctgaagctggctgggggccatggagtctctgcaagccgctttgggccctgcgccaccctctgggcttcactggaccctgtctcagtggacacggcccgactggaacacctctttgagtctcgt

SEQ ID NO: 135175 - DNA, 773 bp, Homo sapiens
  Payload ID: 6417
  Gene Symbol: FHOD1
  Gene Name: formin homology 2 domain containing 1
  ENST ID: ENST00000567561
  CDS Start-End: 1-68
tcagcaaggatggcattgagatgactgaggggtcaagaccaatgcctcaggcctcaggcctgcattgagggggccatgtcaggctctggctacatcctcagaagctactgaccatgatgcccacggaggaagagcggcagaagattgaggaagcccagctggccaaccctgacatacccctgggcccagccgagaacttcctgatgactcttgcctccattggcggcctcgctgctcgtctacaactctgggccttcaagctggactatgacagcatggagcgggaaattgctgagccactgtttgacctgaaagtgggtatggaacagctggtacagaatgccaccttccgctgcatcctggctaccctcctagcggtgggcaacttcctcaatggctcccaggtggactttgaacagctgactgagaacctggggcagctggagcgccggagccgggcagccgaggagagcctgcggagcttggccaagcatgagctggccccagccctgcgtgcccgcctcacccacttcctggaccagtgtgcccgccgtgttgccatgctaaggatagtgcaccgccgtgtctgcaataggttccatgccttcctgctctacctgggctacaccccgcaggcggcccgtgaagtgcgcatcatgcagttctgccacacgctgcgggaatttgcgcttgagtatcggacttgccgggaacgagtgctacagcagcagcagaagcaggccacataccgtgagcgcaacaagacccgggga

SEQ ID NO: 135176 - DNA, 563 bp, Homo sapiens
  Payload ID: 6417
  Gene Symbol: FHOD1
  Gene Name:: formin homology 2 domain containing 1
  ENST ID: ENST00000567509
  CDS Start-End: 1-327
gggccctgcgccaccctctgggcttcactggaccctgtctcagtggacacggcccgactggaacacctctttgagtctcgtgccaaagaggtgctgccctccaagaaagctggagagggccgccggacaatgaccacagtgctggaccccaagcgcagcaacgccatcaacatcggcctaaccacactgccacctgtgcatgtcattaaggctgctctgctcaactttgatgagtttgctgtcagcaaggatggcattgaggctctggctacatcctcagaagctactgaccatgatgcccacggaggaagagcggcagaagattgaggaagcccagctggccaaccctgacatacccctgggcccagccgagaacttcctgatgactcttgcctccattggcggcctcgctgctcgtctacaactctgggccttcaagctggactatgacagcatggagcgggaaattgctgagccactgtttgacctgaaagtgggtatggaacagctggtacagaatgccaccttccgctgcatcctggctaccctcctagcggtgggca

SEQ ID NO: 135177 - DNA, 520 bp, Homo sapiens
  Payload ID: 6417
  Gene Symbol: FHOD1
  Gene Name: formin homology 2 domain containing 1
  ENST ID: ENST00000568595
  CDS Start-End: 1-85
ttttcctaccatctctgtggcaccctcagctgacacctccagcgagaggagcatctacaaacttcaccaaactgcttccgtttgagcccggttcctggagaatgtggcggcagcagaaacagagaagcaggttgcgctggcccagggccgggcagagacacttgccggggccatgcccaatgaggcgggtggacacccagatgcccggcaactctgggactccccagagacagcccctgcagccagaacaccccagagccctgccccctgtgtcctgctccgggcccagcgaagccttgcaccagagcccaaggagccactgataccagcaagccccaaggctgagcccatctgggagctccctacccgtgcacccaggctctctattggggacctggacttttcagatctaggggaggatgaagaccaggacatgctgaatgtagagtctgtggaggctgggaaagacatcccagctccctcacccccactgcccctgctctcgggagtacccccccct

SEQ ID NO: 135178 - DNA, 4967 bp, Homo sapiens
  Payload ID: 6418
  Gene Symbol: FHOD3
  Gene Name: formin homology 2 domain containing 3
  Uniprot ID: Q2V2M9
  ENST ID: ENST00000257209
  CDS Start-End: 123-4442
agcctgcgagtccgcgagccagcgagctgcggctgcggcctcccctgcgcgcagctacccgggcgtcccggcccgcggccccgctaaccccggggcccgcgcccccgcggcagggatgcatcatggccacgctggcttgccgggtgcagttcttggacgacacggaccctttcaacagcaccaacttccccgagcccagccggccgccgctgttcacgttccgcgaggacctcgcgctcggcacccagctggcgggggtccataggctgctgcaggcgccgcacaagctggatgactgtactctgcagctctctcacaatggcgcctacctggatttggaggccaccctggcagagcagcgggatgagttggaaggcttccaggatgacgccgggcggggcaagaagcacagcatcatcctaaggacgcagctgtctgtgagggtccatgcctgcatcgaaaaactatacaactccagcggacgagatttgagaagggccctcttctccctgaagcagatatttcaggatgacaaggatttggtgcatgaatttgtagtggctgaaggtctgacatgtttgatcaaggtgggagctgaggctgatcagaactatcagaactacatcttaagggctttgggccagattatgttgtatgtggatggaatgaatggagtaataaaccgcaatgaaaccattcagtggctgtacactctcattgggtcaaagttccgcctggtggtgaagacagccctgaagctgctgctcgtctttgtagagtactcggagtccaacgcacctctcctaattcaggctgtcactgctgttgacacgaaaagaggggtcaaaccttggtcaaatatcatggaaatcctggaggaaaaagatggagttgatacggagctactggtttatgcaatgactttggtgaacaagacgttatcaggactaccagaccaagacaccttctacgacgtcgtggactgcctggaggagctgggcattgctgctgtgtcccagaggcacttgaacaagaaagggactgacctggacttagtggagcaactcaacatttatgaggtggcgctcaggcacgaggatggcgatgagaccacggagccaccccccagtgggtgccgggaccggaggagggccagcgtgtgttccagtggcggaggcgagcaccggggcctggaccgcagaaggagccgcaggcactcggtgcagagcatcaagagcaccctgtcggcccccaccagtccctgctcccagtcagctcccagcttcaagcccaaccaagtgcgagatctgcgtgaaaaatacagcaattttggcaataactcttatcactcctcaagaccctcatctggatccagtgtgcccaccacccccacatcatccgtctcacccccacaggaggccaggttggaaaggtcatcaccgagtggtcttctcacatcatccttcaggcagcaccaagagtcactggcagcagagagagagaggcggcggcaggagagagaagaaaggttgcagagaatagagcgggaagaaagaaacaaattcagccgagattatttagacaaaagagaggagcaaaggcaagcaagagaagaaagatacaaatacttggaacagttggcagctgaggagcacgagaaggagctgagaagccggagtgtgagccggggcagagccgacctctccttggacctgacctcgccagcagccccagcctgcctggctcctctgagccatagcccctcatcttcagactctcaagaggctctcacggtgtctgcctcctccccaggaacccctcaccatccccaagcaagtgccggggatcctgaacccgaatcagaggcagaaccggaagcagaggcaggggcggggcaggttgctgatgaagctggccaggacatagcctctgcccacgagggtgcagagactgaagtggagcaggcactagagcaagagccggaagaaagagcctccctcagtgaaaaagagaggcagaacgagggggtgaacgagagggacaactgctctgcctccagcgtctcgtcctccagcagcacgttggagagggaggagaaggaggacaagctctccagggacaggacaactggtttgtggcccgcaggtgtccaggatgcaggtgtaaatggacagtgtggcgacatcctcaccaacaaacggttcatgcttgacatgctgtatgcccataacaggaagtctccggatgatgaggagaagggggatggggaggctgggaggacccagcaggaggcagaggcggtagccagccttgctaccaggatatccaccctgcaggccaactctcagacccaggatgagagtgtcaggagggtggatgtcggctgtttggacaatcggggcagtgtgaaagcatttgctgagaaattcaacagtggggacctggggagaggttccatctcccctgatgctgagcccaatgacaaggtcccagaaacagcgccggtgcagccgaagacagagtctgattacatctgggaccagctcatggccaatccaagagagctcagaatccaagacatggatttcactgacctgggggaggaggatgacattgatgtcctagatgtggacctgggtcacagggaggcccctgggccacctcccccacccccacccacctttctgggtttgccgcccccaccccctccgcccctgttggacagcattcctccccctcctgtccctggtaatttattggttcctcctcctccagtgttcaacgctcctcagggcttagggtggtcccaggtacccaggggtcagcccacattcactaagaaaaagaagaccatccgtttgttctggaatgaagttcggccttttgactggccatgtaaaaacaaccgacgctgcagagaattcctgtggtcaaaactggaacccattaaggtggacacttccagactggagcacctgtttgagtctaaatccaaggaactgtctgtctcaaagaaaactgctgcagatggaaaaaggcaagagatcattgttctggattccaagaggagtaacgccatcaatattggtctgacggtgctgccccctccaaggacgattaagatcgccattttgaattttgatgagtatgccttaaacaaagaaggaatcgagaaaattctaacgatgattcccaccgatgaggagaagcagaaaatccaggaagctcagctggccaaccctgaaatccccctgggcagtgcagagcagttcctcctcaccctgtcctccatcagcgagctctctgcacgacttcacctctgggcattcaaaatggattatgaaactacagaaaaggaagtagcagaaccactcctggacctgaaggaaggaatagaccagttggagaacaataaaaccttgggctttatcctgtctactctcttagccattgggaactttctaaatggaactaatgccaaagcgtttgagttaagctacctcgagaaggttccagaagtcaaagacacagtgcacaagcagtcgcttctccaccatgtgtgcaccatggtggtagaaaacttcccagacagctccgatctgtactcggagatcggggccatcaccaggtcagccaaggttgactttgatcaacttcaggataatttatgtcagatggagagaagatgcaaagcttcatgggatcacctcaaggcaattgcaaaacatgaaatgaaaccagttttaaaacaacggatgtcagagttcctgaaagactgtgcagagcgaattataattttaaagattgtccatagaaggataatcaacagattccactcctttttactctttatgggccatccaccttatgcaattcgggaagtgaacataaacaaattctgcaggattattagtgaatttgcactagagtatcgcacaaccagggaaagggttttgcagcagaaacagaaacgggccaaccacagagagagaaataagaccagagggaagatgatcaccgattctggcaagttctccggcagttctccggcgcccccaagccagccgcagggtctgagctatgcggaggacgcggctgagcacgagaacatgaaggctgtgctgaaaacctcgtccccctccgtggaggacgccacccccgcgctgggcgtccgcacacgcagccgagcaagccgaggatccactagttcctggactatgggaactgatgactcgcccaatgtcacagatgatgcagctgatgagatcatggaccgcatcgtcaagtcagccacccaagtgcccagtcagcgagtggtgccgagggagaggaaacgatcccgggccaaccggaaatctttgcgaagaaccctgaagagcggcctgaccccagaagaagccagagccctgggcttggttggcacctcggagttgcagctgtgacactcataggttactcccaggagtgtgctgagcagaaggcaagctcttgctggatgaaacccctccaggtggggttggggagacttgatattcacatccaacagtttgaaaagggagagctcaattcccagcgtcaccccatggcttgtgttgcctgctacgcattgacttggatctccaggagtcccctgcacataccttctccatcgtgtcagctgtgtttctcttgattccgtgacacccggtttattagttcaaaagtgtgacaccttttctgggcaaggaacagcccctttaaggagcaaatcacttctgtcacagttattatggtaatatgaggcaatctgattagcttcacagactgagtctccacaacaccaaaatatccagatgtaaaccccaaacttgtacacaaaagaaagcacagattgtttacctgttgtggattttagatgtaacaaatgtttatacaaatacatacatgtacaccatgtttcaaatactaaataaatagagtttaatgcc

SEQ ID NO: 135179 - DNA, 4518 bp, Homo sapiens
  Payload ID: 6418
  Gene Symbol: FHOD3
  Gene Name: formin homology 2 domain containing 3
  Uniprot ID: Q2V2M9
  ENST ID: ENST00000359247
  CDS Start-End: 1-4269
atggccacgctggcttgccgggtgcagttcttggacgacacggaccctttcaacagcaccaacttccccgagcccagccggccgccgctgttcacgttccgcgaggacctcgcgctcggcacccagctggcgggggtccataggctgctgcaggcgccgcacaagctggatgactgtactctgcagctctctcacaatggcgcctacctggatttggaggccaccctggcagagcagcgggatgagttggaaggcttccaggatgacgccgggcggggcaagaagcacagcatcatcctaaggacgcagctgtctgtgagggtccatgcctgcatcgaaaaactatacaactccagcggacgagatttgagaagggccctcttctccctgaagcagatatttcaggatgacaaggatttggtgcatgaatttgtagtggctgaaggtctgacatgtttgatcaaggtgggagctgaggctgatcagaactatcagaactacatcttaagggctttgggccagattatgttgtatgtggatggaatgaatggagtaataaaccgcaatgaaaccattcagtggctgtacactctcattgggtcaaagttccgcctggtggtgaagacagccctgaagctgctgctcgtctttgtagagtactcggagtccaacgcacctctcctaattcaggctgtcactgctgttgacacgaaaagaggggtcaaaccttggtcaaatatcatggaaatcctggaggaaaaagatggagttgatacggagctactggtttatgcaatgactttggtgaacaagacgttatcaggactaccagaccaagacaccttctacgacgtcgtggactgcctggaggagctgggcattgctgctgtgtcccagaggcacttgaacaagaaagggactgacctggacttagtggagcaactcaacatttatgaggtggcgctcaggcacgaggatggcgatgagaccacggagccaccccccagtgggtgccgggaccggaggagggccagcgtgtgttccagtggcggaggcgagcaccggggcctggaccgcagaaggagccgcaggcactcggtgcagagcatcaagagcaccctgtcggcccccaccagtccctgctcccagtcagctcccagcttcaagcccaaccaagtgcgagatctgcgtgaaaaatacagcaattttggcaataactcttatcactcctcaagaccctcatctggatccagtgtgcccaccacccccacatcatccgtctcacccccacaggaggccaggttggaaaggtcatcaccgagtggtcttctcacatcatccttcaggcagcaccaagagtcactggcagcagagagagagaggcggcggcaggagagagaagaaaggttgcagagaatagagcgggaagaaagaaacaaattcagatacaaatacttggaacagttggcagctgaggagcacgagaaggagctgagaagccggagtgtgagccggggcagagccgacctctccttggacctgacctcgccagcagccccagcctgcctggctcctctgagccatagcccctcatcttcagactctcaagaggctctcacggtgtctgcctcctccccaggaacccctcaccatccccaagcaagtgccggggatcctgaacccgaatcagaggcagaaccggaagcagaggcaggggcggggcaggttgctgatgaagctggccaggacatagcctctgcccacgagggtgcagagactgaagtggagcaggcactagagcaagagccggaagaaagagcctccctcagtgaaaaagagaggcagaacgagggggtgaacgagagggacaactgctctgcctccagcgtctcgtcctccagcagcacgttggagagggaggagaaggaggacaagctctccagggacaggacaactggtttgtggcccgcaggtgtccaggatgcaggtgtaaatggacagtgtggcgacatcctcaccaacaaacggttcatgcttgacatgctgtatgcccataacaggaagtctccggatgatgaggagaagggggatggggaggctgggaggacccagcaggaggcagaggcggtagccagccttgctaccaggatatccaccctgcaggccaactctcagacccaggatgagagtgtcaggagggtggatgtcggctgtttggacaatcggggcagtgtgaaagcatttgctgagaaattcaacagtggggacctggggagaggttccatctcccctgatgctgagcccaatgacaaggtcccagaaacagcgccggtgcagccgaagacagagtctgattacatctgggaccagctcatggccaatccaagagagctcagaatccaagacatggatttcactgacctgggggaggaggatgacattgatgtcctagatgtggacctgggtcacagggaggcccctgggccacctcccccacccccacccacctttctgggtttgccgcccccaccccctccgcccctgttggacagcattcctccccctcctgtccctggtaatttattggttcctcctcctccagtgttcaacgctcctcagggcttagggtggtcccaggtacccaggggtcagcccacattcactaagaaaaagaagaccatccgtttgttctggaatgaagttcggccttttgactggccatgtaaaaacaaccgacgctgcagagaattcctgtggtcaaaactggaacccattaaggtggacacttccagactggagcacctgtttgagtctaaatccaaggaactgtctgtctcaaagaaaactgctgcagatggaaaaaggcaagagatcattgttctggattccaagaggagtaacgccatcaatattggtctgacggtgctgccccctccaaggacgattaagatcgccattttgaattttgatgagtatgccttaaacaaagaaggaatcgagaaaattctaacgatgattcccaccgatgaggagaagcagaaaatccaggaagctcagctggccaaccctgaaatccccctgggcagtgcagagcagttcctcctcaccctgtcctccatcagcgagctctctgcacgacttcacctctgggcattcaaaatggattatgaaactacagaaaaggaagtagcagaaccactcctggacctgaaggaaggaatagaccagttggagaacaataaaaccttgggctttatcctgtctactctcttagccattgggaactttctaaatggaactaatgccaaagcgtttgagttaagctacctcgagaaggttccagaagtcaaagacacagtgcacaagcagtcgcttctccaccatgtgtgcaccatggtggtagaaaacttcccagacagctccgatctgtactcggagatcggggccatcaccaggtcagccaaggttgactttgatcaacttcaggataatttatgtcagatggagagaagatgcaaagcttcatgggatcacctcaaggcaattgcaaaacatgaaatgaaaccagttttaaaacaacggatgtcagagttcctgaaagactgtgcagagcgaattataattttaaagattgtccatagaaggataatcaacagattccactcctttttactctttatgggccatccaccttatgcaattcgggaagtgaacataaacaaattctgcaggattattagtgaatttgcactagagtatcgcacaaccagggaaagggttttgcagcagaaacagaaacgggccaaccacagagagagaaataagaccagagggaagatgatcaccgattctggcaagttctccggcagttctccggcgcccccaagccagccgcagggtctgagctatgcggaggacgcggctgagcacgagaacatgaaggctgtgctgaaaacctcgtccccctccgtggaggacgccacccccgcgctgggcgtccgcacacgcagccgagcaagccgaggatccactagttcctggactatgggaactgatgactcgcccaatgtcacagatgatgcagctgatgagatcatggaccgcatcgtcaagtcagccacccaagtgcccagtcagcgagtggtgccgagggagaggaaacgatcccgggccaaccggaaatctttgcgaagaaccctgaagagcggcctgaccccagaagaagccagagccctgggcttggttggcacctcggagttgcagctgtgacactcataggttactcccaggagtgtgctgagcagaaggcaagctcttgctggatgaaacccctccaggtggggttggggagacttgatattcacatccaacagtttgaaaagggagagctcaattcccagcgtcaccccatggcttgtgttgcctgctacgcattgacttggatctccaggagtcccctgcacataccttctccatcgtgtcagctgtgtttctcttgattccgtgacacccggttta

SEQ ID NO: 135180 - DNA, 1720 bp, Homo sapiens
  Payload ID: 6418
  Gene Symbol: FHOD3
  Gene Name: formin homology 2 domain containing 3
  ENST ID: ENST00000585579
  CDS Start-End: 1-1127
acgccatcaatattggtctgacggtgctgccccctccaaggacgattaagatcgccattttgaattttgatgagtatgccttaaacaaagaaggaatcgagaaaattctaacgatgattcccaccgatgaggagaagcagaaaatccaggaagctcagctggccaaccctgaaatccccctgggcagtgcagagcagttcctcctcaccctgtcctccatcagcgagctctctgcacgacttcacctctgggcattcaaaatggattatgaaactacagaaaaggaagtagcagaaccactcctggacctgaaggaaggaatagaccagttggagaacaataaaaccttgggctttatcctgtctactctcttagccattgggaactttctaaatggaactaatgccaaagcgtttgagttaagctacctcgagaaggttccagaagtcaaagacacagtgcacaagcagtcgcttctccaccatgtgtgcaccatggtggtagaaaacttcccagacagctccgatctgtactcggagatcggggccatcaccaggtcagccaaggttgactttgatcaacttcaggataatttatgtcagatggagagaagatgcaaagcttcatgggatcacctcaaggcaattgcaaaacatgaaatgaaaccagttttaaaacaacggatgtcagagttcctgaaagactgtgcagagcgaattataattttaaagattgtccatagaaggataatcaacagattccactcctttttactctttatgggccatccaccttatgcaattcgggaagtgaacataaacaaattctgcaggattattagtgaatttgcactagagtatcgcacaaccagggaaagggttttgcagcagaaacagaaacgggccaaccacagagagagaaataagaccagagggaagatgatcaccgatgatccactagttcctggactatgggaactgatgactcgcccaatgtcacagatgatgcagctgatgagatcatggaccgcatcgtcaagtcagccacccaagtgcccagtcagcgagtggtgccgagggagaggaaacgatcccgggccaaccggaaatctttgcgaagaaccctgaagagcggcctgaccccagaagaagccagagccctgggcttggttggcacctcggagttgcagctgtgacactcataggttactcccaggagtgtgctgagcagaaggcaagctcttgctggatgaaacccctccaggtggggttggggagacttgatattcacatccaacagtttgaaaagggagagctcaattcccagcgtcaccccatggcttgtgttgcctgctacgcattgacttggatctccaggagtcccctgcacataccttctccatcgtgtcagctgtgtttctcttgattccgtgacacccggtttattagttcaaaagtgtgacaccttttctgggcaaggaacagcccctttaaggagcaaatcacttctgtcacagttattatggtaatatgaggcaatctgattagcttcacagactgagtctccacaacaccaaaatatccagatgtaaaccccaaacttgtacacaaaagaaagcacagattgtttacctgttgtggattttagatgtaacaaatgtttatacaaatacatacatgtacaccatgtttcaaatactaaataaatagagtttaatgcc

SEQ ID NO: 135181 - DNA, 4869 bp, Homo sapiens
  Payload ID: 6418
  Gene Symbol: FHOD3
  Gene Name: formin homology 2 domain containing 3
  Uniprot ID: Q2V2M9
  ENST ID: ENST00000590592
  CDS Start-End: 1-4869
atggccacgctggcttgccgggtgcagttcttggacgacacggaccctttcaacagcaccaacttccccgagcccagccggccgccgctgttcacgttccgcgaggacctcgcgctcggcacccagctggcgggggtccataggctgctgcaggcgccgcacaagctggatgactgtactctgcagctctctcacaatggcgcctacctggatttggaggccaccctggcagagcagcgggatgagttggaaggcttccaggatgacgccgggcggggcaagaagcacagcatcatcctaaggacgcagctgtctgtgagggtccatgcctgcatcgaaaaactatacaactccagcggacgagatttgagaagggccctcttctccctgaagcagatatttcaggatgacaaggatttggtgcatgaatttgtagtggctgaaggtctgacatgtttgatcaaggtgggagctgaggctgatcagaactatcagaactacatcttaagggctttgggccagattatgttgtatgtggatggaatgaatggagtaataaaccgcaatgaaaccattcagtggctgtacactctcattgggtcaaagttccgcctggtggtgaagacagccctgaagctgctgctcgtctttgtagagtactcggagtccaacgcacctctcctaattcaggctgtcactgctgttgacacgaaaagaggggtcaaaccttggtcaaatatcatggaaatcctggaggaaaaagatggagttgatacggagctactggtttatgcaatgactttggtgaacaagacgttatcaggactaccagaccaagacaccttctacgacgtcgtggactgcctggaggagctgggcattgctgctgtgtcccagaggcacttgaacaagaaagggactgacctggacttagtggagcaactcaacatttatgaggtggcgctcaggcacgaggatggcgatgagaccacggagccaccccccagtgggtgccgggaccggaggagggccagcgtgtgttccagtggcggaggcgagcaccggggcctggaccgcagaaggagccgcaggcactcggtgcagagcatcaagagcaccctgtcggcccccaccagtccctgctcccagtcagctcccagcttcaagcccaaccaagtgcgagatctgcgtgaaaaggaggaggaggaggaagaggagcagccaatcacggagcccagttccgaagaagagagagaggatgatgcttcctgtcagggcaaggacagcaaggtcggcgctgcctcagggcagagccccactggaagggatgctgctcccaagagctctgccctccctgctgtctcgaatgccagctcgcagggaaagccgcttctggttggcactgcaggcgggaccacctggcacagtgggtcctctgggtctgaggccaccccatctgccctcctgtcaccccctgcctcagctgctcggccctcctccgccacaccaggctccctgaaggtgtcaccgaccatagacaagctgccctacgtgccccacagccccttccacctcttctcctatgactttgaggactcctccctgtccaccaaggagaaggaagcagagtcccagaaggaaaacagttcctctgattctttctctttgagcacatattctgcctctgagccttaccacttccgatctttctcttctaatagatacagcaattttggcaataactcttatcactcctcaagaccctcatctggatccagtgtgcccaccacccccacatcatccgtctcacccccacaggaggccaggttggaaaggtcatcaccgagtggtcttctcacatcatccttcaggcagcaccaagagtcactggcagcagagagagagaggcggcggcaggagagagaagaaaggttgcagagaatagagcgggaagaaagaaacaaattcagccgagattatttagacaaaagagaggagcaaaggcaagcaagagaagaaagatacaaatacttggaacagttggcagctgaggagcacgagaaggagctgagaagccggagtgtgagccggggcagagccgacctctccttggacctgacctcgccagcagccccagcctgcctggctcctctgagccatagcccctcatcttcagactctcaagaggctctcacggtgtctgcctcctccccaggaacccctcaccatccccaagcaagtgccggggatcctgaacccgaatcagaggcagaaccggaagcagaggcaggggcggggcaggttgctgatgaagctggccaggacatagcctctgcccacgagggtgcagagactgaagtggagcaggcactagagcaagagccggaagaaagagcctccctcagtgaaaaagagaggcagaacgagggggtgaacgagagggacaactgctctgcctccagcgtctcgtcctccagcagcacgttggagagggaggagaaggaggacaagctctccagggacaggacaactggtttgtggcccgcaggtgtccaggatgcaggtgtaaatggacagtgtggcgacatcctcaccaacaaacggttcatgcttgacatgctgtatgcccataacaggaagtctccggatgatgaggagaagggggatggggaggctgggaggacccagcaggaggcagaggcggtagccagccttgctaccaggatatccaccctgcaggccaactctcagacccaggatgagagtgtcaggagggtggatgtcggctgtttggacaatcggggcagtgtgaaagcatttgctgagaaattcaacagtggggacctggggagaggttccatctcccctgatgctgagcccaatgacaaggtcccagaaacagcgccggtgcagccgaagacagagtctgattacatctgggaccagctcatggccaatccaagagagctcagaatccaagacatggatttcactgacctgggggaggaggatgacattgatgtcctagatgtggacctgggtcacagggaggcccctgggccacctcccccacccccacccacctttctgggtttgccgcccccaccccctccgcccctgttggacagcattcctccccctcctgtccctggtaatttattggttcctcctcctccagtgttcaacgctcctcagggcttagggtggtcccaggtacccaggggtcagcccacattcactaagaaaaagaagaccatccgtttgttctggaatgaagttcggccttttgactggccatgtaaaaacaaccgacgctgcagagaattcctgtggtcaaaactggaacccattaaggtggacacttccagactggagcacctgtttgagtctaaatccaaggaactgtctgtctcaaagaaaactgctgcagatggaaaaaggcaagagatcattgttctggattccaagaggagtaacgccatcaatattggtctgacggtgctgccccctccaaggacgattaagatcgccattttgaattttgatgagtatgccttaaacaaagaaggaatcgagaaaattctaacgatgattcccaccgatgaggagaagcagaaaatccaggaagctcagctggccaaccctgaaatccccctgggcagtgcagagcagttcctcctcaccctgtcctccatcagcgagctctctgcacgacttcacctctgggcattcaaaatggattatgaaactacagaaaaggaagtagcagaaccactcctggacctgaaggaaggaatagaccagttggagaacaataaaaccttgggctttatcctgtctactctcttagccattgggaactttctaaatggaactaatgccaaagcgtttgagttaagctacctcgagaaggttccagaagtcaaagacacagtgcacaagcagtcgcttctccaccatgtgtgcaccatggtggtagaaaacttcccagacagctccgatctgtactcggagatcggggccatcaccaggtcagccaaggttgactttgatcaacttcaggataatttatgtcagatggagagaagatgcaaagcttcatgggatcacctcaaggcaattgcaaaacatgaaatgaaaccagttttaaaacaacggatgtcagagttcctgaaagactgtgcagagcgaattataattttaaagattgtccatagaaggataatcaacagattccactcctttttactctttatgggccatccaccttatgcaattcgggaagtgaacataaacaaattctgcaggattattagtgaatttgcactagagtatcgcacaaccagggaaagggttttgcagcagaaacagaaacgggccaaccacagagagagaaataagaccagagggaagatgatcaccgatactgatgaggaggaggaagttgagtctggcaagttctccggcagttctccggcgcccccaagccagccgcagggtctgagctatgcggaggacgcggctgagcacgagaacatgaaggctgtgctgaaaacctcgtccccctccgtggaggacgccacccccgcgctgggcgtccgcacacgcagccgagcaagccgaggatccactagttcctggactatgggaactgatgactcgcccaatgtcacagatgatgcagctgatgagatcatggaccgcatcgtcaagtcagccacccaagtgcccagtcagcgagtggtgccgagggagaggaaacgatcccgggccaaccggaaatctttgcgaagaaccctgaagagcggcctgaccccagaagaagccagagccctgggcttggttggcacctcggagttgcagctgtga

SEQ ID NO: 135182 - DNA, 3035 bp, Homo sapiens
  Payload ID: 6418
  Gene Symbol: FHOD3
  Gene Name: formin homology 2 domain containing 3
  ENST ID: ENST00000591635
  CDS Start-End: 603-2510
agtcggctccctcactgcctctggacttgccaaagttttgttgaggtggagaggtcgccacaggctgaaagcattaaggagaaccaccctggcatgcggagcagtcggtgtgctttggaggaaaacatacaaaccagctttgggccagattatgttgtatgtggatggaatgaatggagtaataaaccgcaatgaaaccattcagtggctgtacactctcattgggtcaaagttccgcctggtggtgaagacagccctgaagctgctgctcgtctttgtagagtactcggagtccaacgcacctctcctaattcaggctgtcactgctgttgacacgaaaagaggggtcaaaccttggtcaaatatcatggaaatcctggaggaaaaagatggagttgatacggagctactggtttatgcaatgactttggtgaacaagacgttatcaggactaccagaccaagacaccttctacgacgtcgtggactgcctggaggagctgggcattgctgctgtgtcccagaggcacttgaacaagaaagggactgacctggacttagtggagcaactcaacatttatgaggtggcgctcaggcacgaggatggcgatgagaccacggagccaccccccagtgggtgccgggaccggaggagggccagcgtgtgttccagtggcggaggcgagcaccggggcctggaccgcagaaggagccgcaggcactcggtgcagagcatcaagagcaccctgtcggcccccaccagtccctgctcccagtcagctcccagcttcaagcccaaccaagtgcgagatctgcgtgaaaaatacagcaattttggcaataactcttatcactcctcaagaccctcatctggatccagtacccaggggtcagcccacattcactaagaaaaagaagaccatccgtttgttctggaatgaagttcggccttttgactggccatgtaaaaacaaccgacgctgcagagaattcctgtggtcaaaactggaacccattaaggtggacacttccagactggagcacctgtttgagtctaaatccaaggaactgtctgtctcaaagaaaactgctgcagatggaaaaaggcaagagatcattgttctggattccaagaggagtaacgccatcaatattggtctgacggtgctgccccctccaaggacgattaagatcgccattttgaattttgatgagtatgccttaaacaaagaaggaatcgagaaaattctaacgatgattcccaccgatgaggagaagcagaaaatccaggaagctcagctggccaaccctgaaatccccctgggcagtgcagagcagttcctcctcaccctgtcctccatcagcgagctctctgcacgacttcacctctgggcattcaaaatggattatgaaactacagaaaaggaagtagcagaaccactcctggacctgaaggaaggaatagaccagttggagaacaataaaaccttgggctttatcctgtctactctcttagccattgggaactttctaaatggaactaatgccaaagcgtttgagttaagctacctcgagaaggttccagaagtcaaagacacagtgcacaagcagtcgcttctccaccatgtgtgcaccatggtggtagaaaacttcccagacagctccgatctgtactcggagatcggggccatcaccaggtcagccaaggttgactttgatcaacttcaggataatttatgtcagatggagagaagatgcaaagcttcatgggatcacctcaaggcaattgcaaaacatgaaatgaaaccagttttaaaacaacggatgtcagagttcctgaaagactgtgcagagcgaattataattttaaagattgtccatagaaggataatcaacagattccactcctttttactctttatgggccatccaccttatgcaattcgggaagtgaacataaacaaattctgcaggattattagtgaatttgcactagagtatcgcacaaccagggaaagggttttgcagcagaaacagaaacgggccaaccacagagagagaaataagaccagagggaagatgatcaccgattctggcaagttctccggcagttctccggcgcccccaagccagccgcagggtctgagctatgcggaggacgcggctgagcacgagaacatgaaggctgtgctgaaaacctcgtccccctccgtggaggacgccacccccgcgctgggcgtccgcacacgcagccgagcaagccgaggatccactagttcctggactatgggaactgatgactcgcccaatgtcacagatgatgcagctgatgagatcatggaccgcatcgtcaagtcagccacccaagtgcccagtcagcgagtggtgccgagggagaggaaacgatcccgggccaaccggaaatctttgcgaagaaccctgaagagcggcctgaccccagaagaagccagagccctgggcttggttggcacctcggagttgcagctgtgacactcataggttactcccaggagtgtgctgagcagaaggcaagctcttgctggatgaaacccctccaggtggggttggggagacttgatattcacatccaacagtttgaaaagggagagctcaattcccagcgtcaccccatggcttgtgttgcctgctacgcattgacttggatctccaggagtcccctgcacataccttctccatcgtgtcagctgtgtttctcttgattccgtgacacccggtttattagttcaaaagtgtgacaccttttctgggcaaggaacagcccctttaaggagcaaatcacttctgtcacagttattatggtaatatgaggcaatctgattagcttcacagactgagtctccacaacaccaaaatatccagatgtaaaccccaaacttgtacacaaaagaaagcacagattgtttacctgttgtggattttagatgtaacaaatgtttatacaaatacatacatgtacaccatgtttcaaatactaaataaatagagtttaatgcc

SEQ ID NO: 135183 - DNA, 2112 bp, Homo sapiens
  Payload ID: 6418
  Gene Symbol: FHOD3
  Gene Name: formin homology 2 domain containing 3
  ENST ID: ENST00000592128
  CDS Start-End: 1-1587
cgtttgttctggaatgaagttcggccttttgactggccatgtaaaaacaaccgacgctgcagagaattcctgtggtcaaaactggaacccattaaggtggacacttccagactggagcacctgtttgagtctaaatccaaggaactgtctgtctcaaagaaaactgctgcagatggaaaaaggcaagagatcattgttctggattccaagaggagtaacgccatcaatattggtctgacggtgctgccccctccaaggacgattaagatcgccattttgaattttgatgagtatgccttaaacaaagaaggaatcgagaaaattctaacgatgattcccaccgatgaggagaagcagaaaatccaggaagctcagctggccaaccctgaaatccccctgggcagtgcagagcagttcctcctcaccctgtcctccatcagcgagctctctgcacgacttcacctctgggcattcaaaatggattatgaaactacagaaaaggaagtagcagaaccactcctggacctgaaggaaggaatagaccagttggagaacaataaaaccttgggctttatcctgtctactctcttagccattgggaactttctaaatggaactaatgccaaagcgtttgagttaagctacctcgagaaggttccagaagtcaaagacacagtgcacaagcagtcgcttctccaccatgtgtgcaccatggtggtagaaaacttcccagacagctccgatctgtactcggagatcggggccatcaccaggtcagccaaggttgactttgatcaacttcaggataatttatgtcagatggagagaagatgcaaagcttcatgggatcacctcaaggcaattgcaaaacatgaaatgaaaccagttttaaaacaacggatgtcagagttcctgaaagactgtgcagagcgaattataattttaaagattgtccatagaaggataatcaacagattccactcctttttactctttatgggccatccaccttatgcaattcgggaagtgaacataaacaaattctgcaggattattagtgaatttgcactagagtatcgcacaaccagggaaagggttttgcagcagaaacagaaacgggccaaccacagagagagaaataagaccagagggaagatgatcaccgattctggcaagttctccggcagttctccggcgcccccaagccagccgcagggtctgagctatgcggaggacgcggctgagcacgagaacatgaaggctgtgctgaaaacctcgtccccctccgtggaggacgccacccccgcgctgggcgtccgcacacgcagccgagcaagccgaggatccactagttcctggactatgggaactgatgactcgcccaatgtcacagatgatgcagctgatgagatcatggaccgcatcgtcaagtcagccacccaagtgcccagtcagcgagtggtgccgagggagaggaaacgatcccgggccaaccggaaatctttgcgaagaaccctgaagagcggcctgaccccagaagaagccagagccctgggcttggttggcacctcggagttgcagctgtgacactcataggttactcccaggagtgtgctgagcagaaggcaagctcttgctggatgaaacccctccaggtggggttggggagacttgatattcacatccaacagtttgaaaagggagagctcaattcccagcgtcaccccatggcttgtgttgcctgctacgcattgacttggatctccaggagtcccctgcacataccttctccatcgtgtcagctgtgtttctcttgattccgtgacacccggtttattagttcaaaagtgtgacaccttttctgggcaaggaacagcccctttaaggagcaaatcacttctgtcacagttattatggtaatatgaggcaatctgattagcttcacagactgagtctccacaacaccaaaatatccagatgtaaaccccaaacttgtacacaaaagaaagcacagattgtttacctgttgtggattttagatgtaacaaatgtttatacaaatacatacatgtacaccatgtttcaaatactaaataaatagagtttaatgcc

SEQ ID NO: 135184 - DNA, 4126 bp, Homo sapiens
  Payload ID: 6418
  Gene Symbol: FHOD3
  Gene Name: formin homology 2 domain containing 3
  ENST ID: ENST00000592930
  CDS Start-End: 1-3601
gttccgcctggtggtgaagacagccctgaagctgctgctcgtctttgtagagtactcggagtccaacgcacctctcctaattcaggctgtcactgctgttgacacgaaaagaggggtcaaaccttggtcaaatatcatggaaatcctggaggaaaaagatggagttgatacggagctactggtttatgcaatgactttggtgaacaagacgttatcaggactaccagaccaagacaccttctacgacgtcgtggactgcctggaggagctgggcattgctgctgtgtcccagaggcacttgaacaagaaagggactgacctggacttagtggagcaactcaacatttatgaggtggcgctcaggcacgaggatggcgatgagaccacggagccaccccccagtgggtgccgggaccggaggagggccagcgtgtgttccagtggcggaggcgagcaccggggcctggaccgcagaaggagccgcaggcactcggtgcagagcatcaagagcaccctgtcggcccccaccagtccctgctcccagtcagctcccagcttcaagcccaaccaagtgcgagatctgcgtgaaaagtcatcaccgagtggtcttctcacatcatccttcaggcagcaccaagagtcactggcagcagagagagagaggcggcggcaggagagagaagaaaggttgcagagaatagagcgggaagaaagaaacaaattcagccgagattatttagacaaaagagaggagcaaaggcaagcaagagaagaaagatacaaatacttggaacagttggcagctgaggagcacgagaaggagctgagaagccggagtgtgagccggggcagagccgacctctccttggacctgacctcgccagcagccccagcctgcctggctcctctgagccatagcccctcatcttcagactctcaagaggctctcacggtgtctgcctcctccccaggaacccctcaccatccccaagcaagtgccggggatcctgaacccgaatcagaggcagaaccggaagcagaggcaggggcggggcaggttgctgatgaagctggccaggacatagcctctgcccacgagggtgcagagactgaagtggagcaggcactagagcaagagccggaagaaagagcctccctcagtgaaaaagagaggcagaacgagggggtgaacgagagggacaactgctctgcctccagcgtctcgtcctccagcagcacgttggagagggaggagaaggaggacaagctctccagggacaggacaactggtttgtggcccgcaggtgtccaggatgcaggtgtaaatggacagtgtggcgacatcctcaccaacaaacggttcatgcttgacatgctgtatgcccataacaggaagtctccggatgatgaggagaagggggatggggaggctgggaggacccagcaggaggcagaggcggtagccagccttgctaccaggatatccaccctgcaggccaactctcagacccaggatgagagtgtcaggagggtggatgtcggctgtttggacaatcggggcagtgtgaaagcatttgctgagaaattcaacagtggggacctggggagaggttccatctcccctgatgctgagcccaatgacaaggtcccagaaacagcgccggtgcagccgaagacagagtctgattacatctgggaccagctcatggccaatccaagagagctcagaatccaagacatggatttcactgacctgggggaggaggatgacattgatgtcctagatgtggacctgggtcacagggaggcccctgggccacctcccccacccccacccacctttctgggtttgccgcccccaccccctccgcccctgttggacagcattcctccccctcctgtccctggtaatttattggttcctcctcctccagtgttcaacgctcctcagggcttagggtggtcccaggtacccaggggtcagcccacattcactaagaaaaagaagaccatccgtttgttctggaatgaagttcggccttttgactggccatgtaaaaacaaccgacgctgcagagaattcctgtggtcaaaactggaacccattaaggtggacacttccagactggagcacctgtttgagtctaaatccaaggaactgtctgtctcaaagaaaactgctgcagatggaaaaaggcaagagatcattgttctggattccaagaggagtaacgccatcaatattggtctgacggtgctgccccctccaaggacgattaagatcgccattttgaattttgatgagtatgccttaaacaaagaaggaatcgagaaaattctaacgatgattcccaccgatgaggagaagcagaaaatccaggaagctcagctggccaaccctgaaatccccctgggcagtgcagagcagttcctcctcaccctgtcctccatcagcgagctctctgcacgacttcacctctgggcattcaaaatggattatgaaactacagaaaaggaagtagcagaaccactcctggacctgaaggaaggaatagaccagttggagaacaataaaaccttgggctttatcctgtctactctcttagccattgggaactttctaaatggaactaatgccaaagcgtttgagttaagctacctcgagaaggttccagaagtcaaagacacagtgcacaagcagtcgcttctccaccatgtgtgcaccatggtggtagaaaacttcccagacagctccgatctgtactcggagatcggggccatcaccaggtcagccaaggttgactttgatcaacttcaggataatttatgtcagatggagagaagatgcaaagcttcatgggatcacctcaaggcaattgcaaaacatgaaatgaaaccagttttaaaacaacggatgtcagagttcctgaaagactgtgcagagcgaattataattttaaagattgtccatagaaggataatcaacagattccactcctttttactctttatgggccatccaccttatgcaattcgggaagtgaacataaacaaattctgcaggattattagtgaatttgcactagagtatcgcacaaccagggaaagggttttgcagcagaaacagaaacgggccaaccacagagagagaaataagaccagagggaagatgatcaccgattctggcaagttctccggcagttctccggcgcccccaagccagccgcagggtctgagctatgcggaggacgcggctgagcacgagaacatgaaggctgtgctgaaaacctcgtccccctccgtggaggacgccacccccgcgctgggcgtccgcacacgcagccgagcaagccgaggatccactagttcctggactatgggaactgatgactcgcccaatgtcacagatgatgcagctgatgagatcatggaccgcatcgtcaagtcagccacccaagtgcccagtcagcgagtggtgccgagggagaggaaacgatcccgggccaaccggaaatctttgcgaagaaccctgaagagcggcctgaccccagaagaagccagagccctgggcttggttggcacctcggagttgcagctgtgacactcataggttactcccaggagtgtgctgagcagaaggcaagctcttgctggatgaaacccctccaggtggggttggggagacttgatattcacatccaacagtttgaaaagggagagctcaattcccagcgtcaccccatggcttgtgttgcctgctacgcattgacttggatctccaggagtcccctgcacataccttctccatcgtgtcagctgtgtttctcttgattccgtgacacccggtttattagttcaaaagtgtgacaccttttctgggcaaggaacagcccctttaaggagcaaatcacttctgtcacagttattatggtaatatgaggcaatctgattagcttcacagactgagtctccacaacaccaaaatatccagatgtaaaccccaaacttgtacacaaaagaaagcacagattgtttacctgttgtggattttagatgtaacaaatgtttatacaaatacatacatgtacaccatgtttcaaatactaaataaatagagtttaatgcc

SEQ ID NO: 135185 - DNA, 2330 bp, Homo sapiens
  Payload ID: 6419
  Gene Symbol: FMNL1
  Gene Name: formin-like 1
  ENST ID: ENST00000328118
  CDS Start-End: 49-1929
ctggatttccgaggctggaggcgcctggccggctgggtggggaccaccatgggcaacgcggccggcagcgccgagcagcccgcgggccccgccgcgccgccccccaagcagcaccgctttgaaaagctgatggaatatttccggaatgaggacagcaacatcgacttcatggtggcctgcatgcagttcatcaacattgtggtacattcggtggagaacatgaacttccgtgtcttcctgcaatatgagttcacccacttgggcctggacctgtacttggagaggcttcggctcaccgagagtgacaagctgcaggtgcagatccaggcgtacctggacaatatttttgatgtgggggcgctgctggaggacacagagaccaagaacgctgtgctggagcacatggaggaactgcaggagcaagtggcgctgctgacagagcggcttcgggacgcggagaacgaatccatggccaagattgcagaactggaaaaacagctaagccaggcgcgcaaggagttggagaccctgcgggagcgcttcagcgaatcgaccgccatggggccctccaggcgtcccccagagcctgagaaagcgcctcccgctgccccgacgcggccctcggccctggagctgaaggtggaggagctggaggagaaggggttaatccgtattctgcgggggccgggggatgctgtctccatcgagatcctccccgtcgctgtggcaactccgagcggcggtgatgctccgactccgggggtgccgaccggctcccccagcccagatctcgcacctgcagcagagccggctcccggagcagcgccaccgccgccgccgccgcctcccggaggtcctcctgatgccctaggaagacgcgactcagaattgggcccaggagtgaaggccaagaagcccatccagactaagttccgaatgccactcttgaactgggtggcactgaaacccagccagatcaccggcactgtcttcacagagctcaatgatgagaaggtgctgcaggagctagacatgagtgattttgaggaacagttcaagaccaagtcccaaggccccagcctggacctcagcgctctcaagagtaaggcagcccagaaggcccccagcaaggcgacactcattgaggccaaccgggccaagaacttggccatcaccctgcggaagggcaacctgggggccgagcgcatctgccaagccattgaggcgtacgacctgcaggctctgggcctggacttcctggagctgctgatgcgcttcctgcccacagagtatgagcgcagcctcatcacccgctttgagcgggagcagcggccaatggaggagctgtcagaggaggaccgcttcatgctatgcttcagccgcatcccgcgcctgccggagcgcatgaccacactcaccttcctgggcaacttcccggacacagcccagctgctcatgccgcaactgaatgccatcattgcagcctcaatgtccatcaagtcctctgacaaactccgccagatcctggagattgtcctggcctttggcaactacatgaacagtagcaagcgtggggcagcctatggcttccggctccagagcctggatgcgctgttggagatgaagtcgactgatcgcaagcagacgctgctgcactacctggtgaaggtcattgctgagaagtacccgcaactcacaggcttccacagcgacctgcacttcctggacaaggcgggctcagtgtccctggacagtgtcctggcggacgtgcgctccctgcagcgaggcctagagttgacacagagagagtttgtgcggcaggatgactgcatggtgctcaaggagttcctgagggccaactcgcccaccatggacaagctgctggcagacagcaagacggctcaggctgtgcccacaggaggcctttgagtctgtggtggagtacttcggagagaaccccaagaccacatccccaggcctgttcttctccctctttagccgcttcattaaggcctacaagaaagctgagcaggaggtggaacagtggaaaaaagaagccgctgcccaggaggcaggcgctgataccccgggcaaaggggagcccccagcacccaagtcaccgccaaaggcccggcggccacagatggacctcatctctgagctgaaacggaggcagcagaaggagccactcatttatgagagcgaccgtgatggggccattgaagacatcatcacagatctgcggaaccagccctacatccgcgcagacacaggccgccgcagtgcccgtcggcgtcccccgggccccccactgcaggtcacctccgacc

SEQ ID NO: 135186 - DNA, 4101 bp, Homo sapiens
  Payload ID: 6419
  Gene Symbol: FMNL1
  Gene Name: formin-like 1
  Uniprot ID: O95466
  ENST ID: ENST00000331495
  CDS Start-End: 337-3639
gagcgacagcagaagttcgaaaatcgccgaggggggagccagcgccgcagcttcctgcccccggcccagccctctggccccggcggcctgcagcctgacttcctcccccaaccctgcagctcgccgcccggtcccacggacggggccgccccgatgggacgccgcgctccggcccctgcgcgccgctgagccgagcgccccccgctgccgagacccccgccgccaccgccagccgctgccccctcgcccccgcccgggccgggagcctcgtccccgtcccccggaaagctggatttccgaggctggaggcgcctggccggctgggtggggaccaccatgggcaacgcggccggcagcgccgagcagcccgcgggccccgccgcgccgccccccaagcagcccgcgcctcccaagcagccgatgcccgcggccggagagctggaggagaggttcaaccgcgccctgaactgcatgaacttgcccccagacaaggtccagctgctgagccagtatgacaacgagaagaagtgggagctcatctgtgatcaggagcggtttcaagtcaagaatccccccgcagcctacatccagaagctgaagagctatgtggatactggtggggtcagccgaaaggtagcagctgattggatgtccaacctggggtttaagaggcgagttcaggagtccacgcaggtgctacgggagctggagacctccctgaggaccaaccacattgggtgggtgcaggagttcctcaatgaagagaaccgtggcctggatgtgctgctcgagtacctggcctttgcccagtgctctgtcacgtatgacatggagagcacagacaacggggcttccaactcagagaaaaacaagcccctggagcagtctgtggaagacctcagcaagggtccaccctcctccgtgcccaaaagccgccacctgaccatcaagctgaccccagcccacagcaggaaggccctgcggaattcccgcatcgtcagccagaaggacgacgtccacgtctgtattatgtgcctacgcgccatcatgaactaccagtctggcttcagccttgtcatgaaccacccagcctgtgtcaatgagattgctctgagcctcaacaacaagaaccccagaaccaaggctctggtgctggagctgctggcggccgtgtgcttggtgcggggaggacatgacatcatccttgcagcctttgacaacttcaaggaggtgtgtggggagcagcaccgctttgaaaagctgatggaatatttccggaatgaggacagcaacatcgacttcatggtggcctgcatgcagttcatcaacattgtggtacattcggtggagaacatgaacttccgtgtcttcctgcaatatgagttcacccacttgggcctggacctgtacttggagaggcttcggctcaccgagagtgacaagctgcaggtgcagatccaggcgtacctggacaatatttttgatgtgggggcgctgctggaggacacagagaccaagaacgctgtgctggagcacatggaggaactgcaggagcaagtggcgctgctgacagagcggcttcgggacgcggagaacgaatccatggccaagattgcagaactggaaaaacagctaagccaggcgcgcaaggagttggagaccctgcgggagcgcttcagcgaatcgaccgccatggggccctccaggcgtcccccagagcctgagaaagcgcctcccgctgccccgacgcggccctcggccctggagctgaaggtggaggagctggaggagaaggggttaatccgtattctgcgggggccgggggatgctgtctccatcgagatcctccccgtcgctgtggcaactccgagcggcggtgatgctccgactccgggggtgccgaccggctcccccagcccagatctcgcacctgcagcagagccggctcccggagcagcgccaccgccgccgcccccactgcccggcctcccctccccgcaggaagccccgccctctgcgcccccacaggccccgcctctccctggcagcccggagcccccgcctgcgccgccgctgcccggagacctgccgcccccacccccgccaccgccaccacctccgggcactgacgggccggtgcctccgccgccgccgccgccgccgccgcctcccggaggtcctcctgatgccctaggaagacgcgactcagaattgggcccaggagtgaaggccaagaagcccatccagactaagttccgaatgccactcttgaactgggtggcactgaaacccagccagatcaccggcactgtcttcacagagctcaatgatgagaaggtgctgcaggagctagacatgagtgattttgaggaacagttcaagaccaagtcccaaggccccagcctggacctcagcgctctcaagagtaaggcagcccagaaggcccccagcaaggcgacactcattgaggccaaccgggccaagaacttggccatcaccctgcggaagggcaacctgggggccgagcgcatctgccaagccattgaggcgtacgacctgcaggctctgggcctggacttcctggagctgctgatgcgcttcctgcccacagagtatgagcgcagcctcatcacccgctttgagcgggagcagcggccaatggaggagctgtcagaggaggaccgcttcatgctatgcttcagccgcatcccgcgcctgccggagcgcatgaccacactcaccttcctgggcaacttcccggacacagcccagctgctcatgccgcaactgaatgccatcattgcagcctcaatgtccatcaagtcctctgacaaactccgccagatcctggagattgtcctggcctttggcaactacatgaacagtagcaagcgtggggcagcctatggcttccggctccagagcctggatgcgctgttggagatgaagtcgactgatcgcaagcagacgctgctgcactacctggtgaaggtcattgctgagaagtacccgcaactcacaggcttccacagcgacctgcacttcctggacaaggcgggctcagtgtccctggacagtgtcctggcggacgtgcgctccctgcagcgaggcctagagttgacacagagagagtttgtgcggcaggatgactgcatggtgctcaaggagttcctgagggccaactcgcccaccatggacaagctgctggcagacagcaagacggctcaggaggcctttgagtctgtggtggagtacttcggagagaaccccaagaccacatccccaggcctgttcttctccctctttagccgcttcattaaggcctacaagaaagctgagcaggaggtggaacagtggaaaaaagaagccgctgcccaggaggcaggcgctgataccccgggcaaaggggagcccccagcacccaagtcaccgccaaaggcccggcggccacagatggacctcatctctgagctgaaacggaggcagcagaaggagccactcatttatgagagcgaccgtgatggggccattgaagacatcatcacagtgatcaagacggtgcccttcacggcccgcaccggcaagcggacatcccggctcctctgtgaggccagcctgggagaagagatgcccctctagcccctcagatctgcggaaccagccctacatccgcgcagacacaggccgccgcagtgcccgtcggcgtcccccgggccccccactgcaggtcacctccgacctctcgctgtagccgctatttctgcaggtggattctgcaggggtgtggggccgtggacaggctgaggctcaaggaaggtggtcctcagctcggctggccgggcagcccctcctccgctgtggcccgcctcaaacgggctggtgcatcctcctcttggccacagagggcagcatcgcccgccccttcccccaaatgctgcttgcagcacccaccctaaagccccctccaaatagccatacttagcctcagcaggagcctggcctgtaacttataaagtgcacctcgcccccgcaagccccagccccgaggaccgtccatggaccttatttttatatgagattaataaagatgtttgcaaaaga

SEQ ID NO: 135187 - DNA, 1475 bp, Homo sapiens
  Payload ID: 6419
  Gene Symbol: FMNL1
  Gene Name: formin-like 1
  ENST ID: ENST00000586643
  CDS Start-End: 1-1467
gagctagacatgagtgattttgaggaacagttcaagaccaagtcccaaggccccagcctggacctcagcgctctcaagagtaaggcagcccagaaggcccccagcaaggcgacactcattgaggccaaccgggccaagaacttggccatcaccctgcggaagggcaacctgggggccgagcgcatctgccaagccattgaggcgtacgacctgcaggctctgggcctggacttcctggagctgctgatgcgcttcctgcccacagagtatgagcgcagcctcatcacccgctttgagcgggagcagcggccaatggaggagctgtcagaggaggaccgcttcatgctatgcttcagccgcatcccgcgcctgccggagcgcatgaccacactcaccttcctgggcaacttcccggacacagcccagctgctcatgccgcaactgaatgccatcattgcagcctcaatgtccatcaagtcctctgacaaactccgccagatcctggagattgtcctggcctttggcaactacatgaacagtagcaagcgtggggcagcctatggcttccggctccagagcctggatgcgctgttggagatgaagtcgactgatcgcaagcagacgctgctgcactacctggtgaaggtcattgctgagaagtacccgcaactcacaggcttccacagcgacctgcacttcctggacaaggcgggctcagtgtccctggacagtgtcctggcggacgtgcgctccctgcagcgaggcctagagttgacacagagagagtttgtgcggcaggatgactgcatggtgctcaaggagttcctgagggccaactcgcccaccatggacaagctgctggcagacagcaagacggctcaggaggcctttgagtctgtggtggagtacttcggagagaaccccaagaccacatccccaggcctgttcttctccctctttagccgcttcattaaggcctacaagaaagctgagcaggaggtggaacagtggaaaaaagaagccgctgcccaggaggcaggcgctgataccccgggcaaaggggagcccccagcacccaagtcaccgccaaaggcccggcggccacagatggacctcatctctgagctgaaacggaggcagcagaaggagccactcatttatgagagcgaccgtgatggggccattgaagacatcatcacaggtaagggcttggccaggccttggtcttatcctcagtctgtccttctatgctttcttctgacccaatgcgctatcctctgggggactggctgccacactgcttcttgctaccttttctgtttttctttcctttttcctttctctactccccttcacctgccccacccccactcagtgatcaagacggtgcccttcacggcccgcaccggcaagcggacatcccggctcctctgtgaggccagcctgggagaagagatgcccctctagcccctcag

SEQ ID NO: 135188 - DNA, 2487 bp, Homo sapiens
  Payload ID: 6419
  Gene Symbol: FMNL1
  Gene Name: formin-like 1
  ENST ID: ENST00000587489
  CDS Start-End: 91-2139
ggcggtgccagtgccgggctgcgggtcggggctcaccatgtgctggtgctacagctgacagagcggcttcgggacgcggagaacgaatccatggccaagattgcagaactggaaaaacagctaagccaggcgcgcaaggagttggagaccctgcgggagcgcttcagcgaatcgaccgccatggggccctccaggcgtcccccagagcctgagaaagcgcctcccgctgccccgacgcggccctcggccctggagctgaaggtggaggagctggaggagaaggggttaatccgtattctgcgggggccgggggatgctgtctccatcgagatcctccccgtcgctgtggcaactccgagcggcggtgatgctccgactccgggggtgccgaccggctcccccagcccagatctcgcacctgcagcagagccggctcccggagcagcgccaccgccgccgcccccactgcccggcctcccctccccgcaggaagccccgccctctgcgcccccacaggccccgcctctccctggcagcccggagcccccgcctgcgccgccgctgcccggagacctgccgcccccacccccgccaccgccaccacctccgggcactgacgggccggtgcctccgccgccgccgccgccgccgccgcctcccggaggtcctcctgatgccctaggaagacgcgactcagaattgggcccaggagtgaaggccaagaagcccatccagactaagttccgaatgccactcttgaactgggtggcactgaaacccagccagatcaccggcactgtcttcacagagctcaatgatgagaaggtgctgcaggagctagacatgagtgattttgaggaacagttcaagaccaagtcccaaggccccagcctggacctcagcgctctcaagagtaaggcagcccagaaggcccccagcaaggcgacactcattgaggccaaccgggccaagaacttggccatcaccctgcggaagggcaacctgggggccgagcgcatctgccaagccattgaggcgtacgacctgcaggctctgggcctggacttcctggagctgctgatgcgcttcctgcccacagagtatgagcgcagcctcatcacccgctttgagcgggagcagcggccaatggaggagctgtcagaggaggaccgcttcatgctatgcttcagccgcatcccgcgcctgccggagcgcatgaccacactcaccttcctgggcaacttcccggacacagcccagctgctcatgccgcaactgaatgccatcattgcagcctcaatgtccatcaagtcctctgacaaactccgccagatcctggagattgtcctggcctttggcaactacatgaacagtagcaagcgtggggcagcctatggcttccggctccagagcctggatgcgctgttggagatgaagtcgactgatcgcaagcagacgctgctgcactacctggtgaaggtcattgctgagaagtacccgcaactcacaggcttccacagcgacctgcacttcctggacaaggcgggctcagtgtccctggacagtgtcctggcggacgtgcgctccctgcagcgaggcctagagttgacacagagagagtttgtgcggcaggatgactgcatggtgctcaaggagttcctgagggccaactcgcccaccatggacaagctgctggcagacagcaagacggctcaggaggcctttgagtctgtggtggagtacttcggagagaaccccaagaccacatccccaggcctgttcttctccctctttagccgcttcattaaggcctacaagaaagctgagcaggaggtggaacagtggaaaaaagaagccgctgcccaggaggcaggcgctgataccccgggcaaaggggagcccccagcacccaagtcaccgccaaaggcccggcggccacagatggacctcatctctgagctgaaacggaggcagcagaaggagccactcatttatgagagcgaccgtgatggggccattgaagacatcatcacagatctgcggaaccagccctacatccgcgcagacacaggccgccgcagtgcccgtcggcgtcccccgggccccccactgcaggtcacctccgacctctcgctgtagccgctatttctgcaggtggattctgcaggggtgtggggccgtggacaggctgaggctcaaggaaggtggtcctcagctcggctggccgggcagcccctcctccgctgtggcccgcctcaaacgggctggtgcatcctcctcttggccacagagggcagcatcgcccgccccttcccccaaatgctgcttgcagcacccaccctaaagccccctccaaatagccatacttagcctcagcaggagcctggcctgtaacttataaagtgcacctcgcccccgcaagccccagccccgaggaccgtccatggaccttatttttatatgagattaataaagatgtttgcaaaa

SEQ ID NO: 135189 - DNA, 769 bp, Homo sapiens
  Payload ID: 6419
  Gene Symbol: FMNL1
  Gene Name: formin-like 1
  ENST ID: ENST00000589911
  CDS Start-End: 1-384
gtgcggcaggatgactgcatggtgctcaaggagttcctgagggccaactcgcccaccatggacaagctgctggcagacagcaagacggctcagaaagctgagcaggaggtggaacagtggaaaaaagaagccgctgcccaggaggcaggcgctgataccccgggcaaaggggagcccccagcacccaaggtaggcaactgctcctgggcttggtactgggctgcagggatgcatggcatctcatcaccctctggtgccacccccacaccctcactgttacagactgaccctgccccaggagcctgggatgggaaagggttctttctgctcaagccagctgtccttgctgtgggggaccaggcagatattccagggttttggtgatggggaggcatcctggagctggagctataaattccccctagtcaccgccaaaggcccggcggccacagatggacctcatctctgagctgaaacggaggcagcagaaggagccactcatttatgagagcgaccgtgatggggccattgaagacatcatcacaggtaagggcttggccaggccttggtcttatcctcagtctgtccttctatgctttcttctgacccaatgcgctatcctctgggggactggctgccacactgcttcttgctaccttttctgtttttctttcctttttcctttctctactccccttcacctgccccacccccactcagtgatcaagacggtgcccttcacggcccgcaccggcaagcggacatcccg

SEQ ID NO: 135190 - DNA, 453 bp, Homo sapiens
  Payload ID: 6419
  Gene Symbol: FMNL1
  Gene Name: formin-like 1
  ENST ID: ENST00000586092
  CDS Start-End: 1-453
gcggcaggatgactgcatggtgctcaaggagttcctgagggccaactcgcccaccatggacaagctgctggcagacagcaagacggctcagaaagctgagcaggaggtggaacagtggaaaaaagaagccgctgcccaggaggcaggcgctgataccccgggcaaaggggagcccccagcacccaagtcaccgccaaaggcccggcggccacagatggacctcatctctgagctgaaacggaggcagcagaaggagccactcatttatgagagcgaccgtgatggggccattgaagacatcatcacaggtaagggcttggccaggccttggtcttatcctcagtctgtccttctatgctttcttctgacccaatgcgctatcctctgggggactggctgccacactgcttcttgctaccttttctgtttttctttcctttttcctttctctac

SEQ ID NO: 135191 - DNA, 5575 bp, Homo sapiens
  Payload ID: 6420
  Gene Symbol: FMNL2
  Gene Name: formin-like 2
  Uniprot ID: Q96PY5
  ENST ID: ENST00000288670
  CDS Start-End: 368-3646
gcggccgcgggcccggcagaaggccgagtaggagggaccacgcgccgggggccgcgatctctggcagggggcggtgtgccagcggagcaccatgcacataggcgcccagcgccccaactacccctcccgaggaaaagaggccggggccgcgctggggcggcggagagcatgagggaggccggggggcggctcggcttggagcgctgctagggagcggtgcgcgccgcacacccgcctgggcgcggcggagggcggggagccgggcaggtcgcgcctgcgggcggcagccgaccgccgggagctgttctgatttccgacgcgcacgctaggggcccggagcagcccccggccccggcgcgccgccgacatgggcaacgcagggagcatggattcgcagcagaccgatttcagggcgcacaacgtgcctttgaagctgccgatgccagagccaggtgaactggaggagcgatttgccatcgtgctgaatgctatgaacctacctcctgacaaagccaggttactgcggcagtatgataatgagaaaaaatgggaactgatttgtgatcaggaacgattccaggtgaagaatcctccccatacatacattcaaaagctcaaaggctatctggatccagctgtaaccaggaagaaattcagacggcgtgttcaagaatctacacaagtgctaagagaactggaaatttctttgagaactaaccacattggatgggtcagagaatttctgaatgaagaaaacaaaggtcttgatgttctagtggaatatctctcatttgcacagtacgcggtaacttttgactttgaaagtgtggagagtactgtggagagctcggtggacaaatcaaagccctggagtaggtccatcgaggacctgcacagagggagcaacctgccctcacctgtgggcaacagtgtctcccgctctggaagacattctgcactgcgatataatacattgccaagcagaagaactctgaaaaattcaagattagtgagtaagaaagatgatgtgcatgtctgtatcatgtgtttacgtgccatcatgaattatcagtatggtttcaacatggtcatgtctcatccacacgctgtcaatgagattgcactaagcctgaacaacaagaatcccagaacaaaagcccttgtcttagaactgttggcagccgtttgtcttgtcagaggcgggcatgaaatcattttatcagcatttgataactttaaagaggtttgtggagaaaaacagcgctttgagaagttgatggaacatttcaggaatgaagacaataacatagattttatggtggcttctatgcagtttattaatattgtagtccattcagtagaagatatgaatttcagagttcacctgcagtatgaatttaccaaattaggcctggacgaatacttggacaagctgaaacacactgagagtgacaagcttcaagtccagatccaggcttacctggacaatgtttttgatgtaggagctctactggaagatgctgaaactaagaatgctgccttggagagggtggaagaactggaagaaaacatttctcatttatctgaaaaactgcaagacacagagaatgaagccatgtccaagattgtggaactggaaaagcaactcatgcagaggaacaaggagctggatgtcgttcgggaaatctacaaagatgcaaatactcaagttcacacattaagaaaaatggtcaaagaaaaagaagaagcaattcaaagacagtctaccctggaaaaaaagattcatgagctagagaaacaagggaccattaaaattcagaagaaaggggatggggatatcgccatactgccagttgtggcttctggcacattgtccatggggtcagaagtggtagcaggtaactctgtgggacccacaatgggggccgcttcctcaggacccttgccccctcctccaccaccactgcctccctcatcagacacacctgaaacagtgcaaaatggtccagtaacaccacctatgccaccgccgccgccgccccctcctccacctcctcctcccccaccgccccctccgcctcctcctctcccaggccctgcagctgagactgtaccagctcctcccttagcacctccccttccctctgcacctccgctgcctggaacatcttcacccacagtggttttcaactcaggattagcagctgtgaaaattaagaagccaatcaagacgaagttcagaatgccagtgtttaactgggttgctctgaagcccaatcagatcaatggcacagtcttcaatgaaattgatgatgagcgaattctggaggatttaaatgtggatgaatttgaggaaatattcaagacaaaagcccaaggacctgccattgatctttcttcaagcaaacagaagataccacagaagggatcaaacaaagtgacattactagaagcaaacagggccaaaaatcttgccataactttaaggaaagctggaaagactgctgatgaaatatgtaaagctattcatgtatttgacttgaagacactgcctgtggactttgtggaatgcttgatgcggttcctaccaactgagaatgaagtgaaagtgcttcggctctacgagcgggaaaggaagcctctggaaaacttgtcagatgaagatcggttcatgatgcagtttagtaaaatcgagaggctcatgcagaagatgaccatcatggccttcattgggaactttgctgaaagcattcagatgctgactcctcaactacatgcgattatagcagcatctgtctctataaagtcgtcccaaaaactcaagaaaattctggagatcatcttagcccttggaaactacatgaatagcagtaaaagaggagcagtttatggatttaaacttcagagtttagatctgctcttagatacaaagtcaacagacagaaagcaaacactgttgcactatatatccaatgtggtgaaagaaaaatatcaccaagtgtccctgttttataatgagcttcattatgtggaaaaagctgctgcagtctcccttgagaatgttttgctggatgtcaaggagctccagaggggaatggacttgaccaagagagagtacaccatgcatgaccataacacgctgctgaaggagttcatcctcaacaatgaggggaagctgaagaagctgcaggatgatgccaagatcgcacaggatgcctttgatgatgttgtgaagtattttggagaaaaccccaagacaacaccaccctctgtcttctttcctgtctttgtccggtttgtgaaagcatataagcaagcagaagaggaaaatgagctgaggaaaaagcaggaacaagctctcatggaaaaactcctagagcaagaagctctgatggagcagcaggatccaaagtctccttctcataaatcaaagaggcagcagcaagagttaattgcagaattaagaagacgacaagttaaagataacagacatgtatatgagggaaaagatggtgccattgaagatattatcacagatcttagaaaccaaccatacagacgagccgatgcggtgaggagaagcgtcaggcggcgctttgatgatcagaacttgcgttctgttaatggtgccgaaataacaatgtgaacctgagactggcctgcatgaatacagggtgtgcgtgaatgaaactgcccacatgaactttatgtgctacgatttaactgcagccttgaacacacacaaaaatattcttaagggctcagatttagcaaacacggaagaattttaaaatgagctctcctttcaacccttgttaacaagtgcctaaaaatggaagtacctgttcagattaatcaaagcaataggatttgatttgattaggtatctttttacaccagtatgttatttttaaccaaaatgtaaagttcttattaaactcattacctgccattgtgattgtcccatcatggcccacctggtttcctgatgttgtaaataacatcaatgcatctgctgtgggtcctttgctgagatgtcttcgaaggaattttgttttagccatatccatcaactttgtattttacttgcaatttggaagaaggaaagtcacatgatgaaactccttttgtctataaccaggccctggcaaagtgcaaacaggatgcaactgcagtggcacaaaggtcactcaatcctttgtttccagtttcacattctactacttctgcgctagagaacgatgctctgtgagaggcattcactagtatgaatgtggggatatagtgtataagacttatttgcagtactgtgttcttcagctagaggcagctttttaaataatgcaagtgtatttattagcattaaaattaacatctcagtaatcagcattagcatttctgaggaccattattaattctgagaacagaaattggtgccttgcaaggaagtttactagctctatcaacaagcattcaaggttacatctgctagcagagtagtgttaggaacctggccttactctcctctgacaatcgcaattttttcttattttttataaattcaagaagatacacttggcatcgtgtatcgaggctaagtttttcatgcatttcccagactacttatggagaattgcagtttaagttgctgaaaagtattaacatggtattaagcttaaataatacgtaatgggactagatggcccactaagccactgttattttccttcctctctggcagggcacttgatccattccaaagtcaaaaactggactgaagctaaatttgtacttttcataatatacattctgcttctggcttatcttcttggtacatcaatatattaattgtaaagtttattgtatagtatttaaccgctgaagttcctattttatgttgtgcttatgtgaaccccttggtgaaggtcccttttccttggatgtgtagttatatgatctttttaaatgtacagatattttgctataaaatcggtgcagttttttatggtttttacacttctctttaattcccacctaagcctctgggtaatattgtaaatattgttttaaaatgcatcagcctatgctatacaatctgaatgttattttaacttatagttttttttaatatatatatttaactataaggacagtttagggaacaagttacctaccacatttcactttagtgtacctatttacagaaagattaaactgccacctgcgggcacattcccataaatgtgtactttactttaaaaagaacatgccacgattttgtctttctgtggactcaacattcacttcgattaaaaatagcaatttgaccaagttggacttccactacaaagcagctgttttccaaagttcaatgctgacatatatgtatattaaaataattgcctatttattaatctacaaatagacaacgttggcatgttcttttctgtttgtctattaatgggcctgcttcttagcaatattagaatgttttataaaagcaattcatgttacttttctggtcttttcatggcatatgagcaaataataaactatttacactactattctgtaa

SEQ ID NO: 135192 - DNA, 3648 bp, Homo sapiens
  Payload ID: 6420
  Gene Symbol: FMNL2
  Gene Name: formin-like 2
  ENST ID: ENST00000475377
  CDS Start-End: 201-1586
caccgccccctccgcctcctcctctcccaggccctgcagctgagactgtaccagctcctcccttagcacctccccttccctctgcacctccgctgcctggaacatcttcacccacagtggttttcaactcaggattagcagatgggccaatcaagcttttctctgtgaaaattaagaagccaatcaagacgaagttcagaatgccagtgtttaactgggttgctctgaagcccaatcagatcaatggcacagtcttcaatgaaattgatgatgagcgaattctggaggatttaaatgtggatgaatttgaggaaatattcaagacaaaagcccaaggacctgccattgatctttcttcaagcaaacagaagataccacagaagggatcaaacaaagtgacattactagaagcaaacagggccaaaaatcttgccataactttaaggaaagctggaaagactgctgatgaaatatgtaaagctattcatgtatttgacttgaagacactgcctgtggactttgtggaatgcttgatgcggttcctaccaactgagaatgaagtgaaagtgcttcggctctacgagcgggaaaggaagcctctggaaaacttgtcagatgaagatcggttcatgatgcagtttagtaaaatcgagaggctcatgcagaagatgaccatcatggccttcattgggaactttgctgaaagcattcagatgctgactcctcaactacatgcgattatagcagcatctgtctctataaagtcgtcccaaaaactcaagaaaattctggagatcatcttagcccttggaaactacatgaatagcagtaaaagaggagcagtttatggatttaaacttcagagtttagatctgctcttagatacaaagtcaacagacagaaagcaaacactgttgcactatatatccaatgtggtgaaagaaaaatatcaccaagtgtccctgttttataatgagcttcattatgtggaaaaagctgctgcagtctcccttgagaatgttttgctggatgtcaaggagctccagaggggaatggacttgaccaagagagagtacaccatgcatgaccataacacgctgctgaaggagttcatcctcaacaatgaggggaagctgaagaagctgcaggatgatgccaagatcgcacaggatgcctttgatgatgttgtgaagtattttggagaaaaccccaagacaacaccaccctctgtcttctttcctgtctttgtccggtttgtgaaagcatataagcaagcagaagaggaaaatgagctgaggaaaaagcaggaacaagctctcatggaaaaactcctagagcaagaagctctgatggagcagcaggatccaaagtctccttctcataaatcaaagaggcagcagcaagagttaattgcagaattaagaagacgacaagttaaagataacagacatgtatatgagggaaaagatggtgccattgaagatattatcacagtgctgaagactgtgccctttactgctcgcaccgccaagcgtggctctcggtttttctgcgaacctgttctcactgaggaataccattactaaactattactctttctcacctgatgctcttaaaagatcttagaaaccaaccatacagacgagccgatgcggtgaggagaagcgtcaggcggcgctttgatgatcagaacttgcgttctgttaatggtgccgaaataacaatgtgaacctgagactggcctgcatgaatacagggtgtgcgtgaatgaaactgcccacatgaactttatgtgctacgatttaactgcagccttgaacacacacaaaaatattcttaagggctcagatttagcaaacacggaagaattttaaaatgagctctcctttcaacccttgttaacaagtgcctaaaaatggaagtacctgttcagattaatcaaagcaataggatttgatttgattaggtatctttttacaccagtatgttatttttaaccaaaatgtaaagttcttattaaactcattacctgccattgtgattgtcccatcatggcccacctggtttcctgatgttgtaaataacatcaatgcatctgctgtgggtcctttgctgagatgtcttcgaaggaattttgttttagccatatccatcaactttgtattttacttgcaatttggaagaaggaaagtcacatgatgaaactccttttgtctataaccaggccctggcaaagtgcaaacaggatgcaactgcagtggcacaaaggtcactcaatcctttgtttccagtttcacattctactacttctgcgctagagaacgatgctctgtgagaggcattcactagtatgaatgtggggatatagtgtataagacttatttgcagtactgtgttcttcagctagaggcagctttttaaataatgcaagtgtatttattagcattaaaattaacatctcagtaatcagcattagcatttctgaggaccattattaattctgagaacagaaattggtgccttgcaaggaagtttactagctctatcaacaagcattcaaggttacatctgctagcagagtagtgttaggaacctggccttactctcctctgacaatcgcaattttttcttattttttataaattcaagaagatacacttggcatcgtgtatcgaggctaagtttttcatgcatttcccagactacttatggagaattgcagtttaagttgctgaaaagtattaacatggtattaagcttaaataatacgtaatgggactagatggcccactaagccactgttattttccttcctctctggcagggcacttgatccattccaaagtcaaaaactggactgaagctaaatttgtacttttcataatatacattctgcttctggcttatcttcttggtacatcaatatattaattgtaaagtttattgtatagtatttaaccgctgaagttcctattttatgttgtgcttatgtgaaccccttggtgaaggtcccttttccttggatgtgtagttatatgatctttttaaatgtacagatattttgctataaaatcggtgcagttttttatggtttttacacttctctttaattcccacctaagcctctgggtaatattgtaaatattgttttaaaatgcatcagcctatgctatacaatctgaatgttattttaacttatagttttttttaatatatatatttaactataaggacagtttagggaacaagttacctaccacatttcactttagtgtacctatttacagaaagattaaactgccacctgcgggcacattcccataaatgtgtactttactttaaaaagaacatgccacgattttgtctttctgtggactcaacattcacttcgattaaaaatagcaatttgaccaagttggacttccactacaaagcagctgttttccaaagttcaatgctgacatatatgtatattaaaataattgcctatttattaatctacaaatagacaacgttggcatgttcttttctgtttgtctattaatgggcctgcttcttagcaatattagaatgttttataaaagcaattcatgttacttttctggtcttttcatggcatatgagcaaataataaactatttacacta

SEQ ID NO: 135193 - DNA, 12634 bp, Homo sapiens
  Payload ID: 6421
  Gene Symbol: FMNL3
  Gene Name: formin-like 3
  Uniprot ID: Q8IVF7
  ENST ID: ENST00000335154
  CDS Start-End: 235-3318
gagccggccgcctccgtccgccttgcttcggtgcggctgtccgctacgctgcctccgccctcgccgcgcgcccccgccagcgggactccagggaacccccggcgccctcgacggggccgaggagtcgggactcggggagccggcgctgagggaggagcctggtcggagccgcggagccgaaagctccggagcgtggaggtggggggccgaggcccctgagggggccccgccgcgatgggcaacctggagagcgccgagggggtcccgggagagcccccctctgtcccgttgttgctgccgcccggcaagatgccgatgcctgagccctgtgagctggaggaaaggttcgccctggtgctgagctccatgaacctgcctccagacaaggcccggctcctgcggcagtatgacaatgagaagaaatgggatctgatctgtgaccaggaacgattccaggtgaagaatcctccccacacttacattcagaaactccagagcttcttggaccccagtgtaactcggaagaagttcaggaggagggtgcaggagtcaaccaaagtactaagggagctggagatctctcttcgcaccaaccacattgggtgggtgcgggaatttctgaatgatgaaaacaaaggcctggatgtactggtggattacctgtcctttgcccagtgttctgtcatgtttgactttgagggtctggaaagtggtgacgatggtgcatttgacaaactccggtcctggagcaggtcaatcgaggacctgcagccacccagcgccctgtcggcccccttcaccaacagcctcgctcgctctgcgcgccagtctgtgctccggtatagcactctccctgggcgcagggccctgaagaactcccgcctagtgagccagaaggatgacgtccacgtctgtatcctttgtctcagagccatcatgaactatcagtacggattcaacctggtcatgtcccacccccatgctgtcaatgagattgcacttagcctcaataacaagaatccaaggaccaaagcccttgtcttagagcttctggcagctgtgtgtttggtgcgaggaggtcacgaaatcatccttgctgcctttgacaatttcaaagaggtatgcaaggagctgcaccgctttgagaagctgatggagtatttccggaatgaggacagcaatattgacttcatggtggcctgcatgcagttcatcaacatcgtggtgcactcggtggaggacatgaacttccgggtccacctgcagtatgagtttaccaagctggggctagaggagttcctgcagaagtcaaggcacacagagagcgagaagctgcaggtgcagattcaggcatatctggacaacgtgtttgatgtcgggggtttgttggaggatgctgagaccaagaatgtagccctggagaaggtggaggagttggaggagcatgtgtcccatctcacagagaagcttctggacctagagaatgaaaacatgatgcgggtggcagaactagagaagcagctgctacagcgggagaaggaactagagagcatcaaggagacatatgagaacacaagccaccaggtgcacaccctgcggaggctcattaaagagaaggaggaggcctttcagcgtcgatgtcatttggagccaaatgtccggggcctggagtctgtggacagtgaggccctggccagagtaggccctgcagagctgagtgagggcatgccaccctccgacctggaccttctggctccagccccaccccctgaggaggtcctgcctcttcctccaccaccagctccgcccttgccccctccacctcccccattaccagacaagtgtcccccagccccacctctccctggtgctgcaccctctgtggtgttgacagtgggcctgtcagccattcgaattaagaaacctatcaagaccaagttccggctgcctgtcttcaactggacagcactgaaacccaaccagatcagtggcactgtcttcagcgaacttgatgatgagaagatcttggaggacctggatcttgataagtttgaagaattattcaagacaaaagcgcagggccctgcccttgacctcatctgctccaaaaacaagacagcgcaaaaagctgccagcaaggtgactctgttggaagccaatcgtgccaagaacctggccatcaccctacgcaaggctggccgctcggctgaggagatctgcagggccattcatacgtttgacttgcagacactacctgtggacttcgtggagtgcctgatgcgcttcctgcccacagaggctgaggtaaagctgctgcggcaatatgagcgggagcggcagcccctggaggagttggcagctgaggaccgcttcatgctgctcttcagcaaggtggaacggttgacccagcgaatggctggcatggccttcctggggaacttccaggataacctgcagatgctcacaccgcaactcaatgccatcattgcggcgtccgcttccgtcaagtcttcacagaagctgaagcagatgttggagatcatacttgcactggggaactacatgaacagcagcaagcggggagctgtgtatggcttcaagctccagagcctggatctgctgctggataccaagtccactgaccggaagatgacactgcttcatttcatcgccttgacagtgaaggagaaatacccagacctggctaacttctggcatgagctgcactttgttgagaaggctgcagcagtgtccctggagaacgtgctgctggacgtgaaggagctgggccggggcatggagctgattcggcgtgagtgcagcatccatgacaacagcgtcctccggaacttcctcagtaccaatgaaggcaaactagacaagctccagcgggacgccaagacggctgaggaggcctacaatgcagttgtgcgctactttggcgagagtcccaagactacacctccttctgtattcttcccagtatttgtccgattcattcgttcttacaaggaagcagaacaagagaatgaagcccgcaagaagcaggaggaggtaatgcgggagaagcagctggctcaggaagccaagaaactggatgccaagaccccatcccagcggaacaagtggcaacagcaggagttaatagcagagttgaggcggcgccaggccaaggaacaccggcctgtttatgaggggaaggatggtaccatcgaggacatcatcacaggcctccactgccagcctatggttgttcgccaccaagccaggagtgctgcaccgcccagtggtccccctcgggctccaggcccccactgagaccctctcggaggcagaagcacttcacccctcagagtcctacaagtccaaccagtggacctggaattggccaagggctcaggagagggctgtgttgctctctcaaccatgtccgccccagctcttgaggctggatctttctacttgtgccactatgggcactaggtctgtaggtccctggtgcttccagtactgcactttgcccccaaggtctttgacttcatttcctgaagggtcaccaagggtcagctcagggctaggaaaaaccatttccagccttagcctaaacagggcacatagatctctcccactagagcccagagggatgagaggagagagcaactgttctttctttttttttcccttcctttttgcaggcccatggtcagctctggtctagatgtatctaggcttagggagccctgggaccctgccagtctcagttcatctcttaccaggagcaaggccctctgaagcatgggccgtgccagctgtgccctagtgataagggtaagaggagagatgtcaggctcactgcccttatttctctgcccatttcattctaggctcacactgtccttgtcaaggtgggcagaagagcagaggtcttctctgcaccaaccactctctgcagatggctggagaaagggtgtgccaactcttcaccttctttcctcagctacggtttttttttttttttttttttttttggcaggggacaaggagcatggtggtcttggctatttgcttaccttcccgtttctcctctgcccctggaagggaatgtgggggcccacttttttgtacatgtaccacctccctttcctcttactgtacataaacctcagactctccccctctcaacaaaggcttgatgcaccaggcctgactttgtctcctctttctgagcttagggggctagggtggccatttagtctgacctgggctatggggatagaaaagaaatctttggggcactgcatctgttttggaggagatgagatcagaactctggggaaaggagaaccggctaggtgggctctagccacacaaagggaagcaggcctgccatgagacactagtgccctctgctgggcatgtgtccagtccccagcctgccccagtagcacatggaaaagagtcactggccatgttataaatattgttatttaaaaaacaaaaaacaaaacacacgtacattaggtcctgggtggaggaagaagtggtggagcctcagggccagggcaggcaggagcaggcactgatgctagagggtgatgaccctgccctctgccacccaggctgcgtccaacagcctgtgactcttccctggagaccccttctctcacacttttatctactggcatcacccaccccacatggcatataccacccatctctggtctggggctgagggcaaggactgcactagtccagggagtaggggacccttgaacaccaagagcaaccttgagaggtgccaacaatggtgtgctgggggtggggttactttagaaaaagtggacacagaccagactaaggaagaagtctgaggcagacggtgagggtggcccaggagccatggcctcacacagacccgaggcagagaacagctcattgggtcactggtgatcatccagctgctgtaggagtgtccgccgccgcctctccagctcaccctcactcagctcactttctgacgtgtcccagcctgtctgttggagcaaaggcacagttcacccttagcctgcactaagggccgtggaagcttgaccagcgtgctgactggcctagggcccctgcccctcaccttctccttcttgattccaaagcctggggaacggttagggagctctgcctgttggagctccctgtccttgtcctgttcttgttctttctcatcgctctccttgccagctttctcctcagggtctgtctcactctcaggactattctgtaagagtccagagcccacctcctcagttcctgtggatagcctgggaggcaggtagaacagaactcacaaaatagcaggggcttaggtagaagttccttcactcaccgacttgtgtcttctcttcttagttttcttttttggtttcttggctttccgaaggccatgatctagagatagaaaaatccctactaagtcccaacaggagaaagacaggctctttttctttgttctagcccctctgttcattcttcacaggcaggaacctcatgctctgaggaagtctaagtccagttttccttctccagcttcttgcttgggcaggtagaggaagttctttctacttccacaggtgcagccctcccaatccagtctaccctcaaaggagctggggcttgtggagggcatcctctcagtctgggacaacagttctccagcttctacgctcacagcaactgcttacctgctccaagaagatgggaggaaggggagccccgtcctccaagggcagcacccccactttcaactgaatcaagtgaggaagagggctcagagcctgactctgaggggttccgcctcctccgcttggggggccggagagatggtgggggcagctcctcttcttctgactcagagccctgggcagatcagcagatacatgtcagtgcagaggttctctgccctccagaagccctcgtctgggaattcgagagaggaggaggacccagggccaaaggaatcctcaaacttccctccaagggagatattgtaaggggaaaacaaagtgtttatttccccaaaacaacccagcttcaccccatgtcccttctacacgcttactcactgagggtgagtgggaacgcttgtgatggtgcttcttgcctttcctgccatgctttcggcctttggtgtggaggtgctggcattcagtctgctagaggcagaggaagaagggtgaggacagcaccagacttagccccaggaaggatcctacttcctaaaatctggctttgcctccctttctcagactagagccttctgcctatcccagggatcctcaggcctccccttccttagctggccaggagtgccctaagggtaagagggaggccactgaggtctctgttgaactggtctaatgagttcaagggcctgaggcagatccagaggacaagcctgcctcacctccagcacctgtaggaactcccggaagagccggatccgctccgactccagggtgatctgctcaaaggctgagtcacacacaaaacgctcacggaccttgaacgaggagagcactgctgatcagactaggccccactcagcctggcctggacaccgccatgagcacagggcagggctggggcagagaaaggaagggaactggagctggcccagggctgtgacgtgactggggtgggccctcagtggtgaagcaccgctgccctcaggcttgaggggtgcttggggccaggctacgctcctgacctcttcccaggcagtgcctagctccagagcaggcacagcctgcctcagcatgcttcgaaaggcagcttccctgcgccgcatcctgcgtgcctcctccttctcccgctccctctcccgtgcctctgctttctccagcagctgaggaaagaagggacacggaacagggtcacccaggagggtggatgccaggtcccactcaggcataccttaggaggtggaaagttagggtctgggcttctaccaccatcccctgaattgggaatatagtcagtgggacagtgagtgagaaggaatggagcaagacacagatgaattagagaacttcccacgccccgcccagcccctcacactattgaaggtcagcttgatgttgcctgcgtccagtgcggcagccctcttgtcaaagcttatgacgtgggcgaagtcctcaaaggccgtgttcacctccacgcagaagccccggtcctgtgggtacagcagtgcatgaagcaggggcaccacgtgcctgaggccaaagctggcaggcagagtggtcacattacagatggtcaagaaggcccttgcctctggaagagatccacaggactgtggtctgcattagaaaccaagttatccaagtcctcatcacttgacaattaagcccccatgcctacccttggtttggatgtcacacagagctgaaggggttgggagatgtctcccaactgctgattaatgctgagtttctcaaaattaacttttgttcctttggcttaaagctctggccccagctgggccctcctgctgctcagcagtgcttccatgcattctcaatcaacatttgctggcccctaccctttgggtctatttattgagtgcttactatgtaccaggtaccatgatgagtgtttcacacattatctcatttaatcctcttggttctacatttaagaataggtcctagtatcctaattttacacagaaggagaaaccaaggttcagagaaactagagcacttgcccaaggtctcacagctgatatacggctgggcaagaaccctaccctgggggggctctctatccccaaagtgtctgctttcaagcaccacacccacccagatgacttagtccatgggagaaacggaggccaccaggtgtgcagctccccaccaatactaaaaacatgtccacaggccaggctctatgcttctcatttaggcctcacaacattccagtgaagcagaggcttagaaaagtgatctcagttggcccaagatgacatgagtggtaaatgaagccactggagttcaaagtctggctctcacgtcagttaagcacaggccagattccctttctctccctccacatagctctcacctcctctggcctttttgctgatggcagaggtgtgctcctctttcttctttccaagggtacttcctcaaccctgctacagtccttatcaacacagcattcattctcagggaattgaaagctccaagtcacccttgttactggctccttccatcaagcagacacctcacctaacctggaacatcctttccaccatgctctccccttcatcaagctaactacctctgctcttttccattgtttcaaaacctcttgaaatgcagcagaaaggaaaaggaataaacatttattgagaacctattagacactttacagatgttatttaattctcacaaccttacctatgaattatccctgatttacaggtgagcaaacaggctcagagacacggaacttacggaggtctcagagccaataagcaaccaggagtaatctgactctaaaacatgtgctgcccccatgccacctccatgactctactctcccaaaggttgcttgtgtctactagccaaatccaaggccgccttctttgtcctcactcatctggtcctcagtgcctctaccacttacttcttcaacactcccctctccaggtcacaccctctctgaccttttattctcttgcatatgcatgttcctgagaacagcacttagtcctctttcactacccaatctgtactccctcgcaatctcatccttcatctctcctgattttcaaacatcctagactggatatttcagacacttaaaattcaacagatctcaagagaatatatttctcatgagcatcctccatggatctccctgacccggatctgtctgcctgttctaagtccagggctctttgcattatcctatgggatgaaaggcaccatcatggtctgcctggctgtggaaagcaagagggactcctgggctcatctgccctccataggcaggaacccaaatggggaaagaggaagggaactgtctaaaaaagttgctttctcaggttgtgtggagagacaggactcagtgaggataggcccctacaggcctatcaaccagccactctgtggctaaaagttaattgtccaataaaatttagctatcccaggataaggcatttctactttatacgattattctgttttaaaatatatttgctttgagagtaattccccaaatagaattcctattttctacagccttgctcttcttgttttatccttatcaatagtgccatcatccactgccctgacacctctgattccttcctttccctccatttcacaaaatctatcaattctacttagtgactctatcccactggtgttgaattctcccttttttttttaaacagcagaaacagtttattaaaatagaaatcttatgtagaacctttatgcataaaaaagattcaagctgcttcacttgaaaacaggaagcagcaccaaatccccccatactcaactccaacccttgcttgtctcaaggcacctacatagaaacccagagtgtctcagaagaacagctggagcgctacagcctgctctcttctgctgtccccactgcccccggctaggatcacctcctacaagattcctgcacagcctactgacttttctccctgctcaccctcttccatccctctaacccagctcctagcatctagtgcttcttggacttttgtaccaagtagccccaacagtaggagagaggtctggggataagtgaaatgaatatgactatttgaattaccactatcagttttagtatcttgaggcttcaagaactgctctacctagcaccaccaccttccctaaggacataagtacgtactctagactgaaaggttctactatacaccatctaatctgatcattccccggttcctcattacttacgagagaaaaatccaaatttcttattttagcattcaaggcactttacatgcagggctctacttccaagctggggcatgtggttccagagaaagagaggatacctcaggacagtatgatacatcttacctaatggtaagtaatttaaaatattaaatttatattaaataggtaatatggtgttaaaatgcaacacctacgtgaatttgtaaggcaaaacagtacttcaaagaaatgtatatgcagtgagacatttctagctttatttccagatccctttcaacccaggtaccatttaatctctgtaattaggtgtactctggtggaacactcaccattttttagatgaggaaacagggtcagaaaggtcaagtgacctatccaaggtcacacaactagcaagcagttaagctagacttttactgtaggcagtctgcctccagtcccgctcctaaccactgtactgtattatctcctcaaatgcattagaatcttcacttccataaagaaatatgctctttgtttttttcttttggaacacaaggtttagtccatcactcactcacttttccacttttgataagatgtaaatattgagaactatttctcttctccagtagaagaagagcaacaggccatgtgtgatggtaaatggcagctgacacttgcgacagtatcaagaaggcactaaggaatggtgagaaggatgacttgccctttctaaagtggcatctcagcttgagtctgcagaatgccttgcaaatccagctcagtactgctagataatccatattgacaagagaagctaaagattcagattttctatgtgaagtttcctggttttaaaatgttagcaacaaattccaaatttttacagaacactgtacaggccagaaagaacaatctgtgtgctaccagtttacaattagctatgcttcttcctcctcagacctggcatgccctttccacccccttgcctttgctcttagtaccccgtgtacactccaacctcttccacctacaaatttctaaatgcacagttcaaatgttagttcttcagattcctgtctctgtaataacacttgcccctttgtataacagttctcatgtatatcttcctattagaccatgagctcctgtggtagaaattgtgtattcattactgtatccctagtgtgcagtaaaggatcacagtagatatctgctgaaccaagctgtaatgcttctgcaaaacaggacttatcagggagtcctctgcagggagtgtgccctgcatccatcctgtatccatccataaccccagcctccctcaccttaaggatgtccttaatgatcttcttttcatcatggaatcgtgccttcaactcctccacatagaacttgaataagtccagaggggtggagcctgtaaggagggagggaggggggcctggcgggcggcagcttcccaaggcctgggggctgggccgaggacaggagccggtagtagggggtgcagagaggctggcagggcaggaagccaggccagagaagggggagcctggctgccttacccggctggcccagcatgttggcaaagcggacatcagtgctgactgctggatatagctccatccaggtggacatagagtgcagctgccctgtctcatgcagctcgtccaggaaggtctgagcagggagaggccagttatagggagagtgagacagggaggcagagccacagactgagggggaagagagggaatggcagaggaagaggcagggacaatcaagattgaggaaatgcaggcaagagaggcagagatgaagagatgcagatggaaggctgagaacaatgcaaaaagagagaaagtaaatacacagagagggacagaacaaaaaggtgagaacaagccagtcccgggatgcaaagaaacagaaacctgcctgcagtaacccctagcactaccaccaccactgccacccccaagctgagggaataaactctgcctgtcgggtgccccaccaagggaaataaacatggcctagctgccaagtcatgcctgtagggtgctctctactggcagtttctgggtggtgcatacatctagtctccctagaagagcacagtccagaattgaggaggtacagcagaaacagactgcaggcagagagaggtctcatagagcttggacagggctaggcacagaaagaacaggcagcgtatccagaagggggcagggaatgggtgaagaggttgtgctctagggcagagctgagctctgatctagaaaggacagcaaagatacctggaaggcctcccgattcttgcgttgttggcgtcgctcccgaagccgggcccgctcccgttcctcctcctcttccctctccaaagctcggatgtgctcctcaaaacagatcagtgcatcttccttgtccatgtctaaagacaggcaggaggttccgcgggcattgtcccagcaggataccctctcagaccccagcacccctaatgtttcaacgatgctgtcctacaggtgctagggatacccagggtggtgggggaagggcctggagggggctctgtgggagcagccactgcaatggtagttcttaagaggggatcattaattgtataagaataaataagcaagtattca

SEQ ID NO: 135194 - DNA, 4006 bp, Homo sapiens
  Payload ID: 6421
  Gene Symbol: FMNL3
  Gene Name: formin-like 3
  Uniprot ID: Q8IVF7
  ENST ID: ENST00000352151
  CDS Start-End: 214-3144
cttgcttcggtgcggctgtccgctacgctgcctccgccctcgccgcgcgcccccgccagcgggactccagggaacccccggcgccctcgacggggccgaggagtcgggactcggggagccggcgctgagggaggagcctggtcggagccgcggagccgaaagctccggagcgtggaggtggggggccgaggcccctgagggggccccgccgcgatgggcaacctggagagcgccgagggggtcccgggagagcccccctctgtcccgttgttgctgccgcccggcaagatgccgatgcctgagccctgtgagctggaggaaaggttcgccctggtgctgagctccatgaacctgcctccagacaaggcccggctcctgcggcagtatgacaatgagaagaaatgggatctgatctgtgaccaggaacgattccaggtgaagaatcctccccacacttacattcagaaactccagagcttcttggaccccagtgtaactcggaagaagttcaggaggagggtgcaggagtcaaccaaagtactaagggagctggagatctctcttcgcaccaaccacattgggtgggtgcgggaatttctgaatgatgaaaacaaaggcctggatgtactggtggattacctgtcctttgcccagtgttctgtcatgtatagcactctccctgggcgcagggccctgaagaactcccgcctagtgagccagaaggatgacgtccacgtctgtatcctttgtctcagagccatcatgaactatcagtacggattcaacctggtcatgtcccacccccatgctgtcaatgagattgcacttagcctcaataacaagaatccaaggaccaaagcccttgtcttagagcttctggcagctgtgtgtttggtgcgaggaggtcacgaaatcatccttgctgcctttgacaatttcaaagaggtatgcaaggagctgcaccgctttgagaagctgatggagtatttccggaatgaggacagcaatattgacttcatggtggcctgcatgcagttcatcaacatcgtggtgcactcggtggaggacatgaacttccgggtccacctgcagtatgagtttaccaagctggggctagaggagttcctgcagaagtcaaggcacacagagagcgagaagctgcaggtgcagattcaggcatatctggacaacgtgtttgatgtcgggggtttgttggaggatgctgagaccaagaatgtagccctggagaaggtggaggagttggaggagcatgtgtcccatctcacagagaagcttctggacctagagaatgaaaacatgatgcgggtggcagaactagagaagcagctgctacagcgggagaaggaactagagagcatcaaggagacatatgagaacacaagccaccaggtgcacaccctgcggaggctcattaaagagaaggaggaggcctttcagcgtcgatgtcatttggagccaaatgtccggggcctggagtctgtggacagtgaggccctggccagagtaggccctgcagagctgagtgagggcatgccaccctccgacctggaccttctggctccagccccaccccctgaggaggtcctgcctcttcctccaccaccagctccgcccttgccccctccacctcccccattaccagacaagtgtcccccagccccacctctccctggtgctgcaccctctgtggtgttgacagtgggcctgtcagccattcgaattaagaaacctatcaagaccaagttccggctgcctgtcttcaactggacagcactgaaacccaaccagatcagtggcactgtcttcagcgaacttgatgatgagaagatcttggaggacctggatcttgataagtttgaagaattattcaagacaaaagcgcagggccctgcccttgacctcatctgctccaaaaacaagacagcgcaaaaagctgccagcaaggtgactctgttggaagccaatcgtgccaagaacctggccatcaccctacgcaaggctggccgctcggctgaggagatctgcagggccattcatacgtttgacttgcagacactacctgtggacttcgtggagtgcctgatgcgcttcctgcccacagaggctgaggtaaagctgctgcggcaatatgagcgggagcggcagcccctggaggagttggcagctgaggaccgcttcatgctgctcttcagcaaggtggaacggttgacccagcgaatggctggcatggccttcctggggaacttccaggataacctgcagatgctcacaccgcaactcaatgccatcattgcggcgtccgcttccgtcaagtcttcacagaagctgaagcagatgttggagatcatacttgcactggggaactacatgaacagcagcaagcggggagctgtgtatggcttcaagctccagagcctggatctgctgctggataccaagtccactgaccggaagatgacactgcttcatttcatcgccttgacagtgaaggagaaatacccagacctggctaacttctggcatgagctgcactttgttgagaaggctgcagcagtgtccctggagaacgtgctgctggacgtgaaggagctgggccggggcatggagctgattcggcgtgagtgcagcatccatgacaacagcgtcctccggaacttcctcagtaccaatgaaggcaaactagacaagctccagcgggacgccaagacggctgaggaggcctacaatgcagttgtgcgctactttggcgagagtcccaagactacacctccttctgtattcttcccagtatttgtccgattcattcgttcttacaaggaagcagaacaagagaatgaagcccgcaagaagcaggaggaggtaatgcgggagaagcagctggctcaggaagccaagaaactggatgccaagaccccatcccagcggaacaagtggcaacagcaggagttaatagcagagttgaggcggcgccaggccaaggaacaccggcctgtttatgaggggaaggatggtaccatcgaggacatcatcacaggcctccactgccagcctatggttgttcgccaccaagccaggagtgctgcaccgcccagtggtccccctcgggctccaggcccccactgagaccctctcggaggcagaagcacttcacccctcagagtcctacaagtccaaccagtggacctggaattggccaagggctcaggagagggctgtgttgctctctcaaccatgtccgccccagctcttgaggctggatctttctacttgtgccactatgggcactaggtctgtaggtccctggtgcttccagtactgcactttgcccccaaggtctttgacttcatttcctgaagggtcaccaagggtcagctcagggctaggaaaaaccatttccagccttagcctaaacagggcacatagatctctcccactagagcccagagggatgagaggagagagcaactgttctttctttttttttcccttcctttttgcaggcccatggtcagctctggtctagatgtatctaggcttagggagccctgggaccctgccagtctcagttcatctcttaccaggagcaaggccctctgaagcatgggccgtgccagctgtgccctagtgataagggtaagaggagagatgtcaggctcactgcccttatttctctgcccatttcattctaggctcacactgtccttgtcaaggtgggcagaagagcagaggtcttctctgcaccaaccactctctgcagatggctggagaaagggtgtgccaactcttcaccttctttcctcagctacggtttttttttttttttttttttttttggcaggggacaaggagcatggtggtcttggctatttgcttaccttcccgtttctcctctgcccctggaagggaatgtgggggcccacttttttgtacatgtaccacctccctttcctcttactgtacataaacctcagactctccccctctc

SEQ ID NO: 135195 - DNA, 4120 bp, Homo sapiens
  Payload ID: 6421
  Gene Symbol: FMNL3
  Gene Name: formin-like 3
  ENST ID: ENST00000550488
  CDS Start-End: 41-3124
ggaggtggggggccgaggcccctgagggggccccgccgcgatgggcaacctggagagcgccgagggggtcccgggagagcccccctctgtcccgttgttgctgccgcccggcaagatgccgatgcctgagccctgtgagctggaggaaaggttcgccctggtgctgagctccatgaacctgcctccagacaaggcccggctcctgcggcagtatgacaatgagaagaaatgggatctgatctgtgaccaggaacgattccaggtgaagaatcctccccacacttacattcagaaactccagagcttcttggaccccagtgtaactcggaagaagttcaggaggagggtgcaggagtcaaccaaagtactaagggagctggagatctctcttcgcaccaaccacattgggtgggtgcgggaatttctgaatgatgaaaacaaaggcctggatgtactggtggattacctgtcctttgcccagtgttctgtcatgtttgactttgagggtctggaaagtggtgacgatggtgcatttgacaaactccggtcctggagcaggtcaatcgaggacctgcagccacccagcgccctgtcggcccccttcaccaacagcctcgctcgctctgcgcgccagtctgtgctccggtatagcactctccctgggcgcagggccctgaagaactcccgcctagtgagccagaaggatgacgtccacgtctgtatcctttgtctcagagccatcatgaactatcagtacggattcaacctggtcatgtcccacccccatgctgtcaatgagattgcacttagcctcaataacaagaatccaaggaccaaagcccttgtcttagagcttctggcagctgtgtgtttggtgcgaggaggtcacgaaatcatccttgctgcctttgacaatttcaaagaggtatgcaaggagctgcaccgctttgagaagctgatggagtatttccggaatgaggacagcaatattgacttcatggtggcctgcatgcagttcatcaacatcgtggtgcactcggtggaggacatgaacttccgggtccacctgcagtatgagtttaccaagctggggctagaggagttcctgcagaagtcaaggcacacagagagcgagaagctgcaggtgcagattcaggcatatctggacaacgtgtttgatgtcgggggtttgttggaggatgctgagaccaagaatgtagccctggagaaggtggaggagttggaggagcatgtgtcccatctcacagagaagcttctggacctagagaatgaaaacatgatgcgggtggcagaactagagaagcagctgctacagcgggagaaggaactagagagcatcaaggagacatatgagaacacaagccaccaggtgcacaccctgcggaggctcattaaagagaaggaggaggcctttcagcgtcgatgtcatttggagccaaatgtccggggcctggagtctgtggacagtgaggccctggccagagtaggccctgcagagctgagtgagggcatgccaccctccgacctggaccttctggctccagccccaccccctgaggaggtcctgcctcttcctccaccaccagctccgcccttgccccctccacctcccccattaccagacaagtgtcccccagccccacctctccctggtgctgcaccctctgtggtgttgacagtgggcctgtcagccattcgaattaagaaacctatcaagaccaagttccggctgcctgtcttcaactggacagcactgaaacccaaccagatcagtggcactgtcttcagcgaacttgatgatgagaagatcttggaggacctggatcttgataagtttgaagaattattcaagacaaaagcgcagggccctgcccttgacctcatctgctccaaaaacaagacagcgcaaaaagctgccagcaaggtgactctgttggaagccaatcgtgccaagaacctggccatcaccctacgcaaggctggccgctcggctgaggagatctgcagggccattcatacgtttgacttgcagacactacctgtggacttcgtggagtgcctgatgcgcttcctgcccacagaggctgaggtaaagctgctgcggcaatatgagcgggagcggcagcccctggaggagttggcagctgaggaccgcttcatgctgctcttcagcaaggtggaacggttgacccagcgaatggctggcatggccttcctggggaacttccaggataacctgcagatgctcacaccgcaactcaatgccatcattgcggcgtccgcttccgtcaagtcttcacagaagctgaagcagatgttggagatcatacttgcactggggaactacatgaacagcagcaagcggggagctgtgtatggcttcaagctccagagcctggatctgctgctggataccaagtccactgaccggaagatgacactgcttcatttcatcgccttgacagtgaaggagaaatacccagacctggctaacttctggcatgagctgcactttgttgagaaggctgcagcagtgtccctggagaacgtgctgctggacgtgaaggagctgggccggggcatggagctgattcggcgtgagtgcagcatccatgacaacagcgtcctccggaacttcctcagtaccaatgaaggcaaactagacaagctccagcgggacgccaagacggctgaggcctacaatgcagttgtgcgctactttggcgagagtcccaagactacacctccttctgtattcttcccagtatttgtccgattcattcgttcttacaaggaagcagaacaagagaatgaagcccgcaagaagcaggaggaggtaatgcgggagaagcagctggctcaggaagccaagaaactggatgccaagaccccatcccagcggaacaagtggcaacagcaggagttaatagcagagttgaggcggcgccaggccaaggaacaccggcctgtttatgaggggaaggatggtaccatcgaggacatcatcacagtgctgaagagtgtccctttcacggcccgtactgccaagcggggctcacgcttcttctgtgatgcagcccaccatgatgagtcaaactgttagcccccaaggttggggcccgacaggcctccactgccagcctatggttgttcgccaccaagccaggagtgctgcaccgcccagtggtccccctcgggctccaggcccccactgagaccctctcggaggcagaagcacttcacccctcagagtcctacaagtccaaccagtggacctggaattggccaagggctcaggagagggctgtgttgctctctcaaccatgtccgccccagctcttgaggctggatctttctacttgtgccactatgggcactaggtctgtaggtccctggtgcttccagtactgcactttgcccccaaggtctttgacttcatttcctgaagggtcaccaagggtcagctcagggctaggaaaaaccatttccagccttagcctaaacagggcacatagatctctcccactagagcccagagggatgagaggagagagcaactgttctttctttttttttcccttcctttttgcaggcccatggtcagctctggtctagatgtatctaggcttagggagccctgggaccctgccagtctcagttcatctcttaccaggagcaaggccctctgaagcatgggccgtgccagctgtgccctagtgataagggtaagaggagagatgtcaggctcactgcccttatttctctgcccatttcattctaggctcacactgtccttgtcaaggtgggcagaagagcagaggtcttctctgcaccaaccactctctgcagatggctggagaaagggtgtgccaactcttcaccttctttcctcagctacggtttttttttttttttttttttttttggcaggggacaaggagcatggtggtcttggctatttgcttaccttcccgtttctcctctgcccctggaagggaatgtgggggcccacttttttgtacatgtaccacctccctttcctcttactgtacataaacctcagactctccccctctcaacaaaggcttgatgcaccagg

SEQ ID NO: 135196 - DNA, 547 bp, Homo sapiens
  Payload ID: 6421
  Gene Symbol: FMNL3
  Gene Name: formin-like 3
  ENST ID: ENST00000550424
  CDS Start-End: 382-547
actggaagaagatggcggctagacaacaaatttccaccgcaaatgtcaacgacccagccgccgactgagcccagaacagcgttcttctcccgcctctccattttcacacgcagccagatggttaagcttctctcctcccaaacgttttttcccctgcctctgtcgggtaagggcttcctcatccctcaatgcctggtccaactatgatctccctcaccccgactcttaacagacccacttaccacaagccatcatcatagctatatataaagatctgggggatgagttttctaggaagagaacaacttttgcaaagccctggggtggaaaagaactttgcacatttgaggaactgcaagaaggccagactggtctacaaggatgctgaggagagtccgagaaggtataggaaagagctccatgaacctgcctccagacaaggcccggctcctgcggcagtatgacaatgagaagaaatgggatctgatctgtgaccaggaacgattccaggtgaagaatcctccccacacttacattcagaaactcc

SEQ ID NO: 135197 - DNA, 1930 bp, Homo sapiens
  Payload ID: 6422
  Gene Symbol: FPR1
  Gene Name: formyl peptide receptor 1
  Uniprot ID: P21462
  ENST ID: ENST00000304748
  CDS Start-End: 108-1160
atgttttgctgcaatcattagagcctgagtcactctccccaggagacccagacctagaactacccagagcaagaccacagctggtgaacagtccaggagcagacaagatggagacaaattcctctctccccacgaacatctctggagggacacctgctgtatctgctggctatctcttcctggatatcatcacttatctggtatttgcagtcacctttgtcctcggggtcctgggcaacgggcttgtgatctgggtggctggattccggatgacacacacagtcaccaccatcagttacctgaacctggccgtggctgacttctgtttcacctccactttgccattcttcatggtcaggaaggccatgggaggacattggcctttcggctggttcctgtgcaaattcgtctttaccatagtggacatcaacttgttcggaagtgtcttcctgatcgccctcattgctctggaccgctgtgtttgcgtcctgcatccagtctggacccagaaccaccgcaccgtgagcctggccaagaaggtgatcattgggccctgggtgatggctctgctcctcacattgccagttatcattcgtgtgactacagtacctggtaaaacggggacagtagcctgcacttttaacttttcgccctggaccaacgaccctaaagagaggataaatgtggccgttgccatgttgacggtgagaggcatcatccggttcatcattggcttcagcgcacccatgtccatcgttgctgtcagttatgggcttattgccaccaagatccacaagcaaggcttgattaagtccagtcgtcccttacgggtcctctcctttgtcgcagcagccttttttctctgctggtccccatatcaggtggtggcccttatagccacagtcagaatccgtgagttattgcaaggcatgtacaaagaaattggtattgcagtggatgtgacaagtgccctggccttcttcaacagctgcctcaaccccatgctctatgtcttcatgggccaggacttccgggagaggctgatccacgcccttcccgccagtctggagagggccctgaccgaggactcaacccaaaccagtgacacagctaccaattctactttaccttctgcagaggtggagttacaggcaaagtgaggagggagctgggggacactttcgagctcccagctccagcttcgtctcaccttgagttaggctgagccacaggcatttcctgcttattttaggattacccactcatcagaaaaaaaaaaaaaagcctttgtgtcccctgatttggggagaataaacagatatgagtttattattgacttcttttttgattttggacctcagccttgggtggtcagggtgggaaatgataggaagaagctgtcatctgcatcctagtttgcctgaaatgaacccaaataatacccattattattagtcctgaattatgagtagtgaatgatacccatcattctggcatcatgatgagtagtgtccacttccattctgaaaagtgccctgctgtgaaaaataaattatatagtcatcctaggtaaatgaaggaggagggagaagtgtgaaagagtatggcttaaatcagacaagatatacaagaagatactttatatagggcaggagcggtggctcatgcctgtaatcccagcactttgggaggccgaggcaggcggatcaccaggggtcaggaattcgagaacagcctggccaacatggtgaaaccctgtctctactaaaaatacaaaaattagctgggcgtagtggcaggctcccgtaatcccagctactcaggagaccgaggcaggagaatcgcttgaacctggaaggcggaggttgtagtgagccaagaaaacgccactacactccagcctgggtgacagagagagactccggctcag

SEQ ID NO: 135198 - DNA, 587 bp, Homo sapiens
  Payload ID: 6422
  Gene Symbol: FPR1
  Gene Name: formyl peptide receptor 1
  ENST ID: ENST00000594900
  CDS Start-End: 469-587
gattaatgttggttaggcagctgtcagtcttggccagaattatgccttcaggtactcaagatccctttacactcttcttccaaatagaagaagtagagccatccttcccaaggatgagatccccaacgttttatgttgaagtttctttgtgataagtgtcccataacttaaaagaatacttagcttcaaagccccaatataccacgatgcaatgagaattgggaatccacaatggaaactcctaatgaggaaaagaaaaaagggagatgtagcggacactgttctactgcaattaaccaaggccagtgggaaggaaaggtctcgctgtgtcacccaggctggagtgcagtgccacaatcatagctcactgccgccttcgcctcccgggctcaagctatcctcccacctcagccccagtccttcagctggatctacaggcacgcaccaccaagcccaggagcagacaagatggagacaaattcctctctccccacgaacatctctggagggacacctgctgtatctgctggctatctcttcctggatatcatcacttatctggtatttgcagtcacctttgtcctcgg

SEQ ID NO: 135199 - DNA, 1965 bp, Homo sapiens
  Payload ID: 6422
  Gene Symbol: FPR1
  Gene Name: formyl peptide receptor 1
  Uniprot ID: P21462
  ENST ID: ENST00000595042
  CDS Start-End: 143-1195
attagagcctgagtcactctccccaggagacccagacctagaactacccagagcaagaccacagctggtgaacagtccagcctgtctccagttggactagccacaattcaagtgcttgaaaaccacatgtggagcagacaagatggagacaaattcctctctccccacgaacatctctggagggacacctgctgtatctgctggctatctcttcctggatatcatcacttatctggtatttgcagtcacctttgtcctcggggtcctgggcaacgggcttgtgatctgggtggctggattccggatgacacacacagtcaccaccatcagttacctgaacctggccgtggctgacttctgtttcacctccactttgccattcttcatggtcaggaaggccatgggaggacattggcctttcggctggttcctgtgcaaattcgtctttaccatagtggacatcaacttgttcggaagtgtcttcctgatcgccctcattgctctggaccgctgtgtttgcgtcctgcatccagtctggacccagaaccaccgcaccgtgagcctggccaagaaggtgatcattgggccctgggtgatggctctgctcctcacattgccagttatcattcgtgtgactacagtacctggtaaaacggggacagtagcctgcacttttaacttttcgccctggaccaacgaccctaaagagaggataaatgtggccgttgccatgttgacggtgagaggcatcatccggttcatcattggcttcagcgcacccatgtccatcgttgctgtcagttatgggcttattgccaccaagatccacaagcaaggcttgattaagtccagtcgtcccttacgggtcctctcctttgtcgcagcagccttttttctctgctggtccccatatcaggtggtggcccttatagccacagtcagaatccgtgagttattgcaaggcatgtacaaagaaattggtattgcagtggatgtgacaagtgccctggccttcttcaacagctgcctcaaccccatgctctatgtcttcatgggccaggacttccgggagaggctgatccacgcccttcccgccagtctggagagggccctgaccgaggactcaacccaaaccagtgacacagctaccaattctactttaccttctgcagaggtggagttacaggcaaagtgaggagggagctgggggacactttcgagctcccagctccagcttcgtctcaccttgagttaggctgagccacaggcatttcctgcttattttaggattacccactcatcagaaaaaaaaaaaaaagcctttgtgtcccctgatttggggagaataaacagatatgagtttattattgacttcttttttgattttggacctcagccttgggtggtcagggtgggaaatgataggaagaagctgtcatctgcatcctagtttgcctgaaatgaacccaaataatacccattattattagtcctgaattatgagtagtgaatgatacccatcattctggcatcatgatgagtagtgtccacttccattctgaaaagtgccctgctgtgaaaaataaattatatagtcatcctaggtaaatgaaggaggagggagaagtgtgaaagagtatggcttaaatcagacaagatatacaagaagatactttatatagggcaggagcggtggctcatgcctgtaatcccagcactttgggaggccgaggcaggcggatcaccaggggtcaggaattcgagaacagcctggccaacatggtgaaaccctgtctctactaaaaatacaaaaattagctgggcgtagtggcaggctcccgtaatcccagctactcaggagaccgaggcaggagaatcgcttgaacctggaaggcggaggttgtagtgagccaagaaaacgccactacactccagcctgggtgacagagagagactccggctcag

SEQ ID NO: 135200 - DNA, 742 bp, Homo sapiens
  Payload ID: 6422
  Gene Symbol: FPR1
  Gene Name: formyl peptide receptor 1
  ENST ID: ENST00000600815
  CDS Start-End: 168-742
tgagatcagaggcaagaaagttgaggatgtggtacaatgattatcaagcataaagtccttcatcgatggcagccaccaaggcctgtgttcattgcaaatcacaggatttttcccttgaaccataattggacaaaattgcacaggttttcctctctggagcagacaagatggagacaaattcctctctccccacgaacatctctggagggacacctgctgtatctgctggctatctcttcctggatatcatcacttatctggtatttgcagtcacctttgtcctcggggtcctgggcaacgggcttgtgatctgggtggctggattccggatgacacacacagtcaccaccatcagttacctgaacctggccgtggctgacttctgtttcacctccactttgccattcttcatggtcaggaaggccatgggaggacattggcctttcggctggttcctgtgcaaattcgtctttaccatagtggacatcaacttgttcggaagtgtcttcctgatcgccctcattgctctggaccgctgtgtttgcgtcctgcatccagtctggacccagaaccaccgcaccgtgagcctggccaagaaggtgatcattgggccctgggtgatggctctgctcctcacattgccagttatcattcgtgtgactacagtacctggtaaaacggggacagtagcctgcacttttaacttttcgccctggaccaacgaccctaaagagaggataaa

SEQ ID NO: 135201 - DNA, 2262 bp, Homo sapiens
  Payload ID: 6423
  Gene Symbol: FPR2
  Gene Name: formyl peptide receptor 2
  Uniprot ID: P25090
  ENST ID: ENST00000340023
  CDS Start-End: 395-1450
atcatatttgggcttgattgcgtggctgaaactcttcccacttcagtaattgtttctttcattttcatgaaactctgaagaaggaagggctggacattcagattccttgacccttgacatttggaagcatgaactccagtctctcacagaaggctagaggtgaaggaacattcagacacattggtttctaagaagagtccgctgacaacatacccaaggtgtcttctgaaaattataagaaatcctgagtttctgttaggggattggctccagctccattgtccctcccccatcattcagtagtctccgcgaaagcccttagagccggtgttgctccacaggaagccaagaagcacacaggaaaaggagcttagctgctggtgctgctggcaagatggaaaccaacttctccactcctctgaatgaatatgaagaagtgtcctatgagtctgctggctacactgttctgcggatcctcccattggtggtgcttggggtcacctttgtcctcggggtcctgggcaatgggcttgtgatctgggtggctggattccggatgacacgcacagtcaccaccatctgttacctgaacctggccctggctgacttttctttcacggccacattaccattcctcattgtctccatggccatgggagaaaaatggccttttggctggttcctgtgtaagttaattcacatcgtggtggacatcaacctctttggaagtgtcttcttgattggtttcattgcactggaccgctgcatttgtgtcctgcatccagtctgggcccagaaccaccgcactgtgagtctggccatgaaggtgatcgtcggaccttggattcttgctctagtccttaccttgccagttttcctctttttgactacagtaactattccaaatggggacacatactgtactttcaactttgcatcctggggtggcacccctgaggagaggctgaaggtggccattaccatgctgacagccagagggattatccggtttgtcattggctttagcttgccgatgtccattgttgccatctgctatgggctcattgcagccaagatccacaaaaagggcatgattaaatccagccgtcccttacgggtcctcactgctgtggtggcttctttcttcatctgttggtttccctttcaactggttgcccttctgggcaccgtctggctcaaagagatgttgttctatggcaagtacaaaatcattgacatcctggttaacccaacgagctccctggccttcttcaacagctgcctcaaccccatgctttacgtctttgtgggccaagacttccgagagagactgatccactccctgcccaccagtctggagagggccctgtctgaggactcagccccaactaatgacacggctgccaattctgcttcacctcctgcagagactgagttacaggcaatgtgaggatggggtcagggatattttgagttctgttcatcctaccctaatgccagttccagcttcatctacccttgagtcatattgaggcattcaaggatgcacagctcaagtatttattcaggaaaaatgcttttgtgtccctgatttggggctaagaaatagacagtcaggctactaaaatattagtgttattttttgttttttgacttctgcctataccctggggtaagtggagttgggaaatacaagaagagaaagaccagtggggatttgtaagacttagatgagatagcgcataataaggggaagactttaaagtataaagtaaaatgtttgctgtaggttttttatagctattaaaaaaaatcagattatggaagttttcttctatttttagtttgctaagagttttctgtttctttttcttacatcatgagtggactttgcattttatcaaatgcattttctacatgtattaagatggtcatattattcttcttcttttatgtaaatcattataaataatgttcattaagttctgaatgttaaactactcttgaattcctggaataaaccacacttagtcctgatgtactttaaatatttatatctcacaggagttggttagaatttctgtgtttatgtttatatactgttatttcactttttctactatccttgctaagttttcatagaaaataaggaacaaagagaaacttgtaatggtctctgaaaaggaattgagaagtaattcctctgattctgttttctggtgttatatctttattaaatattcagaaaaattcaccagtgaa

SEQ ID NO: 135202 - DNA, 1544 bp, Homo sapiens
  Payload ID: 6423
  Gene Symbol: FPR2
  Gene Name: formyl peptide receptor 2
  Uniprot ID: P25090
  ENST ID: ENST00000598953
  CDS Start-End: 190-1245
aaaaggagcttagctgctggaaaaacgtgatttaaggagaaggaagcgatccaatgggaagaagagatccaatggatcctctatcacgaagatattgagataagaaccaatatggatttgcacccactgcatttgcagccttgaggtcataagcatcctcaggaaaatgcaccaggtgctgctggcaagatggaaaccaacttctccactcctctgaatgaatatgaagaagtgtcctatgagtctgctggctacactgttctgcggatcctcccattggtggtgcttggggtcacctttgtcctcggggtcctgggcaatgggcttgtgatctgggtggctggattccggatgacacgcacagtcaccaccatctgttacctgaacctggccctggctgacttttctttcacggccacattaccattcctcattgtctccatggccatgggagaaaaatggccttttggctggttcctgtgtaagttaattcacatcgtggtggacatcaacctctttggaagtgtcttcttgattggtttcattgcactggaccgctgcatttgtgtcctgcatccagtctgggcccagaaccaccgcactgtgagtctggccatgaaggtgatcgtcggaccttggattcttgctctagtccttaccttgccagttttcctctttttgactacagtaactattccaaatggggacacatactgtactttcaactttgcatcctggggtggcacccctgaggagaggctgaaggtggccattaccatgctgacagccagagggattatccggtttgtcattggctttagcttgccgatgtccattgttgccatctgctatgggctcattgcagccaagatccacaaaaagggcatgattaaatccagccgtcccttacgggtcctcactgctgtggtggcttctttcttcatctgttggtttccctttcaactggttgcccttctgggcaccgtctggctcaaagagatgttgttctatggcaagtacaaaatcattgacatcctggttaacccaacgagctccctggccttcttcaacagctgcctcaaccccatgctttacgtctttgtgggccaagacttccgagagagactgatccactccctgcccaccagtctggagagggccctgtctgaggactcagccccaactaatgacacggctgccaattctgcttcacctcctgcagagactgagttacaggcaatgtgaggatggggtcagggatattttgagttctgttcatcctaccctaatgccagttccagcttcatctacccttgagtcatattgaggcattcaaggatgcacagctcaagtatttattcaggaaaaatgcttttgtgtccctgatttggggctaagaaatagacagtcaggctactaaaatattagtgttattttttgttttttgacttctgcctataccctggggtaagtggagttgggaaatacaagaagagaaagaccagtggggatttgtaagacttagatgagatagcgcataataa

SEQ ID NO: 135203 - DNA, 2621 bp, Homo sapiens
  Payload ID: 6423
  Gene Symbol: FPR2
  Gene Name: formyl peptide receptor 2
  Uniprot ID: P25090
  ENST ID: ENST00000598776
  CDS Start-End: 773-1828
ggaccaggaacaacctatttgcaaagttggcgcaaacattcctgcctgacaggaccatggacacaggttgtagagatagagatggctctggctgtgcattcagcagattctgtagatagaattaataggacttggatgggattgtggtgagagaaagtgaaatgaaagataagttctagtttggaagttttaacaactgaatgtttaaactcaaatagacacaaaatattggaagagtggcaggtttgggaggatgagacaatcaactgtttggttgagccacgttaggtttgaaatgtctacgggactcccgtggggagaggttatatcagactggagcaccagagagaggccaaggctgatagtttagatgaaaagagagcatgatattttaagccctgagactggataatatcacctatagaaagactatatagagataagagaggtggggaacaagtaaaagctgcgggacactcctaaatttagagtcaaatttagagcagaaaatactagcaaaggggactgaaaagcggtggccaattgagcttcaaatgcaagtgaaagtgtgttgtgtgtacatttatcatctcatggcacaggaaaaacgtgatttaaggagaaggaagcgatccaatgggaagaagagatccaatggatcctctatcacgaagatattgagataagaaccaatatggatttgcacccactgcatttgcagccttgaggtcataagcatcctcaggaaaatgcaccaggtgctgctggcaagatggaaaccaacttctccactcctctgaatgaatatgaagaagtgtcctatgagtctgctggctacactgttctgcggatcctcccattggtggtgcttggggtcacctttgtcctcggggtcctgggcaatgggcttgtgatctgggtggctggattccggatgacacgcacagtcaccaccatctgttacctgaacctggccctggctgacttttctttcacggccacattaccattcctcattgtctccatggccatgggagaaaaatggccttttggctggttcctgtgtaagttaattcacatcgtggtggacatcaacctctttggaagtgtcttcttgattggtttcattgcactggaccgctgcatttgtgtcctgcatccagtctgggcccagaaccaccgcactgtgagtctggccatgaaggtgatcgtcggaccttggattcttgctctagtccttaccttgccagttttcctctttttgactacagtaactattccaaatggggacacatactgtactttcaactttgcatcctggggtggcacccctgaggagaggctgaaggtggccattaccatgctgacagccagagggattatccggtttgtcattggctttagcttgccgatgtccattgttgccatctgctatgggctcattgcagccaagatccacaaaaagggcatgattaaatccagccgtcccttacgggtcctcactgctgtggtggcttctttcttcatctgttggtttccctttcaactggttgcccttctgggcaccgtctggctcaaagagatgttgttctatggcaagtacaaaatcattgacatcctggttaacccaacgagctccctggccttcttcaacagctgcctcaaccccatgctttacgtctttgtgggccaagacttccgagagagactgatccactccctgcccaccagtctggagagggccctgtctgaggactcagccccaactaatgacacggctgccaattctgcttcacctcctgcagagactgagttacaggcaatgtgaggatggggtcagggatattttgagttctgttcatcctaccctaatgccagttccagcttcatctacccttgagtcatattgaggcattcaaggatgcacagctcaagtatttattcaggaaaaatgcttttgtgtccctgatttggggctaagaaatagacagtcaggctactaaaatattagtgttattttttgttttttgacttctgcctataccctggggtaagtggagttgggaaatacaagaagagaaagaccagtggggatttgtaagacttagatgagatagcgcataataaggggaagactttaaagtataaagtaaaatgtttgctgtaggttttttatagctattaaaaaaaatcagattatggaagttttcttctatttttagtttgctaagagttttctgtttctttttcttacatcatgagtggactttgcattttatcaaatgcattttctacatgtattaagatggtcatattattcttcttcttttatgtaaatcattataaataatgttcattaagttctgaatgttaaactactcttgaattcctggaataaaccacacttagtcctgatgtactttaaatatttatatctcacaggagttggttagaatttctgtgtttatgtttatatactgttatttcactttttctactatccttgctaagttttcatagaaaataaggaacaaagagaaacttgtaatggtctctgaaaaggaattgagaagtaattcctctgattctgttttctggtgttatatctttattaaatattc

SEQ ID NO: 135204 - DNA, 576 bp, Homo sapiens
  Payload ID: 6423
  Gene Symbol: FPR2
  Gene Name: formyl peptide receptor 2
  ENST ID: ENST00000599326
  CDS Start-End: 167-576
aagaagcacacaggaaaaggagcttagctgctgagttttgctcttgttgcccaggctggagtgcaatggcacgatctcagctcactgcaacctccgcctccctggttcaagcgattctcctgcgtcagcctcccgagcatctggaattacaggtgctgctggcaagatggaaaccaacttctccactcctctgaatgaatatgaagaagtgtcctatgagtctgctggctacactgttctgcggatcctcccattggtggtgcttggggtcacctttgtcctcggggtcctgggcaatgggcttgtgatctgggtggctggattccggatgacacgcacagtcaccaccatctgttacctgaacctggccctggctgacttttctttcacggccacattaccattcctcattgtctccatggccatgggagaaaaatggccttttggctggttcctgtgtaagttaattcacatcgtggtggacatcaacctctttggaagtgtcttcttgattggtttcattgcactggaccgctgcatttgtgtcctgcatccagtctgggcccagaaccaccg

SEQ ID NO: 135205 - DNA, 985 bp, Homo sapiens
  Payload ID: 6423
  Gene Symbol: FPR2
  Gene Name: formyl peptide receptor 2
  ENST ID: ENST00000600258
  CDS Start-End: 721-985
gctttaatggcattaggacagtgggctgggcctgtttagaaactcatgtacctgactgtatttctcagcctcagtctctgtgggatgcagaggttcagtgctctcaacaacaagggccaagaaatccaagtgtccgggcccctgctccctccaagggtcaaggtaaagaaagcagcaagcactgtggtgagaagaatcagagggaggcaatgaaaggaagagaagaagtcatgagggatggagaccagaaacacagagagaggtggtccgcagagcccatgtctgattgatctctatgtctccagcagccagcaaggaagcacctctttagagacctgcacctatacaatacctaccaccttttatttctcgatatgtgaactccattgagaacaaacgagtaaataaggaagggctggacattcagattccttgacccttgacatttggaagcatgaactccagtctctcacagaaggctagaggtgaaggaacattcagacacattggtttctaagaagagtccgctgacaacatacccaaggtgtcttctgaaaattataagaaatcctgagtttctgttaggggattggctccagctccattgtccctcccccatcattcagtagtctccgcgaaagcccttagagccggtgttgctccacaggaagccaagaagcacacaggaaaaggagcttagctgctggtgctgctggcaagatggaaaccaacttctccactcctctgaatgaatatgaagaagtgtcctatgagtctgctggctacactgttctgcggatcctcccattggtggtgcttggggtcacctttgtcctcggggtcctgggcaatgggcttgtgatctgggtggctggattccggatgacacgcacagtcaccaccatctgttacctgaacctggccctggctgacttttctttcacggccacattaccattcctcattgtctccatggccatgggag

SEQ ID NO: 135206 - DNA, 543 bp, Homo sapiens
  Payload ID: 6423
  Gene Symbol: FPR2
  Gene Name: formyl peptide receptor 2
  ENST ID: ENST00000600722
  CDS Start-End: 170-543
tatgagccttgtaatcctcttggtgaagtgatcagcccgataagcgaaatgcatattgataatgatgggaatatggaggactatcccttcccaaaggagcatccaagagaatgccaattctatagcaccgttgtcaacaaggcttggtagatagagtgctgctggcaagatggaaaccaacttctccactcctctgaatgaatatgaagaagtgtcctatgagtctgctggctacactgttctgcggatcctcccattggtggtgcttggggtcacctttgtcctcggggtcctgggcaatgggcttgtgatctgggtggctggattccggatgacacgcacagtcaccaccatctgttacctgaacctggccctggctgacttttctttcacggccacattaccattcctcattgtctccatggccatgggagaaaaatggccttttggctggttcctgtgtaagttaattcacatcgtggtggacatcaacctctttggaagtgtcttcttgattggtttcattgcactggaccgctgcat

SEQ ID NO: 135207 - DNA, 2620 bp, Homo sapiens
  Payload ID: 6424
  Gene Symbol: FPR3
  Gene Name: formyl peptide receptor 3
  Uniprot ID: P25089
  ENST ID: ENST00000339223
  CDS Start-End: 180-1241
actcattttgttttatagcatgacaggctgtctgattccatctttataaccaaagccaattaagatcttaaaaccaaacatataacttcatctttttacaagtacttagagcctgagttgctccacaggaatccaggaactgggcacaggaaaaggatctaagctggtggtgtgggaagatggaaaccaacttctccattcctctgaatgaaactgaggaggtgctccctgagcctgctggccacaccgttctgtggatcttctcattgctagtccacggagtcacctttgtcttcggggtcctgggcaatgggcttgtgatctgggtggctggattccggatgacacgcacagtcaacaccatctgttacctgaacctggccctagctgacttctctttcagtgccatcctaccattccgaatggtctcagtcgccatgagagaaaaatggccttttggctcattcctatgtaagttagttcatgttatgatagacatcaacctgtttgtcagtgtctacctgatcaccatcattgctctggaccgctgtatttgtgtcctgcatccagcctgggcccagaaccatcgcaccatgagtctggccaagagggtgatgacgggactctggattttcaccatagtccttaccttaccaaatttcatcttctggactacaataagtactacgaatggggacacatactgtattttcaactttgcattctggggtgacactgctgtagagaggttgaacgtgttcattaccatggccaaggtctttctgatcctccacttcattattggcttcagcgtgcctatgtccatcatcacagtctgctatgggatcatcgctgccaaaattcacagaaaccacatgattaaatccagccgtcccttacgtgtcttcgctgctgtggtggcttctttcttcatctgttggttcccttatgaactaattggcattctaatggcagtctggctcaaagagatgttgttaaatggcaaatacaaaatcattcttgtcctgattaacccaacaagctccttggccttttttaacagctgcctcaacccaattctctacgtctttatgggtcgtaacttccaagaaagactgattcgctctttgcccactagtttggagagggccctgactgaggtccctgactcagcccagaccagcaacacagacaccacttctgcttcacctcctgaggagacggagttacaagcaatgtgaggtcggggatatttttgggctctgtctctttctaccctgcgttaagcggaaaaaaaaaattctgacagtgtttttcttcctctttcataccaccaccaccacaatcatcaacataaaggaagtctgtaccaaatctgtagggggtttttcccacaaccaagcaatagacaccagctgggtgtcctacaattaaattccaacactatctacctggagctactgtcagatcccacaggtttaagggctcattccccaagtctgctcctccagttgagacacaagtcacaaatccaggcttctgaaacttcggaccaaccagcttcaatcagggttcccactaccccctctttgggggtagagtggctcatggaactcagagaaacatttatttcggcttgctggtttattataaaagcaaggtttattataaaagatactacaaaggatacagatgaagaggcacatagggcaaggtacggggttccacgccctccctgagtgcatcaccctctgggaacctccgtgtgttcacgtctcatgaagctctccaaatccagtcctcttgggtttttatggaagcttcatgatgtcagcattctttcctccagtgtataggatgggatcctctctggggagggtcttaagacccacaattagaaaggcaagggaagattagagtcctgctttggggtagatgaaaggaaaggagagagattctgtttcctgaggcttaatacacccaacattataacaaaggactgtagcaagggctatgggagttctgaagcagaaaccatgggctaaaaccaacatacatcttaataccagataccctaatcccagtcctaacttcatttaaccttggtcacattgagtcattccaggatgagtggctcaagtatttcctcagggaaaatacttctgtgccccctgatttgagggtaagaagtagataatgaggccactgtgggtgttattttttcatgtctggacctcagcctatatcctgagactaagtggaagtgggaaaagagtacaagagaagagacaaagtggggatatttgtaaggcttagatgagatagtgtttttttagaaaaaaactttatcttaccattaagtaaaatgtttgccataggctttctggggctttctctttttaaagtcagactgttgaaggtttcttctattcttatttgttaagagttttcttttattgtttaaatcatgaatgaatgttgaattttattaaatgcagtttctgtaaatattaacgtgatcatattatttttattctttcatttacataattataaattagattaagttttcaatgttaagctacccttgcatttatgaaataaaccacgcttgctcatg

SEQ ID NO: 135208 - DNA, 2222 bp, Homo sapiens
  Payload ID: 6424
  Gene Symbol: FPR3
  Gene Name: formyl peptide receptor 3
  Uniprot ID: P25089
  ENST ID: ENST00000595991
  CDS Start-End: 163-1224
atgaggtgttgtctgattctagaattatgaataaagccaataaaaactttacactaaattagttgtaattttgtcttttgacaaatccttggagcttgtgttgctcgacaggaagccagggactggccacaagaaaaggaactcagctagtggtgtgggaagatggaaaccaacttctccattcctctgaatgaaactgaggaggtgctccctgagcctgctggccacaccgttctgtggatcttctcattgctagtccacggagtcacctttgtcttcggggtcctgggcaatgggcttgtgatctgggtggctggattccggatgacacgcacagtcaacaccatctgttacctgaacctggccctagctgacttctctttcagtgccatcctaccattccgaatggtctcagtcgccatgagagaaaaatggccttttggctcattcctatgtaagttagttcatgttatgatagacatcaacctgtttgtcagtgtctacctgatcaccatcattgctctggaccgctgtatttgtgtcctgcatccagcctgggcccagaaccatcgcaccatgagtctggccaagagggtgatgacgggactctggattttcaccatagtccttaccttaccaaatttcatcttctggactacaataagtactacgaatggggacacatactgtattttcaactttgcattctggggtgacactgctgtagagaggttgaacgtgttcattaccatggccaaggtctttctgatcctccacttcattattggcttcagcgtgcctatgtccatcatcacagtctgctatgggatcatcgctgccaaaattcacagaaaccacatgattaaatccagccgtcccttacgtgtcttcgctgctgtggtggcttctttcttcatctgttggttcccttatgaactaattggcattctaatggcagtctggctcaaagagatgttgttaaatggcaaatacaaaatcattcttgtcctgattaacccaacaagctccttggccttttttaacagctgcctcaacccaattctctacgtctttatgggtcgtaacttccaagaaagactgattcgctctttgcccactagtttggagagggccctgactgaggtccctgactcagcccagaccagcaacacagacaccacttctgcttcacctcctgaggagacggagttacaagcaatgtgaggtcggggatatttttgggctctgtctctttctaccctgcgttaagcggaaaaaaaaaattctgacagtgtttttcttcctctttcataccaccaccaccacaatcatcaacataaaggaagtctgtaccaaatctgtagggggtttttcccacaaccaagcaatagacaccagctgggtgtcctacaattaaattccaacactatctacctggagctactgtcagatcccacaggtttaagggctcattccccaagtctgctcctccagttgagacacaagtcacaaatccaggcttctgaaacttcggaccaaccagcttcaatcagggttcccactaccccctctttgggggtagagtggctcatggaactcagagaaacatttatttcggcttgctggtttattataaaagcaaggtttattataaaagatactacaaaggatacagatgaagaggcacatagggcaaggtacggggttccacgccctccctgagtgcatcaccctctgggaacctccgtgtgttcacgtctcatgaagctctccaaatccagtcctcttgggtttttatggaagcttcatgatgtcagcattctttcctccagtgtataggatgggatcctctctggggagggtcttaagacccacaattagaaaggcaagggaagattagagtcctgctttggggtagatgaaaggaaaggagagagattctgtttcctgaggcttaatacacccaacattataacaaaggactgtagcaagggctatgggagttctgaagcagaaaccatgggctaaaaccaacatacatcttaataccagataccctaatcccagtcctaacttcatttaaccttggtcacattgagtcattccaggatgagtggctcaagtatttcctcagggaaaatacttctgtgccccctgatttgagggtaagaagtagataatgaggccactgtgggtgttattttttcatgtctggacctcag

SEQ ID NO: 135209 - DNA, 6866 bp, Homo sapiens
  Payload ID: 6425
  Gene Symbol: FYTTD1
  Gene Name: forty-two-three domain containing 1
  Uniprot ID: Q96QD9
  ENST ID: ENST00000241502
  CDS Start-End: 223-1179
cgatcctgcgagggccgctaggagcgagtcacggcgcggggccgctctggtcgcccgcgagtgtcggtggccccgccccgcccgcagccgcgggtggagaccgaggacggcgccggcgcgtgcgcgctccctcggtgcggcgggctgcgtgcgcgagtgggaggtggcaggcctgcgactccggccttgtccgcgcccgctctcggcgcgacgtctccagccatgaaccggtttggtacccggttggtgggagccacggcgacttcttcgccgccgccgaaggcccgcagcaatgaaaacctcgacaaaatagatatgtctttggatgatatcatcaagttgaatcgaaaggaagggaagaagcagaattttccaagactaaatagaagactcctccagcaaagtggtgcccagcaattcaggatgagagtgcgatggggaatccaacagaattctggttttggtaagactagtctgaatcgtagaggaagagtaatgcctggaaagagacgtcctaatggagttatcactggccttgcagctaggaaaacgactggaattcgaaaaggaattagtcctatgaatcgtccacctctaagtgacaagaatatagaacaatattttccagtgttaaaaaggaaggcaaaccttctgagacaaaatgaagggcagaggaaaccagtagcagttctcaagagacctagccagctaagcagaaaaaataacattccagctaattttaccaggagtggaaataaattaaatcatcagaaagatactcgtcaggcaacttttcttttcagaagaggcctgaaggtgcaggcccagttgaatacagaacaactgctagacgatgtagtagcaaagagaactcgtcaatggcggacttccaccacaaatggagggattttgactgtatctattgacaatcctggagcagtgcaatgcccagtaactcagaaaccacgattaactcgtactgctgtaccttcatttttaacaaagcgggagcaaagtgacgtcaagaaagttcctaaaggtgttcccctgcagtttgacataaacagtgtcggaaaacagacagggatgacgttgaatgagcggtttgggatcctgaaggaacaaagagccactctcacatacaacaaagggggaagccgctttgtcaccgtgggataggtcccatgtcaaaggaacttttgagtgatgactctgagaagttgaattgcttgaagagttcatcacggaaattcaagaaactttacttcaaaatattcacaaggctaaataactcttatttttatttttgaaggtttttttttttaaaaaaaaaaacgtataaaataatgccctgaaagaataatagggattatacctgtctgttcttaaagatttcatggttggctcagacagaacaatcatctgtttgacttctttggttcctcatgcagcagaaggaagacagaaagatagaaattgattatttttatgatagcagtattcaggatctcatcacctttgcccgtgttttagactttgtcatggtaaatcctggtcttcataaacatgagtaggtcccttggttgctgtcacttgccctttaatagtgttgatgtagtcagtgccgttgccttttcttcattagagacacagaacaatgtattagaatttccagctgtgggtttgaagacttagggggacatccagaacgtgcttcctctttcagacggtgtaaagtcccctggaattacacagctttagtgctgagcttttaacaggaaatgtggccctaggtattagtcttagtttaaaatgttggtgtttagagactgtaaatgcatattcacaaagttatctgatagggccttggaggagaaggtccagttttaaaaaatgacagtttgtgtttaataaatgaaggcatgagaggaagtaagtagcaagttgaaggacaggtagttgagatgaaacacttcaaaaccctggttatagatgtactgtttggatgtagcatagtcttgagtctagcgtccacaaagaattattcaaatgatatttagaagaattataactattacattgaatggagtcccttggatattttgatagtaaaattaatagccataaagtcctagacttcttatttgaagttaaaatttcttatttgaaaagttgaaatttatgagctttgaagattgctaaattaaataatttatagctccaaaaacaaaaatatacttgtatatgtcacagagaaaaaaaatgcaaaatttataatagagttacattaaccttgttgtttacctttcactgatttcttatatggtataaattaaagttcaggcatttatggggagaaaaggccctccccaccgacccgccacctgccacctctgacggagtgggagaagttagtctgtgctaagatagtactgagtccccagatgttgtatactgtaaattacagtataatgccaaatgcagcaaaatcttccagctgtacgttacaagtttggtcattttgaagcttgacattttagtttgccattatgttaaaaacatctaaataggtgttagtttctcaggagtagattgttagtgttgacttttcctgtaaagcagacatcgttcttggcctgccctgcattgtatactagatttcattgttgtctctcatgcttcttgagttgcttcatggtttatgctcgccatggaaagctatcagtaacagtttcatgcttataccaaagaattaaatctgatctttaatatctgatattttcctggtactcgtactgataagggattattggaagtcagtcacagaatttggaaataaattctagtctctccttagctatttgatgcttttcatataggccaagaactcattgcaaaacatttttgcaaggatgaatgcctgtatttggtctaggaacagtacattttagtctgatttagaattactggtagcttattttaaagcaaggaaaagcagctgagctcaagtttgctgtctttagaatggtttgtgaaaatatggtataaaggtgttttcattttcctgttcttacctattattgtatagagctattcatgccattttttgggaaaactttaaaaattgccccaaatactgacattgagtgcattaaataacaaattatctttgatacattaaacttttattcttcatgcatctgtaatttaattttaagtataatgttttgcctttggtacaactaaattaaaactcttggtggtcacatattgtatataaacaaaacaatatgctttgttgaaggaaaattttctttattggaatgtggttgtaatccttgttcagttcttaagtttcggttttttttaaaaacaggatgcaacttaaacttttctttgcatcaaggtatatgcaaaacattggtgccgtgcatcaccaaatgaaagtttgtatttaacgaggaggtgctttacactgtactttttggtgttttttggaaaagttacatttagatctattctgaagctgttcatttttaacaaataaaatgttacaggtttcacatgatttattctcagctctaaagattgagttgtggtttttagattgttctatgttacgaagaactttgtagtggttatctatatttgtagtttttagggtgtgaaaccttatctactagcaaaattggtaaatcactgtagactcttctattagcatccctctctcttttgatgatttcatttgtagctccaacaaatgaatctaaaaagaagaatccaggctgggcacggtggctcatgcctgtaatcccagaacttggggaggccaaggcgggcggatcatgaggccaggagcaagaccagcctggctaacatagggagactctatctttactaaaaatacagacattagctggtgtggtgacatgtgcctgtggtcccagctacttgggaggctgaggcgggagaattgcttgaatccaggaagcagagattgcagtgagccgagaccacgccattgcactccagcctgggtgacagagtgacactctgtcttaaaaaaacaaaaaaaaagaatccagtatactttgcaatgcagaatattgggttagatgagcctttagagactaatccagtttaacccctcctttttacaccttagtaaagtgagtcctagtgttttcaagacttgcatgtggcagagttattttttgagctcagatcttctaattcttaattgataataaactgctttggtgaattaacacccacagaaaatagtggaatggtgtgtggttttcaaatacctaagaattggtaatagccatgctttagcatttttagcatggtaagtaaatctattctaccagtgatggttatactttattactttgctatttgggttaggtagacctgttagaaaagtccagtgttcctaatcagatatgcattttttaaaaacaggcataaactcttcaccacaattttaattacagtcatccctcagtatacacggaggattggttccaggacccttgtatatacccaaccctgcgcaatactgaagtcccacatctgtgtaaacgaaaagttggcccactgtgtacatggattttccattccaagatgtttttttggttcaaaacaatttgcttataagtagacccaggtaattcaaagccatgttgttgaagggccaactgtttaagccaatcgtaaaatactgtgtctgaggaaacaggcctcattgctcagcagtgagtttttattagactaggtatgtatatcattattaatattttactgtaaatagctttgtaattcacacaaagtatacgggcccagcaggcctcattgctcagcagtgagtttttattagactaggtatgtatatcattattaatattttactgtaaatagctttgtaattcacacaaagtatacgggcccagaataatttttgttgatttatttttactataaggagataagagaaaaaatagctcacttggcagcacagaaaatgaataccatattggcaatattaaagcagaaaataattcatttctgatcagtagtgctttcagttttcatcagaattattattattattattattttgccactgtgaaaaagcagttaagcatgtaaaacttccctttagagagggttctttttggatagatcaatttggaactagcttcttttttttttttttaaatgatacttcagtaaacacagcatttacaacaagaattgtggactatggtggaccattaatagggatttaaagatttacttagaaattgtagacttctaatatcttttatttcccttctcaccacagtttattttcttttttctttttctttttttttttttcttttttttctttttttgagatggagtttcactcttgttgcccaggttggagtgcaatggtgcgatctcggctcaccccaacctccgcctcccgggttcaagcaattctcctgcctcagcctcccaagtggctgggattacaggtgcccaccaccatgcccagttaattttgcatttttagtagagacggggtttctccatgttggtcaggctggtctcaaactcctgacttcaggtgatctgcctgcctcggcctcccaaagtgctgggattacaggtgtgagccaccgcacccagcctacagcttattttctacctatgtttaacaggaagcttgataacacaagcaaatgtgatgccattctgggactgaaatgtcgtcttatgagtgtattcagatgaggtataccagtgtttaaagattagttggaagttattctcctagtgtgcatatttaatttctacttactccatttccctttaatgagaaaagaatcatattgtctgaattttcctgtataaagtttaaaaaagttaattattaggacttgtttttaaaggagtaagcaatggaaggatcaaacatttattaaatatattcagcaaatatttagaattaaatgtattcagcaaggaagagaatgggattcatactgcttggagtttataaaagcggagtttttttattttttgagacggaatactctgtcacccaggctgcagtgcagtggcacaatctcggctcactgcagcctctgcctcccaggatcctttccgggttcaagcaattcttgtccctcagcctcgtaagtaggtgggattacaagcttgagccaccacagccaactaatttttgtgtttttagtagaaatgagttttcaccatgttggccaggctggtctcgaactcctaccctcaggagatctgcctgcctcagcttcccaaagtgctgggattacaggtgtgagccaccacgcccgccctaaaagtggattcttttttttttttttttttttggagacagtcttgctctgttgcccaggctggagtgcagtagtgatcttggctcactgcagcctctgcctcccgggttcaagcgattttcctgtctcaaccttccaagtatctgggattacaggcacgtgccactacacccagctaatttttgtactaagacgaggtttcaccatattggccagtctagtctcaaactcctgacctcaggtgatatgcccgcctctgactcccaaagtgctgggattacaggcatgagctacggagcccggcctagaagtggagtcttagaaggagtgaccatgatatgtttctactgagtagaagggggaagggaggacataacctttgcatgatatagtgaaatgcagagctggaaagaactattaagatttgagtgaaacttttgccccctgtgttgaatgagttaactttcagtctgtaaaataaacaggaagaactgggaa

SEQ ID NO: 135210 - DNA, 491 bp, Homo sapiens
  Payload ID: 6425
  Gene Symbol: FYTTD1
  Gene Name: forty-two-three domain containing 1
  ENST ID: ENST00000426031
  CDS Start-End: 279-491
agttgccggcggagttttctcgctggtgggcggacccgagcggaggcccggaggacagccgggagcgcaggctcgacgccaggtgcccggctggaccgcgagggacccgggcgtcccctcggccgcggcagtcggaggaggggctgtggaggcgggggcaggggcgctgcgggcccgaagatgatatcatcaagttgaatcgaaaggaagggaagaagcagaattttccaagactaaatagaagactcctccagcaaagtggtgcccagcaattcaggatgagagtgcgatggggaatccaacagaattctggttttggtaagactagtctgaatcgtagaggaagagtaatgcctggaaagagacgtcctaatggagttatcactggccttgcagctaggaaaacgactggaattcgaaaaggaattagtcctatgaatcgtccacctctaagtgacaagaatatagaacaatattttccagtgttaaaa

SEQ ID NO: 135211 - DNA, 1342 bp, Homo sapiens
  Payload ID: 6425
  Gene Symbol: FYTTD1
  Gene Name: forty-two-three domain containing 1
  Uniprot ID: Q96QD9
  ENST ID: ENST00000415708
  CDS Start-End: 239-1117
gaaaggctcgtgtgtaccgaagtataggggacctgtctgcagcaggagggactcgaaggacacggaggattatatcactgaaggcataagattcagagtagagacgggatttcaccatgttggtcaggccagtcccgaactcctgacctcaaatgatccgcccacctcagcctcccaaagtgctgggattataggtgtgagtcaccatgcctggccggaagggggtcatctttaaaaaatggagccttctgtgattatgggaaatgatatcatcaagttgaatcgaaaggaagggaagaagcagaattttccaagactaaatagaagactcctccagcaaagtggtgcccagcaattcaggatgagagtgcgatggggaatccaacagaattctggttttggtaagactagtctgaatcgtagaggaagagtaatgcctggaaagagacgtcctaatggagttatcactggccttgcagctaggaaaacgactggaattcgaaaaggaattagtcctatgaatcgtccacctctaagtgacaagaatatagaacaatattttccagtgttaaaaaggaaggcaaaccttctgagacaaaatgaagggcagaggaaaccagtagcagttctcaagagacctagccagctaagcagaaaaaataacattccagctaattttaccaggagtggaaataaattaaatcatcagaaagatactcgtcaggcaacttttcttttcagaagaggcctgaaggtgcaggcccagttgaatacagaacaactgctagacgatgtagtagcaaagagaactcgtcaatggcggacttccaccacaaatggagggattttgactgtatctattgacaatcctggagcagtgcaatgcccagtaactcagaaaccacgattaactcgtactgctgtaccttcatttttaacaaagcgggagcaaagtgacgtcaagaaagttcctaaaggtgttcccctgcagtttgacataaacagtgtcggaaaacagacagggatgacgttgaatgagcggtttgggatcctgaaggaacaaagagccactctcacatacaacaaagggggaagccgctttgtcaccgtgggataggtcccatgtcaaaggaacttttgagtgatgactctgagaagttgaattgcttgaagagttcatcacggaaattcaagaaactttacttcaaaatattcacaaggctaaataactcttatttttatttttgaaggtttttttttttaaaaaaaaaaacgtataaaataatgccctgaaagaataatagggattatacctgtctgttcttaaagatttcatggttgg

SEQ ID NO: 135212 - DNA, 1758 bp, Homo sapiens
  Payload ID: 6425
  Gene Symbol: FYTTD1
  Gene Name: forty-two-three domain containing 1
  Uniprot ID: Q96QD9
  ENST ID: ENST00000424384
  CDS Start-End: 532-1287
acggctcgccgctcgccggctctttgtgaggaaagatctgccggtttccccggagcgcgttcgcggtgggcgttatcggggagcgaggggaatggtccgaccgagccgttctctctgaagaaaggtcttggagagcccggccggggctgcggtcggttaaaccagcgcttccggagctttccctggtcgccgggcgttccaggccggcgccggccatggctgccgggcgcgactctcggggccacctccggccgcggccccggagcgtctgtcagaaaggaagcagcgctcggccgcctgtgggatgtggttgtgtattgagcgctgcctagaaaagcacagtctccctctccaggcctcagagctagctaatgggggagaaagcaaacatctttgaaggagagatgattgctgtggctcgctgagaagccagatgatatcatcaagttgaatcgaaaggaagggaagaagcagaattttccaagactaaatagaagactcctccagcaaagtggtgcccagcaattcaggatgagagtgcgatggggaatccaacagaattctggttttggtaagactagtctgaatcgtagaggaagagtaatgcctggaaagagacgtcctaatggagttatcactggccttgcagctaggaaaacgactggaattcgaaaaggaattagtcctatgaatcgtccacctctaagtgacaagaatatagaacaatattttccagtgttaaaaaggaaggcaaaccttctgagacaaaatgaagggcagaggaaaccagtagcagttctcaagagacctagccagctaagcagaaaaaataacattccagctaattttaccaggagtggaaataaattaaatcatcagaaagatactcgtcaggcaacttttcttttcagaagaggcctgaaggtgcaggcccagttgaatacagaacaactgctagacgatgtagtagcaaagagaactcgtcaatggcggacttccaccacaaatggagggattttgactgtatctattgacaatcctggagcagtgcaatgcccagtaactcagaaaccacgattaactcgtactgctgtaccttcatttttaacaaagcgggagcaaagtgacgtcaagaaagttcctaaaggtgttcccctgcagtttgacataaacagtgtcggaaaacagacagggatgacgttgaatgagcggtttgggatcctgaaggaacaaagagccactctcacatacaacaaagggggaagccgctttgtcaccgtgggataggtcccatgtcaaaggaacttttgagtgatgactctgagaagttgaattgcttgaagagttcatcacggaaattcaagaaactttacttcaaaatattcacaaggctaaataactcttatttttatttttgaaggtttttttttttaaaaaaaaaaacgtataaaataatgccctgaaagaataatagggattatacctgtctgttcttaaagatttcatggttggctcagacagaacaatcatctgtttgacttctttggttcctcatgcagcagaaggaagacagaaagatagaaattgattatttttatgatagcagtattcaggatctcatcacctttgcccgtgttttagactttgtcatggtaaatcctggtcttcataaacatgagtaggtcccttggttgctgtcacttgccctttaatagtgttgatgtagtcagtgccgttgccttttcttcattagagaca

SEQ ID NO: 135213 - DNA, 718 bp, Homo sapiens
  Payload ID: 6425
  Gene Symbol: FYTTD1
  Gene Name: forty-two-three domain containing 1
  ENST ID: ENST00000428738
  CDS Start-End: 189-718
gcgtatccttattcacccccgtgacattacacgctggggaccgaactcagtccgagatgtagactaggcaataacgctaatctaatcccgatgatatcatcaagttgaatcgaaaggaagggaagaagcagaattttccaagactaaatagaagactcctccagcaaagtggtgcccagcaattcaggatgagagtgcgatggggaatccaacagaattctggttttggtaagactagtctgaatcgtagaggaagagtaatgcctggaaagagacgtcctaatggagttatcactggccttgcagctaggaaaacgactggaattcgaaaaggaattagtcctatgaatcgtccacctctaagtgacaagaatatagaacaatattttccagtgttaaaaaggaaggcaaaccttctgagacaaaatgaagggcagaggaaaccagtagcagttctcaagagacctagccagctaagcagaaaaaataacattccagctaattttaccaggagtggaaataaattaaatcatcagaaagatactcgtcaggcaacttttcttttcagaagaggcctgaaggtgcaggcccagttgaatacagaacaactgctagacgatgtagtagcaaagagaactcgtcaatggcggacttccaccacaaatggagggattttgactgtatctattgacaatcctggagcagtgcaatgcccagt

SEQ ID NO: 135214 - DNA, 593 bp, Homo sapiens
  Payload ID: 6425
  Gene Symbol: FYTTD1
  Gene Name: forty-two-three domain containing 1
  Uniprot ID: Q96QD9
  ENST ID: ENST00000418169
  CDS Start-End: 35-424
gtccgcgcccgctctcggcgcgacgtctccagccatgaaccggtttggtacccggttggtgggagccacggcgacttcttcgccgccgccgaaggcccgcagcaatgaaaacctcgacaaaatagatatgtctttggatgatatcatcaagttgaatcgaaaggaagggaagaagcagaattttccaagactaaatagaagactcctccagcaaagtggtgcccagcaattcaggatgagagtgcgatggggaatccaacagaattctggttttggtaagactagtctgaatcgtagaggaagagtaatgcctggaaagagacgtcctaatggagttatcactggccttgcagctaggaaaacgactggaattcgaaaaggaattagtcctatgaatcgtccacctctaagtgacaagaaataacattccagctaattttaccaggagtggaaataaattaaatcatcagaaagatactcgtcaggcaacttttcttttcagaagaggcctgaaggtgcaggcccagttgaatacagaacaactgctagacgatgtagtagcaaagagaactcgtcaatggcggacttccacc

SEQ ID NO: 135215 - DNA, 998 bp, Homo sapiens
  Payload ID: 6425
  Gene Symbol: FYTTD1
  Gene Name: forty-two-three domain containing 1
  ENST ID: ENST00000412924
  CDS Start-End: 95-460
ccctcggtgcggcgggctgcgtgcgcgagtgggaggtggcaggcctgcgactccggccttgtccgcgcccgctctcggcgcgacgtctccagccatgaaccggtttggtacccggttggtgggagccacggcgacttcttcgccgccgccgaaggcccgcagcaatgaaaacctcgacaaaatagatatgtctttggatgatatcatcaagttgaatcgaaaggaagggaagaagcagaattttccaagactaaatagaagactcctccagcaaagtggtgcccagcaattcaggatgagagtgcgatggggaatccaacagaattctgacacaaaaactttggagtcctcaattgttaagcatatgaagaggttcgtgcttgtaatcccagcactttgggaggtgagagcaagaggattgcttaagccaaggacttcaggaccagcgtgggcaacatagggagaccccgtctctacaaaaaaaaagaaagagtataaagaggttttggtaagactagtctgaatcgtagaggaagagtaatgcctggaaagagacgtcctaatggagttatcactggccttgcagctaggaaaacgactggaattcgaaaaggaattagtcctatgaatcgtccacctctaagtgacaagaatatagaacaatattttccagtgttaaaaaggaaggcaaaccttctgagacaaaatgaagggcagaggaaaccagtagcagttctcaagagacctagccagctaagcagaaaaaataacattccagctaattttaccaggagtggaaataaattaaatcatcagaaagatactcgtcaggcaacttttcttttcagaagaggcctgaaggtgcaggcccagttgaatacagaacaactgctagacgatgtagtagcaaagagaactcgtcaatggcggacttccaccacaaatggagggattttgactgtatctattgacaatcctggagcagtgcaatgcccagt

SEQ ID NO: 135216 - DNA, 719 bp, Homo sapiens
  Payload ID: 6425
  Gene Symbol: FYTTD1
  Gene Name: forty-two-three domain containing 1
  ENST ID: ENST00000494309
  CDS Start-End: 1-381
ggctgcgttgcggtgggcgcgaaaggctcgtgtgtaccgaagtataggggacctgtctgcagcaggagggactcgaaggacacggaggattatatcactgaaggcataagattcagagatgatatcatcaagttgaatcgaaaggaagggaagaagcagaattttccaagactaaatagaagactcctccagcaaagtggtgcccagcaattcaggatgagagtgcgatggggaatccaacagaattctgacacaaaaactttggagtcctcaattgttaagcatatgaagaggttcgtgcttgtaatcccagcactttgggaggtgagagcaagaggattgcttaagccaaggacttcaggaccagcgtgggcaacatagggagaccccgtctctacaaaaaaaaagaaagagtataaagaggttttggtaagactagtctgaatcgtagaggaagagtaatgcctggaaagagacgtcctaatggagttatcactggccttgcagctaggaaaacgactggaattcgaaaaggaattagtcctatgaatcgtccacctctaagtgacaagaatatagaacaatattttccagtgttaaaaaggaaggcaaaccttctgagacaaaatgaagggcagaggaaaccagtagcagttctcaagagacctagccagctaagcagaaaaaataacattccagctaattttaccaggagtgga

SEQ ID NO: 135217 - DNA, 1669 bp, Homo sapiens
  Payload ID: 6426
  Gene Symbol: FOSL1
  Gene Name: FOS-like antigen 1
  Uniprot ID: P15407
  ENST ID: ENST00000312562
  CDS Start-End: 188-1003
acgggccaaggcggcgcgtctcgggggtggagcctggaggtgaccgcgccgctgcaacgcccccaccccccgcggtcgcagtggttcagcccgagaacttttcattcataaaaagaaaagactccgcacggcgcgggtgagtcagaacccagcagccgtgtaccccgcagagccgccagccccgggcatgttccgagacttcggggaacccggcccgagctccgggaacggcggcgggtacggcggccccgcgcagcccccggccgcagcgcaggcagcccagcagaagttccacctggtgccaagcatcaacaccatgagtggcagtcaggagctgcagtggatggtacagcctcatttcctggggcccagcagttaccccaggcctctgacctaccctcagtacagccccccacaaccccggccaggagtcatccgggccctggggccgcctccaggggtacgtcgaaggccttgtgaacagatcagcccggaggaagaggagcgccgccgagtaaggcgcgagcggaacaagctggctgcggccaagtgcaggaaccggaggaaggaactgaccgacttcctgcaggcggagactgacaaactggaagatgagaaatctgggctgcagcgagagattgaggagctgcagaagcagaaggagcgcctagagctggtgctggaagcccaccgacccatctgcaaaatcccggaaggagccaaggagggggacacaggcagtaccagtggcaccagcagcccaccagccccctgccgccctgtaccttgtatctccctttccccagggcctgtgcttgaacctgaggcactgcacacccccacactcatgaccacaccctccctaactcctttcacccccagcctggtcttcacctaccccagcactcctgagccttgtgcctcagctcatcgcaagagtagcagcagcagcggagacccatcctctgacccccttggctctccaaccctcctcgctttgtgaggcgcctgagccctactccctgcagatgccaccctagccaatgtctcctccccttcccccaccggtccagctggcctggacagtatcccacatccaactccagcaacttcttctccatccctctaatgagactgaccatattgtgcttcacagtagagccagcttggggccaccaaagctgcccactgtttctcttgagctggcctctctagcacaatttgcactaaatcagagacaaaatatttcccatttgtgccagaggaatcctggcagcccagagactttgtagatccttagaggtcctctggagccctaaccccttccagatcactgccacactctccatcaccctcttcctgtgatccacccaaccctatctcctgacagaaggtgccactttacccacctagaacactaactcaccagccccactgccagcagcagcaggtgattggaccaggccattctgccgccccctcctgaaccgcacagctcaggaggcgcccttggcttctgtgatgagctgatctgcggatctcagctttgagaagccttcagctccagggaatccaagcctccacagcgagggcagctgctatttattttcctaaagagagtatttttatacaaacctaccaaaatggaataaaaggcttgaagctgtgg

SEQ ID NO: 135218 - DNA, 1427 bp, Homo sapiens
  Payload ID: 6426
  Gene Symbol: FOSL1
  Gene Name: FOS-like antigen 1
  Uniprot ID: P15407
  ENST ID: ENST00000448083
  CDS Start-End: 81-590
ataaaaagaaaagactccgcacggcgcgggtgagtcagaacccagcagccgtgtaccccgcagagccgccagccccgggcatgttccgagacttcggggaacccggcccgagctccgggaacggcggcgggtacggcggccccgcgcagcccccggccgcagcgcaggcagcccagcaggagactgacaaactggaagatgagaaatctgggctgcagcgagagattgaggagctgcagaagcagaaggagcgcctagagctggtgctggaagcccaccgacccatctgcaaaatcccggaaggagccaaggagggggacacaggcagtaccagtggcaccagcagcccaccagccccctgccgccctgtaccttgtatctccctttccccagggcctgtgcttgaacctgaggcactgcacacccccacactcatgaccacaccctccctaactcctttcacccccagcctggtcttcacctaccccagcactcctgagccttgtgcctcagctcatcgcaagagtagcagcagcagcggagacccatcctctgacccccttggctctccaaccctcctcgctttgtgaggcgcctgagccctactccctgcagatgccaccctagccaatgtctcctccccttcccccaccggtccagctggcctggacagtatcccacatccaactccagcaacttcttctccatccctctaatgagactgaccatattgtgcttcacagtagagccagcttggggccaccaaagctgcccactgtttctcttgagctggcctctctagcacaatttgcactaaatcagagacaaaatatttcccatttgtgccagaggaatcctggcagcccagagactttgtagatccttagaggtcctctggagccctaaccccttccagatcactgccacactctccatcaccctcttcctgtgatccacccaaccctatctcctgacagaaggtgccactttacccacctagaacactaactcaccagccccactgccagcagcagcaggtgattggaccaggccattctgccgccccctcctgaaccgcacagctcaggaggcgcccttggcttctgtgatgagctgatctgcggatctcagctttgagaagccttcagctccagggaatccaagcctccacagcgagggcagctgctatttattttcctaaagagagtatttttatacaaacctaccaaaatggaataaaaggcttgaagctgtggcctgagtgcctcactggacccagaggccaatgggagagtatttggagccctaggtcccagccttagctctacagactcactgcatgaccttggacaaattctttgatatttttggactttgtcttatctgacaagtggggctacatccgctcggcctcatctccgggactg

SEQ ID NO: 135219 - DNA, 1132 bp, Homo sapiens
  Payload ID: 6426
  Gene Symbol: FOSL1
  Gene Name: FOS-like antigen 1
  ENST ID: ENST00000532401
  CDS Start-End: 81-488
ataaaaagaaaagactccgcacggcgcgggtgagtcagaacccagcagccgtgtaccccgcagagccgccagccccgggcatgttccgagacttcggggaacccggcccgagctccgggaacggcggcgggtacggcggccccgcgcagcccccggccgcagcgcaggcagcccagcagaagttccacctggtgccaagcatcaacaccatgagtggcagtcaggagctgcagtggatggtacagcctcatttcctggggcccagcagttaccccaggcctctgacctaccctcagtacagccccccacaaccccggccaggagtcatccgggccctggggccgcctccaggggtacgtcgaaggccttgtgaacagcccggaggaagaggagcgccgccgagtaaggcgcgagcggaacaagctggctgcggccaagtgcaggaaccggaggaaggaactgaccgacttcctgcaggcggagactgacaaactggaagatgagaaatctgggctgcagcgagagattgaggagctgcagaagcagaaggagcgcctagagctggtgctggaagcccaccgacccatctgcaaaatcccggaaggagccaaggagggggacacaggcagtaccagtggcaccagcagcccaccagccccctgccgccctgtaccttgtatctccctttccccagggcctgtgcttgaacctgaggcactgcacacccccacactcatgaccacaccctccctaactcctttcacccccagcctggtcttcacctaccccagcactcctgagccttgtgcctcagctcatcgcaagagtagcagcagcagcggagacccatcctctgacccccttggctctccaaccctcctcgctttgtgaggcgcctgagccctactccctgcagatgccaccctagccaatgtctcctccccttcccccaccggtccagctggcctggacagtatcccacatccaactccagcaacttcttctccatccctctaatgagactgaccatattgtgcttcacagtagagccagcttggggccaccaaagctgcccactgtttctcttgagctggcctctctagcacaatttgcactaaatcagagacaaaat

SEQ ID NO: 135220 - DNA, 584 bp, Homo sapiens
  Payload ID: 6426
  Gene Symbol: FOSL1
  Gene Name: FOS-like antigen 1
  ENST ID: ENST00000534222
  CDS Start-End: 547-584
aaaaggctgcagccggacttggggaggcgtcgccaagttcgggaccgacgggccaaggcggcgcgtctcgggggtggagcctggaggtgaccgcgccgctgcaacgcccccaccccccgcggtcgcagtggttcagcccgagaacttttcattcataaaaagaaaagactccgcacggcgcggatcagcccggaggaagaggagcgccgccgagtaaggcgcgagcggaacaagctggctgcggccaagtgcaggaaccggaggaaggaactgaccgacttcctgcaggcggagactgacaaactggaagatgagaaatctgggctgcagcgagagattgaggagctgcagaagcagaaggagcgcctagagctggtgctggaagcccaccgacccatctgcaaaatcccggaaggagccaaggagggggacacaggcagtaccagtggcaccagcagcccaccagccccctgccgccctgtaccttgtatctccctttccccagggcctgtgcttgaacctgaggcactgcacacccccacactcatgaccacaccctccctaactcctttcacccccagcct

SEQ ID NO: 135221 - DNA, 1200 bp, Homo sapiens
  Payload ID: 6426
  Gene Symbol: FOSL1
  Gene Name: FOS-like antigen 1
  ENST ID: ENST00000531493
  CDS Start-End: 81-788
ataaaaagaaaagactccgcacggcgcgggtgagtcagaacccagcagccgtgtaccccgcagagccgccagccccgggcatgttccgagacttcggggaacccggcccgagctccgggaacggcggcgggtacggcggccccgcgcagcccccggccgcagcgcaggcagcccagcagaagttccacctggtgccaagcatcaacaccatgagtggcagtcaggagctgcagtggatggtacagcctcatttcctggggcccagcagttaccccaggcctctgacctaccctcagtacagccccccacaaccccggccaggagtcatccgggccctggggccgcctccaggggtacgtcgaaggccttgtgaacaggagactgacaaactggaagatgagaaatctgggctgcagcgagagattgaggagctgcagaagcagaaggagcgcctagagctggtgctggaagcccaccgacccatctgcaaaatcccggaaggagccaaggagggggacacaggcagtaccagtggcaccagcagcccaccagccccctgccgccctgtaccttgtatctccctttccccagggcctgtgcttgaacctgaggcactgcacacccccacactcatgaccacaccctccctaactcctttcacccccagcctggtcttcacctaccccagcactcctgagccttgtgcctcagctcatcgcaagagtagcagcagcagcggagacccatcctctgacccccttggctctccaaccctcctcgctttgtgaggcgcctgagccctactccctgcagatgccaccctagccaatgtctcctccccttcccccaccggtccagctggcctggacagtatcccacatccaactccagcaacttcttctccatccctctaatgagactgaccatattgtgcttcacagtagagccagcttggggccaccaaagctgcccactgtttctcttgagctggcctctctagcacaatttgcactaaatcagagacaaaatatttcccatttgtgccagaggaatcctggcagcccagagactttgtagatccttagaggtcctctggagccctaaccccttccagatcactgccacactctccatcaccctcttcctgtgatccacccaaccctatctcctgacagaaggtgccactttacccacctagaa

SEQ ID NO: 135222 - DNA, 6708 bp, Homo sapiens
  Payload ID: 6427
  Gene Symbol: FOSL2
  Gene Name: FOS-like antigen 2
  Uniprot ID: P15408
  ENST ID: ENST00000264716
  CDS Start-End: 864-1844
gtagtgactcatctcgggcagagcgctagggctccgagcgaaccagcgagcgagcgaacgagcggcgctcggcggggacagaaagagggagagagagagagagagagagggagaggcgcggccgggcgaggcgggcccgtccgggagcgggctccggggaaggggtgcgggtctgggcgccggagcggggagcggggccgcgtccctctcagcgccagctctacttgagccccacgagccgctgtccccctggcgcgctcggggccgcgggacgggcgcacgccgccttctcctagtcaagtatccgagccgccccgaaactcgggcggcgagtcggccacgggaagtttattctccggctccttttctaaaaggaagaaacagaagtttctcccagcggacagcttttctttccgcctttttggccctgtctgaaatcgggggtccccagggctggcaggccaggctcgctgggctcctaatcttttttttaatttccaatttttgattgggccgtgggtccccgctgagctccggctgcgcgcgggggcgggagggcgcgcgcaggggagggaccgagagacgcgccgactttttagagggagggatcgggtggacaactggtcccgcggcgctcgcagagccggaaagaagtgctgtaagggacgctcgggggacgctgttcctgaggtgtcgccgcctccctgtcctcgccctccgcggtgggggagaaacccaggagcgaagcccagagcccgcggcgcggccggcggacgaacgagcgcgcagcagccggtgcgcggccgcggcgagggcgggggaagaaaaacaccctgtttcctctccggcccccaccgcggatcatgtaccaggattatcccgggaactttgacacctcgtcccggggcagcagcggctctcctgcgcacgccgagtcctactccagcggcggcggcggccagcagaaattccgggtagatatgcctggctcaggcagtgcattcatccccaccatcaacgccatcacgaccagccaggacctgcagtggatggtgcagcccacagtgatcacctccatgtccaacccataccctcgctcgcacccctacagccccctgccgggcctggcctctgtccctggacacatggccctcccaagacctggcgtgatcaagaccattggcaccaccgtgggccgcaggaggagagatgagcagctgtctcctgaagaggaggagaagcgtcgcatccggcgggagaggaacaagctggctgcagccaagtgccggaaccgacgccgggagctgacagagaagctgcaggcggagacagaggagctggaggaggagaagtcaggcctgcagaaggagattgctgagctgcagaaggagaaggagaagctggagttcatgttggtggctcacggcccagtgtgcaagattagccccgaggagcgccgatcgcccccagcccctgggctgcagcccatgcgcagtgggggtggctcggtgggcgctgtagtggtgaaacaggagcccctggaagaggacagcccctcgtcctcgtcggcggggctggacaaggcccagcgctctgtcatcaagcccatcagcattgctgggggcttctacggtgaggagcccctgcacacccccatcgtggtgacctccacacctgctgtcactccgggcacctcgaacctcgtcttcacctatcctagcgtcctggagcaggagtcacccgcatctccctccgaatcctgctccaaggctcaccgcagaagcagtagcagcggggaccaatcatcagactccttgaactcccccactctgctggctctgtaacccagtgcacctccctccccagctccggagggggtcctcctcgctcctccttcccagggaccagcaccttcaagcgctccagggccgtgagggcaagagggggacctgccaccagggagcttcctggctctgggggacccaggtgggacttagcagtgagtattggaagacttgggttgatctcttagaagccatgggacctcctccctcattcatcttgcaagcaaatcccatttcttgaaaagccttggagaactcggtttggtagacttggacatctctctggcttctgaagagcctgaagctggcctggaccattcctgtccctttgttaccatactgtctctggagtgatggtgtccttccctgccccaccacgcatgctcagtgccttttggtttcaccttccctcgacttgaccctttcctcccccagcgtcagtttcactccctcttggtttttatcaaatttgccatgacatttcatctgggtggtctgaatattaaagctcttcatttctggagatggggcagcaggtggctcttctgctggggctgacttgtccagaaggggacaaagtgcaatacagagccttccctaccctgacgcctcccagtcatcatctccagaactcccagcggggctccctgagctctcaaggagatgctgccatcactgggaggctcagaggacccttcctgcccaccttcggagacggcttctggaggaacggcttggccagaagacagggtgtgagtgagacagtggggcacaggttgggtttgccaaacgcctaattaccaggccaggaagcatgccaacaaagccacacgggtgtcctagccagcttcccttcacctggtgtcttgagtagggcgtctcctgtaattactgccttgccattctgcccctggacccttctctccggaccagggaggcgtccctccctaggagccacacattatactccaagtccctgccgggctccgcctttcccccaccctggctctcagggtgacgccacccacagagatttaatgagcgtgggcctggaccttccccagatgctgccaggcagcccctccccaagcctcaaagaagcatttgctgaggatggagaggcaggggagggaggcgggaggccgtcactggagtggcgtctgcagcagctgctgccccagcacccgctcagcctgtcctggctgctcacctccccgcagggcaccgggcctttcctgccctctgtggtcatctgccacctgctggatcaagtgctttctcttttacactcccctgtccccaccccagtgcactcttctggcccaggcagcaagcaagctgtgaacagctggcctgagctgtcgctgtggcttgtggctcatgcgccattcctggttgtctgttgaatctttctggctgctggaattggagataggatgttttgcttcccactgcaggagagctgccccctttcacggggttggggaagggtccccctggcctccagcaggagcacagctcagcagggtccctgctgcccacccctctgagccttttctccccagggtatggctcctgctgagtttcttgtccagcagggccttgacaggaatccagggagtagctcctggccagaaccagcctctgcggggcttgtgctctgcaaagactctgctgctggggattcagctctagaggtcacagtatcctcgtttgaaagataattaagatcccccgtggagaaagcagtgacacattcacacagctgttccctcgcatgttatttcatgaacatgacctgttttcgtgcactagacacacagagtggaacagccgtatgcttaaagtacatgggccagtgggactggaagtgacctgtacaagtgatgcagaaaggagggtttcaaagaaaaaggattttgtttaaaatactttaaaaatgttatttcctgcatcccttggctgtgatgcccctctcccgatttcccaggggctctgggagggacccttctaagaagattgggcagttgggtttctggcttgagatgaatccaagcagcagaatgagccaggagtagcaggagatgggcaaagaaaactggggtgcactcagctctcacaggggtaatcatctcaagtggtatttgtagccaagtgggagctattttcttttttgtgcatatagatatttcttaaatgaagctgctttcttgtcttttatttctaaaagcccccttataccccactttgtgcagcaaagatccccgtgcaggtcacagcctgatttgtggccaggctggacaaattcctgaggcacaacttggcttcagttcagatttcaagctgtgttggtgttgggaccagcagaaggcaaacgtccagccaacacacaggactgtaagaggactctgagctacgtgccctgtgaagacccccaggctttgtcataggaggtcgttcagcttccccaaagtcagaggtgatttgatttggggaagactgaatattcacacctaagtcgtgagcatatcctgagttttacttccttatggcttgccctccaagttctctctctcatacacacacacacccttgctccagaatcaccagacacctccatggctccagctatgggaacagctgcattggggctgcctttctgtttggcttaggaacttctgtgcttcttgtggctccactcgcgaggcagctcggaggtgtggactccgattgggctgcaggcagctctgggacggcacagggcgggcgctctgatcagctcgtgtaaaacacaccgtcttcttggcctcctggccagtctttctgcgaatagtcctctccctggccagttgaatgggggaagctgctggcacaggaaggagaggcgatcccggctgaggcttaggaaattgctggagccggctccaagcagataattcactggggaggttttcagagtcaaacatcattctgcctgtgttgggggccaggtgtgtcacacaagcatctcaaagtcaaaagccatctggggctgctgcttctgtttctcaggctctggggaaaggaatctccctctcctctcacttgattccaagtgtggttgaattgtctggagcactgggactttttttctcttttccttgatggaccaacagtgcaaatgcaatctcgccatttaactttcaggtcgatttcctttcctgatcagacatctttgtgccccctttaggaaggaaaagaatacacctacgatgtgccaggcactgtgttaggcgcttttatatagatcctcgttaggatgagactaagggatgaggacatctctttataaaaggcccctaagtaatggataaacagaaacacttagaggtgagaaggtctgtcttcaagatccaaggtaagattgccttcagtctgatgtttgttctcaaggacttatcccctacaatattctcccactccatacttctccttctaccccaccatgtgctcccgtgcactcctcagatggtcagaggggtaacccaagtccttagagaatttggggaccaatagaatatgtgatgtgtgaattttctttaaaaaacttaaggagtctttgctaccttctgcttgttgagttgttttggcattcatattaaaagccagcatctcactatttattgacaggttgggctgtgtgtgtgcgcatgtgtgtatacatttccaggcgtgcctgtgtcctgtagctttttaaaaggaaacccagtcatcccactatgaatctggcatcttcttatgcttctagtgttttggccatacatcaaccaaggggtttaatttatccaatgcttgacgacatgttcaggaggggctggatcaaattttgagagggttatgggaaagggagggggagaagaaattgacatttattttattatttattttaaatgtttacatcttctttatgttgtatcaagcctgaatagaaactgatagcattaaaatactccgttcctctctctcttctcgcttcctttttttttttttttttaaatttaggataacacatttttgtttctaaagtgatttgtgatttgtgctgtataaactgtataaaaggttctgtttttaaaggtggattttcattcctctggggacagtggtcgccaagacatctacattgtaagagaacacagtggaagatcctgtcctgattctcaaaaattattttctctgtatgattaaaagtttattccatttattttagtttgtgtttacttgattttgaggaagaaaatatttgactttgtgtaaagagtagggtatcagggtgtcttttctgccgtgggagatgtgtatatatatagtattttggtgtatagtagaaaataagctttgtgcatctgtatttgagatatgttaatgacgtggagtaaagtcagctgtaagactctggaggcaaacaagttgtatatggttcatatggctctatggggaatttaattacctttctgggcactttttttttttttttttttttaagtaatggtgaaatggtcccattggagagtctcctaaatagaccttccaggcagaaccgcaagctcaaaatctttgtatagttttgaaaattgaggagtagctttgtttggaagcctttctggtggtggtttttgttgttgttgttgttttgttgttttactatatgtaatacaagcctacagtatttgcactaaagaaagcttgttagaaaaagcttgctgctatggaagaaagaacatattaaaacttctttcccttgcgatttttttgggggaggggggttagcatttccactttcagttgagtagcattttgtagaataaaatgaattaagattgaa

SEQ ID NO: 135223 - DNA, 5829 bp, Homo sapiens
  Payload ID: 6427
  Gene Symbol: FOSL2
  Gene Name: FOS-like antigen 2
  Uniprot ID: P15408
  ENST ID: ENST00000379619
  CDS Start-End: 9-965
gaatccacatggtacagggctggagaataaagagtaaattccgggtagatatgcctggctcaggcagtgcattcatccccaccatcaacgccatcacgaccagccaggacctgcagtggatggtgcagcccacagtgatcacctccatgtccaacccataccctcgctcgcacccctacagccccctgccgggcctggcctctgtccctggacacatggccctcccaagacctggcgtgatcaagaccattggcaccaccgtgggccgcaggaggagagatgagcagctgtctcctgaagaggaggagaagcgtcgcatccggcgggagaggaacaagctggctgcagccaagtgccggaaccgacgccgggagctgacagagaagctgcaggcgattggtccctggcaggttgctgtccctcacatccctctctttccgtggcaggagacagaggagctggaggaggagaagtcaggcctgcagaaggagattgctgagctgcagaaggagaaggagaagctggagttcatgttggtggctcacggcccagtgtgcaagattagccccgaggagcgccgatcgcccccagcccctgggctgcagcccatgcgcagtgggggtggctcggtgggcgctgtagtggtgaaacaggagcccctggaagaggacagcccctcgtcctcgtcggcggggctggacaaggcccagcgctctgtcatcaagcccatcagcattgctgggggcttctacggtgaggagcccctgcacacccccatcgtggtgacctccacacctgctgtcactccgggcacctcgaacctcgtcttcacctatcctagcgtcctggagcaggagtcacccgcatctccctccgaatcctgctccaaggctcaccgcagaagcagtagcagcggggaccaatcatcagactccttgaactcccccactctgctggctctgtaacccagtgcacctccctccccagctccggagggggtcctcctcgctcctccttcccagggaccagcaccttcaagcgctccagggccgtgagggcaagagggggacctgccaccagggagcttcctggctctgggggacccaggtgggacttagcagtgagtattggaagacttgggttgatctcttagaagccatgggacctcctccctcattcatcttgcaagcaaatcccatttcttgaaaagccttggagaactcggtttggtagacttggacatctctctggcttctgaagagcctgaagctggcctggaccattcctgtccctttgttaccatactgtctctggagtgatggtgtccttccctgccccaccacgcatgctcagtgccttttggtttcaccttccctcgacttgaccctttcctcccccagcgtcagtttcactccctcttggtttttatcaaatttgccatgacatttcatctgggtggtctgaatattaaagctcttcatttctggagatggggcagcaggtggctcttctgctggggctgacttgtccagaaggggacaaagtgcaatacagagccttccctaccctgacgcctcccagtcatcatctccagaactcccagcggggctccctgagctctcaaggagatgctgccatcactgggaggctcagaggacccttcctgcccaccttcggagacggcttctggaggaacggcttggccagaagacagggtgtgagtgagacagtggggcacaggttgggtttgccaaacgcctaattaccaggccaggaagcatgccaacaaagccacacgggtgtcctagccagcttcccttcacctggtgtcttgagtagggcgtctcctgtaattactgccttgccattctgcccctggacccttctctccggaccagggaggcgtccctccctaggagccacacattatactccaagtccctgccgggctccgcctttcccccaccctggctctcagggtgacgccacccacagagatttaatgagcgtgggcctggaccttccccagatgctgccaggcagcccctccccaagcctcaaagaagcatttgctgaggatggagaggcaggggagggaggcgggaggccgtcactggagtggcgtctgcagcagctgctgccccagcacccgctcagcctgtcctggctgctcacctccccgcagggcaccgggcctttcctgccctctgtggtcatctgccacctgctggatcaagtgctttctcttttacactcccctgtccccaccccagtgcactcttctggcccaggcagcaagcaagctgtgaacagctggcctgagctgtcgctgtggcttgtggctcatgcgccattcctggttgtctgttgaatctttctggctgctggaattggagataggatgttttgcttcccactgcaggagagctgccccctttcacggggttggggaagggtccccctggcctccagcaggagcacagctcagcagggtccctgctgcccacccctctgagccttttctccccagggtatggctcctgctgagtttcttgtccagcagggccttgacaggaatccagggagtagctcctggccagaaccagcctctgcggggcttgtgctctgcaaagactctgctgctggggattcagctctagaggtcacagtatcctcgtttgaaagataattaagatcccccgtggagaaagcagtgacacattcacacagctgttccctcgcatgttatttcatgaacatgacctgttttcgtgcactagacacacagagtggaacagccgtatgcttaaagtacatgggccagtgggactggaagtgacctgtacaagtgatgcagaaaggagggtttcaaagaaaaaggattttgtttaaaatactttaaaaatgttatttcctgcatcccttggctgtgatgcccctctcccgatttcccaggggctctgggagggacccttctaagaagattgggcagttgggtttctggcttgagatgaatccaagcagcagaatgagccaggagtagcaggagatgggcaaagaaaactggggtgcactcagctctcacaggggtaatcatctcaagtggtatttgtagccaagtgggagctattttcttttttgtgcatatagatatttcttaaatgaagctgctttcttgtcttttatttctaaaagcccccttataccccactttgtgcagcaaagatccccgtgcaggtcacagcctgatttgtggccaggctggacaaattcctgaggcacaacttggcttcagttcagatttcaagctgtgttggtgttgggaccagcagaaggcaaacgtccagccaacacacaggactgtaagaggactctgagctacgtgccctgtgaagacccccaggctttgtcataggaggtcgttcagcttccccaaagtcagaggtgatttgatttggggaagactgaatattcacacctaagtcgtgagcatatcctgagttttacttccttatggcttgccctccaagttctctctctcatacacacacacacccttgctccagaatcaccagacacctccatggctccagctatgggaacagctgcattggggctgcctttctgtttggcttaggaacttctgtgcttcttgtggctccactcgcgaggcagctcggaggtgtggactccgattgggctgcaggcagctctgggacggcacagggcgggcgctctgatcagctcgtgtaaaacacaccgtcttcttggcctcctggccagtctttctgcgaatagtcctctccctggccagttgaatgggggaagctgctggcacaggaaggagaggcgatcccggctgaggcttaggaaattgctggagccggctccaagcagataattcactggggaggttttcagagtcaaacatcattctgcctgtgttgggggccaggtgtgtcacacaagcatctcaaagtcaaaagccatctggggctgctgcttctgtttctcaggctctggggaaaggaatctccctctcctctcacttgattccaagtgtggttgaattgtctggagcactgggactttttttctcttttccttgatggaccaacagtgcaaatgcaatctcgccatttaactttcaggtcgatttcctttcctgatcagacatctttgtgccccctttaggaaggaaaagaatacacctacgatgtgccaggcactgtgttaggcgcttttatatagatcctcgttaggatgagactaagggatgaggacatctctttataaaaggcccctaagtaatggataaacagaaacacttagaggtgagaaggtctgtcttcaagatccaaggtaagattgccttcagtctgatgtttgttctcaaggacttatcccctacaatattctcccactccatacttctccttctaccccaccatgtgctcccgtgcactcctcagatggtcagaggggtaacccaagtccttagagaatttggggaccaatagaatatgtgatgtgtgaattttctttaaaaaacttaaggagtctttgctaccttctgcttgttgagttgttttggcattcatattaaaagccagcatctcactatttattgacaggttgggctgtgtgtgtgcgcatgtgtgtatacatttccaggcgtgcctgtgtcctgtagctttttaaaaggaaacccagtcatcccactatgaatctggcatcttcttatgcttctagtgttttggccatacatcaaccaaggggtttaatttatccaatgcttgacgacatgttcaggaggggctggatcaaattttgagagggttatgggaaagggagggggagaagaaattgacatttattttattatttattttaaatgtttacatcttctttatgttgtatcaagcctgaatagaaactgatagcattaaaatactccgttcctctctctcttctcgcttcctttttttttttttttttaaatttaggataacacatttttgtttctaaagtgatttgtgatttgtgctgtataaactgtataaaaggttctgtttttaaaggtggattttcattcctctggggacagtggtcgccaagacatctacattgtaagagaacacagtggaagatcctgtcctgattctcaaaaattattttctctgtatgattaaaagtttattccatttattttagtttgtgtttacttgattttgaggaagaaaatatttgactttgtgtaaagagtagggtatcagggtgtcttttctgccgtgggagatgtgtatatatatagtattttggtgtatagtagaaaataagctttgtgcatctgtatttgagatatgttaatgacgtggagtaaagtcagctgtaagactctggaggcaaacaagttgtatatggttcatatggctctatggggaatttaattacctttctgggcactttttttttttttttttttttaagtaatggtgaaatggtcccattggagagtctcctaaatagaccttccaggcagaaccgcaagctcaaaatctttgtatagttttgaaaattgaggagtagctttgtttggaagcctttctggtggtggtttttgttgttgttgttgttttgttgttttactatatgtaatacaagcctacagtatttgcactaaagaaagcttgttagaaaaagcttgctgctatggaagaaagaacatattaaaacttctttcccttgcgatttttttgggggaggggggttagcatttccactttcagttgagtagcattttgtagaataaaatgaattaagattgaa

SEQ ID NO: 135224 - DNA, 889 bp, Homo sapiens
  Payload ID: 6427
  Gene Symbol: FOSL2
  Gene Name: FOS-like antigen 2
  ENST ID: ENST00000436647
  CDS Start-End: 282-889
caggatgtgagcggaggcaattcccggttttggaagaaaatcagacaggaaaccagtgctaggaagaaggaagagaactcagtccagcagagtgtaatagggcctcattaccgaagcaaaaagcagctgttggctaattcctagcatgctgtaacacatgagtattttgcaattagcaataaccagtgcacggggtttcgcatagacgcctgcccattcggcccggcagtgtgtgaggcgcctttcaaaccggagggattggcaagaaattccgggtagatatgcctggctcaggcagtgcattcatccccaccatcaacgccatcacgaccagccaggacctgcagtggatggtgcagcccacagtgatcacctccatgtccaacccataccctcgctcgcacccctacagccccctgccgggcctggcctctgtccctggacacatggccctcccaagacctggcgtgatcaagaccattggcaccaccgtgggccgcaggaggagagatgagcagctgtctcctgaagaggaggagaagcgtcgcatccggcgggagaggaacaagctggctgcagccaagtgccggaaccgacgccgggagctgacagagaagctgcaggcggagacagaggagctggaggaggagaagtcaggcctgcagaaggagattgctgagctgcagaaggagaaggagaagctggagttcatgttggtggctcacggcccagtgtgcaagattagccccgaggagcgccgatcgcccccagcccctgggctgcagcccatgcgcagtgggggtggctcggtgggcgctgtagtggtgaaacaggagcccctggaagaggacagcccctcgtcctcgtcggcggggctggacaaggccca

SEQ ID NO: 135225 - DNA, 2458 bp, Homo sapiens
  Payload ID: 6428
  Gene Symbol: FHL1
  Gene Name: four and a half LIM domains 1
  Uniprot ID: Q13642
  ENST ID: ENST00000345434
  CDS Start-End: 82-1053
caaccatatccagcctttgccgaatacatcctatctgccacacatccagcgtgaggtccctccagctacaaggtgggcaccatggcggagaagtttgactgccactactgcagggatcccttgcaggggaagaagtatgtgcaaaaggatggccaccactgctgcctgaaatgctttgacaagttctgtgccaacacctgtgtggaatgccgcaagcccatcggtgcggactccaaggaggtgcactataagaaccgcttctggcatgacacctgcttccgctgtgccaagtgccttcaccccttggccaatgagacctttgtggccaaggacaacaagatcctgtgcaacaagtgcaccactcgggaggactcccccaagtgcaaggggtgcttcaaggccattgtggcaggagatcaaaacgtggagtacaaggggaccgtctggcacaaagactgcttcacctgtagtaactgcaagcaagtcatcgggactggaagcttcttccctaaaggggaggacttctactgcgtgacttgccatgagaccaagtttgccaagcattgcgtgaagtgcaacaaggccatcacatctggaggaatcacttaccaggatcagccctggcatgccgattgctttgtgtgtgttacctgctctaagaagctggctgggcagcgtttcaccgctgtggaggaccagtattactgcgtggattgctacaagaactttgtggccaagaagtgtgctggatgcaagaaccccatcactgggaaaaggactgtgtcaagagtgagccacccagtctctaaagctaggaagcccccagtgtgccacgggaaacgcttgcctctcaccctgtttcccagcgccaacctccggggcaggcatccgggtggagagaggacttgtccctcgtgggtggtggttctttatagaaaaaatcgaagcttagcagctcctcgaggcccgggtttggtaaaggctccagtgtggtggcctatgaaggacaatcctggcacgactactgcttccactgcaaaaaatgctccgtgaatctggccaacaagcgctttgttttccaccaggagcaagtgtattgtcccgactgtgccaaaaagctgtaaactgacaggggctcctgtcctgtaaaatggcatttgaatctcgttctttgtgtccttactttctgccctataccatcaataggggaagagtggtccttcccttctttaaagttctccttccgtcttttctcccattttacagtattactcaaataagggcacacagtgatcatattagcatttagcaaaaagcaaccctgcagcaaagtgaatttctgtccggctgcaatttaaaaatgaaaacttaggtagattgactcttctgcatgtttctcatagagcagaaaagtgctaatcatttagccacttagtgatgtaagcaagaagcataggagataaaacccccactgagatgcctctcatgcctcagctgggacccaccgtgtagacacacgacatgcaagagttgcagcggctgctccaactcactgctcaccctcttctgtgagcaggaaaagaaccctactgacatgcatggtttaacttcctcatcagaactctgcccttccttctgttcttttgtgctttcaaataactaacacgaacttccagaaaattaacatttgaacttagctgtaattctaaactgacctttccccgtactaacgtttggtttccccgtgtggcatgttttctgagcgttcctactttaaagcatggaacatgcaggtgatttgggaagtgtagaaagacctgagaaaacgagcctgtttcagaggaacatcgtcacaacgaatacttctggaagcttaacaaaactaaccctgctgtcctttttattgtttttaattaatatttttgttttaattgatagcaaaatagtttatgggtttggaaacttgcatgaaaatattttagccccctcagatgttcctgcagtgctgaaattcatcctacggaagtaaccgcaaaactctagagggggagttgagcaggcgccagggctgtcatcaacatggatatgacatttcacaacagtgactagttgaatcccttgtaacgtagtagttgtctgctctttgtccatgtgttaatgaggactgcaaagtcccttctgttgtgattcctaggacttttcctcaagaggaaatctggatttccacctaccgcttacctgaaatgcaggatcacctacttactgtattctacattattatatgacatagtataatgagacaatatcaaaagtaaacatgtaatgacaatacatactaacattcttgtaggagtggttagagaagctgatgcctcatttctacattctgtcattagctattatcatctaacgtttcagtgtatccttacagaaataaagcagcatatgaataacctgc

SEQ ID NO: 135226 - DNA, 1017 bp, Homo sapiens
  Payload ID: 6428
  Gene Symbol: FHL1
  Gene Name: four and a half LIM domains 1
  ENST ID: ENST00000370674
  CDS Start-End: 246-1017
atttcctttgtttggaggcttggttctgagtgagagttcaacagcctttgcccaggcggcttctcaaacacagggtgtggtttccttagctcactctctgctgtttggttgctcatggcaacaagatccaaataacttggacatgtgtttgtataaaaaaaacctgggaatggaacccaaagtgagactttggggctttcagttagtggaagagctgcggtccctccagctacaaggtgggcaccatggcggagaagtttgactgccactactgcagggatcccttgcaggggaagaagtatgtgcaaaaggatggccaccactgctgcctgaaatgctttgacaagttctgtgccaacacctgtgtggaatgccgcaagcccatcggtgcggactccaaggaggtgcactataagaaccgcttctggcatgacacctgcttccgctgtgccaagtgccttcaccccttggccaatgagacctttgtggccaaggacaacaagatcctgtgcaacaagtgcaccactcgggaggactcccccaagtgcaaggggtgcttcaaggccattgtggcaggagatcaaaacgtggagtacaaggggaccgtctggcacaaagactgcttcacctgtagtaactgcaagcaagtcatcgggactggaagcttcttccctaaaggggaggacttctactgcgtgacttgccatgagaccaagtttgccaagcattgcgtgaagtgcaacaaggccatcacatctggaggaatcacttaccaggatcagccctggcatgccgattgctttgtgtgtgttacctgctctaagaagctggctgggcagcgtttcaccgctgtggaggaccagtattactgcgtggattgctacaagaactttgtggccaagaagtgtgctggatgcaagaaccccatcactgggtttggtaaaggctccagtgtggtggcctatgaaggacaatcctggcacgactactgcttccactgcaaaaaatgctccgtga

SEQ ID NO: 135227 - DNA, 833 bp, Homo sapiens
  Payload ID: 6428
  Gene Symbol: FHL1
  Gene Name: four and a half LIM domains 1
  ENST ID: ENST00000370676
  CDS Start-End: 88-720
gtatgttcacaaatgagccacagccttatcagctggggttgagggaagactggtctaggtgctgctcctgaacttggtctctgagccatggcttcccatagacactcaggtccctccagctacaaggtgggcaccatggcggagaagtttgactgccactactgcagggatcccttgcaggggaagaagtatgtgcaaaaggatggccaccactgctgcctgaaatgctttgacaagttctgtgccaacacctgtgtggaatgccgcaagcccatcggtgcggactccaaggaggtgcactataagaaccgcttctggcatgacacctgcttccgctgtgccaagtgccttcaccccttggccaatgagacctttgtggccaaggacaacaagatcctgtgcaacaagtgcaccactcgggaggactcccccaagtgcaaggggtgcttcaaggccattgtggcaggagatcaaaacgtggagtacaaggggaccgtctggcacaaagactgcttcacctgtagtaactgcaagcaagtcatcgggactggaagcttcttccctaaaggggaggacttctactgcgtgacttgccatgagaccaagtttgccaagcattgcgtgaagtgcaacaagggtttggtaaaggctccagtgtggtggcctatgaaggacaatcctggcacgactactgcttccactgcaaaaaatgctccgtgaatctggccaacaagcgctttgttttccaccaggagcaagtgtattgtcccgactgtgccaaaaagctgtaaactgacaggggctcctgtcctgtaaaatggcatttgaatctc

SEQ ID NO: 135228 - DNA, 2565 bp, Homo sapiens
  Payload ID: 6428
  Gene Symbol: FHL1
  Gene Name: four and a half LIM domains 1
  Uniprot ID: Q13642
  ENST ID: ENST00000370683
  CDS Start-End: 341-1231
gccgagtccaaattttattccggtacagggatgactttctatgtggcctctctggctctggagctaatttggatgctgagtagccccgcaggtatttatatgtagcgtttggtatttttactgggtcctattcttctcccttggatcacctaaaatggttaagaattttctagtgggattaaggttgtgatctctggggaggggtgggacatctgctctcggttatttttgtgttagccgcttccccttaaatgtatgttcacaaatgagccacagccttatcagctggggttgagggaagactggtctaggtgctgctcctgaacttggtctctgagccatggcttcccatagacactcaggtccctccagctacaaggtgggcaccatggcggagaagtttgactgccactactgcagggatcccttgcaggggaagaagtatgtgcaaaaggatggccaccactgctgcctgaaatgctttgacaagttctgtgccaacacctgtgtggaatgccgcaagcccatcggtgcggactccaaggaggtgcactataagaaccgcttctggcatgacacctgcttccgctgtgccaagtgccttcaccccttggccaatgagacctttgtggccaaggacaacaagatcctgtgcaacaagtgcaccactcgggaggactcccccaagtgcaaggggtgcttcaaggccattgtggcaggagatcaaaacgtggagtacaaggggaccgtctggcacaaagactgcttcacctgtagtaactgcaagcaagtcatcgggactggaagcttcttccctaaaggggaggacttctactgcgtgacttgccatgagaccaagtttgccaagcattgcgtgaagtgcaacaaggccatcacatctggaggaatcacttaccaggatcagccctggcatgccgattgctttgtgtgtgttacctgctctaagaagctggctgggcagcgtttcaccgctgtggaggaccagtattactgcgtggattgctacaagaactttgtggccaagaagtgtgctggatgcaagaaccccatcactgggtttggtaaaggctccagtgtggtggcctatgaaggacaatcctggcacgactactgcttccactgcaaaaaatgctccgtgaatctggccaacaagcgctttgttttccaccaggagcaagtgtattgtcccgactgtgccaaaaagctgtaaactgacaggggctcctgtcctgtaaaatggcatttgaatctcgttctttgtgtccttactttctgccctataccatcaataggggaagagtggtccttcccttctttaaagttctccttccgtcttttctcccattttacagtattactcaaataagggcacacagtgatcatattagcatttagcaaaaagcaaccctgcagcaaagtgaatttctgtccggctgcaatttaaaaatgaaaacttaggtagattgactcttctgcatgtttctcatagagcagaaaagtgctaatcatttagccacttagtgatgtaagcaagaagcataggagataaaacccccactgagatgcctctcatgcctcagctgggacccaccgtgtagacacacgacatgcaagagttgcagcggctgctccaactcactgctcaccctcttctgtgagcaggaaaagaaccctactgacatgcatggtttaacttcctcatcagaactctgcccttccttctgttcttttgtgctttcaaataactaacacgaacttccagaaaattaacatttgaacttagctgtaattctaaactgacctttccccgtactaacgtttggtttccccgtgtggcatgttttctgagcgttcctactttaaagcatggaacatgcaggtgatttgggaagtgtagaaagacctgagaaaacgagcctgtttcagaggaacatcgtcacaacgaatacttctggaagcttaacaaaactaaccctgctgtcctttttattgtttttaattaatatttttgttttaattgatagcaaaatagtttatgggtttggaaacttgcatgaaaatattttagccccctcagatgttcctgcagtgctgaaattcatcctacggaagtaaccgcaaaactctagagggggagttgagcaggcgccagggctgtcatcaacatggatatgacatttcacaacagtgactagttgaatcccttgtaacgtagtagttgtctgctctttgtccatgtgttaatgaggactgcaaagtcccttctgttgtgattcctaggacttttcctcaagaggaaatctggatttccacctaccgcttacctgaaatgcaggatcacctacttactgtattctacattattatatgacatagtataatgagacaatatcaaaagtaaacatgtaatgacaatacatactaacattcttgtaggagtggttagagaagctgatgcctcatttctacattctgtcattagctattatcatctaacgtttcagtgtatccttacagaaataaagcagcatatgaataacctgc

SEQ ID NO: 135229 - DNA, 2441 bp, Homo sapiens
  Payload ID: 6428
  Gene Symbol: FHL1
  Gene Name: four and a half LIM domains 1
  Uniprot ID: Q13642
  ENST ID: ENST00000370690
  CDS Start-End: 265-1107
cccaggcgcgcacccctcccctcgcgcccctcccgcgccctacatccaccgcccggcggagggggctcagtccgcagccgccgccgccaccgccgcgcctcggcctcggtgcaggcagcggccgccgccgccgagacagctgcgcgggcgagcatccccacgcagcaccttggaagttgttttcaaccatatccagcctttgccgaatacatcctatctgccacacatccagcgtgaggtccctccagctacaaggtgggcaccatggcggagaagtttgactgccactactgcagggatcccttgcaggggaagaagtatgtgcaaaaggatggccaccactgctgcctgaaatgctttgacaagttctgtgccaacacctgtgtggaatgccgcaagcccatcggtgcggactccaaggaggtgcactataagaaccgcttctggcatgacacctgcttccgctgtgccaagtgccttcaccccttggccaatgagacctttgtggccaaggacaacaagatcctgtgcaacaagtgcaccactcgggaggactcccccaagtgcaaggggtgcttcaaggccattgtggcaggagatcaaaacgtggagtacaaggggaccgtctggcacaaagactgcttcacctgtagtaactgcaagcaagtcatcgggactggaagcttcttccctaaaggggaggacttctactgcgtgacttgccatgagaccaagtttgccaagcattgcgtgaagtgcaacaaggccatcacatctggaggaatcacttaccaggatcagccctggcatgccgattgctttgtgtgtgttacctgctctaagaagctggctgggcagcgtttcaccgctgtggaggaccagtattactgcgtggattgctacaagaactttgtggccaagaagtgtgctggatgcaagaaccccatcactgggtttggtaaaggctccagtgtggtggcctatgaaggacaatcctggcacgactactgcttccactgcaaaaaatgctccgtgaatctggccaacaagcgctttgttttccaccaggagcaagtgtattgtcccgactgtgccaaaaagctgtaaactgacaggggctcctgtcctgtaaaatggcatttgaatctcgttctttgtgtccttactttctgccctataccatcaataggggaagagtggtccttcccttctttaaagttctccttccgtcttttctcccattttacagtattactcaaataagggcacacagtgatcatattagcatttagcaaaaagcaaccctgcagcaaagtgaatttctgtccggctgcaatttaaaaatgaaaacttaggtagattgactcttctgcatgtttctcatagagcagaaaagtgctaatcatttagccacttagtgatgtaagcaagaagcataggagataaaacccccactgagatgcctctcatgcctcagctgggacccaccgtgtagacacacgacatgcaagagttgcagcggctgctccaactcactgctcaccctcttctgtgagcaggaaaagaaccctactgacatgcatggtttaacttcctcatcagaactctgcccttccttctgttcttttgtgctttcaaataactaacacgaacttccagaaaattaacatttgaacttagctgtaattctaaactgacctttccccgtactaacgtttggtttccccgtgtggcatgttttctgagcgttcctactttaaagcatggaacatgcaggtgatttgggaagtgtagaaagacctgagaaaacgagcctgtttcagaggaacatcgtcacaacgaatacttctggaagcttaacaaaactaaccctgctgtcctttttattgtttttaattaatatttttgttttaattgatagcaaaatagtttatgggtttggaaacttgcatgaaaatattttagccccctcagatgttcctgcagtgctgaaattcatcctacggaagtaaccgcaaaactctagagggggagttgagcaggcgccagggctgtcatcaacatggatatgacatttcacaacagtgactagttgaatcccttgtaacgtagtagttgtctgctctttgtccatgtgttaatgaggactgcaaagtcccttctgttgtgattcctaggacttttcctcaagaggaaatctggatttccacctaccgcttacctgaaatgcaggatcacctacttactgtattctacattattatatgacatagtataatgagacaatatcaaaagtaaacatgtaatgacaatacatactaacattcttgtaggagtggttagagaagctgatgcctcatttctacattctgtcattagctattatcatctaacgtttcagtgtatccttacagaaataaagcagcatatgaataacctgc
